United States Patent Application Publication US 2008/0113351 A1 - sequence listing, part 11

SEQ ID NO: 252388 - DNA, 19 bp, Homo sapiens
  siRNA target sequence for UNC13B (NM_006377.2,1644-1662).
caccactcctcataacttt

SEQ ID NO: 252389 - DNA, 19 bp, Homo sapiens
  siRNA target sequence for UNC13B (NM_006377.2,1646-1664).
ccactcctcataactttga

SEQ ID NO: 252390 - DNA, 19 bp, Homo sapiens
  siRNA target sequence for UNC13B (NM_006377.2,1901-1919).
gaaataagccagagatctt

SEQ ID NO: 252391 - DNA, 19 bp, Homo sapiens
  siRNA target sequence for UNC13B (NM_006377.2,1999-2017).
gatggcacctccaaatggt

SEQ ID NO: 252392 - DNA, 19 bp, Homo sapiens
  siRNA target sequence for UNC13B (NM_006377.2,2104-2122).
caagtcagcaaaactaaga

SEQ ID NO: 252393 - DNA, 19 bp, Homo sapiens
  siRNA target sequence for UNC13B (NM_006377.2,2124-2142).
gcgtaccaagaccattttt

SEQ ID NO: 252394 - DNA, 19 bp, Homo sapiens
  siRNA target sequence for UNC13B (NM_006377.2,2286-2304).
ccttggccaaaccatcatt

SEQ ID NO: 252395 - DNA, 19 bp, Homo sapiens
  siRNA target sequence for UNC13B (NM_006377.2,2352-2370).
gaagaggacagacaaatca

SEQ ID NO: 252396 - DNA, 19 bp, Homo sapiens
  siRNA target sequence for UNC13B (NM_006377.2,2380-2398).
ggggctatccgactacaaa

SEQ ID NO: 252397 - DNA, 19 bp, Homo sapiens
  siRNA target sequence for UNC13B (NM_006377.2,2381-2399).
gggctatccgactacaaat

SEQ ID NO: 252398 - DNA, 19 bp, Homo sapiens
  siRNA target sequence for UNC13B (NM_006377.2,2383-2401).
gctatccgactacaaatca

SEQ ID NO: 252399 - DNA, 19 bp, Homo sapiens
  siRNA target sequence for UNC13B (NM_006377.2,2434-2452).
ccataccacgtgcagtata

SEQ ID NO: 252400 - DNA, 19 bp, Homo sapiens
  siRNA target sequence for UNC13B (NM_006377.2,2439-2457).
ccacgtgcagtatacatgt

SEQ ID NO: 252401 - DNA, 19 bp, Homo sapiens
  siRNA target sequence for UNC13B (NM_006377.2,2628-2646).
gacgcactttgcatgttta

SEQ ID NO: 252402 - DNA, 19 bp, Homo sapiens
  siRNA target sequence for UNC13B (NM_006377.2,2632-2650).
cactttgcatgtttatcat

SEQ ID NO: 252403 - DNA, 19 bp, Homo sapiens
  siRNA target sequence for UNC13B (NM_006377.2,2828-2846).
ggatcgacctctctacata

SEQ ID NO: 252404 - DNA, 19 bp, Homo sapiens
  siRNA target sequence for UNC13B (NM_006377.2,2838-2856).
ctctacatacaggaataat

SEQ ID NO: 252405 - DNA, 19 bp, Homo sapiens
  siRNA target sequence for UNC13B (NM_006377.2,2875-2893).
gaacggcttcaggacttaa

SEQ ID NO: 252406 - DNA, 19 bp, Homo sapiens
  siRNA target sequence for UNC13B (NM_006377.2,2911-2929).
ctgaccagcattactttct

SEQ ID NO: 252407 - DNA, 19 bp, Homo sapiens
  siRNA target sequence for UNC13B (NM_006377.2,3140-3158).
cactcatcgtgtcaatcat

SEQ ID NO: 252408 - DNA, 19 bp, Homo sapiens
  siRNA target sequence for UNC13B (NM_006377.2,3291-3309).
gaaagaccacctgtgtaaa

SEQ ID NO: 252409 - DNA, 19 bp, Homo sapiens
  siRNA target sequence for UNC13B (NM_006377.2,3342-3360).
gaagtggctccacaatgaa

SEQ ID NO: 252410 - DNA, 19 bp, Homo sapiens
  siRNA target sequence for UNC13B (NM_006377.2,3347-3365).
ggctccacaatgaatacgt

SEQ ID NO: 252411 - DNA, 19 bp, Homo sapiens
  siRNA target sequence for UNC13B (NM_006377.2,3418-3436).
gagcagttcgtgctacaat

SEQ ID NO: 252412 - DNA, 19 bp, Homo sapiens
  siRNA target sequence for UNC13B (NM_006377.2,3617-3635).
gcatccttgcccactacat

SEQ ID NO: 252413 - DNA, 19 bp, Homo sapiens
  siRNA target sequence for UNC13B (NM_006377.2,3955-3973).
cggggcacagggaatgcat

SEQ ID NO: 252414 - DNA, 19 bp, Homo sapiens
  siRNA target sequence for UNC13B (NM_006377.2,4114-4132).
cgcgtggtgatgaacacaa

SEQ ID NO: 252415 - DNA, 19 bp, Homo sapiens
  siRNA target sequence for UNC13B (NM_006377.2,4115-4133).
gcgtggtgatgaacacaat

SEQ ID NO: 252416 - DNA, 19 bp, Homo sapiens
  siRNA target sequence for UNC13B (NM_006377.2,4128-4146).
cacaatggagaggatgatt

SEQ ID NO: 252417 - DNA, 19 bp, Homo sapiens
  siRNA target sequence for UNC13B (NM_006377.2,4130-4148).
caatggagaggatgattgt

SEQ ID NO: 252418 - DNA, 19 bp, Homo sapiens
  siRNA target sequence for UNC13B (NM_006377.2,4172-4190).
cgggcacccagctgatctt

SEQ ID NO: 252419 - DNA, 19 bp, Homo sapiens
  siRNA target sequence for UNC13B (NM_006377.2,4493-4511).
ctattcaggtggacttgtt

SEQ ID NO: 252420 - DNA, 19 bp, Homo sapiens
  siRNA target sequence for UNC13B (NM_006377.2,4605-4623).
cgtggaggtgactatggtt

SEQ ID NO: 252421 - DNA, 19 bp, Homo sapiens
  siRNA target sequence for UNC13B (NM_006377.2,4625-4643).
gcccacaccaaagtgataa

SEQ ID NO: 252422 - DNA, 19 bp, Homo sapiens
  siRNA target sequence for UNC13B (NM_006377.2,4627-4645).
ccacaccaaagtgataaga

SEQ ID NO: 252423 - DNA, 19 bp, Homo sapiens
  siRNA target sequence for UNC13B (NM_006377.2,4628-4646).
cacaccaaagtgataagaa

SEQ ID NO: 252424 - DNA, 19 bp, Homo sapiens
  siRNA target sequence for UNC13B (NM_006377.2,4630-4648).
caccaaagtgataagaaga

SEQ ID NO: 252425 - DNA, 19 bp, Homo sapiens
  siRNA target sequence for UNC13B (NM_006377.2,4753-4771).
cagatatgcgtgaaggatt

SEQ ID NO: 252426 - DNA, 19 bp, Homo sapiens
  siRNA target sequence for UNC13B (NM_006377.2,4869-4887).
ccggaagatccatatggat

SEQ ID NO: 252427 - DNA, 19 bp, Homo sapiens
  siRNA target sequence for UNC13B (NM_006377.2,4899-4917).
gaccattctccggatttta

SEQ ID NO: 252428 - DNA, 19 bp, Homo sapiens
  siRNA target sequence for UNC13B (NM_006377.2,4935-4953).
cgaggtggcccgagaattt

SEQ ID NO: 252429 - DNA, 19 bp, Homo sapiens
  siRNA target sequence for UNC13B (NM_006377.2,4943-4961).
cccgagaatttgtgaaact

SEQ ID NO: 252430 - DNA, 19 bp, Homo sapiens
  siRNA target sequence for UNC13B (NM_006377.2,4946-4964).
gagaatttgtgaaactcaa

SEQ ID NO: 252431 - DNA, 19 bp, Homo sapiens
  siRNA target sequence for UNC5B (NM_170744.2,565-583).
gccacaggacgcctacatt

SEQ ID NO: 252432 - DNA, 19 bp, Homo sapiens
  siRNA target sequence for UNC5B (NM_170744.2,567-585).
cacaggacgcctacattgt

SEQ ID NO: 252433 - DNA, 19 bp, Homo sapiens
  siRNA target sequence for UNC5B (NM_170744.2,569-587).
caggacgcctacattgtga

SEQ ID NO: 252434 - DNA, 19 bp, Homo sapiens
  siRNA target sequence for UNC5B (NM_170744.2,1428-1446).
cgctgctcgactctaagaa

SEQ ID NO: 252435 - DNA, 19 bp, Homo sapiens
  siRNA target sequence for UNC5B (NM_170744.2,1462-1480).
gtgcatgcaaaataagaaa

SEQ ID NO: 252436 - DNA, 19 bp, Homo sapiens
  siRNA target sequence for UNC5B (NM_170744.2,1665-1683).
gtttccaccccgtcaactt

SEQ ID NO: 252437 - DNA, 19 bp, Homo sapiens
  siRNA target sequence for UNC5B (NM_170744.2,1833-1851).
ccttacccagccttaaggt

SEQ ID NO: 252438 - DNA, 19 bp, Homo sapiens
  siRNA target sequence for UNC5B (NM_170744.2,2130-2148).
gcaagttctacgagatgta

SEQ ID NO: 252439 - DNA, 19 bp, Homo sapiens
  siRNA target sequence for UNC5B (NM_170744.2,2131-2149).
caagttctacgagatgtat

SEQ ID NO: 252440 - DNA, 19 bp, Homo sapiens
  siRNA target sequence for UNC5B (NM_170744.2,2134-2152).
gttctacgagatgtatcta

SEQ ID NO: 252441 - DNA, 19 bp, Homo sapiens
  siRNA target sequence for UNC5B (NM_170744.2,2189-2207).
gaagggacccagacagtat

SEQ ID NO: 252442 - DNA, 19 bp, Homo sapiens
  siRNA target sequence for UNC5B (NM_170744.2,2192-2210).
gggacccagacagtattga

SEQ ID NO: 252443 - DNA, 19 bp, Homo sapiens
  siRNA target sequence for UNC5B (NM_170744.2,2295-2313).
cccgtgactggatctttca

SEQ ID NO: 252444 - DNA, 19 bp, Homo sapiens
  siRNA target sequence for UNC5B (NM_170744.2,2601-2619).
ggactctgggcggatactt

SEQ ID NO: 252445 - DNA, 19 bp, Homo sapiens
  siRNA target sequence for UNC5B (NM_170744.2,2627-2645).
gagccgaaaccgctaatgt

SEQ ID NO: 252446 - DNA, 19 bp, Homo sapiens
  siRNA target sequence for UNC5B (NM_170744.2,2630-2648).
ccgaaaccgctaatgttca

SEQ ID NO: 252447 - DNA, 19 bp, Homo sapiens
  siRNA target sequence for UNC5B (NM_170744.2,2631-2649).
cgaaaccgctaatgttcaa

SEQ ID NO: 252448 - DNA, 19 bp, Homo sapiens
  siRNA target sequence for UNC5B (NM_170744.2,2856-2874).
gggagggccagatattcca

SEQ ID NO: 252449 - DNA, 19 bp, Homo sapiens
  siRNA target sequence for UNC5B (NM_170744.2,2961-2979).
gaccttatgccttcaagat

SEQ ID NO: 252450 - DNA, 19 bp, Homo sapiens
  siRNA target sequence for WDR31 (NM_145241.1,272-290).
ctccacagaaggtttcgtt

SEQ ID NO: 252451 - DNA, 19 bp, Homo sapiens
  siRNA target sequence for WDR31 (NM_145241.1,279-297).
gaaggtttcgtttaggttt

SEQ ID NO: 252452 - DNA, 19 bp, Homo sapiens
  siRNA target sequence for WDR31 (NM_145241.1,328-346).
ctcaaacacagcacttata

SEQ ID NO: 252453 - DNA, 19 bp, Homo sapiens
  siRNA target sequence for WDR31 (NM_145241.1,431-449).
ctgtcgtggctgctttgaa

SEQ ID NO: 252454 - DNA, 19 bp, Homo sapiens
  siRNA target sequence for WDR31 (NM_145241.1,433-451).
gtcgtggctgctttgaact

SEQ ID NO: 252455 - DNA, 19 bp, Homo sapiens
  siRNA target sequence for WDR31 (NM_145241.1,463-481).
gtctctggagggaaagata

SEQ ID NO: 252456 - DNA, 19 bp, Homo sapiens
  siRNA target sequence for WDR31 (NM_145241.1,492-510).
ggcctataattggaaaact

SEQ ID NO: 252457 - DNA, 19 bp, Homo sapiens
  siRNA target sequence for WDR31 (NM_145241.1,527-545).
ggttcaaaggacatgaaca

SEQ ID NO: 252458 - DNA, 19 bp, Homo sapiens
  siRNA target sequence for WDR31 (NM_145241.1,528-546).
gttcaaaggacatgaacat

SEQ ID NO: 252459 - DNA, 19 bp, Homo sapiens
  siRNA target sequence for WDR31 (NM_145241.1,552-570).
caccaaggtagcctgtatt

SEQ ID NO: 252460 - DNA, 19 bp, Homo sapiens
  siRNA target sequence for WDR31 (NM_145241.1,572-590).
ccaaatccagccagttctt

SEQ ID NO: 252461 - DNA, 19 bp, Homo sapiens
  siRNA target sequence for WDR31 (NM_145241.1,641-659).
cacaaccaaggcagcaatt

SEQ ID NO: 252462 - DNA, 19 bp, Homo sapiens
  siRNA target sequence for WDR31 (NM_145241.1,643-661).
caaccaaggcagcaattgt

SEQ ID NO: 252463 - DNA, 19 bp, Homo sapiens
  siRNA target sequence for WDR31 (NM_145241.1,892-910).
ctgcaggtagctcatatgt

SEQ ID NO: 252464 - DNA, 19 bp, Homo sapiens
  siRNA target sequence for WDR31 (NM_145241.1,894-912).
gcaggtagctcatatgttt

SEQ ID NO: 252465 - DNA, 19 bp, Homo sapiens
  siRNA target sequence for WDR31 (NM_145241.1,1013-1031).
cgttgtgggacctaagaca

SEQ ID NO: 252466 - DNA, 19 bp, Homo sapiens
  siRNA target sequence for WDR31 (NM_145241.1,1107-1125).
ggccttgatgcctttaatt

SEQ ID NO: 252467 - DNA, 19 bp, Homo sapiens
  siRNA target sequence for WDR31 (NM_145241.1,1126-1144).
gctacctcatcacatgatt

SEQ ID NO: 252468 - DNA, 19 bp, Homo sapiens
  siRNA target sequence for WDR31 (NM_145241.1,1204-1222).
ggatcaggacccttgactt

SEQ ID NO: 252469 - DNA, 19 bp, Homo sapiens
  siRNA target sequence for WDR31 (NM_145241.1,1234-1252).
ggtgacgccatctccttat

SEQ ID NO: 252470 - DNA, 19 bp, Homo sapiens
  siRNA target sequence for WDR31 (NM_145241.1,1235-1253).
gtgacgccatctccttatt

SEQ ID NO: 252471 - DNA, 19 bp, Homo sapiens
  siRNA target sequence for WDR31 (NM_145241.1,1239-1257).
cgccatctccttattgtgt

SEQ ID NO: 252472 - DNA, 19 bp, Homo sapiens
  siRNA target sequence for WDR31 (NM_145241.1,1254-1272).
gtgtgcaagttttaacaga

SEQ ID NO: 252473 - DNA, 19 bp, Homo sapiens
  siRNA target sequence for ZYX (NM_003461.3,214-232).
ccccaaagcccaaagtgaa

SEQ ID NO: 252474 - DNA, 19 bp, Homo sapiens
  siRNA target sequence for ZYX (NM_003461.3,414-432).
cccccgatcgaggaatcat

SEQ ID NO: 252475 - DNA, 19 bp, Homo sapiens
  siRNA target sequence for ZYX (NM_003461.3,415-433).
ccccgatcgaggaatcatt

SEQ ID NO: 252476 - DNA, 19 bp, Homo sapiens
  siRNA target sequence for ZYX (NM_003461.3,416-434).
cccgatcgaggaatcattt

SEQ ID NO: 252477 - DNA, 19 bp, Homo sapiens
  siRNA target sequence for ZYX (NM_003461.3,577-595).
cctcactgctggatgacat

SEQ ID NO: 252478 - DNA, 19 bp, Homo sapiens
  siRNA target sequence for ZYX (NM_003461.3,622-640).
gggtgtcatctggatatgt

SEQ ID NO: 252479 - DNA, 19 bp, Homo sapiens
  siRNA target sequence for ZYX (NM_003461.3,651-669).
gtggccactccattcagtt

SEQ ID NO: 252480 - DNA, 19 bp, Homo sapiens
  siRNA target sequence for ZYX (NM_003461.3,903-921).
gctccagcccctaagtttt

SEQ ID NO: 252481 - DNA, 19 bp, Homo sapiens
  siRNA target sequence for ZYX (NM_003461.3,922-940).
ctccagtgactcctaagtt

SEQ ID NO: 252482 - DNA, 19 bp, Homo sapiens
  siRNA target sequence for ZYX (NM_003461.3,924-942).
ccagtgactcctaagttta

SEQ ID NO: 252483 - DNA, 19 bp, Homo sapiens
  siRNA target sequence for ZYX (NM_003461.3,982-1000).
gatctgggtcacaaccaaa

SEQ ID NO: 252484 - DNA, 19 bp, Homo sapiens
  siRNA target sequence for ZYX (NM_003461.3,987-1005).
gggtcacaaccaaatcaaa

SEQ ID NO: 252485 - DNA, 19 bp, Homo sapiens
  siRNA target sequence for ZYX (NM_003461.3,1013-1031).
gcaccccgaagctctttct

SEQ ID NO: 252486 - DNA, 19 bp, Homo sapiens
  siRNA target sequence for ZYX (NM_003461.3,1122-1140).
ccaccggctcagaaccaaa

SEQ ID NO: 252487 - DNA, 19 bp, Homo sapiens
  siRNA target sequence for ZYX (NM_003461.3,1123-1141).
caccggctcagaaccaaaa

SEQ ID NO: 252488 - DNA, 19 bp, Homo sapiens
  siRNA target sequence for APS (NM_020979.1,236-254).
gactttgcgcacaagttct

SEQ ID NO: 252489 - DNA, 19 bp, Homo sapiens
  siRNA target sequence for APS (NM_020979.1,880-898).
cccactgtcagccatcatt

SEQ ID NO: 252490 - DNA, 19 bp, Homo sapiens
  siRNA target sequence for APS (NM_020979.1,929-947).
ccagagaaggataacacat

SEQ ID NO: 252491 - DNA, 19 bp, Homo sapiens
  siRNA target sequence for APS (NM_020979.1,962-980).
gagaatggagccgaataca

SEQ ID NO: 252492 - DNA, 19 bp, Homo sapiens
  siRNA target sequence for ARHGAP4 (NM_001666.1,293-311).
gccgggagcaccaaagctt

SEQ ID NO: 252493 - DNA, 19 bp, Homo sapiens
  siRNA target sequence for ARHGAP4 (NM_001666.1,429-447).
ccagcgcctgagtcacatt

SEQ ID NO: 252494 - DNA, 19 bp, Homo sapiens
  siRNA target sequence for ARHGAP4 (NM_001666.1,551-569).
cgtaccaggcatatcacat

SEQ ID NO: 252495 - DNA, 19 bp, Homo sapiens
  siRNA target sequence for ARHGAP4 (NM_001666.1,805-823).
gctgctgtcagtaactact

SEQ ID NO: 252496 - DNA, 19 bp, Homo sapiens
  siRNA target sequence for ARHGAP4 (NM_001666.1,806-824).
ctgctgtcagtaactacta

SEQ ID NO: 252497 - DNA, 19 bp, Homo sapiens
  siRNA target sequence for ARHGAP4 (NM_001666.1,1078-1096).
gctgagatctgcgttgaaa

SEQ ID NO: 252498 - DNA, 19 bp, Homo sapiens
  siRNA target sequence for ARHGAP4 (NM_001666.1,1079-1097).
ctgagatctgcgttgaaat

SEQ ID NO: 252499 - DNA, 19 bp, Homo sapiens
  siRNA target sequence for ARHGAP4 (NM_001666.1,1238-1256).
gggatgtgcttgattcctt

SEQ ID NO: 252500 - DNA, 19 bp, Homo sapiens
  siRNA target sequence for ARHGAP4 (NM_001666.1,2781-2799).
ccgcctgggcaggaacaaa

SEQ ID NO: 252501 - DNA, 19 bp, Homo sapiens
  siRNA target sequence for ARHGAP6 (NM_001174.2,1512-1530).
ccgatacacatcgtaactt

SEQ ID NO: 252502 - DNA, 19 bp, Homo sapiens
  siRNA target sequence for ARHGAP6 (NM_001174.2,1513-1531).
cgatacacatcgtaacttt

SEQ ID NO: 252503 - DNA, 19 bp, Homo sapiens
  siRNA target sequence for ARHGAP6 (NM_001174.2,1535-1553).
cccaccgcaacccttagaa

SEQ ID NO: 252504 - DNA, 19 bp, Homo sapiens
  siRNA target sequence for ARHGAP6 (NM_001174.2,1536-1554).
ccaccgcaacccttagaaa

SEQ ID NO: 252505 - DNA, 19 bp, Homo sapiens
  siRNA target sequence for ARHGAP6 (NM_001174.2,1537-1555).
caccgcaacccttagaaat

SEQ ID NO: 252506 - DNA, 19 bp, Homo sapiens
  siRNA target sequence for ARHGAP6 (NM_001174.2,1795-1813).
catcccacaggcatttgga

SEQ ID NO: 252507 - DNA, 19 bp, Homo sapiens
  siRNA target sequence for ARHGAP6 (NM_001174.2,1826-1844).
caagtcattgcgaatgaca

SEQ ID NO: 252508 - DNA, 19 bp, Homo sapiens
  siRNA target sequence for ARHGAP6 (NM_001174.2,1836-1854).
cgaatgacagggcctataa

SEQ ID NO: 252509 - DNA, 19 bp, Homo sapiens
  siRNA target sequence for ARHGAP6 (NM_001174.2,1837-1855).
gaatgacagggcctataaa

SEQ ID NO: 252510 - DNA, 19 bp, Homo sapiens
  siRNA target sequence for ARHGAP6 (NM_001174.2,1841-1859).
gacagggcctataaactca

SEQ ID NO: 252511 - DNA, 19 bp, Homo sapiens
  siRNA target sequence for ARHGAP6 (NM_001174.2,2051-2069).
gccatgtcagtggattcta

SEQ ID NO: 252512 - DNA, 19 bp, Homo sapiens
  siRNA target sequence for ARHGAP6 (NM_001174.2,2071-2089).
caccgatcttgatgacaat

SEQ ID NO: 252513 - DNA, 19 bp, Homo sapiens
  siRNA target sequence for ARHGAP6 (NM_001174.2,2086-2104).
caatcagtctcgactacta

SEQ ID NO: 252514 - DNA, 19 bp, Homo sapiens
  siRNA target sequence for ARHGAP6 (NM_001174.2,2102-2120).
ctagaagctttacaacttt

SEQ ID NO: 252515 - DNA, 19 bp, Homo sapiens
  siRNA target sequence for ARHGAP6 (NM_001174.2,2171-2189).
ctcagtctgaatcctattt

SEQ ID NO: 252516 - DNA, 19 bp, Homo sapiens
  siRNA target sequence for ARHGAP6 (NM_001174.2,2270-2288).
gttggaagctcaaaaaaga

SEQ ID NO: 252517 - DNA, 19 bp, Homo sapiens
  siRNA target sequence for ARHGAP6 (NM_001174.2,2564-2582).
catgccgatgacaacatca

SEQ ID NO: 252518 - DNA, 19 bp, Homo sapiens
  siRNA target sequence for ARHGAP6 (NM_001174.2,2624-2642).
ctaaacttagccaccatat

SEQ ID NO: 252519 - DNA, 19 bp, Homo sapiens
  siRNA target sequence for ARHGAP6 (NM_001174.2,2668-2686).
gaagtcatcagacaaagaa

SEQ ID NO: 252520 - DNA, 19 bp, Homo sapiens
  siRNA target sequence for ARHGAP6 (NM_001174.2,2735-2753).
gctgttgtgcaaaagatga

SEQ ID NO: 252521 - DNA, 19 bp, Homo sapiens
  siRNA target sequence for ARHGAP6 (NM_001174.2,2807-2825).
ctgatcagcctgttagaga

SEQ ID NO: 252522 - DNA, 19 bp, Homo sapiens
  siRNA target sequence for ARHGAP6 (NM_001174.2,2832-2850).
ctgatgtcgtggactattt

SEQ ID NO: 252523 - DNA, 19 bp, Homo sapiens
  siRNA target sequence for ARHGAP6 (NM_001174.2,2837-2855).
gtcgtggactatttactca

SEQ ID NO: 252524 - DNA, 19 bp, Homo sapiens
  siRNA target sequence for ARHGAP6 (NM_001174.2,2864-2882).
gcttcccaatcatcaacaa

SEQ ID NO: 252525 - DNA, 19 bp, Homo sapiens
  siRNA target sequence for ARHGAP6 (NM_001174.2,2920-2938).
gtaccctgccagcatgttt

SEQ ID NO: 252526 - DNA, 19 bp, Homo sapiens
  siRNA target sequence for ARHGAP6 (NM_006125.1,1214-1232).
ccatccggcagctttcact

SEQ ID NO: 252527 - DNA, 19 bp, Homo sapiens
  siRNA target sequence for ARHGAP6 (NM_006125.1,1215-1233).
catccggcagctttcactt

SEQ ID NO: 252528 - DNA, 19 bp, Homo sapiens
  siRNA target sequence for ARHGAP6 (NM_006125.1,1218-1236).
ccggcagctttcactttga

SEQ ID NO: 252529 - DNA, 19 bp, Homo sapiens
  siRNA target sequence for ARHGAP6 (NM_006125.1,1439-1457).
ccctacgtcgtgtggaaat

SEQ ID NO: 252530 - DNA, 19 bp, Homo sapiens
  siRNA target sequence for ARHGAP6 (NM_006125.1,2797-2815).
gcagtcggaagtttccttt

SEQ ID NO: 252531 - DNA, 19 bp, Homo sapiens
  siRNA target sequence for ARHGAP6 (NM_006125.1,2798-2816).
cagtcggaagtttcctttt

SEQ ID NO: 252532 - DNA, 19 bp, Homo sapiens
  siRNA target sequence for ARHGAP6 (NM_006125.1,2819-2837).
gtgggagggaggcattcat

SEQ ID NO: 252533 - DNA, 19 bp, Homo sapiens
  siRNA target sequence for ARHGAP6 (NM_006125.1,2821-2839).
gggagggaggcattcatct

SEQ ID NO: 252534 - DNA, 19 bp, Homo sapiens
  siRNA target sequence for ARHGAP6 (NM_006125.1,2865-2883).
gagacatctccccttatga

SEQ ID NO: 252535 - DNA, 19 bp, Homo sapiens
  siRNA target sequence for ARHGAP6 (NM_006125.1,2867-2885).
gacatctccccttatgaca

SEQ ID NO: 252536 - DNA, 19 bp, Homo sapiens
  siRNA target sequence for ARHGAP6 (NM_006125.1,2911-2929).
ctccctgctggctatgcaa

SEQ ID NO: 252537 - DNA, 19 bp, Homo sapiens
  siRNA target sequence for ARHGAP6 (NM_006125.1,2948-2966).
ggctcggagaagctttaca

SEQ ID NO: 252538 - DNA, 19 bp, Homo sapiens
  siRNA target sequence for ARHGAP6 (NM_006125.1,2996-3014).
cacttgtcgtcgtcaaagt

SEQ ID NO: 252539 - DNA, 19 bp, Homo sapiens
  siRNA target sequence for ARHGAP6 (NM_006125.1,2998-3016).
cttgtcgtcgtcaaagtca

SEQ ID NO: 252540 - DNA, 19 bp, Homo sapiens
  siRNA target sequence for ARHGAP6 (NM_006125.1,3036-3054).
caaggcttgggaaaggtaa

SEQ ID NO: 252541 - DNA, 19 bp, Homo sapiens
  siRNA target sequence for ARHGAP6 (NM_006125.1,3069-3087).
gcaggcgctggccaaaaca

SEQ ID NO: 252542 - DNA, 19 bp, Homo sapiens
  siRNA target sequence for ARHGAP6 (NM_006125.1,3070-3088).
caggcgctggccaaaacaa

SEQ ID NO: 252543 - DNA, 19 bp, Homo sapiens
  siRNA target sequence for ARHGAP6 (NM_006125.1,3125-3143).
gctcttcggaccttctctt

SEQ ID NO: 252544 - DNA, 19 bp, Homo sapiens
  siRNA target sequence for ARHGAP6 (NM_006125.1,3141-3159).
cttcgtctctcccttattt

SEQ ID NO: 252545 - DNA, 19 bp, Homo sapiens
  siRNA target sequence for ARHGAP6 (NM_013423.1,1883-1901).
gtcagaggagcctttcgat

SEQ ID NO: 252546 - DNA, 19 bp, Homo sapiens
  siRNA target sequence for ARHGAP6 (NM_013423.1,1885-1903).
cagaggagcctttcgatat

SEQ ID NO: 252547 - DNA, 19 bp, Homo sapiens
  siRNA target sequence for ARHGAP6 (NM_013423.1,1887-1905).
gaggagcctttcgatatct

SEQ ID NO: 252548 - DNA, 19 bp, Homo sapiens
  siRNA target sequence for ARHGAP6 (NM_013423.1,1907-1925).
gggaacttggcattcaaca

SEQ ID NO: 252549 - DNA, 19 bp, Homo sapiens
  siRNA target sequence for ARHGAP6 (NM_013423.1,1908-1926).
ggaacttggcattcaacat

SEQ ID NO: 252550 - DNA, 19 bp, Homo sapiens
  siRNA target sequence for ARHGAP6 (NM_013423.1,1912-1930).
cttggcattcaacattaaa

SEQ ID NO: 252551 - DNA, 19 bp, Homo sapiens
  siRNA target sequence for ARHGAP6 (NM_013423.1,2022-2040).
gggaacctgtccccaaatt

SEQ ID NO: 252552 - DNA, 19 bp, Homo sapiens
  siRNA target sequence for BLNK (NM_013314.2,174-192).
ggacaagcttaataaaata

SEQ ID NO: 252553 - DNA, 19 bp, Homo sapiens
  siRNA target sequence for BLNK (NM_013314.2,226-244).
caaaagatggtccatgata

SEQ ID NO: 252554 - DNA, 19 bp, Homo sapiens
  siRNA target sequence for BLNK (NM_013314.2,231-249).
gatggtccatgatattaaa

SEQ ID NO: 252555 - DNA, 19 bp, Homo sapiens
  siRNA target sequence for BLNK (NM_013314.2,357-375).
gcagtggtccgatgacttt

SEQ ID NO: 252556 - DNA, 19 bp, Homo sapiens
  siRNA target sequence for BLNK (NM_013314.2,378-396).
cagcgactatgaaaatcca

SEQ ID NO: 252557 - DNA, 19 bp, Homo sapiens
  siRNA target sequence for BLNK (NM_013314.2,513-531).
cgccagaggcgagtatata

SEQ ID NO: 252558 - DNA, 19 bp, Homo sapiens
  siRNA target sequence for BLNK (NM_013314.2,515-533).
ccagaggcgagtatataga

SEQ ID NO: 252559 - DNA, 19 bp, Homo sapiens
  siRNA target sequence for BLNK (NM_013314.2,518-536).
gaggcgagtatatagacaa

SEQ ID NO: 252560 - DNA, 19 bp, Homo sapiens
  siRNA target sequence for BLNK (NM_013314.2,523-541).
gagtatatagacaatcgat

SEQ ID NO: 252561 - DNA, 19 bp, Homo sapiens
  siRNA target sequence for BLNK (NM_013314.2,706-724).
gtggtccccgtggaagata

SEQ ID NO: 252562 - DNA, 19 bp, Homo sapiens
  siRNA target sequence for BLNK (NM_013314.2,711-729).
ccccgtggaagataatgat

SEQ ID NO: 252563 - DNA, 19 bp, Homo sapiens
  siRNA target sequence for BLNK (NM_013314.2,778-796).
gctcccatggtgaatagat

SEQ ID NO: 252564 - DNA, 19 bp, Homo sapiens
  siRNA target sequence for BLNK (NM_013314.2,1061-1079).
ctcctgcccagaaacaaat

SEQ ID NO: 252565 - DNA, 19 bp, Homo sapiens
  siRNA target sequence for BLNK (NM_013314.2,1091-1109).
ccatacctctgccaagatt

SEQ ID NO: 252566 - DNA, 19 bp, Homo sapiens
  siRNA target sequence for BLNK (NM_013314.2,1097-1115).
ctctgccaagatttacaga

SEQ ID NO: 252567 - DNA, 19 bp, Homo sapiens
  siRNA target sequence for BLNK (NM_013314.2,1143-1161).
cctacccagcttttcatct

SEQ ID NO: 252568 - DNA, 19 bp, Homo sapiens
  siRNA target sequence for BLNK (NM_013314.2,1147-1165).
cccagcttttcatctaatt

SEQ ID NO: 252569 - DNA, 19 bp, Homo sapiens
  siRNA target sequence for BLNK (NM_013314.2,1160-1178).
ctaattccactatttcaga

SEQ ID NO: 252570 - DNA, 19 bp, Homo sapiens
  siRNA target sequence for BLNK (NM_013314.2,1243-1261).
gaggcattgcacagatcaa

SEQ ID NO: 252571 - DNA, 19 bp, Homo sapiens
  siRNA target sequence for BLNK (NM_013314.2,1259-1277).
caaacaaggatggatcatt

SEQ ID NO: 252572 - DNA, 19 bp, Homo sapiens
  siRNA target sequence for BLNK (NM_013314.2,1266-1284).
ggatggatcatttcttatt

SEQ ID NO: 252573 - DNA, 19 bp, Homo sapiens
  siRNA target sequence for BLNK (NM_013314.2,1293-1311).
ctctggccatgattccaaa

SEQ ID NO: 252574 - DNA, 19 bp, Homo sapiens
  siRNA target sequence for BLNK (NM_013314.2,1303-1321).
gattccaaacaaccatata

SEQ ID NO: 252575 - DNA, 19 bp, Homo sapiens
  siRNA target sequence for BLNK (NM_013314.2,1307-1325).
ccaaacaaccatatacact

SEQ ID NO: 252576 - DNA, 19 bp, Homo sapiens
  siRNA target sequence for BLNK (NM_013314.2,1322-1340).
cactagttgtattctttaa

SEQ ID NO: 252577 - DNA, 19 bp, Homo sapiens
  siRNA target sequence for BLNK (NM_013314.2,1344-1362).
gcgagtatataatattcct

SEQ ID NO: 252578 - DNA, 19 bp, Homo sapiens
  siRNA target sequence for BLNK (NM_013314.2,1477-1495).
cttattgacagtcagaata

SEQ ID NO: 252579 - DNA, 19 bp, Homo sapiens
  siRNA target sequence for BLNK (NM_013314.2,1483-1501).
gacagtcagaataacacaa

SEQ ID NO: 252580 - DNA, 19 bp, Homo sapiens
  siRNA target sequence for BLNK (NM_013314.2,1485-1503).
cagtcagaataacacaaaa

SEQ ID NO: 252581 - DNA, 19 bp, Homo sapiens
  siRNA target sequence for BLNK (NM_013314.2,1521-1539).
gtatgcagttaaagtttca

SEQ ID NO: 252582 - DNA, 19 bp, Homo sapiens
  siRNA target sequence for CRK (NM_005206.2,357-375).
ctccagactccgaatagga

SEQ ID NO: 252583 - DNA, 19 bp, Homo sapiens
  siRNA target sequence for CRK (NM_005206.2,376-394).
gatcaagagtttgattcat

SEQ ID NO: 252584 - DNA, 19 bp, Homo sapiens
  siRNA target sequence for CRK (NM_005206.2,400-418).
gctttactggaattctaca

SEQ ID NO: 252585 - DNA, 19 bp, Homo sapiens
  siRNA target sequence for CRK (NM_005206.2,432-450).
ggacactacaacgttgata

SEQ ID NO: 252586 - DNA, 19 bp, Homo sapiens
  siRNA target sequence for CRK (NM_005206.2,435-453).
cactacaacgttgatagaa

SEQ ID NO: 252587 - DNA, 19 bp, Homo sapiens
  siRNA target sequence for CRK (NM_005206.2,514-532).
gtgcgagccctctttgact

SEQ ID NO: 252588 - DNA, 19 bp, Homo sapiens
  siRNA target sequence for CRK (NM_005206.2,658-676).
ccttacgtcgagaagtata

SEQ ID NO: 252589 - DNA, 19 bp, Homo sapiens
  siRNA target sequence for CRK (NM_005206.2,690-708).
ctcagtatcggctctgatt

SEQ ID NO: 252590 - DNA, 19 bp, Homo sapiens
  siRNA target sequence for CRK (NM_016823.1,885-903).
cggtgagctggtaaaggtt

SEQ ID NO: 252591 - DNA, 19 bp, Homo sapiens
  siRNA target sequence for CRK (NM_016823.1,886-904).
ggtgagctggtaaaggtta

SEQ ID NO: 252592 - DNA, 19 bp, Homo sapiens
  siRNA target sequence for CRK (NM_016823.1,894-912).
ggtaaaggttacgaagatt

SEQ ID NO: 252593 - DNA, 19 bp, Homo sapiens
  siRNA target sequence for CRK (NM_016823.1,895-913).
gtaaaggttacgaagatta

SEQ ID NO: 252594 - DNA, 19 bp, Homo sapiens
  siRNA target sequence for CRK (NM_016823.1,901-919).
gttacgaagattaatgtga

SEQ ID NO: 252595 - DNA, 19 bp, Homo sapiens
  siRNA target sequence for GRAP (NM_006613.2,455-473).
ccaagaagcggcagatctt

SEQ ID NO: 252596 - DNA, 19 bp, Homo sapiens
  siRNA target sequence for GRAP (NM_006613.2,570-588).
ccgccgtggcgacatcatt

SEQ ID NO: 252597 - DNA, 19 bp, Homo sapiens
  siRNA target sequence for GRAP2 (NM_004810.2,393-411).
ggatatgtgcccaagaatt

SEQ ID NO: 252598 - DNA, 19 bp, Homo sapiens
  siRNA target sequence for GRAP2 (NM_004810.2,394-412).
gatatgtgcccaagaattt

SEQ ID NO: 252599 - DNA, 19 bp, Homo sapiens
  siRNA target sequence for GRAP2 (NM_004810.2,403-421).
ccaagaatttcatagacat

SEQ ID NO: 252600 - DNA, 19 bp, Homo sapiens
  siRNA target sequence for GRAP2 (NM_004810.2,462-480).
caggcagagaacttactca

SEQ ID NO: 252601 - DNA, 19 bp, Homo sapiens
  siRNA target sequence for GRAP2 (NM_004810.2,589-607).
gagacaacaagggtaatta

SEQ ID NO: 252602 - DNA, 19 bp, Homo sapiens
  siRNA target sequence for GRAP2 (NM_004810.2,591-609).
gacaacaagggtaattact

SEQ ID NO: 252603 - DNA, 19 bp, Homo sapiens
  siRNA target sequence for GRAP2 (NM_004810.2,866-884).
gccacagcctccgcaatat

SEQ ID NO: 252604 - DNA, 19 bp, Homo sapiens
  siRNA target sequence for GRAP2 (NM_004810.2,963-981).
ggaggcagccttgacataa

SEQ ID NO: 252605 - DNA, 19 bp, Homo sapiens
  siRNA target sequence for GRAP2 (NM_004810.2,964-982).
gaggcagccttgacataaa

SEQ ID NO: 252606 - DNA, 19 bp, Homo sapiens
  siRNA target sequence for GRAP2 (NM_004810.2,1000-1018).
ccggcttgggcagtgaaat

SEQ ID NO: 252607 - DNA, 19 bp, Homo sapiens
  siRNA target sequence for GRAP2 (NM_004810.2,1002-1020).
ggcttgggcagtgaaatga

SEQ ID NO: 252608 - DNA, 19 bp, Homo sapiens
  siRNA target sequence for GRAP2 (NM_004810.2,1003-1021).
gcttgggcagtgaaatgaa

SEQ ID NO: 252609 - DNA, 19 bp, Homo sapiens
  siRNA target sequence for GRB10 (NM_005311.2,795-813).
gccctctgttccgtagtaa

SEQ ID NO: 252610 - DNA, 19 bp, Homo sapiens
  siRNA target sequence for GRB10 (NM_005311.2,829-847).
gacacctcgcagtcaacaa

SEQ ID NO: 252611 - DNA, 19 bp, Homo sapiens
  siRNA target sequence for GRB10 (NM_005311.2,923-941).
gccctggtgaacgatatga

SEQ ID NO: 252612 - DNA, 19 bp, Homo sapiens
  siRNA target sequence for GRB10 (NM_005311.2,929-947).
gtgaacgatatgaatgcat

SEQ ID NO: 252613 - DNA, 19 bp, Homo sapiens
  siRNA target sequence for GRB10 (NM_005311.2,1139-1157).
gaagaccagcagtttagaa

SEQ ID NO: 252614 - DNA, 19 bp, Homo sapiens
  siRNA target sequence for GRB10 (NM_005311.2,1265-1283).
caggatgttaaagtcttta

SEQ ID NO: 252615 - DNA, 19 bp, Homo sapiens
  siRNA target sequence for GRB10 (NM_005311.2,1300-1318).
caaagtggtggagattcta

SEQ ID NO: 252616 - DNA, 19 bp, Homo sapiens
  siRNA target sequence for GRB10 (NM_005311.2,1344-1362).
gccaattgctggtttacaa

SEQ ID NO: 252617 - DNA, 19 bp, Homo sapiens
  siRNA target sequence for GRB10 (NM_005311.2,1345-1363).
ccaattgctggtttacaaa

SEQ ID NO: 252618 - DNA, 19 bp, Homo sapiens
  siRNA target sequence for GRB10 (NM_005311.2,1405-1423).
ccacccgcacctaggatta

SEQ ID NO: 252619 - DNA, 19 bp, Homo sapiens
  siRNA target sequence for GRB10 (NM_005311.2,1409-1427).
ccgcacctaggattagaga

SEQ ID NO: 252620 - DNA, 19 bp, Homo sapiens
  siRNA target sequence for GRB10 (NM_005311.2,1476-1494).
ccagtgagagtaaatttct

SEQ ID NO: 252621 - DNA, 19 bp, Homo sapiens
  siRNA target sequence for GRB10 (NM_005311.2,1500-1518).
ggaagaattacgcaaaata

SEQ ID NO: 252622 - DNA, 19 bp, Homo sapiens
  siRNA target sequence for GRB10 (NM_005311.2,1587-1605).
gcagtcaaacccagctttt

SEQ ID NO: 252623 - DNA, 19 bp, Homo sapiens
  siRNA target sequence for GRB10 (NM_005311.2,1624-1642).
cagtagttgtcctgaaatt

SEQ ID NO: 252624 - DNA, 19 bp, Homo sapiens
  siRNA target sequence for GRB10 (NM_005311.2,1705-1723).
gcggagatctggcctttat

SEQ ID NO: 252625 - DNA, 19 bp, Homo sapiens
  siRNA target sequence for GRB10 (NM_005311.2,1706-1724).
cggagatctggcctttatt

SEQ ID NO: 252626 - DNA, 19 bp, Homo sapiens
  siRNA target sequence for GRB10 (NM_005311.2,1726-1744).
ctccaccaagggaacttca

SEQ ID NO: 252627 - DNA, 19 bp, Homo sapiens
  siRNA target sequence for GRB10 (NM_005311.2,1838-1856).
gaccacgggctctgcataa

SEQ ID NO: 252628 - DNA, 19 bp, Homo sapiens
  siRNA target sequence for GRB10 (NM_005311.2,1941-1959).
cgttcagactcctcaagta

SEQ ID NO: 252629 - DNA, 19 bp, Homo sapiens
  siRNA target sequence for GRB10 (NM_005311.2,1942-1960).
gttcagactcctcaagtat

SEQ ID NO: 252630 - DNA, 19 bp, Homo sapiens
  siRNA target sequence for GRB10 (NM_005311.2,1947-1965).
gactcctcaagtatggaat

SEQ ID NO: 252631 - DNA, 19 bp, Homo sapiens
  siRNA target sequence for GRB10 (NM_005311.2,2055-2073).
ccctcgtggcaatggattt

SEQ ID NO: 252632 - DNA, 19 bp, Homo sapiens
  siRNA target sequence for GRB10 (NM_005311.2,2198-2216).
cacccttctaccctaagta

SEQ ID NO: 252633 - DNA, 19 bp, Homo sapiens
  siRNA target sequence for GRB10 (NM_005311.2,2200-2218).
cccttctaccctaagtaca

SEQ ID NO: 252634 - DNA, 19 bp, Homo sapiens
  siRNA target sequence for GRB10 (NM_005311.2,2208-2226).
ccctaagtacagtgattca

SEQ ID NO: 252635 - DNA, 19 bp, Homo sapiens
  siRNA target sequence for GRB10 (NM_005311.2,2266-2284).
ggaatcccacaggatcatt

SEQ ID NO: 252636 - DNA, 19 bp, Homo sapiens
  siRNA target sequence for GRB10 (NM_005311.2,2267-2285).
gaatcccacaggatcatta

SEQ ID NO: 252637 - DNA, 19 bp, Homo sapiens
  siRNA target sequence for GRB10 (NM_005311.2,2296-2314).
gctcgtggatgggcttttt

SEQ ID NO: 252638 - DNA, 19 bp, Homo sapiens
  siRNA target sequence for GRB10 (NM_005311.2,2334-2352).
gtaatccaaaggcatttgt

SEQ ID NO: 252639 - DNA, 19 bp, Homo sapiens
  siRNA target sequence for GRB10 (NM_005311.2,2421-2439).
cgttcttcagcctagatga

SEQ ID NO: 252640 - DNA, 19 bp, Homo sapiens
  siRNA target sequence for GRB10 (NM_005311.2,2435-2453).
gatgacgggaacaccaaat

SEQ ID NO: 252641 - DNA, 19 bp, Homo sapiens
  siRNA target sequence for GRB10 (NM_005311.2,2438-2456).
gacgggaacaccaaattct

SEQ ID NO: 252642 - DNA, 19 bp, Homo sapiens
  siRNA target sequence for GRB10 (NM_005311.2,2440-2458).
cgggaacaccaaattctct

SEQ ID NO: 252643 - DNA, 19 bp, Homo sapiens
  siRNA target sequence for GRB10 (NM_005311.2,2464-2482).
gatccagctggttgacttt

SEQ ID NO: 252644 - DNA, 19 bp, Homo sapiens
  siRNA target sequence for GRB14 (NM_004490.1,829-847).
gacctatttcccaaagcaa

SEQ ID NO: 252645 - DNA, 19 bp, Homo sapiens
  siRNA target sequence for GRB14 (NM_004490.1,854-872).
ggaaaaaacaggtgattaa

SEQ ID NO: 252646 - DNA, 19 bp, Homo sapiens
  siRNA target sequence for GRB14 (NM_004490.1,855-873).
gaaaaaacaggtgattaaa

SEQ ID NO: 252647 - DNA, 19 bp, Homo sapiens
  siRNA target sequence for GRB14 (NM_004490.1,894-912).
cagcagggctttagatgta

SEQ ID NO: 252648 - DNA, 19 bp, Homo sapiens
  siRNA target sequence for GRB14 (NM_004490.1,921-939).
cataacggctcgagatgtt

SEQ ID NO: 252649 - DNA, 19 bp, Homo sapiens
  siRNA target sequence for GRB14 (NM_004490.1,926-944).
cggctcgagatgtttgtca

SEQ ID NO: 252650 - DNA, 19 bp, Homo sapiens
  siRNA target sequence for GRB14 (NM_004490.1,948-966).
gttgatcctgaagaatcat

SEQ ID NO: 252651 - DNA, 19 bp, Homo sapiens
  siRNA target sequence for GRB14 (NM_004490.1,957-975).
gaagaatcattacattgat

SEQ ID NO: 252652 - DNA, 19 bp, Homo sapiens
  siRNA target sequence for GRB14 (NM_004490.1,978-996).
ccacagctggacccttttt

SEQ ID NO: 252653 - DNA, 19 bp, Homo sapiens
  siRNA target sequence for GRB14 (NM_004490.1,1005-1023).
gcctcacataggtgtagaa

SEQ ID NO: 252654 - DNA, 19 bp, Homo sapiens
  siRNA target sequence for GRB14 (NM_004490.1,1006-1024).
cctcacataggtgtagaaa

SEQ ID NO: 252655 - DNA, 19 bp, Homo sapiens
  siRNA target sequence for GRB14 (NM_004490.1,1009-1027).
cacataggtgtagaaagaa

SEQ ID NO: 252656 - DNA, 19 bp, Homo sapiens
  siRNA target sequence for GRB14 (NM_004490.1,1164-1182).
ggtatcttttgcaactgaa

SEQ ID NO: 252657 - DNA, 19 bp, Homo sapiens
  siRNA target sequence for GRB14 (NM_004490.1,1199-1217).
cccccacacagattttgca

SEQ ID NO: 252658 - DNA, 19 bp, Homo sapiens
  siRNA target sequence for GRB14 (NM_004490.1,1371-1389).
gcagtttttcagcgaattt

SEQ ID NO: 252659 - DNA, 19 bp, Homo sapiens
  siRNA target sequence for GRB14 (NM_004490.1,1380-1398).
cagcgaatttggcaatagt

SEQ ID NO: 252660 - DNA, 19 bp, Homo sapiens
  siRNA target sequence for GRB14 (NM_004490.1,1382-1400).
gcgaatttggcaatagtga

SEQ ID NO: 252661 - DNA, 19 bp, Homo sapiens
  siRNA target sequence for GRB14 (NM_004490.1,1383-1401).
cgaatttggcaatagtgat

SEQ ID NO: 252662 - DNA, 19 bp, Homo sapiens
  siRNA target sequence for GRB14 (NM_004490.1,1432-1450).
catggagcaccgactaact

SEQ ID NO: 252663 - DNA, 19 bp, Homo sapiens
  siRNA target sequence for GRB14 (NM_004490.1,1438-1456).
gcaccgactaactatggat

SEQ ID NO: 252664 - DNA, 19 bp, Homo sapiens
  siRNA target sequence for GRB14 (NM_004490.1,1439-1457).
caccgactaactatggatt

SEQ ID NO: 252665 - DNA, 19 bp, Homo sapiens
  siRNA target sequence for GRB14 (NM_004490.1,1458-1476).
ctgctttaagcctaacaaa

SEQ ID NO: 252666 - DNA, 19 bp, Homo sapiens
  siRNA target sequence for GRB14 (NM_004490.1,1536-1554).
ctgggtgaccgcgattaga

SEQ ID NO: 252667 - DNA, 19 bp, Homo sapiens
  siRNA target sequence for GRB14 (NM_004490.1,1538-1556).
gggtgaccgcgattagatt

SEQ ID NO: 252668 - DNA, 19 bp, Homo sapiens
  siRNA target sequence for GRB14 (NM_004490.1,1544-1562).
ccgcgattagattgcttaa

SEQ ID NO: 252669 - DNA, 19 bp, Homo sapiens
  siRNA target sequence for GRB14 (NM_004490.1,1547-1565).
cgattagattgcttaagta

SEQ ID NO: 252670 - DNA, 19 bp, Homo sapiens
  siRNA target sequence for GRB14 (NM_004490.1,1548-1566).
gattagattgcttaagtat

SEQ ID NO: 252671 - DNA, 19 bp, Homo sapiens
  siRNA target sequence for GRB14 (NM_004490.1,1692-1710).
gaaaagcagagttatagaa

SEQ ID NO: 252672 - DNA, 19 bp, Homo sapiens
  siRNA target sequence for GRB14 (NM_004490.1,1748-1766).
gactcgcttggaggaaaaa

SEQ ID NO: 252673 - DNA, 19 bp, Homo sapiens
  siRNA target sequence for GRB14 (NM_004490.1,1842-1860).
ccggtcccagccatggttt

SEQ ID NO: 252674 - DNA, 19 bp, Homo sapiens
  siRNA target sequence for GRB14 (NM_004490.1,1882-1900).
gaggctcagcgattgatta

SEQ ID NO: 252675 - DNA, 19 bp, Homo sapiens
  siRNA target sequence for GRB14 (NM_004490.1,1884-1902).
ggctcagcgattgattatt

SEQ ID NO: 252676 - DNA, 19 bp, Homo sapiens
  siRNA target sequence for GRB14 (NM_004490.1,1910-1928).
gacttgtggatggagtttt

SEQ ID NO: 252677 - DNA, 19 bp, Homo sapiens
  siRNA target sequence for GRB14 (NM_004490.1,2091-2109).
ggagttctatcaactcaat

SEQ ID NO: 252678 - DNA, 19 bp, Homo sapiens
  siRNA target sequence for GRB14 (NM_004490.1,2092-2110).
gagttctatcaactcaata

SEQ ID NO: 252679 - DNA, 19 bp, Homo sapiens
  siRNA target sequence for GRB2 (NM_002086.2,360-378).
ggaagccatcgccaaatat

SEQ ID NO: 252680 - DNA, 19 bp, Homo sapiens
  siRNA target sequence for GRB2 (NM_002086.2,364-382).
gccatcgccaaatatgact

SEQ ID NO: 252681 - DNA, 19 bp, Homo sapiens
  siRNA target sequence for GRB2 (NM_002086.2,365-383).
ccatcgccaaatatgactt

SEQ ID NO: 252682 - DNA, 19 bp, Homo sapiens
  siRNA target sequence for GRB2 (NM_002086.2,369-387).
cgccaaatatgacttcaaa

SEQ ID NO: 252683 - DNA, 19 bp, Homo sapiens
  siRNA target sequence for GRB2 (NM_002086.2,435-453).
ggttttgaacgaagaatgt

SEQ ID NO: 252684 - DNA, 19 bp, Homo sapiens
  siRNA target sequence for GRB2 (NM_002086.2,468-486).
caaggcagagcttaatgga

SEQ ID NO: 252685 - DNA, 19 bp, Homo sapiens
  siRNA target sequence for GRB2 (NM_002086.2,473-491).
cagagcttaatggaaaaga

SEQ ID NO: 252686 - DNA, 19 bp, Homo sapiens
  siRNA target sequence for GRB2 (NM_002086.2,591-609).
gcacgatggggcctttctt

SEQ ID NO: 252687 - DNA, 19 bp, Homo sapiens
  siRNA target sequence for GRB2 (NM_002086.2,646-664).
ctctctgtcaagtttggaa

SEQ ID NO: 252688 - DNA, 19 bp, Homo sapiens
  siRNA target sequence for GRB2 (NM_002086.2,717-735).
ctgggtggtgaagttcaat

SEQ ID NO: 252689 - DNA, 19 bp, Homo sapiens
  siRNA target sequence for GRB2 (NM_002086.2,721-739).
gtggtgaagttcaattctt

SEQ ID NO: 252690 - DNA, 19 bp, Homo sapiens
  siRNA target sequence for GRB2 (NM_002086.2,751-769).
gtggattatcacagatcta

SEQ ID NO: 252691 - DNA, 19 bp, Homo sapiens
  siRNA target sequence for GRB2 (NM_002086.2,965-983).
gcatgtttccccgcaatta

SEQ ID NO: 252692 - DNA, 19 bp, Homo sapiens
  siRNA target sequence for GRB2 (NM_002086.2,966-984).
catgtttccccgcaattat

SEQ ID NO: 252693 - DNA, 19 bp, Homo sapiens
  siRNA target sequence for GRB7 (NM_005310.1,589-607).
gctcgccacgtgtgtgaaa

SEQ ID NO: 252694 - DNA, 19 bp, Homo sapiens
  siRNA target sequence for GRB7 (NM_005310.1,590-608).
ctcgccacgtgtgtgaaat

SEQ ID NO: 252695 - DNA, 19 bp, Homo sapiens
  siRNA target sequence for GRB7 (NM_005310.1,752-770).
gcttcgtcttccggaaaaa

SEQ ID NO: 252696 - DNA, 19 bp, Homo sapiens
  siRNA target sequence for GRB7 (NM_005310.1,776-794).
ccaagtacgaactgttcaa

SEQ ID NO: 252697 - DNA, 19 bp, Homo sapiens
  siRNA target sequence for GRB7 (NM_005310.1,937-955).
ggttcaggacggaagcttt

SEQ ID NO: 252698 - DNA, 19 bp, Homo sapiens
  siRNA target sequence for GRB7 (NM_005310.1,979-997).
cgccgatctggcctctatt

SEQ ID NO: 252699 - DNA, 19 bp, Homo sapiens
  siRNA target sequence for GRB7 (NM_005310.1,980-998).
gccgatctggcctctatta

SEQ ID NO: 252700 - DNA, 19 bp, Homo sapiens
  siRNA target sequence for GRB7 (NM_005310.1,1005-1023).
caagggcacctctaaggat

SEQ ID NO: 252701 - DNA, 19 bp, Homo sapiens
  siRNA target sequence for GRB7 (NM_005310.1,1131-1149).
gcccaacaagcttcgaaat

SEQ ID NO: 252702 - DNA, 19 bp, Homo sapiens
  siRNA target sequence for GRB7 (NM_005310.1,1167-1185).
gatcttctgcagtgaagat

SEQ ID NO: 252703 - DNA, 19 bp, Homo sapiens
  siRNA target sequence for GRB7 (NM_005310.1,1234-1252).
ggggtgcagctgtacaaga

SEQ ID NO: 252704 - DNA, 19 bp, Homo sapiens
  siRNA target sequence for GRB7 (NM_005310.1,1311-1329).
gagaagtgcctcagataat

SEQ ID NO: 252705 - DNA, 19 bp, Homo sapiens
  siRNA target sequence for GRB7 (NM_005310.1,1360-1378).
gctgggcgtgtcattgaga

SEQ ID NO: 252706 - DNA, 19 bp, Homo sapiens
  siRNA target sequence for GRB7 (NM_005310.1,1536-1554).
ggagagccagcggcttatt

SEQ ID NO: 252707 - DNA, 19 bp, Homo sapiens
  siRNA target sequence for GRB7 (NM_005310.1,1539-1557).
gagccagcggcttattgga

SEQ ID NO: 252708 - DNA, 19 bp, Homo sapiens
  siRNA target sequence for LASP1 (NM_006148.1,127-145).
gtgaactgtctggataagt

SEQ ID NO: 252709 - DNA, 19 bp, Homo sapiens
  siRNA target sequence for LASP1 (NM_006148.1,272-290).
cggacaccccggaaaacct

SEQ ID NO: 252710 - DNA, 19 bp, Homo sapiens
  siRNA target sequence for LASP1 (NM_006148.1,273-291).
ggacaccccggaaaacctt

SEQ ID NO: 252711 - DNA, 19 bp, Homo sapiens
  siRNA target sequence for LASP1 (NM_006148.1,386-404).
cgcccgagctccagagaat

SEQ ID NO: 252712 - DNA, 19 bp, Homo sapiens
  siRNA target sequence for LASP1 (NM_006148.1,497-515).
cagagcgtcgggattcaca

SEQ ID NO: 252713 - DNA, 19 bp, Homo sapiens
  siRNA target sequence for LAT (NM_014387.2,189-207).
cagcacatcctcagatagt

SEQ ID NO: 252714 - DNA, 19 bp, Homo sapiens
  siRNA target sequence for LAT (NM_014387.2,191-209).
gcacatcctcagatagttt

SEQ ID NO: 252715 - DNA, 19 bp, Homo sapiens
  siRNA target sequence for LAT (NM_014387.2,194-212).
catcctcagatagtttgta

SEQ ID NO: 252716 - DNA, 19 bp, Homo sapiens
  siRNA target sequence for LAT (NM_014387.2,726-744).
cagccgggagtatgtgaat

SEQ ID NO: 252717 - DNA, 19 bp, Homo sapiens
  siRNA target sequence for LAT (NM_014387.2,728-746).
gccgggagtatgtgaatgt

SEQ ID NO: 252718 - DNA, 19 bp, Homo sapiens
  siRNA target sequence for LAT (NM_014387.2,833-851).
ctccagattacgagaatct

SEQ ID NO: 252719 - DNA, 19 bp, Homo sapiens
  siRNA target sequence for RUSC1 (NM_014328.1,189-207).
gtcagcgtctccgttgata

SEQ ID NO: 252720 - DNA, 19 bp, Homo sapiens
  siRNA target sequence for RUSC1 (NM_014328.1,191-209).
cagcgtctccgttgataaa

SEQ ID NO: 252721 - DNA, 19 bp, Homo sapiens
  siRNA target sequence for RUSC1 (NM_014328.1,193-211).
gcgtctccgttgataaaat

SEQ ID NO: 252722 - DNA, 19 bp, Homo sapiens
  siRNA target sequence for RUSC1 (NM_014328.1,195-213).
gtctccgttgataaaatca

SEQ ID NO: 252723 - DNA, 19 bp, Homo sapiens
  siRNA target sequence for RUSC1 (NM_014328.1,499-517).
gccgcttccatgcctttat

SEQ ID NO: 252724 - DNA, 19 bp, Homo sapiens
  siRNA target sequence for RUSC1 (NM_014328.1,596-614).
gtacctgccaacaggattt

SEQ ID NO: 252725 - DNA, 19 bp, Homo sapiens
  siRNA target sequence for RUSC1 (NM_014328.1,600-618).
ctgccaacaggatttttct

SEQ ID NO: 252726 - DNA, 19 bp, Homo sapiens
  siRNA target sequence for RUSC1 (NM_014328.1,676-694).
cattgtcggtgctcacttt

SEQ ID NO: 252727 - DNA, 19 bp, Homo sapiens
  siRNA target sequence for RUSC1 (NM_014328.1,1061-1079).
cctctggttgggaagacta

SEQ ID NO: 252728 - DNA, 19 bp, Homo sapiens
  siRNA target sequence for RUSC1 (NM_014328.1,1062-1080).
ctctggttgggaagactat

SEQ ID NO: 252729 - DNA, 19 bp, Homo sapiens
  siRNA target sequence for RUSC1 (NM_014328.1,1165-1183).
gtgtgttggctcttgtgaa

SEQ ID NO: 252730 - DNA, 19 bp, Homo sapiens
  siRNA target sequence for RUSC1 (NM_014328.1,1395-1413).
gtgcctgtggggtatacct

SEQ ID NO: 252731 - DNA, 19 bp, Homo sapiens
  siRNA target sequence for RUSC1 (NM_014328.1,1405-1423).
ggtatacctcccttgttct

SEQ ID NO: 252732 - DNA, 19 bp, Homo sapiens
  siRNA target sequence for SCAP2 (NM_003930.3,326-344).
ccccctccctgaggaaatt

SEQ ID NO: 252733 - DNA, 19 bp, Homo sapiens
  siRNA target sequence for SCAP2 (NM_003930.3,327-345).
cccctccctgaggaaatta

SEQ ID NO: 252734 - DNA, 19 bp, Homo sapiens
  siRNA target sequence for SCAP2 (NM_003930.3,330-348).
ctccctgaggaaattagga

SEQ ID NO: 252735 - DNA, 19 bp, Homo sapiens
  siRNA target sequence for SCAP2 (NM_003930.3,429-447).
gaatcccttattaagaaga

SEQ ID NO: 252736 - DNA, 19 bp, Homo sapiens
  siRNA target sequence for SCAP2 (NM_003930.3,446-464).
gataaaagatgtaaagtct

SEQ ID NO: 252737 - DNA, 19 bp, Homo sapiens
  siRNA target sequence for SCAP2 (NM_003930.3,534-552).
gggcctccagacactattt

SEQ ID NO: 252738 - DNA, 19 bp, Homo sapiens
  siRNA target sequence for SCAP2 (NM_003930.3,553-571).
cattagcctcagaacgata

SEQ ID NO: 252739 - DNA, 19 bp, Homo sapiens
  siRNA target sequence for SCAP2 (NM_003930.3,558-576).
gcctcagaacgatatgata

SEQ ID NO: 252740 - DNA, 19 bp, Homo sapiens
  siRNA target sequence for SCAP2 (NM_003930.3,559-577).
cctcagaacgatatgataa

SEQ ID NO: 252741 - DNA, 19 bp, Homo sapiens
  siRNA target sequence for SCAP2 (NM_003930.3,650-668).
ggctggctaccttgaaaaa

SEQ ID NO: 252742 - DNA, 19 bp, Homo sapiens
  siRNA target sequence for SCAP2 (NM_003930.3,723-741).
ctcagtaaaacggtattct

SEQ ID NO: 252743 - DNA, 19 bp, Homo sapiens
  siRNA target sequence for SCAP2 (NM_003930.3,725-743).
cagtaaaacggtattctat

SEQ ID NO: 252744 - DNA, 19 bp, Homo sapiens
  siRNA target sequence for SCAP2 (NM_003930.3,727-745).
gtaaaacggtattctatta

SEQ ID NO: 252745 - DNA, 19 bp, Homo sapiens
  siRNA target sequence for SCAP2 (NM_003930.3,797-815).
ctacagtgtcagaatgaat

SEQ ID NO: 252746 - DNA, 19 bp, Homo sapiens
  siRNA target sequence for SCAP2 (NM_003930.3,862-880).
ctgctcctgataaacgtat

SEQ ID NO: 252747 - DNA, 19 bp, Homo sapiens
  siRNA target sequence for SCAP2 (NM_003930.3,865-883).
ctcctgataaacgtatata

SEQ ID NO: 252748 - DNA, 19 bp, Homo sapiens
  siRNA target sequence for SCAP2 (NM_003930.3,922-940).
gggtacagcagctgaaatt

SEQ ID NO: 252749 - DNA, 19 bp, Homo sapiens
  siRNA target sequence for SCAP2 (NM_003930.3,923-941).
ggtacagcagctgaaattt

SEQ ID NO: 252750 - DNA, 19 bp, Homo sapiens
  siRNA target sequence for SCAP2 (NM_003930.3,951-969).
gatatggaatctgatatta

SEQ ID NO: 252751 - DNA, 19 bp, Homo sapiens
  siRNA target sequence for SCAP2 (NM_003930.3,1014-1032).
gatcatcctctaccaataa

SEQ ID NO: 252752 - DNA, 19 bp, Homo sapiens
  siRNA target sequence for SCAP2 (NM_003930.3,1017-1035).
catcctctaccaataagca

SEQ ID NO: 252753 - DNA, 19 bp, Homo sapiens
  siRNA target sequence for SCAP2 (NM_003930.3,1045-1063).
caagcagtcaaccaataga

SEQ ID NO: 252754 - DNA, 19 bp, Homo sapiens
  siRNA target sequence for SCAP2 (NM_003930.3,1168-1186).
gggataagagcactgatta

SEQ ID NO: 252755 - DNA, 19 bp, Homo sapiens
  siRNA target sequence for SCAP2 (NM_003930.3,1169-1187).
ggataagagcactgattat

SEQ ID NO: 252756 - DNA, 19 bp, Homo sapiens
  siRNA target sequence for SCAP2 (NM_003930.3,1216-1234).
gtactggagctttttctga

SEQ ID NO: 252757 - DNA, 19 bp, Homo sapiens
  siRNA target sequence for SCAP2 (NM_003930.3,1251-1269).
cgtggtgatgtgatttaca

SEQ ID NO: 252758 - DNA, 19 bp, Homo sapiens
  siRNA target sequence for SCAP2 (NM_003930.3,1272-1290).
cttagcaaggaatacaata

SEQ ID NO: 252759 - DNA, 19 bp, Homo sapiens
  siRNA target sequence for SCAP2 (NM_003930.3,1334-1352).
ggtgcctaaagcctacata

SEQ ID NO: 252760 - DNA, 19 bp, Homo sapiens
  siRNA target sequence for SCAP2 (NM_003930.3,1335-1353).
gtgcctaaagcctacataa

SEQ ID NO: 252761 - DNA, 19 bp, Homo sapiens
  siRNA target sequence for SCAP2 (NM_003930.3,1345-1363).
cctacataatggagatgta

SEQ ID NO: 252762 - DNA, 19 bp, Homo sapiens
  siRNA target sequence for SH2D1A (NM_002351.1,302-320).
ggacgcagtggctgtgtat

SEQ ID NO: 252763 - DNA, 19 bp, Homo sapiens
  siRNA target sequence for SH2D1A (NM_002351.1,415-433).
gcgtgtactgcctatgtgt

SEQ ID NO: 252764 - DNA, 19 bp, Homo sapiens
  siRNA target sequence for SH2D1A (NM_002351.1,424-442).
gcctatgtgtgctgtatca

SEQ ID NO: 252765 - DNA, 19 bp, Homo sapiens
  siRNA target sequence for SH2D1A (NM_002351.1,434-452).
gctgtatcacggttacatt

SEQ ID NO: 252766 - DNA, 19 bp, Homo sapiens
  siRNA target sequence for SH2D1A (NM_002351.1,435-453).
ctgtatcacggttacattt

SEQ ID NO: 252767 - DNA, 19 bp, Homo sapiens
  siRNA target sequence for SH2D1A (NM_002351.1,437-455).
gtatcacggttacatttat

SEQ ID NO: 252768 - DNA, 19 bp, Homo sapiens
  siRNA target sequence for SH2D1A (NM_002351.1,441-459).
cacggttacatttatacat

SEQ ID NO: 252769 - DNA, 19 bp, Homo sapiens
  siRNA target sequence for SH2D1A (NM_002351.1,510-528).
ggggtacataaaagatatt

SEQ ID NO: 252770 - DNA, 19 bp, Homo sapiens
  siRNA target sequence for SH2D1A (NM_002351.1,566-584).
gccagatcaaggcattgta

SEQ ID NO: 252771 - DNA, 19 bp, Homo sapiens
  siRNA target sequence for SH2D1A (NM_002351.1,567-585).
ccagatcaaggcattgtaa

SEQ ID NO: 252772 - DNA, 19 bp, Homo sapiens
  siRNA target sequence for SH2D1A (NM_002351.1,568-586).
cagatcaaggcattgtaat

SEQ ID NO: 252773 - DNA, 19 bp, Homo sapiens
  siRNA target sequence for SH2D3A (NM_005490.1,315-333).
gctcagccctccattttga

SEQ ID NO: 252774 - DNA, 19 bp, Homo sapiens
  siRNA target sequence for SH2D3A (NM_005490.1,417-435).
cggctctggttcacagtta

SEQ ID NO: 252775 - DNA, 19 bp, Homo sapiens
  siRNA target sequence for SH2D3A (NM_005490.1,422-440).
ctggttcacagttatatga

SEQ ID NO: 252776 - DNA, 19 bp, Homo sapiens
  siRNA target sequence for SH2D3A (NM_005490.1,506-524).
cctctgcgacgcagcttta

SEQ ID NO: 252777 - DNA, 19 bp, Homo sapiens
  siRNA target sequence for SH2D3A (NM_005490.1,947-965).
gaagagaatagatgtttta

SEQ ID NO: 252778 - DNA, 19 bp, Homo sapiens
  siRNA target sequence for SH2D3A (NM_005490.1,971-989).
ccacaggctgagatctctt

SEQ ID NO: 252779 - DNA, 19 bp, Homo sapiens
  siRNA target sequence for SH2D3A (NM_005490.1,974-992).
caggctgagatctctttct

SEQ ID NO: 252780 - DNA, 19 bp, Homo sapiens
  siRNA target sequence for SH2D3C (NM_005489.1,116-134).
gctggcagcgactatgtga

SEQ ID NO: 252781 - DNA, 19 bp, Homo sapiens
  siRNA target sequence for SH2D3C (NM_005489.1,117-135).
ctggcagcgactatgtgaa

SEQ ID NO: 252782 - DNA, 19 bp, Homo sapiens
  siRNA target sequence for SH2D3C (NM_005489.1,160-178).
ggactcatcgccagagaaa

SEQ ID NO: 252783 - DNA, 19 bp, Homo sapiens
  siRNA target sequence for SH2D3C (NM_005489.1,465-483).
ccctcgtgcgctatcatgt

SEQ ID NO: 252784 - DNA, 19 bp, Homo sapiens
  siRNA target sequence for SH2D3C (NM_005489.1,1389-1407).
ggatactgggcgttaccaa

SEQ ID NO: 252785 - DNA, 19 bp, Homo sapiens
  siRNA target sequence for SH3BGR (NM_007341.1,195-213).
ccaactgtcgaaatggtta

SEQ ID NO: 252786 - DNA, 19 bp, Homo sapiens
  siRNA target sequence for SH3BGR (NM_007341.1,196-214).
caactgtcgaaatggttat

SEQ ID NO: 252787 - DNA, 19 bp, Homo sapiens
  siRNA target sequence for SH3BGR (NM_007341.1,199-217).
ctgtcgaaatggttatcaa

SEQ ID NO: 252788 - DNA, 19 bp, Homo sapiens
  siRNA target sequence for SH3BGR (NM_007341.1,240-258).
gggtccatagcgattagga

SEQ ID NO: 252789 - DNA, 19 bp, Homo sapiens
  siRNA target sequence for SH3BGR (NM_007341.1,241-259).
ggtccatagcgattaggaa

SEQ ID NO: 252790 - DNA, 19 bp, Homo sapiens
  siRNA target sequence for SH3BGR (NM_007341.1,291-309).
gcgaataaaatcgacttta

SEQ ID NO: 252791 - DNA, 19 bp, Homo sapiens
  siRNA target sequence for SH3BGR (NM_007341.1,292-310).
cgaataaaatcgactttaa

SEQ ID NO: 252792 - DNA, 19 bp, Homo sapiens
  siRNA target sequence for SH3BGR (NM_007341.1,403-421).
ctccccagatcttcaatga

SEQ ID NO: 252793 - DNA, 19 bp, Homo sapiens
  siRNA target sequence for SH3BGR (NM_007341.1,433-451).
gtggggattttgactcttt

SEQ ID NO: 252794 - DNA, 19 bp, Homo sapiens
  siRNA target sequence for SH3BGRL (NM_003022.1,84-102).
gatccgtgtatatattgca

SEQ ID NO: 252795 - DNA, 19 bp, Homo sapiens
  siRNA target sequence for SH3BGRL (NM_003022.1,110-128).
ctggctctacagcgattaa

SEQ ID NO: 252796 - DNA, 19 bp, Homo sapiens
  siRNA target sequence for SH3BGRL (NM_003022.1,112-130).
ggctctacagcgattaaga

SEQ ID NO: 252797 - DNA, 19 bp, Homo sapiens
  siRNA target sequence for SH3BGRL (NM_003022.1,113-131).
gctctacagcgattaagaa

SEQ ID NO: 252798 - DNA, 19 bp, Homo sapiens
  siRNA target sequence for SH3BGRL (NM_003022.1,160-178).
gaagccaacaaaataggat

SEQ ID NO: 252799 - DNA, 19 bp, Homo sapiens
  siRNA target sequence for SH3BGRL (NM_003022.1,164-182).
ccaacaaaataggatttga

SEQ ID NO: 252800 - DNA, 19 bp, Homo sapiens
  siRNA target sequence for SH3BGRL (NM_003022.1,214-232).
cggaagtggatgagagaaa

SEQ ID NO: 252801 - DNA, 19 bp, Homo sapiens
  siRNA target sequence for SH3BP2 (NM_003023.2,265-283).
gcggctgaagagatgcatt

SEQ ID NO: 252802 - DNA, 19 bp, Homo sapiens
  siRNA target sequence for SH3BP2 (NM_003023.2,427-445).
cgctgcgtctactacttca

SEQ ID NO: 252803 - DNA, 19 bp, Homo sapiens
  siRNA target sequence for SH3BP2 (NM_003023.2,524-542).
ccacgtccaacaacgtttt

SEQ ID NO: 252804 - DNA, 19 bp, Homo sapiens
  siRNA target sequence for SH3BP2 (NM_003023.2,538-556).
gttttccccttcaagatca

SEQ ID NO: 252805 - DNA, 19 bp, Homo sapiens
  siRNA target sequence for SH3BP2 (NM_003023.2,574-592).
caccgcacgtggttcttct

SEQ ID NO: 252806 - DNA, 19 bp, Homo sapiens
  siRNA target sequence for SH3BP2 (NM_003023.2,649-667).
ggccacttccacgaaaaga

SEQ ID NO: 252807 - DNA, 19 bp, Homo sapiens
  siRNA target sequence for SH3BP2 (NM_003023.2,651-669).
ccacttccacgaaaagaaa

SEQ ID NO: 252808 - DNA, 19 bp, Homo sapiens
  siRNA target sequence for SH3BP2 (NM_003023.2,758-776).
cgtaccccacggacaatga

SEQ ID NO: 252809 - DNA, 19 bp, Homo sapiens
  siRNA target sequence for SH3BP2 (NM_003023.2,759-777).
gtaccccacggacaatgaa

SEQ ID NO: 252810 - DNA, 19 bp, Homo sapiens
  siRNA target sequence for SH3BP2 (NM_003023.2,765-783).
cacggacaatgaagactat

SEQ ID NO: 252811 - DNA, 19 bp, Homo sapiens
  siRNA target sequence for SH3BP2 (NM_003023.2,1247-1265).
gaaactgtgacaaactcaa

SEQ ID NO: 252812 - DNA, 19 bp, Homo sapiens
  siRNA target sequence for SH3BP2 (NM_003023.2,1329-1347).
gcccaagttcctgaagata

SEQ ID NO: 252813 - DNA, 19 bp, Homo sapiens
  siRNA target sequence for SH3BP2 (NM_003023.2,1763-1781).
gggacgaaacctctaacaa

SEQ ID NO: 252814 - DNA, 19 bp, Homo sapiens
  siRNA target sequence for SH3BP2 (NM_003023.2,1764-1782).
ggacgaaacctctaacaaa

SEQ ID NO: 252815 - DNA, 19 bp, Homo sapiens
  siRNA target sequence for SH3BP2 (NM_003023.2,1785-1803).
gaggaactatcgcattttt

SEQ ID NO: 252816 - DNA, 19 bp, Homo sapiens
  siRNA target sequence for SH3BP2 (NM_003023.2,1787-1805).
ggaactatcgcatttttga

SEQ ID NO: 252817 - DNA, 19 bp, Homo sapiens
  siRNA target sequence for SH3BP2 (NM_003023.2,1804-1822).
gagaaggactctaagttct

SEQ ID NO: 252818 - DNA, 19 bp, Homo sapiens
  siRNA target sequence for SH3BP5 (NM_004844.1,111-129).
gggagaactggagaagtta

SEQ ID NO: 252819 - DNA, 19 bp, Homo sapiens
  siRNA target sequence for SH3BP5 (NM_004844.1,118-136).
ctggagaagttaaatcagt

SEQ ID NO: 252820 - DNA, 19 bp, Homo sapiens
  siRNA target sequence for SH3BP5 (NM_004844.1,133-151).
cagtccacggatgatatca

SEQ ID NO: 252821 - DNA, 19 bp, Homo sapiens
  siRNA target sequence for SH3BP5 (NM_004844.1,155-173).
gacgggagactgaacttga

SEQ ID NO: 252822 - DNA, 19 bp, Homo sapiens
  siRNA target sequence for SH3BP5 (NM_004844.1,591-609).
caagtccaagccttatttt

SEQ ID NO: 252823 - DNA, 19 bp, Homo sapiens
  siRNA target sequence for SH3BP5 (NM_004844.1,596-614).
ccaagccttattttgaact

SEQ ID NO: 252824 - DNA, 19 bp, Homo sapiens
  siRNA target sequence for SH3BP5 (NM_004844.1,633-651).
gcagctcgagcaactgaaa

SEQ ID NO: 252825 - DNA, 19 bp, Homo sapiens
  siRNA target sequence for SH3BP5 (NM_004844.1,634-652).
cagctcgagcaactgaaaa

SEQ ID NO: 252826 - DNA, 19 bp, Homo sapiens
  siRNA target sequence for SH3BP5 (NM_004844.1,688-706).
gcaaaaggcgagtacaaga

SEQ ID NO: 252827 - DNA, 19 bp, Homo sapiens
  siRNA target sequence for SH3BP5 (NM_004844.1,689-707).
caaaaggcgagtacaagat

SEQ ID NO: 252828 - DNA, 19 bp, Homo sapiens
  siRNA target sequence for SH3BP5 (NM_004844.1,864-882).
ggcctcggaggcctttgaa

SEQ ID NO: 252829 - DNA, 19 bp, Homo sapiens
  siRNA target sequence for SH3BP5 (NM_004844.1,928-946).
cagtccgtgtccagcttta

SEQ ID NO: 252830 - DNA, 19 bp, Homo sapiens
  siRNA target sequence for SH3BP5 (NM_004844.1,930-948).
gtccgtgtccagctttagt

SEQ ID NO: 252831 - DNA, 19 bp, Homo sapiens
  siRNA target sequence for SH3BP5 (NM_004844.1,933-951).
cgtgtccagctttagttca

SEQ ID NO: 252832 - DNA, 19 bp, Homo sapiens
  siRNA target sequence for SH3BP5 (NM_004844.1,1094-1112).
cctcctcccctgaatgtga

SEQ ID NO: 252833 - DNA, 19 bp, Homo sapiens
  siRNA target sequence for SH3BP5 (NM_004844.1,1303-1321).
ggaattattgctgacataa

SEQ ID NO: 252834 - DNA, 19 bp, Homo sapiens
  siRNA target sequence for SHB (NM_003028.1,1038-1056).
ccggctctccgcatctcta

SEQ ID NO: 252835 - DNA, 19 bp, Homo sapiens
  siRNA target sequence for SHB (NM_003028.1,1306-1324).
ctactcagatccctttgat

SEQ ID NO: 252836 - DNA, 19 bp, Homo sapiens
  siRNA target sequence for SHB (NM_003028.1,1428-1446).
gtgtccggtcccagcataa

SEQ ID NO: 252837 - DNA, 19 bp, Homo sapiens
  siRNA target sequence for SHB (NM_003028.1,1432-1450).
ccggtcccagcataaaggt

SEQ ID NO: 252838 - DNA, 19 bp, Homo sapiens
  siRNA target sequence for SHB (NM_003028.1,1433-1451).
cggtcccagcataaaggta

SEQ ID NO: 252839 - DNA, 19 bp, Homo sapiens
  siRNA target sequence for SHB (NM_003028.1,1434-1452).
ggtcccagcataaaggtat

SEQ ID NO: 252840 - DNA, 19 bp, Homo sapiens
  siRNA target sequence for SHB (NM_003028.1,1707-1725).
ggggctttaagcctatcaa

SEQ ID NO: 252841 - DNA, 19 bp, Homo sapiens
  siRNA target sequence for SHB (NM_003028.1,1708-1726).
gggctttaagcctatcaaa

SEQ ID NO: 252842 - DNA, 19 bp, Homo sapiens
  siRNA target sequence for SHB (NM_003028.1,1710-1728).
gctttaagcctatcaaaca

SEQ ID NO: 252843 - DNA, 19 bp, Homo sapiens
  siRNA target sequence for SHB (NM_003028.1,1711-1729).
ctttaagcctatcaaacat

SEQ ID NO: 252844 - DNA, 19 bp, Homo sapiens
  siRNA target sequence for SHB (NM_003028.1,1778-1796).
gtccccctggagaagcaaa

SEQ ID NO: 252845 - DNA, 19 bp, Homo sapiens
  siRNA target sequence for SHB (NM_003028.1,1784-1802).
ctggagaagcaaatatggt

SEQ ID NO: 252846 - DNA, 19 bp, Homo sapiens
  siRNA target sequence for SHB (NM_003028.1,1917-1935).
ggagcaaccagggttttat

SEQ ID NO: 252847 - DNA, 19 bp, Homo sapiens
  siRNA target sequence for SHB (NM_003028.1,1920-1938).
gcaaccagggttttatgca

SEQ ID NO: 252848 - DNA, 19 bp, Homo sapiens
  siRNA target sequence for SHB (NM_003028.1,2007-2025).
cggaagtcatccactacta

SEQ ID NO: 252849 - DNA, 19 bp, Homo sapiens
  siRNA target sequence for SHB (NM_003028.1,2023-2041).
ctacaccaccagaaagcta

SEQ ID NO: 252850 - DNA, 19 bp, Homo sapiens
  siRNA target sequence for SLA (NM_006748.1,180-198).
gagaaactgcgtgtgattt

SEQ ID NO: 252851 - DNA, 19 bp, Homo sapiens
  siRNA target sequence for SLA (NM_006748.1,182-200).
gaaactgcgtgtgatttct

SEQ ID NO: 252852 - DNA, 19 bp, Homo sapiens
  siRNA target sequence for SLA (NM_006748.1,207-225).
gggggctggtggaaagcta

SEQ ID NO: 252853 - DNA, 19 bp, Homo sapiens
  siRNA target sequence for SLA (NM_006748.1,209-227).
gggctggtggaaagctatt

SEQ ID NO: 252854 - DNA, 19 bp, Homo sapiens
  siRNA target sequence for SLA (NM_006748.1,238-256).
ctggtcgagagagttacat

SEQ ID NO: 252855 - DNA, 19 bp, Homo sapiens
  siRNA target sequence for SLA (NM_006748.1,248-266).
gagttacatccctggaata

SEQ ID NO: 252856 - DNA, 19 bp, Homo sapiens
  siRNA target sequence for SLA (NM_006748.1,268-286).
gtgtggccagagtttacca

SEQ ID NO: 252857 - DNA, 19 bp, Homo sapiens
  siRNA target sequence for SLA (NM_006748.1,767-785).
ggacaacacctcctttgat

SEQ ID NO: 252858 - DNA, 19 bp, Homo sapiens
  siRNA target sequence for SLA (NM_006748.1,775-793).
cctcctttgatcgaaagaa

SEQ ID NO: 252859 - DNA, 19 bp, Homo sapiens
  siRNA target sequence for SLA (NM_006748.1,847-865).
catcaccaccttactttga

SEQ ID NO: 252860 - DNA, 19 bp, Homo sapiens
  siRNA target sequence for SNX9 (NM_016224.3,181-199).
ccaaggctcgggttatgta

SEQ ID NO: 252861 - DNA, 19 bp, Homo sapiens
  siRNA target sequence for SNX9 (NM_016224.3,186-204).
gctcgggttatgtatgatt

SEQ ID NO: 252862 - DNA, 19 bp, Homo sapiens
  siRNA target sequence for SNX9 (NM_016224.3,187-205).
ctcgggttatgtatgattt

SEQ ID NO: 252863 - DNA, 19 bp, Homo sapiens
  siRNA target sequence for SNX9 (NM_016224.3,330-348).
cccacagactacgttgaaa

SEQ ID NO: 252864 - DNA, 19 bp, Homo sapiens
  siRNA target sequence for SNX9 (NM_016224.3,334-352).
cagactacgttgaaatttt

SEQ ID NO: 252865 - DNA, 19 bp, Homo sapiens
  siRNA target sequence for SNX9 (NM_016224.3,449-467).
gtcggctgccagcaacaat

SEQ ID NO: 252866 - DNA, 19 bp, Homo sapiens
  siRNA target sequence for SNX9 (NM_016224.3,451-469).
cggctgccagcaacaatca

SEQ ID NO: 252867 - DNA, 19 bp, Homo sapiens
  siRNA target sequence for SNX9 (NM_016224.3,501-519).
gcctggagtgcctccaaat

SEQ ID NO: 252868 - DNA, 19 bp, Homo sapiens
  siRNA target sequence for SNX9 (NM_016224.3,700-718).
cctactttaaggattcaga

SEQ ID NO: 252869 - DNA, 19 bp, Homo sapiens
  siRNA target sequence for SNX9 (NM_016224.3,737-755).
cgctcagcgaggaaacagt

SEQ ID NO: 252870 - DNA, 19 bp, Homo sapiens
  siRNA target sequence for SNX9 (NM_016224.3,776-794).
gaaaattccccttaacaaa

SEQ ID NO: 252871 - DNA, 19 bp, Homo sapiens
  siRNA target sequence for SNX9 (NM_016224.3,813-831).
cctggcacggaacagtatt

SEQ ID NO: 252872 - DNA, 19 bp, Homo sapiens
  siRNA target sequence for SNX9 (NM_016224.3,816-834).
ggcacggaacagtatttgt

SEQ ID NO: 252873 - DNA, 19 bp, Homo sapiens
  siRNA target sequence for SNX9 (NM_016224.3,863-881).
gaaaattcccatcattgtt

SEQ ID NO: 252874 - DNA, 19 bp, Homo sapiens
  siRNA target sequence for SNX9 (NM_016224.3,893-911).
cccaatgtgggtttatcct

SEQ ID NO: 252875 - DNA, 19 bp, Homo sapiens
  siRNA target sequence for SNX9 (NM_016224.3,894-912).
ccaatgtgggtttatccta

SEQ ID NO: 252876 - DNA, 19 bp, Homo sapiens
  siRNA target sequence for SNX9 (NM_016224.3,955-973).
ccaaaatgtatggtctaaa

SEQ ID NO: 252877 - DNA, 19 bp, Homo sapiens
  siRNA target sequence for SNX9 (NM_016224.3,990-1008).
cagctaacacctactaaca

SEQ ID NO: 252878 - DNA, 19 bp, Homo sapiens
  siRNA target sequence for SNX9 (NM_016224.3,999-1017).
cctactaacactaatcgat

SEQ ID NO: 252879 - DNA, 19 bp, Homo sapiens
  siRNA target sequence for SNX9 (NM_016224.3,1009-1027).
ctaatcgatctgtaaacca

SEQ ID NO: 252880 - DNA, 19 bp, Homo sapiens
  siRNA target sequence for SNX9 (NM_016224.3,1037-1055).
gcactttgactggttatat

SEQ ID NO: 252881 - DNA, 19 bp, Homo sapiens
  siRNA target sequence for SNX9 (NM_016224.3,1058-1076).
gcgtctcctggttaagttt

SEQ ID NO: 252882 - DNA, 19 bp, Homo sapiens
  siRNA target sequence for SNX9 (NM_016224.3,1123-1141).
gccgctttgaagaggaatt

SEQ ID NO: 252883 - DNA, 19 bp, Homo sapiens
  siRNA target sequence for SNX9 (NM_016224.3,1124-1142).
ccgctttgaagaggaattt

SEQ ID NO: 252884 - DNA, 19 bp, Homo sapiens
  siRNA target sequence for SNX9 (NM_016224.3,1292-1310).
gctggcgggagtcatgata

SEQ ID NO: 252885 - DNA, 19 bp, Homo sapiens
  siRNA target sequence for SNX9 (NM_016224.3,1293-1311).
ctggcgggagtcatgatat

SEQ ID NO: 252886 - DNA, 19 bp, Homo sapiens
  siRNA target sequence for SNX9 (NM_016224.3,1295-1313).
ggcgggagtcatgatattt

SEQ ID NO: 252887 - DNA, 19 bp, Homo sapiens
  siRNA target sequence for SNX9 (NM_016224.3,1296-1314).
gcgggagtcatgatatttt

SEQ ID NO: 252888 - DNA, 19 bp, Homo sapiens
  siRNA target sequence for SNX9 (NM_016224.3,1333-1351).
cacctgacttggacttagt

SEQ ID NO: 252889 - DNA, 19 bp, Homo sapiens
  siRNA target sequence for SNX9 (NM_016224.3,1338-1356).
gacttggacttagtagaaa

SEQ ID NO: 252890 - DNA, 19 bp, Homo sapiens
  siRNA target sequence for SNX9 (NM_016224.3,1340-1358).
cttggacttagtagaaata

SEQ ID NO: 252891 - DNA, 19 bp, Homo sapiens
  siRNA target sequence for SNX9 (NM_016224.3,1462-1480).
cattacccaaggaatatca

SEQ ID NO: 252892 - DNA, 19 bp, Homo sapiens
  siRNA target sequence for SNX9 (NM_016224.3,1532-1550).
ctatcaaggtgaaacagat

SEQ ID NO: 252893 - DNA, 19 bp, Homo sapiens
  siRNA target sequence for SNX9 (NM_016224.3,1548-1566).
gatctcaatgatgcaataa

SEQ ID NO: 252894 - DNA, 19 bp, Homo sapiens
  siRNA target sequence for SNX9 (NM_016224.3,1567-1585).
cagaagcaggaaagactta

SEQ ID NO: 252895 - DNA, 19 bp, Homo sapiens
  siRNA target sequence for SNX9 (NM_016224.3,1644-1662).
gaatgtaatcacgagtata

SEQ ID NO: 252896 - DNA, 19 bp, Homo sapiens
  siRNA target sequence for SNX9 (NM_016224.3,1736-1754).
caaactagttgcaacaagt

SEQ ID NO: 252897 - DNA, 19 bp, Homo sapiens
  siRNA target sequence for SNX9 (NM_016224.3,1813-1831).
cgttgcaagctgagatgaa

SEQ ID NO: 252898 - DNA, 19 bp, Homo sapiens
  siRNA target sequence for SNX9 (NM_016224.3,1814-1832).
gttgcaagctgagatgaat

SEQ ID NO: 252899 - DNA, 19 bp, Homo sapiens
  siRNA target sequence for SNX9 (NM_016224.3,1841-1859).
cagtaaccggatctatgat

SEQ ID NO: 252900 - DNA, 19 bp, Homo sapiens
  siRNA target sequence for SNX9 (NM_016224.3,1843-1861).
gtaaccggatctatgatta

SEQ ID NO: 252901 - DNA, 19 bp, Homo sapiens
  siRNA target sequence for SNX9 (NM_016224.3,1848-1866).
cggatctatgattacaaca

SEQ ID NO: 252902 - DNA, 19 bp, Homo sapiens
  siRNA target sequence for SNX9 (NM_016224.3,1898-1916).
gcaattttacgaaacgatt

SEQ ID NO: 252903 - DNA, 19 bp, Homo sapiens
  siRNA target sequence for STAM (NM_003473.2,239-257).
ccttcgatcaggatgttga

SEQ ID NO: 252904 - DNA, 19 bp, Homo sapiens
  siRNA target sequence for STAM (NM_003473.2,286-304).
gaggactggggcctcattt

SEQ ID NO: 252905 - DNA, 19 bp, Homo sapiens
  siRNA target sequence for STAM (NM_003473.2,291-309).
ctggggcctcattttggat

SEQ ID NO: 252906 - DNA, 19 bp, Homo sapiens
  siRNA target sequence for STAM (NM_003473.2,293-311).
ggggcctcattttggatat

SEQ ID NO: 252907 - DNA, 19 bp, Homo sapiens
  siRNA target sequence for STAM (NM_003473.2,295-313).
ggcctcattttggatatct

SEQ ID NO: 252908 - DNA, 19 bp, Homo sapiens
  siRNA target sequence for STAM (NM_003473.2,306-324).
ggatatctgtgataaagtt

SEQ ID NO: 252909 - DNA, 19 bp, Homo sapiens
  siRNA target sequence for STAM (NM_003473.2,334-352).
cgcactggacctaaggatt

SEQ ID NO: 252910 - DNA, 19 bp, Homo sapiens
  siRNA target sequence for STAM (NM_003473.2,348-366).
ggattgtcttcggtctatt

SEQ ID NO: 252911 - DNA, 19 bp, Homo sapiens
  siRNA target sequence for STAM (NM_003473.2,349-367).
gattgtcttcggtctatta

SEQ ID NO: 252912 - DNA, 19 bp, Homo sapiens
  siRNA target sequence for STAM (NM_003473.2,355-373).
cttcggtctattatgagaa

SEQ ID NO: 252913 - DNA, 19 bp, Homo sapiens
  siRNA target sequence for STAM (NM_003473.2,418-436).
cttctaggagcatgtgtat

SEQ ID NO: 252914 - DNA, 19 bp, Homo sapiens
  siRNA target sequence for STAM (NM_003473.2,421-439).
ctaggagcatgtgtatcaa

SEQ ID NO: 252915 - DNA, 19 bp, Homo sapiens
  siRNA target sequence for STAM (NM_003473.2,424-442).
ggagcatgtgtatcaaact

SEQ ID NO: 252916 - DNA, 19 bp, Homo sapiens
  siRNA target sequence for STAM (NM_003473.2,493-511).
gtaagcaacgtattaaata

SEQ ID NO: 252917 - DNA, 19 bp, Homo sapiens
  siRNA target sequence for STAM (NM_003473.2,580-598).
gatccacagcttagtctaa

SEQ ID NO: 252918 - DNA, 19 bp, Homo sapiens
  siRNA target sequence for STAM (NM_003473.2,604-622).
gcaatgattaagaacctta

SEQ ID NO: 252919 - DNA, 19 bp, Homo sapiens
  siRNA target sequence for STAM (NM_003473.2,605-623).
caatgattaagaaccttaa

SEQ ID NO: 252920 - DNA, 19 bp, Homo sapiens
  siRNA target sequence for STAM (NM_003473.2,709-727).
ggtactgtggctaacaaaa

SEQ ID NO: 252921 - DNA, 19 bp, Homo sapiens
  siRNA target sequence for STAM (NM_003473.2,710-728).
gtactgtggctaacaaaaa

SEQ ID NO: 252922 - DNA, 19 bp, Homo sapiens
  siRNA target sequence for STAM (NM_003473.2,818-836).
catccagtctcttaactaa

SEQ ID NO: 252923 - DNA, 19 bp, Homo sapiens
  siRNA target sequence for STAM (NM_003473.2,852-870).
ccgaaaagttcgtgctata

SEQ ID NO: 252924 - DNA, 19 bp, Homo sapiens
  siRNA target sequence for STAM (NM_003473.2,853-871).
cgaaaagttcgtgctatat

SEQ ID NO: 252925 - DNA, 19 bp, Homo sapiens
  siRNA target sequence for STAM (NM_003473.2,859-877).
gttcgtgctatatatgact

SEQ ID NO: 252926 - DNA, 19 bp, Homo sapiens
  siRNA target sequence for STAM (NM_003473.2,1048-1066).
gagaagaagacggtacaat

SEQ ID NO: 252927 - DNA, 19 bp, Homo sapiens
  siRNA target sequence for STAM (NM_003473.2,1050-1068).
gaagaagacggtacaattt

SEQ ID NO: 252928 - DNA, 19 bp, Homo sapiens
  siRNA target sequence for STAM (NM_003473.2,1104-1122).
gccggaaccagcctttatt

SEQ ID NO: 252929 - DNA, 19 bp, Homo sapiens
  siRNA target sequence for STAM (NM_003473.2,1106-1124).
cggaaccagcctttattga

SEQ ID NO: 252930 - DNA, 19 bp, Homo sapiens
  siRNA target sequence for STAM (NM_003473.2,1166-1184).
cagaccccagtgatgatca

SEQ ID NO: 252931 - DNA, 19 bp, Homo sapiens
  siRNA target sequence for STAM (NM_003473.2,1227-1245).
ccagatgggacctctcatt

SEQ ID NO: 252932 - DNA, 19 bp, Homo sapiens
  siRNA target sequence for STAM (NM_003473.2,1230-1248).
gatgggacctctcattgat

SEQ ID NO: 252933 - DNA, 19 bp, Homo sapiens
  siRNA target sequence for STAM (NM_003473.2,1233-1251).
gggacctctcattgatgaa

SEQ ID NO: 252934 - DNA, 19 bp, Homo sapiens
  siRNA target sequence for STAM (NM_003473.2,1308-1326).
gatggaggccctttcctta

SEQ ID NO: 252935 - DNA, 19 bp, Homo sapiens
  siRNA target sequence for STAM (NM_003473.2,1341-1359).
gaacgaagatccgatgtat

SEQ ID NO: 252936 - DNA, 19 bp, Homo sapiens
  siRNA target sequence for STAM (NM_003473.2,1345-1363).
gaagatccgatgtattcca

SEQ ID NO: 252937 - DNA, 19 bp, Homo sapiens
  siRNA target sequence for STAM (NM_003473.2,1585-1603).
caggccgcttacccaaata

SEQ ID NO: 252938 - DNA, 19 bp, Homo sapiens
  siRNA target sequence for STAM (NM_003473.2,1587-1605).
ggccgcttacccaaataca

SEQ ID NO: 252939 - DNA, 19 bp, Homo sapiens
  siRNA target sequence for STAM (NM_003473.2,1588-1606).
gccgcttacccaaatacaa

SEQ ID NO: 252940 - DNA, 19 bp, Homo sapiens
  siRNA target sequence for STAM (NM_003473.2,1589-1607).
ccgcttacccaaatacaat

SEQ ID NO: 252941 - DNA, 19 bp, Homo sapiens
  siRNA target sequence for STAM (NM_003473.2,1637-1655).
ccagccaggcgccagtata

SEQ ID NO: 252942 - DNA, 19 bp, Homo sapiens
  siRNA target sequence for STAM (NM_003473.2,1638-1656).
cagccaggcgccagtatat

SEQ ID NO: 252943 - DNA, 19 bp, Homo sapiens
  siRNA target sequence for STAM (NM_003473.2,1641-1659).
ccaggcgccagtatatagt

SEQ ID NO: 252944 - DNA, 19 bp, Homo sapiens
  siRNA target sequence for STAM (NM_003473.2,1731-1749).
gccccaggtgccaaactat

SEQ ID NO: 252945 - DNA, 19 bp, Homo sapiens
  siRNA target sequence for STAM (NM_003473.2,1737-1755).
ggtgccaaactataactta

SEQ ID NO: 252946 - DNA, 19 bp, Homo sapiens
  siRNA target sequence for STAM (NM_003473.2,1741-1759).
ccaaactataacttaacat

SEQ ID NO: 252947 - DNA, 19 bp, Homo sapiens
  siRNA target sequence for TP53BP2 (NM_005426.1,794-812).
ctcgccagcagcaacagat

SEQ ID NO: 252948 - DNA, 19 bp, Homo sapiens
  siRNA target sequence for TP53BP2 (NM_005426.1,797-815).
gccagcagcaacagattga

SEQ ID NO: 252949 - DNA, 19 bp, Homo sapiens
  siRNA target sequence for TP53BP2 (NM_005426.1,839-857).
ctaaggaacagcgcttaaa

SEQ ID NO: 252950 - DNA, 19 bp, Homo sapiens
  siRNA target sequence for TP53BP2 (NM_005426.1,849-867).
gcgcttaaagtttttgaaa

SEQ ID NO: 252951 - DNA, 19 bp, Homo sapiens
  siRNA target sequence for TP53BP2 (NM_005426.1,898-916).
gctgagcaggagaaactta

SEQ ID NO: 252952 - DNA, 19 bp, Homo sapiens
  siRNA target sequence for TP53BP2 (NM_005426.1,943-961).
caggaagctaagctaaaaa

SEQ ID NO: 252953 - DNA, 19 bp, Homo sapiens
  siRNA target sequence for TP53BP2 (NM_005426.1,1171-1189).
gagcttgatcgcctctata

SEQ ID NO: 252954 - DNA, 19 bp, Homo sapiens
  siRNA target sequence for TP53BP2 (NM_005426.1,1243-1261).
caacagagggagtgtttga

SEQ ID NO: 252955 - DNA, 19 bp, Homo sapiens
  siRNA target sequence for TP53BP2 (NM_005426.1,1260-1278).
gaataagcgtaattcagaa

SEQ ID NO: 252956 - DNA, 19 bp, Homo sapiens
  siRNA target sequence for TP53BP2 (NM_005426.1,1287-1305).
catggataagcgtgttaat

SEQ ID NO: 252957 - DNA, 19 bp, Homo sapiens
  siRNA target sequence for TP53BP2 (NM_005426.1,1315-1333).
gaccggctgtggaagaaga

SEQ ID NO: 252958 - DNA, 19 bp, Homo sapiens
  siRNA target sequence for TP53BP2 (NM_005426.1,1421-1439).
ctgcagtaggtccctatat

SEQ ID NO: 252959 - DNA, 19 bp, Homo sapiens
  siRNA target sequence for TP53BP2 (NM_005426.1,1424-1442).
cagtaggtccctatatcca

SEQ ID NO: 252960 - DNA, 19 bp, Homo sapiens
  siRNA target sequence for TP53BP2 (NM_005426.1,1573-1591).
ggggctgcttcacaaacta

SEQ ID NO: 252961 - DNA, 19 bp, Homo sapiens
  siRNA target sequence for TP53BP2 (NM_005426.1,1575-1593).
ggctgcttcacaaactaaa

SEQ ID NO: 252962 - DNA, 19 bp, Homo sapiens
  siRNA target sequence for TP53BP2 (NM_005426.1,1656-1674).
ccaaggctctgcttctgta

SEQ ID NO: 252963 - DNA, 19 bp, Homo sapiens
  siRNA target sequence for TP53BP2 (NM_005426.1,1747-1765).
gtgcgtccgttctcaatgt

SEQ ID NO: 252964 - DNA, 19 bp, Homo sapiens
  siRNA target sequence for TP53BP2 (NM_005426.1,1749-1767).
gcgtccgttctcaatgttt

SEQ ID NO: 252965 - DNA, 19 bp, Homo sapiens
  siRNA target sequence for TP53BP2 (NM_005426.1,1751-1769).
gtccgttctcaatgtttga

SEQ ID NO: 252966 - DNA, 19 bp, Homo sapiens
  siRNA target sequence for TP53BP2 (NM_005426.1,1785-1803).
caatgccccaccttccttt

SEQ ID NO: 252967 - DNA, 19 bp, Homo sapiens
  siRNA target sequence for TP53BP2 (NM_005426.1,1846-1864).
gatgctcaggttgcaaata

SEQ ID NO: 252968 - DNA, 19 bp, Homo sapiens
  siRNA target sequence for TP53BP2 (NM_005426.1,1922-1940).
cttattttggacaaactaa

SEQ ID NO: 252969 - DNA, 19 bp, Homo sapiens
  siRNA target sequence for TP53BP2 (NM_005426.1,2001-2019).
gtccatgggaactaaacca

SEQ ID NO: 252970 - DNA, 19 bp, Homo sapiens
  siRNA target sequence for TP53BP2 (NM_005426.1,2193-2211).
gaccgtggcagcaagttca

SEQ ID NO: 252971 - DNA, 19 bp, Homo sapiens
  siRNA target sequence for TP53BP2 (NM_005426.1,2195-2213).
ccgtggcagcaagttcaat

SEQ ID NO: 252972 - DNA, 19 bp, Homo sapiens
  siRNA target sequence for TP53BP2 (NM_005426.1,2197-2215).
gtggcagcaagttcaatat

SEQ ID NO: 252973 - DNA, 19 bp, Homo sapiens
  siRNA target sequence for TP53BP2 (NM_005426.1,2203-2221).
gcaagttcaatatattcca

SEQ ID NO: 252974 - DNA, 19 bp, Homo sapiens
  siRNA target sequence for TP53BP2 (NM_005426.1,2295-2313).
cagagggccacacttttca

SEQ ID NO: 252975 - DNA, 19 bp, Homo sapiens
  siRNA target sequence for TP53BP2 (NM_005426.1,2368-2386).
gagaacatttattccaata

SEQ ID NO: 252976 - DNA, 19 bp, Homo sapiens
  siRNA target sequence for TP53BP2 (NM_005426.1,2448-2466).
ccatgaaaacgaaagaatt

SEQ ID NO: 252977 - DNA, 19 bp, Homo sapiens
  siRNA target sequence for TP53BP2 (NM_005426.1,2472-2490).
gccactcagcccaactaaa

SEQ ID NO: 252978 - DNA, 19 bp, Homo sapiens
  siRNA target sequence for TP53BP2 (NM_005426.1,2473-2491).
ccactcagcccaactaaat

SEQ ID NO: 252979 - DNA, 19 bp, Homo sapiens
  siRNA target sequence for TP53BP2 (NM_005426.1,2474-2492).
cactcagcccaactaaatt

SEQ ID NO: 252980 - DNA, 19 bp, Homo sapiens
  siRNA target sequence for TP53BP2 (NM_005426.1,2486-2504).
ctaaattactgcctttctt

SEQ ID NO: 252981 - DNA, 19 bp, Homo sapiens
  siRNA target sequence for TP53BP2 (NM_005426.1,2545-2563).
gccttacgaaagaaactgt

SEQ ID NO: 252982 - DNA, 19 bp, Homo sapiens
  siRNA target sequence for TP53BP2 (NM_005426.1,2586-2604).
gaaacgtagttctattaca

SEQ ID NO: 252983 - DNA, 19 bp, Homo sapiens
  siRNA target sequence for TP53BP2 (NM_005426.1,2614-2632).
ggtcctaatgggccaaata

SEQ ID NO: 252984 - DNA, 19 bp, Homo sapiens
  siRNA target sequence for TP53BP2 (NM_005426.1,2615-2633).
gtcctaatgggccaaatat

SEQ ID NO: 252985 - DNA, 19 bp, Homo sapiens
  siRNA target sequence for TP53BP2 (NM_005426.1,2748-2766).
ccagaatccatatttacat

SEQ ID NO: 252986 - DNA, 19 bp, Homo sapiens
  siRNA target sequence for TP53BP2 (NM_005426.1,2909-2927).
gcccaaatctccagaataa

SEQ ID NO: 252987 - DNA, 19 bp, Homo sapiens
  siRNA target sequence for TP53BP2 (NM_005426.1,3102-3120).
gacaaacttgcgtaaaact

SEQ ID NO: 252988 - DNA, 19 bp, Homo sapiens
  siRNA target sequence for TP53BP2 (NM_005426.1,3142-3160).
ggaatgagggtgaaattca

SEQ ID NO: 252989 - DNA, 19 bp, Homo sapiens
  siRNA target sequence for TP53BP2 (NM_005426.1,3296-3314).
gccacacagaaatcgttaa

SEQ ID NO: 252990 - DNA, 19 bp, Homo sapiens
  siRNA target sequence for TP53BP2 (NM_005426.1,3298-3316).
cacacagaaatcgttaagt

SEQ ID NO: 252991 - DNA, 19 bp, Homo sapiens
  siRNA target sequence for TP53BP2 (NM_005426.1,3321-3339).
ggtacagtttggtgtaaat

SEQ ID NO: 252992 - DNA, 19 bp, Homo sapiens
  siRNA target sequence for TP53BP2 (NM_005426.1,3376-3394).
cattgtgctgcctcatgta

SEQ ID NO: 252993 - DNA, 19 bp, Homo sapiens
  siRNA target sequence for TP53BP2 (NM_005426.1,3380-3398).
gtgctgcctcatgtaacaa

SEQ ID NO: 252994 - DNA, 19 bp, Homo sapiens
  siRNA target sequence for TP53BP2 (NM_005426.1,3399-3417).
cgtccaagtgtgtaagttt

SEQ ID NO: 252995 - DNA, 19 bp, Homo sapiens
  siRNA target sequence for TP53BP2 (NM_005426.1,3400-3418).
gtccaagtgtgtaagtttt

SEQ ID NO: 252996 - DNA, 19 bp, Homo sapiens
  siRNA target sequence for TP53BP2 (NM_005426.1,3476-3494).
cagataagtgcgaggaaat

SEQ ID NO: 252997 - DNA, 19 bp, Homo sapiens
  siRNA target sequence for TP53BP2 (NM_005426.1,3507-3525).
cactcagtgctcccaattt

SEQ ID NO: 252998 - DNA, 19 bp, Homo sapiens
  siRNA target sequence for TP53BP2 (NM_005426.1,3509-3527).
ctcagtgctcccaatttct

SEQ ID NO: 252999 - DNA, 19 bp, Homo sapiens
  siRNA target sequence for TP53BP2 (NM_005426.1,3516-3534).
ctcccaatttctttatgga

SEQ ID NO: 253000 - DNA, 19 bp, Homo sapiens
  siRNA target sequence for TP53BP2 (NM_005426.1,3543-3561).
gaagatgggcataatgaat

SEQ ID NO: 253001 - DNA, 19 bp, Homo sapiens
  siRNA target sequence for TP53BP2 (NM_005426.1,3549-3567).
gggcataatgaataaagga

SEQ ID NO: 253002 - DNA, 19 bp, Homo sapiens
  siRNA target sequence for TP53BP2 (NM_005426.1,3585-3603).
ggattatgaacctcagaat

SEQ ID NO: 253003 - DNA, 19 bp, Homo sapiens
  siRNA target sequence for TP53BP2 (NM_005426.1,3658-3676).
gacgaagatgaaatcgaat

SEQ ID NO: 253004 - DNA, 19 bp, Homo sapiens
  siRNA target sequence for TP53BP2 (NM_005426.1,3707-3725).
gatatgttccacgtaactt

SEQ ID NO: 253005 - DNA, 19 bp, Homo sapiens
  siRNA target sequence for PAG (NM_018440.2,299-317).
gttcagccgttcagttact

SEQ ID NO: 253006 - DNA, 19 bp, Homo sapiens
  siRNA target sequence for PAG (NM_018440.2,403-421).
cctgcatgcagcattacga

SEQ ID NO: 253007 - DNA, 19 bp, Homo sapiens
  siRNA target sequence for PAG (NM_018440.2,635-653).
ggactgcttgtatgaaact

SEQ ID NO: 253008 - DNA, 19 bp, Homo sapiens
  siRNA target sequence for PAG (NM_018440.2,708-726).
ggcaaggcaaaatctactt

SEQ ID NO: 253009 - DNA, 19 bp, Homo sapiens
  siRNA target sequence for PAG (NM_018440.2,786-804).
gcctcggtggacagaaaca

SEQ ID NO: 253010 - DNA, 19 bp, Homo sapiens
  siRNA target sequence for PAG (NM_018440.2,788-806).
ctcggtggacagaaacaaa

SEQ ID NO: 253011 - DNA, 19 bp, Homo sapiens
  siRNA target sequence for PAG (NM_018440.2,811-829).
gtcgtcaaagtgttaatgt

SEQ ID NO: 253012 - DNA, 19 bp, Homo sapiens
  siRNA target sequence for PAG (NM_018440.2,820-838).
gtgttaatgtagagagtat

SEQ ID NO: 253013 - DNA, 19 bp, Homo sapiens
  siRNA target sequence for PAG (NM_018440.2,833-851).
gagtatccttggaaattca

SEQ ID NO: 253014 - DNA, 19 bp, Homo sapiens
  siRNA target sequence for PAG (NM_018440.2,839-857).
ccttggaaattcatgtgat

SEQ ID NO: 253015 - DNA, 19 bp, Homo sapiens
  siRNA target sequence for PAG (NM_018440.2,877-895).
cacctgtccctgttaagct

SEQ ID NO: 253016 - DNA, 19 bp, Homo sapiens
  siRNA target sequence for PAG (NM_018440.2,957-975).
gacacgaccagtgaaacta

SEQ ID NO: 253017 - DNA, 19 bp, Homo sapiens
  siRNA target sequence for PAG (NM_018440.2,961-979).
cgaccagtgaaactaacaa

SEQ ID NO: 253018 - DNA, 19 bp, Homo sapiens
  siRNA target sequence for PAG (NM_018440.2,1019-1037).
ccccactctcacagaagaa

SEQ ID NO: 253019 - DNA, 19 bp, Homo sapiens
  siRNA target sequence for PAG (NM_018440.2,1038-1056).
gagatctcagctatgtact

SEQ ID NO: 253020 - DNA, 19 bp, Homo sapiens
  siRNA target sequence for PAG (NM_018440.2,1074-1092).
ggacagttagtgaataaat

SEQ ID NO: 253021 - DNA, 19 bp, Homo sapiens
  siRNA target sequence for PAG (NM_018440.2,1093-1111).
cggggcagtcgcttacagt

SEQ ID NO: 253022 - DNA, 19 bp, Homo sapiens
  siRNA target sequence for PAG (NM_018440.2,1094-1112).
ggggcagtcgcttacagtt

SEQ ID NO: 253023 - DNA, 19 bp, Homo sapiens
  siRNA target sequence for PAG (NM_018440.2,1154-1172).
gtcaccctcctcctgtaat

SEQ ID NO: 253024 - DNA, 19 bp, Homo sapiens
  siRNA target sequence for PAG (NM_018440.2,1162-1180).
cctcctgtaatgatctcta

SEQ ID NO: 253025 - DNA, 19 bp, Homo sapiens
  siRNA target sequence for PAG (NM_018440.2,1163-1181).
ctcctgtaatgatctctat

SEQ ID NO: 253026 - DNA, 19 bp, Homo sapiens
  siRNA target sequence for PAG (NM_018440.2,1349-1367).
cgactacgagagcataagt

SEQ ID NO: 253027 - DNA, 19 bp, Homo sapiens
  siRNA target sequence for SHC1 (NM_003029.3,196-214).
cgccacgggagctttgtca

SEQ ID NO: 253028 - DNA, 19 bp, Homo sapiens
  siRNA target sequence for SHC1 (NM_003029.3,199-217).
cacgggagctttgtcaata

SEQ ID NO: 253029 - DNA, 19 bp, Homo sapiens
  siRNA target sequence for SHC1 (NM_003029.3,523-541).
gccgcagactgcaaacaga

SEQ ID NO: 253030 - DNA, 19 bp, Homo sapiens
  siRNA target sequence for SHC1 (NM_003029.3,524-542).
ccgcagactgcaaacagat

SEQ ID NO: 253031 - DNA, 19 bp, Homo sapiens
  siRNA target sequence for SHC1 (NM_003029.3,553-571).
caccacatgcaatctatct

SEQ ID NO: 253032 - DNA, 19 bp, Homo sapiens
  siRNA target sequence for SHC1 (NM_003029.3,593-611).
cggacacagccgagtatgt

SEQ ID NO: 253033 - DNA, 19 bp, Homo sapiens
  siRNA target sequence for SHC1 (NM_003029.3,603-621).
cgagtatgtcgcctatgtt

SEQ ID NO: 253034 - DNA, 19 bp, Homo sapiens
  siRNA target sequence for SHC1 (NM_003029.3,623-641).
ccaaagaccctgtgaatca

SEQ ID NO: 253035 - DNA, 19 bp, Homo sapiens
  siRNA target sequence for SHC1 (NM_003029.3,711-729).
cttcgagttgcgcttcaaa

SEQ ID NO: 253036 - DNA, 19 bp, Homo sapiens
  siRNA target sequence for SHC1 (NM_003029.3,714-732).
cgagttgcgcttcaaacaa

SEQ ID NO: 253037 - DNA, 19 bp, Homo sapiens
  siRNA target sequence for SHC1 (NM_003029.3,715-733).
gagttgcgcttcaaacaat

SEQ ID NO: 253038 - DNA, 19 bp, Homo sapiens
  siRNA target sequence for SHC1 (NM_003029.3,823-841).
cctgaccatcagtactata

SEQ ID NO: 253039 - DNA, 19 bp, Homo sapiens
  siRNA target sequence for SHC1 (NM_003029.3,824-842).
ctgaccatcagtactataa

SEQ ID NO: 253040 - DNA, 19 bp, Homo sapiens
  siRNA target sequence for SHC1 (NM_003029.3,1000-1018).
ccagaagtccgcaaacaga

SEQ ID NO: 253041 - DNA, 19 bp, Homo sapiens
  siRNA target sequence for SHC1 (NM_003029.3,1001-1019).
cagaagtccgcaaacagat

SEQ ID NO: 253042 - DNA, 19 bp, Homo sapiens
  siRNA target sequence for SHC1 (NM_003029.3,1060-1078).
gatgatccctcctatgtca

SEQ ID NO: 253043 - DNA, 19 bp, Homo sapiens
  siRNA target sequence for SHC1 (NM_003029.3,1371-1389).
gagtgggcagcctaagcat

SEQ ID NO: 253044 - DNA, 19 bp, Homo sapiens
  siRNA target sequence for SHC1 (NM_003029.3,1373-1391).
gtgggcagcctaagcattt

SEQ ID NO: 253045 - DNA, 19 bp, Homo sapiens
  siRNA target sequence for SHC1 (NM_003029.3,1376-1394).
ggcagcctaagcatttgct

SEQ ID NO: 253046 - DNA, 19 bp, Homo sapiens
  siRNA target sequence for SHC1 (NM_003029.3,1377-1395).
gcagcctaagcatttgcta

SEQ ID NO: 253047 - DNA, 19 bp, Homo sapiens
  siRNA target sequence for SHC1 (NM_003029.3,1428-1446).
ggatcaccgctttgaaagt

SEQ ID NO: 253048 - DNA, 19 bp, Homo sapiens
  siRNA target sequence for SHC1 (NM_003029.3,1463-1481).
gctaccacatggacaatca

SEQ ID NO: 253049 - DNA, 19 bp, Homo sapiens
  siRNA target sequence for SHC1 (NM_003029.3,1525-1543).
cctgtggagcggaaactgt

SEQ ID NO: 253050 - DNA, 19 bp, Homo sapiens
  siRNA target sequence for TRIM (NM_016388.1,199-217).
gggcttggctttggttata

SEQ ID NO: 253051 - DNA, 19 bp, Homo sapiens
  siRNA target sequence for TRIM (NM_016388.1,212-230).
gttatatcactgatcttca

SEQ ID NO: 253052 - DNA, 19 bp, Homo sapiens
  siRNA target sequence for TRIM (NM_016388.1,297-315).
gggttgatgagtattatat

SEQ ID NO: 253053 - DNA, 19 bp, Homo sapiens
  siRNA target sequence for TRIM (NM_016388.1,298-316).
ggttgatgagtattatatt

SEQ ID NO: 253054 - DNA, 19 bp, Homo sapiens
  siRNA target sequence for TRIM (NM_016388.1,320-338).
gacacaccaatttatggta

SEQ ID NO: 253055 - DNA, 19 bp, Homo sapiens
  siRNA target sequence for TRIM (NM_016388.1,324-342).
caccaatttatggtaactt

SEQ ID NO: 253056 - DNA, 19 bp, Homo sapiens
  siRNA target sequence for TRIM (NM_016388.1,391-409).
gaaagcccgaccagagaaa

SEQ ID NO: 253057 - DNA, 19 bp, Homo sapiens
  siRNA target sequence for TRIM (NM_016388.1,396-414).
cccgaccagagaaatctgt

SEQ ID NO: 253058 - DNA, 19 bp, Homo sapiens
  siRNA target sequence for TRIM (NM_016388.1,397-415).
ccgaccagagaaatctgta

SEQ ID NO: 253059 - DNA, 19 bp, Homo sapiens
  siRNA target sequence for TRIM (NM_016388.1,469-487).
gtgctacgcctcacttgat

SEQ ID NO: 253060 - DNA, 19 bp, Homo sapiens
  siRNA target sequence for TRIM (NM_016388.1,517-535).
caggaaacagaatactcat

SEQ ID NO: 253061 - DNA, 19 bp, Homo sapiens
  siRNA target sequence for TRIM (NM_016388.1,575-593).
gatgccagcgtttctaaga

SEQ ID NO: 253062 - DNA, 19 bp, Homo sapiens
  siRNA target sequence for TRIM (NM_016388.1,588-606).
ctaagaccaccttagtaga

SEQ ID NO: 253063 - DNA, 19 bp, Homo sapiens
  siRNA target sequence for AKAP12 (NM_005100.2,389-407).
gcgtagctgagcaagatga

SEQ ID NO: 253064 - DNA, 19 bp, Homo sapiens
  siRNA target sequence for AKAP12 (NM_005100.2,417-435).
ccaggagggtgacctaaat

SEQ ID NO: 253065 - DNA, 19 bp, Homo sapiens
  siRNA target sequence for AKAP12 (NM_005100.2,537-555).
caaaagagactccgataaa

SEQ ID NO: 253066 - DNA, 19 bp, Homo sapiens
  siRNA target sequence for AKAP12 (NM_005100.2,542-560).
gagactccgataaagagat

SEQ ID NO: 253067 - DNA, 19 bp, Homo sapiens
  siRNA target sequence for AKAP12 (NM_005100.2,566-584).
ctaagtcagcggttgttca

SEQ ID NO: 253068 - DNA, 19 bp, Homo sapiens
  siRNA target sequence for AKAP12 (NM_005100.2,606-624).
ggaggagacacccgaaata

SEQ ID NO: 253069 - DNA, 19 bp, Homo sapiens
  siRNA target sequence for AKAP12 (NM_005100.2,607-625).
gaggagacacccgaaataa

SEQ ID NO: 253070 - DNA, 19 bp, Homo sapiens
  siRNA target sequence for AKAP12 (NM_005100.2,617-635).
ccgaaataatcgaacagat

SEQ ID NO: 253071 - DNA, 19 bp, Homo sapiens
  siRNA target sequence for AKAP12 (NM_005100.2,618-636).
cgaaataatcgaacagatt

SEQ ID NO: 253072 - DNA, 19 bp, Homo sapiens
  siRNA target sequence for AKAP12 (NM_005100.2,627-645).
cgaacagattccttcttca

SEQ ID NO: 253073 - DNA, 19 bp, Homo sapiens
  siRNA target sequence for AKAP12 (NM_005100.2,679-697).
gagtcccaggctaatgata

SEQ ID NO: 253074 - DNA, 19 bp, Homo sapiens
  siRNA target sequence for AKAP12 (NM_005100.2,681-699).
gtcccaggctaatgatatt

SEQ ID NO: 253075 - DNA, 19 bp, Homo sapiens
  siRNA target sequence for AKAP12 (NM_005100.2,684-702).
ccaggctaatgatattgga

SEQ ID NO: 253076 - DNA, 19 bp, Homo sapiens
  siRNA target sequence for AKAP12 (NM_005100.2,685-703).
caggctaatgatattggat

SEQ ID NO: 253077 - DNA, 19 bp, Homo sapiens
  siRNA target sequence for AKAP12 (NM_005100.2,687-705).
ggctaatgatattggattt

SEQ ID NO: 253078 - DNA, 19 bp, Homo sapiens
  siRNA target sequence for AKAP12 (NM_005100.2,688-706).
gctaatgatattggattta

SEQ ID NO: 253079 - DNA, 19 bp, Homo sapiens
  siRNA target sequence for AKAP12 (NM_005100.2,689-707).
ctaatgatattggatttaa

SEQ ID NO: 253080 - DNA, 19 bp, Homo sapiens
  siRNA target sequence for AKAP12 (NM_005100.2,874-892).
gaaagcgaacccaaacaat

SEQ ID NO: 253081 - DNA, 19 bp, Homo sapiens
  siRNA target sequence for AKAP12 (NM_005100.2,879-897).
cgaacccaaacaatctaca

SEQ ID NO: 253082 - DNA, 19 bp, Homo sapiens
  siRNA target sequence for AKAP12 (NM_005100.2,1382-1400).
cgttggcgacagaagtgtt

SEQ ID NO: 253083 - DNA, 19 bp, Homo sapiens
  siRNA target sequence for AKAP12 (NM_005100.2,1383-1401).
gttggcgacagaagtgttt

SEQ ID NO: 253084 - DNA, 19 bp, Homo sapiens
  siRNA target sequence for AKAP12 (NM_005100.2,1388-1406).
cgacagaagtgtttgatga

SEQ ID NO: 253085 - DNA, 19 bp, Homo sapiens
  siRNA target sequence for AKAP12 (NM_005100.2,1585-1603).
ctcaaagaaacgtgtgttt

SEQ ID NO: 253086 - DNA, 19 bp, Homo sapiens
  siRNA target sequence for AKAP12 (NM_005100.2,1730-1748).
gtccactaaagaagctttt

SEQ ID NO: 253087 - DNA, 19 bp, Homo sapiens
  siRNA target sequence for AKAP12 (NM_005100.2,1732-1750).
ccactaaagaagcttttta

SEQ ID NO: 253088 - DNA, 19 bp, Homo sapiens
  siRNA target sequence for AKAP12 (NM_005100.2,1755-1773).
cactggcttaaaaaagctt

SEQ ID NO: 253089 - DNA, 19 bp, Homo sapiens
  siRNA target sequence for AKAP12 (NM_005100.2,2043-2061).
gcccaagaagcgtgttaga

SEQ ID NO: 253090 - DNA, 19 bp, Homo sapiens
  siRNA target sequence for AKAP12 (NM_005100.2,2062-2080).
cggccttcggaaagtgata

SEQ ID NO: 253091 - DNA, 19 bp, Homo sapiens
  siRNA target sequence for AKAP12 (NM_005100.2,2180-2198).
caaagccggaagaaccaaa

SEQ ID NO: 253092 - DNA, 19 bp, Homo sapiens
  siRNA target sequence for AKAP12 (NM_005100.2,2205-2223).
ggtggatacctcagtatct

SEQ ID NO: 253093 - DNA, 19 bp, Homo sapiens
  siRNA target sequence for AKAP12 (NM_005100.2,2225-2243).
gggaagctttaatttgtgt

SEQ ID NO: 253094 - DNA, 19 bp, Homo sapiens
  siRNA target sequence for AKAP12 (NM_005100.2,2242-2260).
gtgggatcatccaagaaaa

SEQ ID NO: 253095 - DNA, 19 bp, Homo sapiens
  siRNA target sequence for AKAP12 (NM_005100.2,2480-2498).
ggttagtcacgccaagaaa

SEQ ID NO: 253096 - DNA, 19 bp, Homo sapiens
  siRNA target sequence for AKAP12 (NM_005100.2,2481-2499).
gttagtcacgccaagaaaa

SEQ ID NO: 253097 - DNA, 19 bp, Homo sapiens
  siRNA target sequence for AKAP12 (NM_005100.2,2578-2596).
gaacccggtaaagaagaat

SEQ ID NO: 253098 - DNA, 19 bp, Homo sapiens
  siRNA target sequence for AKAP12 (NM_005100.2,2600-2618).
gggtctcaatcaagaagtt

SEQ ID NO: 253099 - DNA, 19 bp, Homo sapiens
  siRNA target sequence for AKAP12 (NM_005100.2,2601-2619).
ggtctcaatcaagaagttt

SEQ ID NO: 253100 - DNA, 19 bp, Homo sapiens
  siRNA target sequence for AKAP12 (NM_005100.2,2727-2745).
ggtccctctgtctgagtat

SEQ ID NO: 253101 - DNA, 19 bp, Homo sapiens
  siRNA target sequence for AKAP12 (NM_005100.2,2730-2748).
ccctctgtctgagtatgat

SEQ ID NO: 253102 - DNA, 19 bp, Homo sapiens
  siRNA target sequence for AKAP12 (NM_005100.2,2843-2861).
gcgagagtcaggttcatat

SEQ ID NO: 253103 - DNA, 19 bp, Homo sapiens
  siRNA target sequence for AKAP12 (NM_005100.2,2888-2906).
cgagggcagctaccattat

SEQ ID NO: 253104 - DNA, 19 bp, Homo sapiens
  siRNA target sequence for AKAP12 (NM_005100.2,2894-2912).
cagctaccattattgaaga

SEQ ID NO: 253105 - DNA, 19 bp, Homo sapiens
  siRNA target sequence for AKAP12 (NM_005100.2,2968-2986).
gctgaagccgcactgttaa

SEQ ID NO: 253106 - DNA, 19 bp, Homo sapiens
  siRNA target sequence for AKAP12 (NM_005100.2,3074-3092).
gcgacacggtcgttagtga

SEQ ID NO: 253107 - DNA, 19 bp, Homo sapiens
  siRNA target sequence for AKAP12 (NM_005100.2,3085-3103).
gttagtgaggcggaattga

SEQ ID NO: 253108 - DNA, 19 bp, Homo sapiens
  siRNA target sequence for AKAP12 (NM_005100.2,3269-3287).
gtggcgtacctgacataga

SEQ ID NO: 253109 - DNA, 19 bp, Homo sapiens
  siRNA target sequence for AKAP12 (NM_005100.2,3272-3290).
gcgtacctgacatagaaga

SEQ ID NO: 253110 - DNA, 19 bp, Homo sapiens
  siRNA target sequence for AKAP12 (NM_005100.2,3456-3474).
gacggatgtagtgttgaaa

SEQ ID NO: 253111 - DNA, 19 bp, Homo sapiens
  siRNA target sequence for AKAP12 (NM_005100.2,3478-3496).
gatgctcaggaggcaaaaa

SEQ ID NO: 253112 - DNA, 19 bp, Homo sapiens
  siRNA target sequence for AKAP12 (NM_005100.2,3531-3549).
gaccaccccagaaagcttt

SEQ ID NO: 253113 - DNA, 19 bp, Homo sapiens
  siRNA target sequence for AKAP12 (NM_005100.2,3602-3620).
cttgtcaagccgaaacctt

SEQ ID NO: 253114 - DNA, 19 bp, Homo sapiens
  siRNA target sequence for AKAP12 (NM_005100.2,3713-3731).
cccccgtagccgactttga

SEQ ID NO: 253115 - DNA, 19 bp, Homo sapiens
  siRNA target sequence for AKAP12 (NM_005100.2,3856-3874).
gcaccttccagttttgtgt

SEQ ID NO: 253116 - DNA, 19 bp, Homo sapiens
  siRNA target sequence for AKAP12 (NM_005100.2,3914-3932).
ctctagagcatacagataa

SEQ ID NO: 253117 - DNA, 19 bp, Homo sapiens
  siRNA target sequence for AKAP12 (NM_005100.2,3936-3954).
ggtgtcagtggaaactgta

SEQ ID NO: 253118 - DNA, 19 bp, Homo sapiens
  siRNA target sequence for AKAP12 (NM_005100.2,3950-3968).
ctgtatccattctgtcaaa

SEQ ID NO: 253119 - DNA, 19 bp, Homo sapiens
  siRNA target sequence for AKAP12 (NM_005100.2,3952-3970).
gtatccattctgtcaaaga

SEQ ID NO: 253120 - DNA, 19 bp, Homo sapiens
  siRNA target sequence for AKAP12 (NM_005100.2,4013-4031).
ccaaagacgtaccattttt

SEQ ID NO: 253121 - DNA, 19 bp, Homo sapiens
  siRNA target sequence for AKAP12 (NM_005100.2,4037-4055).
gacttgaggggtctataga

SEQ ID NO: 253122 - DNA, 19 bp, Homo sapiens
  siRNA target sequence for AKAP12 (NM_005100.2,4039-4057).
cttgaggggtctatagaca

SEQ ID NO: 253123 - DNA, 19 bp, Homo sapiens
  siRNA target sequence for AKAP12 (NM_005100.2,4155-4173).
gcagagtcacgctaagtct

SEQ ID NO: 253124 - DNA, 19 bp, Homo sapiens
  siRNA target sequence for AKAP12 (NM_005100.2,4191-4209).
gagagagatggtagttcaa

SEQ ID NO: 253125 - DNA, 19 bp, Homo sapiens
  siRNA target sequence for AKAP12 (NM_005100.2,4193-4211).
gagagatggtagttcaagt

SEQ ID NO: 253126 - DNA, 19 bp, Homo sapiens
  siRNA target sequence for AKAP12 (NM_005100.2,4207-4225).
caagtcgaaagggagaaaa

SEQ ID NO: 253127 - DNA, 19 bp, Homo sapiens
  siRNA target sequence for AKAP12 (NM_005100.2,4236-4254).
gccaacccatgtgaatgaa

SEQ ID NO: 253128 - DNA, 19 bp, Homo sapiens
  siRNA target sequence for AKAP12 (NM_005100.2,4399-4417).
gaggcagtatgcaccaaaa

SEQ ID NO: 253129 - DNA, 19 bp, Homo sapiens
  siRNA target sequence for AKAP12 (NM_005100.2,4401-4419).
ggcagtatgcaccaaaatt

SEQ ID NO: 253130 - DNA, 19 bp, Homo sapiens
  siRNA target sequence for AKAP12 (NM_005100.2,4435-4453).
gaggcatcattcactctaa

SEQ ID NO: 253131 - DNA, 19 bp, Homo sapiens
  siRNA target sequence for AKAP12 (NM_005100.2,4437-4455).
ggcatcattcactctaaca

SEQ ID NO: 253132 - DNA, 19 bp, Homo sapiens
  siRNA target sequence for AKAP12 (NM_005100.2,4529-4547).
caggtgcacatttagttct

SEQ ID NO: 253133 - DNA, 19 bp, Homo sapiens
  siRNA target sequence for AKAP12 (NM_005100.2,4618-4636).
cccgactgtcaggcaaaat

SEQ ID NO: 253134 - DNA, 19 bp, Homo sapiens
  siRNA target sequence for AKAP12 (NM_005100.2,4638-4656).
gacaccagtgatagtatct

SEQ ID NO: 253135 - DNA, 19 bp, Homo sapiens
  siRNA target sequence for AKAP12 (NM_005100.2,4748-4766).
cttgccaggaggtcaaagt

SEQ ID NO: 253136 - DNA, 19 bp, Homo sapiens
  siRNA target sequence for AKAP12 (NM_005100.2,4769-4787).
gtgtagcaattgaggattt

SEQ ID NO: 253137 - DNA, 19 bp, Homo sapiens
  siRNA target sequence for AKAP12 (NM_005100.2,4866-4884).
ccagtttgtacgtacagaa

SEQ ID NO: 253138 - DNA, 19 bp, Homo sapiens
  siRNA target sequence for AKAP12 (NM_005100.2,4869-4887).
gtttgtacgtacagaagaa

SEQ ID NO: 253139 - DNA, 19 bp, Homo sapiens
  siRNA target sequence for AKAP12 (NM_005100.2,5442-5460).
gcacagtgaatcagataaa

SEQ ID NO: 253140 - DNA, 19 bp, Homo sapiens
  siRNA target sequence for AKAP3 (NM_006422.2,397-415).
ccaagatgttcggttcaaa

SEQ ID NO: 253141 - DNA, 19 bp, Homo sapiens
  siRNA target sequence for AKAP3 (NM_006422.2,409-427).
gttcaaacccggagaatca

SEQ ID NO: 253142 - DNA, 19 bp, Homo sapiens
  siRNA target sequence for AKAP3 (NM_006422.2,452-470).
ggagacccacacaaaggtt

SEQ ID NO: 253143 - DNA, 19 bp, Homo sapiens
  siRNA target sequence for AKAP3 (NM_006422.2,453-471).
gagacccacacaaaggttt

SEQ ID NO: 253144 - DNA, 19 bp, Homo sapiens
  siRNA target sequence for AKAP3 (NM_006422.2,467-485).
ggtttctctgtagactatt

SEQ ID NO: 253145 - DNA, 19 bp, Homo sapiens
  siRNA target sequence for AKAP3 (NM_006422.2,468-486).
gtttctctgtagactatta

SEQ ID NO: 253146 - DNA, 19 bp, Homo sapiens
  siRNA target sequence for AKAP3 (NM_006422.2,507-525).
ctccagaaagattgcattt

SEQ ID NO: 253147 - DNA, 19 bp, Homo sapiens
  siRNA target sequence for AKAP3 (NM_006422.2,512-530).
gaaagattgcattttgaga

SEQ ID NO: 253148 - DNA, 19 bp, Homo sapiens
  siRNA target sequence for AKAP3 (NM_006422.2,577-595).
caacgggagttcagtagat

SEQ ID NO: 253149 - DNA, 19 bp, Homo sapiens
  siRNA target sequence for AKAP3 (NM_006422.2,580-598).
cgggagttcagtagatgaa

SEQ ID NO: 253150 - DNA, 19 bp, Homo sapiens
  siRNA target sequence for AKAP3 (NM_006422.2,582-600).
ggagttcagtagatgaagt

SEQ ID NO: 253151 - DNA, 19 bp, Homo sapiens
  siRNA target sequence for AKAP3 (NM_006422.2,583-601).
gagttcagtagatgaagtt

SEQ ID NO: 253152 - DNA, 19 bp, Homo sapiens
  siRNA target sequence for AKAP3 (NM_006422.2,596-614).
gaagtttccttctatgcta

SEQ ID NO: 253153 - DNA, 19 bp, Homo sapiens
  siRNA target sequence for AKAP3 (NM_006422.2,647-665).
cgcaaagagatcaatgaga

SEQ ID NO: 253154 - DNA, 19 bp, Homo sapiens
  siRNA target sequence for AKAP3 (NM_006422.2,670-688).
cgatggctctgaaaacaaa

SEQ ID NO: 253155 - DNA, 19 bp, Homo sapiens
  siRNA target sequence for AKAP3 (NM_006422.2,692-710).
gtctatcagtcattgtaca

SEQ ID NO: 253156 - DNA, 19 bp, Homo sapiens
  siRNA target sequence for AKAP3 (NM_006422.2,829-847).
cagagtctcgggatcatca

SEQ ID NO: 253157 - DNA, 19 bp, Homo sapiens
  siRNA target sequence for AKAP3 (NM_006422.2,833-851).
gtctcgggatcatcacaaa

SEQ ID NO: 253158 - DNA, 19 bp, Homo sapiens
  siRNA target sequence for AKAP3 (NM_006422.2,932-950).
ccttctaagaagtctttct

SEQ ID NO: 253159 - DNA, 19 bp, Homo sapiens
  siRNA target sequence for AKAP3 (NM_006422.2,964-982).
gtttgaatctcgtaatgga

SEQ ID NO: 253160 - DNA, 19 bp, Homo sapiens
  siRNA target sequence for AKAP3 (NM_006422.2,1055-1073).
gactttacggcttctgtta

SEQ ID NO: 253161 - DNA, 19 bp, Homo sapiens
  siRNA target sequence for AKAP3 (NM_006422.2,1070-1088).
gttagtgaagggatcatga

SEQ ID NO: 253162 - DNA, 19 bp, Homo sapiens
  siRNA target sequence for AKAP3 (NM_006422.2,1079-1097).
gggatcatgacctatgcta

SEQ ID NO: 253163 - DNA, 19 bp, Homo sapiens
  siRNA target sequence for AKAP3 (NM_006422.2,1084-1102).
catgacctatgctaacagt

SEQ ID NO: 253164 - DNA, 19 bp, Homo sapiens
  siRNA target sequence for AKAP3 (NM_006422.2,1095-1113).
ctaacagtgtggtatctga

SEQ ID NO: 253165 - DNA, 19 bp, Homo sapiens
  siRNA target sequence for AKAP3 (NM_006422.2,1101-1119).
gtgtggtatctgatatgat

SEQ ID NO: 253166 - DNA, 19 bp, Homo sapiens
  siRNA target sequence for AKAP3 (NM_006422.2,1288-1306).
gtttgtctcggctgtgaaa

SEQ ID NO: 253167 - DNA, 19 bp, Homo sapiens
  siRNA target sequence for AKAP3 (NM_006422.2,1292-1310).
gtctcggctgtgaaaagaa

SEQ ID NO: 253168 - DNA, 19 bp, Homo sapiens
  siRNA target sequence for AKAP3 (NM_006422.2,1294-1312).
ctcggctgtgaaaagaact

SEQ ID NO: 253169 - DNA, 19 bp, Homo sapiens
  siRNA target sequence for AKAP3 (NM_006422.2,1329-1347).
gccaaaaggccacagatat

SEQ ID NO: 253170 - DNA, 19 bp, Homo sapiens
  siRNA target sequence for AKAP3 (NM_006422.2,1424-1442).
gacaaggctgagagttatt

SEQ ID NO: 253171 - DNA, 19 bp, Homo sapiens
  siRNA target sequence for AKAP3 (NM_006422.2,1460-1478).
ggaatgggtgatcctaaaa

SEQ ID NO: 253172 - DNA, 19 bp, Homo sapiens
  siRNA target sequence for AKAP3 (NM_006422.2,1461-1479).
gaatgggtgatcctaaaaa

SEQ ID NO: 253173 - DNA, 19 bp, Homo sapiens
  siRNA target sequence for AKAP3 (NM_006422.2,1572-1590).
ctctgggtgagcacattat

SEQ ID NO: 253174 - DNA, 19 bp, Homo sapiens
  siRNA target sequence for AKAP3 (NM_006422.2,1576-1594).
gggtgagcacattatcaaa

SEQ ID NO: 253175 - DNA, 19 bp, Homo sapiens
  siRNA target sequence for AKAP3 (NM_006422.2,1600-1618).
gcttaccttgtggcataaa

SEQ ID NO: 253176 - DNA, 19 bp, Homo sapiens
  siRNA target sequence for AKAP3 (NM_006422.2,1601-1619).
cttaccttgtggcataaaa

SEQ ID NO: 253177 - DNA, 19 bp, Homo sapiens
  siRNA target sequence for AKAP3 (NM_006422.2,1651-1669).
ccagcatgcagcatttgaa

SEQ ID NO: 253178 - DNA, 19 bp, Homo sapiens
  siRNA target sequence for AKAP3 (NM_006422.2,1925-1943).
gtagctcccgatgaatctt

SEQ ID NO: 253179 - DNA, 19 bp, Homo sapiens
  siRNA target sequence for AKAP3 (NM_006422.2,2020-2038).
catccggaacttacttagt

SEQ ID NO: 253180 - DNA, 19 bp, Homo sapiens
  siRNA target sequence for AKAP3 (NM_006422.2,2082-2100).
cggaacagccagttaagga

SEQ ID NO: 253181 - DNA, 19 bp, Homo sapiens
  siRNA target sequence for AKAP3 (NM_006422.2,2087-2105).
cagccagttaaggaagata

SEQ ID NO: 253182 - DNA, 19 bp, Homo sapiens
  siRNA target sequence for AKAP3 (NM_006422.2,2136-2154).
ctccccccaggctatatga

SEQ ID NO: 253183 - DNA, 19 bp, Homo sapiens
  siRNA target sequence for AKAP3 (NM_006422.2,2333-2351).
gatgccagtaggctaactt

SEQ ID NO: 253184 - DNA, 19 bp, Homo sapiens
  siRNA target sequence for AKAP3 (NM_006422.2,2352-2370).
cggccttcccagatagttt

SEQ ID NO: 253185 - DNA, 19 bp, Homo sapiens
  siRNA target sequence for AKAP3 (NM_006422.2,2353-2371).
ggccttcccagatagttta

SEQ ID NO: 253186 - DNA, 19 bp, Homo sapiens
  siRNA target sequence for AKAP3 (NM_006422.2,2354-2372).
gccttcccagatagtttat

SEQ ID NO: 253187 - DNA, 19 bp, Homo sapiens
  siRNA target sequence for AKAP3 (NM_006422.2,2355-2373).
ccttcccagatagtttata

SEQ ID NO: 253188 - DNA, 19 bp, Homo sapiens
  siRNA target sequence for AKAP3 (NM_006422.2,2426-2444).
gcctatcaagctatccata

SEQ ID NO: 253189 - DNA, 19 bp, Homo sapiens
  siRNA target sequence for AKAP3 (NM_006422.2,2427-2445).
cctatcaagctatccataa

SEQ ID NO: 253190 - DNA, 19 bp, Homo sapiens
  siRNA target sequence for AKAP3 (NM_006422.2,2428-2446).
ctatcaagctatccataat

SEQ ID NO: 253191 - DNA, 19 bp, Homo sapiens
  siRNA target sequence for AKAP3 (NM_006422.2,2487-2505).
cagcacccacggtgattgt

SEQ ID NO: 253192 - DNA, 19 bp, Homo sapiens
  siRNA target sequence for AKAP3 (NM_006422.2,2489-2507).
gcacccacggtgattgtca

SEQ ID NO: 253193 - DNA, 19 bp, Homo sapiens
  siRNA target sequence for AKAP3 (NM_006422.2,2546-2564).
ctccaagccgtccttcaat

SEQ ID NO: 253194 - DNA, 19 bp, Homo sapiens
  siRNA target sequence for AKAP3 (NM_006422.2,2579-2597).
gagctcaatgtccctattt

SEQ ID NO: 253195 - DNA, 19 bp, Homo sapiens
  siRNA target sequence for AKAP3 (NM_006422.2,2697-2715).
cggtgctgcgctatgagaa

SEQ ID NO: 253196 - DNA, 19 bp, Homo sapiens
  siRNA target sequence for AKAP4 (NM_003886.2,127-145).
gatggcgtactctgatact

SEQ ID NO: 253197 - DNA, 19 bp, Homo sapiens
  siRNA target sequence for AKAP4 (NM_003886.2,130-148).
ggcgtactctgatactaca

SEQ ID NO: 253198 - DNA, 19 bp, Homo sapiens
  siRNA target sequence for AKAP4 (NM_003886.2,132-150).
cgtactctgatactacaat

SEQ ID NO: 253199 - DNA, 19 bp, Homo sapiens
  siRNA target sequence for AKAP4 (NM_003886.2,189-207).
gtgtgtgcaaggtagatct

SEQ ID NO: 253200 - DNA, 19 bp, Homo sapiens
  siRNA target sequence for AKAP4 (NM_003886.2,195-213).
gcaaggtagatctctacaa

SEQ ID NO: 253201 - DNA, 19 bp, Homo sapiens
  siRNA target sequence for AKAP4 (NM_003886.2,233-251).
caggaccggaaagtgatat

SEQ ID NO: 253202 - DNA, 19 bp, Homo sapiens
  siRNA target sequence for AKAP4 (NM_003886.2,236-254).
gaccggaaagtgatatgct

SEQ ID NO: 253203 - DNA, 19 bp, Homo sapiens
  siRNA target sequence for AKAP4 (NM_003886.2,270-288).
ccctgaatgtagaagataa

SEQ ID NO: 253204 - DNA, 19 bp, Homo sapiens
  siRNA target sequence for AKAP4 (NM_003886.2,271-289).
cctgaatgtagaagataaa

SEQ ID NO: 253205 - DNA, 19 bp, Homo sapiens
  siRNA target sequence for AKAP4 (NM_003886.2,435-453).
cctctgatcctgtaagtgt

SEQ ID NO: 253206 - DNA, 19 bp, Homo sapiens
  siRNA target sequence for AKAP4 (NM_003886.2,522-540).
cctctacctgtaaacataa

SEQ ID NO: 253207 - DNA, 19 bp, Homo sapiens
  siRNA target sequence for AKAP4 (NM_003886.2,525-543).
ctacctgtaaacataaagt

SEQ ID NO: 253208 - DNA, 19 bp, Homo sapiens
  siRNA target sequence for AKAP4 (NM_003886.2,594-612).
gtgtctatgccgatcaagt

SEQ ID NO: 253209 - DNA, 19 bp, Homo sapiens
  siRNA target sequence for AKAP4 (NM_003886.2,603-621).
ccgatcaagtgaacataga

SEQ ID NO: 253210 - DNA, 19 bp, Homo sapiens
  siRNA target sequence for AKAP4 (NM_003886.2,604-622).
cgatcaagtgaacatagat

SEQ ID NO: 253211 - DNA, 19 bp, Homo sapiens
  siRNA target sequence for AKAP4 (NM_003886.2,608-626).
caagtgaacatagattatt

SEQ ID NO: 253212 - DNA, 19 bp, Homo sapiens
  siRNA target sequence for AKAP4 (NM_003886.2,646-664).
cctacgtctagaaatgaca

SEQ ID NO: 253213 - DNA, 19 bp, Homo sapiens
  siRNA target sequence for AKAP4 (NM_003886.2,676-694).
caccaacaataatcaaagt

SEQ ID NO: 253214 - DNA, 19 bp, Homo sapiens
  siRNA target sequence for AKAP4 (NM_003886.2,724-742).
cactcagagagcagtcatt

SEQ ID NO: 253215 - DNA, 19 bp, Homo sapiens
  siRNA target sequence for AKAP4 (NM_003886.2,753-771).
gagaatgttctatagatga

SEQ ID NO: 253216 - DNA, 19 bp, Homo sapiens
  siRNA target sequence for AKAP4 (NM_003886.2,762-780).
ctatagatgacctttcctt

SEQ ID NO: 253217 - DNA, 19 bp, Homo sapiens
  siRNA target sequence for AKAP4 (NM_003886.2,784-802).
cgtcaaccgactatcttct

SEQ ID NO: 253218 - DNA, 19 bp, Homo sapiens
  siRNA target sequence for AKAP4 (NM_003886.2,792-810).
gactatcttctctggtaat

SEQ ID NO: 253219 - DNA, 19 bp, Homo sapiens
  siRNA target sequence for AKAP4 (NM_003886.2,920-938).
cctgcgagcaagattgctt

SEQ ID NO: 253220 - DNA, 19 bp, Homo sapiens
  siRNA target sequence for AKAP4 (NM_003886.2,1013-1031).
ggccagaaaagctttctat

SEQ ID NO: 253221 - DNA, 19 bp, Homo sapiens
  siRNA target sequence for AKAP4 (NM_003886.2,1014-1032).
gccagaaaagctttctata

SEQ ID NO: 253222 - DNA, 19 bp, Homo sapiens
  siRNA target sequence for AKAP4 (NM_003886.2,1028-1046).
ctatatagcgaattatcca

SEQ ID NO: 253223 - DNA, 19 bp, Homo sapiens
  siRNA target sequence for AKAP4 (NM_003886.2,1113-1131).
gcaaggggctcatggttta

SEQ ID NO: 253224 - DNA, 19 bp, Homo sapiens
  siRNA target sequence for AKAP4 (NM_003886.2,1118-1136).
gggctcatggtttatgcaa

SEQ ID NO: 253225 - DNA, 19 bp, Homo sapiens
  siRNA target sequence for AKAP4 (NM_003886.2,1119-1137).
ggctcatggtttatgcaaa

SEQ ID NO: 253226 - DNA, 19 bp, Homo sapiens
  siRNA target sequence for AKAP4 (NM_003886.2,1253-1271).
gagattgtgtccgatttga

SEQ ID NO: 253227 - DNA, 19 bp, Homo sapiens
  siRNA target sequence for AKAP4 (NM_003886.2,1288-1306).
gaacctgcataatattact

SEQ ID NO: 253228 - DNA, 19 bp, Homo sapiens
  siRNA target sequence for AKAP4 (NM_003886.2,1360-1378).
caaccagtggaaacaaaat

SEQ ID NO: 253229 - DNA, 19 bp, Homo sapiens
  siRNA target sequence for AKAP4 (NM_003886.2,1411-1429).
cttggtcagtgcccttata

SEQ ID NO: 253230 - DNA, 19 bp, Homo sapiens
  siRNA target sequence for AKAP4 (NM_003886.2,1414-1432).
ggtcagtgcccttataggt

SEQ ID NO: 253231 - DNA, 19 bp, Homo sapiens
  siRNA target sequence for AKAP4 (NM_003886.2,1504-1522).
caggaatcagagtcttgaa

SEQ ID NO: 253232 - DNA, 19 bp, Homo sapiens
  siRNA target sequence for AKAP4 (NM_003886.2,1606-1624).
gaaagtcggtgaacacatt

SEQ ID NO: 253233 - DNA, 19 bp, Homo sapiens
  siRNA target sequence for AKAP4 (NM_003886.2,1610-1628).
gtcggtgaacacattctca

SEQ ID NO: 253234 - DNA, 19 bp, Homo sapiens
  siRNA target sequence for AKAP4 (NM_003886.2,1612-1630).
cggtgaacacattctcaaa

SEQ ID NO: 253235 - DNA, 19 bp, Homo sapiens
  siRNA target sequence for AKAP4 (NM_003886.2,1683-1701).
ccaaagcatgcagcaataa

SEQ ID NO: 253236 - DNA, 19 bp, Homo sapiens
  siRNA target sequence for AKAP4 (NM_003886.2,1798-1816).
gcagactaagggcaaagat

SEQ ID NO: 253237 - DNA, 19 bp, Homo sapiens
  siRNA target sequence for AKAP4 (NM_003886.2,1858-1876).
ggctcagagtactcaatat

SEQ ID NO: 253238 - DNA, 19 bp, Homo sapiens
  siRNA target sequence for AKAP4 (NM_003886.2,1860-1878).
ctcagagtactcaatatga

SEQ ID NO: 253239 - DNA, 19 bp, Homo sapiens
  siRNA target sequence for AKAP4 (NM_003886.2,1946-1964).
ggaccatccacctgtcaaa

SEQ ID NO: 253240 - DNA, 19 bp, Homo sapiens
  siRNA target sequence for AKAP4 (NM_003886.2,1947-1965).
gaccatccacctgtcaaaa

SEQ ID NO: 253241 - DNA, 19 bp, Homo sapiens
  siRNA target sequence for AKAP4 (NM_003886.2,1982-2000).
gactcccagaaaatggata

SEQ ID NO: 253242 - DNA, 19 bp, Homo sapiens
  siRNA target sequence for AKAP4 (NM_003886.2,2122-2140).
gtccaacagatctgacaaa

SEQ ID NO: 253243 - DNA, 19 bp, Homo sapiens
  siRNA target sequence for AKAP4 (NM_003886.2,2133-2151).
ctgacaaagcggaagaaca

SEQ ID NO: 253244 - DNA, 19 bp, Homo sapiens
  siRNA target sequence for AKAP4 (NM_003886.2,2194-2212).
gcaagcgaacgggcaattt

SEQ ID NO: 253245 - DNA, 19 bp, Homo sapiens
  siRNA target sequence for AKAP4 (NM_003886.2,2195-2213).
caagcgaacgggcaattta

SEQ ID NO: 253246 - DNA, 19 bp, Homo sapiens
  siRNA target sequence for AKAP4 (NM_003886.2,2199-2217).
cgaacgggcaatttataga

SEQ ID NO: 253247 - DNA, 19 bp, Homo sapiens
  siRNA target sequence for AKAP4 (NM_003886.2,2200-2218).
gaacgggcaatttatagat

SEQ ID NO: 253248 - DNA, 19 bp, Homo sapiens
  siRNA target sequence for AKAP4 (NM_003886.2,2203-2221).
cgggcaatttatagataaa

SEQ ID NO: 253249 - DNA, 19 bp, Homo sapiens
  siRNA target sequence for AKAP4 (NM_003886.2,2205-2223).
ggcaatttatagataaact

SEQ ID NO: 253250 - DNA, 19 bp, Homo sapiens
  siRNA target sequence for AKAP4 (NM_003886.2,2247-2265).
gccttatcatggctaagta

SEQ ID NO: 253251 - DNA, 19 bp, Homo sapiens
  siRNA target sequence for AKAP4 (NM_003886.2,2248-2266).
ccttatcatggctaagtat

SEQ ID NO: 253252 - DNA, 19 bp, Homo sapiens
  siRNA target sequence for AKAP4 (NM_003886.2,2303-2321).
caagcagcctcggcaaata

SEQ ID NO: 253253 - DNA, 19 bp, Homo sapiens
  siRNA target sequence for AKAP4 (NM_003886.2,2313-2331).
cggcaaataagcccaattt

SEQ ID NO: 253254 - DNA, 19 bp, Homo sapiens
  siRNA target sequence for AKAP4 (NM_003886.2,2332-2350).
caggggcaccagatgcatt

SEQ ID NO: 253255 - DNA, 19 bp, Homo sapiens
  siRNA target sequence for AKAP4 (NM_003886.2,2361-2379).
caatgccacagaactatca

SEQ ID NO: 253256 - DNA, 19 bp, Homo sapiens
  siRNA target sequence for AKAP4 (NM_003886.2,2469-2487).
cagcctcccagtttaacgt

SEQ ID NO: 253257 - DNA, 19 bp, Homo sapiens
  siRNA target sequence for AKAP4 (NM_003886.2,2574-2592).
gtgtaggaggtcttcttca

SEQ ID NO: 253258 - DNA, 19 bp, Homo sapiens
  siRNA target sequence for AKAP4 (NM_003886.2,2614-2632).
ggaacggcaaccagatgaa

SEQ ID NO: 253259 - DNA, 19 bp, Homo sapiens
  siRNA target sequence for AKAP6 (NM_004274.3,374-392).
gggtccgagacctaaccta

SEQ ID NO: 253260 - DNA, 19 bp, Homo sapiens
  siRNA target sequence for AKAP6 (NM_004274.3,375-393).
ggtccgagacctaacctat

SEQ ID NO: 253261 - DNA, 19 bp, Homo sapiens
  siRNA target sequence for AKAP6 (NM_004274.3,376-394).
gtccgagacctaacctatt

SEQ ID NO: 253262 - DNA, 19 bp, Homo sapiens
  siRNA target sequence for AKAP6 (NM_004274.3,378-396).
ccgagacctaacctattca

SEQ ID NO: 253263 - DNA, 19 bp, Homo sapiens
  siRNA target sequence for AKAP6 (NM_004274.3,420-438).
gcatgtggatgtacatcta

SEQ ID NO: 253264 - DNA, 19 bp, Homo sapiens
  siRNA target sequence for AKAP6 (NM_004274.3,426-444).
ggatgtacatctagttcaa

SEQ ID NO: 253265 - DNA, 19 bp, Homo sapiens
  siRNA target sequence for AKAP6 (NM_004274.3,506-524).
cagagttctccctaaagct

SEQ ID NO: 253266 - DNA, 19 bp, Homo sapiens
  siRNA target sequence for AKAP6 (NM_004274.3,637-655).
gacgccaatggcaactaca

SEQ ID NO: 253267 - DNA, 19 bp, Homo sapiens
  siRNA target sequence for AKAP6 (NM_004274.3,640-658).
gccaatggcaactacacta

SEQ ID NO: 253268 - DNA, 19 bp, Homo sapiens
  siRNA target sequence for AKAP6 (NM_004274.3,656-674).
ctaggcagacggacattct

SEQ ID NO: 253269 - DNA, 19 bp, Homo sapiens
  siRNA target sequence for AKAP6 (NM_004274.3,680-698).
ctttctctgaagagacaaa

SEQ ID NO: 253270 - DNA, 19 bp, Homo sapiens
  siRNA target sequence for AKAP6 (NM_004274.3,729-747).
ggatgactcaggacaatta

SEQ ID NO: 253271 - DNA, 19 bp, Homo sapiens
  siRNA target sequence for AKAP6 (NM_004274.3,730-748).
gatgactcaggacaattaa

SEQ ID NO: 253272 - DNA, 19 bp, Homo sapiens
  siRNA target sequence for AKAP6 (NM_004274.3,818-836).
gtccaagtgaggatttgct

SEQ ID NO: 253273 - DNA, 19 bp, Homo sapiens
  siRNA target sequence for AKAP6 (NM_004274.3,953-971).
cggtagctgctgactctat

SEQ ID NO: 253274 - DNA, 19 bp, Homo sapiens
  siRNA target sequence for AKAP6 (NM_004274.3,955-973).
gtagctgctgactctatct

SEQ ID NO: 253275 - DNA, 19 bp, Homo sapiens
  siRNA target sequence for AKAP6 (NM_004274.3,958-976).
gctgctgactctatctcta

SEQ ID NO: 253276 - DNA, 19 bp, Homo sapiens
  siRNA target sequence for AKAP6 (NM_004274.3,1000-1018).
gaggaggtatctcaagtat

SEQ ID NO: 253277 - DNA, 19 bp, Homo sapiens
  siRNA target sequence for AKAP6 (NM_004274.3,1204-1222).
cagcctgttccttgtgaaa

SEQ ID NO: 253278 - DNA, 19 bp, Homo sapiens
  siRNA target sequence for AKAP6 (NM_004274.3,1242-1260).
catcagagattgctttaat

SEQ ID NO: 253279 - DNA, 19 bp, Homo sapiens
  siRNA target sequence for AKAP6 (NM_004274.3,1247-1265).
gagattgctttaattataa

SEQ ID NO: 253280 - DNA, 19 bp, Homo sapiens
  siRNA target sequence for AKAP6 (NM_004274.3,1274-1292).
ctcccacgcagcctacatt

SEQ ID NO: 253281 - DNA, 19 bp, Homo sapiens
  siRNA target sequence for AKAP6 (NM_004274.3,1359-1377).
gaggcaaatggttgatcta

SEQ ID NO: 253282 - DNA, 19 bp, Homo sapiens
  siRNA target sequence for AKAP6 (NM_004274.3,1361-1379).
ggcaaatggttgatctaaa

SEQ ID NO: 253283 - DNA, 19 bp, Homo sapiens
  siRNA target sequence for AKAP6 (NM_004274.3,1397-1415).
gcaccccttcgctagtaga

SEQ ID NO: 253284 - DNA, 19 bp, Homo sapiens
  siRNA target sequence for AKAP6 (NM_004274.3,1398-1416).
caccccttcgctagtagat

SEQ ID NO: 253285 - DNA, 19 bp, Homo sapiens
  siRNA target sequence for AKAP6 (NM_004274.3,1475-1493).
ctgctgccagccagtctta

SEQ ID NO: 253286 - DNA, 19 bp, Homo sapiens
  siRNA target sequence for AKAP6 (NM_004274.3,1484-1502).
gccagtcttatgagtgttt

SEQ ID NO: 253287 - DNA, 19 bp, Homo sapiens
  siRNA target sequence for AKAP6 (NM_004274.3,1513-1531).
gggaatgggaaccttgaaa

SEQ ID NO: 253288 - DNA, 19 bp, Homo sapiens
  siRNA target sequence for AKAP6 (NM_004274.3,1514-1532).
ggaatgggaaccttgaaaa

SEQ ID NO: 253289 - DNA, 19 bp, Homo sapiens
  siRNA target sequence for AKAP6 (NM_004274.3,1533-1551).
cacagtcaaatttcacatt

SEQ ID NO: 253290 - DNA, 19 bp, Homo sapiens
  siRNA target sequence for AKAP6 (NM_004274.3,1578-1596).
gcttaacgactgctataaa

SEQ ID NO: 253291 - DNA, 19 bp, Homo sapiens
  siRNA target sequence for AKAP6 (NM_004274.3,1584-1602).
cgactgctataaagagaaa

SEQ ID NO: 253292 - DNA, 19 bp, Homo sapiens
  siRNA target sequence for AKAP6 (NM_004274.3,1587-1605).
ctgctataaagagaaatct

SEQ ID NO: 253293 - DNA, 19 bp, Homo sapiens
  siRNA target sequence for AKAP6 (NM_004274.3,1668-1686).
gactggttcaggcaaacaa

SEQ ID NO: 253294 - DNA, 19 bp, Homo sapiens
  siRNA target sequence for AKAP6 (NM_004274.3,1746-1764).
catagaggggccacaaaca

SEQ ID NO: 253295 - DNA, 19 bp, Homo sapiens
  siRNA target sequence for AKAP6 (NM_004274.3,1808-1826).
gttggaatgccaaattgca

SEQ ID NO: 253296 - DNA, 19 bp, Homo sapiens
  siRNA target sequence for AKAP6 (NM_004274.3,1811-1829).
ggaatgccaaattgcaatt

SEQ ID NO: 253297 - DNA, 19 bp, Homo sapiens
  siRNA target sequence for AKAP6 (NM_004274.3,1824-1842).
gcaattgcagtcagaaaca

SEQ ID NO: 253298 - DNA, 19 bp, Homo sapiens
  siRNA target sequence for AKAP6 (NM_004274.3,1845-1863).
cagttcaccagcttttact

SEQ ID NO: 253299 - DNA, 19 bp, Homo sapiens
  siRNA target sequence for AKAP6 (NM_004274.3,1847-1865).
gttcaccagcttttactca

SEQ ID NO: 253300 - DNA, 19 bp, Homo sapiens
  siRNA target sequence for AKAP6 (NM_004274.3,1902-1920).
gtctccggtgccacttctt

SEQ ID NO: 253301 - DNA, 19 bp, Homo sapiens
  siRNA target sequence for AKAP6 (NM_004274.3,1995-2013).
ctggtatggctctgatgaa

SEQ ID NO: 253302 - DNA, 19 bp, Homo sapiens
  siRNA target sequence for AKAP6 (NM_004274.3,2035-2053).
cttaagcagacagaagtat

SEQ ID NO: 253303 - DNA, 19 bp, Homo sapiens
  siRNA target sequence for AKAP6 (NM_004274.3,2045-2063).
cagaagtattggctttgaa

SEQ ID NO: 253304 - DNA, 19 bp, Homo sapiens
  siRNA target sequence for AKAP6 (NM_004274.3,2104-2122).
ggagaaaccatccagaata

SEQ ID NO: 253305 - DNA, 19 bp, Homo sapiens
  siRNA target sequence for AKAP6 (NM_004274.3,2105-2123).
gagaaaccatccagaatat

SEQ ID NO: 253306 - DNA, 19 bp, Homo sapiens
  siRNA target sequence for AKAP6 (NM_004274.3,2111-2129).
ccatccagaatattgatga

SEQ ID NO: 253307 - DNA, 19 bp, Homo sapiens
  siRNA target sequence for AKAP6 (NM_004274.3,2272-2290).
cccctgagtgacattcttt

SEQ ID NO: 253308 - DNA, 19 bp, Homo sapiens
  siRNA target sequence for AKAP6 (NM_004274.3,2311-2329).
cctctcgctggcatgaaaa

SEQ ID NO: 253309 - DNA, 19 bp, Homo sapiens
  siRNA target sequence for AKAP6 (NM_004274.3,2314-2332).
ctcgctggcatgaaaaagt

SEQ ID NO: 253310 - DNA, 19 bp, Homo sapiens
  siRNA target sequence for AKAP6 (NM_004274.3,2390-2408).
ccactaaatcagctttaat

SEQ ID NO: 253311 - DNA, 19 bp, Homo sapiens
  siRNA target sequence for AKAP6 (NM_004274.3,2393-2411).
ctaaatcagctttaattca

SEQ ID NO: 253312 - DNA, 19 bp, Homo sapiens
  siRNA target sequence for AKAP6 (NM_004274.3,2433-2451).
gcaccaagacaactatgaa

SEQ ID NO: 253313 - DNA, 19 bp, Homo sapiens
  siRNA target sequence for AKAP6 (NM_004274.3,2562-2580).
ggatgaccttaaactgtat

SEQ ID NO: 253314 - DNA, 19 bp, Homo sapiens
  siRNA target sequence for AKAP6 (NM_004274.3,2590-2608).
cacttgagttttaagttga

SEQ ID NO: 253315 - DNA, 19 bp, Homo sapiens
  siRNA target sequence for AKAP6 (NM_004274.3,2597-2615).
gttttaagttgaatgtaga

SEQ ID NO: 253316 - DNA, 19 bp, Homo sapiens
  siRNA target sequence for AKAP6 (NM_004274.3,2709-2727).
gcggatgattgcaagtcaa

SEQ ID NO: 253317 - DNA, 19 bp, Homo sapiens
  siRNA target sequence for AKAP6 (NM_004274.3,2710-2728).
cggatgattgcaagtcaat

SEQ ID NO: 253318 - DNA, 19 bp, Homo sapiens
  siRNA target sequence for AKAP6 (NM_004274.3,2789-2807).
ccatcaaagccgagatact

SEQ ID NO: 253319 - DNA, 19 bp, Homo sapiens
  siRNA target sequence for AKAP6 (NM_004274.3,2853-2871).
caaggctgaggttcaacta

SEQ ID NO: 253320 - DNA, 19 bp, Homo sapiens
  siRNA target sequence for AKAP6 (NM_004274.3,2920-2938).
ctgtacagcgagcagtata

SEQ ID NO: 253321 - DNA, 19 bp, Homo sapiens
  siRNA target sequence for AKAP6 (NM_004274.3,2962-2980).
gagtttgctgatatgtcaa

SEQ ID NO: 253322 - DNA, 19 bp, Homo sapiens
  siRNA target sequence for AKAP6 (NM_004274.3,2964-2982).
gtttgctgatatgtcaaaa

SEQ ID NO: 253323 - DNA, 19 bp, Homo sapiens
  siRNA target sequence for AKAP6 (NM_004274.3,2969-2987).
ctgatatgtcaaaagttca

SEQ ID NO: 253324 - DNA, 19 bp, Homo sapiens
  siRNA target sequence for AKAP6 (NM_004274.3,3041-3059).
gggattggctgattgacat

SEQ ID NO: 253325 - DNA, 19 bp, Homo sapiens
  siRNA target sequence for AKAP6 (NM_004274.3,3168-3186).
ggagctgcttagtaaggtt

SEQ ID NO: 253326 - DNA, 19 bp, Homo sapiens
  siRNA target sequence for AKAP6 (NM_004274.3,3203-3221).
gtggcgttttactaccaaa

SEQ ID NO: 253327 - DNA, 19 bp, Homo sapiens
  siRNA target sequence for AKAP6 (NM_004274.3,3206-3224).
gcgttttactaccaaatga

SEQ ID NO: 253328 - DNA, 19 bp, Homo sapiens
  siRNA target sequence for AKAP6 (NM_004274.3,3207-3225).
cgttttactaccaaatgat

SEQ ID NO: 253329 - DNA, 19 bp, Homo sapiens
  siRNA target sequence for AKAP6 (NM_004274.3,3232-3250).
gaaaaagtggattcaatta

SEQ ID NO: 253330 - DNA, 19 bp, Homo sapiens
  siRNA target sequence for AKAP6 (NM_004274.3,3481-3499).
caactgcaatactttaagt

SEQ ID NO: 253331 - DNA, 19 bp, Homo sapiens
  siRNA target sequence for AKAP6 (NM_004274.3,3577-3595).
cgggagacttgcaatctga

SEQ ID NO: 253332 - DNA, 19 bp, Homo sapiens
  siRNA target sequence for AKAP6 (NM_004274.3,3621-3639).
gatcattgtaaatcttgaa

SEQ ID NO: 253333 - DNA, 19 bp, Homo sapiens
  siRNA target sequence for AKAP6 (NM_004274.3,3644-3662).
ggtgggaagccattgtcat

SEQ ID NO: 253334 - DNA, 19 bp, Homo sapiens
  siRNA target sequence for AKAP6 (NM_004274.3,3675-3693).
gtggcaaacacgtctacaa

SEQ ID NO: 253335 - DNA, 19 bp, Homo sapiens
  siRNA target sequence for AKAP6 (NM_004274.3,3677-3695).
ggcaaacacgtctacaaaa

SEQ ID NO: 253336 - DNA, 19 bp, Homo sapiens
  siRNA target sequence for AKAP6 (NM_004274.3,3704-3722).
gaaaggaatctgagacttt

SEQ ID NO: 253337 - DNA, 19 bp, Homo sapiens
  siRNA target sequence for AKAP6 (NM_004274.3,3737-3755).
ctggcttgatggacctaaa

SEQ ID NO: 253338 - DNA, 19 bp, Homo sapiens
  siRNA target sequence for AKAP6 (NM_004274.3,3793-3811).
gacataagtaacaagttaa

SEQ ID NO: 253339 - DNA, 19 bp, Homo sapiens
  siRNA target sequence for AKAP6 (NM_004274.3,3795-3813).
cataagtaacaagttaatt

SEQ ID NO: 253340 - DNA, 19 bp, Homo sapiens
  siRNA target sequence for AKAP6 (NM_004274.3,3876-3894).
gcttggagagacaagtaat

SEQ ID NO: 253341 - DNA, 19 bp, Homo sapiens
  siRNA target sequence for AKAP6 (NM_004274.3,3927-3945).
ccatgggggatctcagtat

SEQ ID NO: 253342 - DNA, 19 bp, Homo sapiens
  siRNA target sequence for AKAP6 (NM_004274.3,3963-3981).
cccctctagtccacacatt

SEQ ID NO: 253343 - DNA, 19 bp, Homo sapiens
  siRNA target sequence for AKAP6 (NM_004274.3,3965-3983).
cctctagtccacacattta

SEQ ID NO: 253344 - DNA, 19 bp, Homo sapiens
  siRNA target sequence for AKAP6 (NM_004274.3,3968-3986).
ctagtccacacatttacca

SEQ ID NO: 253345 - DNA, 19 bp, Homo sapiens
  siRNA target sequence for AKAP6 (NM_004274.3,3995-4013).
gcctccacaatgttgaact

SEQ ID NO: 253346 - DNA, 19 bp, Homo sapiens
  siRNA target sequence for AKAP6 (NM_004274.3,3999-4017).
ccacaatgttgaactctat

SEQ ID NO: 253347 - DNA, 19 bp, Homo sapiens
  siRNA target sequence for AKAP6 (NM_004274.3,4088-4106).
ctaagagtctcagtaaaga

SEQ ID NO: 253348 - DNA, 19 bp, Homo sapiens
  siRNA target sequence for AKAP6 (NM_004274.3,4125-4143).
caaatctttgccagatctt

SEQ ID NO: 253349 - DNA, 19 bp, Homo sapiens
  siRNA target sequence for AKAP6 (NM_004274.3,4141-4159).
cttctaggtggttccaatt

SEQ ID NO: 253350 - DNA, 19 bp, Homo sapiens
  siRNA target sequence for AKAP6 (NM_004274.3,4148-4166).
gtggttccaatttggtaaa

SEQ ID NO: 253351 - DNA, 19 bp, Homo sapiens
  siRNA target sequence for AKAP6 (NM_004274.3,4186-4204).
ggagacatgagccagaatt

SEQ ID NO: 253352 - DNA, 19 bp, Homo sapiens
  siRNA target sequence for AKAP6 (NM_004274.3,4293-4311).
cccaagtaaccttgaaact

SEQ ID NO: 253353 - DNA, 19 bp, Homo sapiens
  siRNA target sequence for AKAP6 (NM_004274.3,4295-4313).
caagtaaccttgaaactga

SEQ ID NO: 253354 - DNA, 19 bp, Homo sapiens
  siRNA target sequence for AKAP6 (NM_004274.3,4336-4354).
gatgcagttaacgtgttaa

SEQ ID NO: 253355 - DNA, 19 bp, Homo sapiens
  siRNA target sequence for AKAP6 (NM_004274.3,4340-4358).
cagttaacgtgttaaagca

SEQ ID NO: 253356 - DNA, 19 bp, Homo sapiens
  siRNA target sequence for AKAP6 (NM_004274.3,4342-4360).
gttaacgtgttaaagcaaa

SEQ ID NO: 253357 - DNA, 19 bp, Homo sapiens
  siRNA target sequence for AKAP6 (NM_004274.3,4418-4436).
caccagtgggttgtgtaaa

SEQ ID NO: 253358 - DNA, 19 bp, Homo sapiens
  siRNA target sequence for AKAP6 (NM_004274.3,4447-4465).
ggagatttaaacagtatta

SEQ ID NO: 253359 - DNA, 19 bp, Homo sapiens
  siRNA target sequence for AKAP6 (NM_004274.3,4616-4634).
ccctgcttcgtggttttta

SEQ ID NO: 253360 - DNA, 19 bp, Homo sapiens
  siRNA target sequence for AKAP6 (NM_004274.3,4687-4705).
gatgtacctccccatgaaa

SEQ ID NO: 253361 - DNA, 19 bp, Homo sapiens
  siRNA target sequence for AKAP6 (NM_004274.3,4713-4731).
ggcaagtgcatctcatgaa

SEQ ID NO: 253362 - DNA, 19 bp, Homo sapiens
  siRNA target sequence for AKAP6 (NM_004274.3,4714-4732).
gcaagtgcatctcatgaaa

SEQ ID NO: 253363 - DNA, 19 bp, Homo sapiens
  siRNA target sequence for AKAP6 (NM_004274.3,4729-4747).
gaaatggatcgcatttcat

SEQ ID NO: 253364 - DNA, 19 bp, Homo sapiens
  siRNA target sequence for AKAP6 (NM_004274.3,4734-4752).
ggatcgcatttcatataaa

SEQ ID NO: 253365 - DNA, 19 bp, Homo sapiens
  siRNA target sequence for AKAP6 (NM_004274.3,4735-4753).
gatcgcatttcatataaaa

SEQ ID NO: 253366 - DNA, 19 bp, Homo sapiens
  siRNA target sequence for AKAP6 (NM_004274.3,4800-4818).
gctctcccttttatctcat

SEQ ID NO: 253367 - DNA, 19 bp, Homo sapiens
  siRNA target sequence for AKAP6 (NM_004274.3,4806-4824).
ccttttatctcatagttca

SEQ ID NO: 253368 - DNA, 19 bp, Homo sapiens
  siRNA target sequence for AKAP6 (NM_004274.3,4814-4832).
ctcatagttcatctattga

SEQ ID NO: 253369 - DNA, 19 bp, Homo sapiens
  siRNA target sequence for AKAP6 (NM_004274.3,4841-4859).
ctccagggggtgatttatt

SEQ ID NO: 253370 - DNA, 19 bp, Homo sapiens
  siRNA target sequence for AKAP6 (NM_004274.3,4963-4981).
cacagctctggggatataa

SEQ ID NO: 253371 - DNA, 19 bp, Homo sapiens
  siRNA target sequence for AKAP6 (NM_004274.3,4993-5011).
ggctcagttggtgaactaa

SEQ ID NO: 253372 - DNA, 19 bp, Homo sapiens
  siRNA target sequence for AKAP6 (NM_004274.3,5057-5075).
gcccctcagagcaaaagat

SEQ ID NO: 253373 - DNA, 19 bp, Homo sapiens
  siRNA target sequence for AKAP6 (NM_004274.3,5080-5098).
cgaagtgtttctgatatca

SEQ ID NO: 253374 - DNA, 19 bp, Homo sapiens
  siRNA target sequence for AKAP6 (NM_004274.3,5151-5169).
catagcatcttctatcaat

SEQ ID NO: 253375 - DNA, 19 bp, Homo sapiens
  siRNA target sequence for AKAP6 (NM_004274.3,5173-5191).
gactcagcggcatctctaa

SEQ ID NO: 253376 - DNA, 19 bp, Homo sapiens
  siRNA target sequence for AKAP6 (NM_004274.3,5175-5193).
ctcagcggcatctctaaca

SEQ ID NO: 253377 - DNA, 19 bp, Homo sapiens
  siRNA target sequence for AKAP6 (NM_004274.3,5177-5195).
cagcggcatctctaacaga

SEQ ID NO: 253378 - DNA, 19 bp, Homo sapiens
  siRNA target sequence for AKAP6 (NM_004274.3,5226-5244).
ctcagaggatattgtgtta

SEQ ID NO: 253379 - DNA, 19 bp, Homo sapiens
  siRNA target sequence for AKAP6 (NM_004274.3,5253-5271).
caagatcccggaatcgaat

SEQ ID NO: 253380 - DNA, 19 bp, Homo sapiens
  siRNA target sequence for AKAP6 (NM_004274.3,5311-5329).
gaaagcgatgtcaatgtca

SEQ ID NO: 253381 - DNA, 19 bp, Homo sapiens
  siRNA target sequence for AKAP6 (NM_004274.3,5445-5463).
ggatgacgactccagtatt

SEQ ID NO: 253382 - DNA, 19 bp, Homo sapiens
  siRNA target sequence for AKAP6 (NM_004274.3,5449-5467).
gacgactccagtattgcaa

SEQ ID NO: 253383 - DNA, 19 bp, Homo sapiens
  siRNA target sequence for AKAP6 (NM_004274.3,5454-5472).
ctccagtattgcaacagat

SEQ ID NO: 253384 - DNA, 19 bp, Homo sapiens
  siRNA target sequence for AKAP6 (NM_004274.3,5457-5475).
cagtattgcaacagatgat

SEQ ID NO: 253385 - DNA, 19 bp, Homo sapiens
  siRNA target sequence for AKAP6 (NM_004274.3,5502-5520).
gtcagggctagactacata

SEQ ID NO: 253386 - DNA, 19 bp, Homo sapiens
  siRNA target sequence for AKAP6 (NM_004274.3,5514-5532).
ctacataaagaatgaatta

SEQ ID NO: 253387 - DNA, 19 bp, Homo sapiens
  siRNA target sequence for AKAP6 (NM_004274.3,5527-5545).
gaattacagacctggatta

SEQ ID NO: 253388 - DNA, 19 bp, Homo sapiens
  siRNA target sequence for AKAP6 (NM_004274.3,5537-5555).
cctggattaggccaaaatt

SEQ ID NO: 253389 - DNA, 19 bp, Homo sapiens
  siRNA target sequence for AKAP6 (NM_004274.3,5541-5559).
gattaggccaaaattgtct

SEQ ID NO: 253390 - DNA, 19 bp, Homo sapiens
  siRNA target sequence for AKAP6 (NM_004274.3,5598-5616).
gatgaagggcagtaaagat

SEQ ID NO: 253391 - DNA, 19 bp, Homo sapiens
  siRNA target sequence for AKAP6 (NM_004274.3,5601-5619).
gaagggcagtaaagatata

SEQ ID NO: 253392 - DNA, 19 bp, Homo sapiens
  siRNA target sequence for AKAP6 (NM_004274.3,5604-5622).
gggcagtaaagatataagt

SEQ ID NO: 253393 - DNA, 19 bp, Homo sapiens
  siRNA target sequence for AKAP6 (NM_004274.3,5605-5623).
ggcagtaaagatataagta

SEQ ID NO: 253394 - DNA, 19 bp, Homo sapiens
  siRNA target sequence for AKAP6 (NM_004274.3,5641-5659).
ccctctgatactctgaata

SEQ ID NO: 253395 - DNA, 19 bp, Homo sapiens
  siRNA target sequence for AKAP6 (NM_004274.3,5713-5731).
ggtaagaattcatctcata

SEQ ID NO: 253396 - DNA, 19 bp, Homo sapiens
  siRNA target sequence for AKAP6 (NM_004274.3,5744-5762).
ggacaaagcgtgaaaataa

SEQ ID NO: 253397 - DNA, 19 bp, Homo sapiens
  siRNA target sequence for AKAP6 (NM_004274.3,5817-5835).
caatattgaaggtattcca

SEQ ID NO: 253398 - DNA, 19 bp, Homo sapiens
  siRNA target sequence for AKAP6 (NM_004274.3,5867-5885).
caaaggtatcagaaaatct

SEQ ID NO: 253399 - DNA, 19 bp, Homo sapiens
  siRNA target sequence for AKAP6 (NM_004274.3,5887-5905).
ggttcacatgggaaagaga

SEQ ID NO: 253400 - DNA, 19 bp, Homo sapiens
  siRNA target sequence for AKAP6 (NM_004274.3,5928-5946).
gtgtaaagcacttatggat

SEQ ID NO: 253401 - DNA, 19 bp, Homo sapiens
  siRNA target sequence for AKAP6 (NM_004274.3,5936-5954).
cacttatggatagtttaga

SEQ ID NO: 253402 - DNA, 19 bp, Homo sapiens
  siRNA target sequence for AKAP6 (NM_004274.3,5943-5961).
ggatagtttagatgattca

SEQ ID NO: 253403 - DNA, 19 bp, Homo sapiens
  siRNA target sequence for AKAP6 (NM_004274.3,6020-6038).
caaatcaccaccattttga

SEQ ID NO: 253404 - DNA, 19 bp, Homo sapiens
  siRNA target sequence for AKAP6 (NM_004274.3,6088-6106).
gctttagaaaccaggttta

SEQ ID NO: 253405 - DNA, 19 bp, Homo sapiens
  siRNA target sequence for AKAP6 (NM_004274.3,6089-6107).
ctttagaaaccaggtttaa

SEQ ID NO: 253406 - DNA, 19 bp, Homo sapiens
  siRNA target sequence for AKAP6 (NM_004274.3,6118-6136).
gactctgatgcactgaaat

SEQ ID NO: 253407 - DNA, 19 bp, Homo sapiens
  siRNA target sequence for AKAP6 (NM_004274.3,6151-6169).
ccgagtatggctggaaaat

SEQ ID NO: 253408 - DNA, 19 bp, Homo sapiens
  siRNA target sequence for AKAP6 (NM_004274.3,6153-6171).
gagtatggctggaaaatct

SEQ ID NO: 253409 - DNA, 19 bp, Homo sapiens
  siRNA target sequence for AKAP6 (NM_004274.3,6182-6200).
gcctagcacttgaacaaaa

SEQ ID NO: 253410 - DNA, 19 bp, Homo sapiens
  siRNA target sequence for AKAP6 (NM_004274.3,6201-6219).
cggaacagaggaaaatgct

SEQ ID NO: 253411 - DNA, 19 bp, Homo sapiens
  siRNA target sequence for AKAP6 (NM_004274.3,6243-6261).
caactgtgagccagatgtt

SEQ ID NO: 253412 - DNA, 19 bp, Homo sapiens
  siRNA target sequence for AKAP6 (NM_004274.3,6268-6286).
caaaaagatgccgaagatt

SEQ ID NO: 253413 - DNA, 19 bp, Homo sapiens
  siRNA target sequence for AKAP6 (NM_004274.3,6287-6305).
gttcagtacacaactttgt

SEQ ID NO: 253414 - DNA, 19 bp, Homo sapiens
  siRNA target sequence for AKAP6 (NM_004274.3,6324-6342).
ggcttcgacagccctaaaa

SEQ ID NO: 253415 - DNA, 19 bp, Homo sapiens
  siRNA target sequence for AKAP6 (NM_004274.3,6329-6347).
cgacagccctaaaaagtaa

SEQ ID NO: 253416 - DNA, 19 bp, Homo sapiens
  siRNA target sequence for AKAP6 (NM_004274.3,6344-6362).
gtaaatctcaacctgaaaa

SEQ ID NO: 253417 - DNA, 19 bp, Homo sapiens
  siRNA target sequence for AKAP6 (NM_004274.3,6366-6384).
ggtggctgctcctacttca

SEQ ID NO: 253418 - DNA, 19 bp, Homo sapiens
  siRNA target sequence for AKAP6 (NM_004274.3,6367-6385).
gtggctgctcctacttcat

SEQ ID NO: 253419 - DNA, 19 bp, Homo sapiens
  siRNA target sequence for AKAP6 (NM_004274.3,6391-6409).
caaatcaaggagaaagtgt

SEQ ID NO: 253420 - DNA, 19 bp, Homo sapiens
  siRNA target sequence for AKAP6 (NM_004274.3,6447-6465).
ggacttttattcgtactta

SEQ ID NO: 253421 - DNA, 19 bp, Homo sapiens
  siRNA target sequence for AKAP6 (NM_004274.3,6491-6509).
gtggggaggtcaccaatta

SEQ ID NO: 253422 - DNA, 19 bp, Homo sapiens
  siRNA target sequence for AKAP6 (NM_004274.3,6493-6511).
ggggaggtcaccaattaca

SEQ ID NO: 253423 - DNA, 19 bp, Homo sapiens
  siRNA target sequence for AKAP6 (NM_004274.3,6494-6512).
gggaggtcaccaattacat

SEQ ID NO: 253424 - DNA, 19 bp, Homo sapiens
  siRNA target sequence for AKAP6 (NM_004274.3,6495-6513).
ggaggtcaccaattacata

SEQ ID NO: 253425 - DNA, 19 bp, Homo sapiens
  siRNA target sequence for AKAP6 (NM_004274.3,6498-6516).
ggtcaccaattacatagaa

SEQ ID NO: 253426 - DNA, 19 bp, Homo sapiens
  siRNA target sequence for AKAP6 (NM_004274.3,6549-6567).
cactgactcgggcttagat

SEQ ID NO: 253427 - DNA, 19 bp, Homo sapiens
  siRNA target sequence for AKAP6 (NM_004274.3,6625-6643).
gaggagccttgtttctcta

SEQ ID NO: 253428 - DNA, 19 bp, Homo sapiens
  siRNA target sequence for AKAP6 (NM_004274.3,6639-6657).
ctctagtgctcctccaaat

SEQ ID NO: 253429 - DNA, 19 bp, Homo sapiens
  siRNA target sequence for AKAP6 (NM_004274.3,6694-6712).
caagcaacagcatgttctt

SEQ ID NO: 253430 - DNA, 19 bp, Homo sapiens
  siRNA target sequence for AKAP6 (NM_004274.3,6751-6769).
gatacagtggctctttcaa

SEQ ID NO: 253431 - DNA, 19 bp, Homo sapiens
  siRNA target sequence for AKAP6 (NM_004274.3,6839-6857).
gtgcagaaaacttagagtt

SEQ ID NO: 253432 - DNA, 19 bp, Homo sapiens
  siRNA target sequence for AKAP6 (NM_004274.3,6885-6903).
ggaaagttccggaaaacca

SEQ ID NO: 253433 - DNA, 19 bp, Homo sapiens
  siRNA target sequence for AKAP6 (NM_004274.3,6894-6912).
cggaaaaccaggtgaatct

SEQ ID NO: 253434 - DNA, 19 bp, Homo sapiens
  siRNA target sequence for AKAP6 (NM_004274.3,7063-7081).
cgacatagaaatatgcata

SEQ ID NO: 253435 - DNA, 19 bp, Homo sapiens
  siRNA target sequence for AKAP7 (NM_004842.2,273-291).
gcccgatgacgctgaacta

SEQ ID NO: 253436 - DNA, 19 bp, Homo sapiens
  siRNA target sequence for AKAP7 (NM_004842.2,275-293).
ccgatgacgctgaactagt

SEQ ID NO: 253437 - DNA, 19 bp, Homo sapiens
  siRNA target sequence for AKAP7 (NM_004842.2,276-294).
cgatgacgctgaactagta

SEQ ID NO: 253438 - DNA, 19 bp, Homo sapiens
  siRNA target sequence for AKAP7 (NM_004842.2,289-307).
ctagtaaggctcagtaaga

SEQ ID NO: 253439 - DNA, 19 bp, Homo sapiens
  siRNA target sequence for AKAP7 (NM_016377.2,20-38).
ggaatttgaagccaatact

SEQ ID NO: 253440 - DNA, 19 bp, Homo sapiens
  siRNA target sequence for AKAP7 (NM_016377.2,27-45).
gaagccaatactatggatt

SEQ ID NO: 253441 - DNA, 19 bp, Homo sapiens
  siRNA target sequence for AKAP7 (NM_016377.2,51-69).
gtagacatgccatttgcta

SEQ ID NO: 253442 - DNA, 19 bp, Homo sapiens
  siRNA target sequence for AKAP7 (NM_016377.2,189-207).
gattatcaacccaactatt

SEQ ID NO: 253443 - DNA, 19 bp, Homo sapiens
  siRNA target sequence for AKAP7 (NM_016377.2,215-233).
cattccaatcaccaacaaa

SEQ ID NO: 253444 - DNA, 19 bp, Homo sapiens
  siRNA target sequence for AKAP7 (NM_016377.2,224-242).
caccaacaaagagattata

SEQ ID NO: 253445 - DNA, 19 bp, Homo sapiens
  siRNA target sequence for AKAP7 (NM_016377.2,268-286).
caataatacaacaagatga

SEQ ID NO: 253446 - DNA, 19 bp, Homo sapiens
  siRNA target sequence for AKAP7 (NM_016377.2,308-326).
cagtgatggttcctttcat

SEQ ID NO: 253447 - DNA, 19 bp, Homo sapiens
  siRNA target sequence for AKAP7 (NM_016377.2,335-353).
gctggtgatgcaattatta

SEQ ID NO: 253448 - DNA, 19 bp, Homo sapiens
  siRNA target sequence for AKAP7 (NM_016377.2,360-378).
gatgaagtaaacattggta

SEQ ID NO: 253449 - DNA, 19 bp, Homo sapiens
  siRNA target sequence for AKAP7 (NM_016377.2,387-405).
cttttggaattgaaaccat

SEQ ID NO: 253450 - DNA, 19 bp, Homo sapiens
  siRNA target sequence for AKAP7 (NM_016377.2,392-410).
ggaattgaaaccattcata

SEQ ID NO: 253451 - DNA, 19 bp, Homo sapiens
  siRNA target sequence for AKAP7 (NM_016377.2,422-440).
ccagggaaaacatttgact

SEQ ID NO: 253452 - DNA, 19 bp, Homo sapiens
  siRNA target sequence for AKAP7 (NM_016377.2,444-462).
ccctttcaagggattggta

SEQ ID NO: 253453 - DNA, 19 bp, Homo sapiens
  siRNA target sequence for AKAP7 (NM_016377.2,496-514).
cagaaggagatcatgtaaa

SEQ ID NO: 253454 - DNA, 19 bp, Homo sapiens
  siRNA target sequence for AKAP7 (NM_016377.2,498-516).
gaaggagatcatgtaaact

SEQ ID NO: 253455 - DNA, 19 bp, Homo sapiens
  siRNA target sequence for AKAP7 (NM_016377.2,600-618).
catttgaccttcatgaagt

SEQ ID NO: 253456 - DNA, 19 bp, Homo sapiens
  siRNA target sequence for AKAP7 (NM_016377.2,628-646).
caccgtggctccgtaagaa

SEQ ID NO: 253457 - DNA, 19 bp, Homo sapiens
  siRNA target sequence for AKAP7 (NM_016377.2,638-656).
ccgtaagaatggagtgaaa

SEQ ID NO: 253458 - DNA, 19 bp, Homo sapiens
  siRNA target sequence for AKAP7 (NM_016377.2,639-657).
cgtaagaatggagtgaaaa

SEQ ID NO: 253459 - DNA, 19 bp, Homo sapiens
  siRNA target sequence for AKAP7 (NM_138633.1,277-295).
gcagtcctacagagataca

SEQ ID NO: 253460 - DNA, 19 bp, Homo sapiens
  siRNA target sequence for AKAP7 (NM_138633.1,288-306).
gagatacagcaaggatata

SEQ ID NO: 253461 - DNA, 19 bp, Homo sapiens
  siRNA target sequence for PDCL (NM_005388.2,173-191).
ccacccttgatgataagtt

SEQ ID NO: 253462 - DNA, 19 bp, Homo sapiens
  siRNA target sequence for PDCL (NM_005388.2,197-215).
gggagaaactgcagtacta

SEQ ID NO: 253463 - DNA, 19 bp, Homo sapiens
  siRNA target sequence for PDCL (NM_005388.2,205-223).
ctgcagtactactatagca

SEQ ID NO: 253464 - DNA, 19 bp, Homo sapiens
  siRNA target sequence for PDCL (NM_005388.2,344-362).
caaaaggtgtgatcaatga

SEQ ID NO: 253465 - DNA, 19 bp, Homo sapiens
  siRNA target sequence for PDCL (NM_005388.2,868-886).
cctgccctgctgatctata

SEQ ID NO: 253466 - DNA, 19 bp, Homo sapiens
  siRNA target sequence for PDCL (NM_005388.2,869-887).
ctgccctgctgatctataa

SEQ ID NO: 253467 - DNA, 19 bp, Homo sapiens
  siRNA target sequence for PDCL (NM_005388.2,893-911).
gtgaattgatcggcaattt

SEQ ID NO: 253468 - DNA, 19 bp, Homo sapiens
  siRNA target sequence for PDCL (NM_005388.2,906-924).
caattttgttcgtgttact

SEQ ID NO: 253469 - DNA, 19 bp, Homo sapiens
  siRNA target sequence for PDCL (NM_005388.2,1014-1032).
gacatctgtgcgtaactct

SEQ ID NO: 253470 - DNA, 19 bp, Homo sapiens
  siRNA target sequence for PDCL (NM_005388.2,1050-1068).
ggatagcgacctggaaata

SEQ ID NO: 253471 - DNA, 19 bp, Homo sapiens
  siRNA target sequence for CD19 (NM_001770.3,212-230).
cccgcttaaacccttctta

SEQ ID NO: 253472 - DNA, 19 bp, Homo sapiens
  siRNA target sequence for CD19 (NM_001770.3,213-231).
ccgcttaaacccttcttaa

SEQ ID NO: 253473 - DNA, 19 bp, Homo sapiens
  siRNA target sequence for CD19 (NM_001770.3,214-232).
cgcttaaacccttcttaaa

SEQ ID NO: 253474 - DNA, 19 bp, Homo sapiens
  siRNA target sequence for CD19 (NM_001770.3,368-386).
gcctggctggacagtcaat

SEQ ID NO: 253475 - DNA, 19 bp, Homo sapiens
  siRNA target sequence for CD19 (NM_001770.3,405-423).
ctgttccggtggaatgttt

SEQ ID NO: 253476 - DNA, 19 bp, Homo sapiens
  siRNA target sequence for CD19 (NM_001770.3,698-716).
ccccaaggggcctaagtca

SEQ ID NO: 253477 - DNA, 19 bp, Homo sapiens
  siRNA target sequence for CD19 (NM_001770.3,699-717).
cccaaggggcctaagtcat

SEQ ID NO: 253478 - DNA, 19 bp, Homo sapiens
  siRNA target sequence for CD19 (NM_001770.3,700-718).
ccaaggggcctaagtcatt

SEQ ID NO: 253479 - DNA, 19 bp, Homo sapiens
  siRNA target sequence for CD19 (NM_001770.3,804-822).
caagacgctggaaagtatt

SEQ ID NO: 253480 - DNA, 19 bp, Homo sapiens
  siRNA target sequence for CD19 (NM_001770.3,807-825).
gacgctggaaagtattatt

SEQ ID NO: 253481 - DNA, 19 bp, Homo sapiens
  siRNA target sequence for CD19 (NM_001770.3,809-827).
cgctggaaagtattattgt

SEQ ID NO: 253482 - DNA, 19 bp, Homo sapiens
  siRNA target sequence for CD19 (NM_001770.3,866-884).
cactgctcggccagtacta

SEQ ID NO: 253483 - DNA, 19 bp, Homo sapiens
  siRNA target sequence for CD19 (NM_001770.3,927-945).
gtgactttggcttatctga

SEQ ID NO: 253484 - DNA, 19 bp, Homo sapiens
  siRNA target sequence for CD19 (NM_001770.3,961-979).
cccttgtgggcattcttca

SEQ ID NO: 253485 - DNA, 19 bp, Homo sapiens
  siRNA target sequence for CD19 (NM_001770.3,1160-1178).
gggcactgccccgtcttat

SEQ ID NO: 253486 - DNA, 19 bp, Homo sapiens
  siRNA target sequence for CD19 (NM_001770.3,1163-1181).
cactgccccgtcttatgga

SEQ ID NO: 253487 - DNA, 19 bp, Homo sapiens
  siRNA target sequence for CD19 (NM_001770.3,1289-1307).
ggaggactccgagttctat

SEQ ID NO: 253488 - DNA, 19 bp, Homo sapiens
  siRNA target sequence for CD19 (NM_001770.3,1409-1427).
ctccaacgctgagtcttat

SEQ ID NO: 253489 - DNA, 19 bp, Homo sapiens
  siRNA target sequence for CD19 (NM_001770.3,1411-1429).
ccaacgctgagtcttatga

SEQ ID NO: 253490 - DNA, 19 bp, Homo sapiens
  siRNA target sequence for FLRT2 (NM_013231.2,166-184).
gccatggggcttttttcct

SEQ ID NO: 253491 - DNA, 19 bp, Homo sapiens
  siRNA target sequence for FLRT2 (NM_013231.2,174-192).
gcttttttcctgaagtctt

SEQ ID NO: 253492 - DNA, 19 bp, Homo sapiens
  siRNA target sequence for FLRT2 (NM_013231.2,183-201).
ctgaagtcttggcttatca

SEQ ID NO: 253493 - DNA, 19 bp, Homo sapiens
  siRNA target sequence for FLRT2 (NM_013231.2,185-203).
gaagtcttggcttatcatt

SEQ ID NO: 253494 - DNA, 19 bp, Homo sapiens
  siRNA target sequence for FLRT2 (NM_013231.2,257-275).
ccgctgcgacaggaacttt

SEQ ID NO: 253495 - DNA, 19 bp, Homo sapiens
  siRNA target sequence for FLRT2 (NM_013231.2,345-363).
ctccacaacaaccaaatta

SEQ ID NO: 253496 - DNA, 19 bp, Homo sapiens
  siRNA target sequence for FLRT2 (NM_013231.2,347-365).
ccacaacaaccaaattaat

SEQ ID NO: 253497 - DNA, 19 bp, Homo sapiens
  siRNA target sequence for FLRT2 (NM_013231.2,427-445).
gcaaccaactggacgaatt

SEQ ID NO: 253498 - DNA, 19 bp, Homo sapiens
  siRNA target sequence for FLRT2 (NM_013231.2,449-467).
catgaaccttcccaagaat

SEQ ID NO: 253499 - DNA, 19 bp, Homo sapiens
  siRNA target sequence for FLRT2 (NM_013231.2,494-512).
caatattcagaccatttca

SEQ ID NO: 253500 - DNA, 19 bp, Homo sapiens
  siRNA target sequence for FLRT2 (NM_013231.2,597-615).
gccttccgggaggctatta

SEQ ID NO: 253501 - DNA, 19 bp, Homo sapiens
  siRNA target sequence for FLRT2 (NM_013231.2,606-624).
gaggctattagcctcaaat

SEQ ID NO: 253502 - DNA, 19 bp, Homo sapiens
  siRNA target sequence for FLRT2 (NM_013231.2,609-627).
gctattagcctcaaattgt

SEQ ID NO: 253503 - DNA, 19 bp, Homo sapiens
  siRNA target sequence for FLRT2 (NM_013231.2,692-710).
gagagtggatgaaaatcga

SEQ ID NO: 253504 - DNA, 19 bp, Homo sapiens
  siRNA target sequence for FLRT2 (NM_013231.2,698-716).
ggatgaaaatcgaattgct

SEQ ID NO: 253505 - DNA, 19 bp, Homo sapiens
  siRNA target sequence for FLRT2 (NM_013231.2,748-766).
cgagcttggagcgtcttat

SEQ ID NO: 253506 - DNA, 19 bp, Homo sapiens
  siRNA target sequence for FLRT2 (NM_013231.2,749-767).
gagcttggagcgtcttatt

SEQ ID NO: 253507 - DNA, 19 bp, Homo sapiens
  siRNA target sequence for FLRT2 (NM_013231.2,751-769).
gcttggagcgtcttattgt

SEQ ID NO: 253508 - DNA, 19 bp, Homo sapiens
  siRNA target sequence for FLRT2 (NM_013231.2,824-842).
caccaagctcaaggaattt

SEQ ID NO: 253509 - DNA, 19 bp, Homo sapiens
  siRNA target sequence for FLRT2 (NM_013231.2,827-845).
caagctcaaggaattttca

SEQ ID NO: 253510 - DNA, 19 bp, Homo sapiens
  siRNA target sequence for FLRT2 (NM_013231.2,830-848).
gctcaaggaattttcaatt

SEQ ID NO: 253511 - DNA, 19 bp, Homo sapiens
  siRNA target sequence for FLRT2 (NM_013231.2,894-912).
catctgatcaggctctatt

SEQ ID NO: 253512 - DNA, 19 bp, Homo sapiens
  siRNA target sequence for FLRT2 (NM_013231.2,968-986).
gctggaacggctggatata

SEQ ID NO: 253513 - DNA, 19 bp, Homo sapiens
  siRNA target sequence for FLRT2 (NM_013231.2,969-987).
ctggaacggctggatatat

SEQ ID NO: 253514 - DNA, 19 bp, Homo sapiens
  siRNA target sequence for FLRT2 (NM_013231.2,972-990).
gaacggctggatatatcca

SEQ ID NO: 253515 - DNA, 19 bp, Homo sapiens
  siRNA target sequence for FLRT2 (NM_013231.2,1007-1025).
gctgactcaaggggttttt

SEQ ID NO: 253516 - DNA, 19 bp, Homo sapiens
  siRNA target sequence for FLRT2 (NM_013231.2,1010-1028).
gactcaaggggtttttgat

SEQ ID NO: 253517 - DNA, 19 bp, Homo sapiens
  siRNA target sequence for FLRT2 (NM_013231.2,1017-1035).
ggggtttttgataatctct

SEQ ID NO: 253518 - DNA, 19 bp, Homo sapiens
  siRNA target sequence for FLRT2 (NM_013231.2,1098-1116).
gtcacagaatggctcaaat

SEQ ID NO: 253519 - DNA, 19 bp, Homo sapiens
  siRNA target sequence for FLRT2 (NM_013231.2,1102-1120).
cagaatggctcaaatatat

SEQ ID NO: 253520 - DNA, 19 bp, Homo sapiens
  siRNA target sequence for FLRT2 (NM_013231.2,1178-1196).
gatggccgtcagggaatta

SEQ ID NO: 253521 - DNA, 19 bp, Homo sapiens
  siRNA target sequence for FLRT2 (NM_013231.2,1181-1199).
ggccgtcagggaattaaat

SEQ ID NO: 253522 - DNA, 19 bp, Homo sapiens
  siRNA target sequence for FLRT2 (NM_013231.2,1182-1200).
gccgtcagggaattaaata

SEQ ID NO: 253523 - DNA, 19 bp, Homo sapiens
  siRNA target sequence for FLRT2 (NM_013231.2,1183-1201).
ccgtcagggaattaaatat

SEQ ID NO: 253524 - DNA, 19 bp, Homo sapiens
  siRNA target sequence for FLRT2 (NM_013231.2,1412-1430).
ccagctctctatccatttt

SEQ ID NO: 253525 - DNA, 19 bp, Homo sapiens
  siRNA target sequence for FLRT2 (NM_013231.2,1416-1434).
ctctctatccattttgtga

SEQ ID NO: 253526 - DNA, 19 bp, Homo sapiens
  siRNA target sequence for FLRT2 (NM_013231.2,1472-1490).
caccgtgatggcatacaaa

SEQ ID NO: 253527 - DNA, 19 bp, Homo sapiens
  siRNA target sequence for FLRT2 (NM_013231.2,1474-1492).
ccgtgatggcatacaaact

SEQ ID NO: 253528 - DNA, 19 bp, Homo sapiens
  siRNA target sequence for FLRT2 (NM_013231.2,1502-1520).
gaaaatgggccacagttta

SEQ ID NO: 253529 - DNA, 19 bp, Homo sapiens
  siRNA target sequence for FLRT2 (NM_013231.2,1597-1615).
ccacctatcggatttgttt

SEQ ID NO: 253530 - DNA, 19 bp, Homo sapiens
  siRNA target sequence for FLRT2 (NM_013231.2,1598-1616).
cacctatcggatttgttta

SEQ ID NO: 253531 - DNA, 19 bp, Homo sapiens
  siRNA target sequence for FLRT2 (NM_013231.2,1600-1618).
cctatcggatttgtttagt

SEQ ID NO: 253532 - DNA, 19 bp, Homo sapiens
  siRNA target sequence for FLRT2 (NM_013231.2,1617-1635).
gtgccactggatgctttta

SEQ ID NO: 253533 - DNA, 19 bp, Homo sapiens
  siRNA target sequence for FLRT2 (NM_013231.2,1620-1638).
ccactggatgcttttaact

SEQ ID NO: 253534 - DNA, 19 bp, Homo sapiens
  siRNA target sequence for FLRT2 (NM_013231.2,1644-1662).
gcggtagaagacaccattt

SEQ ID NO: 253535 - DNA, 19 bp, Homo sapiens
  siRNA target sequence for FLRT2 (NM_013231.2,1646-1664).
ggtagaagacaccatttgt

SEQ ID NO: 253536 - DNA, 19 bp, Homo sapiens
  siRNA target sequence for FLRT2 (NM_013231.2,1647-1665).
gtagaagacaccatttgtt

SEQ ID NO: 253537 - DNA, 19 bp, Homo sapiens
  siRNA target sequence for FLRT2 (NM_013231.2,1678-1696).
cccatgcctcctatctgaa

SEQ ID NO: 253538 - DNA, 19 bp, Homo sapiens
  siRNA target sequence for FLRT2 (NM_013231.2,1940-1958).
gatgacagaaaccagtttt

SEQ ID NO: 253539 - DNA, 19 bp, Homo sapiens
  siRNA target sequence for FLRT2 (NM_013231.2,1959-1977).
cagatcgtctccttaaata

SEQ ID NO: 253540 - DNA, 19 bp, Homo sapiens
  siRNA target sequence for FLRT2 (NM_013231.2,1969-1987).
ccttaaataacgatcaact

SEQ ID NO: 253541 - DNA, 19 bp, Homo sapiens
  siRNA target sequence for FLRT2 (NM_013231.2,2024-2042).
cccaaatgggggcattaat

SEQ ID NO: 253542 - DNA, 19 bp, Homo sapiens
  siRNA target sequence for FLRT2 (NM_013231.2,2025-2043).
ccaaatgggggcattaatt

SEQ ID NO: 253543 - DNA, 19 bp, Homo sapiens
  siRNA target sequence for FLRT2 (NM_013231.2,2026-2044).
caaatgggggcattaatta

SEQ ID NO: 253544 - DNA, 19 bp, Homo sapiens
  siRNA target sequence for MADH1 (NM_005900.1,491-509).
ggaaacagggcgatgaaga

SEQ ID NO: 253545 - DNA, 19 bp, Homo sapiens
  siRNA target sequence for MADH1 (NM_005900.1,492-510).
gaaacagggcgatgaagaa

SEQ ID NO: 253546 - DNA, 19 bp, Homo sapiens
  siRNA target sequence for MADH1 (NM_005900.1,726-744).
gagccaccatgaactaaaa

SEQ ID NO: 253547 - DNA, 19 bp, Homo sapiens
  siRNA target sequence for MADH1 (NM_005900.1,900-918).
ccgtaacttaggacaaaat

SEQ ID NO: 253548 - DNA, 19 bp, Homo sapiens
  siRNA target sequence for MADH1 (NM_005900.1,902-920).
gtaacttaggacaaaatga

SEQ ID NO: 253549 - DNA, 19 bp, Homo sapiens
  siRNA target sequence for MADH1 (NM_005900.1,985-1003).
cctcactctcccaatagca

SEQ ID NO: 253550 - DNA, 19 bp, Homo sapiens
  siRNA target sequence for MADH1 (NM_005900.1,1150-1168).
cagccgatggacacaaaca

SEQ ID NO: 253551 - DNA, 19 bp, Homo sapiens
  siRNA target sequence for MADH1 (NM_005900.1,1153-1171).
ccgatggacacaaacatga

SEQ ID NO: 253552 - DNA, 19 bp, Homo sapiens
  siRNA target sequence for MADH1 (NM_005900.1,1154-1172).
cgatggacacaaacatgat

SEQ ID NO: 253553 - DNA, 19 bp, Homo sapiens
  siRNA target sequence for MADH1 (NM_005900.1,1244-1262).
ggtgctctattgtctacta

SEQ ID NO: 253554 - DNA, 19 bp, Homo sapiens
  siRNA target sequence for MADH1 (NM_005900.1,1245-1263).
gtgctctattgtctactat

SEQ ID NO: 253555 - DNA, 19 bp, Homo sapiens
  siRNA target sequence for MADH1 (NM_005900.1,1247-1265).
gctctattgtctactatga

SEQ ID NO: 253556 - DNA, 19 bp, Homo sapiens
  siRNA target sequence for MADH1 (NM_005900.1,1257-1275).
ctactatgagctcaacaat

SEQ ID NO: 253557 - DNA, 19 bp, Homo sapiens
  siRNA target sequence for MADH1 (NM_005900.1,1386-1404).
ccggaattccactattgaa

SEQ ID NO: 253558 - DNA, 19 bp, Homo sapiens
  siRNA target sequence for MADH1 (NM_005900.1,1387-1405).
cggaattccactattgaaa

SEQ ID NO: 253559 - DNA, 19 bp, Homo sapiens
  siRNA target sequence for MADH1 (NM_005900.1,1515-1533).
ctaccatcatggatttcat

SEQ ID NO: 253560 - DNA, 19 bp, Homo sapiens
  siRNA target sequence for MADH1 (NM_005900.1,1559-1577).
gtgggtgtagtctgaaaat

SEQ ID NO: 253561 - DNA, 19 bp, Homo sapiens
  siRNA target sequence for MADH1 (NM_005900.1,1561-1579).
gggtgtagtctgaaaattt

SEQ ID NO: 253562 - DNA, 19 bp, Homo sapiens
  siRNA target sequence for MADH1 (NM_005900.1,1562-1580).
ggtgtagtctgaaaatttt

SEQ ID NO: 253563 - DNA, 19 bp, Homo sapiens
  siRNA target sequence for MADH1 (NM_005900.1,1637-1655).
cagtctatgagcttacaaa

SEQ ID NO: 253564 - DNA, 19 bp, Homo sapiens
  siRNA target sequence for MADH1 (NM_005900.1,1639-1657).
gtctatgagcttacaaaaa

SEQ ID NO: 253565 - DNA, 19 bp, Homo sapiens
  siRNA target sequence for MADH1 (NM_005900.1,1704-1722).
ccaccgccaggatgttact

SEQ ID NO: 253566 - DNA, 19 bp, Homo sapiens
  siRNA target sequence for MADH1 (NM_005900.1,1705-1723).
caccgccaggatgttacta

SEQ ID NO: 253567 - DNA, 19 bp, Homo sapiens
  siRNA target sequence for MADH1 (NM_005900.1,1794-1812).
gggttcacctcataatcct

SEQ ID NO: 253568 - DNA, 19 bp, Homo sapiens
  siRNA target sequence for MADH1 (NM_005900.1,1795-1813).
ggttcacctcataatccta

SEQ ID NO: 253569 - DNA, 19 bp, Homo sapiens
  siRNA target sequence for MADH1 (NM_005900.1,1796-1814).
gttcacctcataatcctat

SEQ ID NO: 253570 - DNA, 19 bp, Homo sapiens
  siRNA target sequence for MADH5 (NM_005903.4,373-391).
gccagcttgttttctttta

SEQ ID NO: 253571 - DNA, 19 bp, Homo sapiens
  siRNA target sequence for MADH5 (NM_005903.4,398-416).
cagcagtaaagcgattgtt

SEQ ID NO: 253572 - DNA, 19 bp, Homo sapiens
  siRNA target sequence for MADH5 (NM_005903.4,539-557).
gacagccgagtaaatgtgt

SEQ ID NO: 253573 - DNA, 19 bp, Homo sapiens
  siRNA target sequence for MADH5 (NM_005903.4,558-576).
cactattcccagatcttta

SEQ ID NO: 253574 - DNA, 19 bp, Homo sapiens
  siRNA target sequence for MADH5 (NM_005903.4,581-599).
gacgcctgcaggtttctca

SEQ ID NO: 253575 - DNA, 19 bp, Homo sapiens
  siRNA target sequence for MADH5 (NM_005903.4,607-625).
ggcttaccccatgttatat

SEQ ID NO: 253576 - DNA, 19 bp, Homo sapiens
  siRNA target sequence for MADH5 (NM_005903.4,667-685).
gagctaaagccgttggata

SEQ ID NO: 253577 - DNA, 19 bp, Homo sapiens
  siRNA target sequence for MADH5 (NM_005903.4,669-687).
gctaaagccgttggatatt

SEQ ID NO: 253578 - DNA, 19 bp, Homo sapiens
  siRNA target sequence for MADH5 (NM_005903.4,670-688).
ctaaagccgttggatattt

SEQ ID NO: 253579 - DNA, 19 bp, Homo sapiens
  siRNA target sequence for MADH5 (NM_005903.4,675-693).
gccgttggatatttgtgaa

SEQ ID NO: 253580 - DNA, 19 bp, Homo sapiens
  siRNA target sequence for MADH5 (NM_005903.4,697-715).
ccttttggatctaagcaaa

SEQ ID NO: 253581 - DNA, 19 bp, Homo sapiens
  siRNA target sequence for MADH5 (NM_005903.4,784-802).
cctcgtcataatgaattca

SEQ ID NO: 253582 - DNA, 19 bp, Homo sapiens
  siRNA target sequence for MADH5 (NM_005903.4,785-803).
ctcgtcataatgaattcaa

SEQ ID NO: 253583 - DNA, 19 bp, Homo sapiens
  siRNA target sequence for MADH5 (NM_005903.4,897-915).
gcccaacaacactcctttt

SEQ ID NO: 253584 - DNA, 19 bp, Homo sapiens
  siRNA target sequence for MADH5 (NM_005903.4,989-1007).
gaccaggaagtccatttca

SEQ ID NO: 253585 - DNA, 19 bp, Homo sapiens
  siRNA target sequence for MADH5 (NM_005903.4,1035-1053).
ctatatgccacctgatgat

SEQ ID NO: 253586 - DNA, 19 bp, Homo sapiens
  siRNA target sequence for MADH5 (NM_005903.4,1051-1069).
gatcagatgggtcaagata

SEQ ID NO: 253587 - DNA, 19 bp, Homo sapiens
  siRNA target sequence for MADH5 (NM_005903.4,1077-1095).
gcctatggatacaagcaat

SEQ ID NO: 253588 - DNA, 19 bp, Homo sapiens
  siRNA target sequence for MADH5 (NM_005903.4,1079-1097).
ctatggatacaagcaataa

SEQ ID NO: 253589 - DNA, 19 bp, Homo sapiens
  siRNA target sequence for MADH5 (NM_005903.4,1108-1126).
cagattatgcccagtatat

SEQ ID NO: 253590 - DNA, 19 bp, Homo sapiens
  siRNA target sequence for MADH5 (NM_005903.4,1168-1186).
cattggtgttcaatagtct

SEQ ID NO: 253591 - DNA, 19 bp, Homo sapiens
  siRNA target sequence for MADH5 (NM_005903.4,1172-1190).
ggtgttcaatagtctacta

SEQ ID NO: 253592 - DNA, 19 bp, Homo sapiens
  siRNA target sequence for MADH5 (NM_005903.4,1173-1191).
gtgttcaatagtctactat

SEQ ID NO: 253593 - DNA, 19 bp, Homo sapiens
  siRNA target sequence for MADH5 (NM_005903.4,1175-1193).
gttcaatagtctactatga

SEQ ID NO: 253594 - DNA, 19 bp, Homo sapiens
  siRNA target sequence for MADH5 (NM_005903.4,1178-1196).
caatagtctactatgaatt

SEQ ID NO: 253595 - DNA, 19 bp, Homo sapiens
  siRNA target sequence for MADH5 (NM_005903.4,1216-1234).
gcttttcatgcatcttcta

SEQ ID NO: 253596 - DNA, 19 bp, Homo sapiens
  siRNA target sequence for MADH5 (NM_005903.4,1229-1247).
cttctactagtgtgttagt

SEQ ID NO: 253597 - DNA, 19 bp, Homo sapiens
  siRNA target sequence for MADH5 (NM_005903.4,1232-1250).
ctactagtgtgttagtaga

SEQ ID NO: 253598 - DNA, 19 bp, Homo sapiens
  siRNA target sequence for MADH5 (NM_005903.4,1242-1260).
gttagtagatggattcaca

SEQ ID NO: 253599 - DNA, 19 bp, Homo sapiens
  siRNA target sequence for MADH5 (NM_005903.4,1259-1277).
cagatccttcaaataacaa

SEQ ID NO: 253600 - DNA, 19 bp, Homo sapiens
  siRNA target sequence for MADH5 (NM_005903.4,1289-1307).
gcttgggtttgttgtcaaa

SEQ ID NO: 253601 - DNA, 19 bp, Homo sapiens
  siRNA target sequence for MADH5 (NM_005903.4,1293-1311).
gggtttgttgtcaaatgtt

SEQ ID NO: 253602 - DNA, 19 bp, Homo sapiens
  siRNA target sequence for MADH5 (NM_005903.4,1299-1317).
gttgtcaaatgttaatcgt

SEQ ID NO: 253603 - DNA, 19 bp, Homo sapiens
  siRNA target sequence for MADH5 (NM_005903.4,1302-1320).
gtcaaatgttaatcgtaat

SEQ ID NO: 253604 - DNA, 19 bp, Homo sapiens
  siRNA target sequence for MADH5 (NM_005903.4,1315-1333).
cgtaattcgacaattgaaa

SEQ ID NO: 253605 - DNA, 19 bp, Homo sapiens
  siRNA target sequence for MADH5 (NM_005903.4,1316-1334).
gtaattcgacaattgaaaa

SEQ ID NO: 253606 - DNA, 19 bp, Homo sapiens
  siRNA target sequence for MADH5 (NM_005903.4,1428-1446).
gagtaggaactgcaacttt

SEQ ID NO: 253607 - DNA, 19 bp, Homo sapiens
  siRNA target sequence for MADH5 (NM_005903.4,1430-1448).
gtaggaactgcaactttca

SEQ ID NO: 253608 - DNA, 19 bp, Homo sapiens
  siRNA target sequence for MADH5 (NM_005903.4,1567-1585).
gtatatgagctcaccaaaa

SEQ ID NO: 253609 - DNA, 19 bp, Homo sapiens
  siRNA target sequence for MADH5 (NM_005903.4,1658-1676).
catgttggattgagattat

SEQ ID NO: 253610 - DNA, 19 bp, Homo sapiens
  siRNA target sequence for MADH5 (NM_005903.4,1661-1679).
gttggattgagattatctt

SEQ ID NO: 253611 - DNA, 19 bp, Homo sapiens
  siRNA target sequence for MS4A1 (NM_021950.2,201-219).
ggccctattgctatgcaat

SEQ ID NO: 253612 - DNA, 19 bp, Homo sapiens
  siRNA target sequence for MS4A1 (NM_021950.2,281-299).
catgagggaatctaagact

SEQ ID NO: 253613 - DNA, 19 bp, Homo sapiens
  siRNA target sequence for MS4A1 (NM_021950.2,305-323).
ggctgtccagattatgaat

SEQ ID NO: 253614 - DNA, 19 bp, Homo sapiens
  siRNA target sequence for MS4A1 (NM_021950.2,340-358).
ccctggggggtcttctgat

SEQ ID NO: 253615 - DNA, 19 bp, Homo sapiens
  siRNA target sequence for MS4A1 (NM_021950.2,410-428).
ctggggaggcattatgtat

SEQ ID NO: 253616 - DNA, 19 bp, Homo sapiens
  siRNA target sequence for MS4A1 (NM_021950.2,412-430).
ggggaggcattatgtatat

SEQ ID NO: 253617 - DNA, 19 bp, Homo sapiens
  siRNA target sequence for MS4A1 (NM_021950.2,414-432).
ggaggcattatgtatatta

SEQ ID NO: 253618 - DNA, 19 bp, Homo sapiens
  siRNA target sequence for MS4A1 (NM_021950.2,415-433).
gaggcattatgtatattat

SEQ ID NO: 253619 - DNA, 19 bp, Homo sapiens
  siRNA target sequence for MS4A1 (NM_021950.2,447-465).
ctggcagcaacggagaaaa

SEQ ID NO: 253620 - DNA, 19 bp, Homo sapiens
  siRNA target sequence for MS4A1 (NM_021950.2,450-468).
gcagcaacggagaaaaact

SEQ ID NO: 253621 - DNA, 19 bp, Homo sapiens
  siRNA target sequence for MS4A1 (NM_021950.2,677-695).
cccatctacccaatactgt

SEQ ID NO: 253622 - DNA, 19 bp, Homo sapiens
  siRNA target sequence for MS4A1 (NM_021950.2,678-696).
ccatctacccaatactgtt

SEQ ID NO: 253623 - DNA, 19 bp, Homo sapiens
  siRNA target sequence for MS4A1 (NM_021950.2,679-697).
catctacccaatactgtta

SEQ ID NO: 253624 - DNA, 19 bp, Homo sapiens
  siRNA target sequence for MS4A1 (NM_021950.2,692-710).
ctgttacagcatacaatct

SEQ ID NO: 253625 - DNA, 19 bp, Homo sapiens
  siRNA target sequence for MS4A1 (NM_021950.2,694-712).
gttacagcatacaatctct

SEQ ID NO: 253626 - DNA, 19 bp, Homo sapiens
  siRNA target sequence for MS4A1 (NM_021950.2,700-718).
gcatacaatctctgttctt

SEQ ID NO: 253627 - DNA, 19 bp, Homo sapiens
  siRNA target sequence for MS4A1 (NM_021950.2,803-821).
gtgctccagacccaaatct

SEQ ID NO: 253628 - DNA, 19 bp, Homo sapiens
  siRNA target sequence for MS4A1 (NM_021950.2,805-823).
gctccagacccaaatctaa

SEQ ID NO: 253629 - DNA, 19 bp, Homo sapiens
  siRNA target sequence for MS4A1 (NM_021950.2,882-900).
gtggttgggctaactgaaa

SEQ ID NO: 253630 - DNA, 19 bp, Homo sapiens
  siRNA target sequence for MS4A1 (NM_021950.2,884-902).
ggttgggctaactgaaaca

SEQ ID NO: 253631 - DNA, 19 bp, Homo sapiens
  siRNA target sequence for MS4A1 (NM_021950.2,885-903).
gttgggctaactgaaacat

SEQ ID NO: 253632 - DNA, 19 bp, Homo sapiens
  siRNA target sequence for MS4A1 (NM_021950.2,888-906).
gggctaactgaaacatctt

SEQ ID NO: 253633 - DNA, 19 bp, Homo sapiens
  siRNA target sequence for MS4A1 (NM_021950.2,907-925).
cccaaccaaagaatgaaga

SEQ ID NO: 253634 - DNA, 19 bp, Homo sapiens
  siRNA target sequence for MS4A1 (NM_021950.2,1004-1022).
ggaatcctcaccaatagaa

SEQ ID NO: 253635 - DNA, 19 bp, Homo sapiens
  siRNA target sequence for MS4A1 (NM_021950.2,1005-1023).
gaatcctcaccaatagaaa

SEQ ID NO: 253636 - DNA, 19 bp, Homo sapiens
  siRNA target sequence for NSMAF (NM_003580.2,299-317).
cagcatagagccaatcaca

SEQ ID NO: 253637 - DNA, 19 bp, Homo sapiens
  siRNA target sequence for NSMAF (NM_003580.2,306-324).
gagccaatcacattttgca

SEQ ID NO: 253638 - DNA, 19 bp, Homo sapiens
  siRNA target sequence for NSMAF (NM_003580.2,356-374).
ggctccttaaaaatatgtt

SEQ ID NO: 253639 - DNA, 19 bp, Homo sapiens
  siRNA target sequence for NSMAF (NM_003580.2,385-403).
gatttttgaaccagattca

SEQ ID NO: 253640 - DNA, 19 bp, Homo sapiens
  siRNA target sequence for NSMAF (NM_003580.2,413-431).
cccatcatcaagattcctt

SEQ ID NO: 253641 - DNA, 19 bp, Homo sapiens
  siRNA target sequence for NSMAF (NM_003580.2,473-491).
gccaatagacacttcacaa

SEQ ID NO: 253642 - DNA, 19 bp, Homo sapiens
  siRNA target sequence for NSMAF (NM_003580.2,503-521).
gggggtatttcactcattt

SEQ ID NO: 253643 - DNA, 19 bp, Homo sapiens
  siRNA target sequence for NSMAF (NM_003580.2,615-633).
ccgggaaagtggaagatgt

SEQ ID NO: 253644 - DNA, 19 bp, Homo sapiens
  siRNA target sequence for NSMAF (NM_003580.2,616-634).
cgggaaagtggaagatgtt

SEQ ID NO: 253645 - DNA, 19 bp, Homo sapiens
  siRNA target sequence for NSMAF (NM_003580.2,660-678).
gagcatcctgccttgacaa

SEQ ID NO: 253646 - DNA, 19 bp, Homo sapiens
  siRNA target sequence for NSMAF (NM_003580.2,686-704).
gaccaaaccgccatgataa

SEQ ID NO: 253647 - DNA, 19 bp, Homo sapiens
  siRNA target sequence for NSMAF (NM_003580.2,688-706).
ccaaaccgccatgataaca

SEQ ID NO: 253648 - DNA, 19 bp, Homo sapiens
  siRNA target sequence for NSMAF (NM_003580.2,694-712).
cgccatgataacagctatt

SEQ ID NO: 253649 - DNA, 19 bp, Homo sapiens
  siRNA target sequence for NSMAF (NM_003580.2,718-736).
gtctcgtttagctagaaca

SEQ ID NO: 253650 - DNA, 19 bp, Homo sapiens
  siRNA target sequence for NSMAF (NM_003580.2,722-740).
cgtttagctagaacatcat

SEQ ID NO: 253651 - DNA, 19 bp, Homo sapiens
  siRNA target sequence for NSMAF (NM_003580.2,728-746).
gctagaacatcatttgaca

SEQ ID NO: 253652 - DNA, 19 bp, Homo sapiens
  siRNA target sequence for NSMAF (NM_003580.2,729-747).
ctagaacatcatttgacaa

SEQ ID NO: 253653 - DNA, 19 bp, Homo sapiens
  siRNA target sequence for NSMAF (NM_003580.2,805-823).
gacgcctctggtgactaat

SEQ ID NO: 253654 - DNA, 19 bp, Homo sapiens
  siRNA target sequence for NSMAF (NM_003580.2,808-826).
gcctctggtgactaatcct

SEQ ID NO: 253655 - DNA, 19 bp, Homo sapiens
  siRNA target sequence for NSMAF (NM_003580.2,990-1008).
gttccgacatctacctaaa

SEQ ID NO: 253656 - DNA, 19 bp, Homo sapiens
  siRNA target sequence for NSMAF (NM_003580.2,993-1011).
ccgacatctacctaaagtt

SEQ ID NO: 253657 - DNA, 19 bp, Homo sapiens
  siRNA target sequence for NSMAF (NM_003580.2,995-1013).
gacatctacctaaagttct

SEQ ID NO: 253658 - DNA, 19 bp, Homo sapiens
  siRNA target sequence for NSMAF (NM_003580.2,1012-1030).
ctatgaacctcaagataga

SEQ ID NO: 253659 - DNA, 19 bp, Homo sapiens
  siRNA target sequence for NSMAF (NM_003580.2,1119-1137).
gacacctttccaactatca

SEQ ID NO: 253660 - DNA, 19 bp, Homo sapiens
  siRNA target sequence for NSMAF (NM_003580.2,1121-1139).
cacctttccaactatcagt

SEQ ID NO: 253661 - DNA, 19 bp, Homo sapiens
  siRNA target sequence for NSMAF (NM_003580.2,1206-1224).
catggataatacatgatta

SEQ ID NO: 253662 - DNA, 19 bp, Homo sapiens
  siRNA target sequence for NSMAF (NM_003580.2,1260-1278).
ccttccgggatctcagtaa

SEQ ID NO: 253663 - DNA, 19 bp, Homo sapiens
  siRNA target sequence for NSMAF (NM_003580.2,1380-1398).
cgggttatgtactttttta

SEQ ID NO: 253664 - DNA, 19 bp, Homo sapiens
  siRNA target sequence for NSMAF (NM_003580.2,1407-1425).
ggattgcaccagagtatat

SEQ ID NO: 253665 - DNA, 19 bp, Homo sapiens
  siRNA target sequence for NSMAF (NM_003580.2,1457-1475).
gcagatagaatgttcaaca

SEQ ID NO: 253666 - DNA, 19 bp, Homo sapiens
  siRNA target sequence for NSMAF (NM_003580.2,1504-1522).
ggatggtgcaacggatttt

SEQ ID NO: 253667 - DNA, 19 bp, Homo sapiens
  siRNA target sequence for NSMAF (NM_003580.2,1505-1523).
gatggtgcaacggatttta

SEQ ID NO: 253668 - DNA, 19 bp, Homo sapiens
  siRNA target sequence for NSMAF (NM_003580.2,1509-1527).
gtgcaacggattttaaaga

SEQ ID NO: 253669 - DNA, 19 bp, Homo sapiens
  siRNA target sequence for NSMAF (NM_003580.2,1512-1530).
caacggattttaaagagtt

SEQ ID NO: 253670 - DNA, 19 bp, Homo sapiens
  siRNA target sequence for NSMAF (NM_003580.2,1556-1574).
gtgagctttctagtcaata

SEQ ID NO: 253671 - DNA, 19 bp, Homo sapiens
  siRNA target sequence for NSMAF (NM_003580.2,1679-1697).
gatgcattggaaagcaatt

SEQ ID NO: 253672 - DNA, 19 bp, Homo sapiens
  siRNA target sequence for NSMAF (NM_003580.2,1711-1729).
ccttcacgagtggattgat

SEQ ID NO: 253673 - DNA, 19 bp, Homo sapiens
  siRNA target sequence for NSMAF (NM_003580.2,1717-1735).
cgagtggattgatctaata

SEQ ID NO: 253674 - DNA, 19 bp, Homo sapiens
  siRNA target sequence for NSMAF (NM_003580.2,1718-1736).
gagtggattgatctaatat

SEQ ID NO: 253675 - DNA, 19 bp, Homo sapiens
  siRNA target sequence for NSMAF (NM_003580.2,1720-1738).
gtggattgatctaatattt

SEQ ID NO: 253676 - DNA, 19 bp, Homo sapiens
  siRNA target sequence for NSMAF (NM_003580.2,1841-1859).
gagaaggtagccatgctta

SEQ ID NO: 253677 - DNA, 19 bp, Homo sapiens
  siRNA target sequence for NSMAF (NM_003580.2,1851-1869).
ccatgcttacgcaaatctt

SEQ ID NO: 253678 - DNA, 19 bp, Homo sapiens
  siRNA target sequence for NSMAF (NM_003580.2,1856-1874).
cttacgcaaatcttggaat

SEQ ID NO: 253679 - DNA, 19 bp, Homo sapiens
  siRNA target sequence for NSMAF (NM_003580.2,1878-1896).
ggcagacaccaaaacaact

SEQ ID NO: 253680 - DNA, 19 bp, Homo sapiens
  siRNA target sequence for NSMAF (NM_003580.2,1884-1902).
caccaaaacaactatttgt

SEQ ID NO: 253681 - DNA, 19 bp, Homo sapiens
  siRNA target sequence for NSMAF (NM_003580.2,1886-1904).
ccaaaacaactatttgtga

SEQ ID NO: 253682 - DNA, 19 bp, Homo sapiens
  siRNA target sequence for NSMAF (NM_003580.2,1924-1942).
caccccaaagtttaaaagt

SEQ ID NO: 253683 - DNA, 19 bp, Homo sapiens
  siRNA target sequence for NSMAF (NM_003580.2,1948-1966).
ccagacctccagttataat

SEQ ID NO: 253684 - DNA, 19 bp, Homo sapiens
  siRNA target sequence for NSMAF (NM_003580.2,1951-1969).
gacctccagttataatgct

SEQ ID NO: 253685 - DNA, 19 bp, Homo sapiens
  siRNA target sequence for NSMAF (NM_003580.2,1956-1974).
ccagttataatgcttctat

SEQ ID NO: 253686 - DNA, 19 bp, Homo sapiens
  siRNA target sequence for NSMAF (NM_003580.2,2013-2031).
ccgaagaaagcaaaacact

SEQ ID NO: 253687 - DNA, 19 bp, Homo sapiens
  siRNA target sequence for NSMAF (NM_003580.2,2059-2077).
gttacacgagcactataaa

SEQ ID NO: 253688 - DNA, 19 bp, Homo sapiens
  siRNA target sequence for NSMAF (NM_003580.2,2114-2132).
cgcaatggatcttcagtat

SEQ ID NO: 253689 - DNA, 19 bp, Homo sapiens
  siRNA target sequence for NSMAF (NM_003580.2,2215-2233).
ggctttatcgtcttgttta

SEQ ID NO: 253690 - DNA, 19 bp, Homo sapiens
  siRNA target sequence for NSMAF (NM_003580.2,2224-2242).
gtcttgtttacttttacca

SEQ ID NO: 253691 - DNA, 19 bp, Homo sapiens
  siRNA target sequence for NSMAF (NM_003580.2,2265-2283).
cttcatgggataataatgt

SEQ ID NO: 253692 - DNA, 19 bp, Homo sapiens
  siRNA target sequence for NSMAF (NM_003580.2,2310-2328).
gacgccaggacacgttaat

SEQ ID NO: 253693 - DNA, 19 bp, Homo sapiens
  siRNA target sequence for NSMAF (NM_003580.2,2320-2338).
cacgttaatgggacatgat

SEQ ID NO: 253694 - DNA, 19 bp, Homo sapiens
  siRNA target sequence for NSMAF (NM_003580.2,2322-2340).
cgttaatgggacatgatga

SEQ ID NO: 253695 - DNA, 19 bp, Homo sapiens
  siRNA target sequence for NSMAF (NM_003580.2,2362-2380).
gcatgacaacaggctatat

SEQ ID NO: 253696 - DNA, 19 bp, Homo sapiens
  siRNA target sequence for NSMAF (NM_003580.2,2442-2460).
ccaaaagacaccactttga

SEQ ID NO: 253697 - DNA, 19 bp, Homo sapiens
  siRNA target sequence for NSMAF (NM_003580.2,2467-2485).
ggccgagctggaacatgat

SEQ ID NO: 253698 - DNA, 19 bp, Homo sapiens
  siRNA target sequence for NSMAF (NM_003580.2,2480-2498).
catgatgtcagtgtagata

SEQ ID NO: 253699 - DNA, 19 bp, Homo sapiens
  siRNA target sequence for NSMAF (NM_003580.2,2483-2501).
gatgtcagtgtagatacaa

SEQ ID NO: 253700 - DNA, 19 bp, Homo sapiens
  siRNA target sequence for NSMAF (NM_003580.2,2486-2504).
gtcagtgtagatacaatca

SEQ ID NO: 253701 - DNA, 19 bp, Homo sapiens
  siRNA target sequence for NSMAF (NM_003580.2,2488-2506).
cagtgtagatacaatcagt

SEQ ID NO: 253702 - DNA, 19 bp, Homo sapiens
  siRNA target sequence for NSMAF (NM_003580.2,2490-2508).
gtgtagatacaatcagttt

SEQ ID NO: 253703 - DNA, 19 bp, Homo sapiens
  siRNA target sequence for NSMAF (NM_003580.2,2546-2564).
gaaggcacagtgaatattt

SEQ ID NO: 253704 - DNA, 19 bp, Homo sapiens
  siRNA target sequence for NSMAF (NM_003580.2,2570-2588).
ctcacaacggccaccttaa

SEQ ID NO: 253705 - DNA, 19 bp, Homo sapiens
  siRNA target sequence for NSMAF (NM_003580.2,2574-2592).
caacggccaccttaatgca

SEQ ID NO: 253706 - DNA, 19 bp, Homo sapiens
  siRNA target sequence for NSMAF (NM_003580.2,2605-2623).
ccattcagggattgtatgt

SEQ ID NO: 253707 - DNA, 19 bp, Homo sapiens
  siRNA target sequence for NSMAF (NM_003580.2,2666-2684).
ggaacagatggctgtctta

SEQ ID NO: 253708 - DNA, 19 bp, Homo sapiens
  siRNA target sequence for NSMAF (NM_003580.2,2670-2688).
cagatggctgtcttaatgt

SEQ ID NO: 253709 - DNA, 19 bp, Homo sapiens
  siRNA target sequence for NSMAF (NM_003580.2,2672-2690).
gatggctgtcttaatgtca

SEQ ID NO: 253710 - DNA, 19 bp, Homo sapiens
  siRNA target sequence for NSMAF (NM_003580.2,2676-2694).
gctgtcttaatgtcattga

SEQ ID NO: 253711 - DNA, 19 bp, Homo sapiens
  siRNA target sequence for NSMAF (NM_003580.2,2711-2729).
ctcatctcctccatgacat

SEQ ID NO: 253712 - DNA, 19 bp, Homo sapiens
  siRNA target sequence for NSMAF (NM_003580.2,2759-2777).
gatggaaattccgttttat

SEQ ID NO: 253713 - DNA, 19 bp, Homo sapiens
  siRNA target sequence for NSMAF (NM_003580.2,2855-2873).
ggtgctgtgacatgtatat

SEQ ID NO: 253714 - DNA, 19 bp, Homo sapiens
  siRNA target sequence for NSMAF (NM_003580.2,2882-2900).
gaacagtgtagcagtatca

SEQ ID NO: 253715 - DNA, 19 bp, Homo sapiens
  siRNA target sequence for NSMAF (NM_003580.2,2885-2903).
cagtgtagcagtatcatca

SEQ ID NO: 253716 - DNA, 19 bp, Homo sapiens
  siRNA target sequence for RGS12 (NM_002926.2,1052-1070).
ggagccctgcggatttcgt

SEQ ID NO: 253717 - DNA, 19 bp, Homo sapiens
  siRNA target sequence for RGS12 (NM_002926.2,1079-1097).
gagctggagaccagatact

SEQ ID NO: 253718 - DNA, 19 bp, Homo sapiens
  siRNA target sequence for RGS12 (NM_002926.2,1092-1110).
gatacttgctgtcaatgaa

SEQ ID NO: 253719 - DNA, 19 bp, Homo sapiens
  siRNA target sequence for RGS12 (NM_002926.2,1329-1347).
gtctggtggaattttcaat

SEQ ID NO: 253720 - DNA, 19 bp, Homo sapiens
  siRNA target sequence for RGS12 (NM_002926.2,1368-1386).
cctttgtgcgagcaattca

SEQ ID NO: 253721 - DNA, 19 bp, Homo sapiens
  siRNA target sequence for RGS12 (NM_002926.2,1427-1445).
ccgcaactcgatttgatgt

SEQ ID NO: 253722 - DNA, 19 bp, Homo sapiens
  siRNA target sequence for RGS12 (NM_002926.2,1428-1446).
cgcaactcgatttgatgtt

SEQ ID NO: 253723 - DNA, 19 bp, Homo sapiens
  siRNA target sequence for RGS12 (NM_002926.2,1441-1459).
gatgttggacatgaaagta

SEQ ID NO: 253724 - DNA, 19 bp, Homo sapiens
  siRNA target sequence for RGS12 (NM_002926.2,1530-1548).
cagcattggactagaaagt

SEQ ID NO: 253725 - DNA, 19 bp, Homo sapiens
  siRNA target sequence for RGS12 (NM_002926.2,1532-1550).
gcattggactagaaagtca

SEQ ID NO: 253726 - DNA, 19 bp, Homo sapiens
  siRNA target sequence for RGS12 (NM_002926.2,1533-1551).
cattggactagaaagtcat

SEQ ID NO: 253727 - DNA, 19 bp, Homo sapiens
  siRNA target sequence for RGS12 (NM_002926.2,1547-1565).
gtcatgacgattttgcatt

SEQ ID NO: 253728 - DNA, 19 bp, Homo sapiens
  siRNA target sequence for RGS12 (NM_002926.2,1590-1608).
gatgatcgtgggctactta

SEQ ID NO: 253729 - DNA, 19 bp, Homo sapiens
  siRNA target sequence for RGS12 (NM_002926.2,1687-1705).
ctgcgggcagagcagaaaa

SEQ ID NO: 253730 - DNA, 19 bp, Homo sapiens
  siRNA target sequence for RGS12 (NM_002926.2,1819-1837).
ccggacgaccggcgatttt

SEQ ID NO: 253731 - DNA, 19 bp, Homo sapiens
  siRNA target sequence for RGS12 (NM_002926.2,1820-1838).
cggacgaccggcgattttt

SEQ ID NO: 253732 - DNA, 19 bp, Homo sapiens
  siRNA target sequence for RGS12 (NM_002926.2,1831-1849).
cgatttttcgggttggtta

SEQ ID NO: 253733 - DNA, 19 bp, Homo sapiens
  siRNA target sequence for RGS12 (NM_002926.2,1907-1925).
cttcctgccacgtgttcat

SEQ ID NO: 253734 - DNA, 19 bp, Homo sapiens
  siRNA target sequence for RGS12 (NM_002926.2,1933-1951).
ccagacttgtttaatcaca

SEQ ID NO: 253735 - DNA, 19 bp, Homo sapiens
  siRNA target sequence for RGS12 (NM_002926.2,1972-1990).
cggcggtttgggtttgagt

SEQ ID NO: 253736 - DNA, 19 bp, Homo sapiens
  siRNA target sequence for RGS12 (NM_002926.2,2009-2027).
ccaatggctgtctggaatt

SEQ ID NO: 253737 - DNA, 19 bp, Homo sapiens
  siRNA target sequence for RGS12 (NM_002926.2,2132-2150).
ccgatgcccaccagaacaa

SEQ ID NO: 253738 - DNA, 19 bp, Homo sapiens
  siRNA target sequence for RGS12 (NM_002926.2,2559-2577).
cgaccaggactcttacaca

SEQ ID NO: 253739 - DNA, 19 bp, Homo sapiens
  siRNA target sequence for RGS12 (NM_002926.2,2563-2581).
caggactcttacacagatt

SEQ ID NO: 253740 - DNA, 19 bp, Homo sapiens
  siRNA target sequence for RGS12 (NM_002926.2,2590-2608).
ggctggtccagcatcaact

SEQ ID NO: 253741 - DNA, 19 bp, Homo sapiens
  siRNA target sequence for RGS12 (NM_002926.2,2747-2765).
cccatcgaaatgttcgaaa

SEQ ID NO: 253742 - DNA, 19 bp, Homo sapiens
  siRNA target sequence for RGS12 (NM_002926.2,2753-2771).
gaaatgttcgaaagactaa

SEQ ID NO: 253743 - DNA, 19 bp, Homo sapiens
  siRNA target sequence for RGS12 (NM_002926.2,2761-2779).
cgaaagactaaggaagata

SEQ ID NO: 253744 - DNA, 19 bp, Homo sapiens
  siRNA target sequence for RGS12 (NM_002926.2,2834-2852).
cgtctgctcggagatcatt

SEQ ID NO: 253745 - DNA, 19 bp, Homo sapiens
  siRNA target sequence for RGS12 (NM_002926.2,2835-2853).
gtctgctcggagatcattt

SEQ ID NO: 253746 - DNA, 19 bp, Homo sapiens
  siRNA target sequence for RGS12 (NM_002926.2,2858-2876).
gatccaagagattcagtat

SEQ ID NO: 253747 - DNA, 19 bp, Homo sapiens
  siRNA target sequence for RGS12 (NM_002926.2,2947-2965).
gactgcgtcagcaacaaca

SEQ ID NO: 253748 - DNA, 19 bp, Homo sapiens
  siRNA target sequence for RGS12 (NM_002926.2,3073-3091).
gtcggtgtccgctacttct

SEQ ID NO: 253749 - DNA, 19 bp, Homo sapiens
  siRNA target sequence for RGS12 (NM_002926.2,3081-3099).
ccgctacttctctgatttt

SEQ ID NO: 253750 - DNA, 19 bp, Homo sapiens
  siRNA target sequence for RGS12 (NM_002926.2,3135-3153).
ctggcaggcctgtgaatat

SEQ ID NO: 253751 - DNA, 19 bp, Homo sapiens
  siRNA target sequence for RGS12 (NM_002926.2,3137-3155).
ggcaggcctgtgaatattt

SEQ ID NO: 253752 - DNA, 19 bp, Homo sapiens
  siRNA target sequence for RGS12 (NM_002926.2,3138-3156).
gcaggcctgtgaatatttt

SEQ ID NO: 253753 - DNA, 19 bp, Homo sapiens
  siRNA target sequence for RGS12 (NM_002926.2,3139-3157).
caggcctgtgaatatttta

SEQ ID NO: 253754 - DNA, 19 bp, Homo sapiens
  siRNA target sequence for RGS12 (NM_002926.2,3144-3162).
ctgtgaatattttaatcat

SEQ ID NO: 253755 - DNA, 19 bp, Homo sapiens
  siRNA target sequence for RGS12 (NM_002926.2,3167-3185).
ctgcacatgacaaaaagga

SEQ ID NO: 253756 - DNA, 19 bp, Homo sapiens
  siRNA target sequence for RGS12 (NM_002926.2,3295-3313).
cctcacccagacatgttca

SEQ ID NO: 253757 - DNA, 19 bp, Homo sapiens
  siRNA target sequence for RGS12 (NM_002926.2,3493-3511).
gtgtccacgccaaaaaagt

SEQ ID NO: 253758 - DNA, 19 bp, Homo sapiens
  siRNA target sequence for RGS12 (NM_002926.2,3495-3513).
gtccacgccaaaaaagtta

SEQ ID NO: 253759 - DNA, 19 bp, Homo sapiens
  siRNA target sequence for RGS12 (NM_002926.2,3498-3516).
cacgccaaaaaagttaagt

SEQ ID NO: 253760 - DNA, 19 bp, Homo sapiens
  siRNA target sequence for RGS12 (NM_002926.2,3533-3551).
gccgatccctgaatgaaga

SEQ ID NO: 253761 - DNA, 19 bp, Homo sapiens
  siRNA target sequence for RGS12 (NM_002926.2,3580-3598).
cggaaaggcgcgtttttct

SEQ ID NO: 253762 - DNA, 19 bp, Homo sapiens
  siRNA target sequence for RGS12 (NM_002926.2,3620-3638).
ccgggaggtcccagaaaaa

SEQ ID NO: 253763 - DNA, 19 bp, Homo sapiens
  siRNA target sequence for RGS12 (NM_002926.2,3622-3640).
gggaggtcccagaaaaaga

SEQ ID NO: 253764 - DNA, 19 bp, Homo sapiens
  siRNA target sequence for RGS12 (NM_002926.2,3845-3863).
gcttctccatcaaagacat

SEQ ID NO: 253765 - DNA, 19 bp, Homo sapiens
  siRNA target sequence for RGS12 (NM_002926.2,4005-4023).
gtttcggctggatcttgtt

SEQ ID NO: 253766 - DNA, 19 bp, Homo sapiens
  siRNA target sequence for RGS12 (NM_002926.2,4229-4247).
gaaaggcatccgcagataa

SEQ ID NO: 253767 - DNA, 19 bp, Homo sapiens
  siRNA target sequence for RGS12 (NM_002926.2,4235-4253).
catccgcagataaacagaa

SEQ ID NO: 253768 - DNA, 19 bp, Homo sapiens
  siRNA target sequence for RGS12 (NM_002926.2,4270-4288).
cagaacacagctgtaaatt

SEQ ID NO: 253769 - DNA, 19 bp, Homo sapiens
  siRNA target sequence for RGS12 (NM_002926.2,4325-4343).
gaacactaggcaagtctaa

SEQ ID NO: 253770 - DNA, 19 bp, Homo sapiens
  siRNA target sequence for RGS12 (NM_002926.2,4334-4352).
gcaagtctaattctattaa

SEQ ID NO: 253771 - DNA, 19 bp, Homo sapiens
  siRNA target sequence for RGS12 (NM_198227.1,2488-2506).
cgatgtggatcttgtaact

SEQ ID NO: 253772 - DNA, 19 bp, Homo sapiens
  siRNA target sequence for RGS12 (NM_198587.1,123-141).
ctttactaatcatcatact

SEQ ID NO: 253773 - DNA, 19 bp, Homo sapiens
  siRNA target sequence for RGS12 (NM_198587.1,1678-1696).
ccactcggctacgagtttt

SEQ ID NO: 253774 - DNA, 19 bp, Homo sapiens
  siRNA target sequence for RGS12 (NM_198587.1,1679-1697).
cactcggctacgagttttt

SEQ ID NO: 253775 - DNA, 19 bp, Homo sapiens
  siRNA target sequence for RGS14 (NM_006480.3,421-439).
gcgcggaaaacgtgacttt

SEQ ID NO: 253776 - DNA, 19 bp, Homo sapiens
  siRNA target sequence for RGS14 (NM_006480.3,423-441).
gcggaaaacgtgactttct

SEQ ID NO: 253777 - DNA, 19 bp, Homo sapiens
  siRNA target sequence for RGS14 (NM_006480.3,541-559).
cgctgagcccagtgaacat

SEQ ID NO: 253778 - DNA, 19 bp, Homo sapiens
  siRNA target sequence for RGS14 (NM_006480.3,978-996).
gccttcgtcagcagcaaat

SEQ ID NO: 253779 - DNA, 19 bp, Homo sapiens
  siRNA target sequence for RGS14 (NM_006480.3,1022-1040).
gagcacggagggtgaaagt

SEQ ID NO: 253780 - DNA, 19 bp, Homo sapiens
  siRNA target sequence for RGS14 (NM_006480.3,1184-1202).
ctacctggtgggcaatgaa

SEQ ID NO: 253781 - DNA, 19 bp, Homo sapiens
  siRNA target sequence for RGS14 (NM_006480.3,1301-1319).
gcgcgtggtacgaatctca

SEQ ID NO: 253782 - DNA, 19 bp, Homo sapiens
  siRNA target sequence for RGS14 (NM_006480.3,1480-1498).
ctcttccaggtgtgaagat

SEQ ID NO: 253783 - DNA, 19 bp, Homo sapiens
  siRNA target sequence for RGS14 (NM_006480.3,1543-1561).
cacctagaactcaggataa

SEQ ID NO: 253784 - DNA, 19 bp, Homo sapiens
  siRNA target sequence for RGS14 (NM_006480.3,1781-1799).
cccaccacagaccaaatca

SEQ ID NO: 253785 - DNA, 19 bp, Homo sapiens
  siRNA target sequence for SIVA (NM_006427.2,513-531).
gtgacatgtacgagaaagt

SEQ ID NO: 253786 - DNA, 19 bp, Homo sapiens
  siRNA target sequence for TBL3 (NM_006453.2,129-147).
ccgcttcaagaccaactat

SEQ ID NO: 253787 - DNA, 19 bp, Homo sapiens
  siRNA target sequence for TBL3 (NM_006453.2,409-427).
ctgtggaaggcgatacaca

SEQ ID NO: 253788 - DNA, 19 bp, Homo sapiens
  siRNA target sequence for TBL3 (NM_006453.2,792-810).
gaggaccgtgcctgtgttt

SEQ ID NO: 253789 - DNA, 19 bp, Homo sapiens
  siRNA target sequence for TBL3 (NM_006453.2,794-812).
ggaccgtgcctgtgtttga

SEQ ID NO: 253790 - DNA, 19 bp, Homo sapiens
  siRNA target sequence for TBL3 (NM_006453.2,870-888).
gtccccagggctgtacttt

SEQ ID NO: 253791 - DNA, 19 bp, Homo sapiens
  siRNA target sequence for TBL3 (NM_006453.2,1097-1115).
gctacagtgaggaggtttt

SEQ ID NO: 253792 - DNA, 19 bp, Homo sapiens
  siRNA target sequence for TBL3 (NM_006453.2,1101-1119).
cagtgaggaggttttggat

SEQ ID NO: 253793 - DNA, 19 bp, Homo sapiens
  siRNA target sequence for TBL3 (NM_006453.2,1150-1168).
gttgtcgtggcctccaata

SEQ ID NO: 253794 - DNA, 19 bp, Homo sapiens
  siRNA target sequence for TBL3 (NM_006453.2,1170-1188).
cccctgcctaaaagtgttt

SEQ ID NO: 253795 - DNA, 19 bp, Homo sapiens
  siRNA target sequence for TBL3 (NM_006453.2,1300-1318).
gtccgtatctggagaatga

SEQ ID NO: 253796 - DNA, 19 bp, Homo sapiens
  siRNA target sequence for TBL3 (NM_006453.2,1303-1321).
cgtatctggagaatgaaca

SEQ ID NO: 253797 - DNA, 19 bp, Homo sapiens
  siRNA target sequence for TBL3 (NM_006453.2,1523-1541).
ctcagcgctgccatgataa

SEQ ID NO: 253798 - DNA, 19 bp, Homo sapiens
  siRNA target sequence for TBL3 (NM_006453.2,1867-1885).
ctctggaccatcaagaaca

SEQ ID NO: 253799 - DNA, 19 bp, Homo sapiens
  siRNA target sequence for TIAM1 (NM_003253.1,482-500).
cgcagaaagtcaacatgta

SEQ ID NO: 253800 - DNA, 19 bp, Homo sapiens
  siRNA target sequence for TIAM1 (NM_003253.1,484-502).
cagaaagtcaacatgtaga

SEQ ID NO: 253801 - DNA, 19 bp, Homo sapiens
  siRNA target sequence for TIAM1 (NM_003253.1,495-513).
catgtagagcacgagtttt

SEQ ID NO: 253802 - DNA, 19 bp, Homo sapiens
  siRNA target sequence for TIAM1 (NM_003253.1,879-897).
ggggatgacgctacatatt

SEQ ID NO: 253803 - DNA, 19 bp, Homo sapiens
  siRNA target sequence for TIAM1 (NM_003253.1,880-898).
gggatgacgctacatattt

SEQ ID NO: 253804 - DNA, 19 bp, Homo sapiens
  siRNA target sequence for TIAM1 (NM_003253.1,914-932).
gaggcagcattcctataca

SEQ ID NO: 253805 - DNA, 19 bp, Homo sapiens
  siRNA target sequence for TIAM1 (NM_003253.1,920-938).
gcattcctatacatccaat

SEQ ID NO: 253806 - DNA, 19 bp, Homo sapiens
  siRNA target sequence for TIAM1 (NM_003253.1,958-976).
cggcgagctttaagaagaa

SEQ ID NO: 253807 - DNA, 19 bp, Homo sapiens
  siRNA target sequence for TIAM1 (NM_003253.1,959-977).
ggcgagctttaagaagaaa

SEQ ID NO: 253808 - DNA, 19 bp, Homo sapiens
  siRNA target sequence for TIAM1 (NM_003253.1,971-989).
gaagaaacgctccaaatct

SEQ ID NO: 253809 - DNA, 19 bp, Homo sapiens
  siRNA target sequence for TIAM1 (NM_003253.1,1312-1330).
ctcctccgtacagtaatta

SEQ ID NO: 253810 - DNA, 19 bp, Homo sapiens
  siRNA target sequence for TIAM1 (NM_003253.1,1314-1332).
cctccgtacagtaattata

SEQ ID NO: 253811 - DNA, 19 bp, Homo sapiens
  siRNA target sequence for TIAM1 (NM_003253.1,1315-1333).
ctccgtacagtaattataa

SEQ ID NO: 253812 - DNA, 19 bp, Homo sapiens
  siRNA target sequence for TIAM1 (NM_003253.1,1317-1335).
ccgtacagtaattataaca

SEQ ID NO: 253813 - DNA, 19 bp, Homo sapiens
  siRNA target sequence for TIAM1 (NM_003253.1,1319-1337).
gtacagtaattataacaca

SEQ ID NO: 253814 - DNA, 19 bp, Homo sapiens
  siRNA target sequence for TIAM1 (NM_003253.1,1334-1352).
cacacttccctgtaggaaa

SEQ ID NO: 253815 - DNA, 19 bp, Homo sapiens
  siRNA target sequence for TIAM1 (NM_003253.1,1413-1431).
ggcagaagagctaaaacaa

SEQ ID NO: 253816 - DNA, 19 bp, Homo sapiens
  siRNA target sequence for TIAM1 (NM_003253.1,1508-1526).
cctgtccaggcgatctaat

SEQ ID NO: 253817 - DNA, 19 bp, Homo sapiens
  siRNA target sequence for TIAM1 (NM_003253.1,1880-1898).
gaaaggatgcacgctattt

SEQ ID NO: 253818 - DNA, 19 bp, Homo sapiens
  siRNA target sequence for TIAM1 (NM_003253.1,2067-2085).
cagacggagcttgaaaact

SEQ ID NO: 253819 - DNA, 19 bp, Homo sapiens
  siRNA target sequence for TIAM1 (NM_003253.1,2316-2334).
caaatggacctgtttcgtt

SEQ ID NO: 253820 - DNA, 19 bp, Homo sapiens
  siRNA target sequence for TIAM1 (NM_003253.1,2327-2345).
gtttcgtttccgctgttat

SEQ ID NO: 253821 - DNA, 19 bp, Homo sapiens
  siRNA target sequence for TIAM1 (NM_003253.1,2436-2454).
ggaatcttttcggtatcat

SEQ ID NO: 253822 - DNA, 19 bp, Homo sapiens
  siRNA target sequence for TIAM1 (NM_003253.1,2594-2612).
gggacggccaagcatcaat

SEQ ID NO: 253823 - DNA, 19 bp, Homo sapiens
  siRNA target sequence for TIAM1 (NM_003253.1,2596-2614).
gacggccaagcatcaatca

SEQ ID NO: 253824 - DNA, 19 bp, Homo sapiens
  siRNA target sequence for TIAM1 (NM_003253.1,2628-2646).
ggaaccgaagctgtaaaga

SEQ ID NO: 253825 - DNA, 19 bp, Homo sapiens
  siRNA target sequence for TIAM1 (NM_003253.1,2629-2647).
gaaccgaagctgtaaagaa

SEQ ID NO: 253826 - DNA, 19 bp, Homo sapiens
  siRNA target sequence for TIAM1 (NM_003253.1,2634-2652).
gaagctgtaaagaaatctt

SEQ ID NO: 253827 - DNA, 19 bp, Homo sapiens
  siRNA target sequence for TIAM1 (NM_003253.1,2776-2794).
ggttctgtctgcccaataa

SEQ ID NO: 253828 - DNA, 19 bp, Homo sapiens
  siRNA target sequence for TIAM1 (NM_003253.1,2838-2856).
gacaccctggagctgattt

SEQ ID NO: 253829 - DNA, 19 bp, Homo sapiens
  siRNA target sequence for TIAM1 (NM_003253.1,2852-2870).
gatttgcaagacacatcaa

SEQ ID NO: 253830 - DNA, 19 bp, Homo sapiens
  siRNA target sequence for TIAM1 (NM_003253.1,2886-2904).
cattacctgcgcctgaaat

SEQ ID NO: 253831 - DNA, 19 bp, Homo sapiens
  siRNA target sequence for TIAM1 (NM_003253.1,2891-2909).
cctgcgcctgaaatttcta

SEQ ID NO: 253832 - DNA, 19 bp, Homo sapiens
  siRNA target sequence for TIAM1 (NM_003253.1,2892-2910).
ctgcgcctgaaatttctaa

SEQ ID NO: 253833 - DNA, 19 bp, Homo sapiens
  siRNA target sequence for TIAM1 (NM_003253.1,2894-2912).
gcgcctgaaatttctaata

SEQ ID NO: 253834 - DNA, 19 bp, Homo sapiens
  siRNA target sequence for TIAM1 (NM_003253.1,2944-2962).
ccgaggaagacatctatga

SEQ ID NO: 253835 - DNA, 19 bp, Homo sapiens
  siRNA target sequence for TIAM1 (NM_003253.1,3012-3030).
cacattgagaagtcagata

SEQ ID NO: 253836 - DNA, 19 bp, Homo sapiens
  siRNA target sequence for TIAM1 (NM_003253.1,3068-3086).
ggaagaagatggtattcga

SEQ ID NO: 253837 - DNA, 19 bp, Homo sapiens
  siRNA target sequence for TIAM1 (NM_003253.1,3084-3102).
cgaaggctgtacgtgaata

SEQ ID NO: 253838 - DNA, 19 bp, Homo sapiens
  siRNA target sequence for TIAM1 (NM_003253.1,3088-3106).
ggctgtacgtgaatagtgt

SEQ ID NO: 253839 - DNA, 19 bp, Homo sapiens
  siRNA target sequence for TIAM1 (NM_003253.1,3107-3125).
gaaggaaaccggtttagct

SEQ ID NO: 253840 - DNA, 19 bp, Homo sapiens
  siRNA target sequence for TIAM1 (NM_003253.1,3116-3134).
cggtttagcttccaagaaa

SEQ ID NO: 253841 - DNA, 19 bp, Homo sapiens
  siRNA target sequence for TIAM1 (NM_003253.1,3148-3166).
gagatgagattcttgagat

SEQ ID NO: 253842 - DNA, 19 bp, Homo sapiens
  siRNA target sequence for TIAM1 (NM_003253.1,3450-3468).
gatcacagcagcaagagta

SEQ ID NO: 253843 - DNA, 19 bp, Homo sapiens
  siRNA target sequence for TIAM1 (NM_003253.1,3471-3489).
gaacaggtggccgcatttt

SEQ ID NO: 253844 - DNA, 19 bp, Homo sapiens
  siRNA target sequence for TIAM1 (NM_003253.1,3630-3648).
cgcacctacgtgaaggatt

SEQ ID NO: 253845 - DNA, 19 bp, Homo sapiens
  siRNA target sequence for TIAM1 (NM_003253.1,3631-3649).
gcacctacgtgaaggattt

SEQ ID NO: 253846 - DNA, 19 bp, Homo sapiens
  siRNA target sequence for TIAM1 (NM_003253.1,3638-3656).
cgtgaaggatttaaactgt

SEQ ID NO: 253847 - DNA, 19 bp, Homo sapiens
  siRNA target sequence for TIAM1 (NM_003253.1,3657-3675).
cttatggagagatacctaa

SEQ ID NO: 253848 - DNA, 19 bp, Homo sapiens
  siRNA target sequence for TIAM1 (NM_003253.1,3713-3731).
gcttgacgtgctttttgga

SEQ ID NO: 253849 - DNA, 19 bp, Homo sapiens
  siRNA target sequence for TIAM1 (NM_003253.1,3739-3757).
cggaaatggtagagtttca

SEQ ID NO: 253850 - DNA, 19 bp, Homo sapiens
  siRNA target sequence for TIAM1 (NM_003253.1,3752-3770).
gtttcaagtagaattcctt

SEQ ID NO: 253851 - DNA, 19 bp, Homo sapiens
  siRNA target sequence for TIAM1 (NM_003253.1,3816-3834).
cttgagaaggttgatcaat

SEQ ID NO: 253852 - DNA, 19 bp, Homo sapiens
  siRNA target sequence for TIAM1 (NM_003253.1,3819-3837).
gagaaggttgatcaattta

SEQ ID NO: 253853 - DNA, 19 bp, Homo sapiens
  siRNA target sequence for TIAM1 (NM_003253.1,3961-3979).
cggctttcaaggcattctt

SEQ ID NO: 253854 - DNA, 19 bp, Homo sapiens
  siRNA target sequence for TIAM1 (NM_003253.1,4151-4169).
ggttgccagtcacatcaat

SEQ ID NO: 253855 - DNA, 19 bp, Homo sapiens
  siRNA target sequence for TIAM1 (NM_003253.1,4369-4387).
ctgtggtccttgtgtataa

SEQ ID NO: 253856 - DNA, 19 bp, Homo sapiens
  siRNA target sequence for TIAM1 (NM_003253.1,4420-4438).
gatctcacaggctttccat

SEQ ID NO: 253857 - DNA, 19 bp, Homo sapiens
  siRNA target sequence for TIAM1 (NM_003253.1,4446-4464).
gactgggaccccttcagat

SEQ ID NO: 253858 - DNA, 19 bp, Homo sapiens
  siRNA target sequence for TIAM1 (NM_003253.1,4576-4594).
ggccggagagggtctttca

SEQ ID NO: 253859 - DNA, 19 bp, Homo sapiens
  siRNA target sequence for TIAM1 (NM_003253.1,4578-4596).
ccggagagggtctttcact

SEQ ID NO: 253860 - DNA, 19 bp, Homo sapiens
  siRNA target sequence for TIAM1 (NM_003253.1,4579-4597).
cggagagggtctttcactt

SEQ ID NO: 253861 - DNA, 19 bp, Homo sapiens
  siRNA target sequence for TIAM1 (NM_003253.1,4610-4628).
cccagagagccgaaaggat

SEQ ID NO: 253862 - DNA, 19 bp, Homo sapiens
  siRNA target sequence for TIAM1 (NM_003253.1,4611-4629).
ccagagagccgaaaggatt

SEQ ID NO: 253863 - DNA, 19 bp, Homo sapiens
  siRNA target sequence for TIAM1 (NM_003253.1,4612-4630).
cagagagccgaaaggattt

SEQ ID NO: 253864 - DNA, 19 bp, Homo sapiens
  siRNA target sequence for TIAM1 (NM_003253.1,4618-4636).
gccgaaaggatttcctaaa

SEQ ID NO: 253865 - DNA, 19 bp, Homo sapiens
  siRNA target sequence for TIAM1 (NM_003253.1,4632-4650).
ctaaaggctgtgcattcaa

SEQ ID NO: 253866 - DNA, 19 bp, Homo sapiens
  siRNA target sequence for TIAM1 (NM_003253.1,4648-4666).
caatcctgcgtgataagca

SEQ ID NO: 253867 - DNA, 19 bp, Homo sapiens
  siRNA target sequence for TIAM1 (NM_003253.1,4709-4727).
gcaatatgtcccttttgga

SEQ ID NO: 253868 - DNA, 19 bp, Homo sapiens
  siRNA target sequence for TIAM1 (NM_003253.1,4821-4839).
ctggctcgaaacaggttta

SEQ ID NO: 253869 - DNA, 19 bp, Homo sapiens
  siRNA target sequence for TIAM1 (NM_003253.1,4824-4842).
gctcgaaacaggtttacca

SEQ ID NO: 253870 - DNA, 19 bp, Homo sapiens
  siRNA target sequence for TIAM1 (NM_003253.1,5176-5194).
gcgcaagcgaggaagtcat

SEQ ID NO: 253871 - DNA, 19 bp, Homo sapiens
  siRNA target sequence for TIAM1 (NM_003253.1,5177-5195).
cgcaagcgaggaagtcatt

SEQ ID NO: 253872 - DNA, 19 bp, Homo sapiens
  siRNA target sequence for TIAM1 (NM_003253.1,5178-5196).
gcaagcgaggaagtcattt

SEQ ID NO: 253873 - DNA, 19 bp, Homo sapiens
  siRNA target sequence for TIAM1 (NM_003253.1,5197-5215).
gggttaggcgtgaagactt

SEQ ID NO: 253874 - DNA, 19 bp, Homo sapiens
  siRNA target sequence for TIAM1 (NM_003253.1,5198-5216).
ggttaggcgtgaagacttt

SEQ ID NO: 253875 - DNA, 19 bp, Homo sapiens
  siRNA target sequence for FST (NM_006350.2,385-403).
ccggattgttccaacatca

SEQ ID NO: 253876 - DNA, 19 bp, Homo sapiens
  siRNA target sequence for FST (NM_006350.2,435-453).
gaaaacctaccgcaatgaa

SEQ ID NO: 253877 - DNA, 19 bp, Homo sapiens
  siRNA target sequence for FST (NM_006350.2,460-478).
ctcctaaaggcaagatgta

SEQ ID NO: 253878 - DNA, 19 bp, Homo sapiens
  siRNA target sequence for FST (NM_006350.2,708-726).
gggcagatctattggatta

SEQ ID NO: 253879 - DNA, 19 bp, Homo sapiens
  siRNA target sequence for FST (NM_006350.2,736-754).
ggaaagtgtatcaaagcaa

SEQ ID NO: 253880 - DNA, 19 bp, Homo sapiens
  siRNA target sequence for FST (NM_006350.2,844-862).
ctgtgccctgacagtaagt

SEQ ID NO: 253881 - DNA, 19 bp, Homo sapiens
  siRNA target sequence for FST (NM_013409.1,967-985).
ggatcttgcaactccattt

SEQ ID NO: 253882 - DNA, 19 bp, Homo sapiens
  siRNA target sequence for FST (NM_013409.1,1023-1041).
ggactacagctttcctata

SEQ ID NO: 253883 - DNA, 19 bp, Homo sapiens
  siRNA target sequence for FST (NM_013409.1,1026-1044).
ctacagctttcctatatct

SEQ ID NO: 253884 - DNA, 19 bp, Homo sapiens
  siRNA target sequence for FST (NM_013409.1,1031-1049).
gctttcctatatcttctat

SEQ ID NO: 253885 - DNA, 19 bp, Homo sapiens
  siRNA target sequence for FST (NM_013409.1,1037-1055).
ctatatcttctattctaga

SEQ ID NO: 253886 - DNA, 19 bp, Homo sapiens
  siRNA target sequence for ARHGEF1 (NM_004706.3,208-226).
cgagctggagacaaactca

SEQ ID NO: 253887 - DNA, 19 bp, Homo sapiens
  siRNA target sequence for ARHGEF1 (NM_004706.3,456-474).
ccaacgtcgcctttgaact

SEQ ID NO: 253888 - DNA, 19 bp, Homo sapiens
  siRNA target sequence for ARHGEF1 (NM_004706.3,457-475).
caacgtcgcctttgaactt

SEQ ID NO: 253889 - DNA, 19 bp, Homo sapiens
  siRNA target sequence for ARHGEF1 (NM_004706.3,943-961).
gccccaggttccagatttt

SEQ ID NO: 253890 - DNA, 19 bp, Homo sapiens
  siRNA target sequence for ARHGEF1 (NM_004706.3,1032-1050).
cctctcgggaccggaatat

SEQ ID NO: 253891 - DNA, 19 bp, Homo sapiens
  siRNA target sequence for ARHGEF1 (NM_004706.3,2007-2025).
ctatgctgagcgagttcaa

SEQ ID NO: 253892 - DNA, 19 bp, Homo sapiens
  siRNA target sequence for ARHGEF1 (NM_004706.3,2260-2278).
ggtggccaccgatcacaaa

SEQ ID NO: 253893 - DNA, 19 bp, Homo sapiens
  siRNA target sequence for ARHGEF1 (NM_004706.3,2382-2400).
ctgccggatccctgaaagt

SEQ ID NO: 253894 - DNA, 19 bp, Homo sapiens
  siRNA target sequence for ARHGEF1 (NM_004706.3,2703-2721).
cacggacccaggaaatcca

SEQ ID NO: 253895 - DNA, 19 bp, Homo sapiens
  siRNA target sequence for ARHGEF11 (NM_014784.2,1051-1069).
ggttaccccagagtataga

SEQ ID NO: 253896 - DNA, 19 bp, Homo sapiens
  siRNA target sequence for ARHGEF11 (NM_014784.2,1059-1077).
cagagtatagacaggttaa

SEQ ID NO: 253897 - DNA, 19 bp, Homo sapiens
  siRNA target sequence for ARHGEF11 (NM_014784.2,1061-1079).
gagtatagacaggttaagt

SEQ ID NO: 253898 - DNA, 19 bp, Homo sapiens
  siRNA target sequence for ARHGEF11 (NM_014784.2,1293-1311).
gagggcgaccggatcatca

SEQ ID NO: 253899 - DNA, 19 bp, Homo sapiens
  siRNA target sequence for ARHGEF11 (NM_014784.2,1547-1565).
gcaggatcccgaagttcaa

SEQ ID NO: 253900 - DNA, 19 bp, Homo sapiens
  siRNA target sequence for ARHGEF11 (NM_014784.2,1548-1566).
caggatcccgaagttcaaa

SEQ ID NO: 253901 - DNA, 19 bp, Homo sapiens
  siRNA target sequence for ARHGEF11 (NM_014784.2,1550-1568).
ggatcccgaagttcaaaaa

SEQ ID NO: 253902 - DNA, 19 bp, Homo sapiens
  siRNA target sequence for ARHGEF11 (NM_014784.2,1625-1643).
catacttccactatatggt

SEQ ID NO: 253903 - DNA, 19 bp, Homo sapiens
  siRNA target sequence for ARHGEF11 (NM_014784.2,1735-1753).
ccctcagtgagtcattgat

SEQ ID NO: 253904 - DNA, 19 bp, Homo sapiens
  siRNA target sequence for ARHGEF11 (NM_014784.2,1798-1816).
gaacctcccctgtgatcat

SEQ ID NO: 253905 - DNA, 19 bp, Homo sapiens
  siRNA target sequence for ARHGEF11 (NM_014784.2,1874-1892).
cggtgaccagggtgtagat

SEQ ID NO: 253906 - DNA, 19 bp, Homo sapiens
  siRNA target sequence for ARHGEF11 (NM_014784.2,1876-1894).
gtgaccagggtgtagatca

SEQ ID NO: 253907 - DNA, 19 bp, Homo sapiens
  siRNA target sequence for ARHGEF11 (NM_014784.2,1897-1915).
gcccaaagcctttaattat

SEQ ID NO: 253908 - DNA, 19 bp, Homo sapiens
  siRNA target sequence for ARHGEF11 (NM_014784.2,1918-1936).
gcccagaggaagactatga

SEQ ID NO: 253909 - DNA, 19 bp, Homo sapiens
  siRNA target sequence for ARHGEF11 (NM_014784.2,1929-1947).
gactatgacccgggttatt

SEQ ID NO: 253910 - DNA, 19 bp, Homo sapiens
  siRNA target sequence for ARHGEF11 (NM_014784.2,1935-1953).
gacccgggttatttcaaca

SEQ ID NO: 253911 - DNA, 19 bp, Homo sapiens
  siRNA target sequence for ARHGEF11 (NM_014784.2,2005-2023).
ctcacctgggggtttttct

SEQ ID NO: 253912 - DNA, 19 bp, Homo sapiens
  siRNA target sequence for ARHGEF11 (NM_014784.2,2014-2032).
gggtttttctacgttacat

SEQ ID NO: 253913 - DNA, 19 bp, Homo sapiens
  siRNA target sequence for ARHGEF11 (NM_014784.2,2069-2087).
cctgtgtgcagaagtttat

SEQ ID NO: 253914 - DNA, 19 bp, Homo sapiens
  siRNA target sequence for ARHGEF11 (NM_014784.2,2112-2130).
cgaagcttggggaaagaca

SEQ ID NO: 253915 - DNA, 19 bp, Homo sapiens
  siRNA target sequence for ARHGEF11 (NM_014784.2,2187-2205).
ctacaggctgaaattgact

SEQ ID NO: 253916 - DNA, 19 bp, Homo sapiens
  siRNA target sequence for ARHGEF11 (NM_014784.2,2283-2301).
cagatccacgactacagaa

SEQ ID NO: 253917 - DNA, 19 bp, Homo sapiens
  siRNA target sequence for ARHGEF11 (NM_014784.2,2326-2344).
gcctgtatggtgaaaatga

SEQ ID NO: 253918 - DNA, 19 bp, Homo sapiens
  siRNA target sequence for ARHGEF11 (NM_014784.2,2402-2420).
ggctgcccttggagatatt

SEQ ID NO: 253919 - DNA, 19 bp, Homo sapiens
  siRNA target sequence for ARHGEF11 (NM_014784.2,2637-2655).
cgaaaccctatcctcaaat

SEQ ID NO: 253920 - DNA, 19 bp, Homo sapiens
  siRNA target sequence for ARHGEF11 (NM_014784.2,2638-2656).
gaaaccctatcctcaaata

SEQ ID NO: 253921 - DNA, 19 bp, Homo sapiens
  siRNA target sequence for ARHGEF11 (NM_014784.2,2843-2861).
cagttcacgctcagagatt

SEQ ID NO: 253922 - DNA, 19 bp, Homo sapiens
  siRNA target sequence for ARHGEF11 (NM_014784.2,2933-2951).
ccgctctcgcagtgatgtt

SEQ ID NO: 253923 - DNA, 19 bp, Homo sapiens
  siRNA target sequence for ARHGEF11 (NM_014784.2,3168-3186).
gagccagatgcccaaaatt

SEQ ID NO: 253924 - DNA, 19 bp, Homo sapiens
  siRNA target sequence for ARHGEF11 (NM_014784.2,3242-3260).
ccggcaagaggtcatcaat

SEQ ID NO: 253925 - DNA, 19 bp, Homo sapiens
  siRNA target sequence for ARHGEF11 (NM_014784.2,3379-3397).
cgaacctgcctgaactcat

SEQ ID NO: 253926 - DNA, 19 bp, Homo sapiens
  siRNA target sequence for ARHGEF11 (NM_014784.2,3380-3398).
gaacctgcctgaactcata

SEQ ID NO: 253927 - DNA, 19 bp, Homo sapiens
  siRNA target sequence for ARHGEF11 (NM_014784.2,3522-3540).
gtggctgcacagttctgtt

SEQ ID NO: 253928 - DNA, 19 bp, Homo sapiens
  siRNA target sequence for ARHGEF11 (NM_014784.2,3531-3549).
cagttctgttcctatcagt

SEQ ID NO: 253929 - DNA, 19 bp, Homo sapiens
  siRNA target sequence for ARHGEF11 (NM_014784.2,3536-3554).
ctgttcctatcagtcaata

SEQ ID NO: 253930 - DNA, 19 bp, Homo sapiens
  siRNA target sequence for ARHGEF11 (NM_014784.2,3555-3573).
gccctagagctaatcaaga

SEQ ID NO: 253931 - DNA, 19 bp, Homo sapiens
  siRNA target sequence for ARHGEF11 (NM_014784.2,3592-3610).
gtcgattccagctcttcat

SEQ ID NO: 253932 - DNA, 19 bp, Homo sapiens
  siRNA target sequence for ARHGEF11 (NM_014784.2,3779-3797).
ccgggagattctcaagtat

SEQ ID NO: 253933 - DNA, 19 bp, Homo sapiens
  siRNA target sequence for ARHGEF11 (NM_014784.2,3917-3935).
ggatcttacaaccagaaaa

SEQ ID NO: 253934 - DNA, 19 bp, Homo sapiens
  siRNA target sequence for ARHGEF11 (NM_014784.2,3918-3936).
gatcttacaaccagaaaaa

SEQ ID NO: 253935 - DNA, 19 bp, Homo sapiens
  siRNA target sequence for ARHGEF11 (NM_014784.2,3921-3939).
cttacaaccagaaaaatga

SEQ ID NO: 253936 - DNA, 19 bp, Homo sapiens
  siRNA target sequence for ARHGEF11 (NM_014784.2,4140-4158).
cgctctgtggccacagata

SEQ ID NO: 253937 - DNA, 19 bp, Homo sapiens
  siRNA target sequence for ARHGEF11 (NM_014784.2,4363-4381).
cacccagcagggtagaact

SEQ ID NO: 253938 - DNA, 19 bp, Homo sapiens
  siRNA target sequence for ARHGEF11 (NM_014784.2,4905-4923).
cccccaaggaccagaaatt

SEQ ID NO: 253939 - DNA, 19 bp, Homo sapiens
  siRNA target sequence for ARHGEF11 (NM_014784.2,4987-5005).
cagcaggaggttacaaagt

SEQ ID NO: 253940 - DNA, 19 bp, Homo sapiens
  siRNA target sequence for ARHGEF11 (NM_014784.2,4990-5008).
caggaggttacaaagttgt

SEQ ID NO: 253941 - DNA, 19 bp, Homo sapiens
  siRNA target sequence for ARHGEF11 (NM_014784.2,5106-5124).
gctacggggaactgctttt

SEQ ID NO: 253942 - DNA, 19 bp, Homo sapiens
  siRNA target sequence for ARHGEF11 (NM_014784.2,5107-5125).
ctacggggaactgctttta

SEQ ID NO: 253943 - DNA, 19 bp, Homo sapiens
  siRNA target sequence for ARHGEF11 (NM_014784.2,5110-5128).
cggggaactgcttttatgt

SEQ ID NO: 253944 - DNA, 19 bp, Homo sapiens
  siRNA target sequence for ARHGEF11 (NM_014784.2,5304-5322).
gtgggcatgatcttccata

SEQ ID NO: 253945 - DNA, 19 bp, Homo sapiens
  siRNA target sequence for ARHGEF11 (NM_198236.1,1623-1641).
cgtatctgtgaggtctata

SEQ ID NO: 253946 - DNA, 19 bp, Homo sapiens
  siRNA target sequence for ARHGEF11 (NM_198236.1,1690-1708).
ggcgagtcactcagttaca

SEQ ID NO: 253947 - DNA, 19 bp, Homo sapiens
  siRNA target sequence for ARHGEF11 (NM_198236.1,1732-1750).
gtggctcagtggacatact

SEQ ID NO: 253948 - DNA, 19 bp, Homo sapiens
  siRNA target sequence for ARHGEF12 (NM_015313.1,12-30).
gtggcacacagtctactat

SEQ ID NO: 253949 - DNA, 19 bp, Homo sapiens
  siRNA target sequence for ARHGEF12 (NM_015313.1,35-53).
gacaggtttcccctcaaaa

SEQ ID NO: 253950 - DNA, 19 bp, Homo sapiens
  siRNA target sequence for ARHGEF12 (NM_015313.1,82-100).
ccgagagtcaccaacagat

SEQ ID NO: 253951 - DNA, 19 bp, Homo sapiens
  siRNA target sequence for ARHGEF12 (NM_015313.1,83-101).
cgagagtcaccaacagata

SEQ ID NO: 253952 - DNA, 19 bp, Homo sapiens
  siRNA target sequence for ARHGEF12 (NM_015313.1,86-104).
gagtcaccaacagataaga

SEQ ID NO: 253953 - DNA, 19 bp, Homo sapiens
  siRNA target sequence for ARHGEF12 (NM_015313.1,118-136).
gcgcattgcatcacatgat

SEQ ID NO: 253954 - DNA, 19 bp, Homo sapiens
  siRNA target sequence for ARHGEF12 (NM_015313.1,149-167).
gatagctcctccaagaaga

SEQ ID NO: 253955 - DNA, 19 bp, Homo sapiens
  siRNA target sequence for ARHGEF12 (NM_015313.1,187-205).
gagtagatccgagatatat

SEQ ID NO: 253956 - DNA, 19 bp, Homo sapiens
  siRNA target sequence for ARHGEF12 (NM_015313.1,196-214).
cgagatatatggtcttgtt

SEQ ID NO: 253957 - DNA, 19 bp, Homo sapiens
  siRNA target sequence for ARHGEF12 (NM_015313.1,212-230).
gttcagcgttgcgtaatca

SEQ ID NO: 253958 - DNA, 19 bp, Homo sapiens
  siRNA target sequence for ARHGEF12 (NM_015313.1,223-241).
cgtaatcatccagaaagat

SEQ ID NO: 253959 - DNA, 19 bp, Homo sapiens
  siRNA target sequence for ARHGEF12 (NM_015313.1,336-354).
caggtgatcgaatcatcaa

SEQ ID NO: 253960 - DNA, 19 bp, Homo sapiens
  siRNA target sequence for ARHGEF12 (NM_015313.1,362-380).
ggaactctggtgactcatt

SEQ ID NO: 253961 - DNA, 19 bp, Homo sapiens
  siRNA target sequence for ARHGEF12 (NM_015313.1,409-427).
caaatctggttcctatgta

SEQ ID NO: 253962 - DNA, 19 bp, Homo sapiens
  siRNA target sequence for ARHGEF12 (NM_015313.1,509-527).
catatgtctcccatcatga

SEQ ID NO: 253963 - DNA, 19 bp, Homo sapiens
  siRNA target sequence for ARHGEF12 (NM_015313.1,523-541).
catgacatctcctcattca

SEQ ID NO: 253964 - DNA, 19 bp, Homo sapiens
  siRNA target sequence for ARHGEF12 (NM_015313.1,607-625).
ggttcataaccagaaagta

SEQ ID NO: 253965 - DNA, 19 bp, Homo sapiens
  siRNA target sequence for ARHGEF12 (NM_015313.1,668-686).
cagttattgcaggaagatt

SEQ ID NO: 253966 - DNA, 19 bp, Homo sapiens
  siRNA target sequence for ARHGEF12 (NM_015313.1,698-716).
cctgcccaaagattgctaa

SEQ ID NO: 253967 - DNA, 19 bp, Homo sapiens
  siRNA target sequence for ARHGEF12 (NM_015313.1,699-717).
ctgcccaaagattgctaaa

SEQ ID NO: 253968 - DNA, 19 bp, Homo sapiens
  siRNA target sequence for ARHGEF12 (NM_015313.1,702-720).
cccaaagattgctaaaaga

SEQ ID NO: 253969 - DNA, 19 bp, Homo sapiens
  siRNA target sequence for ARHGEF12 (NM_015313.1,749-767).
cagctgcaagagcagttat

SEQ ID NO: 253970 - DNA, 19 bp, Homo sapiens
  siRNA target sequence for ARHGEF12 (NM_015313.1,788-806).
caggatggagctgtagtta

SEQ ID NO: 253971 - DNA, 19 bp, Homo sapiens
  siRNA target sequence for ARHGEF12 (NM_015313.1,1038-1056).
cccgtatagcacctcatat

SEQ ID NO: 253972 - DNA, 19 bp, Homo sapiens
  siRNA target sequence for ARHGEF12 (NM_015313.1,1039-1057).
ccgtatagcacctcatatt

SEQ ID NO: 253973 - DNA, 19 bp, Homo sapiens
  siRNA target sequence for ARHGEF12 (NM_015313.1,1040-1058).
cgtatagcacctcatatta

SEQ ID NO: 253974 - DNA, 19 bp, Homo sapiens
  siRNA target sequence for ARHGEF12 (NM_015313.1,1086-1104).
ctgaacatgaacagatcaa

SEQ ID NO: 253975 - DNA, 19 bp, Homo sapiens
  siRNA target sequence for ARHGEF12 (NM_015313.1,1152-1170).
cggctcatttggctgtttt

SEQ ID NO: 253976 - DNA, 19 bp, Homo sapiens
  siRNA target sequence for ARHGEF12 (NM_015313.1,1175-1193).
caccatgtagtttcacaat

SEQ ID NO: 253977 - DNA, 19 bp, Homo sapiens
  siRNA target sequence for ARHGEF12 (NM_015313.1,1203-1221).
cgactttgctctgttatct

SEQ ID NO: 253978 - DNA, 19 bp, Homo sapiens
  siRNA target sequence for ARHGEF12 (NM_015313.1,1210-1228).
gctctgttatctctattca

SEQ ID NO: 253979 - DNA, 19 bp, Homo sapiens
  siRNA target sequence for ARHGEF12 (NM_015313.1,1222-1240).
ctattcagacctgtataaa

SEQ ID NO: 253980 - DNA, 19 bp, Homo sapiens
  siRNA target sequence for ARHGEF12 (NM_015313.1,1263-1281).
gtcgcatcttccttgagtt

SEQ ID NO: 253981 - DNA, 19 bp, Homo sapiens
  siRNA target sequence for ARHGEF12 (NM_015313.1,1382-1400).
gatctgcatcgccactata

SEQ ID NO: 253982 - DNA, 19 bp, Homo sapiens
  siRNA target sequence for ARHGEF12 (NM_015313.1,1388-1406).
catcgccactatatccaaa

SEQ ID NO: 253983 - DNA, 19 bp, Homo sapiens
  siRNA target sequence for ARHGEF12 (NM_015313.1,1391-1409).
cgccactatatccaaacta

SEQ ID NO: 253984 - DNA, 19 bp, Homo sapiens
  siRNA target sequence for ARHGEF12 (NM_015313.1,1392-1410).
gccactatatccaaactat

SEQ ID NO: 253985 - DNA, 19 bp, Homo sapiens
  siRNA target sequence for ARHGEF12 (NM_015313.1,1396-1414).
ctatatccaaactatgcaa

SEQ ID NO: 253986 - DNA, 19 bp, Homo sapiens
  siRNA target sequence for ARHGEF12 (NM_015313.1,1488-1506).
ctgaaagcgagctgactaa

SEQ ID NO: 253987 - DNA, 19 bp, Homo sapiens
  siRNA target sequence for ARHGEF12 (NM_015313.1,1494-1512).
gcgagctgactaaacttga

SEQ ID NO: 253988 - DNA, 19 bp, Homo sapiens
  siRNA target sequence for ARHGEF12 (NM_015313.1,1495-1513).
cgagctgactaaacttgat

SEQ ID NO: 253989 - DNA, 19 bp, Homo sapiens
  siRNA target sequence for ARHGEF12 (NM_015313.1,1610-1628).
gctgtagaggaagataaga

SEQ ID NO: 253990 - DNA, 19 bp, Homo sapiens
  siRNA target sequence for ARHGEF12 (NM_015313.1,1633-1651).
caccatgcagtatgttatt

SEQ ID NO: 253991 - DNA, 19 bp, Homo sapiens
  siRNA target sequence for ARHGEF12 (NM_015313.1,1635-1653).
ccatgcagtatgttattct

SEQ ID NO: 253992 - DNA, 19 bp, Homo sapiens
  siRNA target sequence for ARHGEF12 (NM_015313.1,1642-1660).
gtatgttattctcatgtat

SEQ ID NO: 253993 - DNA, 19 bp, Homo sapiens
  siRNA target sequence for ARHGEF12 (NM_015313.1,1646-1664).
gttattctcatgtatatga

SEQ ID NO: 253994 - DNA, 19 bp, Homo sapiens
  siRNA target sequence for ARHGEF12 (NM_015313.1,1682-1700).
gtgaaagagcctcgaaatt

SEQ ID NO: 253995 - DNA, 19 bp, Homo sapiens
  siRNA target sequence for ARHGEF12 (NM_015313.1,1713-1731).
ggggtcggattggatttct

SEQ ID NO: 253996 - DNA, 19 bp, Homo sapiens
  siRNA target sequence for ARHGEF12 (NM_015313.1,1714-1732).
gggtcggattggatttctt

SEQ ID NO: 253997 - DNA, 19 bp, Homo sapiens
  siRNA target sequence for ARHGEF12 (NM_015313.1,1734-1752).
ccaaaatcaagcaaagtat

SEQ ID NO: 253998 - DNA, 19 bp, Homo sapiens
  siRNA target sequence for ARHGEF12 (NM_015313.1,1880-1898).
cgccaccctaagcacttat

SEQ ID NO: 253999 - DNA, 19 bp, Homo sapiens
  siRNA target sequence for ARHGEF12 (NM_015313.1,1883-1901).
caccctaagcacttatcca

SEQ ID NO: 254000 - DNA, 19 bp, Homo sapiens
  siRNA target sequence for ARHGEF12 (NM_015313.1,1946-1964).
cgccagagtgggttagcaa

SEQ ID NO: 254001 - DNA, 19 bp, Homo sapiens
  siRNA target sequence for ARHGEF12 (NM_015313.1,1947-1965).
gccagagtgggttagcaaa

SEQ ID NO: 254002 - DNA, 19 bp, Homo sapiens
  siRNA target sequence for ARHGEF12 (NM_015313.1,2015-2033).
gcttcaggggcctcttttt

SEQ ID NO: 254003 - DNA, 19 bp, Homo sapiens
  siRNA target sequence for ARHGEF12 (NM_015313.1,2113-2131).
cacacctcgtactctcaat

SEQ ID NO: 254004 - DNA, 19 bp, Homo sapiens
  siRNA target sequence for ARHGEF12 (NM_015313.1,2118-2136).
ctcgtactctcaatactgt

SEQ ID NO: 254005 - DNA, 19 bp, Homo sapiens
  siRNA target sequence for ARHGEF12 (NM_015313.1,2217-2235).
caaagccctttcgaaagtt

SEQ ID NO: 254006 - DNA, 19 bp, Homo sapiens
  siRNA target sequence for ARHGEF12 (NM_015313.1,2233-2251).
gtttgacagtgtagctttt

SEQ ID NO: 254007 - DNA, 19 bp, Homo sapiens
  siRNA target sequence for ARHGEF12 (NM_015313.1,2261-2279).
caaagtgaggatgaacaat

SEQ ID NO: 254008 - DNA, 19 bp, Homo sapiens
  siRNA target sequence for ARHGEF12 (NM_015313.1,2338-2356).
gttactgggactaaaacct

SEQ ID NO: 254009 - DNA, 19 bp, Homo sapiens
  siRNA target sequence for ARHGEF12 (NM_015313.1,2344-2362).
gggactaaaaccttgtgaa

SEQ ID NO: 254010 - DNA, 19 bp, Homo sapiens
  siRNA target sequence for ARHGEF12 (NM_015313.1,2387-2405).
gaattgttctacactgaaa

SEQ ID NO: 254011 - DNA, 19 bp, Homo sapiens
  siRNA target sequence for ARHGEF12 (NM_015313.1,2418-2436).
gaacactgaaggttcttga

SEQ ID NO: 254012 - DNA, 19 bp, Homo sapiens
  siRNA target sequence for ARHGEF12 (NM_015313.1,2481-2499).
cctcagagctacggaaaat

SEQ ID NO: 254013 - DNA, 19 bp, Homo sapiens
  siRNA target sequence for ARHGEF12 (NM_015313.1,2482-2500).
ctcagagctacggaaaatt

SEQ ID NO: 254014 - DNA, 19 bp, Homo sapiens
  siRNA target sequence for ARHGEF12 (NM_015313.1,2484-2502).
cagagctacggaaaatttt

SEQ ID NO: 254015 - DNA, 19 bp, Homo sapiens
  siRNA target sequence for ARHGEF12 (NM_015313.1,2486-2504).
gagctacggaaaatttttt

SEQ ID NO: 254016 - DNA, 19 bp, Homo sapiens
  siRNA target sequence for ARHGEF12 (NM_015313.1,2488-2506).
gctacggaaaattttttca

SEQ ID NO: 254017 - DNA, 19 bp, Homo sapiens
  siRNA target sequence for ARHGEF12 (NM_015313.1,2489-2507).
ctacggaaaattttttcaa

SEQ ID NO: 254018 - DNA, 19 bp, Homo sapiens
  siRNA target sequence for ARHGEF12 (NM_015313.1,2554-2572).
gaaggctgttcgaaagaga

SEQ ID NO: 254019 - DNA, 19 bp, Homo sapiens
  siRNA target sequence for ARHGEF12 (NM_015313.1,2559-2577).
ctgttcgaaagagaaatga

SEQ ID NO: 254020 - DNA, 19 bp, Homo sapiens
  siRNA target sequence for ARHGEF12 (NM_015313.1,2561-2579).
gttcgaaagagaaatgaga

SEQ ID NO: 254021 - DNA, 19 bp, Homo sapiens
  siRNA target sequence for ARHGEF12 (NM_015313.1,2591-2609).
gatcagattggggaagatt

SEQ ID NO: 254022 - DNA, 19 bp, Homo sapiens
  siRNA target sequence for ARHGEF12 (NM_015313.1,2681-2699).
cctttcgccctggaaatga

SEQ ID NO: 254023 - DNA, 19 bp, Homo sapiens
  siRNA target sequence for ARHGEF12 (NM_015313.1,2769-2787).
gtcgtcgtcttcaactgaa

SEQ ID NO: 254024 - DNA, 19 bp, Homo sapiens
  siRNA target sequence for ARHGEF12 (NM_015313.1,2774-2792).
cgtcttcaactgaaggata

SEQ ID NO: 254025 - DNA, 19 bp, Homo sapiens
  siRNA target sequence for ARHGEF12 (NM_015313.1,2789-2807).
gatattattcccactcaaa

SEQ ID NO: 254026 - DNA, 19 bp, Homo sapiens
  siRNA target sequence for ARHGEF12 (NM_015313.1,2820-2838).
ctaagtacccacttctgtt

SEQ ID NO: 254027 - DNA, 19 bp, Homo sapiens
  siRNA target sequence for ARHGEF12 (NM_015313.1,2827-2845).
cccacttctgttggataat

SEQ ID NO: 254028 - DNA, 19 bp, Homo sapiens
  siRNA target sequence for ARHGEF12 (NM_015313.1,2903-2921).
cactgtcgtcagatcttaa

SEQ ID NO: 254029 - DNA, 19 bp, Homo sapiens
  siRNA target sequence for ARHGEF12 (NM_015313.1,2905-2923).
ctgtcgtcagatcttaaat

SEQ ID NO: 254030 - DNA, 19 bp, Homo sapiens
  siRNA target sequence for ARHGEF12 (NM_015313.1,2959-2977).
gcagcgcctagaagattat

SEQ ID NO: 254031 - DNA, 19 bp, Homo sapiens
  siRNA target sequence for ARHGEF12 (NM_015313.1,3095-3113).
gtgaatagagataaaacta

SEQ ID NO: 254032 - DNA, 19 bp, Homo sapiens
  siRNA target sequence for ARHGEF12 (NM_015313.1,3176-3194).
ctggttttaaggtgtcata

SEQ ID NO: 254033 - DNA, 19 bp, Homo sapiens
  siRNA target sequence for ARHGEF12 (NM_015313.1,3178-3196).
ggttttaaggtgtcatagt

SEQ ID NO: 254034 - DNA, 19 bp, Homo sapiens
  siRNA target sequence for ARHGEF12 (NM_015313.1,3179-3197).
gttttaaggtgtcatagta

SEQ ID NO: 254035 - DNA, 19 bp, Homo sapiens
  siRNA target sequence for ARHGEF12 (NM_015313.1,3207-3225).
catctacagctgatagcaa

SEQ ID NO: 254036 - DNA, 19 bp, Homo sapiens
  siRNA target sequence for ARHGEF12 (NM_015313.1,3229-3247).
cacgtttagccctgtcatt

SEQ ID NO: 254037 - DNA, 19 bp, Homo sapiens
  siRNA target sequence for ARHGEF12 (NM_015313.1,3231-3249).
cgtttagccctgtcattaa

SEQ ID NO: 254038 - DNA, 19 bp, Homo sapiens
  siRNA target sequence for ARHGEF12 (NM_015313.1,3239-3257).
cctgtcattaagttgagta

SEQ ID NO: 254039 - DNA, 19 bp, Homo sapiens
  siRNA target sequence for ARHGEF12 (NM_015313.1,3269-3287).
cgacaagtggcaacagata

SEQ ID NO: 254040 - DNA, 19 bp, Homo sapiens
  siRNA target sequence for ARHGEF12 (NM_015313.1,3317-3335).
gacaatggcgctcagattt

SEQ ID NO: 254041 - DNA, 19 bp, Homo sapiens
  siRNA target sequence for ARHGEF12 (NM_015313.1,3319-3337).
caatggcgctcagatttat

SEQ ID NO: 254042 - DNA, 19 bp, Homo sapiens
  siRNA target sequence for ARHGEF12 (NM_015313.1,3369-3387).
ctgtctggcaggacctaat

SEQ ID NO: 254043 - DNA, 19 bp, Homo sapiens
  siRNA target sequence for ARHGEF12 (NM_015313.1,3371-3389).
gtctggcaggacctaatct

SEQ ID NO: 254044 - DNA, 19 bp, Homo sapiens
  siRNA target sequence for ARHGEF12 (NM_015313.1,3373-3391).
ctggcaggacctaatctgt

SEQ ID NO: 254045 - DNA, 19 bp, Homo sapiens
  siRNA target sequence for ARHGEF12 (NM_015313.1,3456-3474).
gcgaaggagataatgatga

SEQ ID NO: 254046 - DNA, 19 bp, Homo sapiens
  siRNA target sequence for ARHGEF12 (NM_015313.1,3499-3517).
ggagcagcatggcatttca

SEQ ID NO: 254047 - DNA, 19 bp, Homo sapiens
  siRNA target sequence for ARHGEF12 (NM_015313.1,3550-3568).
gggattagaatctacctta

SEQ ID NO: 254048 - DNA, 19 bp, Homo sapiens
  siRNA target sequence for ARHGEF12 (NM_015313.1,3552-3570).
gattagaatctaccttaat

SEQ ID NO: 254049 - DNA, 19 bp, Homo sapiens
  siRNA target sequence for ARHGEF12 (NM_015313.1,3557-3575).
gaatctaccttaatatcgt

SEQ ID NO: 254050 - DNA, 19 bp, Homo sapiens
  siRNA target sequence for ARHGEF12 (NM_015313.1,3598-3616).
gagtacctctgggaaatca

SEQ ID NO: 254051 - DNA, 19 bp, Homo sapiens
  siRNA target sequence for ARHGEF12 (NM_015313.1,3615-3633).
cagaggtacgtgatctgtt

SEQ ID NO: 254052 - DNA, 19 bp, Homo sapiens
  siRNA target sequence for ARHGEF12 (NM_015313.1,3638-3656).
gctgagagacagtttgcaa

SEQ ID NO: 254053 - DNA, 19 bp, Homo sapiens
  siRNA target sequence for ARHGEF12 (NM_015313.1,3669-3687).
cagatgggacactaaagga

SEQ ID NO: 254054 - DNA, 19 bp, Homo sapiens
  siRNA target sequence for ARHGEF12 (NM_015313.1,3799-3817).
gcaacagctaggtttgact

SEQ ID NO: 254055 - DNA, 19 bp, Homo sapiens
  siRNA target sequence for ARHGEF12 (NM_015313.1,3830-3848).
caggaagactggcaacatt

SEQ ID NO: 254056 - DNA, 19 bp, Homo sapiens
  siRNA target sequence for ARHGEF12 (NM_015313.1,3840-3858).
ggcaacatttcccaagata

SEQ ID NO: 254057 - DNA, 19 bp, Homo sapiens
  siRNA target sequence for ARHGEF12 (NM_015313.1,3893-3911).
gtcatccagaactctgaaa

SEQ ID NO: 254058 - DNA, 19 bp, Homo sapiens
  siRNA target sequence for ARHGEF12 (NM_015313.1,3959-3977).
ggaactggtgacattgcaa

SEQ ID NO: 254059 - DNA, 19 bp, Homo sapiens
  siRNA target sequence for ARHGEF12 (NM_015313.1,3965-3983).
ggtgacattgcaacttgtt

SEQ ID NO: 254060 - DNA, 19 bp, Homo sapiens
  siRNA target sequence for ARHGEF12 (NM_015313.1,3966-3984).
gtgacattgcaacttgtta

SEQ ID NO: 254061 - DNA, 19 bp, Homo sapiens
  siRNA target sequence for ARHGEF12 (NM_015313.1,3993-4011).
ggacttcaactgaatcttt

SEQ ID NO: 254062 - DNA, 19 bp, Homo sapiens
  siRNA target sequence for ARHGEF12 (NM_015313.1,4046-4064).
gatagccaggcaagtaaca

SEQ ID NO: 254063 - DNA, 19 bp, Homo sapiens
  siRNA target sequence for ARHGEF12 (NM_015313.1,4056-4074).
caagtaacattttagtaat

SEQ ID NO: 254064 - DNA, 19 bp, Homo sapiens
  siRNA target sequence for ARHGEF12 (NM_015313.1,4059-4077).
gtaacattttagtaatgga

SEQ ID NO: 254065 - DNA, 19 bp, Homo sapiens
  siRNA target sequence for ARHGEF12 (NM_015313.1,4070-4088).
gtaatggaccacatgatta

SEQ ID NO: 254066 - DNA, 19 bp, Homo sapiens
  siRNA target sequence for ARHGEF12 (NM_015313.1,4114-4132).
gccagaagggggtcttgat

SEQ ID NO: 254067 - DNA, 19 bp, Homo sapiens
  siRNA target sequence for ARHGEF12 (NM_015313.1,4116-4134).
cagaagggggtcttgatga

SEQ ID NO: 254068 - DNA, 19 bp, Homo sapiens
  siRNA target sequence for ARHGEF12 (NM_015313.1,4235-4253).
cgcatctcaggaaactatt

SEQ ID NO: 254069 - DNA, 19 bp, Homo sapiens
  siRNA target sequence for ARHGEF12 (NM_015313.1,4236-4254).
gcatctcaggaaactattt

SEQ ID NO: 254070 - DNA, 19 bp, Homo sapiens
  siRNA target sequence for ARHGEF12 (NM_015313.1,4391-4409).
cactccgatggggcaattt

SEQ ID NO: 254071 - DNA, 19 bp, Homo sapiens
  siRNA target sequence for ARHGEF12 (NM_015313.1,4393-4411).
ctccgatggggcaatttca

SEQ ID NO: 254072 - DNA, 19 bp, Homo sapiens
  siRNA target sequence for ARHGEF12 (NM_015313.1,4413-4431).
cattcacccccgaatttct

SEQ ID NO: 254073 - DNA, 19 bp, Homo sapiens
  siRNA target sequence for ARHGEF12 (NM_015313.1,4448-4466).
ggagctatggagtattcct

SEQ ID NO: 254074 - DNA, 19 bp, Homo sapiens
  siRNA target sequence for ARHGEF12 (NM_015313.1,4513-4531).
gatcatggagtacattcat

SEQ ID NO: 254075 - DNA, 19 bp, Homo sapiens
  siRNA target sequence for ARHGEF12 (NM_015313.1,4519-4537).
ggagtacattcataagata

SEQ ID NO: 254076 - DNA, 19 bp, Homo sapiens
  siRNA target sequence for ARHGEF12 (NM_015313.1,4541-4559).
gctgaccttgaacacttaa

SEQ ID NO: 254077 - DNA, 19 bp, Homo sapiens
  siRNA target sequence for ARHGEF12 (NM_015313.1,4544-4562).
gaccttgaacacttaaaga

SEQ ID NO: 254078 - DNA, 19 bp, Homo sapiens
  siRNA target sequence for AXIN1 (NM_003502.2,208-226).
gacctcggagcaagtttca

SEQ ID NO: 254079 - DNA, 19 bp, Homo sapiens
  siRNA target sequence for AXIN1 (NM_003502.2,317-335).
ggaaaggtgttggcattaa

SEQ ID NO: 254080 - DNA, 19 bp, Homo sapiens
  siRNA target sequence for AXIN1 (NM_003502.2,409-427).
cccaccccaccatacttga

SEQ ID NO: 254081 - DNA, 19 bp, Homo sapiens
  siRNA target sequence for AXIN1 (NM_003502.2,602-620).
gagccatctaccgaaagta

SEQ ID NO: 254082 - DNA, 19 bp, Homo sapiens
  siRNA target sequence for AXIN1 (NM_003502.2,604-622).
gccatctaccgaaagtaca

SEQ ID NO: 254083 - DNA, 19 bp, Homo sapiens
  siRNA target sequence for AXIN1 (NM_003502.2,612-630).
ccgaaagtacattcttgat

SEQ ID NO: 254084 - DNA, 19 bp, Homo sapiens
  siRNA target sequence for AXIN1 (NM_003502.2,613-631).
cgaaagtacattcttgata

SEQ ID NO: 254085 - DNA, 19 bp, Homo sapiens
  siRNA target sequence for AXIN1 (NM_003502.2,864-882).
gacagggaagggcatatct

SEQ ID NO: 254086 - DNA, 19 bp, Homo sapiens
  siRNA target sequence for AXIN1 (NM_003502.2,883-901).
ggatacctgccgaccttaa

SEQ ID NO: 254087 - DNA, 19 bp, Homo sapiens
  siRNA target sequence for AXIN1 (NM_003502.2,884-902).
gatacctgccgaccttaaa

SEQ ID NO: 254088 - DNA, 19 bp, Homo sapiens
  siRNA target sequence for AXIN1 (NM_003502.2,888-906).
cctgccgaccttaaatgaa

SEQ ID NO: 254089 - DNA, 19 bp, Homo sapiens
  siRNA target sequence for AXIN1 (NM_003502.2,891-909).
gccgaccttaaatgaagat

SEQ ID NO: 254090 - DNA, 19 bp, Homo sapiens
  siRNA target sequence for AXIN1 (NM_003502.2,893-911).
cgaccttaaatgaagatga

SEQ ID NO: 254091 - DNA, 19 bp, Homo sapiens
  siRNA target sequence for AXIN1 (NM_003502.2,1074-1092).
gccagtcaacccctattat

SEQ ID NO: 254092 - DNA, 19 bp, Homo sapiens
  siRNA target sequence for AXIN1 (NM_003502.2,1080-1098).
caacccctattatgtcaat

SEQ ID NO: 254093 - DNA, 19 bp, Homo sapiens
  siRNA target sequence for AXIN1 (NM_003502.2,1969-1987).
gtgggcgtggcgtgcaaaa

SEQ ID NO: 254094 - DNA, 19 bp, Homo sapiens
  siRNA target sequence for AXIN1 (NM_003502.2,1971-1989).
gggcgtggcgtgcaaaaga

SEQ ID NO: 254095 - DNA, 19 bp, Homo sapiens
  siRNA target sequence for AXIN1 (NM_003502.2,1972-1990).
ggcgtggcgtgcaaaagaa

SEQ ID NO: 254096 - DNA, 19 bp, Homo sapiens
  siRNA target sequence for AXIN1 (NM_003502.2,1973-1991).
gcgtggcgtgcaaaagaaa

SEQ ID NO: 254097 - DNA, 19 bp, Homo sapiens
  siRNA target sequence for AXIN1 (NM_003502.2,1974-1992).
cgtggcgtgcaaaagaaat

SEQ ID NO: 254098 - DNA, 19 bp, Homo sapiens
  siRNA target sequence for AXIN1 (NM_003502.2,2527-2545).
gttgtggcgtactacttct

SEQ ID NO: 254099 - DNA, 19 bp, Homo sapiens
  siRNA target sequence for AXIN1 (NM_003502.2,2633-2651).
gctacagatactacttcaa

SEQ ID NO: 254100 - DNA, 19 bp, Homo sapiens
  siRNA target sequence for AXIN1 (NM_003502.2,2656-2674).
gtgagcgacgagtttgact

SEQ ID NO: 254101 - DNA, 19 bp, Homo sapiens
  siRNA target sequence for AXIN2 (NM_004655.1,582-600).
cagattgattccatcatgt

SEQ ID NO: 254102 - DNA, 19 bp, Homo sapiens
  siRNA target sequence for AXIN2 (NM_004655.1,584-602).
gattgattccatcatgttt

SEQ ID NO: 254103 - DNA, 19 bp, Homo sapiens
  siRNA target sequence for AXIN2 (NM_004655.1,626-644).
gtcggtgatggaggaaaat

SEQ ID NO: 254104 - DNA, 19 bp, Homo sapiens
  siRNA target sequence for AXIN2 (NM_004655.1,645-663).
gcctaccagatgtttttga

SEQ ID NO: 254105 - DNA, 19 bp, Homo sapiens
  siRNA target sequence for AXIN2 (NM_004655.1,647-665).
ctaccagatgtttttgact

SEQ ID NO: 254106 - DNA, 19 bp, Homo sapiens
  siRNA target sequence for AXIN2 (NM_004655.1,707-725).
cacagcttacatgagtaat

SEQ ID NO: 254107 - DNA, 19 bp, Homo sapiens
  siRNA target sequence for AXIN2 (NM_004655.1,730-748).
gactcgggagcctaaaggt

SEQ ID NO: 254108 - DNA, 19 bp, Homo sapiens
  siRNA target sequence for AXIN2 (NM_004655.1,790-808).
ggacttgtgccgacttcaa

SEQ ID NO: 254109 - DNA, 19 bp, Homo sapiens
  siRNA target sequence for AXIN2 (NM_004655.1,801-819).
gacttcaagtgcaaacttt

SEQ ID NO: 254110 - DNA, 19 bp, Homo sapiens
  siRNA target sequence for AXIN2 (NM_004655.1,897-915).
ggatacaggtccttcaaga

SEQ ID NO: 254111 - DNA, 19 bp, Homo sapiens
  siRNA target sequence for AXIN2 (NM_004655.1,917-935).
gagcgatcctgttaatcct

SEQ ID NO: 254112 - DNA, 19 bp, Homo sapiens
  siRNA target sequence for AXIN2 (NM_004655.1,919-937).
gcgatcctgttaatcctta

SEQ ID NO: 254113 - DNA, 19 bp, Homo sapiens
  siRNA target sequence for AXIN2 (NM_004655.1,977-995).
cgccaacgacagtgagata

SEQ ID NO: 254114 - DNA, 19 bp, Homo sapiens
  siRNA target sequence for AXIN2 (NM_004655.1,978-996).
gccaacgacagtgagatat

SEQ ID NO: 254115 - DNA, 19 bp, Homo sapiens
  siRNA target sequence for AXIN2 (NM_004655.1,1002-1020).
gatgcgctgacggatgatt

SEQ ID NO: 254116 - DNA, 19 bp, Homo sapiens
  siRNA target sequence for AXIN2 (NM_004655.1,1719-1737).
cctgggggcagcgagtatt

SEQ ID NO: 254117 - DNA, 19 bp, Homo sapiens
  siRNA target sequence for AXIN2 (NM_004655.1,1720-1738).
ctgggggcagcgagtatta

SEQ ID NO: 254118 - DNA, 19 bp, Homo sapiens
  siRNA target sequence for AXIN2 (NM_004655.1,1722-1740).
gggggcagcgagtattact

SEQ ID NO: 254119 - DNA, 19 bp, Homo sapiens
  siRNA target sequence for AXIN2 (NM_004655.1,2374-2392).
gtgagttggttgtcactta

SEQ ID NO: 254120 - DNA, 19 bp, Homo sapiens
  siRNA target sequence for AXIN2 (NM_004655.1,2376-2394).
gagttggttgtcacttact

SEQ ID NO: 254121 - DNA, 19 bp, Homo sapiens
  siRNA target sequence for AXIN2 (NM_004655.1,2378-2396).
gttggttgtcacttacttt

SEQ ID NO: 254122 - DNA, 19 bp, Homo sapiens
  siRNA target sequence for AXIN2 (NM_004655.1,2447-2465).
gaccctgggccactttaaa

SEQ ID NO: 254123 - DNA, 19 bp, Homo sapiens
  siRNA target sequence for AXIN2 (NM_004655.1,2564-2582).
gacggtgctcccgatgtat

SEQ ID NO: 254124 - DNA, 19 bp, Homo sapiens
  siRNA target sequence for AXIN2 (NM_004655.1,2566-2584).
cggtgctcccgatgtatga

SEQ ID NO: 254125 - DNA, 19 bp, Homo sapiens
  siRNA target sequence for AXIN2 (NM_004655.1,2567-2585).
ggtgctcccgatgtatgaa

SEQ ID NO: 254126 - DNA, 19 bp, Homo sapiens
  siRNA target sequence for BCAR1 (NM_014567.1,777-795).
ggcagggctatgtatacga

SEQ ID NO: 254127 - DNA, 19 bp, Homo sapiens
  siRNA target sequence for BCAR1 (NM_014567.1,852-870).
ggccacaggacatctatga

SEQ ID NO: 254128 - DNA, 19 bp, Homo sapiens
  siRNA target sequence for BCAR1 (NM_014567.1,853-871).
gccacaggacatctatgat

SEQ ID NO: 254129 - DNA, 19 bp, Homo sapiens
  siRNA target sequence for BCAR1 (NM_014567.1,855-873).
cacaggacatctatgatgt

SEQ ID NO: 254130 - DNA, 19 bp, Homo sapiens
  siRNA target sequence for BCAR1 (NM_014567.1,966-984).
cgttgctggaggtgtatga

SEQ ID NO: 254131 - DNA, 19 bp, Homo sapiens
  siRNA target sequence for BCAR1 (NM_014567.1,2100-2118).
ggatggaggactatgacta

SEQ ID NO: 254132 - DNA, 19 bp, Homo sapiens
  siRNA target sequence for BSG (NM_001728.2,941-959).
ccggtcagagctacacatt

SEQ ID NO: 254133 - DNA, 19 bp, Homo sapiens
  siRNA target sequence for BSG (NM_001728.2,943-961).
ggtcagagctacacattga

SEQ ID NO: 254134 - DNA, 19 bp, Homo sapiens
  siRNA target sequence for BSG (NM_001728.2,1233-1251).
gtccgccagaggaactctt

SEQ ID NO: 254135 - DNA, 19 bp, Homo sapiens
  siRNA target sequence for BSG (NM_198591.1,236-254).
gacgcgtctccccaagaaa

SEQ ID NO: 254136 - DNA, 19 bp, Homo sapiens
  siRNA target sequence for CLTCL1 (NM_001835.1,86-104).
gctccaaaaccttggaatt

SEQ ID NO: 254137 - DNA, 19 bp, Homo sapiens
  siRNA target sequence for CLTCL1 (NM_001835.1,155-173).
catatgtatccgagagaaa

SEQ ID NO: 254138 - DNA, 19 bp, Homo sapiens
  siRNA target sequence for CLTCL1 (NM_001835.1,185-203).
ggcacaggtcacgatcatt

SEQ ID NO: 254139 - DNA, 19 bp, Homo sapiens
  siRNA target sequence for CLTCL1 (NM_001835.1,187-205).
cacaggtcacgatcattga

SEQ ID NO: 254140 - DNA, 19 bp, Homo sapiens
  siRNA target sequence for CLTCL1 (NM_001835.1,352-370).
ctatggcagaagaagtgat

SEQ ID NO: 254141 - DNA, 19 bp, Homo sapiens
  siRNA target sequence for CLTCL1 (NM_001835.1,458-476).
catgaagatgtttgataga

SEQ ID NO: 254142 - DNA, 19 bp, Homo sapiens
  siRNA target sequence for CLTCL1 (NM_001835.1,461-479).
gaagatgtttgatagacat

SEQ ID NO: 254143 - DNA, 19 bp, Homo sapiens
  siRNA target sequence for CLTCL1 (NM_001835.1,493-511).
gctgccaggtgattcacta

SEQ ID NO: 254144 - DNA, 19 bp, Homo sapiens
  siRNA target sequence for CLTCL1 (NM_001835.1,550-568).
gcatctcggctcagcaaaa

SEQ ID NO: 254145 - DNA, 19 bp, Homo sapiens
  siRNA target sequence for CLTCL1 (NM_001835.1,640-658).
cggcttttgcagagttcaa

SEQ ID NO: 254146 - DNA, 19 bp, Homo sapiens
  siRNA target sequence for CLTCL1 (NM_001835.1,718-736).
gaggcaagttgcacatcat

SEQ ID NO: 254147 - DNA, 19 bp, Homo sapiens
  siRNA target sequence for CLTCL1 (NM_001835.1,749-767).
gcctgcagcgggaaaccaa

SEQ ID NO: 254148 - DNA, 19 bp, Homo sapiens
  siRNA target sequence for CLTCL1 (NM_001835.1,757-775).
cgggaaaccaaccttttgt

SEQ ID NO: 254149 - DNA, 19 bp, Homo sapiens
  siRNA target sequence for CLTCL1 (NM_001835.1,836-854).
gcagattggagctaaacat

SEQ ID NO: 254150 - DNA, 19 bp, Homo sapiens
  siRNA target sequence for CLTCL1 (NM_001835.1,844-862).
gagctaaacatggtgttat

SEQ ID NO: 254151 - DNA, 19 bp, Homo sapiens
  siRNA target sequence for CLTCL1 (NM_001835.1,858-876).
gttatttacttgatcacaa

SEQ ID NO: 254152 - DNA, 19 bp, Homo sapiens
  siRNA target sequence for CLTCL1 (NM_001835.1,874-892).
caaagtatggctatcttca

SEQ ID NO: 254153 - DNA, 19 bp, Homo sapiens
  siRNA target sequence for CLTCL1 (NM_001835.1,923-941).
ctgcatgaaccgtattagt

SEQ ID NO: 254154 - DNA, 19 bp, Homo sapiens
  siRNA target sequence for CLTCL1 (NM_001835.1,934-952).
gtattagtgctgacacaat

SEQ ID NO: 254155 - DNA, 19 bp, Homo sapiens
  siRNA target sequence for CLTCL1 (NM_001835.1,940-958).
gtgctgacacaatatttgt

SEQ ID NO: 254156 - DNA, 19 bp, Homo sapiens
  siRNA target sequence for CLTCL1 (NM_001835.1,942-960).
gctgacacaatatttgtca

SEQ ID NO: 254157 - DNA, 19 bp, Homo sapiens
  siRNA target sequence for CLTCL1 (NM_001835.1,1008-1026).
ggacaggtactgtcagttt

SEQ ID NO: 254158 - DNA, 19 bp, Homo sapiens
  siRNA target sequence for CLTCL1 (NM_001835.1,1013-1031).
ggtactgtcagtttgtgtt

SEQ ID NO: 254159 - DNA, 19 bp, Homo sapiens
  siRNA target sequence for CLTCL1 (NM_001835.1,1027-1045).
gtgttgaggaagataacat

SEQ ID NO: 254160 - DNA, 19 bp, Homo sapiens
  siRNA target sequence for CLTCL1 (NM_001835.1,1032-1050).
gaggaagataacattgtga

SEQ ID NO: 254161 - DNA, 19 bp, Homo sapiens
  siRNA target sequence for CLTCL1 (NM_001835.1,1057-1075).
caaccaacgtgcttcagaa

SEQ ID NO: 254162 - DNA, 19 bp, Homo sapiens
  siRNA target sequence for CLTCL1 (NM_001835.1,1093-1111).
gtttggccgttcgtagtaa

SEQ ID NO: 254163 - DNA, 19 bp, Homo sapiens
  siRNA target sequence for CLTCL1 (NM_001835.1,1228-1246).
gagagacggtccagaaatt

SEQ ID NO: 254164 - DNA, 19 bp, Homo sapiens
  siRNA target sequence for CLTCL1 (NM_001835.1,1238-1256).
ccagaaattccagagtata

SEQ ID NO: 254165 - DNA, 19 bp, Homo sapiens
  siRNA target sequence for CLTCL1 (NM_001835.1,1316-1334).
gggtcagctcaataaactt

SEQ ID NO: 254166 - DNA, 19 bp, Homo sapiens
  siRNA target sequence for CLTCL1 (NM_001835.1,1375-1393).
gtaagcaactcctagagaa

SEQ ID NO: 254167 - DNA, 19 bp, Homo sapiens
  siRNA target sequence for CLTCL1 (NM_001835.1,1431-1449).
ctcggagacttggtcaaaa

SEQ ID NO: 254168 - DNA, 19 bp, Homo sapiens
  siRNA target sequence for CLTCL1 (NM_001835.1,1434-1452).
ggagacttggtcaaaacca

SEQ ID NO: 254169 - DNA, 19 bp, Homo sapiens
  siRNA target sequence for CLTCL1 (NM_001835.1,1487-1505).
ggcaaatgtgccaagcaaa

SEQ ID NO: 254170 - DNA, 19 bp, Homo sapiens
  siRNA target sequence for CLTCL1 (NM_001835.1,1593-1611).
ctgctgaggggtgtaatga

SEQ ID NO: 254171 - DNA, 19 bp, Homo sapiens
  siRNA target sequence for CLTCL1 (NM_001835.1,1596-1614).
ctgaggggtgtaatgaaga

SEQ ID NO: 254172 - DNA, 19 bp, Homo sapiens
  siRNA target sequence for CLTCL1 (NM_001835.1,1623-1641).
gaacagggcctgcagtttt

SEQ ID NO: 254173 - DNA, 19 bp, Homo sapiens
  siRNA target sequence for CLTCL1 (NM_001835.1,1634-1652).
gcagttttctcgaatgcta

SEQ ID NO: 254174 - DNA, 19 bp, Homo sapiens
  siRNA target sequence for CLTCL1 (NM_001835.1,1675-1693).
ccaacattagccagattgt

SEQ ID NO: 254175 - DNA, 19 bp, Homo sapiens
  siRNA target sequence for CLTCL1 (NM_001835.1,1799-1817).
ggagatgaaccttgttcat

SEQ ID NO: 254176 - DNA, 19 bp, Homo sapiens
  siRNA target sequence for CLTCL1 (NM_001835.1,1936-1954).
ccgacctctatgacatcaa

SEQ ID NO: 254177 - DNA, 19 bp, Homo sapiens
  siRNA target sequence for CLTCL1 (NM_001835.1,1986-2004).
cccgagtggcttgtcaatt

SEQ ID NO: 254178 - DNA, 19 bp, Homo sapiens
  siRNA target sequence for CLTCL1 (NM_001835.1,1987-2005).
ccgagtggcttgtcaattt

SEQ ID NO: 254179 - DNA, 19 bp, Homo sapiens
  siRNA target sequence for CLTCL1 (NM_001835.1,2164-2182).
gttacaaaggcctcttcta

SEQ ID NO: 254180 - DNA, 19 bp, Homo sapiens
  siRNA target sequence for CLTCL1 (NM_001835.1,2311-2329).
cagagcgtgtgaagaactt

SEQ ID NO: 254181 - DNA, 19 bp, Homo sapiens
  siRNA target sequence for CLTCL1 (NM_001835.1,2397-2415).
catgaccttgtcctatatt

SEQ ID NO: 254182 - DNA, 19 bp, Homo sapiens
  siRNA target sequence for CLTCL1 (NM_001835.1,2426-2444).
caacctgcagaggtacatt

SEQ ID NO: 254183 - DNA, 19 bp, Homo sapiens
  siRNA target sequence for CLTCL1 (NM_001835.1,2526-2544).
gtgattaaacacttaatca

SEQ ID NO: 254184 - DNA, 19 bp, Homo sapiens
  siRNA target sequence for CLTCL1 (NM_001835.1,2670-2688).
cacaatgcactggctaaaa

SEQ ID NO: 254185 - DNA, 19 bp, Homo sapiens
  siRNA target sequence for CLTCL1 (NM_001835.1,2728-2746).
gagagaatgcctactatga

SEQ ID NO: 254186 - DNA, 19 bp, Homo sapiens
  siRNA target sequence for CLTCL1 (NM_001835.1,2840-2858).
ggtgtgcaatgagaattct

SEQ ID NO: 254187 - DNA, 19 bp, Homo sapiens
  siRNA target sequence for CLTCL1 (NM_001835.1,2991-3009).
cgggatcctgaagagattt

SEQ ID NO: 254188 - DNA, 19 bp, Homo sapiens
  siRNA target sequence for CLTCL1 (NM_001835.1,3005-3023).
gatttcggtcactgtcaaa

SEQ ID NO: 254189 - DNA, 19 bp, Homo sapiens
  siRNA target sequence for CLTCL1 (NM_001835.1,3034-3052).
cagccgacctgcctaatga

SEQ ID NO: 254190 - DNA, 19 bp, Homo sapiens
  siRNA target sequence for CLTCL1 (NM_001835.1,3098-3116).
cagcgagcacaggaatcta

SEQ ID NO: 254191 - DNA, 19 bp, Homo sapiens
  siRNA target sequence for CLTCL1 (NM_001835.1,3100-3118).
gcgagcacaggaatctaca

SEQ ID NO: 254192 - DNA, 19 bp, Homo sapiens
  siRNA target sequence for CLTCL1 (NM_001835.1,3104-3122).
gcacaggaatctacagaat

SEQ ID NO: 254193 - DNA, 19 bp, Homo sapiens
  siRNA target sequence for CLTCL1 (NM_001835.1,3159-3177).
cgggtcatggagtacatca

SEQ ID NO: 254194 - DNA, 19 bp, Homo sapiens
  siRNA target sequence for CLTCL1 (NM_001835.1,3251-3269).
caccgttttccacaagttt

SEQ ID NO: 254195 - DNA, 19 bp, Homo sapiens
  siRNA target sequence for CLTCL1 (NM_001835.1,3253-3271).
ccgttttccacaagtttga

SEQ ID NO: 254196 - DNA, 19 bp, Homo sapiens
  siRNA target sequence for CLTCL1 (NM_001835.1,3254-3272).
cgttttccacaagtttgat

SEQ ID NO: 254197 - DNA, 19 bp, Homo sapiens
  siRNA target sequence for CLTCL1 (NM_001835.1,3260-3278).
ccacaagtttgatatgaat

SEQ ID NO: 254198 - DNA, 19 bp, Homo sapiens
  siRNA target sequence for CLTCL1 (NM_001835.1,3335-3353).
gtttgcggagagatgcaat

SEQ ID NO: 254199 - DNA, 19 bp, Homo sapiens
  siRNA target sequence for CLTCL1 (NM_001835.1,3416-3434).
catcaactcctatatcaga

SEQ ID NO: 254200 - DNA, 19 bp, Homo sapiens
  siRNA target sequence for CLTCL1 (NM_001835.1,3488-3506).
caactgggaggatctagtt

SEQ ID NO: 254201 - DNA, 19 bp, Homo sapiens
  siRNA target sequence for CLTCL1 (NM_001835.1,3491-3509).
ctgggaggatctagttaaa

SEQ ID NO: 254202 - DNA, 19 bp, Homo sapiens
  siRNA target sequence for CLTCL1 (NM_001835.1,3493-3511).
gggaggatctagttaaatt

SEQ ID NO: 254203 - DNA, 19 bp, Homo sapiens
  siRNA target sequence for CLTCL1 (NM_001835.1,3494-3512).
ggaggatctagttaaattt

SEQ ID NO: 254204 - DNA, 19 bp, Homo sapiens
  siRNA target sequence for CLTCL1 (NM_001835.1,3533-3551).
gggccgtgagtcctatata

SEQ ID NO: 254205 - DNA, 19 bp, Homo sapiens
  siRNA target sequence for CLTCL1 (NM_001835.1,3535-3553).
gccgtgagtcctatataga

SEQ ID NO: 254206 - DNA, 19 bp, Homo sapiens
  siRNA target sequence for CLTCL1 (NM_001835.1,3537-3555).
cgtgagtcctatatagaga

SEQ ID NO: 254207 - DNA, 19 bp, Homo sapiens
  siRNA target sequence for CLTCL1 (NM_001835.1,3545-3563).
ctatatagagactgaactt

SEQ ID NO: 254208 - DNA, 19 bp, Homo sapiens
  siRNA target sequence for CLTCL1 (NM_001835.1,3658-3676).
gttacgaggagggaatgta

SEQ ID NO: 254209 - DNA, 19 bp, Homo sapiens
  siRNA target sequence for CLTCL1 (NM_001835.1,3692-3710).
gctctatagcaatgtttct

SEQ ID NO: 254210 - DNA, 19 bp, Homo sapiens
  siRNA target sequence for CLTCL1 (NM_001835.1,3693-3711).
ctctatagcaatgtttcta

SEQ ID NO: 254211 - DNA, 19 bp, Homo sapiens
  siRNA target sequence for CLTCL1 (NM_001835.1,4201-4219).
ggaaggagggtcagttcaa

SEQ ID NO: 254212 - DNA, 19 bp, Homo sapiens
  siRNA target sequence for CLTCL1 (NM_001835.1,4210-4228).
gtcagttcaaggacatcat

SEQ ID NO: 254213 - DNA, 19 bp, Homo sapiens
  siRNA target sequence for CLTCL1 (NM_001835.1,4240-4258).
ccaacgtcgagctctgtta

SEQ ID NO: 254214 - DNA, 19 bp, Homo sapiens
  siRNA target sequence for CLTCL1 (NM_001835.1,4244-4262).
cgtcgagctctgttacaga

SEQ ID NO: 254215 - DNA, 19 bp, Homo sapiens
  siRNA target sequence for CLTCL1 (NM_001835.1,4286-4304).
caaaccactgctcatcaat

SEQ ID NO: 254216 - DNA, 19 bp, Homo sapiens
  siRNA target sequence for CLTCL1 (NM_007098.1,4481-4499).
cttaagggcatctatcgat

SEQ ID NO: 254217 - DNA, 19 bp, Homo sapiens
  siRNA target sequence for CLTCL1 (NM_007098.1,4570-4588).
gcattgcggcctatctgta

SEQ ID NO: 254218 - DNA, 19 bp, Homo sapiens
  siRNA target sequence for CLTCL1 (NM_007098.1,4584-4602).
ctgtacaagggcaataact

SEQ ID NO: 254219 - DNA, 19 bp, Homo sapiens
  siRNA target sequence for CLTCL1 (NM_007098.1,4627-4645).
gcaagaaggatcatctcta

SEQ ID NO: 254220 - DNA, 19 bp, Homo sapiens
  siRNA target sequence for DIXDC1 (NM_033425.1,474-492).
gcaaagagcgagtccatta

SEQ ID NO: 254221 - DNA, 19 bp, Homo sapiens
  siRNA target sequence for DIXDC1 (NM_033425.1,475-493).
caaagagcgagtccattat

SEQ ID NO: 254222 - DNA, 19 bp, Homo sapiens
  siRNA target sequence for DIXDC1 (NM_033425.1,531-549).
cccgctgaaggaatagaga

SEQ ID NO: 254223 - DNA, 19 bp, Homo sapiens
  siRNA target sequence for DIXDC1 (NM_033425.1,532-550).
ccgctgaaggaatagagaa

SEQ ID NO: 254224 - DNA, 19 bp, Homo sapiens
  siRNA target sequence for DIXDC1 (NM_033425.1,561-579).
gggacagattctccattat

SEQ ID NO: 254225 - DNA, 19 bp, Homo sapiens
  siRNA target sequence for DIXDC1 (NM_033425.1,563-581).
gacagattctccattatct

SEQ ID NO: 254226 - DNA, 19 bp, Homo sapiens
  siRNA target sequence for DIXDC1 (NM_033425.1,785-803).
cgaggaacaactgattata

SEQ ID NO: 254227 - DNA, 19 bp, Homo sapiens
  siRNA target sequence for DIXDC1 (NM_033425.1,811-829).
gtcgtctggatcagagtat

SEQ ID NO: 254228 - DNA, 19 bp, Homo sapiens
  siRNA target sequence for DIXDC1 (NM_033425.1,887-905).
cttacaggggataaaggat

SEQ ID NO: 254229 - DNA, 19 bp, Homo sapiens
  siRNA target sequence for DIXDC1 (NM_033425.1,960-978).
gagctactgagggcaaata

SEQ ID NO: 254230 - DNA, 19 bp, Homo sapiens
  siRNA target sequence for DIXDC1 (NM_033425.1,1040-1058).
ccggctcttgggagaatat

SEQ ID NO: 254231 - DNA, 19 bp, Homo sapiens
  siRNA target sequence for DIXDC1 (NM_033425.1,1094-1112).
gcagcaccaggccaagtta

SEQ ID NO: 254232 - DNA, 19 bp, Homo sapiens
  siRNA target sequence for DIXDC1 (NM_033425.1,1116-1134).
gaagcactccggaaactct

SEQ ID NO: 254233 - DNA, 19 bp, Homo sapiens
  siRNA target sequence for DIXDC1 (NM_033425.1,1166-1184).
gcgagagctagaacacaaa

SEQ ID NO: 254234 - DNA, 19 bp, Homo sapiens
  siRNA target sequence for DIXDC1 (NM_033425.1,1224-1242).
gaggcgaccaactacaaca

SEQ ID NO: 254235 - DNA, 19 bp, Homo sapiens
  siRNA target sequence for DIXDC1 (NM_033425.1,1386-1404).
cagcaccacactattgaca

SEQ ID NO: 254236 - DNA, 19 bp, Homo sapiens
  siRNA target sequence for DIXDC1 (NM_033425.1,1490-1508).
gtcacccagaactcaagta

SEQ ID NO: 254237 - DNA, 19 bp, Homo sapiens
  siRNA target sequence for DIXDC1 (NM_033425.1,1579-1597).
gcagcacctgtactaaagt

SEQ ID NO: 254238 - DNA, 19 bp, Homo sapiens
  siRNA target sequence for DIXDC1 (NM_033425.1,1624-1642).
cgcccttcatggtcaatat

SEQ ID NO: 254239 - DNA, 19 bp, Homo sapiens
  siRNA target sequence for DIXDC1 (NM_033425.1,1625-1643).
gcccttcatggtcaatata

SEQ ID NO: 254240 - DNA, 19 bp, Homo sapiens
  siRNA target sequence for DIXDC1 (NM_033425.1,1659-1677).
gaggtgacgttaaaggatt

SEQ ID NO: 254241 - DNA, 19 bp, Homo sapiens
  siRNA target sequence for DIXDC1 (NM_033425.1,1664-1682).
gacgttaaaggattttaaa

SEQ ID NO: 254242 - DNA, 19 bp, Homo sapiens
  siRNA target sequence for DIXDC1 (NM_033425.1,1687-1705).
ctattgatcgggaaggaaa

SEQ ID NO: 254243 - DNA, 19 bp, Homo sapiens
  siRNA target sequence for DIXDC1 (NM_033425.1,1701-1719).
ggaaatcaccggtatcact

SEQ ID NO: 254244 - DNA, 19 bp, Homo sapiens
  siRNA target sequence for DIXDC1 (NM_033425.1,1702-1720).
gaaatcaccggtatcactt

SEQ ID NO: 254245 - DNA, 19 bp, Homo sapiens
  siRNA target sequence for DKFZP434I092 (NM_015668.1,44-62).
ccgcggagccaccaactat

SEQ ID NO: 254246 - DNA, 19 bp, Homo sapiens
  siRNA target sequence for DKFZP434I092 (NM_015668.1,45-63).
cgcggagccaccaactatt

SEQ ID NO: 254247 - DNA, 19 bp, Homo sapiens
  siRNA target sequence for DKFZP434I092 (NM_015668.1,46-64).
gcggagccaccaactatta

SEQ ID NO: 254248 - DNA, 19 bp, Homo sapiens
  siRNA target sequence for DKFZP434I092 (NM_015668.1,51-69).
gccaccaactattacagaa

SEQ ID NO: 254249 - DNA, 19 bp, Homo sapiens
  siRNA target sequence for DKFZP434I092 (NM_015668.1,105-123).
ccttgtagactactttaat

SEQ ID NO: 254250 - DNA, 19 bp, Homo sapiens
  siRNA target sequence for DKFZP434I092 (NM_015668.1,144-162).
cttttcagaggcaattaga

SEQ ID NO: 254251 - DNA, 19 bp, Homo sapiens
  siRNA target sequence for DKFZP434I092 (NM_015668.1,194-212).
ctaatgatgctccacaatt

SEQ ID NO: 254252 - DNA, 19 bp, Homo sapiens
  siRNA target sequence for DKFZP434I092 (NM_015668.1,254-272).
ctcgaaatcccatttatga

SEQ ID NO: 254253 - DNA, 19 bp, Homo sapiens
  siRNA target sequence for DKFZP434I092 (NM_015668.1,331-349).
gatgagaccattaatgtca

SEQ ID NO: 254254 - DNA, 19 bp, Homo sapiens
  siRNA target sequence for DKFZP434I092 (NM_015668.1,346-364).
gtcaactacaatattatgt

SEQ ID NO: 254255 - DNA, 19 bp, Homo sapiens
  siRNA target sequence for DKFZP434I092 (NM_015668.1,369-387).
cagtcgtgaagaaggtatt

SEQ ID NO: 254256 - DNA, 19 bp, Homo sapiens
  siRNA target sequence for DKFZP434I092 (NM_015668.1,371-389).
gtcgtgaagaaggtattaa

SEQ ID NO: 254257 - DNA, 19 bp, Homo sapiens
  siRNA target sequence for DKFZP434I092 (NM_015668.1,456-474).
caaattggtctcacaagta

SEQ ID NO: 254258 - DNA, 19 bp, Homo sapiens
  siRNA target sequence for DKFZP434I092 (NM_015668.1,480-498).
gagcaagtccggcatgaat

SEQ ID NO: 254259 - DNA, 19 bp, Homo sapiens
  siRNA target sequence for DKFZP434I092 (NM_015668.1,482-500).
gcaagtccggcatgaattt

SEQ ID NO: 254260 - DNA, 19 bp, Homo sapiens
  siRNA target sequence for DKFZP434I092 (NM_015668.1,486-504).
gtccggcatgaatttcaca

SEQ ID NO: 254261 - DNA, 19 bp, Homo sapiens
  siRNA target sequence for DKFZP434I092 (NM_015668.1,563-581).
ccactgaagaagataatct

SEQ ID NO: 254262 - DNA, 19 bp, Homo sapiens
  siRNA target sequence for DKFZP434I092 (NM_015668.1,633-651).
gcaaacagtatcaaccttt

SEQ ID NO: 254263 - DNA, 19 bp, Homo sapiens
  siRNA target sequence for DKFZP434I092 (NM_015668.1,634-652).
caaacagtatcaacctttt

SEQ ID NO: 254264 - DNA, 19 bp, Homo sapiens
  siRNA target sequence for DKFZP434I092 (NM_015668.1,638-656).
cagtatcaaccttttcgtt

SEQ ID NO: 254265 - DNA, 19 bp, Homo sapiens
  siRNA target sequence for DKFZP434I092 (NM_015668.1,667-685).
gtaccctacaacaaactta

SEQ ID NO: 254266 - DNA, 19 bp, Homo sapiens
  siRNA target sequence for DKFZP434I092 (NM_015668.1,670-688).
ccctacaacaaacttaaat

SEQ ID NO: 254267 - DNA, 19 bp, Homo sapiens
  siRNA target sequence for DKFZP434I092 (NM_015668.1,736-754).
gttcaccctaggacaaaaa

SEQ ID NO: 254268 - DNA, 19 bp, Homo sapiens
  siRNA target sequence for DKFZP434I092 (NM_015668.1,749-767).
caaaaaaggacccatctaa

SEQ ID NO: 254269 - DNA, 19 bp, Homo sapiens
  siRNA target sequence for DKFZP434I092 (NM_015668.1,811-829).
gaagaagaggtgtctgtat

SEQ ID NO: 254270 - DNA, 19 bp, Homo sapiens
  siRNA target sequence for DKFZP434I092 (NM_015668.1,859-877).
ctgagagtataccttgaaa

SEQ ID NO: 254271 - DNA, 19 bp, Homo sapiens
  siRNA target sequence for DKFZP434I092 (NM_015668.1,863-881).
gagtataccttgaaaagaa

SEQ ID NO: 254272 - DNA, 19 bp, Homo sapiens
  siRNA target sequence for DKFZP434I092 (NM_015668.1,879-897).
gaaacaggatgttgatgaa

SEQ ID NO: 254273 - DNA, 19 bp, Homo sapiens
  siRNA target sequence for DKFZP434I092 (NM_015668.1,895-913).
gaaagcctgacaatgcatt

SEQ ID NO: 254274 - DNA, 19 bp, Homo sapiens
  siRNA target sequence for DKFZP434I092 (NM_015668.1,938-956).
gctcctatatatactttat

SEQ ID NO: 254275 - DNA, 19 bp, Homo sapiens
  siRNA target sequence for DKFZP434I092 (NM_015668.1,962-980).
gaggagcaattcagcaaat

SEQ ID NO: 254276 - DNA, 19 bp, Homo sapiens
  siRNA target sequence for DKFZP434I092 (NM_015668.1,1039-1057).
gtgtcatttgatgattgtt

SEQ ID NO: 254277 - DNA, 19 bp, Homo sapiens
  siRNA target sequence for DKFZP434I092 (NM_015668.1,1090-1108).
gaattagttcaaactacaa

SEQ ID NO: 254278 - DNA, 19 bp, Homo sapiens
  siRNA target sequence for DKFZP434I092 (NM_015668.1,1116-1134).
gtcagaagagatagaacaa

SEQ ID NO: 254279 - DNA, 19 bp, Homo sapiens
  siRNA target sequence for DKFZP434I092 (NM_015668.1,1129-1147).
gaacaaacaagtttaagtt

SEQ ID NO: 254280 - DNA, 19 bp, Homo sapiens
  siRNA target sequence for DKFZP434I092 (NM_015668.1,1176-1194).
cagggcggactggtgtatt

SEQ ID NO: 254281 - DNA, 19 bp, Homo sapiens
  siRNA target sequence for DKFZP434I092 (NM_015668.1,1179-1197).
ggcggactggtgtatttct

SEQ ID NO: 254282 - DNA, 19 bp, Homo sapiens
  siRNA target sequence for DKFZP434I092 (NM_015668.1,1181-1199).
cggactggtgtatttctca

SEQ ID NO: 254283 - DNA, 19 bp, Homo sapiens
  siRNA target sequence for DKFZP434I092 (NM_015668.1,1182-1200).
ggactggtgtatttctcat

SEQ ID NO: 254284 - DNA, 19 bp, Homo sapiens
  siRNA target sequence for DKFZP434I092 (NM_015668.1,1280-1298).
ggtggctatggatggatat

SEQ ID NO: 254285 - DNA, 19 bp, Homo sapiens
  siRNA target sequence for DKFZP434I092 (NM_015668.1,1283-1301).
ggctatggatggatattga

SEQ ID NO: 254286 - DNA, 19 bp, Homo sapiens
  siRNA target sequence for DKFZP434I092 (NM_015668.1,1285-1303).
ctatggatggatattgaga

SEQ ID NO: 254287 - DNA, 19 bp, Homo sapiens
  siRNA target sequence for DKFZP434I092 (NM_015668.1,1293-1311).
ggatattgagaggttaaaa

SEQ ID NO: 254288 - DNA, 19 bp, Homo sapiens
  siRNA target sequence for DKFZP434I092 (NM_015668.1,1305-1323).
gttaaaagttcttaaggat

SEQ ID NO: 254289 - DNA, 19 bp, Homo sapiens
  siRNA target sequence for DKFZP434I092 (NM_015668.1,1372-1390).
gtgagcaatggagattact

SEQ ID NO: 254290 - DNA, 19 bp, Homo sapiens
  siRNA target sequence for DKFZP434I092 (NM_015668.1,1547-1565).
ctagtgctgaactgaaatt

SEQ ID NO: 254291 - DNA, 19 bp, Homo sapiens
  siRNA target sequence for DKFZP434I092 (NM_015668.1,1568-1586).
ggcacctccgtcaagcaaa

SEQ ID NO: 254292 - DNA, 19 bp, Homo sapiens
  siRNA target sequence for DKFZP434I092 (NM_015668.1,1569-1587).
gcacctccgtcaagcaaaa

SEQ ID NO: 254293 - DNA, 19 bp, Homo sapiens
  siRNA target sequence for DKFZP434I092 (NM_015668.1,1572-1590).
cctccgtcaagcaaaacca

SEQ ID NO: 254294 - DNA, 19 bp, Homo sapiens
  siRNA target sequence for DKFZP434I092 (NM_015668.1,1573-1591).
ctccgtcaagcaaaaccaa

SEQ ID NO: 254295 - DNA, 19 bp, Homo sapiens
  siRNA target sequence for DKFZP434I092 (NM_015668.1,1632-1650).
gccattaagacccaaatct

SEQ ID NO: 254296 - DNA, 19 bp, Homo sapiens
  siRNA target sequence for DKFZP434I092 (NM_015668.1,1633-1651).
ccattaagacccaaatctt

SEQ ID NO: 254297 - DNA, 19 bp, Homo sapiens
  siRNA target sequence for DKFZP434I092 (NM_015668.1,1692-1710).
cttatcacaacctcctaaa

SEQ ID NO: 254298 - DNA, 19 bp, Homo sapiens
  siRNA target sequence for DKFZP434I092 (NM_015668.1,1716-1734).
caataaatcacctgaagta

SEQ ID NO: 254299 - DNA, 19 bp, Homo sapiens
  siRNA target sequence for DKFZP434I092 (NM_015668.1,1856-1874).
cttttactgacatttctga

SEQ ID NO: 254300 - DNA, 19 bp, Homo sapiens
  siRNA target sequence for DKFZP434I092 (NM_015668.1,1862-1880).
ctgacatttctgaatgtct

SEQ ID NO: 254301 - DNA, 19 bp, Homo sapiens
  siRNA target sequence for DKFZP434I092 (NM_015668.1,1886-1904).
cccagctggatagaagata

SEQ ID NO: 254302 - DNA, 19 bp, Homo sapiens
  siRNA target sequence for DKFZP434I092 (NM_015668.1,1894-1912).
gatagaagatacgcttata

SEQ ID NO: 254303 - DNA, 19 bp, Homo sapiens
  siRNA target sequence for DKFZP434I092 (NM_015668.1,1898-1916).
gaagatacgcttatacaga

SEQ ID NO: 254304 - DNA, 19 bp, Homo sapiens
  siRNA target sequence for DKFZP434I092 (NM_015668.1,1972-1990).
gaaaatttgttgcaatctt

SEQ ID NO: 254305 - DNA, 19 bp, Homo sapiens
  siRNA target sequence for DKFZP434I092 (NM_015668.1,1984-2002).
caatctttgtatgtagaaa

SEQ ID NO: 254306 - DNA, 19 bp, Homo sapiens
  siRNA target sequence for DKFZP434I092 (NM_015668.1,2092-2110).
gcttatcatcagcttttct

SEQ ID NO: 254307 - DNA, 19 bp, Homo sapiens
  siRNA target sequence for DKFZP434I092 (NM_015668.1,2093-2111).
cttatcatcagcttttcta

SEQ ID NO: 254308 - DNA, 19 bp, Homo sapiens
  siRNA target sequence for DKFZP434I092 (NM_015668.1,2103-2121).
gcttttctaccaagaaaca

SEQ ID NO: 254309 - DNA, 19 bp, Homo sapiens
  siRNA target sequence for DKFZP434I092 (NM_015668.1,2116-2134).
gaaacacttcagcctttta

SEQ ID NO: 254310 - DNA, 19 bp, Homo sapiens
  siRNA target sequence for DKFZP434I092 (NM_015668.1,2141-2159).
gcaagcaagcgcaatatct

SEQ ID NO: 254311 - DNA, 19 bp, Homo sapiens
  siRNA target sequence for DKFZP434I092 (NM_015668.1,2142-2160).
caagcaagcgcaatatctt

SEQ ID NO: 254312 - DNA, 19 bp, Homo sapiens
  siRNA target sequence for DKFZP434I092 (NM_015668.1,2145-2163).
gcaagcgcaatatcttttt

SEQ ID NO: 254313 - DNA, 19 bp, Homo sapiens
  siRNA target sequence for DKFZP434I092 (NM_015668.1,2306-2324).
catggacaaagatggtaaa

SEQ ID NO: 254314 - DNA, 19 bp, Homo sapiens
  siRNA target sequence for DKFZP434I092 (NM_015668.1,2319-2337).
ggtaaaatcggaccaaatt

SEQ ID NO: 254315 - DNA, 19 bp, Homo sapiens
  siRNA target sequence for DKFZP434I092 (NM_015668.1,2327-2345).
cggaccaaattgcttataa

SEQ ID NO: 254316 - DNA, 19 bp, Homo sapiens
  siRNA target sequence for DKFZP434I092 (NM_015668.1,2365-2383).
gaaactcgacagttagact

SEQ ID NO: 254317 - DNA, 19 bp, Homo sapiens
  siRNA target sequence for DKFZP434I092 (NM_015668.1,2385-2403).
cacatacttcagaaagcta

SEQ ID NO: 254318 - DNA, 19 bp, Homo sapiens
  siRNA target sequence for DKFZP434I092 (NM_015668.1,2440-2458).
gaggacaccacttgtgaaa

SEQ ID NO: 254319 - DNA, 19 bp, Homo sapiens
  siRNA target sequence for DKFZP434I092 (NM_015668.1,2442-2460).
ggacaccacttgtgaaatt

SEQ ID NO: 254320 - DNA, 19 bp, Homo sapiens
  siRNA target sequence for DKFZP434I092 (NM_015668.1,2462-2480).
gaactggcattttatcact

SEQ ID NO: 254321 - DNA, 19 bp, Homo sapiens
  siRNA target sequence for DKFZP434I092 (NM_015668.1,2468-2486).
gcattttatcactctctaa

SEQ ID NO: 254322 - DNA, 19 bp, Homo sapiens
  siRNA target sequence for DKFZP434I092 (NM_015668.1,2477-2495).
cactctctaacgtctctaa

SEQ ID NO: 254323 - DNA, 19 bp, Homo sapiens
  siRNA target sequence for DKFZP434I092 (NM_015668.1,2481-2499).
ctctaacgtctctaaacga

SEQ ID NO: 254324 - DNA, 19 bp, Homo sapiens
  siRNA target sequence for DKFZP434I092 (NM_015668.1,2487-2505).
cgtctctaaacgaacagaa

SEQ ID NO: 254325 - DNA, 19 bp, Homo sapiens
  siRNA target sequence for DKFZP434I092 (NM_015668.1,2488-2506).
gtctctaaacgaacagaat

SEQ ID NO: 254326 - DNA, 19 bp, Homo sapiens
  siRNA target sequence for DKFZP434I092 (NM_015668.1,2565-2583).
caaactggagtttgaacat

SEQ ID NO: 254327 - DNA, 19 bp, Homo sapiens
  siRNA target sequence for DKFZP434I092 (NM_015668.1,2590-2608).
cagtttcttgagactcatt

SEQ ID NO: 254328 - DNA, 19 bp, Homo sapiens
  siRNA target sequence for DKFZP434I092 (NM_015668.1,2592-2610).
gtttcttgagactcattct

SEQ ID NO: 254329 - DNA, 19 bp, Homo sapiens
  siRNA target sequence for DKFZP434I092 (NM_015668.1,2596-2614).
cttgagactcattcttcaa

SEQ ID NO: 254330 - DNA, 19 bp, Homo sapiens
  siRNA target sequence for DKFZP434I092 (NM_015668.1,2663-2681).
cttacagagatcgaaatca

SEQ ID NO: 254331 - DNA, 19 bp, Homo sapiens
  siRNA target sequence for DKFZP434I092 (NM_015668.1,2669-2687).
gagatcgaaatcaaaggaa

SEQ ID NO: 254332 - DNA, 19 bp, Homo sapiens
  siRNA target sequence for DKFZP434I092 (NM_015668.1,2690-2708).
caaaatctatatacattaa

SEQ ID NO: 254333 - DNA, 19 bp, Homo sapiens
  siRNA target sequence for DKFZP434I092 (NM_015668.1,2775-2793).
ccaggtaatgcatttaagt

SEQ ID NO: 254334 - DNA, 19 bp, Homo sapiens
  siRNA target sequence for DKFZP434I092 (NM_015668.1,2823-2841).
gcttgatgcacctgttcta

SEQ ID NO: 254335 - DNA, 19 bp, Homo sapiens
  siRNA target sequence for DKFZP434I092 (NM_015668.1,2862-2880).
gcaaaataggctagaaaat

SEQ ID NO: 254336 - DNA, 19 bp, Homo sapiens
  siRNA target sequence for DKFZP434I092 (NM_015668.1,2917-2935).
gcagcacgtcagaagataa

SEQ ID NO: 254337 - DNA, 19 bp, Homo sapiens
  siRNA target sequence for DKFZP434I092 (NM_015668.1,3049-3067).
gcttttcgcaaagcattat

SEQ ID NO: 254338 - DNA, 19 bp, Homo sapiens
  siRNA target sequence for DKFZP434I092 (NM_015668.1,3073-3091).
ccagttacttcaagacaat

SEQ ID NO: 254339 - DNA, 19 bp, Homo sapiens
  siRNA target sequence for DKFZP434I092 (NM_015668.1,3086-3104).
gacaatttcaacgttttgt

SEQ ID NO: 254340 - DNA, 19 bp, Homo sapiens
  siRNA target sequence for DKFZP434I092 (NM_015668.1,3168-3186).
ggacttgtgccattctcat

SEQ ID NO: 254341 - DNA, 19 bp, Homo sapiens
  siRNA target sequence for DKFZP434I092 (NM_015668.1,3169-3187).
gacttgtgccattctcatt

SEQ ID NO: 254342 - DNA, 19 bp, Homo sapiens
  siRNA target sequence for DKFZP434I092 (NM_015668.1,3204-3222).
ccagaagaagattacaact

SEQ ID NO: 254343 - DNA, 19 bp, Homo sapiens
  siRNA target sequence for DKFZP434I092 (NM_015668.1,3221-3239).
ctattatcaactgctttat

SEQ ID NO: 254344 - DNA, 19 bp, Homo sapiens
  siRNA target sequence for DKFZP434I092 (NM_015668.1,3246-3264).
cagtattccaccagcttta

SEQ ID NO: 254345 - DNA, 19 bp, Homo sapiens
  siRNA target sequence for DKFZP434I092 (NM_015668.1,3248-3266).
gtattccaccagctttaca

SEQ ID NO: 254346 - DNA, 19 bp, Homo sapiens
  siRNA target sequence for DKFZP434I092 (NM_015668.1,3254-3272).
caccagctttacaaattga

SEQ ID NO: 254347 - DNA, 19 bp, Homo sapiens
  siRNA target sequence for DKFZP434I092 (NM_015668.1,3315-3333).
ggagttaggaccatatgta

SEQ ID NO: 254348 - DNA, 19 bp, Homo sapiens
  siRNA target sequence for DKFZP434I092 (NM_015668.1,3316-3334).
gagttaggaccatatgtat

SEQ ID NO: 254349 - DNA, 19 bp, Homo sapiens
  siRNA target sequence for DKFZP434I092 (NM_015668.1,3323-3341).
gaccatatgtatttagaga

SEQ ID NO: 254350 - DNA, 19 bp, Homo sapiens
  siRNA target sequence for DKFZP434I092 (NM_015668.1,3338-3356).
gagaggcacagatgacaat

SEQ ID NO: 254351 - DNA, 19 bp, Homo sapiens
  siRNA target sequence for DKFZP434I092 (NM_015668.1,3361-3379).
ggggttctgtttaaattct

SEQ ID NO: 254352 - DNA, 19 bp, Homo sapiens
  siRNA target sequence for DKFZP434I092 (NM_015668.1,3479-3497).
cagtcctagaagacgaaaa

SEQ ID NO: 254353 - DNA, 19 bp, Homo sapiens
  siRNA target sequence for DKFZP434I092 (NM_015668.1,3481-3499).
gtcctagaagacgaaaaat

SEQ ID NO: 254354 - DNA, 19 bp, Homo sapiens
  siRNA target sequence for DKFZP434I092 (NM_015668.1,3492-3510).
cgaaaaatctggaaaggat

SEQ ID NO: 254355 - DNA, 19 bp, Homo sapiens
  siRNA target sequence for DKFZP434I092 (NM_015668.1,3545-3563).
ctatcaaaactgctttact

SEQ ID NO: 254356 - DNA, 19 bp, Homo sapiens
  siRNA target sequence for DKFZP434I092 (NM_015668.1,3576-3594).
cctaggcctccaaccatat

SEQ ID NO: 254357 - DNA, 19 bp, Homo sapiens
  siRNA target sequence for DKFZP434I092 (NM_015668.1,3605-3623).
caacctggtgctactcaaa

SEQ ID NO: 254358 - DNA, 19 bp, Homo sapiens
  siRNA target sequence for DKFZP434I092 (NM_015668.1,3609-3627).
ctggtgctactcaaagtat

SEQ ID NO: 254359 - DNA, 19 bp, Homo sapiens
  siRNA target sequence for DKFZP434I092 (NM_015668.1,3611-3629).
ggtgctactcaaagtatat

SEQ ID NO: 254360 - DNA, 19 bp, Homo sapiens
  siRNA target sequence for DKFZP434I092 (NM_015668.1,3643-3661).
caggagagaattcttctta

SEQ ID NO: 254361 - DNA, 19 bp, Homo sapiens
  siRNA target sequence for DKFZP434I092 (NM_015668.1,3646-3664).
gagagaattcttcttaaga

SEQ ID NO: 254362 - DNA, 19 bp, Homo sapiens
  siRNA target sequence for DKFZP434I092 (NM_015668.1,3698-3716).
gcttgcaacctctcacaaa

SEQ ID NO: 254363 - DNA, 19 bp, Homo sapiens
  siRNA target sequence for DKFZP434I092 (NM_015668.1,3724-3742).
gctagctcttcaactatgt

SEQ ID NO: 254364 - DNA, 19 bp, Homo sapiens
  siRNA target sequence for DKFZP434I092 (NM_015668.1,3728-3746).
gctcttcaactatgtcttt

SEQ ID NO: 254365 - DNA, 19 bp, Homo sapiens
  siRNA target sequence for DKKL1-pending (NM_014419.1,460-478).
ggagcttcgagggtgattt

SEQ ID NO: 254366 - DNA, 19 bp, Homo sapiens
  siRNA target sequence for DKKL1-pending (NM_014419.1,463-481).
gcttcgagggtgatttgaa

SEQ ID NO: 254367 - DNA, 19 bp, Homo sapiens
  siRNA target sequence for DRCTNNB1A (NM_032581.2,468-486).
ctcccagaactaatttggt

SEQ ID NO: 254368 - DNA, 19 bp, Homo sapiens
  siRNA target sequence for DRCTNNB1A (NM_032581.2,518-536).
gcatagcagtggatgcatt

SEQ ID NO: 254369 - DNA, 19 bp, Homo sapiens
  siRNA target sequence for DRCTNNB1A (NM_032581.2,543-561).
cttcttctaggggtttaca

SEQ ID NO: 254370 - DNA, 19 bp, Homo sapiens
  siRNA target sequence for DRCTNNB1A (NM_032581.2,546-564).
cttctaggggtttacaatt

SEQ ID NO: 254371 - DNA, 19 bp, Homo sapiens
  siRNA target sequence for DRCTNNB1A (NM_032581.2,588-606).
cataccaaagtattgagtt

SEQ ID NO: 254372 - DNA, 19 bp, Homo sapiens
  siRNA target sequence for DRCTNNB1A (NM_032581.2,604-622).
gttttacgattccatcttt

SEQ ID NO: 254373 - DNA, 19 bp, Homo sapiens
  siRNA target sequence for DRCTNNB1A (NM_032581.2,625-643).
ccaaaccatctgtatacca

SEQ ID NO: 254374 - DNA, 19 bp, Homo sapiens
  siRNA target sequence for DRCTNNB1A (NM_032581.2,626-644).
caaaccatctgtataccat

SEQ ID NO: 254375 - DNA, 19 bp, Homo sapiens
  siRNA target sequence for DRCTNNB1A (NM_032581.2,685-703).
cactatcccagcatggttt

SEQ ID NO: 254376 - DNA, 19 bp, Homo sapiens
  siRNA target sequence for DRCTNNB1A (NM_032581.2,743-761).
gatgctgacagcacagaat

SEQ ID NO: 254377 - DNA, 19 bp, Homo sapiens
  siRNA target sequence for DRCTNNB1A (NM_032581.2,762-780).
cggtttgaagtgttgacat

SEQ ID NO: 254378 - DNA, 19 bp, Homo sapiens
  siRNA target sequence for DRCTNNB1A (NM_032581.2,834-852).
cagtcactgtgtcaaattt

SEQ ID NO: 254379 - DNA, 19 bp, Homo sapiens
  siRNA target sequence for DRCTNNB1A (NM_032581.2,844-862).
gtcaaatttgttcaagaat

SEQ ID NO: 254380 - DNA, 19 bp, Homo sapiens
  siRNA target sequence for DRCTNNB1A (NM_032581.2,863-881).
ctgtgtttgtggatatcct

SEQ ID NO: 254381 - DNA, 19 bp, Homo sapiens
  siRNA target sequence for DRCTNNB1A (NM_032581.2,874-892).
gatatcctcgacaacatgt

SEQ ID NO: 254382 - DNA, 19 bp, Homo sapiens
  siRNA target sequence for DRCTNNB1A (NM_032581.2,880-898).
ctcgacaacatgtaagaaa

SEQ ID NO: 254383 - DNA, 19 bp, Homo sapiens
  siRNA target sequence for DRCTNNB1A (NM_032581.2,934-952).
caggattcatggtgcaaat

SEQ ID NO: 254384 - DNA, 19 bp, Homo sapiens
  siRNA target sequence for DRCTNNB1A (NM_032581.2,936-954).
ggattcatggtgcaaatgt

SEQ ID NO: 254385 - DNA, 19 bp, Homo sapiens
  siRNA target sequence for DRCTNNB1A (NM_032581.2,992-1010).
ggatctagctcaaaaagca

SEQ ID NO: 254386 - DNA, 19 bp, Homo sapiens
  siRNA target sequence for DRCTNNB1A (NM_032581.2,1008-1026).
gcactggatgatattatat

SEQ ID NO: 254387 - DNA, 19 bp, Homo sapiens
  siRNA target sequence for DRCTNNB1A (NM_032581.2,1011-1029).
ctggatgatattatataca

SEQ ID NO: 254388 - DNA, 19 bp, Homo sapiens
  siRNA target sequence for DRCTNNB1A (NM_032581.2,1028-1046).
cagagcccagctagaatta

SEQ ID NO: 254389 - DNA, 19 bp, Homo sapiens
  siRNA target sequence for DRCTNNB1A (NM_032581.2,1030-1048).
gagcccagctagaattata

SEQ ID NO: 254390 - DNA, 19 bp, Homo sapiens
  siRNA target sequence for DRCTNNB1A (NM_032581.2,1055-1073).
gccattgctggttgctaat

SEQ ID NO: 254391 - DNA, 19 bp, Homo sapiens
  siRNA target sequence for DRCTNNB1A (NM_032581.2,1061-1079).
gctggttgctaatgcaata

SEQ ID NO: 254392 - DNA, 19 bp, Homo sapiens
  siRNA target sequence for DRCTNNB1A (NM_032581.2,1062-1080).
ctggttgctaatgcaataa

SEQ ID NO: 254393 - DNA, 19 bp, Homo sapiens
  siRNA target sequence for DRCTNNB1A (NM_032581.2,1095-1113).
catggtcccatgaaatcta

SEQ ID NO: 254394 - DNA, 19 bp, Homo sapiens
  siRNA target sequence for DRCTNNB1A (NM_032581.2,1098-1116).
ggtcccatgaaatctaata

SEQ ID NO: 254395 - DNA, 19 bp, Homo sapiens
  siRNA target sequence for DRCTNNB1A (NM_032581.2,1099-1117).
gtcccatgaaatctaataa

SEQ ID NO: 254396 - DNA, 19 bp, Homo sapiens
  siRNA target sequence for DRCTNNB1A (NM_032581.2,1118-1136).
ggaaggtacaaggtgtatt

SEQ ID NO: 254397 - DNA, 19 bp, Homo sapiens
  siRNA target sequence for DRCTNNB1A (NM_032581.2,1123-1141).
gtacaaggtgtattcaagt

SEQ ID NO: 254398 - DNA, 19 bp, Homo sapiens
  siRNA target sequence for DRCTNNB1A (NM_032581.2,1152-1170).
ccaacttcctctcgaatat

SEQ ID NO: 254399 - DNA, 19 bp, Homo sapiens
  siRNA target sequence for DRCTNNB1A (NM_032581.2,1160-1178).
ctctcgaatatcaagaaat

SEQ ID NO: 254400 - DNA, 19 bp, Homo sapiens
  siRNA target sequence for DRCTNNB1A (NM_032581.2,1182-1200).
gtaaccagcatgtcaataa

SEQ ID NO: 254401 - DNA, 19 bp, Homo sapiens
  siRNA target sequence for DRCTNNB1A (NM_032581.2,1269-1287).
gaagttgacgagggatttt

SEQ ID NO: 254402 - DNA, 19 bp, Homo sapiens
  siRNA target sequence for DRCTNNB1A (NM_032581.2,1272-1290).
gttgacgagggattttatt

SEQ ID NO: 254403 - DNA, 19 bp, Homo sapiens
  siRNA target sequence for DRCTNNB1A (NM_032581.2,1275-1293).
gacgagggattttattcca

SEQ ID NO: 254404 - DNA, 19 bp, Homo sapiens
  siRNA target sequence for DRCTNNB1A (NM_032581.2,1310-1328).
cagccagtcgggtttatca

SEQ ID NO: 254405 - DNA, 19 bp, Homo sapiens
  siRNA target sequence for DRCTNNB1A (NM_032581.2,1312-1330).
gccagtcgggtttatcaaa

SEQ ID NO: 254406 - DNA, 19 bp, Homo sapiens
  siRNA target sequence for DRCTNNB1A (NM_032581.2,1314-1332).
cagtcgggtttatcaaaca

SEQ ID NO: 254407 - DNA, 19 bp, Homo sapiens
  siRNA target sequence for DRCTNNB1A (NM_032581.2,1316-1334).
gtcgggtttatcaaacagt

SEQ ID NO: 254408 - DNA, 19 bp, Homo sapiens
  siRNA target sequence for DRCTNNB1A (NM_032581.2,1426-1444).
gggaatcttgcaaagatca

SEQ ID NO: 254409 - DNA, 19 bp, Homo sapiens
  siRNA target sequence for DRCTNNB1A (NM_032581.2,1445-1463).
ctttgctcgaaaacaaact

SEQ ID NO: 254410 - DNA, 19 bp, Homo sapiens
  siRNA target sequence for DRCTNNB1A (NM_032581.2,1494-1512).
ctctctttgaagagactta

SEQ ID NO: 254411 - DNA, 19 bp, Homo sapiens
  siRNA target sequence for DRCTNNB1A (NM_032581.2,1565-1583).
gaccgcagcgactgtattt

SEQ ID NO: 254412 - DNA, 19 bp, Homo sapiens
  siRNA target sequence for DRCTNNB1A (NM_032581.2,1568-1586).
cgcagcgactgtatttagt

SEQ ID NO: 254413 - DNA, 19 bp, Homo sapiens
  siRNA target sequence for DRCTNNB1A (NM_032581.2,1570-1588).
cagcgactgtatttagtaa

SEQ ID NO: 254414 - DNA, 19 bp, Homo sapiens
  siRNA target sequence for DRCTNNB1A (NM_032581.2,1572-1590).
gcgactgtatttagtaaat

SEQ ID NO: 254415 - DNA, 19 bp, Homo sapiens
  siRNA target sequence for DRCTNNB1A (NM_032581.2,1609-1627).
gtgtcacagtcccacataa

SEQ ID NO: 254416 - DNA, 19 bp, Homo sapiens
  siRNA target sequence for DRCTNNB1A (NM_032581.2,1657-1675).
ggacagatgccaataggtt

SEQ ID NO: 254417 - DNA, 19 bp, Homo sapiens
  siRNA target sequence for DRCTNNB1A (NM_032581.2,1681-1699).
cttgtagtctccaagaaga

SEQ ID NO: 254418 - DNA, 19 bp, Homo sapiens
  siRNA target sequence for DRCTNNB1A (NM_032581.2,1757-1775).
gcagagacctcctagtatt

SEQ ID NO: 254419 - DNA, 19 bp, Homo sapiens
  siRNA target sequence for DRCTNNB1A (NM_032581.2,1762-1780).
gacctcctagtattagcat

SEQ ID NO: 254420 - DNA, 19 bp, Homo sapiens
  siRNA target sequence for DRCTNNB1A (NM_032581.2,1764-1782).
cctcctagtattagcatta

SEQ ID NO: 254421 - DNA, 19 bp, Homo sapiens
  siRNA target sequence for DRCTNNB1A (NM_032581.2,1768-1786).
ctagtattagcattactct

SEQ ID NO: 254422 - DNA, 19 bp, Homo sapiens
  siRNA target sequence for DVL1 (NM_004421.2,51-69).
gcggagaccaagattatct

SEQ ID NO: 254423 - DNA, 19 bp, Homo sapiens
  siRNA target sequence for DVL1 (NM_004421.2,133-151).
cgctggccgacttcaagaa

SEQ ID NO: 254424 - DNA, 19 bp, Homo sapiens
  siRNA target sequence for DVL1 (NM_004421.2,168-186).
cccgtgcacgcctacaaat

SEQ ID NO: 254425 - DNA, 19 bp, Homo sapiens
  siRNA target sequence for DVL1 (NM_004421.2,169-187).
ccgtgcacgcctacaaatt

SEQ ID NO: 254426 - DNA, 19 bp, Homo sapiens
  siRNA target sequence for DVL1 (NM_004421.2,176-194).
cgcctacaaattcttcttt

SEQ ID NO: 254427 - DNA, 19 bp, Homo sapiens
  siRNA target sequence for DVL1 (NM_004421.2,177-195).
gcctacaaattcttcttta

SEQ ID NO: 254428 - DNA, 19 bp, Homo sapiens
  siRNA target sequence for DVL1 (NM_004421.2,812-830).
catggaaagacatcacttt

SEQ ID NO: 254429 - DNA, 19 bp, Homo sapiens
  siRNA target sequence for DVL1 (NM_004421.2,1005-1023).
gtgctgcgggagatcgttt

SEQ ID NO: 254430 - DNA, 19 bp, Homo sapiens
  siRNA target sequence for DVL1 (NM_004421.2,1910-1928).
cacgaccaaggcctataca

SEQ ID NO: 254431 - DNA, 19 bp, Homo sapiens
  siRNA target sequence for DVL1 (NM_004421.2,1912-1930).
cgaccaaggcctatacagt

SEQ ID NO: 254432 - DNA, 19 bp, Homo sapiens
  siRNA target sequence for DVL1 (NM_004421.2,2026-2044).
ggaacccctgcgagttctt

SEQ ID NO: 254433 - DNA, 19 bp, Homo sapiens
  siRNA target sequence for DVL2 (NM_004422.1,782-800).
ccacaatgtctctcaatat

SEQ ID NO: 254434 - DNA, 19 bp, Homo sapiens
  siRNA target sequence for DVL2 (NM_004422.1,812-830).
cgctaaacatggagaagta

SEQ ID NO: 254435 - DNA, 19 bp, Homo sapiens
  siRNA target sequence for DVL2 (NM_004422.1,944-962).
caggggacatgcttttgca

SEQ ID NO: 254436 - DNA, 19 bp, Homo sapiens
  siRNA target sequence for DVL2 (NM_004422.1,955-973).
cttttgcaggtgaatgaca

SEQ ID NO: 254437 - DNA, 19 bp, Homo sapiens
  siRNA target sequence for DVL2 (NM_004422.1,1541-1559).
gtgagagctacctagtcaa

SEQ ID NO: 254438 - DNA, 19 bp, Homo sapiens
  siRNA target sequence for DVL2 (NM_004422.1,1711-1729).
catgagctttcatcttaca

SEQ ID NO: 254439 - DNA, 19 bp, Homo sapiens
  siRNA target sequence for DVL2 (NM_004422.1,1961-1979).
ctgggggtgcccctaatct

SEQ ID NO: 254440 - DNA, 19 bp, Homo sapiens
  siRNA target sequence for DVL2 (NM_004422.1,2150-2168).
cagccagccgccaaagctt

SEQ ID NO: 254441 - DNA, 19 bp, Homo sapiens
  siRNA target sequence for GASZ (NM_130768.1,119-137).
cgaccggacgtctcagaaa

SEQ ID NO: 254442 - DNA, 19 bp, Homo sapiens
  siRNA target sequence for GASZ (NM_130768.1,120-138).
gaccggacgtctcagaaat

SEQ ID NO: 254443 - DNA, 19 bp, Homo sapiens
  siRNA target sequence for GASZ (NM_130768.1,123-141).
cggacgtctcagaaattga

SEQ ID NO: 254444 - DNA, 19 bp, Homo sapiens
  siRNA target sequence for GASZ (NM_130768.1,146-164).
gctattacccattgaagaa

SEQ ID NO: 254445 - DNA, 19 bp, Homo sapiens
  siRNA target sequence for GASZ (NM_130768.1,193-211).
ccatcggagatgtttcatt

SEQ ID NO: 254446 - DNA, 19 bp, Homo sapiens
  siRNA target sequence for GASZ (NM_130768.1,213-231).
gtccaggagctcctagatt

SEQ ID NO: 254447 - DNA, 19 bp, Homo sapiens
  siRNA target sequence for GASZ (NM_130768.1,235-253).
gcattagtgtagattccaa

SEQ ID NO: 254448 - DNA, 19 bp, Homo sapiens
  siRNA target sequence for GASZ (NM_130768.1,241-259).
gtgtagattccaactttca

SEQ ID NO: 254449 - DNA, 19 bp, Homo sapiens
  siRNA target sequence for GASZ (NM_130768.1,264-282).
ggatggactccccttatgt

SEQ ID NO: 254450 - DNA, 19 bp, Homo sapiens
  siRNA target sequence for GASZ (NM_130768.1,265-283).
gatggactccccttatgta

SEQ ID NO: 254451 - DNA, 19 bp, Homo sapiens
  siRNA target sequence for GASZ (NM_130768.1,326-344).
ggacagaggtgctaatgca

SEQ ID NO: 254452 - DNA, 19 bp, Homo sapiens
  siRNA target sequence for GASZ (NM_130768.1,327-345).
gacagaggtgctaatgcaa

SEQ ID NO: 254453 - DNA, 19 bp, Homo sapiens
  siRNA target sequence for GASZ (NM_130768.1,336-354).
gctaatgcaagctttgaga

SEQ ID NO: 254454 - DNA, 19 bp, Homo sapiens
  siRNA target sequence for GASZ (NM_130768.1,337-355).
ctaatgcaagctttgagaa

SEQ ID NO: 254455 - DNA, 19 bp, Homo sapiens
  siRNA target sequence for GASZ (NM_130768.1,342-360).
gcaagctttgagaaggata

SEQ ID NO: 254456 - DNA, 19 bp, Homo sapiens
  siRNA target sequence for GASZ (NM_130768.1,400-418).
cagaggaacagatcttgaa

SEQ ID NO: 254457 - DNA, 19 bp, Homo sapiens
  siRNA target sequence for GASZ (NM_130768.1,410-428).
gatcttgaagtgtgtagaa

SEQ ID NO: 254458 - DNA, 19 bp, Homo sapiens
  siRNA target sequence for GASZ (NM_130768.1,413-431).
cttgaagtgtgtagaacta

SEQ ID NO: 254459 - DNA, 19 bp, Homo sapiens
  siRNA target sequence for GASZ (NM_130768.1,423-441).
gtagaactactactttcaa

SEQ ID NO: 254460 - DNA, 19 bp, Homo sapiens
  siRNA target sequence for GASZ (NM_130768.1,426-444).
gaactactactttcaagaa

SEQ ID NO: 254461 - DNA, 19 bp, Homo sapiens
  siRNA target sequence for GASZ (NM_130768.1,472-490).
gacttatgaccccaatcat

SEQ ID NO: 254462 - DNA, 19 bp, Homo sapiens
  siRNA target sequence for GASZ (NM_130768.1,474-492).
cttatgaccccaatcatgt

SEQ ID NO: 254463 - DNA, 19 bp, Homo sapiens
  siRNA target sequence for GASZ (NM_130768.1,573-591).
ggttacactgctttaacgt

SEQ ID NO: 254464 - DNA, 19 bp, Homo sapiens
  siRNA target sequence for GASZ (NM_130768.1,595-613).
cagcacgtcagggtcataa

SEQ ID NO: 254465 - DNA, 19 bp, Homo sapiens
  siRNA target sequence for GASZ (NM_130768.1,597-615).
gcacgtcagggtcataaaa

SEQ ID NO: 254466 - DNA, 19 bp, Homo sapiens
  siRNA target sequence for GASZ (NM_130768.1,598-616).
cacgtcagggtcataaaaa

SEQ ID NO: 254467 - DNA, 19 bp, Homo sapiens
  siRNA target sequence for GASZ (NM_130768.1,632-650).
gcttgaacttggagctaat

SEQ ID NO: 254468 - DNA, 19 bp, Homo sapiens
  siRNA target sequence for GASZ (NM_130768.1,700-718).
gaaacaaacatcatgagat

SEQ ID NO: 254469 - DNA, 19 bp, Homo sapiens
  siRNA target sequence for GASZ (NM_130768.1,708-726).
catcatgagatcttcaact

SEQ ID NO: 254470 - DNA, 19 bp, Homo sapiens
  siRNA target sequence for GASZ (NM_130768.1,716-734).
gatcttcaacttactttct

SEQ ID NO: 254471 - DNA, 19 bp, Homo sapiens
  siRNA target sequence for GASZ (NM_130768.1,917-935).
ggaaagggatataacgtta

SEQ ID NO: 254472 - DNA, 19 bp, Homo sapiens
  siRNA target sequence for GASZ (NM_130768.1,918-936).
gaaagggatataacgttaa

SEQ ID NO: 254473 - DNA, 19 bp, Homo sapiens
  siRNA target sequence for GASZ (NM_130768.1,922-940).
gggatataacgttaagaca

SEQ ID NO: 254474 - DNA, 19 bp, Homo sapiens
  siRNA target sequence for GASZ (NM_130768.1,923-941).
ggatataacgttaagacat

SEQ ID NO: 254475 - DNA, 19 bp, Homo sapiens
  siRNA target sequence for GASZ (NM_130768.1,955-973).
gggaagatgaatttacaaa

SEQ ID NO: 254476 - DNA, 19 bp, Homo sapiens
  siRNA target sequence for GASZ (NM_130768.1,1056-1074).
ctatctgaagagacaaagt

SEQ ID NO: 254477 - DNA, 19 bp, Homo sapiens
  siRNA target sequence for GASZ (NM_130768.1,1087-1105).
gtgatgagttcctcaactt

SEQ ID NO: 254478 - DNA, 19 bp, Homo sapiens
  siRNA target sequence for GASZ (NM_130768.1,1144-1162).
cagctgtacagaatgttat

SEQ ID NO: 254479 - DNA, 19 bp, Homo sapiens
  siRNA target sequence for GASZ (NM_130768.1,1154-1172).
gaatgttattactgagtta

SEQ ID NO: 254480 - DNA, 19 bp, Homo sapiens
  siRNA target sequence for GASZ (NM_130768.1,1169-1187).
gttacctgtaaattctcaa

SEQ ID NO: 254481 - DNA, 19 bp, Homo sapiens
  siRNA target sequence for GASZ (NM_130768.1,1269-1287).
gaaaaggtctgcaaactaa

SEQ ID NO: 254482 - DNA, 19 bp, Homo sapiens
  siRNA target sequence for GASZ (NM_130768.1,1319-1337).
ggaaaatgatccaactcat

SEQ ID NO: 254483 - DNA, 19 bp, Homo sapiens
  siRNA target sequence for GASZ (NM_130768.1,1326-1344).
gatccaactcatatacaat

SEQ ID NO: 254484 - DNA, 19 bp, Homo sapiens
  siRNA target sequence for GASZ (NM_130768.1,1329-1347).
ccaactcatatacaattaa

SEQ ID NO: 254485 - DNA, 19 bp, Homo sapiens
  siRNA target sequence for GASZ (NM_130768.1,1353-1371).
gaagtatctacatggaata

SEQ ID NO: 254486 - DNA, 19 bp, Homo sapiens
  siRNA target sequence for GASZ (NM_130768.1,1385-1403).
gaggacagctattaccata

SEQ ID NO: 254487 - DNA, 19 bp, Homo sapiens
  siRNA target sequence for GASZ (NM_130768.1,1405-1423).
gcggattcggttttcttct

SEQ ID NO: 254488 - DNA, 19 bp, Homo sapiens
  siRNA target sequence for GASZ (NM_130768.1,1406-1424).
cggattcggttttcttctt

SEQ ID NO: 254489 - DNA, 19 bp, Homo sapiens
  siRNA target sequence for GASZ (NM_130768.1,1422-1440).
cttttcatttgcaagctaa

SEQ ID NO: 254490 - DNA, 19 bp, Homo sapiens
  siRNA target sequence for IKBKG (NM_003639.2,739-757).
ggaggctgccactaaggaa

SEQ ID NO: 254491 - DNA, 19 bp, Homo sapiens
  siRNA target sequence for IKBKG (NM_003639.2,740-758).
gaggctgccactaaggaat

SEQ ID NO: 254492 - DNA, 19 bp, Homo sapiens
  siRNA target sequence for IKBKG (NM_003639.2,1029-1047).
gaatgcagctggaagatct

SEQ ID NO: 254493 - DNA, 19 bp, Homo sapiens
  siRNA target sequence for IKBKG (NM_003639.2,1120-1138).
ggccgagcagcacaagatt

SEQ ID NO: 254494 - DNA, 19 bp, Homo sapiens
  siRNA target sequence for IKBKG (NM_003639.2,1166-1184).
gcccaggcggatatctaca

SEQ ID NO: 254495 - DNA, 19 bp, Homo sapiens
  siRNA target sequence for IKBKG (NM_003639.2,1167-1185).
cccaggcggatatctacaa

SEQ ID NO: 254496 - DNA, 19 bp, Homo sapiens
  siRNA target sequence for IKBKG (NM_003639.2,1449-1467).
gtcccaagtgccagtatca

SEQ ID NO: 254497 - DNA, 19 bp, Homo sapiens
  siRNA target sequence for IKBKG (NM_003639.2,1499-1517).
gtcatggagtgcattgagt

SEQ ID NO: 254498 - DNA, 19 bp, Homo sapiens
  siRNA target sequence for KCNH7 (NM_033272.2,259-277).
ggaccatcattcggaaatt

SEQ ID NO: 254499 - DNA, 19 bp, Homo sapiens
  siRNA target sequence for KCNH7 (NM_033272.2,260-278).
gaccatcattcggaaattt

SEQ ID NO: 254500 - DNA, 19 bp, Homo sapiens
  siRNA target sequence for KCNH7 (NM_033272.2,440-458).
gcatgatattgcccaaatt

SEQ ID NO: 254501 - DNA, 19 bp, Homo sapiens
  siRNA target sequence for KCNH7 (NM_033272.2,497-515).
ggtcacctactatcacaaa

SEQ ID NO: 254502 - DNA, 19 bp, Homo sapiens
  siRNA target sequence for KCNH7 (NM_033272.2,519-537).
gggtccacttttatttgta

SEQ ID NO: 254503 - DNA, 19 bp, Homo sapiens
  siRNA target sequence for KCNH7 (NM_033272.2,520-538).
ggtccacttttatttgtaa

SEQ ID NO: 254504 - DNA, 19 bp, Homo sapiens
  siRNA target sequence for KCNH7 (NM_033272.2,543-561).
cacataattccagtgaaaa

SEQ ID NO: 254505 - DNA, 19 bp, Homo sapiens
  siRNA target sequence for KCNH7 (NM_033272.2,567-585).
gagggcgtggctatgatgt

SEQ ID NO: 254506 - DNA, 19 bp, Homo sapiens
  siRNA target sequence for KCNH7 (NM_033272.2,570-588).
ggcgtggctatgatgttca

SEQ ID NO: 254507 - DNA, 19 bp, Homo sapiens
  siRNA target sequence for KCNH7 (NM_033272.2,577-595).
ctatgatgttcatcattaa

SEQ ID NO: 254508 - DNA, 19 bp, Homo sapiens
  siRNA target sequence for KCNH7 (NM_033272.2,636-654).
gagagggtaaacccaatat

SEQ ID NO: 254509 - DNA, 19 bp, Homo sapiens
  siRNA target sequence for KCNH7 (NM_033272.2,638-656).
gagggtaaacccaatatta

SEQ ID NO: 254510 - DNA, 19 bp, Homo sapiens
  siRNA target sequence for KCNH7 (NM_033272.2,647-665).
cccaatattaccaatcaaa

SEQ ID NO: 254511 - DNA, 19 bp, Homo sapiens
  siRNA target sequence for KCNH7 (NM_033272.2,667-685).
ctgtaaaccggaaattttt

SEQ ID NO: 254512 - DNA, 19 bp, Homo sapiens
  siRNA target sequence for KCNH7 (NM_033272.2,753-771).
gatgtggtggtcatcgatt

SEQ ID NO: 254513 - DNA, 19 bp, Homo sapiens
  siRNA target sequence for KCNH7 (NM_033272.2,758-776).
ggtggtcatcgattcatct

SEQ ID NO: 254514 - DNA, 19 bp, Homo sapiens
  siRNA target sequence for KCNH7 (NM_033272.2,759-777).
gtggtcatcgattcatcta

SEQ ID NO: 254515 - DNA, 19 bp, Homo sapiens
  siRNA target sequence for KCNH7 (NM_033272.2,761-779).
ggtcatcgattcatctaaa

SEQ ID NO: 254516 - DNA, 19 bp, Homo sapiens
  siRNA target sequence for KCNH7 (NM_033272.2,795-813).
gtagccatgaagcatttta

SEQ ID NO: 254517 - DNA, 19 bp, Homo sapiens
  siRNA target sequence for KCNH7 (NM_033272.2,960-978).
gacatgctgcagtcaagtt

SEQ ID NO: 254518 - DNA, 19 bp, Homo sapiens
  siRNA target sequence for KCNH7 (NM_033272.2,984-1002).
ctgtcccattccagatcaa

SEQ ID NO: 254519 - DNA, 19 bp, Homo sapiens
  siRNA target sequence for KCNH7 (NM_033272.2,994-1012).
ccagatcaagggaaagctt

SEQ ID NO: 254520 - DNA, 19 bp, Homo sapiens
  siRNA target sequence for KCNH7 (NM_033272.2,995-1013).
cagatcaagggaaagctta

SEQ ID NO: 254521 - DNA, 19 bp, Homo sapiens
  siRNA target sequence for KCNH7 (NM_033272.2,1029-1047).
gcatcttcggtccatgata

SEQ ID NO: 254522 - DNA, 19 bp, Homo sapiens
  siRNA target sequence for KCNH7 (NM_033272.2,1030-1048).
catcttcggtccatgatat

SEQ ID NO: 254523 - DNA, 19 bp, Homo sapiens
  siRNA target sequence for KCNH7 (NM_033272.2,1060-1078).
gcgtccaccccaagaacat

SEQ ID NO: 254524 - DNA, 19 bp, Homo sapiens
  siRNA target sequence for KCNH7 (NM_033272.2,1062-1080).
gtccaccccaagaacatat

SEQ ID NO: 254525 - DNA, 19 bp, Homo sapiens
  siRNA target sequence for KCNH7 (NM_033272.2,1090-1108).
gacatgccagcgaagacaa

SEQ ID NO: 254526 - DNA, 19 bp, Homo sapiens
  siRNA target sequence for KCNH7 (NM_033272.2,1104-1122).
gacaatggtcgcaatgtca

SEQ ID NO: 254527 - DNA, 19 bp, Homo sapiens
  siRNA target sequence for KCNH7 (NM_033272.2,1106-1124).
caatggtcgcaatgtcaaa

SEQ ID NO: 254528 - DNA, 19 bp, Homo sapiens
  siRNA target sequence for KCNH7 (NM_033272.2,1158-1176).
ggatccacatcagattcaa

SEQ ID NO: 254529 - DNA, 19 bp, Homo sapiens
  siRNA target sequence for KCNH7 (NM_033272.2,1270-1288).
cttcagataaaaccattat

SEQ ID NO: 254530 - DNA, 19 bp, Homo sapiens
  siRNA target sequence for KCNH7 (NM_033272.2,1337-1355).
ccaggttctctctttagga

SEQ ID NO: 254531 - DNA, 19 bp, Homo sapiens
  siRNA target sequence for KCNH7 (NM_033272.2,1389-1407).
ccacgcatcaacaagttta

SEQ ID NO: 254532 - DNA, 19 bp, Homo sapiens
  siRNA target sequence for KCNH7 (NM_033272.2,1392-1410).
cgcatcaacaagtttacga

SEQ ID NO: 254533 - DNA, 19 bp, Homo sapiens
  siRNA target sequence for KCNH7 (NM_033272.2,1393-1411).
gcatcaacaagtttacgat

SEQ ID NO: 254534 - DNA, 19 bp, Homo sapiens
  siRNA target sequence for KCNH7 (NM_033272.2,1394-1412).
catcaacaagtttacgata

SEQ ID NO: 254535 - DNA, 19 bp, Homo sapiens
  siRNA target sequence for KCNH7 (NM_033272.2,1457-1475).
gctgttggtcatatacact

SEQ ID NO: 254536 - DNA, 19 bp, Homo sapiens
  siRNA target sequence for KCNH7 (NM_033272.2,1463-1481).
ggtcatatacactgctata

SEQ ID NO: 254537 - DNA, 19 bp, Homo sapiens
  siRNA target sequence for KCNH7 (NM_033272.2,1552-1570).
cttgtagccctttgaatgt

SEQ ID NO: 254538 - DNA, 19 bp, Homo sapiens
  siRNA target sequence for KCNH7 (NM_033272.2,1619-1637).
cttcagaacaacatatgta

SEQ ID NO: 254539 - DNA, 19 bp, Homo sapiens
  siRNA target sequence for KCNH7 (NM_033272.2,1624-1642).
gaacaacatatgtaaatca

SEQ ID NO: 254540 - DNA, 19 bp, Homo sapiens
  siRNA target sequence for KCNH7 (NM_033272.2,1662-1680).
gatcccgccaaaatagcaa

SEQ ID NO: 254541 - DNA, 19 bp, Homo sapiens
  siRNA target sequence for KCNH7 (NM_033272.2,1666-1684).
ccgccaaaatagcaataca

SEQ ID NO: 254542 - DNA, 19 bp, Homo sapiens
  siRNA target sequence for KCNH7 (NM_033272.2,1669-1687).
ccaaaatagcaatacacta

SEQ ID NO: 254543 - DNA, 19 bp, Homo sapiens
  siRNA target sequence for KCNH7 (NM_033272.2,1712-1730).
catggttgcagcaattcct

SEQ ID NO: 254544 - DNA, 19 bp, Homo sapiens
  siRNA target sequence for KCNH7 (NM_033272.2,1720-1738).
cagcaattccttttgactt

SEQ ID NO: 254545 - DNA, 19 bp, Homo sapiens
  siRNA target sequence for KCNH7 (NM_033272.2,1755-1773).
ggttctgatgagacaacaa

SEQ ID NO: 254546 - DNA, 19 bp, Homo sapiens
  siRNA target sequence for KCNH7 (NM_033272.2,1771-1789).
caacattaattggtctttt

SEQ ID NO: 254547 - DNA, 19 bp, Homo sapiens
  siRNA target sequence for KCNH7 (NM_033272.2,1774-1792).
cattaattggtcttttgaa

SEQ ID NO: 254548 - DNA, 19 bp, Homo sapiens
  siRNA target sequence for KCNH7 (NM_033272.2,1829-1847).
gaaactggatcgatattca

SEQ ID NO: 254549 - DNA, 19 bp, Homo sapiens
  siRNA target sequence for KCNH7 (NM_033272.2,1833-1851).
ctggatcgatattcagaat

SEQ ID NO: 254550 - DNA, 19 bp, Homo sapiens
  siRNA target sequence for KCNH7 (NM_033272.2,1855-1873).
gcgctgctgttctaatgct

SEQ ID NO: 254551 - DNA, 19 bp, Homo sapiens
  siRNA target sequence for KCNH7 (NM_033272.2,1922-1940).
gtatgcgattgggaatgta

SEQ ID NO: 254552 - DNA, 19 bp, Homo sapiens
  siRNA target sequence for KCNH7 (NM_033272.2,1946-1964).
gccttacctgactgacaaa

SEQ ID NO: 254553 - DNA, 19 bp, Homo sapiens
  siRNA target sequence for KCNH7 (NM_033272.2,1947-1965).
ccttacctgactgacaaaa

SEQ ID NO: 254554 - DNA, 19 bp, Homo sapiens
  siRNA target sequence for KCNH7 (NM_033272.2,1948-1966).
cttacctgactgacaaaat

SEQ ID NO: 254555 - DNA, 19 bp, Homo sapiens
  siRNA target sequence for KCNH7 (NM_033272.2,1967-1985).
cggatggttggattcctta

SEQ ID NO: 254556 - DNA, 19 bp, Homo sapiens
  siRNA target sequence for KCNH7 (NM_033272.2,2031-2049).
ggaccatccattaaagaca

SEQ ID NO: 254557 - DNA, 19 bp, Homo sapiens
  siRNA target sequence for KCNH7 (NM_033272.2,2032-2050).
gaccatccattaaagacaa

SEQ ID NO: 254558 - DNA, 19 bp, Homo sapiens
  siRNA target sequence for KCNH7 (NM_033272.2,2034-2052).
ccatccattaaagacaaat

SEQ ID NO: 254559 - DNA, 19 bp, Homo sapiens
  siRNA target sequence for KCNH7 (NM_033272.2,2083-2101).
gtttaaccagtgtaggatt

SEQ ID NO: 254560 - DNA, 19 bp, Homo sapiens
  siRNA target sequence for KCNH7 (NM_033272.2,2094-2112).
gtaggattcgggaatgtgt

SEQ ID NO: 254561 - DNA, 19 bp, Homo sapiens
  siRNA target sequence for KCNH7 (NM_033272.2,2109-2127).
gtgtctcctaacacgaatt

SEQ ID NO: 254562 - DNA, 19 bp, Homo sapiens
  siRNA target sequence for KCNH7 (NM_033272.2,2122-2140).
cgaattcggagaaaatctt

SEQ ID NO: 254563 - DNA, 19 bp, Homo sapiens
  siRNA target sequence for KCNH7 (NM_033272.2,2163-2181).
ggctcactaatgtatgcaa

SEQ ID NO: 254564 - DNA, 19 bp, Homo sapiens
  siRNA target sequence for KCNH7 (NM_033272.2,2202-2220).
gcaattatccaaagactat

SEQ ID NO: 254565 - DNA, 19 bp, Homo sapiens
  siRNA target sequence for KCNH7 (NM_033272.2,2246-2264).
gcagatgctgcgagtaaaa

SEQ ID NO: 254566 - DNA, 19 bp, Homo sapiens
  siRNA target sequence for KCNH7 (NM_033272.2,2255-2273).
gcgagtaaaagagttcatt

SEQ ID NO: 254567 - DNA, 19 bp, Homo sapiens
  siRNA target sequence for KCNH7 (NM_033272.2,2302-2320).
ggcaacgtcttgaagaata

SEQ ID NO: 254568 - DNA, 19 bp, Homo sapiens
  siRNA target sequence for KCNH7 (NM_033272.2,2476-2494).
gagctttggcaatgaagtt

SEQ ID NO: 254569 - DNA, 19 bp, Homo sapiens
  siRNA target sequence for KCNH7 (NM_033272.2,2478-2496).
gctttggcaatgaagttca

SEQ ID NO: 254570 - DNA, 19 bp, Homo sapiens
  siRNA target sequence for KCNH7 (NM_033272.2,2572-2590).
gaggctccattgaaattct

SEQ ID NO: 254571 - DNA, 19 bp, Homo sapiens
  siRNA target sequence for KCNH7 (NM_033272.2,2575-2593).
gctccattgaaattctcaa

SEQ ID NO: 254572 - DNA, 19 bp, Homo sapiens
  siRNA target sequence for KCNH7 (NM_033272.2,2659-2677).
ccaaacctggaaagtctaa

SEQ ID NO: 254573 - DNA, 19 bp, Homo sapiens
  siRNA target sequence for KCNH7 (NM_033272.2,2672-2690).
gtctaatgcagatgtaaga

SEQ ID NO: 254574 - DNA, 19 bp, Homo sapiens
  siRNA target sequence for KCNH7 (NM_033272.2,2685-2703).
gtaagagccctcacatact

SEQ ID NO: 254575 - DNA, 19 bp, Homo sapiens
  siRNA target sequence for KCNH7 (NM_033272.2,2747-2765).
ggatatgtatcctgagttt

SEQ ID NO: 254576 - DNA, 19 bp, Homo sapiens
  siRNA target sequence for KCNH7 (NM_033272.2,2753-2771).
gtatcctgagttttctgat

SEQ ID NO: 254577 - DNA, 19 bp, Homo sapiens
  siRNA target sequence for KCNH7 (NM_033272.2,2767-2785).
ctgatcactttctaacaaa

SEQ ID NO: 254578 - DNA, 19 bp, Homo sapiens
  siRNA target sequence for KCNH7 (NM_033272.2,2782-2800).
caaacctagagttgacttt

SEQ ID NO: 254579 - DNA, 19 bp, Homo sapiens
  siRNA target sequence for KCNH7 (NM_033272.2,2829-2847).
gatctcctacgatcacaat

SEQ ID NO: 254580 - DNA, 19 bp, Homo sapiens
  siRNA target sequence for KCNH7 (NM_033272.2,2839-2857).
gatcacaatccatgaatga

SEQ ID NO: 254581 - DNA, 19 bp, Homo sapiens
  siRNA target sequence for KCNH7 (NM_033272.2,2865-2883).
ggagacaactgtaaactaa

SEQ ID NO: 254582 - DNA, 19 bp, Homo sapiens
  siRNA target sequence for KCNH7 (NM_033272.2,2887-2905).
gaaggaaattgtcatttga

SEQ ID NO: 254583 - DNA, 19 bp, Homo sapiens
  siRNA target sequence for KCNH7 (NM_033272.2,2946-2964).
gactctgcagataccataa

SEQ ID NO: 254584 - DNA, 19 bp, Homo sapiens
  siRNA target sequence for KCNH7 (NM_033272.2,2948-2966).
ctctgcagataccataaga

SEQ ID NO: 254585 - DNA, 19 bp, Homo sapiens
  siRNA target sequence for KCNH7 (NM_033272.2,2952-2970).
gcagataccataagacatt

SEQ ID NO: 254586 - DNA, 19 bp, Homo sapiens
  siRNA target sequence for KCNH7 (NM_033272.2,2953-2971).
cagataccataagacatta

SEQ ID NO: 254587 - DNA, 19 bp, Homo sapiens
  siRNA target sequence for KCNH7 (NM_033272.2,2975-2993).
gagttccaagagacacttt

SEQ ID NO: 254588 - DNA, 19 bp, Homo sapiens
  siRNA target sequence for KCNH7 (NM_033272.2,2977-2995).
gttccaagagacactttga

SEQ ID NO: 254589 - DNA, 19 bp, Homo sapiens
  siRNA target sequence for KCNH7 (NM_033272.2,2980-2998).
ccaagagacactttgaaga

SEQ ID NO: 254590 - DNA, 19 bp, Homo sapiens
  siRNA target sequence for KCNH7 (NM_033272.2,3050-3068).
gccgctcttctcaggaata

SEQ ID NO: 254591 - DNA, 19 bp, Homo sapiens
  siRNA target sequence for KCNH7 (NM_033272.2,3052-3070).
cgctcttctcaggaatagt

SEQ ID NO: 254592 - DNA, 19 bp, Homo sapiens
  siRNA target sequence for KCNH7 (NM_033272.2,3097-3115).
catctgggctcgattttga

SEQ ID NO: 254593 - DNA, 19 bp, Homo sapiens
  siRNA target sequence for KCNH7 (NM_033272.2,3102-3120).
gggctcgattttgaagaaa

SEQ ID NO: 254594 - DNA, 19 bp, Homo sapiens
  siRNA target sequence for KCNH7 (NM_033272.2,3143-3161).
gcacatagataaaagaagt

SEQ ID NO: 254595 - DNA, 19 bp, Homo sapiens
  siRNA target sequence for KCNH7 (NM_033272.2,3164-3182).
ctcttgcaaagatatcact

SEQ ID NO: 254596 - DNA, 19 bp, Homo sapiens
  siRNA target sequence for KCNH7 (NM_033272.2,3258-3276).
gcctggggtatctctgaaa

SEQ ID NO: 254597 - DNA, 19 bp, Homo sapiens
  siRNA target sequence for KCNH7 (NM_033272.2,3333-3351).
caacttaacaggcttgaat

SEQ ID NO: 254598 - DNA, 19 bp, Homo sapiens
  siRNA target sequence for KCNH7 (NM_033272.2,3411-3429).
gtccccccagcctacagta

SEQ ID NO: 254599 - DNA, 19 bp, Homo sapiens
  siRNA target sequence for KCNH7 (NM_033272.2,3431-3449).
ggtaacagcaggatcagaa

SEQ ID NO: 254600 - DNA, 19 bp, Homo sapiens
  siRNA target sequence for KCNH7 (NM_033272.2,3438-3456).
gcaggatcagaatatcaga

SEQ ID NO: 254601 - DNA, 19 bp, Homo sapiens
  siRNA target sequence for KCNH7 (NM_033272.2,3489-3507).
ccggaagcatccatcaaaa

SEQ ID NO: 254602 - DNA, 19 bp, Homo sapiens
  siRNA target sequence for KCNH7 (NM_033272.2,3592-3610).
caagtggggtgcatctgaa

SEQ ID NO: 254603 - DNA, 19 bp, Homo sapiens
  siRNA target sequence for KCNH7 (NM_033272.2,3706-3724).
caattaggcatccttcttt

SEQ ID NO: 254604 - DNA, 19 bp, Homo sapiens
  siRNA target sequence for KCNH7 (NM_033272.2,3736-3754).
ccctaagcactgtaggaat

SEQ ID NO: 254605 - DNA, 19 bp, Homo sapiens
  siRNA target sequence for KCNH7 (NM_033272.2,3750-3768).
ggaatcgtgggtcttcata

SEQ ID NO: 254606 - DNA, 19 bp, Homo sapiens
  siRNA target sequence for KCNH7 (NM_173162.1,1097-1115).
cagcgaagggccttttaat

SEQ ID NO: 254607 - DNA, 19 bp, Homo sapiens
  siRNA target sequence for KCNH7 (NM_173162.1,2339-2357).
gaacatggtatgtatgtct

SEQ ID NO: 254608 - DNA, 19 bp, Homo sapiens
  siRNA target sequence for KCNH7 (NM_173162.1,2350-2368).
gtatgtctgttttccaaaa

SEQ ID NO: 254609 - DNA, 19 bp, Homo sapiens
  siRNA target sequence for KCNH7 (NM_173162.1,2374-2392).
gtgccgcaggcattatagt

SEQ ID NO: 254610 - DNA, 19 bp, Homo sapiens
  siRNA target sequence for KCNH7 (NM_173162.1,2376-2394).
gccgcaggcattatagtga

SEQ ID NO: 254611 - DNA, 19 bp, Homo sapiens
  siRNA target sequence for KCNH7 (NM_173162.1,2377-2395).
ccgcaggcattatagtgat

SEQ ID NO: 254612 - DNA, 19 bp, Homo sapiens
  siRNA target sequence for KCNH7 (NM_173162.1,2378-2396).
cgcaggcattatagtgata

SEQ ID NO: 254613 - DNA, 19 bp, Homo sapiens
  siRNA target sequence for LOC139135 (NM_173493.1,322-340).
catttcctacctatgatta

SEQ ID NO: 254614 - DNA, 19 bp, Homo sapiens
  siRNA target sequence for LOC139135 (NM_173493.1,327-345).
cctacctatgattacttca

SEQ ID NO: 254615 - DNA, 19 bp, Homo sapiens
  siRNA target sequence for LOC139135 (NM_173493.1,347-365).
ccaagtgacgctacagtta

SEQ ID NO: 254616 - DNA, 19 bp, Homo sapiens
  siRNA target sequence for LOC139135 (NM_173493.1,348-366).
caagtgacgctacagttat

SEQ ID NO: 254617 - DNA, 19 bp, Homo sapiens
  siRNA target sequence for LOC139135 (NM_173493.1,353-371).
gacgctacagttattagat

SEQ ID NO: 254618 - DNA, 19 bp, Homo sapiens
  siRNA target sequence for LOC139135 (NM_173493.1,462-480).
gtgggcaaaaaattattaa

SEQ ID NO: 254619 - DNA, 19 bp, Homo sapiens
  siRNA target sequence for LOC139135 (NM_173493.1,594-612).
gtcgaacatggtgatagtt

SEQ ID NO: 254620 - DNA, 19 bp, Homo sapiens
  siRNA target sequence for LOC139135 (NM_173493.1,596-614).
cgaacatggtgatagttct

SEQ ID NO: 254621 - DNA, 19 bp, Homo sapiens
  siRNA target sequence for LOC139135 (NM_173493.1,610-628).
gttctgcttacgaaaacgt

SEQ ID NO: 254622 - DNA, 19 bp, Homo sapiens
  siRNA target sequence for LOC139135 (NM_173493.1,615-633).
gcttacgaaaacgtgaaat

SEQ ID NO: 254623 - DNA, 19 bp, Homo sapiens
  siRNA target sequence for LOC139135 (NM_173493.1,616-634).
cttacgaaaacgtgaaatt

SEQ ID NO: 254624 - DNA, 19 bp, Homo sapiens
  siRNA target sequence for LOC139135 (NM_173493.1,620-638).
cgaaaacgtgaaatttatt

SEQ ID NO: 254625 - DNA, 19 bp, Homo sapiens
  siRNA target sequence for LOC139135 (NM_173493.1,626-644).
cgtgaaatttattgtgaat

SEQ ID NO: 254626 - DNA, 19 bp, Homo sapiens
  siRNA target sequence for LOC139135 (NM_173493.1,665-683).
gtttcctgtggtctttagt

SEQ ID NO: 254627 - DNA, 19 bp, Homo sapiens
  siRNA target sequence for LOC139135 (NM_173493.1,734-752).
ggaggatcggctttatctt

SEQ ID NO: 254628 - DNA, 19 bp, Homo sapiens
  siRNA target sequence for LOC139135 (NM_173493.1,783-801).
ctcctgcagcaactttaca

SEQ ID NO: 254629 - DNA, 19 bp, Homo sapiens
  siRNA target sequence for LOC139135 (NM_173493.1,825-843).
gctgtacttacacaagatt

SEQ ID NO: 254630 - DNA, 19 bp, Homo sapiens
  siRNA target sequence for LOC139135 (NM_173493.1,952-970).
ctatctcagacgaccaaat

SEQ ID NO: 254631 - DNA, 19 bp, Homo sapiens
  siRNA target sequence for LOC139135 (NM_173493.1,956-974).
ctcagacgaccaaattgat

SEQ ID NO: 254632 - DNA, 19 bp, Homo sapiens
  siRNA target sequence for LOC139135 (NM_173493.1,958-976).
cagacgaccaaattgatat

SEQ ID NO: 254633 - DNA, 19 bp, Homo sapiens
  siRNA target sequence for LOC139135 (NM_173493.1,962-980).
cgaccaaattgatattgca

SEQ ID NO: 254634 - DNA, 19 bp, Homo sapiens
  siRNA target sequence for LOC139135 (NM_173493.1,1010-1028).
cgttcacatgtttgtagat

SEQ ID NO: 254635 - DNA, 19 bp, Homo sapiens
  siRNA target sequence for LOC139135 (NM_173493.1,1011-1029).
gttcacatgtttgtagatt

SEQ ID NO: 254636 - DNA, 19 bp, Homo sapiens
  siRNA target sequence for LOC139135 (NM_173493.1,1117-1135).
ctgaggtgaatccattgta

SEQ ID NO: 254637 - DNA, 19 bp, Homo sapiens
  siRNA target sequence for LOC139135 (NM_173493.1,1333-1351).
caccagttgcatatgacat

SEQ ID NO: 254638 - DNA, 19 bp, Homo sapiens
  siRNA target sequence for LOC139135 (NM_173493.1,1440-1458).
cagaatgcattggaattga

SEQ ID NO: 254639 - DNA, 19 bp, Homo sapiens
  siRNA target sequence for LOC139135 (NM_173493.1,1489-1507).
cattacgccacgttgtcat

SEQ ID NO: 254640 - DNA, 19 bp, Homo sapiens
  siRNA target sequence for LOC139135 (NM_173493.1,1590-1608).
cccaaggacgtcaagtgtt

SEQ ID NO: 254641 - DNA, 19 bp, Homo sapiens
  siRNA target sequence for LOC139135 (NM_173493.1,1591-1609).
ccaaggacgtcaagtgttt

SEQ ID NO: 254642 - DNA, 19 bp, Homo sapiens
  siRNA target sequence for LOC139135 (NM_173493.1,1595-1613).
ggacgtcaagtgtttctgt

SEQ ID NO: 254643 - DNA, 19 bp, Homo sapiens
  siRNA target sequence for LOC139135 (NM_173493.1,1956-1974).
ccactgaagcataatgtca

SEQ ID NO: 254644 - DNA, 19 bp, Homo sapiens
  siRNA target sequence for LOC139135 (NM_173493.1,1957-1975).
cactgaagcataatgtcat

SEQ ID NO: 254645 - DNA, 19 bp, Homo sapiens
  siRNA target sequence for LOC139135 (NM_173493.1,2036-2054).
ctgcaatcaccctgttaga

SEQ ID NO: 254646 - DNA, 19 bp, Homo sapiens
  siRNA target sequence for LOC139135 (NM_173493.1,2038-2056).
gcaatcaccctgttagatt

SEQ ID NO: 254647 - DNA, 19 bp, Homo sapiens
  siRNA target sequence for LOC139135 (NM_173493.1,2105-2123).
gccctctggcttctatcaa

SEQ ID NO: 254648 - DNA, 19 bp, Homo sapiens
  siRNA target sequence for LOC139135 (NM_173493.1,2195-2213).
gaaccagctgccattgata

SEQ ID NO: 254649 - DNA, 19 bp, Homo sapiens
  siRNA target sequence for LOC139135 (NM_173493.1,2198-2216).
ccagctgccattgatagat

SEQ ID NO: 254650 - DNA, 19 bp, Homo sapiens
  siRNA target sequence for LOC139135 (NM_173493.1,2199-2217).
cagctgccattgatagata

SEQ ID NO: 254651 - DNA, 19 bp, Homo sapiens
  siRNA target sequence for LOC139135 (NM_173493.1,2347-2365).
gtcctgttgtccaagtgaa

SEQ ID NO: 254652 - DNA, 19 bp, Homo sapiens
  siRNA target sequence for LOC139135 (NM_173493.1,2352-2370).
gttgtccaagtgaacactt

SEQ ID NO: 254653 - DNA, 19 bp, Homo sapiens
  siRNA target sequence for LOC139135 (NM_173493.1,2511-2529).
gcggagcagaccagattga

SEQ ID NO: 254654 - DNA, 19 bp, Homo sapiens
  siRNA target sequence for LOC139135 (NM_173493.1,2512-2530).
cggagcagaccagattgat

SEQ ID NO: 254655 - DNA, 19 bp, Homo sapiens
  siRNA target sequence for LOC139135 (NM_173493.1,2538-2556).
gagcaacgtgactcaaata

SEQ ID NO: 254656 - DNA, 19 bp, Homo sapiens
  siRNA target sequence for LY86 (NM_004271.1,149-167).
ccagagttgcgatccatta

SEQ ID NO: 254657 - DNA, 19 bp, Homo sapiens
  siRNA target sequence for LY86 (NM_004271.1,152-170).
gagttgcgatccattacaa

SEQ ID NO: 254658 - DNA, 19 bp, Homo sapiens
  siRNA target sequence for LY86 (NM_004271.1,154-172).
gttgcgatccattacaaga

SEQ ID NO: 254659 - DNA, 19 bp, Homo sapiens
  siRNA target sequence for LY86 (NM_004271.1,157-175).
gcgatccattacaagattt

SEQ ID NO: 254660 - DNA, 19 bp, Homo sapiens
  siRNA target sequence for LY86 (NM_004271.1,158-176).
cgatccattacaagatttt

SEQ ID NO: 254661 - DNA, 19 bp, Homo sapiens
  siRNA target sequence for LY86 (NM_004271.1,291-309).
caaggctcatctgttttga

SEQ ID NO: 254662 - DNA, 19 bp, Homo sapiens
  siRNA target sequence for LY86 (NM_004271.1,294-312).
ggctcatctgttttgaatt

SEQ ID NO: 254663 - DNA, 19 bp, Homo sapiens
  siRNA target sequence for LY86 (NM_004271.1,386-404).
ctatgctgggcctgtcaat

SEQ ID NO: 254664 - DNA, 19 bp, Homo sapiens
  siRNA target sequence for LY86 (NM_004271.1,418-436).
ctattcctcagggagaata

SEQ ID NO: 254665 - DNA, 19 bp, Homo sapiens
  siRNA target sequence for LY86 (NM_004271.1,430-448).
gagaataccaggttttgct

SEQ ID NO: 254666 - DNA, 19 bp, Homo sapiens
  siRNA target sequence for NPAS3 (NM_022123.1,110-128).
cttccaggcgagaacgttt

SEQ ID NO: 254667 - DNA, 19 bp, Homo sapiens
  siRNA target sequence for NPAS3 (NM_022123.1,113-131).
ccaggcgagaacgtttaca

SEQ ID NO: 254668 - DNA, 19 bp, Homo sapiens
  siRNA target sequence for NPAS3 (NM_022123.1,119-137).
gagaacgtttacaagcatt

SEQ ID NO: 254669 - DNA, 19 bp, Homo sapiens
  siRNA target sequence for NPAS3 (NM_022123.1,124-142).
cgtttacaagcattgagaa

SEQ ID NO: 254670 - DNA, 19 bp, Homo sapiens
  siRNA target sequence for NPAS3 (NM_022123.1,249-267).
cgacaaggcatccatcatt

SEQ ID NO: 254671 - DNA, 19 bp, Homo sapiens
  siRNA target sequence for NPAS3 (NM_022123.1,260-278).
ccatcattcgacttacaat

SEQ ID NO: 254672 - DNA, 19 bp, Homo sapiens
  siRNA target sequence for NPAS3 (NM_022123.1,349-367).
ccacctaacacatcagtaa

SEQ ID NO: 254673 - DNA, 19 bp, Homo sapiens
  siRNA target sequence for NPAS3 (NM_022123.1,552-570).
cagcagtgtctttgactat

SEQ ID NO: 254674 - DNA, 19 bp, Homo sapiens
  siRNA target sequence for NPAS3 (NM_022123.1,750-768).
cactcttgagcgttccttt

SEQ ID NO: 254675 - DNA, 19 bp, Homo sapiens
  siRNA target sequence for NPAS3 (NM_022123.1,771-789).
catccgaatgaaatctact

SEQ ID NO: 254676 - DNA, 19 bp, Homo sapiens
  siRNA target sequence for NPAS3 (NM_022123.1,799-817).
cgcggtgtgcacatcaaat

SEQ ID NO: 254677 - DNA, 19 bp, Homo sapiens
  siRNA target sequence for NPAS3 (NM_022123.1,801-819).
cggtgtgcacatcaaatca

SEQ ID NO: 254678 - DNA, 19 bp, Homo sapiens
  siRNA target sequence for NPAS3 (NM_022123.1,887-905).
ccgtccccagccaaatcat

SEQ ID NO: 254679 - DNA, 19 bp, Homo sapiens
  siRNA target sequence for NPAS3 (NM_022123.1,933-951).
gcctccccctacgatcaat

SEQ ID NO: 254680 - DNA, 19 bp, Homo sapiens
  siRNA target sequence for NPAS3 (NM_022123.1,935-953).
ctccccctacgatcaatga

SEQ ID NO: 254681 - DNA, 19 bp, Homo sapiens
  siRNA target sequence for NPAS3 (NM_022123.1,938-956).
cccctacgatcaatgaagt

SEQ ID NO: 254682 - DNA, 19 bp, Homo sapiens
  siRNA target sequence for NPAS3 (NM_022123.1,944-962).
cgatcaatgaagtcagaat

SEQ ID NO: 254683 - DNA, 19 bp, Homo sapiens
  siRNA target sequence for NPAS3 (NM_022123.1,975-993).
gttcgtcactcgagtaaat

SEQ ID NO: 254684 - DNA, 19 bp, Homo sapiens
  siRNA target sequence for NPAS3 (NM_022123.1,988-1006).
gtaaatatggacctcaata

SEQ ID NO: 254685 - DNA, 19 bp, Homo sapiens
  siRNA target sequence for NPAS3 (NM_022123.1,999-1017).
cctcaatatcatttactgt

SEQ ID NO: 254686 - DNA, 19 bp, Homo sapiens
  siRNA target sequence for NPAS3 (NM_022123.1,1014-1032).
ctgtgaaaataggattagt

SEQ ID NO: 254687 - DNA, 19 bp, Homo sapiens
  siRNA target sequence for NPAS3 (NM_022123.1,1026-1044).
gattagtgattatatggat

SEQ ID NO: 254688 - DNA, 19 bp, Homo sapiens
  siRNA target sequence for NPAS3 (NM_022123.1,1041-1059).
ggatctgacccctgtagat

SEQ ID NO: 254689 - DNA, 19 bp, Homo sapiens
  siRNA target sequence for NPAS3 (NM_022123.1,1042-1060).
gatctgacccctgtagata

SEQ ID NO: 254690 - DNA, 19 bp, Homo sapiens
  siRNA target sequence for NPAS3 (NM_022123.1,1057-1075).
gatatcgtagggaagagat

SEQ ID NO: 254691 - DNA, 19 bp, Homo sapiens
  siRNA target sequence for NPAS3 (NM_022123.1,1144-1162).
ggtcagtgtgtgacaaagt

SEQ ID NO: 254692 - DNA, 19 bp, Homo sapiens
  siRNA target sequence for NPAS3 (NM_022123.1,1147-1165).
cagtgtgtgacaaagtact

SEQ ID NO: 254693 - DNA, 19 bp, Homo sapiens
  siRNA target sequence for NPAS3 (NM_022123.1,1177-1195).
cagaagaacggaggatata

SEQ ID NO: 254694 - DNA, 19 bp, Homo sapiens
  siRNA target sequence for NPAS3 (NM_022123.1,1185-1203).
cggaggatatatttggata

SEQ ID NO: 254695 - DNA, 19 bp, Homo sapiens
  siRNA target sequence for NPAS3 (NM_022123.1,1189-1207).
ggatatatttggatacagt

SEQ ID NO: 254696 - DNA, 19 bp, Homo sapiens
  siRNA target sequence for NPAS3 (NM_022123.1,1209-1227).
cagtgccaccatagctatt

SEQ ID NO: 254697 - DNA, 19 bp, Homo sapiens
  siRNA target sequence for NPAS3 (NM_022123.1,1468-1486).
gagcccgaccggaagaagt

SEQ ID NO: 254698 - DNA, 19 bp, Homo sapiens
  siRNA target sequence for NPAS3 (NM_022123.1,1496-1514).
cgtgtgacaacgacatgaa

SEQ ID NO: 254699 - DNA, 19 bp, Homo sapiens
  siRNA target sequence for NPAS3 (NM_022123.1,1932-1950).
gatctcagaacccatcaat

SEQ ID NO: 254700 - DNA, 19 bp, Homo sapiens
  siRNA target sequence for NPAS3 (NM_022123.1,1937-1955).
cagaacccatcaatttcga

SEQ ID NO: 254701 - DNA, 19 bp, Homo sapiens
  siRNA target sequence for NPAS3 (NM_022123.1,1943-1961).
ccatcaatttcgacaatga

SEQ ID NO: 254702 - DNA, 19 bp, Homo sapiens
  siRNA target sequence for NPAS3 (NM_022123.1,2516-2534).
ccaacgcgcacgctgttaa

SEQ ID NO: 254703 - DNA, 19 bp, Homo sapiens
  siRNA target sequence for NPAS3 (NM_022123.1,2605-2623).
gtgcaccggctcaacatgt

SEQ ID NO: 254704 - DNA, 19 bp, Homo sapiens
  siRNA target sequence for NXF (NM_178864.2,325-343).
ctcgcaagggcgtcttctt

SEQ ID NO: 254705 - DNA, 19 bp, Homo sapiens
  siRNA target sequence for NXF (NM_178864.2,527-545).
cagcatctacgacatcatt

SEQ ID NO: 254706 - DNA, 19 bp, Homo sapiens
  siRNA target sequence for NXF (NM_178864.2,529-547).
gcatctacgacatcattga

SEQ ID NO: 254707 - DNA, 19 bp, Homo sapiens
  siRNA target sequence for NXF (NM_178864.2,664-682).
gcaacaaactcgtgcttat

SEQ ID NO: 254708 - DNA, 19 bp, Homo sapiens
  siRNA target sequence for NXF (NM_178864.2,668-686).
caaactcgtgcttattcga

SEQ ID NO: 254709 - DNA, 19 bp, Homo sapiens
  siRNA target sequence for NXF (NM_178864.2,868-886).
ccgagagtgtcctaatcta

SEQ ID NO: 254710 - DNA, 19 bp, Homo sapiens
  siRNA target sequence for NXF (NM_178864.2,900-918).
cgcagtgaactgctttgta

SEQ ID NO: 254711 - DNA, 19 bp, Homo sapiens
  siRNA target sequence for NXF (NM_178864.2,911-929).
gctttgtaaatcatggtat

SEQ ID NO: 254712 - DNA, 19 bp, Homo sapiens
  siRNA target sequence for NXF (NM_178864.2,1044-1062).
ggctgggcatggatttact

SEQ ID NO: 254713 - DNA, 19 bp, Homo sapiens
  siRNA target sequence for NXF (NM_178864.2,1054-1072).
ggatttactgcctgttata

SEQ ID NO: 254714 - DNA, 19 bp, Homo sapiens
  siRNA target sequence for NXF (NM_178864.2,1090-1108).
gacccattactgccaataa

SEQ ID NO: 254715 - DNA, 19 bp, Homo sapiens
  siRNA target sequence for NXF (NM_178864.2,1103-1121).
caataactacccaatcagt

SEQ ID NO: 254716 - DNA, 19 bp, Homo sapiens
  siRNA target sequence for NXF (NM_178864.2,1140-1158).
ctccgccagcagttgaact

SEQ ID NO: 254717 - DNA, 19 bp, Homo sapiens
  siRNA target sequence for NXF (NM_178864.2,1206-1224).
ccctcattccctgaaaaca

SEQ ID NO: 254718 - DNA, 19 bp, Homo sapiens
  siRNA target sequence for NXF (NM_178864.2,1210-1228).
cattccctgaaaacattct

SEQ ID NO: 254719 - DNA, 19 bp, Homo sapiens
  siRNA target sequence for NXF (NM_178864.2,1567-1585).
cgaccttctctgatcagtt

SEQ ID NO: 254720 - DNA, 19 bp, Homo sapiens
  siRNA target sequence for NXF (NM_178864.2,1654-1672).
cggtcagaagctatgaaga

SEQ ID NO: 254721 - DNA, 19 bp, Homo sapiens
  siRNA target sequence for NXF (NM_178864.2,1865-1883).
ccaggagggatgcagtttt

SEQ ID NO: 254722 - DNA, 19 bp, Homo sapiens
  siRNA target sequence for NXF (NM_178864.2,2076-2094).
cgtctcatccagcagatta

SEQ ID NO: 254723 - DNA, 19 bp, Homo sapiens
  siRNA target sequence for NXF (NM_178864.2,2229-2247).
gacctgaaaccctggaaat

SEQ ID NO: 254724 - DNA, 19 bp, Homo sapiens
  siRNA target sequence for NXF (NM_178864.2,2301-2319).
cccgtggaagacatcttca

SEQ ID NO: 254725 - DNA, 19 bp, Homo sapiens
  siRNA target sequence for NXF (NM_178864.2,2442-2460).
gacctggccacatatgaaa

SEQ ID NO: 254726 - DNA, 19 bp, Homo sapiens
  siRNA target sequence for NXF (NM_178864.2,2489-2507).
cccctatgatgggtttact

SEQ ID NO: 254727 - DNA, 19 bp, Homo sapiens
  siRNA target sequence for NXF (NM_178864.2,2491-2509).
cctatgatgggtttactga

SEQ ID NO: 254728 - DNA, 19 bp, Homo sapiens
  siRNA target sequence for NXF (NM_178864.2,2506-2524).
ctgatgagttgcatcaact

SEQ ID NO: 254729 - DNA, 19 bp, Homo sapiens
  siRNA target sequence for PDCD1 (NM_005018.1,127-145).
ggccaggatggttcttaga

SEQ ID NO: 254730 - DNA, 19 bp, Homo sapiens
  siRNA target sequence for PDCD1 (NM_005018.1,247-265).
cggagagcttcgtgctaaa

SEQ ID NO: 254731 - DNA, 19 bp, Homo sapiens
  siRNA target sequence for PDCD1 (NM_005018.1,653-671).
cgcacgagggacaatagga

SEQ ID NO: 254732 - DNA, 19 bp, Homo sapiens
  siRNA target sequence for PER1 (NM_002616.1,323-341).
gatgccaacagcaatggtt

SEQ ID NO: 254733 - DNA, 19 bp, Homo sapiens
  siRNA target sequence for PER1 (NM_002616.1,328-346).
caacagcaatggttcaagt

SEQ ID NO: 254734 - DNA, 19 bp, Homo sapiens
  siRNA target sequence for PER1 (NM_002616.1,338-356).
ggttcaagtggcaatgagt

SEQ ID NO: 254735 - DNA, 19 bp, Homo sapiens
  siRNA target sequence for PER1 (NM_002616.1,816-834).
ctgagtacacacttcagaa

SEQ ID NO: 254736 - DNA, 19 bp, Homo sapiens
  siRNA target sequence for PER1 (NM_002616.1,1075-1093).
cgtcttctgccgtatcaga

SEQ ID NO: 254737 - DNA, 19 bp, Homo sapiens
  siRNA target sequence for PER1 (NM_002616.1,1136-1154).
cgcctaaccccgtatgtga

SEQ ID NO: 254738 - DNA, 19 bp, Homo sapiens
  siRNA target sequence for PER1 (NM_002616.1,1216-1234).
catccattcgggttacgaa

SEQ ID NO: 254739 - DNA, 19 bp, Homo sapiens
  siRNA target sequence for PER1 (NM_002616.1,1247-1265).
ccccctgacaagaggattt

SEQ ID NO: 254740 - DNA, 19 bp, Homo sapiens
  siRNA target sequence for PER1 (NM_002616.1,1248-1266).
cccctgacaagaggatttt

SEQ ID NO: 254741 - DNA, 19 bp, Homo sapiens
  siRNA target sequence for PER1 (NM_002616.1,1473-1491).
cccgcaacggggagtatgt

SEQ ID NO: 254742 - DNA, 19 bp, Homo sapiens
  siRNA target sequence for PER1 (NM_002616.1,1475-1493).
cgcaacggggagtatgtca

SEQ ID NO: 254743 - DNA, 19 bp, Homo sapiens
  siRNA target sequence for PER1 (NM_002616.1,1626-1644).
cctccctggacactgatat

SEQ ID NO: 254744 - DNA, 19 bp, Homo sapiens
  siRNA target sequence for PER1 (NM_002616.1,1761-1779).
ggtcctccagtgatagcaa

SEQ ID NO: 254745 - DNA, 19 bp, Homo sapiens
  siRNA target sequence for PER1 (NM_002616.1,2122-2140).
caccactaagcgtaaatgt

SEQ ID NO: 254746 - DNA, 19 bp, Homo sapiens
  siRNA target sequence for PER1 (NM_002616.1,2301-2319).
cgctcgccctggccaataa

SEQ ID NO: 254747 - DNA, 19 bp, Homo sapiens
  siRNA target sequence for PER1 (NM_002616.1,2396-2414).
ccggagtcggacatcatca

SEQ ID NO: 254748 - DNA, 19 bp, Homo sapiens
  siRNA target sequence for PER1 (NM_002616.1,2397-2415).
cggagtcggacatcatcat

SEQ ID NO: 254749 - DNA, 19 bp, Homo sapiens
  siRNA target sequence for PER1 (NM_002616.1,2399-2417).
gagtcggacatcatcatga

SEQ ID NO: 254750 - DNA, 19 bp, Homo sapiens
  siRNA target sequence for PER1 (NM_002616.1,2946-2964).
ccttggtgctccctaacta

SEQ ID NO: 254751 - DNA, 19 bp, Homo sapiens
  siRNA target sequence for PER1 (NM_002616.1,2947-2965).
cttggtgctccctaactat

SEQ ID NO: 254752 - DNA, 19 bp, Homo sapiens
  siRNA target sequence for PER1 (NM_002616.1,2951-2969).
gtgctccctaactatctgt

SEQ ID NO: 254753 - DNA, 19 bp, Homo sapiens
  siRNA target sequence for PER1 (NM_002616.1,2977-2995).
cccatccagctatccttat

SEQ ID NO: 254754 - DNA, 19 bp, Homo sapiens
  siRNA target sequence for PER1 (NM_002616.1,3093-3111).
cggactctccactgttcaa

SEQ ID NO: 254755 - DNA, 19 bp, Homo sapiens
  siRNA target sequence for PER1 (NM_002616.1,3306-3324).
gtgacctgctcgaacttct

SEQ ID NO: 254756 - DNA, 19 bp, Homo sapiens
  siRNA target sequence for PER2 (NM_003894.3,240-258).
ggacatgagaccaacgaaa

SEQ ID NO: 254757 - DNA, 19 bp, Homo sapiens
  siRNA target sequence for PER2 (NM_003894.3,241-259).
gacatgagaccaacgaaaa

SEQ ID NO: 254758 - DNA, 19 bp, Homo sapiens
  siRNA target sequence for PER2 (NM_003894.3,346-364).
gccagagtccagatacctt

SEQ ID NO: 254759 - DNA, 19 bp, Homo sapiens
  siRNA target sequence for PER2 (NM_003894.3,387-405).
gaacacaacccatctacaa

SEQ ID NO: 254760 - DNA, 19 bp, Homo sapiens
  siRNA target sequence for PER2 (NM_003894.3,523-541).
cgctggccaccttgaagta

SEQ ID NO: 254761 - DNA, 19 bp, Homo sapiens
  siRNA target sequence for PER2 (NM_003894.3,683-701).
gaagaatgccgatatgttt

SEQ ID NO: 254762 - DNA, 19 bp, Homo sapiens
  siRNA target sequence for PER2 (NM_003894.3,747-765).
gaccaggttgcatccatat

SEQ ID NO: 254763 - DNA, 19 bp, Homo sapiens
  siRNA target sequence for PER2 (NM_003894.3,785-803).
cttcagcgatgccaagttt

SEQ ID NO: 254764 - DNA, 19 bp, Homo sapiens
  siRNA target sequence for PER2 (NM_003894.3,831-849).
ggcgtgttccacagtttca

SEQ ID NO: 254765 - DNA, 19 bp, Homo sapiens
  siRNA target sequence for PER2 (NM_003894.3,881-899).
gtgcagtggagcagattct

SEQ ID NO: 254766 - DNA, 19 bp, Homo sapiens
  siRNA target sequence for PER2 (NM_003894.3,883-901).
gcagtggagcagattcttt

SEQ ID NO: 254767 - DNA, 19 bp, Homo sapiens
  siRNA target sequence for PER2 (NM_003894.3,889-907).
gagcagattcttttactca

SEQ ID NO: 254768 - DNA, 19 bp, Homo sapiens
  siRNA target sequence for PER2 (NM_003894.3,1067-1085).
gagagtgcactctggttat

SEQ ID NO: 254769 - DNA, 19 bp, Homo sapiens
  siRNA target sequence for PER2 (NM_003894.3,1183-1201).
gggcagcctttcgactatt

SEQ ID NO: 254770 - DNA, 19 bp, Homo sapiens
  siRNA target sequence for PER2 (NM_003894.3,1185-1203).
gcagcctttcgactattct

SEQ ID NO: 254771 - DNA, 19 bp, Homo sapiens
  siRNA target sequence for PER2 (NM_003894.3,1222-1240).
cggaacggagagtacatca

SEQ ID NO: 254772 - DNA, 19 bp, Homo sapiens
  siRNA target sequence for PER2 (NM_003894.3,1317-1335).
cagggtgggccctttgaat

SEQ ID NO: 254773 - DNA, 19 bp, Homo sapiens
  siRNA target sequence for PER2 (NM_022817.1,1426-1444).
gggtgggccctttgaatga

SEQ ID NO: 254774 - DNA, 19 bp, Homo sapiens
  siRNA target sequence for PER2 (NM_022817.1,1655-1673).
gaggagagccgaaatttgt

SEQ ID NO: 254775 - DNA, 19 bp, Homo sapiens
  siRNA target sequence for PER2 (NM_022817.1,1657-1675).
ggagagccgaaatttgtaa

SEQ ID NO: 254776 - DNA, 19 bp, Homo sapiens
  siRNA target sequence for PER2 (NM_022817.1,1664-1682).
cgaaatttgtaaaaatggt

SEQ ID NO: 254777 - DNA, 19 bp, Homo sapiens
  siRNA target sequence for PER2 (NM_022817.1,1688-1706).
gaccaaaaatagaagtcat

SEQ ID NO: 254778 - DNA, 19 bp, Homo sapiens
  siRNA target sequence for PER2 (NM_022817.1,1965-1983).
gcgctaaggtccagtgata

SEQ ID NO: 254779 - DNA, 19 bp, Homo sapiens
  siRNA target sequence for PER2 (NM_022817.1,1966-1984).
cgctaaggtccagtgataa

SEQ ID NO: 254780 - DNA, 19 bp, Homo sapiens
  siRNA target sequence for PER2 (NM_022817.1,2172-2190).
ccgcagccggagttagaga

SEQ ID NO: 254781 - DNA, 19 bp, Homo sapiens
  siRNA target sequence for PER2 (NM_022817.1,2173-2191).
cgcagccggagttagagat

SEQ ID NO: 254782 - DNA, 19 bp, Homo sapiens
  siRNA target sequence for PER2 (NM_022817.1,2385-2403).
cagtcccactgccattact

SEQ ID NO: 254783 - DNA, 19 bp, Homo sapiens
  siRNA target sequence for PER2 (NM_022817.1,2443-2461).
ctgcccctggactaagaaa

SEQ ID NO: 254784 - DNA, 19 bp, Homo sapiens
  siRNA target sequence for PER2 (NM_022817.1,2447-2465).
ccctggactaagaaatact

SEQ ID NO: 254785 - DNA, 19 bp, Homo sapiens
  siRNA target sequence for PER2 (NM_022817.1,3049-3067).
cctccccaccgctctttca

SEQ ID NO: 254786 - DNA, 19 bp, Homo sapiens
  siRNA target sequence for PER2 (NM_022817.1,3224-3242).
gcctctgacccgtgatgaa

SEQ ID NO: 254787 - DNA, 19 bp, Homo sapiens
  siRNA target sequence for PER2 (NM_022817.1,3277-3295).
cgtcaagcggcctcctaaa

SEQ ID NO: 254788 - DNA, 19 bp, Homo sapiens
  siRNA target sequence for PER2 (NM_022817.1,3280-3298).
caagcggcctcctaaacct

SEQ ID NO: 254789 - DNA, 19 bp, Homo sapiens
  siRNA target sequence for PER2 (NM_022817.1,3398-3416).
cagtagtgacacaagtcat

SEQ ID NO: 254790 - DNA, 19 bp, Homo sapiens
  siRNA target sequence for PER2 (NM_022817.1,3476-3494).
cactggtatggaagaaagt

SEQ ID NO: 254791 - DNA, 19 bp, Homo sapiens
  siRNA target sequence for PER2 (NM_022817.1,3578-3596).
gctgccttcccgaaattta

SEQ ID NO: 254792 - DNA, 19 bp, Homo sapiens
  siRNA target sequence for PER2 (NM_022817.1,3581-3599).
gccttcccgaaatttagaa

SEQ ID NO: 254793 - DNA, 19 bp, Homo sapiens
  siRNA target sequence for PER2 (NM_022817.1,3728-3746).
catcgacgtggcagaatgt

SEQ ID NO: 254794 - DNA, 19 bp, Homo sapiens
  siRNA target sequence for PER2 (NM_022817.1,3731-3749).
cgacgtggcagaatgtgtt

SEQ ID NO: 254795 - DNA, 19 bp, Homo sapiens
  siRNA target sequence for PER2 (NM_022817.1,3852-3870).
ggatcccccttgaatcaca

SEQ ID NO: 254796 - DNA, 19 bp, Homo sapiens
  siRNA target sequence for PER3 (NM_016831.1,311-329).
caagatcgaaacagagttt

SEQ ID NO: 254797 - DNA, 19 bp, Homo sapiens
  siRNA target sequence for PER3 (NM_016831.1,324-342).
gagtttctgaagaacttat

SEQ ID NO: 254798 - DNA, 19 bp, Homo sapiens
  siRNA target sequence for PER3 (NM_016831.1,379-397).
ggagagacgcaataaacca

SEQ ID NO: 254799 - DNA, 19 bp, Homo sapiens
  siRNA target sequence for PER3 (NM_016831.1,380-398).
gagagacgcaataaaccaa

SEQ ID NO: 254800 - DNA, 19 bp, Homo sapiens
  siRNA target sequence for PER3 (NM_016831.1,529-547).
ggccactatcgcttcagaa

SEQ ID NO: 254801 - DNA, 19 bp, Homo sapiens
  siRNA target sequence for PER3 (NM_016831.1,603-621).
ggttagtgcacatttctga

SEQ ID NO: 254802 - DNA, 19 bp, Homo sapiens
  siRNA target sequence for PER3 (NM_016831.1,604-622).
gttagtgcacatttctgaa

SEQ ID NO: 254803 - DNA, 19 bp, Homo sapiens
  siRNA target sequence for PER3 (NM_016831.1,630-648).
ctttgatcctgaatcgtaa

SEQ ID NO: 254804 - DNA, 19 bp, Homo sapiens
  siRNA target sequence for PER3 (NM_016831.1,661-679).
ggcgtcttctcactttgtt

SEQ ID NO: 254805 - DNA, 19 bp, Homo sapiens
  siRNA target sequence for PER3 (NM_016831.1,695-713).
caagacatgagggtattct

SEQ ID NO: 254806 - DNA, 19 bp, Homo sapiens
  siRNA target sequence for PER3 (NM_016831.1,783-801).
gtgctccggtgaaaccttt

SEQ ID NO: 254807 - DNA, 19 bp, Homo sapiens
  siRNA target sequence for PER3 (NM_016831.1,785-803).
gctccggtgaaaccttttt

SEQ ID NO: 254808 - DNA, 19 bp, Homo sapiens
  siRNA target sequence for PER3 (NM_016831.1,786-804).
ctccggtgaaacctttttt

SEQ ID NO: 254809 - DNA, 19 bp, Homo sapiens
  siRNA target sequence for PER3 (NM_016831.1,860-878).
cggatcatcccctatctga

SEQ ID NO: 254810 - DNA, 19 bp, Homo sapiens
  siRNA target sequence for PER3 (NM_016831.1,861-879).
ggatcatcccctatctgat

SEQ ID NO: 254811 - DNA, 19 bp, Homo sapiens
  siRNA target sequence for PER3 (NM_016831.1,865-883).
catcccctatctgattcat

SEQ ID NO: 254812 - DNA, 19 bp, Homo sapiens
  siRNA target sequence for PER3 (NM_016831.1,871-889).
ctatctgattcatgtacat

SEQ ID NO: 254813 - DNA, 19 bp, Homo sapiens
  siRNA target sequence for PER3 (NM_016831.1,946-964).
gattcactctggttatgaa

SEQ ID NO: 254814 - DNA, 19 bp, Homo sapiens
  siRNA target sequence for PER3 (NM_016831.1,1051-1069).
gcctttgctgggttaccta

SEQ ID NO: 254815 - DNA, 19 bp, Homo sapiens
  siRNA target sequence for PER3 (NM_016831.1,1086-1104).
gaacatcgatcctaagcta

SEQ ID NO: 254816 - DNA, 19 bp, Homo sapiens
  siRNA target sequence for PER3 (NM_016831.1,1132-1150).
ggttgccatacaccaaaaa

SEQ ID NO: 254817 - DNA, 19 bp, Homo sapiens
  siRNA target sequence for PER3 (NM_016831.1,1167-1185).
ggcatcctccctttgaaca

SEQ ID NO: 254818 - DNA, 19 bp, Homo sapiens
  siRNA target sequence for PER3 (NM_016831.1,1181-1199).
gaacattctcccattcgat

SEQ ID NO: 254819 - DNA, 19 bp, Homo sapiens
  siRNA target sequence for PER3 (NM_016831.1,1184-1202).
cattctcccattcgatttt

SEQ ID NO: 254820 - DNA, 19 bp, Homo sapiens
  siRNA target sequence for PER3 (NM_016831.1,1192-1210).
cattcgattttgtactcaa

SEQ ID NO: 254821 - DNA, 19 bp, Homo sapiens
  siRNA target sequence for PER3 (NM_016831.1,1206-1224).
ctcaaaacggagactacat

SEQ ID NO: 254822 - DNA, 19 bp, Homo sapiens
  siRNA target sequence for PER3 (NM_016831.1,1208-1226).
caaaacggagactacatca

SEQ ID NO: 254823 - DNA, 19 bp, Homo sapiens
  siRNA target sequence for PER3 (NM_016831.1,1239-1257).
gttggtccagctttgtgaa

SEQ ID NO: 254824 - DNA, 19 bp, Homo sapiens
  siRNA target sequence for PER3 (NM_016831.1,1263-1281).
ggagccggaagatttcttt

SEQ ID NO: 254825 - DNA, 19 bp, Homo sapiens
  siRNA target sequence for PER3 (NM_016831.1,1266-1284).
gccggaagatttctttcat

SEQ ID NO: 254826 - DNA, 19 bp, Homo sapiens
  siRNA target sequence for PER3 (NM_016831.1,1282-1300).
catcattggtcggcataaa

SEQ ID NO: 254827 - DNA, 19 bp, Homo sapiens
  siRNA target sequence for PER3 (NM_016831.1,1305-1323).
gaacgagcccactaaatga

SEQ ID NO: 254828 - DNA, 19 bp, Homo sapiens
  siRNA target sequence for PER3 (NM_016831.1,1357-1375).
cgataatgacaaagacata

SEQ ID NO: 254829 - DNA, 19 bp, Homo sapiens
  siRNA target sequence for PER3 (NM_016831.1,1565-1583).
gccagtgtgaacaaaatta

SEQ ID NO: 254830 - DNA, 19 bp, Homo sapiens
  siRNA target sequence for PER3 (NM_016831.1,1566-1584).
ccagtgtgaacaaaattaa

SEQ ID NO: 254831 - DNA, 19 bp, Homo sapiens
  siRNA target sequence for PER3 (NM_016831.1,1593-1611).
gtcagcagctctacattga

SEQ ID NO: 254832 - DNA, 19 bp, Homo sapiens
  siRNA target sequence for PER3 (NM_016831.1,1676-1694).
gaatgtaagacctttactt

SEQ ID NO: 254833 - DNA, 19 bp, Homo sapiens
  siRNA target sequence for PER3 (NM_016831.1,1770-1788).
catcctatcaacagatcaa

SEQ ID NO: 254834 - DNA, 19 bp, Homo sapiens
  siRNA target sequence for PER3 (NM_016831.1,1813-1831).
cctgaagagctacaacatt

SEQ ID NO: 254835 - DNA, 19 bp, Homo sapiens
  siRNA target sequence for PER3 (NM_016831.1,1849-1867).
gtgtatctcctgtacaaat

SEQ ID NO: 254836 - DNA, 19 bp, Homo sapiens
  siRNA target sequence for PER3 (NM_016831.1,1948-1966).
cccagccatacctaaatca

SEQ ID NO: 254837 - DNA, 19 bp, Homo sapiens
  siRNA target sequence for PER3 (NM_016831.1,1950-1968).
cagccatacctaaatcaga

SEQ ID NO: 254838 - DNA, 19 bp, Homo sapiens
  siRNA target sequence for PER3 (NM_016831.1,1952-1970).
gccatacctaaatcagaaa

SEQ ID NO: 254839 - DNA, 19 bp, Homo sapiens
  siRNA target sequence for PER3 (NM_016831.1,1953-1971).
ccatacctaaatcagaaat

SEQ ID NO: 254840 - DNA, 19 bp, Homo sapiens
  siRNA target sequence for PER3 (NM_016831.1,2162-2180).
cctttgacctcggaagaat

SEQ ID NO: 254841 - DNA, 19 bp, Homo sapiens
  siRNA target sequence for PER3 (NM_016831.1,2167-2185).
gacctcggaagaatttaaa

SEQ ID NO: 254842 - DNA, 19 bp, Homo sapiens
  siRNA target sequence for PER3 (NM_016831.1,2169-2187).
cctcggaagaatttaaaca

SEQ ID NO: 254843 - DNA, 19 bp, Homo sapiens
  siRNA target sequence for PER3 (NM_016831.1,2280-2298).
cctacagctcctatcttca

SEQ ID NO: 254844 - DNA, 19 bp, Homo sapiens
  siRNA target sequence for PER3 (NM_016831.1,2303-2321).
gaaagcaggagcaaagcta

SEQ ID NO: 254845 - DNA, 19 bp, Homo sapiens
  siRNA target sequence for PER3 (NM_016831.1,2712-2730).
cttttatgaccgttttcct

SEQ ID NO: 254846 - DNA, 19 bp, Homo sapiens
  siRNA target sequence for PER3 (NM_016831.1,2753-2771).
ctgttgtcgccatcgtttt

SEQ ID NO: 254847 - DNA, 19 bp, Homo sapiens
  siRNA target sequence for PER3 (NM_016831.1,2807-2825).
gcgatatcaccctcaatgt

SEQ ID NO: 254848 - DNA, 19 bp, Homo sapiens
  siRNA target sequence for PER3 (NM_016831.1,2911-2929).
ggggcacccgttcattact

SEQ ID NO: 254849 - DNA, 19 bp, Homo sapiens
  siRNA target sequence for PER3 (NM_016831.1,2912-2930).
gggcacccgttcattactt

SEQ ID NO: 254850 - DNA, 19 bp, Homo sapiens
  siRNA target sequence for PER3 (NM_016831.1,2940-2958).
gctcacccttgcagttaaa

SEQ ID NO: 254851 - DNA, 19 bp, Homo sapiens
  siRNA target sequence for PER3 (NM_016831.1,3019-3037).
gtgcccacaaactgagtat

SEQ ID NO: 254852 - DNA, 19 bp, Homo sapiens
  siRNA target sequence for PER3 (NM_016831.1,3022-3040).
cccacaaactgagtattgt

SEQ ID NO: 254853 - DNA, 19 bp, Homo sapiens
  siRNA target sequence for PER3 (NM_016831.1,3024-3042).
cacaaactgagtattgtgt

SEQ ID NO: 254854 - DNA, 19 bp, Homo sapiens
  siRNA target sequence for PER3 (NM_016831.1,3366-3384).
gcagcgacagcagtatata

SEQ ID NO: 254855 - DNA, 19 bp, Homo sapiens
  siRNA target sequence for PER3 (NM_016831.1,3370-3388).
cgacagcagtatatacctt

SEQ ID NO: 254856 - DNA, 19 bp, Homo sapiens
  siRNA target sequence for PER3 (NM_016831.1,3376-3394).
cagtatataccttactagt

SEQ ID NO: 254857 - DNA, 19 bp, Homo sapiens
  siRNA target sequence for PER3 (NM_016831.1,3385-3403).
ccttactagtagtgtttat

SEQ ID NO: 254858 - DNA, 19 bp, Homo sapiens
  siRNA target sequence for PER3 (NM_016831.1,3435-3453).
ctcaggacgtacagaaaaa

SEQ ID NO: 254859 - DNA, 19 bp, Homo sapiens
  siRNA target sequence for PER3 (NM_016831.1,3507-3525).
cacctgagcgcattctcat

SEQ ID NO: 254860 - DNA, 19 bp, Homo sapiens
  siRNA target sequence for PER3 (NM_016831.1,3544-3562).
gagggttaaagaagttgta

SEQ ID NO: 254861 - DNA, 19 bp, Homo sapiens
  siRNA target sequence for PER3 (NM_016831.1,3575-3593).
ctggaaaagctagaaagta

SEQ ID NO: 254862 - DNA, 19 bp, Homo sapiens
  siRNA target sequence for PER3 (NM_016831.1,3637-3655).
gctggctaaggtgtataat

SEQ ID NO: 254863 - DNA, 19 bp, Homo sapiens
  siRNA target sequence for PER3 (NM_016831.1,3638-3656).
ctggctaaggtgtataatt

SEQ ID NO: 254864 - DNA, 19 bp, Homo sapiens
  siRNA target sequence for PER3 (NM_016831.1,3641-3659).
gctaaggtgtataattgga

SEQ ID NO: 254865 - DNA, 19 bp, Homo sapiens
  siRNA target sequence for PER3 (NM_016831.1,3642-3660).
ctaaggtgtataattggat

SEQ ID NO: 254866 - DNA, 19 bp, Homo sapiens
  siRNA target sequence for PER3 (NM_016831.1,3646-3664).
ggtgtataattggattcaa

SEQ ID NO: 254867 - DNA, 19 bp, Homo sapiens
  siRNA target sequence for PER3 (NM_016831.1,3672-3690).
ctgtcactcaagaaatcga

SEQ ID NO: 254868 - DNA, 19 bp, Homo sapiens
  siRNA target sequence for PER3 (NM_016831.1,3678-3696).
ctcaagaaatcgacattca

SEQ ID NO: 254869 - DNA, 19 bp, Homo sapiens
  siRNA target sequence for PLEKHB1 (NM_021200.1,460-478).
cgctctggaaagtcctttt

SEQ ID NO: 254870 - DNA, 19 bp, Homo sapiens
  siRNA target sequence for PLEKHB1 (NM_021200.1,621-639).
gtgtgctcatccacttcaa

SEQ ID NO: 254871 - DNA, 19 bp, Homo sapiens
  siRNA target sequence for PLEKHB1 (NM_021200.1,936-954).
gcccgtaccaagactacta

SEQ ID NO: 254872 - DNA, 19 bp, Homo sapiens
  siRNA target sequence for PLEKHB1 (NM_021200.1,1029-1047).
gcgtgacgcacgtgatagt

SEQ ID NO: 254873 - DNA, 19 bp, Homo sapiens
  siRNA target sequence for PPP1R12A (NM_002480.1,239-257).
cttgcattgatgacaatgt

SEQ ID NO: 254874 - DNA, 19 bp, Homo sapiens
  siRNA target sequence for PPP1R12A (NM_002480.1,449-467).
caatggaagagctacttca

SEQ ID NO: 254875 - DNA, 19 bp, Homo sapiens
  siRNA target sequence for PPP1R12A (NM_002480.1,517-535).
gaagaacggatcatgctta

SEQ ID NO: 254876 - DNA, 19 bp, Homo sapiens
  siRNA target sequence for PPP1R12A (NM_002480.1,541-559).
gccaggcagtggctaaata

SEQ ID NO: 254877 - DNA, 19 bp, Homo sapiens
  siRNA target sequence for PPP1R12A (NM_002480.1,543-561).
caggcagtggctaaatagt

SEQ ID NO: 254878 - DNA, 19 bp, Homo sapiens
  siRNA target sequence for PPP1R12A (NM_002480.1,560-578).
gtggtcatataaatgatgt

SEQ ID NO: 254879 - DNA, 19 bp, Homo sapiens
  siRNA target sequence for PPP1R12A (NM_002480.1,574-592).
gatgtccggcatgcaaaat

SEQ ID NO: 254880 - DNA, 19 bp, Homo sapiens
  siRNA target sequence for PPP1R12A (NM_002480.1,628-646).
ggctatacggaagttttaa

SEQ ID NO: 254881 - DNA, 19 bp, Homo sapiens
  siRNA target sequence for PPP1R12A (NM_002480.1,629-647).
gctatacggaagttttaaa

SEQ ID NO: 254882 - DNA, 19 bp, Homo sapiens
  siRNA target sequence for PPP1R12A (NM_002480.1,658-676).
caggcaggctatgatgtta

SEQ ID NO: 254883 - DNA, 19 bp, Homo sapiens
  siRNA target sequence for PPP1R12A (NM_002480.1,660-678).
ggcaggctatgatgttaat

SEQ ID NO: 254884 - DNA, 19 bp, Homo sapiens
  siRNA target sequence for PPP1R12A (NM_002480.1,746-764).
gaattttagtggacaatct

SEQ ID NO: 254885 - DNA, 19 bp, Homo sapiens
  siRNA target sequence for PPP1R12A (NM_002480.1,794-812).
gccaaacagcctttgatgt

SEQ ID NO: 254886 - DNA, 19 bp, Homo sapiens
  siRNA target sequence for PPP1R12A (NM_002480.1,804-822).
ctttgatgtagcagatgaa

SEQ ID NO: 254887 - DNA, 19 bp, Homo sapiens
  siRNA target sequence for PPP1R12A (NM_002480.1,957-975).
caaagagacgttgattatt

SEQ ID NO: 254888 - DNA, 19 bp, Homo sapiens
  siRNA target sequence for PPP1R12A (NM_002480.1,992-1010).
catcccgtattgaatctct

SEQ ID NO: 254889 - DNA, 19 bp, Homo sapiens
  siRNA target sequence for PPP1R12A (NM_002480.1,1056-1074).
gtctagctgctctagtgaa

SEQ ID NO: 254890 - DNA, 19 bp, Homo sapiens
  siRNA target sequence for PPP1R12A (NM_002480.1,1126-1144).
cccctggcttctgtaacta

SEQ ID NO: 254891 - DNA, 19 bp, Homo sapiens
  siRNA target sequence for PPP1R12A (NM_002480.1,1127-1145).
ccctggcttctgtaactaa

SEQ ID NO: 254892 - DNA, 19 bp, Homo sapiens
  siRNA target sequence for PPP1R12A (NM_002480.1,1217-1235).
cacctacatcacctattaa

SEQ ID NO: 254893 - DNA, 19 bp, Homo sapiens
  siRNA target sequence for PPP1R12A (NM_002480.1,1219-1237).
cctacatcacctattaaaa

SEQ ID NO: 254894 - DNA, 19 bp, Homo sapiens
  siRNA target sequence for PPP1R12A (NM_002480.1,1489-1507).
gttgcacctacaataccaa

SEQ ID NO: 254895 - DNA, 19 bp, Homo sapiens
  siRNA target sequence for PPP1R12A (NM_002480.1,1517-1535).
ccagtacatctgacattga

SEQ ID NO: 254896 - DNA, 19 bp, Homo sapiens
  siRNA target sequence for PPP1R12A (NM_002480.1,1566-1584).
gcgaacaagtagttcatat

SEQ ID NO: 254897 - DNA, 19 bp, Homo sapiens
  siRNA target sequence for PPP1R12A (NM_002480.1,1633-1651).
gaaggatcaacgtatcata

SEQ ID NO: 254898 - DNA, 19 bp, Homo sapiens
  siRNA target sequence for PPP1R12A (NM_002480.1,1636-1654).
ggatcaacgtatcataaaa

SEQ ID NO: 254899 - DNA, 19 bp, Homo sapiens
  siRNA target sequence for PPP1R12A (NM_002480.1,1675-1693).
caagatgatttgattagtt

SEQ ID NO: 254900 - DNA, 19 bp, Homo sapiens
  siRNA target sequence for PPP1R12A (NM_002480.1,1678-1696).
gatgatttgattagttcta

SEQ ID NO: 254901 - DNA, 19 bp, Homo sapiens
  siRNA target sequence for PPP1R12A (NM_002480.1,1699-1717).
gttccaagcaccacatcaa

SEQ ID NO: 254902 - DNA, 19 bp, Homo sapiens
  siRNA target sequence for PPP1R12A (NM_002480.1,1764-1782).
cagcacaagcactactaca

SEQ ID NO: 254903 - DNA, 19 bp, Homo sapiens
  siRNA target sequence for PPP1R12A (NM_002480.1,1766-1784).
gcacaagcactactacaaa

SEQ ID NO: 254904 - DNA, 19 bp, Homo sapiens
  siRNA target sequence for PPP1R12A (NM_002480.1,1769-1787).
caagcactactacaaagat

SEQ ID NO: 254905 - DNA, 19 bp, Homo sapiens
  siRNA target sequence for PPP1R12A (NM_002480.1,1773-1791).
cactactacaaagattaca

SEQ ID NO: 254906 - DNA, 19 bp, Homo sapiens
  siRNA target sequence for PPP1R12A (NM_002480.1,1839-1857).
gtgggctgaggatagtact

SEQ ID NO: 254907 - DNA, 19 bp, Homo sapiens
  siRNA target sequence for PPP1R12A (NM_002480.1,1988-2006).
gggagagacgcagatcata

SEQ ID NO: 254908 - DNA, 19 bp, Homo sapiens
  siRNA target sequence for PPP1R12A (NM_002480.1,2084-2102).
caacacagggagtgacatt

SEQ ID NO: 254909 - DNA, 19 bp, Homo sapiens
  siRNA target sequence for PPP1R12A (NM_002480.1,2271-2289).
gtactccagaacgtatgat

SEQ ID NO: 254910 - DNA, 19 bp, Homo sapiens
  siRNA target sequence for PPP1R12A (NM_002480.1,2290-2308).
gagacttaccagcgttata

SEQ ID NO: 254911 - DNA, 19 bp, Homo sapiens
  siRNA target sequence for PPP1R12A (NM_002480.1,2301-2319).
gcgttataggccagtatca

SEQ ID NO: 254912 - DNA, 19 bp, Homo sapiens
  siRNA target sequence for PPP1R12A (NM_002480.1,2302-2320).
cgttataggccagtatcaa

SEQ ID NO: 254913 - DNA, 19 bp, Homo sapiens
  siRNA target sequence for PPP1R12A (NM_002480.1,2310-2328).
gccagtatcaacttcaagt

SEQ ID NO: 254914 - DNA, 19 bp, Homo sapiens
  siRNA target sequence for PPP1R12A (NM_002480.1,2334-2352).
cactccatcctcttcactt

SEQ ID NO: 254915 - DNA, 19 bp, Homo sapiens
  siRNA target sequence for PPP1R12A (NM_002480.1,2373-2391).
gtatgcttcaagtcaacta

SEQ ID NO: 254916 - DNA, 19 bp, Homo sapiens
  siRNA target sequence for PPP1R12A (NM_002480.1,2386-2404).
caactaaacaggccaaata

SEQ ID NO: 254917 - DNA, 19 bp, Homo sapiens
  siRNA target sequence for PPP1R12A (NM_002480.1,2497-2515).
gataaatcacaacctaaat

SEQ ID NO: 254918 - DNA, 19 bp, Homo sapiens
  siRNA target sequence for PPP1R12A (NM_002480.1,2530-2548).
cgacgaccaagagagaaaa

SEQ ID NO: 254919 - DNA, 19 bp, Homo sapiens
  siRNA target sequence for PPP1R12A (NM_002480.1,2552-2570).
gatctacaggagtttcatt

SEQ ID NO: 254920 - DNA, 19 bp, Homo sapiens
  siRNA target sequence for PPP1R12A (NM_002480.1,2616-2634).
cacagaagagggatccaat

SEQ ID NO: 254921 - DNA, 19 bp, Homo sapiens
  siRNA target sequence for PPP1R12A (NM_002480.1,2620-2638).
gaagagggatccaataaga

SEQ ID NO: 254922 - DNA, 19 bp, Homo sapiens
  siRNA target sequence for PPP1R12A (NM_002480.1,2689-2707).
gctggtgatcgatatgatt

SEQ ID NO: 254923 - DNA, 19 bp, Homo sapiens
  siRNA target sequence for PPP1R12A (NM_002480.1,2693-2711).
gtgatcgatatgattcctt

SEQ ID NO: 254924 - DNA, 19 bp, Homo sapiens
  siRNA target sequence for PPP1R12A (NM_002480.1,2716-2734).
ggtcgctctggatcataca

SEQ ID NO: 254925 - DNA, 19 bp, Homo sapiens
  siRNA target sequence for PPP1R12A (NM_002480.1,2719-2737).
cgctctggatcatacagtt

SEQ ID NO: 254926 - DNA, 19 bp, Homo sapiens
  siRNA target sequence for PPP1R12A (NM_002480.1,2802-2820).
gctttatgaacaaattcta

SEQ ID NO: 254927 - DNA, 19 bp, Homo sapiens
  siRNA target sequence for PPP1R12A (NM_002480.1,2854-2872).
gatacaaatatggaactaa

SEQ ID NO: 254928 - DNA, 19 bp, Homo sapiens
  siRNA target sequence for PPP1R12A (NM_002480.1,2914-2932).
gaaagatttgctgatagat

SEQ ID NO: 254929 - DNA, 19 bp, Homo sapiens
  siRNA target sequence for PPP1R12A (NM_002480.1,3049-3067).
gaaaatggggccttgatca

SEQ ID NO: 254930 - DNA, 19 bp, Homo sapiens
  siRNA target sequence for PPP1R12A (NM_002480.1,3057-3075).
ggccttgatcagagttata

SEQ ID NO: 254931 - DNA, 19 bp, Homo sapiens
  siRNA target sequence for PPP1R12A (NM_002480.1,3063-3081).
gatcagagttataagcaaa

SEQ ID NO: 254932 - DNA, 19 bp, Homo sapiens
  siRNA target sequence for PWP2H (NM_005049.1,37-55).
gttcgcttaccggttttca

SEQ ID NO: 254933 - DNA, 19 bp, Homo sapiens
  siRNA target sequence for PWP2H (NM_005049.1,40-58).
cgcttaccggttttcaaat

SEQ ID NO: 254934 - DNA, 19 bp, Homo sapiens
  siRNA target sequence for PWP2H (NM_005049.1,41-59).
gcttaccggttttcaaatt

SEQ ID NO: 254935 - DNA, 19 bp, Homo sapiens
  siRNA target sequence for PWP2H (NM_005049.1,42-60).
cttaccggttttcaaattt

SEQ ID NO: 254936 - DNA, 19 bp, Homo sapiens
  siRNA target sequence for PWP2H (NM_005049.1,78-96).
ggcgtgggaacctaaattt

SEQ ID NO: 254937 - DNA, 19 bp, Homo sapiens
  siRNA target sequence for PWP2H (NM_005049.1,83-101).
gggaacctaaattttacct

SEQ ID NO: 254938 - DNA, 19 bp, Homo sapiens
  siRNA target sequence for PWP2H (NM_005049.1,121-139).
cagtcccgtgggcaataga

SEQ ID NO: 254939 - DNA, 19 bp, Homo sapiens
  siRNA target sequence for PWP2H (NM_005049.1,123-141).
gtcccgtgggcaatagagt

SEQ ID NO: 254940 - DNA, 19 bp, Homo sapiens
  siRNA target sequence for PWP2H (NM_005049.1,131-149).
ggcaatagagtcactgtat

SEQ ID NO: 254941 - DNA, 19 bp, Homo sapiens
  siRNA target sequence for PWP2H (NM_005049.1,132-150).
gcaatagagtcactgtatt

SEQ ID NO: 254942 - DNA, 19 bp, Homo sapiens
  siRNA target sequence for PWP2H (NM_005049.1,133-151).
caatagagtcactgtattt

SEQ ID NO: 254943 - DNA, 19 bp, Homo sapiens
  siRNA target sequence for PWP2H (NM_005049.1,348-366).
ctgatggcaggaagtttgt

SEQ ID NO: 254944 - DNA, 19 bp, Homo sapiens
  siRNA target sequence for PWP2H (NM_005049.1,408-426).
ggaagaagcgggagttcaa

SEQ ID NO: 254945 - DNA, 19 bp, Homo sapiens
  siRNA target sequence for PWP2H (NM_005049.1,579-597).
cactggggggacataagga

SEQ ID NO: 254946 - DNA, 19 bp, Homo sapiens
  siRNA target sequence for PWP2H (NM_005049.1,605-623).
gtggcctgcttctttgaat

SEQ ID NO: 254947 - DNA, 19 bp, Homo sapiens
  siRNA target sequence for PWP2H (NM_005049.1,609-627).
cctgcttctttgaatccaa

SEQ ID NO: 254948 - DNA, 19 bp, Homo sapiens
  siRNA target sequence for PWP2H (NM_005049.1,857-875).
cggctggccaagtacttct

SEQ ID NO: 254949 - DNA, 19 bp, Homo sapiens
  siRNA target sequence for PWP2H (NM_005049.1,960-978).
gaatcttccatcttcatga

SEQ ID NO: 254950 - DNA, 19 bp, Homo sapiens
  siRNA target sequence for PWP2H (NM_005049.1,1030-1048).
cgcctcagtggccatcaat

SEQ ID NO: 254951 - DNA, 19 bp, Homo sapiens
  siRNA target sequence for PWP2H (NM_005049.1,1031-1049).
gcctcagtggccatcaata

SEQ ID NO: 254952 - DNA, 19 bp, Homo sapiens
  siRNA target sequence for PWP2H (NM_005049.1,1283-1301).
gtgaccggtgtgaccttta

SEQ ID NO: 254953 - DNA, 19 bp, Homo sapiens
  siRNA target sequence for PWP2H (NM_005049.1,1500-1518).
caggcaggctccttgatgt

SEQ ID NO: 254954 - DNA, 19 bp, Homo sapiens
  siRNA target sequence for PWP2H (NM_005049.1,1502-1520).
ggcaggctccttgatgttt

SEQ ID NO: 254955 - DNA, 19 bp, Homo sapiens
  siRNA target sequence for PWP2H (NM_005049.1,1503-1521).
gcaggctccttgatgtttt

SEQ ID NO: 254956 - DNA, 19 bp, Homo sapiens
  siRNA target sequence for PWP2H (NM_005049.1,1539-1557).
ccatcagtggtctgtgttt

SEQ ID NO: 254957 - DNA, 19 bp, Homo sapiens
  siRNA target sequence for PWP2H (NM_005049.1,1540-1558).
catcagtggtctgtgtttt

SEQ ID NO: 254958 - DNA, 19 bp, Homo sapiens
  siRNA target sequence for PWP2H (NM_005049.1,1606-1624).
gcgcctatgggacatgttt

SEQ ID NO: 254959 - DNA, 19 bp, Homo sapiens
  siRNA target sequence for PWP2H (NM_005049.1,1610-1628).
ctatgggacatgtttgaca

SEQ ID NO: 254960 - DNA, 19 bp, Homo sapiens
  siRNA target sequence for PWP2H (NM_005049.1,1931-1949).
gtccgtgagcagattctca

SEQ ID NO: 254961 - DNA, 19 bp, Homo sapiens
  siRNA target sequence for PWP2H (NM_005049.1,2031-2049).
gcaacctggcactaattga

SEQ ID NO: 254962 - DNA, 19 bp, Homo sapiens
  siRNA target sequence for PWP2H (NM_005049.1,2032-2050).
caacctggcactaattgat

SEQ ID NO: 254963 - DNA, 19 bp, Homo sapiens
  siRNA target sequence for PWP2H (NM_005049.1,2113-2131).
gagttctcggcacttcaaa

SEQ ID NO: 254964 - DNA, 19 bp, Homo sapiens
  siRNA target sequence for PWP2H (NM_005049.1,2196-2214).
cggagggactcctcatcta

SEQ ID NO: 254965 - DNA, 19 bp, Homo sapiens
  siRNA target sequence for PWP2H (NM_005049.1,2377-2395).
gcccaggggcgagattgaa

SEQ ID NO: 254966 - DNA, 19 bp, Homo sapiens
  siRNA target sequence for PWP2H (NM_005049.1,2435-2453).
gtgctggagtttttagctt

SEQ ID NO: 254967 - DNA, 19 bp, Homo sapiens
  siRNA target sequence for RGS10 (NM_002925.2,149-167).
gaaggcgtgaaaagattta

SEQ ID NO: 254968 - DNA, 19 bp, Homo sapiens
  siRNA target sequence for RGS10 (NM_002925.2,208-226).
gttttggctagcatgtgaa

SEQ ID NO: 254969 - DNA, 19 bp, Homo sapiens
  siRNA target sequence for RGS10 (NM_002925.2,214-232).
gctagcatgtgaagatttt

SEQ ID NO: 254970 - DNA, 19 bp, Homo sapiens
  siRNA target sequence for RGS10 (NM_002925.2,215-233).
ctagcatgtgaagatttta

SEQ ID NO: 254971 - DNA, 19 bp, Homo sapiens
  siRNA target sequence for RGS13 (NM_002927.3,287-305).
caggcggaattgttggatt

SEQ ID NO: 254972 - DNA, 19 bp, Homo sapiens
  siRNA target sequence for RGS13 (NM_002927.3,422-440).
ctatgcagcatatttaaaa

SEQ ID NO: 254973 - DNA, 19 bp, Homo sapiens
  siRNA target sequence for RGS13 (NM_002927.3,444-462).
gagcacagtgacgagaata

SEQ ID NO: 254974 - DNA, 19 bp, Homo sapiens
  siRNA target sequence for RGS13 (NM_002927.3,446-464).
gcacagtgacgagaatatt

SEQ ID NO: 254975 - DNA, 19 bp, Homo sapiens
  siRNA target sequence for RGS13 (NM_002927.3,449-467).
cagtgacgagaatattcaa

SEQ ID NO: 254976 - DNA, 19 bp, Homo sapiens
  siRNA target sequence for RGS13 (NM_002927.3,451-469).
gtgacgagaatattcaatt

SEQ ID NO: 254977 - DNA, 19 bp, Homo sapiens
  siRNA target sequence for RGS13 (NM_002927.3,472-490).
ggatggcatgtgaaaccta

SEQ ID NO: 254978 - DNA, 19 bp, Homo sapiens
  siRNA target sequence for RGS13 (NM_002927.3,473-491).
gatggcatgtgaaacctat

SEQ ID NO: 254979 - DNA, 19 bp, Homo sapiens
  siRNA target sequence for RGS13 (NM_002927.3,481-499).
gtgaaacctataagaaaat

SEQ ID NO: 254980 - DNA, 19 bp, Homo sapiens
  siRNA target sequence for RGS13 (NM_002927.3,526-544).
gggcaaagaagctttataa

SEQ ID NO: 254981 - DNA, 19 bp, Homo sapiens
  siRNA target sequence for RGS13 (NM_002927.3,528-546).
gcaaagaagctttataaga

SEQ ID NO: 254982 - DNA, 19 bp, Homo sapiens
  siRNA target sequence for RGS13 (NM_002927.3,561-579).
cagtcccctagagagatta

SEQ ID NO: 254983 - DNA, 19 bp, Homo sapiens
  siRNA target sequence for RGS13 (NM_002927.3,592-610).
cgacaagagagactatcat

SEQ ID NO: 254984 - DNA, 19 bp, Homo sapiens
  siRNA target sequence for RGS13 (NM_002927.3,623-641).
ggaacccactgaaacatgt

SEQ ID NO: 254985 - DNA, 19 bp, Homo sapiens
  siRNA target sequence for RGS13 (NM_002927.3,624-642).
gaacccactgaaacatgtt

SEQ ID NO: 254986 - DNA, 19 bp, Homo sapiens
  siRNA target sequence for RGS13 (NM_002927.3,692-710).
ccccagatttctaaagtca

SEQ ID NO: 254987 - DNA, 19 bp, Homo sapiens
  siRNA target sequence for RGS13 (NM_002927.3,707-725).
gtcagaaatgtaccaaaaa

SEQ ID NO: 254988 - DNA, 19 bp, Homo sapiens
  siRNA target sequence for RGS17 (NM_012419.3,547-565).
ggctaggatgatatatgaa

SEQ ID NO: 254989 - DNA, 19 bp, Homo sapiens
  siRNA target sequence for RGS17 (NM_012419.3,614-632).
gttagagaggtgatcaata

SEQ ID NO: 254990 - DNA, 19 bp, Homo sapiens
  siRNA target sequence for RGS17 (NM_012419.3,671-689).
gcccaacttcagatatata

SEQ ID NO: 254991 - DNA, 19 bp, Homo sapiens
  siRNA target sequence for RGS18 (NM_130782.1,346-364).
gacacccgctccagtagat

SEQ ID NO: 254992 - DNA, 19 bp, Homo sapiens
  siRNA target sequence for RGS18 (NM_130782.1,348-366).
cacccgctccagtagatct

SEQ ID NO: 254993 - DNA, 19 bp, Homo sapiens
  siRNA target sequence for RGS18 (NM_130782.1,409-427).
gtgaaatggggtgaatcat

SEQ ID NO: 254994 - DNA, 19 bp, Homo sapiens
  siRNA target sequence for RGS18 (NM_130782.1,416-434).
ggggtgaatcatttgacaa

SEQ ID NO: 254995 - DNA, 19 bp, Homo sapiens
  siRNA target sequence for RGS18 (NM_130782.1,542-560).
gcaagggacctcaacaaat

SEQ ID NO: 254996 - DNA, 19 bp, Homo sapiens
  siRNA target sequence for RGS18 (NM_130782.1,543-561).
caagggacctcaacaaatt

SEQ ID NO: 254997 - DNA, 19 bp, Homo sapiens
  siRNA target sequence for RGS18 (NM_130782.1,609-627).
cccaaaagaggttaacctt

SEQ ID NO: 254998 - DNA, 19 bp, Homo sapiens
  siRNA target sequence for RGS18 (NM_130782.1,785-803).
ctcagagaccaacaaatct

SEQ ID NO: 254999 - DNA, 19 bp, Homo sapiens
  siRNA target sequence for RGS18 (NM_130782.1,807-825).
gagacgatcacgctcattt

SEQ ID NO: 255000 - DNA, 19 bp, Homo sapiens
  siRNA target sequence for RGS18 (NM_130782.1,811-829).
cgatcacgctcatttacct

SEQ ID NO: 255001 - DNA, 19 bp, Homo sapiens
  siRNA target sequence for RGS18 (NM_130782.1,835-853).
gaattccaagatgtacaat

SEQ ID NO: 255002 - DNA, 19 bp, Homo sapiens
  siRNA target sequence for RGS3 (NM_017790.2,84-102).
gggttggccagaaggaatt

SEQ ID NO: 255003 - DNA, 19 bp, Homo sapiens
  siRNA target sequence for RGS3 (NM_017790.2,468-486).
gcaaggcagacaaaatgat

SEQ ID NO: 255004 - DNA, 19 bp, Homo sapiens
  siRNA target sequence for RGS3 (NM_017790.2,866-884).
ctctacctggaccttatta

SEQ ID NO: 255005 - DNA, 19 bp, Homo sapiens
  siRNA target sequence for RGS3 (NM_021106.2,909-927).
ccttccaccctgtcaagat

SEQ ID NO: 255006 - DNA, 19 bp, Homo sapiens
  siRNA target sequence for RGS3 (NM_021106.2,1412-1430).
cgcccagcaccctcaagaa

SEQ ID NO: 255007 - DNA, 19 bp, Homo sapiens
  siRNA target sequence for RGS3 (NM_130795.1,575-593).
gctgccacctggtatgtga

SEQ ID NO: 255008 - DNA, 19 bp, Homo sapiens
  siRNA target sequence for RGS3 (NM_130795.1,698-716).
ccgaccccaactacatcat

SEQ ID NO: 255009 - DNA, 19 bp, Homo sapiens
  siRNA target sequence for RGS3 (NM_130795.1,868-886).
ggccacgggaactaccaaa

SEQ ID NO: 255010 - DNA, 19 bp, Homo sapiens
  siRNA target sequence for RGS3 (NM_130795.1,869-887).
gccacgggaactaccaaaa

SEQ ID NO: 255011 - DNA, 19 bp, Homo sapiens
  siRNA target sequence for RGS3 (NM_130795.1,871-889).
cacgggaactaccaaaact

SEQ ID NO: 255012 - DNA, 19 bp, Homo sapiens
  siRNA target sequence for RGS3 (NM_130795.1,957-975).
cctggtgttccctgtcttt

SEQ ID NO: 255013 - DNA, 19 bp, Homo sapiens
  siRNA target sequence for RGS3 (NM_130795.1,981-999).
gcctctagatctctgtaat

SEQ ID NO: 255014 - DNA, 19 bp, Homo sapiens
  siRNA target sequence for RGS3 (NM_130795.1,1219-1237).
gagaaggcagagtgcttat

SEQ ID NO: 255015 - DNA, 19 bp, Homo sapiens
  siRNA target sequence for RGS3 (NM_130795.1,1283-1301).
ggtgcctgtcggagaacat

SEQ ID NO: 255016 - DNA, 19 bp, Homo sapiens
  siRNA target sequence for RGS3 (NM_144488.1,137-155).
gggttctgctgcttcacat

SEQ ID NO: 255017 - DNA, 19 bp, Homo sapiens
  siRNA target sequence for RGS3 (NM_144488.1,225-243).
ccctgaagatagtagacta

SEQ ID NO: 255018 - DNA, 19 bp, Homo sapiens
  siRNA target sequence for RGS3 (NM_144488.1,287-305).
ctttccacgagcacttctt

SEQ ID NO: 255019 - DNA, 19 bp, Homo sapiens
  siRNA target sequence for RGS5 (NM_003617.1,176-194).
cagttggtgaccttgtcat

SEQ ID NO: 255020 - DNA, 19 bp, Homo sapiens
  siRNA target sequence for RGS5 (NM_003617.1,190-208).
gtcattccgtacaatgaga

SEQ ID NO: 255021 - DNA, 19 bp, Homo sapiens
  siRNA target sequence for RGS5 (NM_003617.1,362-380).
ggattgcctgtgaggatta

SEQ ID NO: 255022 - DNA, 19 bp, Homo sapiens
  siRNA target sequence for RGS5 (NM_003617.1,454-472).
gctcctaaagaggtgaata

SEQ ID NO: 255023 - DNA, 19 bp, Homo sapiens
  siRNA target sequence for RGS5 (NM_003617.1,588-606).
ctttgtgcgctctgagttt

SEQ ID NO: 255024 - DNA, 19 bp, Homo sapiens
  siRNA target sequence for RGS5 (NM_003617.1,601-619).
gagttttatcaggagttaa

SEQ ID NO: 255025 - DNA, 19 bp, Homo sapiens
  siRNA target sequence for RGS8 (NM_033345.1,213-231).
gtcagactcgtgtagtgat

SEQ ID NO: 255026 - DNA, 19 bp, Homo sapiens
  siRNA target sequence for RGS8 (NM_033345.1,215-233).
cagactcgtgtagtgattt

SEQ ID NO: 255027 - DNA, 19 bp, Homo sapiens
  siRNA target sequence for RGS8 (NM_033345.1,217-235).
gactcgtgtagtgatttca

SEQ ID NO: 255028 - DNA, 19 bp, Homo sapiens
  siRNA target sequence for RGS8 (NM_033345.1,219-237).
ctcgtgtagtgatttcaca

SEQ ID NO: 255029 - DNA, 19 bp, Homo sapiens
  siRNA target sequence for RGS8 (NM_033345.1,261-279).
ccgcgctctcaagagatta

SEQ ID NO: 255030 - DNA, 19 bp, Homo sapiens
  siRNA target sequence for RGS8 (NM_033345.1,262-280).
cgcgctctcaagagattat

SEQ ID NO: 255031 - DNA, 19 bp, Homo sapiens
  siRNA target sequence for RGS8 (NM_033345.1,273-291).
gagattatcgacagaagaa

SEQ ID NO: 255032 - DNA, 19 bp, Homo sapiens
  siRNA target sequence for RGS8 (NM_033345.1,302-320).
gggcagattcctttgatgt

SEQ ID NO: 255033 - DNA, 19 bp, Homo sapiens
  siRNA target sequence for RGS8 (NM_033345.1,319-337).
gtgcttctctctcataagt

SEQ ID NO: 255034 - DNA, 19 bp, Homo sapiens
  siRNA target sequence for RGS8 (NM_033345.1,350-368).
cattccgtgccttcttgaa

SEQ ID NO: 255035 - DNA, 19 bp, Homo sapiens
  siRNA target sequence for RGS8 (NM_033345.1,428-446).
ccaggtcaactgcaaaact

SEQ ID NO: 255036 - DNA, 19 bp, Homo sapiens
  siRNA target sequence for RGS8 (NM_033345.1,497-515).
cacgggaggtaaacattga

SEQ ID NO: 255037 - DNA, 19 bp, Homo sapiens
  siRNA target sequence for RGS8 (NM_033345.1,635-653).
ggtccaaaatgtacttaga

SEQ ID NO: 255038 - DNA, 19 bp, Homo sapiens
  siRNA target sequence for RGS8 (NM_033345.1,636-654).
gtccaaaatgtacttagat

SEQ ID NO: 255039 - DNA, 19 bp, Homo sapiens
  siRNA target sequence for RGS8 (NM_033345.1,638-656).
ccaaaatgtacttagatct

SEQ ID NO: 255040 - DNA, 19 bp, Homo sapiens
  siRNA target sequence for RGSL1 (NM_181572.2,124-142).
gatcagtgatgactacaaa

SEQ ID NO: 255041 - DNA, 19 bp, Homo sapiens
  siRNA target sequence for RGSL1 (NM_181572.2,131-149).
gatgactacaaaatatact

SEQ ID NO: 255042 - DNA, 19 bp, Homo sapiens
  siRNA target sequence for RGSL1 (NM_181572.2,150-168).
gtgagaaagcacctaaaat

SEQ ID NO: 255043 - DNA, 19 bp, Homo sapiens
  siRNA target sequence for RGSL1 (NM_181572.2,206-224).
gtttcacgctcaaatagga

SEQ ID NO: 255044 - DNA, 19 bp, Homo sapiens
  siRNA target sequence for RGSL1 (NM_181572.2,210-228).
cacgctcaaataggaaaat

SEQ ID NO: 255045 - DNA, 19 bp, Homo sapiens
  siRNA target sequence for RGSL1 (NM_181572.2,212-230).
cgctcaaataggaaaatgt

SEQ ID NO: 255046 - DNA, 19 bp, Homo sapiens
  siRNA target sequence for RGSL1 (NM_181572.2,251-269).
gtaaggaagccatcaatga

SEQ ID NO: 255047 - DNA, 19 bp, Homo sapiens
  siRNA target sequence for RGSL1 (NM_181572.2,346-364).
ggctaaaatcccattgcaa

SEQ ID NO: 255048 - DNA, 19 bp, Homo sapiens
  siRNA target sequence for RGSL1 (NM_181572.2,348-366).
ctaaaatcccattgcaatt

SEQ ID NO: 255049 - DNA, 19 bp, Homo sapiens
  siRNA target sequence for RGSL1 (NM_181572.2,388-406).
cagtatagagaccaatgaa

SEQ ID NO: 255050 - DNA, 19 bp, Homo sapiens
  siRNA target sequence for RGSL1 (NM_181572.2,420-438).
ctctcatagaaaatgtaat

SEQ ID NO: 255051 - DNA, 19 bp, Homo sapiens
  siRNA target sequence for RGSL1 (NM_181572.2,486-504).
gtgatgcccctattatcaa

SEQ ID NO: 255052 - DNA, 19 bp, Homo sapiens
  siRNA target sequence for RGSL1 (NM_181572.2,491-509).
gcccctattatcaaagaaa

SEQ ID NO: 255053 - DNA, 19 bp, Homo sapiens
  siRNA target sequence for RGSL1 (NM_181572.2,529-547).
caccacaagcacactgtta

SEQ ID NO: 255054 - DNA, 19 bp, Homo sapiens
  siRNA target sequence for RGSL1 (NM_181572.2,553-571).
ccagggacatgttatgaaa

SEQ ID NO: 255055 - DNA, 19 bp, Homo sapiens
  siRNA target sequence for RGSL1 (NM_181572.2,556-574).
gggacatgttatgaaatct

SEQ ID NO: 255056 - DNA, 19 bp, Homo sapiens
  siRNA target sequence for RGSL1 (NM_181572.2,666-684).
ggaagccctcaaagatagt

SEQ ID NO: 255057 - DNA, 19 bp, Homo sapiens
  siRNA target sequence for RGSL1 (NM_181572.2,679-697).
gatagtgtcaacttaccta

SEQ ID NO: 255058 - DNA, 19 bp, Homo sapiens
  siRNA target sequence for RGSL1 (NM_181572.2,753-771).
gcaagtaccgcagatttat

SEQ ID NO: 255059 - DNA, 19 bp, Homo sapiens
  siRNA target sequence for RGSL1 (NM_181572.2,760-778).
ccgcagatttatgttgaat

SEQ ID NO: 255060 - DNA, 19 bp, Homo sapiens
  siRNA target sequence for RGSL1 (NM_181572.2,780-798).
ctagtaagcgccaggaatt

SEQ ID NO: 255061 - DNA, 19 bp, Homo sapiens
  siRNA target sequence for RGSL1 (NM_181572.2,783-801).
gtaagcgccaggaatttga

SEQ ID NO: 255062 - DNA, 19 bp, Homo sapiens
  siRNA target sequence for RGSL1 (NM_181572.2,928-946).
ccttgtaaagcgtcgtata

SEQ ID NO: 255063 - DNA, 19 bp, Homo sapiens
  siRNA target sequence for RGSL1 (NM_181572.2,929-947).
cttgtaaagcgtcgtatat

SEQ ID NO: 255064 - DNA, 19 bp, Homo sapiens
  siRNA target sequence for RGSL1 (NM_181572.2,970-988).
caactttgcgatcaatgat

SEQ ID NO: 255065 - DNA, 19 bp, Homo sapiens
  siRNA target sequence for RGSL1 (NM_181572.2,977-995).
gcgatcaatgatctatatt

SEQ ID NO: 255066 - DNA, 19 bp, Homo sapiens
  siRNA target sequence for RGSL1 (NM_181572.2,978-996).
cgatcaatgatctatattt

SEQ ID NO: 255067 - DNA, 19 bp, Homo sapiens
  siRNA target sequence for RGSL1 (NM_181572.2,1049-1067).
caggtcaaccgggcatata

SEQ ID NO: 255068 - DNA, 19 bp, Homo sapiens
  siRNA target sequence for RGSL1 (NM_181572.2,1051-1069).
ggtcaaccgggcatataat

SEQ ID NO: 255069 - DNA, 19 bp, Homo sapiens
  siRNA target sequence for RGSL1 (NM_181572.2,1057-1075).
ccgggcatataatgagaat

SEQ ID NO: 255070 - DNA, 19 bp, Homo sapiens
  siRNA target sequence for RGSL1 (NM_181572.2,1059-1077).
gggcatataatgagaatga

SEQ ID NO: 255071 - DNA, 19 bp, Homo sapiens
  siRNA target sequence for RGSL1 (NM_181572.2,1085-1103).
ctaatgcggtccaaaatga

SEQ ID NO: 255072 - DNA, 19 bp, Homo sapiens
  siRNA target sequence for RGSL1 (NM_181572.2,1090-1108).
gcggtccaaaatgaacatt

SEQ ID NO: 255073 - DNA, 19 bp, Homo sapiens
  siRNA target sequence for RGSL1 (NM_181572.2,1091-1109).
cggtccaaaatgaacatta

SEQ ID NO: 255074 - DNA, 19 bp, Homo sapiens
  siRNA target sequence for RGSL1 (NM_181572.2,1092-1110).
ggtccaaaatgaacattat

SEQ ID NO: 255075 - DNA, 19 bp, Homo sapiens
  siRNA target sequence for RGSL1 (NM_181572.2,1095-1113).
ccaaaatgaacattatcca

SEQ ID NO: 255076 - DNA, 19 bp, Homo sapiens
  siRNA target sequence for RGSL1 (NM_181572.2,1247-1265).
gtcttccccgttgttatgt

SEQ ID NO: 255077 - DNA, 19 bp, Homo sapiens
  siRNA target sequence for RGSL1 (NM_181572.2,1253-1271).
cccgttgttatgtacttct

SEQ ID NO: 255078 - DNA, 19 bp, Homo sapiens
  siRNA target sequence for RGSL1 (NM_181572.2,1299-1317).
cccgctcttacttacagta

SEQ ID NO: 255079 - DNA, 19 bp, Homo sapiens
  siRNA target sequence for RGSL1 (NM_181572.2,1300-1318).
ccgctcttacttacagtat

SEQ ID NO: 255080 - DNA, 19 bp, Homo sapiens
  siRNA target sequence for RGSL1 (NM_181572.2,1301-1319).
cgctcttacttacagtata

SEQ ID NO: 255081 - DNA, 19 bp, Homo sapiens
  siRNA target sequence for RGSL1 (NM_181572.2,1359-1377).
ctacggacaagtatccttt

SEQ ID NO: 255082 - DNA, 19 bp, Homo sapiens
  siRNA target sequence for RGSL1 (NM_181572.2,1378-1396).
ctcgagtggaggagacaat

SEQ ID NO: 255083 - DNA, 19 bp, Homo sapiens
  siRNA target sequence for RGSL1 (NM_181572.2,1388-1406).
ggagacaatgccatcttaa

SEQ ID NO: 255084 - DNA, 19 bp, Homo sapiens
  siRNA target sequence for RGSL1 (NM_181572.2,1391-1409).
gacaatgccatcttaaggt

SEQ ID NO: 255085 - DNA, 19 bp, Homo sapiens
  siRNA target sequence for RGSL1 (NM_181572.2,1411-1429).
caccttgctcagaggtatt

SEQ ID NO: 255086 - DNA, 19 bp, Homo sapiens
  siRNA target sequence for RGSL1 (NM_181572.2,1442-1460).
cctcaacgggaagcaataa

SEQ ID NO: 255087 - DNA, 19 bp, Homo sapiens
  siRNA target sequence for RGSL1 (NM_181572.2,1450-1468).
ggaagcaataagttcagtt

SEQ ID NO: 255088 - DNA, 19 bp, Homo sapiens
  siRNA target sequence for RGSL1 (NM_181572.2,1454-1472).
gcaataagttcagttcaaa

SEQ ID NO: 255089 - DNA, 19 bp, Homo sapiens
  siRNA target sequence for RGSL1 (NM_181572.2,1534-1552).
cgtccagggacaaaaatta

SEQ ID NO: 255090 - DNA, 19 bp, Homo sapiens
  siRNA target sequence for RGSL2 (NM_032267.1,15-33).
cagtgctgagataattggt

SEQ ID NO: 255091 - DNA, 19 bp, Homo sapiens
  siRNA target sequence for RGSL2 (NM_032267.1,22-40).
gagataattggttctacaa

SEQ ID NO: 255092 - DNA, 19 bp, Homo sapiens
  siRNA target sequence for RGSL2 (NM_032267.1,31-49).
ggttctacaaatcttataa

SEQ ID NO: 255093 - DNA, 19 bp, Homo sapiens
  siRNA target sequence for RGSL2 (NM_032267.1,74-92).
ccgattttttcaacacatt

SEQ ID NO: 255094 - DNA, 19 bp, Homo sapiens
  siRNA target sequence for RGSL2 (NM_032267.1,117-135).
gacaccattttatactgtt

SEQ ID NO: 255095 - DNA, 19 bp, Homo sapiens
  siRNA target sequence for RGSL2 (NM_032267.1,163-181).
gaaataccttgtaacttga

SEQ ID NO: 255096 - DNA, 19 bp, Homo sapiens
  siRNA target sequence for RGSL2 (NM_032267.1,173-191).
gtaacttgattgccaaata

SEQ ID NO: 255097 - DNA, 19 bp, Homo sapiens
  siRNA target sequence for RGSL2 (NM_032267.1,213-231).
ggaaaaatgccgattacct

SEQ ID NO: 255098 - DNA, 19 bp, Homo sapiens
  siRNA target sequence for RGSL2 (NM_032267.1,214-232).
gaaaaatgccgattacctt

SEQ ID NO: 255099 - DNA, 19 bp, Homo sapiens
  siRNA target sequence for RGSL2 (NM_032267.1,223-241).
cgattacctttcttctgta

SEQ ID NO: 255100 - DNA, 19 bp, Homo sapiens
  siRNA target sequence for RGSL2 (NM_032267.1,268-286).
ctctgtcaggagttcatca

SEQ ID NO: 255101 - DNA, 19 bp, Homo sapiens
  siRNA target sequence for RGSL2 (NM_032267.1,276-294).
ggagttcatcagtttcatt

SEQ ID NO: 255102 - DNA, 19 bp, Homo sapiens
  siRNA target sequence for RGSL2 (NM_032267.1,344-362).
ggctactccagaaatgcat

SEQ ID NO: 255103 - DNA, 19 bp, Homo sapiens
  siRNA target sequence for RGSL2 (NM_032267.1,345-363).
gctactccagaaatgcatt

SEQ ID NO: 255104 - DNA, 19 bp, Homo sapiens
  siRNA target sequence for RGSL2 (NM_032267.1,376-394).
gggatgtggcgcttctatt

SEQ ID NO: 255105 - DNA, 19 bp, Homo sapiens
  siRNA target sequence for RGSL2 (NM_032267.1,548-566).
gggtggtaaccctctgtaa

SEQ ID NO: 255106 - DNA, 19 bp, Homo sapiens
  siRNA target sequence for RGSL2 (NM_032267.1,557-575).
ccctctgtaacatgaacat

SEQ ID NO: 255107 - DNA, 19 bp, Homo sapiens
  siRNA target sequence for RGSL2 (NM_032267.1,767-785).
gcttatacagcgtttgcta

SEQ ID NO: 255108 - DNA, 19 bp, Homo sapiens
  siRNA target sequence for RGSL2 (NM_032267.1,799-817).
gggctccctctgaacatga

SEQ ID NO: 255109 - DNA, 19 bp, Homo sapiens
  siRNA target sequence for RGSL2 (NM_032267.1,872-890).
ggaagatgtggcaattggt

SEQ ID NO: 255110 - DNA, 19 bp, Homo sapiens
  siRNA target sequence for RGSL2 (NM_032267.1,924-942).
caagccagatgctattggt

SEQ ID NO: 255111 - DNA, 19 bp, Homo sapiens
  siRNA target sequence for RGSL2 (NM_032267.1,1051-1069).
cattatgcaaaaatatcca

SEQ ID NO: 255112 - DNA, 19 bp, Homo sapiens
  siRNA target sequence for RGSL2 (NM_032267.1,1169-1187).
cctccaagatgacaattca

SEQ ID NO: 255113 - DNA, 19 bp, Homo sapiens
  siRNA target sequence for RGSL2 (NM_032267.1,1346-1364).
gtgtccttctgaataacaa

SEQ ID NO: 255114 - DNA, 19 bp, Homo sapiens
  siRNA target sequence for RGSL2 (NM_032267.1,1441-1459).
ccgtgcttaccactcaaat

SEQ ID NO: 255115 - DNA, 19 bp, Homo sapiens
  siRNA target sequence for RGSL2 (NM_032267.1,1451-1469).
cactcaaatcccaaaccat

SEQ ID NO: 255116 - DNA, 19 bp, Homo sapiens
  siRNA target sequence for RGSL2 (NM_032267.1,1471-1489).
cagggcctgaaggaactat

SEQ ID NO: 255117 - DNA, 19 bp, Homo sapiens
  siRNA target sequence for RGSL2 (NM_032267.1,1548-1566).
gctcagtccctggtatgat

SEQ ID NO: 255118 - DNA, 19 bp, Homo sapiens
  siRNA target sequence for RGSL2 (NM_032267.1,1553-1571).
gtccctggtatgatgagtt

SEQ ID NO: 255119 - DNA, 19 bp, Homo sapiens
  siRNA target sequence for RGSL2 (NM_032267.1,1556-1574).
cctggtatgatgagtttct

SEQ ID NO: 255120 - DNA, 19 bp, Homo sapiens
  siRNA target sequence for RTN1 (NM_021136.1,390-408).
gaccacaccttctcaacaa

SEQ ID NO: 255121 - DNA, 19 bp, Homo sapiens
  siRNA target sequence for RTN1 (NM_021136.1,420-438).
ggggaaggatcgtgttaca

SEQ ID NO: 255122 - DNA, 19 bp, Homo sapiens
  siRNA target sequence for RTN1 (NM_021136.1,422-440).
ggaaggatcgtgttacaca

SEQ ID NO: 255123 - DNA, 19 bp, Homo sapiens
  siRNA target sequence for RTN1 (NM_021136.1,468-486).
cctcaggaggattctacat

SEQ ID NO: 255124 - DNA, 19 bp, Homo sapiens
  siRNA target sequence for RTN1 (NM_021136.1,469-487).
ctcaggaggattctacata

SEQ ID NO: 255125 - DNA, 19 bp, Homo sapiens
  siRNA target sequence for RTN1 (NM_021136.1,576-594).
gatgtgcctgggatagagt

SEQ ID NO: 255126 - DNA, 19 bp, Homo sapiens
  siRNA target sequence for RTN1 (NM_021136.1,591-609).
gagtctcgtggcttattta

SEQ ID NO: 255127 - DNA, 19 bp, Homo sapiens
  siRNA target sequence for RTN1 (NM_021136.1,593-611).
gtctcgtggcttatttagt

SEQ ID NO: 255128 - DNA, 19 bp, Homo sapiens
  siRNA target sequence for RTN1 (NM_021136.1,613-631).
ctgattctggaatagagat

SEQ ID NO: 255129 - DNA, 19 bp, Homo sapiens
  siRNA target sequence for RTN1 (NM_021136.1,674-692).
ccctctggaccagatgaaa

SEQ ID NO: 255130 - DNA, 19 bp, Homo sapiens
  siRNA target sequence for RTN1 (NM_021136.1,756-774).
caccccgagctggaagata

SEQ ID NO: 255131 - DNA, 19 bp, Homo sapiens
  siRNA target sequence for RTN1 (NM_021136.1,760-778).
ccgagctggaagataaaga

SEQ ID NO: 255132 - DNA, 19 bp, Homo sapiens
  siRNA target sequence for RTN1 (NM_021136.1,798-816).
gacactgacatctcaatta

SEQ ID NO: 255133 - DNA, 19 bp, Homo sapiens
  siRNA target sequence for RTN1 (NM_021136.1,855-873).
gtggagggaaaaatcatca

SEQ ID NO: 255134 - DNA, 19 bp, Homo sapiens
  siRNA target sequence for RTN1 (NM_021136.1,872-890).
caaggaccatttattggaa

SEQ ID NO: 255135 - DNA, 19 bp, Homo sapiens
  siRNA target sequence for RTN1 (NM_021136.1,876-894).
gaccatttattggaagaat

SEQ ID NO: 255136 - DNA, 19 bp, Homo sapiens
  siRNA target sequence for RTN1 (NM_021136.1,980-998).
ggaaatagaaccttctgtt

SEQ ID NO: 255137 - DNA, 19 bp, Homo sapiens
  siRNA target sequence for RTN1 (NM_021136.1,1187-1205).
gctgatcaccgccatcaaa

SEQ ID NO: 255138 - DNA, 19 bp, Homo sapiens
  siRNA target sequence for RTN1 (NM_021136.1,1206-1224).
gaagcaaagggattatcgt

SEQ ID NO: 255139 - DNA, 19 bp, Homo sapiens
  siRNA target sequence for RTN1 (NM_021136.1,1401-1419).
ctgccctcaggctatgtga

SEQ ID NO: 255140 - DNA, 19 bp, Homo sapiens
  siRNA target sequence for RTN1 (NM_021136.1,1791-1809).
gactcgagttccaaccaaa

SEQ ID NO: 255141 - DNA, 19 bp, Homo sapiens
  siRNA target sequence for RTN1 (NM_021136.1,1872-1890).
ctcaataagcaaaaagcta

SEQ ID NO: 255142 - DNA, 19 bp, Homo sapiens
  siRNA target sequence for RTN1 (NM_021136.1,2037-2055).
cgcatctacaagtctgttt

SEQ ID NO: 255143 - DNA, 19 bp, Homo sapiens
  siRNA target sequence for RTN1 (NM_021136.1,2098-2116).
cctacttggagcttgagat

SEQ ID NO: 255144 - DNA, 19 bp, Homo sapiens
  siRNA target sequence for RTN1 (NM_021136.1,2149-2167).
cggactgcctgcagttcta

SEQ ID NO: 255145 - DNA, 19 bp, Homo sapiens
  siRNA target sequence for RTN1 (NM_021136.1,2216-2234).
cctggtggattccttaaaa

SEQ ID NO: 255146 - DNA, 19 bp, Homo sapiens
  siRNA target sequence for RTN1 (NM_021136.1,2264-2282).
cgttggcgctctcttcaat

SEQ ID NO: 255147 - DNA, 19 bp, Homo sapiens
  siRNA target sequence for RTN1 (NM_021136.1,2309-2327).
ggtttcaatgtttactcta

SEQ ID NO: 255148 - DNA, 19 bp, Homo sapiens
  siRNA target sequence for RTN1 (NM_021136.1,2323-2341).
ctctacctgtagtgtatgt

SEQ ID NO: 255149 - DNA, 19 bp, Homo sapiens
  siRNA target sequence for RTN1 (NM_021136.1,2329-2347).
ctgtagtgtatgttaagca

SEQ ID NO: 255150 - DNA, 19 bp, Homo sapiens
  siRNA target sequence for RTN1 (NM_021136.1,2376-2394).
cttgtgaggactcacataa

SEQ ID NO: 255151 - DNA, 19 bp, Homo sapiens
  siRNA target sequence for RTN2 (NM_005619.2,311-329).
gggaacgacgactctgatt

SEQ ID NO: 255152 - DNA, 19 bp, Homo sapiens
  siRNA target sequence for RTN2 (NM_005619.2,312-330).
ggaacgacgactctgattt

SEQ ID NO: 255153 - DNA, 19 bp, Homo sapiens
  siRNA target sequence for RTN2 (NM_005619.2,313-331).
gaacgacgactctgatttt

SEQ ID NO: 255154 - DNA, 19 bp, Homo sapiens
  siRNA target sequence for RTN2 (NM_005619.2,747-765).
cccaagaacccaacagatt

SEQ ID NO: 255155 - DNA, 19 bp, Homo sapiens
  siRNA target sequence for RTN2 (NM_005619.2,894-912).
cccgatcgcgagattcgaa

SEQ ID NO: 255156 - DNA, 19 bp, Homo sapiens
  siRNA target sequence for RTN2 (NM_005619.2,997-1015).
cgatagcacggaccaatta

SEQ ID NO: 255157 - DNA, 19 bp, Homo sapiens
  siRNA target sequence for RTN2 (NM_005619.2,1002-1020).
gcacggaccaattagaatt

SEQ ID NO: 255158 - DNA, 19 bp, Homo sapiens
  siRNA target sequence for RTN2 (NM_005619.2,1040-1058).
ctaggaacagctatggaat

SEQ ID NO: 255159 - DNA, 19 bp, Homo sapiens
  siRNA target sequence for RTN2 (NM_005619.2,1049-1067).
gctatggaatggttaaaga

SEQ ID NO: 255160 - DNA, 19 bp, Homo sapiens
  siRNA target sequence for RTN2 (NM_005619.2,1076-1094).
cttttggctgtttacaaga

SEQ ID NO: 255161 - DNA, 19 bp, Homo sapiens
  siRNA target sequence for RTN2 (NM_005619.2,1095-1113).
cggttccaattttggaatt

SEQ ID NO: 255162 - DNA, 19 bp, Homo sapiens
  siRNA target sequence for RTN2 (NM_005619.2,1173-1191).
ctgtcctccgggttctact

SEQ ID NO: 255163 - DNA, 19 bp, Homo sapiens
  siRNA target sequence for RTN2 (NM_005619.2,1245-1263).
ccgatatggggagtaaagt

SEQ ID NO: 255164 - DNA, 19 bp, Homo sapiens
  siRNA target sequence for RTN2 (NM_005619.2,1648-1666).
catcttcaatggtttgact

SEQ ID NO: 255165 - DNA, 19 bp, Homo sapiens
  siRNA target sequence for RTN2 (NM_005619.2,1679-1697).
ggagtgattggtctattca

SEQ ID NO: 255166 - DNA, 19 bp, Homo sapiens
  siRNA target sequence for RTN2 (NM_005619.2,1728-1746).
ctcagatcgaccaatatgt

SEQ ID NO: 255167 - DNA, 19 bp, Homo sapiens
  siRNA target sequence for RTN2 (NM_005619.2,1781-1799).
gctaagatccgagctaaaa

SEQ ID NO: 255168 - DNA, 19 bp, Homo sapiens
  siRNA target sequence for RTN2 (NM_005619.2,1782-1800).
ctaagatccgagctaaaat

SEQ ID NO: 255169 - DNA, 19 bp, Homo sapiens
  siRNA target sequence for RTN2 (NM_005619.2,1834-1852).
cgcagtctccggatccaaa

SEQ ID NO: 255170 - DNA, 19 bp, Homo sapiens
  siRNA target sequence for SH3BP4 (NM_014521.1,410-428).
cctgagcgaagggttttca

SEQ ID NO: 255171 - DNA, 19 bp, Homo sapiens
  siRNA target sequence for SH3BP4 (NM_014521.1,427-445).
cagagacgagctttaatga

SEQ ID NO: 255172 - DNA, 19 bp, Homo sapiens
  siRNA target sequence for SH3BP4 (NM_014521.1,429-447).
gagacgagctttaatgaca

SEQ ID NO: 255173 - DNA, 19 bp, Homo sapiens
  siRNA target sequence for SH3BP4 (NM_014521.1,433-451).
cgagctttaatgacatcaa

SEQ ID NO: 255174 - DNA, 19 bp, Homo sapiens
  siRNA target sequence for SH3BP4 (NM_014521.1,436-454).
gctttaatgacatcaaagt

SEQ ID NO: 255175 - DNA, 19 bp, Homo sapiens
  siRNA target sequence for SH3BP4 (NM_014521.1,466-484).
gtgccttgctcgtagacaa

SEQ ID NO: 255176 - DNA, 19 bp, Homo sapiens
  siRNA target sequence for SH3BP4 (NM_014521.1,565-583).
ccaagggcgaccatctcta

SEQ ID NO: 255177 - DNA, 19 bp, Homo sapiens
  siRNA target sequence for SH3BP4 (NM_014521.1,692-710).
gagtgacagcggtatgatt

SEQ ID NO: 255178 - DNA, 19 bp, Homo sapiens
  siRNA target sequence for SH3BP4 (NM_014521.1,694-712).
gtgacagcggtatgattga

SEQ ID NO: 255179 - DNA, 19 bp, Homo sapiens
  siRNA target sequence for SH3BP4 (NM_014521.1,696-714).
gacagcggtatgattgata

SEQ ID NO: 255180 - DNA, 19 bp, Homo sapiens
  siRNA target sequence for SH3BP4 (NM_014521.1,698-716).
cagcggtatgattgataat

SEQ ID NO: 255181 - DNA, 19 bp, Homo sapiens
  siRNA target sequence for SH3BP4 (NM_014521.1,763-781).
ggggatggacagatgacaa

SEQ ID NO: 255182 - DNA, 19 bp, Homo sapiens
  siRNA target sequence for SH3BP4 (NM_014521.1,764-782).
gggatggacagatgacaaa

SEQ ID NO: 255183 - DNA, 19 bp, Homo sapiens
  siRNA target sequence for SH3BP4 (NM_014521.1,792-810).
ggcagaatgtacagtaata

SEQ ID NO: 255184 - DNA, 19 bp, Homo sapiens
  siRNA target sequence for SH3BP4 (NM_014521.1,825-843).
ggggtccagaccaatccat

SEQ ID NO: 255185 - DNA, 19 bp, Homo sapiens
  siRNA target sequence for SH3BP4 (NM_014521.1,831-849).
cagaccaatccatttctga

SEQ ID NO: 255186 - DNA, 19 bp, Homo sapiens
  siRNA target sequence for SH3BP4 (NM_014521.1,882-900).
gagctgaatcccaaaagta

SEQ ID NO: 255187 - DNA, 19 bp, Homo sapiens
  siRNA target sequence for SH3BP4 (NM_014521.1,1114-1132).
ccacatcgtcgagtttctt

SEQ ID NO: 255188 - DNA, 19 bp, Homo sapiens
  siRNA target sequence for SH3BP4 (NM_014521.1,1169-1187).
gagccgggaggattttcga

SEQ ID NO: 255189 - DNA, 19 bp, Homo sapiens
  siRNA target sequence for SH3BP4 (NM_014521.1,1524-1542).
gtgtcagccgagataaaaa

SEQ ID NO: 255190 - DNA, 19 bp, Homo sapiens
  siRNA target sequence for SH3BP4 (NM_014521.1,1526-1544).
gtcagccgagataaaaaat

SEQ ID NO: 255191 - DNA, 19 bp, Homo sapiens
  siRNA target sequence for SH3BP4 (NM_014521.1,1594-1612).
cgaaggaagggccatatgt

SEQ ID NO: 255192 - DNA, 19 bp, Homo sapiens
  siRNA target sequence for SH3BP4 (NM_014521.1,1729-1747).
ccgtgtgggacttcatcaa

SEQ ID NO: 255193 - DNA, 19 bp, Homo sapiens
  siRNA target sequence for SH3BP4 (NM_014521.1,1730-1748).
cgtgtgggacttcatcaat

SEQ ID NO: 255194 - DNA, 19 bp, Homo sapiens
  siRNA target sequence for SH3BP4 (NM_014521.1,1731-1749).
gtgtgggacttcatcaata

SEQ ID NO: 255195 - DNA, 19 bp, Homo sapiens
  siRNA target sequence for SH3BP4 (NM_014521.1,1767-1785).
ctctacggccctaaacaca

SEQ ID NO: 255196 - DNA, 19 bp, Homo sapiens
  siRNA target sequence for SH3BP4 (NM_014521.1,1802-1820).
gacggtagtgaccattttt

SEQ ID NO: 255197 - DNA, 19 bp, Homo sapiens
  siRNA target sequence for SH3BP4 (NM_014521.1,1908-1926).
gggaagcaccagttcgttt

SEQ ID NO: 255198 - DNA, 19 bp, Homo sapiens
  siRNA target sequence for SH3BP4 (NM_014521.1,1909-1927).
ggaagcaccagttcgtttt

SEQ ID NO: 255199 - DNA, 19 bp, Homo sapiens
  siRNA target sequence for SH3BP4 (NM_014521.1,1949-1967).
ggtctgtatgttttccaat

SEQ ID NO: 255200 - DNA, 19 bp, Homo sapiens
  siRNA target sequence for SH3BP4 (NM_014521.1,1963-1981).
ccaatatgacgaattacga

SEQ ID NO: 255201 - DNA, 19 bp, Homo sapiens
  siRNA target sequence for SH3BP4 (NM_014521.1,2130-2148).
gccatcctcacccagtttt

SEQ ID NO: 255202 - DNA, 19 bp, Homo sapiens
  siRNA target sequence for SH3BP4 (NM_014521.1,2247-2265).
ccgtttgccaccactacaa

SEQ ID NO: 255203 - DNA, 19 bp, Homo sapiens
  siRNA target sequence for SH3BP4 (NM_014521.1,2290-2308).
cggtgtccagcctcaagtt

SEQ ID NO: 255204 - DNA, 19 bp, Homo sapiens
  siRNA target sequence for SH3BP4 (NM_014521.1,2727-2745).
gtggcgtccgtcctagaaa

SEQ ID NO: 255205 - DNA, 19 bp, Homo sapiens
  siRNA target sequence for SH3BP4 (NM_014521.1,2731-2749).
cgtccgtcctagaaaagct

SEQ ID NO: 255206 - DNA, 19 bp, Homo sapiens
  siRNA target sequence for SH3BP4 (NM_014521.1,3016-3034).
ctgcgtatgacttcttact

SEQ ID NO: 255207 - DNA, 19 bp, Homo sapiens
  siRNA target sequence for SH3BP4 (NM_014521.1,3018-3036).
gcgtatgacttcttactca

SEQ ID NO: 255208 - DNA, 19 bp, Homo sapiens
  siRNA target sequence for SHC3 (NM_016848.2,811-829).
caatgaggtctcttgactt

SEQ ID NO: 255209 - DNA, 19 bp, Homo sapiens
  siRNA target sequence for SHC3 (NM_016848.2,822-840).
cttgacttcagtacaagaa

SEQ ID NO: 255210 - DNA, 19 bp, Homo sapiens
  siRNA target sequence for SHC3 (NM_016848.2,891-909).
gcgaagggagccttcaaga

SEQ ID NO: 255211 - DNA, 19 bp, Homo sapiens
  siRNA target sequence for SHC3 (NM_016848.2,892-910).
cgaagggagccttcaagaa

SEQ ID NO: 255212 - DNA, 19 bp, Homo sapiens
  siRNA target sequence for SHC3 (NM_016848.2,1021-1039).
ctccggactccaaacagat

SEQ ID NO: 255213 - DNA, 19 bp, Homo sapiens
  siRNA target sequence for SHC3 (NM_016848.2,1212-1230).
gagctccggtttaagcaat

SEQ ID NO: 255214 - DNA, 19 bp, Homo sapiens
  siRNA target sequence for SHC3 (NM_016848.2,1214-1232).
gctccggtttaagcaatat

SEQ ID NO: 255215 - DNA, 19 bp, Homo sapiens
  siRNA target sequence for SHC3 (NM_016848.2,1255-1273).
ccgctctccatgatcgaat

SEQ ID NO: 255216 - DNA, 19 bp, Homo sapiens
  siRNA target sequence for SHC3 (NM_016848.2,1360-1378).
ctccagggggctttcttga

SEQ ID NO: 255217 - DNA, 19 bp, Homo sapiens
  siRNA target sequence for SHC3 (NM_016848.2,1362-1380).
ccagggggctttcttgata

SEQ ID NO: 255218 - DNA, 19 bp, Homo sapiens
  siRNA target sequence for SHC3 (NM_016848.2,1367-1385).
gggctttcttgatactaga

SEQ ID NO: 255219 - DNA, 19 bp, Homo sapiens
  siRNA target sequence for SHC3 (NM_016848.2,1456-1474).
gacacttaggagacacttt

SEQ ID NO: 255220 - DNA, 19 bp, Homo sapiens
  siRNA target sequence for SHC3 (NM_016848.2,1645-1663).
caaggaaagacctctttga

SEQ ID NO: 255221 - DNA, 19 bp, Homo sapiens
  siRNA target sequence for SHC3 (NM_016848.2,1648-1666).
ggaaagacctctttgacat

SEQ ID NO: 255222 - DNA, 19 bp, Homo sapiens
  siRNA target sequence for SNX13 (NM_015132.2,209-227).
ctgaggccagtctatccat

SEQ ID NO: 255223 - DNA, 19 bp, Homo sapiens
  siRNA target sequence for SNX13 (NM_015132.2,211-229).
gaggccagtctatccatat

SEQ ID NO: 255224 - DNA, 19 bp, Homo sapiens
  siRNA target sequence for SNX13 (NM_015132.2,247-265).
ggcattgtcctttttctga

SEQ ID NO: 255225 - DNA, 19 bp, Homo sapiens
  siRNA target sequence for SNX13 (NM_015132.2,420-438).
ggttcctaagtgcttagaa

SEQ ID NO: 255226 - DNA, 19 bp, Homo sapiens
  siRNA target sequence for SNX13 (NM_015132.2,448-466).
cgggaagccaggactatta

SEQ ID NO: 255227 - DNA, 19 bp, Homo sapiens
  siRNA target sequence for SNX13 (NM_015132.2,449-467).
gggaagccaggactattaa

SEQ ID NO: 255228 - DNA, 19 bp, Homo sapiens
  siRNA target sequence for SNX13 (NM_015132.2,455-473).
ccaggactattaagattga

SEQ ID NO: 255229 - DNA, 19 bp, Homo sapiens
  siRNA target sequence for SNX13 (NM_015132.2,456-474).
caggactattaagattgat

SEQ ID NO: 255230 - DNA, 19 bp, Homo sapiens
  siRNA target sequence for SNX13 (NM_015132.2,479-497).
gattgacgggtgccaatat

SEQ ID NO: 255231 - DNA, 19 bp, Homo sapiens
  siRNA target sequence for SNX13 (NM_015132.2,483-501).
gacgggtgccaatataatt

SEQ ID NO: 255232 - DNA, 19 bp, Homo sapiens
  siRNA target sequence for SNX13 (NM_015132.2,485-503).
cgggtgccaatataattga

SEQ ID NO: 255233 - DNA, 19 bp, Homo sapiens
  siRNA target sequence for SNX13 (NM_015132.2,486-504).
gggtgccaatataattgat

SEQ ID NO: 255234 - DNA, 19 bp, Homo sapiens
  siRNA target sequence for SNX13 (NM_015132.2,488-506).
gtgccaatataattgatga

SEQ ID NO: 255235 - DNA, 19 bp, Homo sapiens
  siRNA target sequence for SNX13 (NM_015132.2,552-570).
gtattggtattatacacta

SEQ ID NO: 255236 - DNA, 19 bp, Homo sapiens
  siRNA target sequence for SNX13 (NM_015132.2,568-586).
ctaagcgatgatgaatctt

SEQ ID NO: 255237 - DNA, 19 bp, Homo sapiens
  siRNA target sequence for SNX13 (NM_015132.2,630-648).
gtttgctactaggtcaaaa

SEQ ID NO: 255238 - DNA, 19 bp, Homo sapiens
  siRNA target sequence for SNX13 (NM_015132.2,635-653).
ctactaggtcaaaagaaat

SEQ ID NO: 255239 - DNA, 19 bp, Homo sapiens
  siRNA target sequence for SNX13 (NM_015132.2,655-673).
gactggcaaccttatttta

SEQ ID NO: 255240 - DNA, 19 bp, Homo sapiens
  siRNA target sequence for SNX13 (NM_015132.2,677-695).
cacgcattgtagatgactt

SEQ ID NO: 255241 - DNA, 19 bp, Homo sapiens
  siRNA target sequence for SNX13 (NM_015132.2,698-716).
gcacacacttacgagtatt

SEQ ID NO: 255242 - DNA, 19 bp, Homo sapiens
  siRNA target sequence for SNX13 (NM_015132.2,748-766).
gatgatcaagtgaaaggta

SEQ ID NO: 255243 - DNA, 19 bp, Homo sapiens
  siRNA target sequence for SNX13 (NM_015132.2,769-787).
gcagaagatcttgtagata

SEQ ID NO: 255244 - DNA, 19 bp, Homo sapiens
  siRNA target sequence for SNX13 (NM_015132.2,788-806).
ccttctttgaagttgaagt

SEQ ID NO: 255245 - DNA, 19 bp, Homo sapiens
  siRNA target sequence for SNX13 (NM_015132.2,819-837).
ggaggtttgccgtgatcta

SEQ ID NO: 255246 - DNA, 19 bp, Homo sapiens
  siRNA target sequence for SNX13 (NM_015132.2,840-858).
gtgcacttcccccaaagat

SEQ ID NO: 255247 - DNA, 19 bp, Homo sapiens
  siRNA target sequence for SNX13 (NM_015132.2,886-904).
gaggtcttactatatttat

SEQ ID NO: 255248 - DNA, 19 bp, Homo sapiens
  siRNA target sequence for SNX13 (NM_015132.2,930-948).
caagatcatgcgatacttt

SEQ ID NO: 255249 - DNA, 19 bp, Homo sapiens
  siRNA target sequence for SNX13 (NM_015132.2,960-978).
ccttgcacgaggaattctt

SEQ ID NO: 255250 - DNA, 19 bp, Homo sapiens
  siRNA target sequence for SNX13 (NM_015132.2,1034-1052).
ggatgatccgtgattctaa

SEQ ID NO: 255251 - DNA, 19 bp, Homo sapiens
  siRNA target sequence for SNX13 (NM_015132.2,1055-1073).
gcaactatgaggcctttat

SEQ ID NO: 255252 - DNA, 19 bp, Homo sapiens
  siRNA target sequence for SNX13 (NM_015132.2,1108-1126).
ctagaagcagtcagagata

SEQ ID NO: 255253 - DNA, 19 bp, Homo sapiens
  siRNA target sequence for SNX13 (NM_015132.2,1162-1180).
gatacagctggtgatgata

SEQ ID NO: 255254 - DNA, 19 bp, Homo sapiens
  siRNA target sequence for SNX13 (NM_015132.2,1171-1189).
ggtgatgatatcaacacta

SEQ ID NO: 255255 - DNA, 19 bp, Homo sapiens
  siRNA target sequence for SNX13 (NM_015132.2,1172-1190).
gtgatgatatcaacactat

SEQ ID NO: 255256 - DNA, 19 bp, Homo sapiens
  siRNA target sequence for SNX13 (NM_015132.2,1182-1200).
caacactatcaaaaatcaa

SEQ ID NO: 255257 - DNA, 19 bp, Homo sapiens
  siRNA target sequence for SNX13 (NM_015132.2,1208-1226).
gcttactattcgtaaagaa

SEQ ID NO: 255258 - DNA, 19 bp, Homo sapiens
  siRNA target sequence for SNX13 (NM_015132.2,1213-1231).
ctattcgtaaagaaggtat

SEQ ID NO: 255259 - DNA, 19 bp, Homo sapiens
  siRNA target sequence for SNX13 (NM_015132.2,1227-1245).
ggtatgtgactcaagaata

SEQ ID NO: 255260 - DNA, 19 bp, Homo sapiens
  siRNA target sequence for SNX13 (NM_015132.2,1317-1335).
ccccctggacagcattctt

SEQ ID NO: 255261 - DNA, 19 bp, Homo sapiens
  siRNA target sequence for SNX13 (NM_015132.2,1339-1357).
gacaatgttgcactacaat

SEQ ID NO: 255262 - DNA, 19 bp, Homo sapiens
  siRNA target sequence for SNX13 (NM_015132.2,1341-1359).
caatgttgcactacaattt

SEQ ID NO: 255263 - DNA, 19 bp, Homo sapiens
  siRNA target sequence for SNX13 (NM_015132.2,1349-1367).
cactacaattttttatgga

SEQ ID NO: 255264 - DNA, 19 bp, Homo sapiens
  siRNA target sequence for SNX13 (NM_015132.2,1385-1403).
gaggtcaagcacatctatt

SEQ ID NO: 255265 - DNA, 19 bp, Homo sapiens
  siRNA target sequence for SNX13 (NM_015132.2,1388-1406).
gtcaagcacatctattctt

SEQ ID NO: 255266 - DNA, 19 bp, Homo sapiens
  siRNA target sequence for SNX13 (NM_015132.2,1446-1464).
gcagctagaagttttatta

SEQ ID NO: 255267 - DNA, 19 bp, Homo sapiens
  siRNA target sequence for SNX13 (NM_015132.2,1449-1467).
gctagaagttttattaagt

SEQ ID NO: 255268 - DNA, 19 bp, Homo sapiens
  siRNA target sequence for SNX13 (NM_015132.2,1560-1578).
ggcatctccaagagttact

SEQ ID NO: 255269 - DNA, 19 bp, Homo sapiens
  siRNA target sequence for SNX13 (NM_015132.2,1598-1616).
caaaattagcagatacttt

SEQ ID NO: 255270 - DNA, 19 bp, Homo sapiens
  siRNA target sequence for SNX13 (NM_015132.2,1814-1832).
ctcctacaggaagcataaa

SEQ ID NO: 255271 - DNA, 19 bp, Homo sapiens
  siRNA target sequence for SNX13 (NM_015132.2,1865-1883).
ctgatgactcagtacaact

SEQ ID NO: 255272 - DNA, 19 bp, Homo sapiens
  siRNA target sequence for SNX13 (NM_015132.2,1879-1897).
caacttcatgcctacattt

SEQ ID NO: 255273 - DNA, 19 bp, Homo sapiens
  siRNA target sequence for SNX13 (NM_015132.2,1898-1916).
cagacacaggcgtttgtaa

SEQ ID NO: 255274 - DNA, 19 bp, Homo sapiens
  siRNA target sequence for SNX13 (NM_015132.2,1902-1920).
cacaggcgtttgtaatgat

SEQ ID NO: 255275 - DNA, 19 bp, Homo sapiens
  siRNA target sequence for SNX13 (NM_015132.2,1904-1922).
caggcgtttgtaatgatca

SEQ ID NO: 255276 - DNA, 19 bp, Homo sapiens
  siRNA target sequence for SNX13 (NM_015132.2,1924-1942).
ggcaagacatatgcattat

SEQ ID NO: 255277 - DNA, 19 bp, Homo sapiens
  siRNA target sequence for SNX13 (NM_015132.2,1926-1944).
caagacatatgcattatat

SEQ ID NO: 255278 - DNA, 19 bp, Homo sapiens
  siRNA target sequence for SNX13 (NM_015132.2,1989-2007).
gaaaacctatcgtcgttat

SEQ ID NO: 255279 - DNA, 19 bp, Homo sapiens
  siRNA target sequence for SNX13 (NM_015132.2,1994-2012).
cctatcgtcgttatagtga

SEQ ID NO: 255280 - DNA, 19 bp, Homo sapiens
  siRNA target sequence for SNX13 (NM_015132.2,2020-2038).
gacttccacatgagaatca

SEQ ID NO: 255281 - DNA, 19 bp, Homo sapiens
  siRNA target sequence for SNX13 (NM_015132.2,2031-2049).
gagaatcactgaacagttt

SEQ ID NO: 255282 - DNA, 19 bp, Homo sapiens
  siRNA target sequence for SNX13 (NM_015132.2,2189-2207).
ccgctttagctcactatgt

SEQ ID NO: 255283 - DNA, 19 bp, Homo sapiens
  siRNA target sequence for SNX13 (NM_015132.2,2191-2209).
gctttagctcactatgtgt

SEQ ID NO: 255284 - DNA, 19 bp, Homo sapiens
  siRNA target sequence for SNX13 (NM_015132.2,2192-2210).
ctttagctcactatgtgta

SEQ ID NO: 255285 - DNA, 19 bp, Homo sapiens
  siRNA target sequence for SNX13 (NM_015132.2,2258-2276).
ctcgcaagatggacacttt

SEQ ID NO: 255286 - DNA, 19 bp, Homo sapiens
  siRNA target sequence for SNX13 (NM_015132.2,2357-2375).
ctaaaatgtcagacaacat

SEQ ID NO: 255287 - DNA, 19 bp, Homo sapiens
  siRNA target sequence for SNX13 (NM_015132.2,2393-2411).
gattaggtcaagacataaa

SEQ ID NO: 255288 - DNA, 19 bp, Homo sapiens
  siRNA target sequence for SNX13 (NM_015132.2,2472-2490).
ccgagtttcggctcaactt

SEQ ID NO: 255289 - DNA, 19 bp, Homo sapiens
  siRNA target sequence for SNX13 (NM_015132.2,2474-2492).
gagtttcggctcaacttga

SEQ ID NO: 255290 - DNA, 19 bp, Homo sapiens
  siRNA target sequence for SNX13 (NM_015132.2,2480-2498).
cggctcaacttgacgataa

SEQ ID NO: 255291 - DNA, 19 bp, Homo sapiens
  siRNA target sequence for SNX13 (NM_015132.2,2483-2501).
ctcaacttgacgataatgt

SEQ ID NO: 255292 - DNA, 19 bp, Homo sapiens
  siRNA target sequence for SNX13 (NM_015132.2,2493-2511).
cgataatgtggatgacaat

SEQ ID NO: 255293 - DNA, 19 bp, Homo sapiens
  siRNA target sequence for SNX13 (NM_015132.2,2542-2560).
gatgaagtattcgacttaa

SEQ ID NO: 255294 - DNA, 19 bp, Homo sapiens
  siRNA target sequence for SNX13 (NM_015132.2,2572-2590).
cagtggttgcgaaggaata

SEQ ID NO: 255295 - DNA, 19 bp, Homo sapiens
  siRNA target sequence for SNX13 (NM_015132.2,2576-2594).
ggttgcgaaggaatatcaa

SEQ ID NO: 255296 - DNA, 19 bp, Homo sapiens
  siRNA target sequence for SNX13 (NM_015132.2,2577-2595).
gttgcgaaggaatatcaaa

SEQ ID NO: 255297 - DNA, 19 bp, Homo sapiens
  siRNA target sequence for SNX13 (NM_015132.2,2610-2628).
gcttattagagctacatat

SEQ ID NO: 255298 - DNA, 19 bp, Homo sapiens
  siRNA target sequence for SNX13 (NM_015132.2,2620-2638).
gctacatatggcgatacta

SEQ ID NO: 255299 - DNA, 19 bp, Homo sapiens
  siRNA target sequence for SNX13 (NM_015132.2,2621-2639).
ctacatatggcgatactat

SEQ ID NO: 255300 - DNA, 19 bp, Homo sapiens
  siRNA target sequence for SNX13 (NM_015132.2,2624-2642).
catatggcgatactattaa

SEQ ID NO: 255301 - DNA, 19 bp, Homo sapiens
  siRNA target sequence for SNX13 (NM_015132.2,2631-2649).
cgatactattaatagaaaa

SEQ ID NO: 255302 - DNA, 19 bp, Homo sapiens
  siRNA target sequence for SNX13 (NM_015132.2,2673-2691).
gacttcacctgaacaagta

SEQ ID NO: 255303 - DNA, 19 bp, Homo sapiens
  siRNA target sequence for SNX13 (NM_015132.2,2692-2710).
gccgactcagtgaaacgtt

SEQ ID NO: 255304 - DNA, 19 bp, Homo sapiens
  siRNA target sequence for SNX13 (NM_015132.2,2693-2711).
ccgactcagtgaaacgttt

SEQ ID NO: 255305 - DNA, 19 bp, Homo sapiens
  siRNA target sequence for SNX13 (NM_015132.2,2760-2778).
cagagataaaagtattcga

SEQ ID NO: 255306 - DNA, 19 bp, Homo sapiens
  siRNA target sequence for SNX13 (NM_015132.2,2791-2809).
gtagcaggaaaaacgaaat

SEQ ID NO: 255307 - DNA, 19 bp, Homo sapiens
  siRNA target sequence for SNX13 (NM_015132.2,2804-2822).
cgaaattacttgcaattat

SEQ ID NO: 255308 - DNA, 19 bp, Homo sapiens
  siRNA target sequence for SNX13 (NM_015132.2,2854-2872).
gagacaacacggaaaggta

SEQ ID NO: 255309 - DNA, 19 bp, Homo sapiens
  siRNA target sequence for SNX13 (NM_015132.2,2856-2874).
gacaacacggaaaggtatt

SEQ ID NO: 255310 - DNA, 19 bp, Homo sapiens
  siRNA target sequence for SNX13 (NM_015132.2,2858-2876).
caacacggaaaggtattct

SEQ ID NO: 255311 - DNA, 19 bp, Homo sapiens
  siRNA target sequence for SNX13 (NM_015132.2,2892-2910).
gtttcagcacaaccaatta

SEQ ID NO: 255312 - DNA, 19 bp, Homo sapiens
  siRNA target sequence for SNX13 (NM_015132.2,2967-2985).
gtataaattccgtgaactt

SEQ ID NO: 255313 - DNA, 19 bp, Homo sapiens
  siRNA target sequence for SNX13 (NM_015132.2,3033-3051).
gaaacttcaaactactcaa

SEQ ID NO: 255314 - DNA, 19 bp, Homo sapiens
  siRNA target sequence for SNX13 (NM_015132.2,3044-3062).
ctactcaagcgccttcttt

SEQ ID NO: 255315 - DNA, 19 bp, Homo sapiens
  siRNA target sequence for SNX25 (NM_031953.2,208-226).
gaagtgttcgactacagtt

SEQ ID NO: 255316 - DNA, 19 bp, Homo sapiens
  siRNA target sequence for SNX25 (NM_031953.2,211-229).
gtgttcgactacagttata

SEQ ID NO: 255317 - DNA, 19 bp, Homo sapiens
  siRNA target sequence for SNX25 (NM_031953.2,213-231).
gttcgactacagttataga

SEQ ID NO: 255318 - DNA, 19 bp, Homo sapiens
  siRNA target sequence for SNX25 (NM_031953.2,216-234).
cgactacagttatagagat

SEQ ID NO: 255319 - DNA, 19 bp, Homo sapiens
  siRNA target sequence for SNX25 (NM_031953.2,376-394).
gttgtgaggactttactca

SEQ ID NO: 255320 - DNA, 19 bp, Homo sapiens
  siRNA target sequence for SNX25 (NM_031953.2,383-401).
ggactttactcactcattt

SEQ ID NO: 255321 - DNA, 19 bp, Homo sapiens
  siRNA target sequence for SNX25 (NM_031953.2,487-505).
gaagtaagatttctacaaa

SEQ ID NO: 255322 - DNA, 19 bp, Homo sapiens
  siRNA target sequence for SNX25 (NM_031953.2,777-795).
gaagcaactaaggtatcaa

SEQ ID NO: 255323 - DNA, 19 bp, Homo sapiens
  siRNA target sequence for SNX25 (NM_031953.2,1094-1112).
gaatgtacatggaaaggat

SEQ ID NO: 255324 - DNA, 19 bp, Homo sapiens
  siRNA target sequence for SNX25 (NM_031953.2,1113-1131).
ggacaaaagagctctgatt

SEQ ID NO: 255325 - DNA, 19 bp, Homo sapiens
  siRNA target sequence for SNX25 (NM_031953.2,1139-1157).
gggaatctgtggaacattt

SEQ ID NO: 255326 - DNA, 19 bp, Homo sapiens
  siRNA target sequence for SNX25 (NM_031953.2,1184-1202).
cacaattagttggtgaaat

SEQ ID NO: 255327 - DNA, 19 bp, Homo sapiens
  siRNA target sequence for SNX25 (NM_031953.2,1186-1204).
caattagttggtgaaattt

SEQ ID NO: 255328 - DNA, 19 bp, Homo sapiens
  siRNA target sequence for SNX25 (NM_031953.2,1192-1210).
gttggtgaaatttatcaga

SEQ ID NO: 255329 - DNA, 19 bp, Homo sapiens
  siRNA target sequence for SNX25 (NM_031953.2,1269-1287).
gcagtgtcttgtaggaaat

SEQ ID NO: 255330 - DNA, 19 bp, Homo sapiens
  siRNA target sequence for SNX25 (NM_031953.2,1276-1294).
cttgtaggaaataaaggta

SEQ ID NO: 255331 - DNA, 19 bp, Homo sapiens
  siRNA target sequence for SNX25 (NM_031953.2,1332-1350).
gaccctaaaggataggtat

SEQ ID NO: 255332 - DNA, 19 bp, Homo sapiens
  siRNA target sequence for SNX25 (NM_031953.2,1334-1352).
ccctaaaggataggtatta

SEQ ID NO: 255333 - DNA, 19 bp, Homo sapiens
  siRNA target sequence for SNX25 (NM_031953.2,1346-1364).
ggtattacccttcatttat

SEQ ID NO: 255334 - DNA, 19 bp, Homo sapiens
  siRNA target sequence for SNX25 (NM_031953.2,1366-1384).
gtcagtgacctgtatgaga

SEQ ID NO: 255335 - DNA, 19 bp, Homo sapiens
  siRNA target sequence for SNX25 (NM_031953.2,1487-1505).
gtaccaatcagatcaatga

SEQ ID NO: 255336 - DNA, 19 bp, Homo sapiens
  siRNA target sequence for SNX25 (NM_031953.2,1500-1518).
caatgaacaagccagtttt

SEQ ID NO: 255337 - DNA, 19 bp, Homo sapiens
  siRNA target sequence for SNX25 (NM_031953.2,1600-1618).
cctgacaagaagattgttt

SEQ ID NO: 255338 - DNA, 19 bp, Homo sapiens
  siRNA target sequence for SNX25 (NM_031953.2,1688-1706).
cggattggtggtgtgaaaa

SEQ ID NO: 255339 - DNA, 19 bp, Homo sapiens
  siRNA target sequence for SNX25 (NM_031953.2,1733-1751).
ccagtggagaggttacaga

SEQ ID NO: 255340 - DNA, 19 bp, Homo sapiens
  siRNA target sequence for SNX25 (NM_031953.2,1762-1780).
gagcaattgccatgttact

SEQ ID NO: 255341 - DNA, 19 bp, Homo sapiens
  siRNA target sequence for SNX25 (NM_031953.2,1807-1825).
ggaggagttgaaactaaga

SEQ ID NO: 255342 - DNA, 19 bp, Homo sapiens
  siRNA target sequence for SNX25 (NM_031953.2,1808-1826).
gaggagttgaaactaagaa

SEQ ID NO: 255343 - DNA, 19 bp, Homo sapiens
  siRNA target sequence for SNX25 (NM_031953.2,1841-1859).
gaaggctcagcgagtttca

SEQ ID NO: 255344 - DNA, 19 bp, Homo sapiens
  siRNA target sequence for SNX25 (NM_031953.2,1850-1868).
gcgagtttcagaatttaca

SEQ ID NO: 255345 - DNA, 19 bp, Homo sapiens
  siRNA target sequence for SNX25 (NM_031953.2,1906-1924).
gtccagttgccttctctta

SEQ ID NO: 255346 - DNA, 19 bp, Homo sapiens
  siRNA target sequence for SNX25 (NM_031953.2,1926-1944).
caagctgcctttcaaatct

SEQ ID NO: 255347 - DNA, 19 bp, Homo sapiens
  siRNA target sequence for SNX25 (NM_031953.2,1932-1950).
gcctttcaaatctatagat

SEQ ID NO: 255348 - DNA, 19 bp, Homo sapiens
  siRNA target sequence for SNX25 (NM_031953.2,1968-1986).
gtcgaagaatcaattaaat

SEQ ID NO: 255349 - DNA, 19 bp, Homo sapiens
  siRNA target sequence for SNX25 (NM_031953.2,1970-1988).
cgaagaatcaattaaataa

SEQ ID NO: 255350 - DNA, 19 bp, Homo sapiens
  siRNA target sequence for SNX25 (NM_031953.2,2035-2053).
gcactttatgccttcttga

SEQ ID NO: 255351 - DNA, 19 bp, Homo sapiens
  siRNA target sequence for SNX25 (NM_031953.2,2062-2080).
cctgactacctcaaggtta

SEQ ID NO: 255352 - DNA, 19 bp, Homo sapiens
  siRNA target sequence for SNX25 (NM_031953.2,2082-2100).
cgacgtgcaggggaaaaaa

SEQ ID NO: 255353 - DNA, 19 bp, Homo sapiens
  siRNA target sequence for SNX25 (NM_031953.2,2132-2150).
gacttcctcgcgacttctt

SEQ ID NO: 255354 - DNA, 19 bp, Homo sapiens
  siRNA target sequence for SNX25 (NM_031953.2,2269-2287).
gaacttcgaggaatgttta

SEQ ID NO: 255355 - DNA, 19 bp, Homo sapiens
  siRNA target sequence for SNX25 (NM_031953.2,2272-2290).
cttcgaggaatgtttaaat

SEQ ID NO: 255356 - DNA, 19 bp, Homo sapiens
  siRNA target sequence for SNX25 (NM_031953.2,2291-2309).
gggtgagaagaacattaat

SEQ ID NO: 255357 - DNA, 19 bp, Homo sapiens
  siRNA target sequence for SNX25 (NM_031953.2,2312-2330).
ccctcgttcaggtcacttt

SEQ ID NO: 255358 - DNA, 19 bp, Homo sapiens
  siRNA target sequence for SNX25 (NM_031953.2,2313-2331).
cctcgttcaggtcactttt

SEQ ID NO: 255359 - DNA, 19 bp, Homo sapiens
  siRNA target sequence for SNX25 (NM_031953.2,2316-2334).
cgttcaggtcacttttgga

SEQ ID NO: 255360 - DNA, 19 bp, Homo sapiens
  siRNA target sequence for SNX25 (NM_031953.2,2359-2377).
gacacagtcagctggattt

SEQ ID NO: 255361 - DNA, 19 bp, Homo sapiens
  siRNA target sequence for SNX25 (NM_031953.2,2381-2399).
gtgagcaaatgttggttta

SEQ ID NO: 255362 - DNA, 19 bp, Homo sapiens
  siRNA target sequence for SNX25 (NM_031953.2,2446-2464).
gcaccaccgaccacaatca

SEQ ID NO: 255363 - DNA, 19 bp, Homo sapiens
  siRNA target sequence for SNX25 (NM_031953.2,2449-2467).
ccaccgaccacaatcagaa

SEQ ID NO: 255364 - DNA, 19 bp, Homo sapiens
  siRNA target sequence for SNX25 (NM_031953.2,2566-2584).
cgccacggtataataaaaa

SEQ ID NO: 255365 - DNA, 19 bp, Homo sapiens
  siRNA target sequence for SNX25 (NM_031953.2,2609-2627).
gagccaacaagcatctgtt

SEQ ID NO: 255366 - DNA, 19 bp, Homo sapiens
  siRNA target sequence for SNX25 (NM_031953.2,2637-2655).
gatggaactgctgctaatt

SEQ ID NO: 255367 - DNA, 19 bp, Homo sapiens
  siRNA target sequence for SNX25 (NM_031953.2,2666-2684).
ctgagctgagagttcattt

SEQ ID NO: 255368 - DNA, 19 bp, Homo sapiens
  siRNA target sequence for SNX25 (NM_031953.2,2673-2691).
gagagttcatttagatcaa

SEQ ID NO: 255369 - DNA, 19 bp, Homo sapiens
  siRNA target sequence for SNX25 (NM_031953.2,2677-2695).
gttcatttagatcaactta

SEQ ID NO: 255370 - DNA, 19 bp, Homo sapiens
  siRNA target sequence for STMN1 (NM_005563.2,163-181).
cagccctcggtcaaaagaa

SEQ ID NO: 255371 - DNA, 19 bp, Homo sapiens
  siRNA target sequence for STMN1 (NM_005563.2,166-184).
ccctcggtcaaaagaatct

SEQ ID NO: 255372 - DNA, 19 bp, Homo sapiens
  siRNA target sequence for STMN1 (NM_005563.2,455-473).
cgtttgcgagagaaggata

SEQ ID NO: 255373 - DNA, 19 bp, Homo sapiens
  siRNA target sequence for TM4SF3 (NM_004616.2,186-204).
ggtgtgagtgcctgtataa

SEQ ID NO: 255374 - DNA, 19 bp, Homo sapiens
  siRNA target sequence for TM4SF3 (NM_004616.2,187-205).
gtgtgagtgcctgtataaa

SEQ ID NO: 255375 - DNA, 19 bp, Homo sapiens
  siRNA target sequence for TM4SF3 (NM_004616.2,276-294).
gtacgagtaagcaatgact

SEQ ID NO: 255376 - DNA, 19 bp, Homo sapiens
  siRNA target sequence for TM4SF3 (NM_004616.2,367-385).
gtgccatcatcatgattct

SEQ ID NO: 255377 - DNA, 19 bp, Homo sapiens
  siRNA target sequence for TM4SF3 (NM_004616.2,396-414).
ggatgctgcggtgctataa

SEQ ID NO: 255378 - DNA, 19 bp, Homo sapiens
  siRNA target sequence for TM4SF3 (NM_004616.2,400-418).
gctgcggtgctataaaaga

SEQ ID NO: 255379 - DNA, 19 bp, Homo sapiens
  siRNA target sequence for TM4SF3 (NM_004616.2,404-422).
cggtgctataaaagaaagt

SEQ ID NO: 255380 - DNA, 19 bp, Homo sapiens
  siRNA target sequence for TM4SF3 (NM_004616.2,421-439).
gtcgctgcatgcttctgtt

SEQ ID NO: 255381 - DNA, 19 bp, Homo sapiens
  siRNA target sequence for TM4SF3 (NM_004616.2,431-449).
gcttctgttgtttttcata

SEQ ID NO: 255382 - DNA, 19 bp, Homo sapiens
  siRNA target sequence for TM4SF3 (NM_004616.2,476-494).
ggtggcgacaggtatccta

SEQ ID NO: 255383 - DNA, 19 bp, Homo sapiens
  siRNA target sequence for TM4SF3 (NM_004616.2,515-533).
gtctgatcgcattgtgaat

SEQ ID NO: 255384 - DNA, 19 bp, Homo sapiens
  siRNA target sequence for TM4SF3 (NM_004616.2,517-535).
ctgatcgcattgtgaatga

SEQ ID NO: 255385 - DNA, 19 bp, Homo sapiens
  siRNA target sequence for TM4SF3 (NM_004616.2,565-583).
gcgccacaggggaaagtga

SEQ ID NO: 255386 - DNA, 19 bp, Homo sapiens
  siRNA target sequence for TM4SF3 (NM_004616.2,594-612).
caggaagccataattgtgt

SEQ ID NO: 255387 - DNA, 19 bp, Homo sapiens
  siRNA target sequence for TM4SF3 (NM_004616.2,601-619).
ccataattgtgtttcaaga

SEQ ID NO: 255388 - DNA, 19 bp, Homo sapiens
  siRNA target sequence for TM4SF3 (NM_004616.2,615-633).
caagaagagtttaaatgct

SEQ ID NO: 255389 - DNA, 19 bp, Homo sapiens
  siRNA target sequence for TM4SF3 (NM_004616.2,651-669).
gctgctgattggggaaata

SEQ ID NO: 255390 - DNA, 19 bp, Homo sapiens
  siRNA target sequence for TM4SF3 (NM_004616.2,652-670).
ctgctgattggggaaataa

SEQ ID NO: 255391 - DNA, 19 bp, Homo sapiens
  siRNA target sequence for TM4SF3 (NM_004616.2,817-835).
catttggactggcagttat

SEQ ID NO: 255392 - DNA, 19 bp, Homo sapiens
  siRNA target sequence for TP53AP1 (NM_007233.1,216-234).
ccaaccctctgggatagat

SEQ ID NO: 255393 - DNA, 19 bp, Homo sapiens
  siRNA target sequence for TP53AP1 (NM_007233.1,236-254).
caggaagcgatggttaaga

SEQ ID NO: 255394 - DNA, 19 bp, Homo sapiens
  siRNA target sequence for TP53AP1 (NM_007233.1,244-262).
gatggttaagacccatttt

SEQ ID NO: 255395 - DNA, 19 bp, Homo sapiens
  siRNA target sequence for TP53AP1 (NM_007233.1,314-332).
cagtgagccgctttttgca

SEQ ID NO: 255396 - DNA, 19 bp, Homo sapiens
  siRNA target sequence for TP53AP1 (NM_007233.1,334-352).
caccaggcgaacacttaca

SEQ ID NO: 255397 - DNA, 19 bp, Homo sapiens
  siRNA target sequence for WNT1 (NM_005430.2,293-311).
gccgatggtggggtattgt

SEQ ID NO: 255398 - DNA, 19 bp, Homo sapiens
  siRNA target sequence for WNT1 (NM_005430.2,295-313).
cgatggtggggtattgtga

SEQ ID NO: 255399 - DNA, 19 bp, Homo sapiens
  siRNA target sequence for WNT1 (NM_005430.2,296-314).
gatggtggggtattgtgaa

SEQ ID NO: 255400 - DNA, 19 bp, Homo sapiens
  siRNA target sequence for WNT1 (NM_005430.2,326-344).
ccacgaacctgcttacaga

SEQ ID NO: 255401 - DNA, 19 bp, Homo sapiens
  siRNA target sequence for WNT1 (NM_005430.2,396-414).
caaacagcggcgtctgata

SEQ ID NO: 255402 - DNA, 19 bp, Homo sapiens
  siRNA target sequence for WNT1 (NM_005430.2,560-578).
gtcgagaaacggcgtttat

SEQ ID NO: 255403 - DNA, 19 bp, Homo sapiens
  siRNA target sequence for WNT1 (NM_005430.2,562-580).
cgagaaacggcgtttatct

SEQ ID NO: 255404 - DNA, 19 bp, Homo sapiens
  siRNA target sequence for WNT1 (NM_005430.2,707-725).
gcagcgacaacattgactt

SEQ ID NO: 255405 - DNA, 19 bp, Homo sapiens
  siRNA target sequence for WNT1 (NM_005430.2,814-832).
ggccgtacgaccgtattct

SEQ ID NO: 255406 - DNA, 19 bp, Homo sapiens
  siRNA target sequence for WNT10A (NM_025216.2,576-594).
ggtcagcacccaatgacat

SEQ ID NO: 255407 - DNA, 19 bp, Homo sapiens
  siRNA target sequence for WNT10A (NM_025216.2,577-595).
gtcagcacccaatgacatt

SEQ ID NO: 255408 - DNA, 19 bp, Homo sapiens
  siRNA target sequence for WNT10A (NM_025216.2,791-809).
ctggagactcgcaacaaga

SEQ ID NO: 255409 - DNA, 19 bp, Homo sapiens
  siRNA target sequence for WNT10A (NM_025216.2,979-997).
gaagctgcaccgcttacaa

SEQ ID NO: 255410 - DNA, 19 bp, Homo sapiens
  siRNA target sequence for WNT10A (NM_025216.2,1120-1138).
cttcggggagcgcttttct

SEQ ID NO: 255411 - DNA, 19 bp, Homo sapiens
  siRNA target sequence for WNT10A (NM_025216.2,1131-1149).
gcttttctaaggactttct

SEQ ID NO: 255412 - DNA, 19 bp, Homo sapiens
  siRNA target sequence for WNT10A (NM_025216.2,1172-1190).
gacatccacgcgagaatga

SEQ ID NO: 255413 - DNA, 19 bp, Homo sapiens
  siRNA target sequence for WNT10B (NM_003394.2,414-432).
gcagtcgggctctaagcaa

SEQ ID NO: 255414 - DNA, 19 bp, Homo sapiens
  siRNA target sequence for WNT10B (NM_003394.2,419-437).
cgggctctaagcaatgaga

SEQ ID NO: 255415 - DNA, 19 bp, Homo sapiens
  siRNA target sequence for WNT10B (NM_003394.2,679-697).
gcgcggtttccgagaaagt

SEQ ID NO: 255416 - DNA, 19 bp, Homo sapiens
  siRNA target sequence for WNT10B (NM_003394.2,689-707).
cgagaaagtgctttttcct

SEQ ID NO: 255417 - DNA, 19 bp, Homo sapiens
  siRNA target sequence for WNT10B (NM_003394.2,1023-1041).
gaatgcgaatccacaacaa

SEQ ID NO: 255418 - DNA, 19 bp, Homo sapiens
  siRNA target sequence for WNT11 (NM_004626.2,184-202).
gtgtgctatggcatcaagt

SEQ ID NO: 255419 - DNA, 19 bp, Homo sapiens
  siRNA target sequence for WNT11 (NM_004626.2,668-686).
gatcccaagccaataaact

SEQ ID NO: 255420 - DNA, 19 bp, Homo sapiens
  siRNA target sequence for WNT11 (NM_004626.2,736-754).
ctggaaatgaagtgtaagt

SEQ ID NO: 255421 - DNA, 19 bp, Homo sapiens
  siRNA target sequence for WNT11 (NM_004626.2,1040-1058).
gcgacagctgcgaccttat

SEQ ID NO: 255422 - DNA, 19 bp, Homo sapiens
  siRNA target sequence for WNT16 (NM_016087.2,555-573).
gcagaaagttcctagattt

SEQ ID NO: 255423 - DNA, 19 bp, Homo sapiens
  siRNA target sequence for WNT16 (NM_016087.2,653-671).
gctgtcgccaagttgatgt

SEQ ID NO: 255424 - DNA, 19 bp, Homo sapiens
  siRNA target sequence for WNT16 (NM_016087.2,755-773).
ggccatttgttgaaggata

SEQ ID NO: 255425 - DNA, 19 bp, Homo sapiens
  siRNA target sequence for WNT16 (NM_016087.2,757-775).
ccatttgttgaaggataaa

SEQ ID NO: 255426 - DNA, 19 bp, Homo sapiens
  siRNA target sequence for WNT16 (NM_016087.2,790-808).
ccagatatcagacaaaaca

SEQ ID NO: 255427 - DNA, 19 bp, Homo sapiens
  siRNA target sequence for WNT16 (NM_016087.2,822-840).
gcaggagagaaaaagatca

SEQ ID NO: 255428 - DNA, 19 bp, Homo sapiens
  siRNA target sequence for WNT16 (NM_016087.2,843-861).
ggaaaataccaatccataa

SEQ ID NO: 255429 - DNA, 19 bp, Homo sapiens
  siRNA target sequence for WNT16 (NM_016087.2,852-870).
caatccataaggatgatct

SEQ ID NO: 255430 - DNA, 19 bp, Homo sapiens
  siRNA target sequence for WNT16 (NM_016087.2,862-880).
ggatgatctgctctatgtt

SEQ ID NO: 255431 - DNA, 19 bp, Homo sapiens
  siRNA target sequence for WNT16 (NM_016087.2,871-889).
gctctatgttaataagtct

SEQ ID NO: 255432 - DNA, 19 bp, Homo sapiens
  siRNA target sequence for WNT16 (NM_016087.2,898-916).
ctgtgtagaagataagaaa

SEQ ID NO: 255433 - DNA, 19 bp, Homo sapiens
  siRNA target sequence for WNT2 (NM_003391.1,407-425).
gggtgatgtgcgataatgt

SEQ ID NO: 255434 - DNA, 19 bp, Homo sapiens
  siRNA target sequence for WNT2 (NM_003391.1,610-628).
cgggaatctgcctttgttt

SEQ ID NO: 255435 - DNA, 19 bp, Homo sapiens
  siRNA target sequence for WNT2 (NM_003391.1,636-654).
ctcctcagctggagttgta

SEQ ID NO: 255436 - DNA, 19 bp, Homo sapiens
  siRNA target sequence for WNT2 (NM_003391.1,638-656).
cctcagctggagttgtatt

SEQ ID NO: 255437 - DNA, 19 bp, Homo sapiens
  siRNA target sequence for WNT2 (NM_003391.1,698-716).
gttcctgtgatccaaagaa

SEQ ID NO: 255438 - DNA, 19 bp, Homo sapiens
  siRNA target sequence for WNT2 (NM_003391.1,764-782).
gcagtgataacattgacta

SEQ ID NO: 255439 - DNA, 19 bp, Homo sapiens
  siRNA target sequence for WNT2 (NM_003391.1,884-902).
ctgtaaagcggttcttgaa

SEQ ID NO: 255440 - DNA, 19 bp, Homo sapiens
  siRNA target sequence for WNT2 (NM_003391.1,975-993).
caggaaaacgggcgattat

SEQ ID NO: 255441 - DNA, 19 bp, Homo sapiens
  siRNA target sequence for WNT2 (NM_003391.1,977-995).
ggaaaacgggcgattatct

SEQ ID NO: 255442 - DNA, 19 bp, Homo sapiens
  siRNA target sequence for WNT2 (NM_003391.1,1060-1078).
gctaacgagaggtttaaga

SEQ ID NO: 255443 - DNA, 19 bp, Homo sapiens
  siRNA target sequence for WNT2 (NM_003391.1,1093-1111).
gacctcgtgtattttgaga

SEQ ID NO: 255444 - DNA, 19 bp, Homo sapiens
  siRNA target sequence for WNT2 (NM_003391.1,1096-1114).
ctcgtgtattttgagaatt

SEQ ID NO: 255445 - DNA, 19 bp, Homo sapiens
  siRNA target sequence for WNT2 (NM_003391.1,1259-1277).
ccaagtgtgggtgtaagtt

SEQ ID NO: 255446 - DNA, 19 bp, Homo sapiens
  siRNA target sequence for WNT2B (NM_004185.2,136-154).
ggagtggtagccataagca

SEQ ID NO: 255447 - DNA, 19 bp, Homo sapiens
  siRNA target sequence for WNT2B (NM_004185.2,137-155).
gagtggtagccataagcat

SEQ ID NO: 255448 - DNA, 19 bp, Homo sapiens
  siRNA target sequence for WNT2B (NM_004185.2,139-157).
gtggtagccataagcattt

SEQ ID NO: 255449 - DNA, 19 bp, Homo sapiens
  siRNA target sequence for WNT2B (NM_004185.2,141-159).
ggtagccataagcattttt

SEQ ID NO: 255450 - DNA, 19 bp, Homo sapiens
  siRNA target sequence for WNT2B (NM_004185.2,146-164).
ccataagcatttttggaat

SEQ ID NO: 255451 - DNA, 19 bp, Homo sapiens
  siRNA target sequence for WNT2B (NM_004185.2,217-235).
cagtcagcgttcaacaagt

SEQ ID NO: 255452 - DNA, 19 bp, Homo sapiens
  siRNA target sequence for WNT2B (NM_004185.2,268-286).
cgagtgatctgtgacaata

SEQ ID NO: 255453 - DNA, 19 bp, Homo sapiens
  siRNA target sequence for WNT2B (NM_004185.2,269-287).
gagtgatctgtgacaatat

SEQ ID NO: 255454 - DNA, 19 bp, Homo sapiens
  siRNA target sequence for WNT2B (NM_004185.2,400-418).
caccaccgctggaactgta

SEQ ID NO: 255455 - DNA, 19 bp, Homo sapiens
  siRNA target sequence for WNT2B (NM_004185.2,470-488).
gccgagaggcagcttttgt

SEQ ID NO: 255456 - DNA, 19 bp, Homo sapiens
  siRNA target sequence for WNT2B (NM_004185.2,472-490).
cgagaggcagcttttgtat

SEQ ID NO: 255457 - DNA, 19 bp, Homo sapiens
  siRNA target sequence for WNT2B (NM_004185.2,508-526).
ggggtagtccacgctatta

SEQ ID NO: 255458 - DNA, 19 bp, Homo sapiens
  siRNA target sequence for WNT2B (NM_004185.2,510-528).
ggtagtccacgctattact

SEQ ID NO: 255459 - DNA, 19 bp, Homo sapiens
  siRNA target sequence for WNT2B (NM_004185.2,706-724).
gccctcatgaacttacata

SEQ ID NO: 255460 - DNA, 19 bp, Homo sapiens
  siRNA target sequence for WNT2B (NM_004185.2,818-836).
ggcgtgcactctcagattt

SEQ ID NO: 255461 - DNA, 19 bp, Homo sapiens
  siRNA target sequence for WNT2B (NM_004185.2,855-873).
cctgcggcgacgctatgat

SEQ ID NO: 255462 - DNA, 19 bp, Homo sapiens
  siRNA target sequence for WNT2B (NM_004185.2,944-962).
ccacccggactgatcttgt

SEQ ID NO: 255463 - DNA, 19 bp, Homo sapiens
  siRNA target sequence for WNT2B (NM_004185.2,947-965).
cccggactgatcttgtcta

SEQ ID NO: 255464 - DNA, 19 bp, Homo sapiens
  siRNA target sequence for WNT2B (NM_004185.2,950-968).
ggactgatcttgtctactt

SEQ ID NO: 255465 - DNA, 19 bp, Homo sapiens
  siRNA target sequence for WNT2B (NM_004185.2,972-990).
caactctccagattactgt

SEQ ID NO: 255466 - DNA, 19 bp, Homo sapiens
  siRNA target sequence for WNT2B (NM_004185.2,1055-1073).
gaacagacggttgtgaaat

SEQ ID NO: 255467 - DNA, 19 bp, Homo sapiens
  siRNA target sequence for WNT2B (NM_004185.2,1058-1076).
cagacggttgtgaaatcat

SEQ ID NO: 255468 - DNA, 19 bp, Homo sapiens
  siRNA target sequence for WNT2B (NM_004185.2,1060-1078).
gacggttgtgaaatcatgt

SEQ ID NO: 255469 - DNA, 19 bp, Homo sapiens
  siRNA target sequence for WNT2B (NM_004185.2,1153-1171).
gctgtacggtgcaaggaat

SEQ ID NO: 255470 - DNA, 19 bp, Homo sapiens
  siRNA target sequence for WNT2B (NM_004185.2,1185-1203).
ggacgtccatacttgcaaa

SEQ ID NO: 255471 - DNA, 19 bp, Homo sapiens
  siRNA target sequence for WNT3 (NM_030753.3,177-195).
ctcgctggctacccaattt

SEQ ID NO: 255472 - DNA, 19 bp, Homo sapiens
  siRNA target sequence for WNT3 (NM_030753.3,180-198).
gctggctacccaatttggt

SEQ ID NO: 255473 - DNA, 19 bp, Homo sapiens
  siRNA target sequence for WNT3 (NM_030753.3,210-228).
ctgggccagcagtacacat

SEQ ID NO: 255474 - DNA, 19 bp, Homo sapiens
  siRNA target sequence for WNT3 (NM_030753.3,288-306).
cgcttctgccgcaattaca

SEQ ID NO: 255475 - DNA, 19 bp, Homo sapiens
  siRNA target sequence for WNT3 (NM_030753.3,298-316).
gcaattacatcgagatcat

SEQ ID NO: 255476 - DNA, 19 bp, Homo sapiens
  siRNA target sequence for WNT3 (NM_030753.3,386-404).
gaactgcaccaccatagat

SEQ ID NO: 255477 - DNA, 19 bp, Homo sapiens
  siRNA target sequence for WNT3 (NM_030753.3,537-555).
ggctgtgactcgcatcata

SEQ ID NO: 255478 - DNA, 19 bp, Homo sapiens
  siRNA target sequence for WNT3 (NM_030753.3,538-556).
gctgtgactcgcatcataa

SEQ ID NO: 255479 - DNA, 19 bp, Homo sapiens
  siRNA target sequence for WNT3 (NM_030753.3,604-622).
ctgacttcggcgtgttagt

SEQ ID NO: 255480 - DNA, 19 bp, Homo sapiens
  siRNA target sequence for WNT3 (NM_030753.3,606-624).
gacttcggcgtgttagtgt

SEQ ID NO: 255481 - DNA, 19 bp, Homo sapiens
  siRNA target sequence for WNT3 (NM_030753.3,901-919).
ccaagtactcgctcttcaa

SEQ ID NO: 255482 - DNA, 19 bp, Homo sapiens
  siRNA target sequence for WNT3 (NM_030753.3,950-968).
cgagaactcccccaacttt

SEQ ID NO: 255483 - DNA, 19 bp, Homo sapiens
  siRNA target sequence for WNT3 (NM_030753.3,953-971).
gaactcccccaacttttgt

SEQ ID NO: 255484 - DNA, 19 bp, Homo sapiens
  siRNA target sequence for WNT3 (NM_030753.3,1008-1026).
gaccggacttgcaatgtca

SEQ ID NO: 255485 - DNA, 19 bp, Homo sapiens
  siRNA target sequence for WNT3 (NM_030753.3,1139-1157).
cagctgccaggagtgtatt

SEQ ID NO: 255486 - DNA, 19 bp, Homo sapiens
  siRNA target sequence for WNT3A (NM_033131.2,82-100).
gccccactcggatacttct

SEQ ID NO: 255487 - DNA, 19 bp, Homo sapiens
  siRNA target sequence for WNT3A (NM_033131.2,84-102).
cccactcggatacttctta

SEQ ID NO: 255488 - DNA, 19 bp, Homo sapiens
  siRNA target sequence for WNT3A (NM_033131.2,276-294).
ggccgagggcatcaagatt

SEQ ID NO: 255489 - DNA, 19 bp, Homo sapiens
  siRNA target sequence for WNT3A (NM_033131.2,376-394).
cccgtgctggacaaagcta

SEQ ID NO: 255490 - DNA, 19 bp, Homo sapiens
  siRNA target sequence for WNT4 (NM_030761.2,814-832).
cacgcaacgcacagttcaa

SEQ ID NO: 255491 - DNA, 19 bp, Homo sapiens
  siRNA target sequence for WNT5B (NM_030775.2,214-232).
caactcctggtggtcatta

SEQ ID NO: 255492 - DNA, 19 bp, Homo sapiens
  siRNA target sequence for WNT5B (NM_030775.2,222-240).
ggtggtcattagctttgaa

SEQ ID NO: 255493 - DNA, 19 bp, Homo sapiens
  siRNA target sequence for WNT5B (NM_030775.2,321-339).
ggaagctgtgccaattgta

SEQ ID NO: 255494 - DNA, 19 bp, Homo sapiens
  siRNA target sequence for WNT5B (NM_030775.2,436-454).
ggacaacgcatctgtcttt

SEQ ID NO: 255495 - DNA, 19 bp, Homo sapiens
  siRNA target sequence for WNT5B (NM_030775.2,680-698).
cgggagcgagagaagaact

SEQ ID NO: 255496 - DNA, 19 bp, Homo sapiens
  siRNA target sequence for WNT5B (NM_030775.2,681-699).
gggagcgagagaagaactt

SEQ ID NO: 255497 - DNA, 19 bp, Homo sapiens
  siRNA target sequence for WNT5B (NM_030775.2,757-775).
cggtcgcagggctgtgtat

SEQ ID NO: 255498 - DNA, 19 bp, Homo sapiens
  siRNA target sequence for WNT5B (NM_030775.2,758-776).
ggtcgcagggctgtgtata

SEQ ID NO: 255499 - DNA, 19 bp, Homo sapiens
  siRNA target sequence for WNT5B (NM_030775.2,759-777).
gtcgcagggctgtgtataa

SEQ ID NO: 255500 - DNA, 19 bp, Homo sapiens
  siRNA target sequence for WNT5B (NM_030775.2,762-780).
gcagggctgtgtataagat

SEQ ID NO: 255501 - DNA, 19 bp, Homo sapiens
  siRNA target sequence for WNT5B (NM_030775.2,782-800).
gcagacgtagcctgcaaat

SEQ ID NO: 255502 - DNA, 19 bp, Homo sapiens
  siRNA target sequence for WNT5B (NM_030775.2,1170-1188).
gcttcgtcaggtgtaagaa

SEQ ID NO: 255503 - DNA, 19 bp, Homo sapiens
  siRNA target sequence for WNT6 (NM_006522.2,581-599).
gtcacgcaggcctgttcta

SEQ ID NO: 255504 - DNA, 19 bp, Homo sapiens
  siRNA target sequence for WNT6 (NM_006522.2,1221-1239).
gcgtgcagctcgaagagaa

SEQ ID NO: 255505 - DNA, 19 bp, Homo sapiens
  siRNA target sequence for WNT7B (NM_058238.1,118-136).
ggattttctacgtgtttct

SEQ ID NO: 255506 - DNA, 19 bp, Homo sapiens
  siRNA target sequence for WNT7B (NM_058238.1,261-279).
cccgatgccatcattgtga

SEQ ID NO: 255507 - DNA, 19 bp, Homo sapiens
  siRNA target sequence for WNT7B (NM_058238.1,262-280).
ccgatgccatcattgtgat

SEQ ID NO: 255508 - DNA, 19 bp, Homo sapiens
  siRNA target sequence for WNT7B (NM_058238.1,263-281).
cgatgccatcattgtgatt

SEQ ID NO: 255509 - DNA, 19 bp, Homo sapiens
  siRNA target sequence for WNT7B (NM_058238.1,861-879).
cagctgcgcagctatcaga

SEQ ID NO: 255510 - DNA, 19 bp, Homo sapiens
  siRNA target sequence for WNT7B (NM_058238.1,890-908).
gacagacctggtgtacatt

SEQ ID NO: 255511 - DNA, 19 bp, Homo sapiens
  siRNA target sequence for WNT8A (NM_031933.1,164-182).
gcctggtcagtgaacaatt

SEQ ID NO: 255512 - DNA, 19 bp, Homo sapiens
  siRNA target sequence for WNT8A (NM_031933.1,194-212).
ggtcccaaggcctatctga

SEQ ID NO: 255513 - DNA, 19 bp, Homo sapiens
  siRNA target sequence for WNT8A (NM_031933.1,286-304).
ctggaactgccctgaaaat

SEQ ID NO: 255514 - DNA, 19 bp, Homo sapiens
  siRNA target sequence for WNT8A (NM_031933.1,354-372).
cttccttcatacatgctat

SEQ ID NO: 255515 - DNA, 19 bp, Homo sapiens
  siRNA target sequence for WNT8A (NM_031933.1,383-401).
ggagtcatgtacatcatca

SEQ ID NO: 255516 - DNA, 19 bp, Homo sapiens
  siRNA target sequence for WNT8A (NM_031933.1,414-432).
gcatgggtgacttcgaaaa

SEQ ID NO: 255517 - DNA, 19 bp, Homo sapiens
  siRNA target sequence for WNT8A (NM_031933.1,418-436).
gggtgacttcgaaaactgt

SEQ ID NO: 255518 - DNA, 19 bp, Homo sapiens
  siRNA target sequence for WNT8A (NM_031933.1,443-461).
gatgggtcaaacaatggaa

SEQ ID NO: 255519 - DNA, 19 bp, Homo sapiens
  siRNA target sequence for WNT8A (NM_031933.1,495-513).
gcagcgacaatgtggaatt

SEQ ID NO: 255520 - DNA, 19 bp, Homo sapiens
  siRNA target sequence for WNT8A (NM_031933.1,496-514).
cagcgacaatgtggaattt

SEQ ID NO: 255521 - DNA, 19 bp, Homo sapiens
  siRNA target sequence for WNT8A (NM_031933.1,522-540).
ggatctccaaactctttgt

SEQ ID NO: 255522 - DNA, 19 bp, Homo sapiens
  siRNA target sequence for WNT8A (NM_031933.1,659-677).
gggagctgcagcatacaga

SEQ ID NO: 255523 - DNA, 19 bp, Homo sapiens
  siRNA target sequence for WNT8A (NM_031933.1,718-736).
ctacctaaaggccaagtat

SEQ ID NO: 255524 - DNA, 19 bp, Homo sapiens
  siRNA target sequence for WNT8A (NM_031933.1,739-757).
ccaggcgctgaaaattgaa

SEQ ID NO: 255525 - DNA, 19 bp, Homo sapiens
  siRNA target sequence for WNT8A (NM_031933.1,857-875).
gaggaatcaccagattact

SEQ ID NO: 255526 - DNA, 19 bp, Homo sapiens
  siRNA target sequence for WNT8A (NM_031933.1,860-878).
gaatcaccagattactgta

SEQ ID NO: 255527 - DNA, 19 bp, Homo sapiens
  siRNA target sequence for WNT8A (NM_031933.1,1029-1047).
gcagctgtaactgcaaatt

SEQ ID NO: 255528 - DNA, 19 bp, Homo sapiens
  siRNA target sequence for WNT8A (NM_031933.1,1085-1103).
catgtggtgagcaagtatt

SEQ ID NO: 255529 - DNA, 19 bp, Homo sapiens
  siRNA target sequence for WNT8A (NM_031933.1,1088-1106).
gtggtgagcaagtattact

SEQ ID NO: 255530 - DNA, 19 bp, Homo sapiens
  siRNA target sequence for WNT8B (NM_003393.2,275-293).
cccagagtggtattgaaga

SEQ ID NO: 255531 - DNA, 19 bp, Homo sapiens
  siRNA target sequence for WNT8B (NM_003393.2,276-294).
ccagagtggtattgaagaa

SEQ ID NO: 255532 - DNA, 19 bp, Homo sapiens
  siRNA target sequence for WNT8B (NM_003393.2,277-295).
cagagtggtattgaagaat

SEQ ID NO: 255533 - DNA, 19 bp, Homo sapiens
  siRNA target sequence for WNT8B (NM_003393.2,557-575).
cgatttccaagcagtttgt

SEQ ID NO: 255534 - DNA, 19 bp, Homo sapiens
  siRNA target sequence for WNT8B (NM_003393.2,897-915).
ctactgcctggagaacaaa

SEQ ID NO: 255535 - DNA, 19 bp, Homo sapiens
  siRNA target sequence for WNT8B (NM_003393.2,1111-1129).
cggagggtcaccaagtact

SEQ ID NO: 255536 - DNA, 19 bp, Homo sapiens
  siRNA target sequence for WNT8B (NM_003393.2,1112-1130).
ggagggtcaccaagtactt

SEQ ID NO: 255537 - DNA, 19 bp, Homo sapiens
  siRNA target sequence for WNT9A (NM_003395.1,510-528).
ggctgcggagacaacctta

SEQ ID NO: 255538 - DNA, 19 bp, Homo sapiens
  siRNA target sequence for WNT9A (NM_003395.1,511-529).
gctgcggagacaaccttaa

SEQ ID NO: 255539 - DNA, 19 bp, Homo sapiens
  siRNA target sequence for WNT9A (NM_003395.1,592-610).
gtgtggacttccacaacaa

SEQ ID NO: 255540 - DNA, 19 bp, Homo sapiens
  siRNA target sequence for WNT9A (NM_003395.1,704-722).
gcagttggcgcctttccat

SEQ ID NO: 255541 - DNA, 19 bp, Homo sapiens
  siRNA target sequence for WNT9A (NM_003395.1,770-788).
gggcagcaccaccaatgaa

SEQ ID NO: 255542 - DNA, 19 bp, Homo sapiens
  siRNA target sequence for WNT9B (NM_003396.1,602-620).
cgggcagacgcccacaata

SEQ ID NO: 255543 - DNA, 19 bp, Homo sapiens
  siRNA target sequence for WNT9B (NM_003396.1,749-767).
ctgaaactgcgctatgact

SEQ ID NO: 255544 - DNA, 19 bp, Homo sapiens
  siRNA target sequence for C3orf1 (NM_016589.1,237-255).
cctatttccccgagtcttt

SEQ ID NO: 255545 - DNA, 19 bp, Homo sapiens
  siRNA target sequence for C3orf1 (NM_016589.1,398-416).
caaaggaccttgctaatat

SEQ ID NO: 255546 - DNA, 19 bp, Homo sapiens
  siRNA target sequence for C3orf1 (NM_016589.1,453-471).
ggtgtatgggggaatacca

SEQ ID NO: 255547 - DNA, 19 bp, Homo sapiens
  siRNA target sequence for C3orf1 (NM_016589.1,460-478).
gggggaataccagctttta

SEQ ID NO: 255548 - DNA, 19 bp, Homo sapiens
  siRNA target sequence for C3orf1 (NM_016589.1,569-587).
cacgaggcttcattcgtta

SEQ ID NO: 255549 - DNA, 19 bp, Homo sapiens
  siRNA target sequence for C3orf1 (NM_016589.1,613-631).
gcagtgtttgtgactatat

SEQ ID NO: 255550 - DNA, 19 bp, Homo sapiens
  siRNA target sequence for C3orf1 (NM_016589.1,652-670).
ctgaatgtataccgaaata

SEQ ID NO: 255551 - DNA, 19 bp, Homo sapiens
  siRNA target sequence for C3orf1 (NM_016589.1,710-728).
cgggaagtctttttaggat

SEQ ID NO: 255552 - DNA, 19 bp, Homo sapiens
  siRNA target sequence for C3orf1 (NM_016589.1,864-882).
ggcactccatgagctaaaa

SEQ ID NO: 255553 - DNA, 19 bp, Homo sapiens
  siRNA target sequence for C3orf1 (NM_016589.1,866-884).
cactccatgagctaaaact

SEQ ID NO: 255554 - DNA, 19 bp, Homo sapiens
  siRNA target sequence for C3orf1 (NM_016589.1,891-909).
gtggaaaggcagactacaa

SEQ ID NO: 255555 - DNA, 19 bp, Homo sapiens
  siRNA target sequence for C3orf1 (NM_016589.1,893-911).
ggaaaggcagactacaagt

SEQ ID NO: 255556 - DNA, 19 bp, Homo sapiens
  siRNA target sequence for C3orf1 (NM_016589.1,894-912).
gaaaggcagactacaagtt

SEQ ID NO: 255557 - DNA, 19 bp, Homo sapiens
  siRNA target sequence for C3orf1 (NM_016589.1,899-917).
gcagactacaagttactga

SEQ ID NO: 255558 - DNA, 19 bp, Homo sapiens
  siRNA target sequence for C3orf1 (NM_016589.1,916-934).
gagcacctccctgagaaaa

SEQ ID NO: 255559 - DNA, 19 bp, Homo sapiens
  siRNA target sequence for C3orf1 (NM_016589.1,1007-1025).
gaaacccttcagtaataga

SEQ ID NO: 255560 - DNA, 19 bp, Homo sapiens
  siRNA target sequence for SEC61A1 (NM_013336.2,251-269).
gagaggaagattcagttta

SEQ ID NO: 255561 - DNA, 19 bp, Homo sapiens
  siRNA target sequence for SEC61A1 (NM_013336.2,255-273).
ggaagattcagtttaagga

SEQ ID NO: 255562 - DNA, 19 bp, Homo sapiens
  siRNA target sequence for SEC61A1 (NM_013336.2,288-306).
ccgctatcaccctctttat

SEQ ID NO: 255563 - DNA, 19 bp, Homo sapiens
  siRNA target sequence for SEC61A1 (NM_013336.2,290-308).
gctatcaccctctttatct

SEQ ID NO: 255564 - DNA, 19 bp, Homo sapiens
  siRNA target sequence for SEC61A1 (NM_013336.2,359-377).
gctgaccctttctattgga

SEQ ID NO: 255565 - DNA, 19 bp, Homo sapiens
  siRNA target sequence for SEC61A1 (NM_013336.2,360-378).
ctgaccctttctattggat

SEQ ID NO: 255566 - DNA, 19 bp, Homo sapiens
  siRNA target sequence for SEC61A1 (NM_013336.2,383-401).
gtgattctagcctctaaca

SEQ ID NO: 255567 - DNA, 19 bp, Homo sapiens
  siRNA target sequence for SEC61A1 (NM_013336.2,418-436).
gctagggatctctcctatt

SEQ ID NO: 255568 - DNA, 19 bp, Homo sapiens
  siRNA target sequence for SEC61A1 (NM_013336.2,422-440).
gggatctctcctattgtca

SEQ ID NO: 255569 - DNA, 19 bp, Homo sapiens
  siRNA target sequence for SEC61A1 (NM_013336.2,437-455).
gtcacgtctggccttataa

SEQ ID NO: 255570 - DNA, 19 bp, Homo sapiens
  siRNA target sequence for SEC61A1 (NM_013336.2,447-465).
gccttataatgcaactctt

SEQ ID NO: 255571 - DNA, 19 bp, Homo sapiens
  siRNA target sequence for SEC61A1 (NM_013336.2,463-481).
cttggctggcgccaagata

SEQ ID NO: 255572 - DNA, 19 bp, Homo sapiens
  siRNA target sequence for SEC61A1 (NM_013336.2,466-484).
ggctggcgccaagataatt

SEQ ID NO: 255573 - DNA, 19 bp, Homo sapiens
  siRNA target sequence for SEC61A1 (NM_013336.2,468-486).
ctggcgccaagataattga

SEQ ID NO: 255574 - DNA, 19 bp, Homo sapiens
  siRNA target sequence for SEC61A1 (NM_013336.2,471-489).
gcgccaagataattgaagt

SEQ ID NO: 255575 - DNA, 19 bp, Homo sapiens
  siRNA target sequence for SEC61A1 (NM_013336.2,472-490).
cgccaagataattgaagtt

SEQ ID NO: 255576 - DNA, 19 bp, Homo sapiens
  siRNA target sequence for SEC61A1 (NM_013336.2,523-541).
cggagcccaaaagttattt

SEQ ID NO: 255577 - DNA, 19 bp, Homo sapiens
  siRNA target sequence for SEC61A1 (NM_013336.2,561-579).
gccagtctatcgtgtatgt

SEQ ID NO: 255578 - DNA, 19 bp, Homo sapiens
  siRNA target sequence for SEC61A1 (NM_013336.2,563-581).
cagtctatcgtgtatgtga

SEQ ID NO: 255579 - DNA, 19 bp, Homo sapiens
  siRNA target sequence for SEC61A1 (NM_013336.2,618-636).
ctggaatttgcctgctaat

SEQ ID NO: 255580 - DNA, 19 bp, Homo sapiens
  siRNA target sequence for SEC61A1 (NM_013336.2,620-638).
ggaatttgcctgctaatca

SEQ ID NO: 255581 - DNA, 19 bp, Homo sapiens
  siRNA target sequence for SEC61A1 (NM_013336.2,706-724).
ccttggctctggtatttct

SEQ ID NO: 255582 - DNA, 19 bp, Homo sapiens
  siRNA target sequence for SEC61A1 (NM_013336.2,734-752).
gcaactaacatctgtgaaa

SEQ ID NO: 255583 - DNA, 19 bp, Homo sapiens
  siRNA target sequence for SEC61A1 (NM_013336.2,747-765).
gtgaaaccatcgtatggaa

SEQ ID NO: 255584 - DNA, 19 bp, Homo sapiens
  siRNA target sequence for SEC61A1 (NM_013336.2,796-814).
ccgaggaatggaatttgaa

SEQ ID NO: 255585 - DNA, 19 bp, Homo sapiens
  siRNA target sequence for SEC61A1 (NM_013336.2,816-834).
gtgctatcatcgcactttt

SEQ ID NO: 255586 - DNA, 19 bp, Homo sapiens
  siRNA target sequence for SEC61A1 (NM_013336.2,882-900).
cgttctaccgccagaatct

SEQ ID NO: 255587 - DNA, 19 bp, Homo sapiens
  siRNA target sequence for SEC61A1 (NM_013336.2,883-901).
gttctaccgccagaatctt

SEQ ID NO: 255588 - DNA, 19 bp, Homo sapiens
  siRNA target sequence for SEC61A1 (NM_013336.2,969-987).
gagtggacctgccaatcaa

SEQ ID NO: 255589 - DNA, 19 bp, Homo sapiens
  siRNA target sequence for SEC61A1 (NM_013336.2,996-1014).
gctaccgtggccagtacaa

SEQ ID NO: 255590 - DNA, 19 bp, Homo sapiens
  siRNA target sequence for SEC61A1 (NM_013336.2,1177-1195).
cccagcacgtgcttatcca

SEQ ID NO: 255591 - DNA, 19 bp, Homo sapiens
  siRNA target sequence for SEC61A1 (NM_013336.2,1219-1237).
gtcccctccagaatctttt

SEQ ID NO: 255592 - DNA, 19 bp, Homo sapiens
  siRNA target sequence for SEC61A1 (NM_013336.2,1255-1273).
cccggtccatgcagttgta

SEQ ID NO: 255593 - DNA, 19 bp, Homo sapiens
  siRNA target sequence for SEC61A1 (NM_013336.2,1257-1275).
cggtccatgcagttgtata

SEQ ID NO: 255594 - DNA, 19 bp, Homo sapiens
  siRNA target sequence for SEC61A1 (NM_013336.2,1261-1279).
ccatgcagttgtatacata

SEQ ID NO: 255595 - DNA, 19 bp, Homo sapiens
  siRNA target sequence for SEC61A1 (NM_013336.2,1265-1283).
gcagttgtatacatagtgt

SEQ ID NO: 255596 - DNA, 19 bp, Homo sapiens
  siRNA target sequence for SEC61A1 (NM_013336.2,1266-1284).
cagttgtatacatagtgtt

SEQ ID NO: 255597 - DNA, 19 bp, Homo sapiens
  siRNA target sequence for SEC61A1 (NM_013336.2,1407-1425).
ccatggtccatgaactcaa

SEQ ID NO: 255598 - DNA, 19 bp, Homo sapiens
  siRNA target sequence for SEC61A2 (NM_018144.2,181-199).
ggttctgtggactgctata

SEQ ID NO: 255599 - DNA, 19 bp, Homo sapiens
  siRNA target sequence for SEC61A2 (NM_018144.2,182-200).
gttctgtggactgctataa

SEQ ID NO: 255600 - DNA, 19 bp, Homo sapiens
  siRNA target sequence for SEC61A2 (NM_018144.2,192-210).
ctgctataacgctcttcat

SEQ ID NO: 255601 - DNA, 19 bp, Homo sapiens
  siRNA target sequence for SEC61A2 (NM_018144.2,194-212).
gctataacgctcttcattt

SEQ ID NO: 255602 - DNA, 19 bp, Homo sapiens
  siRNA target sequence for SEC61A2 (NM_018144.2,300-318).
ccaatagaggaactttaat

SEQ ID NO: 255603 - DNA, 19 bp, Homo sapiens
  siRNA target sequence for SEC61A2 (NM_018144.2,325-343).
gggtatctccccaattgta

SEQ ID NO: 255604 - DNA, 19 bp, Homo sapiens
  siRNA target sequence for SEC61A2 (NM_018144.2,326-344).
ggtatctccccaattgtaa

SEQ ID NO: 255605 - DNA, 19 bp, Homo sapiens
  siRNA target sequence for SEC61A2 (NM_018144.2,331-349).
ctccccaattgtaacatct

SEQ ID NO: 255606 - DNA, 19 bp, Homo sapiens
  siRNA target sequence for SEC61A2 (NM_018144.2,345-363).
catctggtttgattatgca

SEQ ID NO: 255607 - DNA, 19 bp, Homo sapiens
  siRNA target sequence for SEC61A2 (NM_018144.2,395-413).
ggagatacaccgaaagata

SEQ ID NO: 255608 - DNA, 19 bp, Homo sapiens
  siRNA target sequence for SEC61A2 (NM_018144.2,404-422).
ccgaaagatagagctttat

SEQ ID NO: 255609 - DNA, 19 bp, Homo sapiens
  siRNA target sequence for SEC61A2 (NM_018144.2,431-449).
gcccagaaactgtttggta

SEQ ID NO: 255610 - DNA, 19 bp, Homo sapiens
  siRNA target sequence for SEC61A2 (NM_018144.2,440-458).
ctgtttggtatgatcatta

SEQ ID NO: 255611 - DNA, 19 bp, Homo sapiens
  siRNA target sequence for SEC61A2 (NM_018144.2,465-483).
ggcaagccattgtgtatgt

SEQ ID NO: 255612 - DNA, 19 bp, Homo sapiens
  siRNA target sequence for SEC61A2 (NM_018144.2,712-730).
gtttgagggtgcagtcata

SEQ ID NO: 255613 - DNA, 19 bp, Homo sapiens
  siRNA target sequence for SEC61A2 (NM_018144.2,760-778).
ggacaaagtccgagcttta

SEQ ID NO: 255614 - DNA, 19 bp, Homo sapiens
  siRNA target sequence for SEC61A2 (NM_018144.2,797-815).
cagaacttacccaatctca

SEQ ID NO: 255615 - DNA, 19 bp, Homo sapiens
  siRNA target sequence for SEC61A2 (NM_018144.2,873-891).
gcgttgatctgcccattaa

SEQ ID NO: 255616 - DNA, 19 bp, Homo sapiens
  siRNA target sequence for SEC61A2 (NM_018144.2,875-893).
gttgatctgcccattaagt

SEQ ID NO: 255617 - DNA, 19 bp, Homo sapiens
  siRNA target sequence for SEC61A2 (NM_018144.2,921-939).
gctaccccatcaaactctt

SEQ ID NO: 255618 - DNA, 19 bp, Homo sapiens
  siRNA target sequence for SEC61A2 (NM_018144.2,982-1000).
gtccaacctgtatgttatt

SEQ ID NO: 255619 - DNA, 19 bp, Homo sapiens
  siRNA target sequence for SEC61A2 (NM_018144.2,1009-1027).
gctgtctgttcgatttagt

SEQ ID NO: 255620 - DNA, 19 bp, Homo sapiens
  siRNA target sequence for SEC61A2 (NM_018144.2,1019-1037).
cgatttagtggcaactttt

SEQ ID NO: 255621 - DNA, 19 bp, Homo sapiens
  siRNA target sequence for SEC61A2 (NM_018144.2,1077-1095).
gaggacccgcacgttctta

SEQ ID NO: 255622 - DNA, 19 bp, Homo sapiens
  siRNA target sequence for SEC61A2 (NM_018144.2,1104-1122).
gaggcctttgttactatct

SEQ ID NO: 255623 - DNA, 19 bp, Homo sapiens
  siRNA target sequence for SEC61A2 (NM_018144.2,1108-1126).
cctttgttactatctttct

SEQ ID NO: 255624 - DNA, 19 bp, Homo sapiens
  siRNA target sequence for SEC61A2 (NM_018144.2,1213-1231).
ctctaagacatggattgaa

SEQ ID NO: 255625 - DNA, 19 bp, Homo sapiens
  siRNA target sequence for SEC61A2 (NM_018144.2,1300-1318).
ccgagatacctctatggtt

SEQ ID NO: 255626 - DNA, 19 bp, Homo sapiens
  siRNA target sequence for SEC61A2 (NM_018144.2,1311-1329).
ctatggttcatgagcttaa

SEQ ID NO: 255627 - DNA, 19 bp, Homo sapiens
  siRNA target sequence for SEC61A2 (NM_018144.2,1430-1448).
ctgctagcagtcactatta

SEQ ID NO: 255628 - DNA, 19 bp, Homo sapiens
  siRNA target sequence for SEC61A2 (NM_018144.2,1432-1450).
gctagcagtcactattatt

SEQ ID NO: 255629 - DNA, 19 bp, Homo sapiens
  siRNA target sequence for SEC61A2 (NM_018144.2,1433-1451).
ctagcagtcactattattt

SEQ ID NO: 255630 - DNA, 19 bp, Homo sapiens
  siRNA target sequence for SEC61A2 (NM_018144.2,1496-1514).
gggatgggtgctttgtttt

SEQ ID NO: 255631 - DNA, 19 bp, Homo sapiens
  siRNA target sequence for SEC61G (NM_014302.2,117-135).
gccaagtcggcagtttgta

SEQ ID NO: 255632 - DNA, 19 bp, Homo sapiens
  siRNA target sequence for SEC61G (NM_014302.2,122-140).
gtcggcagtttgtaaagga

SEQ ID NO: 255633 - DNA, 19 bp, Homo sapiens
  siRNA target sequence for SEC61G (NM_014302.2,141-159).
ctccattcggctggttaaa

SEQ ID NO: 255634 - DNA, 19 bp, Homo sapiens
  siRNA target sequence for SEC61G (NM_014302.2,144-162).
cattcggctggttaaaaga

SEQ ID NO: 255635 - DNA, 19 bp, Homo sapiens
  siRNA target sequence for SEC61G (NM_014302.2,164-182).
gcactaaacctgatagaaa

SEQ ID NO: 255636 - DNA, 19 bp, Homo sapiens
  siRNA target sequence for SEC61G (NM_014302.2,165-183).
cactaaacctgatagaaaa

SEQ ID NO: 255637 - DNA, 19 bp, Homo sapiens
  siRNA target sequence for SEC61G (NM_014302.2,211-229).
gcaataggatttgctataa

SEQ ID NO: 255638 - DNA, 19 bp, Homo sapiens
  siRNA target sequence for SEC61G (NM_014302.2,262-280).
catattcctattaataaca

SEQ ID NO: 255639 - DNA, 19 bp, Homo sapiens
  siRNA target sequence for TIMM17A (NM_006335.1,57-75).
gtggtggggcctttacgat

SEQ ID NO: 255640 - DNA, 19 bp, Homo sapiens
  siRNA target sequence for TIMM17A (NM_006335.1,90-108).
gtggtatctttcaagcaat

SEQ ID NO: 255641 - DNA, 19 bp, Homo sapiens
  siRNA target sequence for TIMM17A (NM_006335.1,109-127).
caaaggttttcgcaattct

SEQ ID NO: 255642 - DNA, 19 bp, Homo sapiens
  siRNA target sequence for TIMM17A (NM_006335.1,155-173).
gggagtttgacagctatta

SEQ ID NO: 255643 - DNA, 19 bp, Homo sapiens
  siRNA target sequence for TIMM17A (NM_006335.1,157-175).
gagtttgacagctattaaa

SEQ ID NO: 255644 - DNA, 19 bp, Homo sapiens
  siRNA target sequence for TIMM17A (NM_006335.1,228-246).
ccatgattgactgtagtat

SEQ ID NO: 255645 - DNA, 19 bp, Homo sapiens
  siRNA target sequence for TIMM17A (NM_006335.1,365-383).
ggcattctcctagctttaa

SEQ ID NO: 255646 - DNA, 19 bp, Homo sapiens
  siRNA target sequence for TIMM17A (NM_006335.1,366-384).
gcattctcctagctttaat

SEQ ID NO: 255647 - DNA, 19 bp, Homo sapiens
  siRNA target sequence for TIMM17A (NM_006335.1,367-385).
cattctcctagctttaatt

SEQ ID NO: 255648 - DNA, 19 bp, Homo sapiens
  siRNA target sequence for TIMM17A (NM_006335.1,392-410).
gctggtatcttgttgacaa

SEQ ID NO: 255649 - DNA, 19 bp, Homo sapiens
  siRNA target sequence for TIMM17A (NM_006335.1,395-413).
ggtatcttgttgacaagat

SEQ ID NO: 255650 - DNA, 19 bp, Homo sapiens
  siRNA target sequence for TIMM17A (NM_006335.1,396-414).
gtatcttgttgacaagatt

SEQ ID NO: 255651 - DNA, 19 bp, Homo sapiens
  siRNA target sequence for TIMM17A (NM_006335.1,466-484).
gttgccttcaactcagtta

SEQ ID NO: 255652 - DNA, 19 bp, Homo sapiens
  siRNA target sequence for TIMM17A (NM_006335.1,501-519).
gagactatcgacaatatca

SEQ ID NO: 255653 - DNA, 19 bp, Homo sapiens
  siRNA target sequence for TIMM17B (NM_005834.1,199-217).
gcggtggagccttcactat

SEQ ID NO: 255654 - DNA, 19 bp, Homo sapiens
  siRNA target sequence for TIMM17B (NM_005834.1,262-280).
gcaatgcccctgttggaat

SEQ ID NO: 255655 - DNA, 19 bp, Homo sapiens
  siRNA target sequence for TIMM17B (NM_005834.1,363-381).
ctgttctccaccattgact

SEQ ID NO: 255656 - DNA, 19 bp, Homo sapiens
  siRNA target sequence for TIMM22 (NM_013337.1,235-253).
gcgtgggaggatttgtctt

SEQ ID NO: 255657 - DNA, 19 bp, Homo sapiens
  siRNA target sequence for TIMM22 (NM_013337.1,236-254).
cgtgggaggatttgtctta

SEQ ID NO: 255658 - DNA, 19 bp, Homo sapiens
  siRNA target sequence for TIMM22 (NM_013337.1,277-295).
ccgctggcatcgataccaa

SEQ ID NO: 255659 - DNA, 19 bp, Homo sapiens
  siRNA target sequence for TIMM22 (NM_013337.1,299-317).
gggctttgaccctaaggat

SEQ ID NO: 255660 - DNA, 19 bp, Homo sapiens
  siRNA target sequence for TIMM22 (NM_013337.1,323-341).
ccgtacaccgactgcaaaa

SEQ ID NO: 255661 - DNA, 19 bp, Homo sapiens
  siRNA target sequence for TIMM22 (NM_013337.1,325-343).
gtacaccgactgcaaaaga

SEQ ID NO: 255662 - DNA, 19 bp, Homo sapiens
  siRNA target sequence for TIMM22 (NM_013337.1,402-420).
ggagccatgttttcttgta

SEQ ID NO: 255663 - DNA, 19 bp, Homo sapiens
  siRNA target sequence for TIMM22 (NM_013337.1,560-578).
ctctgctgcgattgattat

SEQ ID NO: 255664 - DNA, 19 bp, Homo sapiens
  siRNA target sequence for TIMM22 (NM_013337.1,562-580).
ctgctgcgattgattatta

SEQ ID NO: 255665 - DNA, 19 bp, Homo sapiens
  siRNA target sequence for TIMM22 (NM_013337.1,565-583).
ctgcgattgattattacct

SEQ ID NO: 255666 - DNA, 19 bp, Homo sapiens
  siRNA target sequence for TIMM23 (NM_006327.1,244-262).
ccctctgtctccttattta

SEQ ID NO: 255667 - DNA, 19 bp, Homo sapiens
  siRNA target sequence for TIMM23 (NM_006327.1,280-298).
cctcgtgcaggatacagat

SEQ ID NO: 255668 - DNA, 19 bp, Homo sapiens
  siRNA target sequence for TIMM23 (NM_006327.1,289-307).
ggatacagatgagtttatt

SEQ ID NO: 255669 - DNA, 19 bp, Homo sapiens
  siRNA target sequence for TIMM23 (NM_006327.1,290-308).
gatacagatgagtttattt

SEQ ID NO: 255670 - DNA, 19 bp, Homo sapiens
  siRNA target sequence for TIMM23 (NM_006327.1,311-329).
cctaccggagctaataaaa

SEQ ID NO: 255671 - DNA, 19 bp, Homo sapiens
  siRNA target sequence for TIMM23 (NM_006327.1,344-362).
gagctggccttctttacga

SEQ ID NO: 255672 - DNA, 19 bp, Homo sapiens
  siRNA target sequence for TIMM23 (NM_006327.1,346-364).
gctggccttctttacgatt

SEQ ID NO: 255673 - DNA, 19 bp, Homo sapiens
  siRNA target sequence for TIMM23 (NM_006327.1,387-405).
ctgcgtttggtgcaatgaa

SEQ ID NO: 255674 - DNA, 19 bp, Homo sapiens
  siRNA target sequence for TIMM23 (NM_006327.1,408-426).
gtcttcggctaggattgaa

SEQ ID NO: 255675 - DNA, 19 bp, Homo sapiens
  siRNA target sequence for TIMM23 (NM_006327.1,413-431).
cggctaggattgaaggaaa

SEQ ID NO: 255676 - DNA, 19 bp, Homo sapiens
  siRNA target sequence for TIMM23 (NM_006327.1,494-512).
ggggcactttgggctaata

SEQ ID NO: 255677 - DNA, 19 bp, Homo sapiens
  siRNA target sequence for TIMM23 (NM_006327.1,498-516).
cactttgggctaatactct

SEQ ID NO: 255678 - DNA, 19 bp, Homo sapiens
  siRNA target sequence for TIMM23 (NM_006327.1,532-550).
gctctatagtgcatttggt

SEQ ID NO: 255679 - DNA, 19 bp, Homo sapiens
  siRNA target sequence for TIMM23 (NM_006327.1,617-635).
ggcatgttgtataaatgta

SEQ ID NO: 255680 - DNA, 19 bp, Homo sapiens
  siRNA target sequence for TIMM8A (NM_004085.2,232-250).
gcgttgagcgcttcattga

SEQ ID NO: 255681 - DNA, 19 bp, Homo sapiens
  siRNA target sequence for TIMM8A (NM_004085.2,234-252).
gttgagcgcttcattgata

SEQ ID NO: 255682 - DNA, 19 bp, Homo sapiens
  siRNA target sequence for TIMM8A (NM_004085.2,237-255).
gagcgcttcattgatacaa

SEQ ID NO: 255683 - DNA, 19 bp, Homo sapiens
  siRNA target sequence for SLC6A6 (NM_003043.1,38-56).
ctgcagtgtctgaaagatt

SEQ ID NO: 255684 - DNA, 19 bp, Homo sapiens
  siRNA target sequence for SLC6A6 (NM_003043.1,253-271).
gtttctcataccgtatttt

SEQ ID NO: 255685 - DNA, 19 bp, Homo sapiens
  siRNA target sequence for SLC6A6 (NM_003043.1,389-407).
ggctatgcctccgttgtaa

SEQ ID NO: 255686 - DNA, 19 bp, Homo sapiens
  siRNA target sequence for SLC6A6 (NM_003043.1,390-408).
gctatgcctccgttgtaat

SEQ ID NO: 255687 - DNA, 19 bp, Homo sapiens
  siRNA target sequence for SLC6A6 (NM_003043.1,391-409).
ctatgcctccgttgtaatt

SEQ ID NO: 255688 - DNA, 19 bp, Homo sapiens
  siRNA target sequence for SLC6A6 (NM_003043.1,395-413).
gcctccgttgtaattgtgt

SEQ ID NO: 255689 - DNA, 19 bp, Homo sapiens
  siRNA target sequence for SLC6A6 (NM_003043.1,539-557).
gacaccatgcgcaagaaca

SEQ ID NO: 255690 - DNA, 19 bp, Homo sapiens
  siRNA target sequence for SLC6A6 (NM_003043.1,896-914).
gacgctgggactcagatat

SEQ ID NO: 255691 - DNA, 19 bp, Homo sapiens
  siRNA target sequence for SLC6A6 (NM_003043.1,899-917).
gctgggactcagatattct

SEQ ID NO: 255692 - DNA, 19 bp, Homo sapiens
  siRNA target sequence for SLC6A6 (NM_003043.1,960-978).
gctacaacaagtacaagta

SEQ ID NO: 255693 - DNA, 19 bp, Homo sapiens
  siRNA target sequence for SLC6A6 (NM_003043.1,1015-1033).
gaacagtggtaccagtttt

SEQ ID NO: 255694 - DNA, 19 bp, Homo sapiens
  siRNA target sequence for SLC6A6 (NM_003043.1,1034-1052).
gtgtctggcttcgcaattt

SEQ ID NO: 255695 - DNA, 19 bp, Homo sapiens
  siRNA target sequence for SLC6A6 (NM_003043.1,1036-1054).
gtctggcttcgcaattttt

SEQ ID NO: 255696 - DNA, 19 bp, Homo sapiens
  siRNA target sequence for SLC6A6 (NM_003043.1,1040-1058).
ggcttcgcaattttttcca

SEQ ID NO: 255697 - DNA, 19 bp, Homo sapiens
  siRNA target sequence for SLC6A6 (NM_003043.1,1159-1177).
gatgccgctgcccacattt

SEQ ID NO: 255698 - DNA, 19 bp, Homo sapiens
  siRNA target sequence for SLC6A6 (NM_003043.1,1163-1181).
ccgctgcccacattttggt

SEQ ID NO: 255699 - DNA, 19 bp, Homo sapiens
  siRNA target sequence for SLC6A6 (NM_003043.1,1171-1189).
cacattttggtccattctt

SEQ ID NO: 255700 - DNA, 19 bp, Homo sapiens
  siRNA target sequence for SLC6A6 (NM_003043.1,1219-1237).
ggatagccagtttgttgaa

SEQ ID NO: 255701 - DNA, 19 bp, Homo sapiens
  siRNA target sequence for SLC6A6 (NM_003043.1,1224-1242).
gccagtttgttgaagttga

SEQ ID NO: 255702 - DNA, 19 bp, Homo sapiens
  siRNA target sequence for SLC6A6 (NM_003043.1,1238-1256).
gttgaaggacagatcacat

SEQ ID NO: 255703 - DNA, 19 bp, Homo sapiens
  siRNA target sequence for SLC6A6 (NM_003043.1,1252-1270).
cacatccttggttgatctt

SEQ ID NO: 255704 - DNA, 19 bp, Homo sapiens
  siRNA target sequence for SLC6A6 (NM_003043.1,1282-1300).
cctaaggaagggttatcgt

SEQ ID NO: 255705 - DNA, 19 bp, Homo sapiens
  siRNA target sequence for SLC6A6 (NM_003043.1,1293-1311).
gttatcgtcgggaaatctt

SEQ ID NO: 255706 - DNA, 19 bp, Homo sapiens
  siRNA target sequence for SLC6A6 (NM_003043.1,1362-1380).
cggagggtggcatgtatgt

SEQ ID NO: 255707 - DNA, 19 bp, Homo sapiens
  siRNA target sequence for SLC6A6 (NM_003043.1,1429-1447).
ggttgcattctttgaatgt

SEQ ID NO: 255708 - DNA, 19 bp, Homo sapiens
  siRNA target sequence for SLC6A6 (NM_003043.1,1470-1488).
gaggtgataacctttatga

SEQ ID NO: 255709 - DNA, 19 bp, Homo sapiens
  siRNA target sequence for SLC6A6 (NM_003043.1,1598-1616).
gtacccctgacctacaaca

SEQ ID NO: 255710 - DNA, 19 bp, Homo sapiens
  siRNA target sequence for SLC6A6 (NM_003043.1,1604-1622).
ctgacctacaacaaaacat

SEQ ID NO: 255711 - DNA, 19 bp, Homo sapiens
  siRNA target sequence for SLC6A4 (NM_001045.2,301-319).
gacgacgcccttgaattct

SEQ ID NO: 255712 - DNA, 19 bp, Homo sapiens
  siRNA target sequence for SLC6A4 (NM_001045.2,303-321).
cgacgcccttgaattctca

SEQ ID NO: 255713 - DNA, 19 bp, Homo sapiens
  siRNA target sequence for SLC6A4 (NM_001045.2,328-346).
gctatcagcgtgtgaagat

SEQ ID NO: 255714 - DNA, 19 bp, Homo sapiens
  siRNA target sequence for SLC6A4 (NM_001045.2,407-425).
gtggagtccgggcaaatat

SEQ ID NO: 255715 - DNA, 19 bp, Homo sapiens
  siRNA target sequence for SLC6A4 (NM_001045.2,410-428).
gagtccgggcaaatatcca

SEQ ID NO: 255716 - DNA, 19 bp, Homo sapiens
  siRNA target sequence for SLC6A4 (NM_001045.2,412-430).
gtccgggcaaatatccaat

SEQ ID NO: 255717 - DNA, 19 bp, Homo sapiens
  siRNA target sequence for SLC6A4 (NM_001045.2,601-619).
ctggcgcttcccctacata

SEQ ID NO: 255718 - DNA, 19 bp, Homo sapiens
  siRNA target sequence for SLC6A4 (NM_001045.2,677-695).
gggggaatcccgctctttt

SEQ ID NO: 255719 - DNA, 19 bp, Homo sapiens
  siRNA target sequence for SLC6A4 (NM_001045.2,678-696).
ggggaatcccgctctttta

SEQ ID NO: 255720 - DNA, 19 bp, Homo sapiens
  siRNA target sequence for SLC6A4 (NM_001045.2,680-698).
ggaatcccgctcttttaca

SEQ ID NO: 255721 - DNA, 19 bp, Homo sapiens
  siRNA target sequence for SLC6A4 (NM_001045.2,681-699).
gaatcccgctcttttacat

SEQ ID NO: 255722 - DNA, 19 bp, Homo sapiens
  siRNA target sequence for SLC6A4 (NM_001045.2,716-734).
cagtaccaccgaaatggat

SEQ ID NO: 255723 - DNA, 19 bp, Homo sapiens
  siRNA target sequence for SLC6A4 (NM_001045.2,721-739).
ccaccgaaatggatgcatt

SEQ ID NO: 255724 - DNA, 19 bp, Homo sapiens
  siRNA target sequence for SLC6A4 (NM_001045.2,722-740).
caccgaaatggatgcattt

SEQ ID NO: 255725 - DNA, 19 bp, Homo sapiens
  siRNA target sequence for SLC6A4 (NM_001045.2,724-742).
ccgaaatggatgcatttca

SEQ ID NO: 255726 - DNA, 19 bp, Homo sapiens
  siRNA target sequence for SLC6A4 (NM_001045.2,725-743).
cgaaatggatgcatttcaa

SEQ ID NO: 255727 - DNA, 19 bp, Homo sapiens
  siRNA target sequence for SLC6A4 (NM_001045.2,731-749).
ggatgcatttcaatatgga

SEQ ID NO: 255728 - DNA, 19 bp, Homo sapiens
  siRNA target sequence for SLC6A4 (NM_001045.2,914-932).
ggcaactgcaccaattact

SEQ ID NO: 255729 - DNA, 19 bp, Homo sapiens
  siRNA target sequence for SLC6A4 (NM_001045.2,915-933).
gcaactgcaccaattactt

SEQ ID NO: 255730 - DNA, 19 bp, Homo sapiens
  siRNA target sequence for SLC6A4 (NM_001045.2,967-985).
cacgtcccctgctgaagaa

SEQ ID NO: 255731 - DNA, 19 bp, Homo sapiens
  siRNA target sequence for SLC6A4 (NM_001045.2,969-987).
cgtcccctgctgaagaatt

SEQ ID NO: 255732 - DNA, 19 bp, Homo sapiens
  siRNA target sequence for SLC6A4 (NM_001045.2,970-988).
gtcccctgctgaagaattt

SEQ ID NO: 255733 - DNA, 19 bp, Homo sapiens
  siRNA target sequence for SLC6A4 (NM_001045.2,972-990).
cccctgctgaagaatttta

SEQ ID NO: 255734 - DNA, 19 bp, Homo sapiens
  siRNA target sequence for SLC6A4 (NM_001045.2,1148-1166).
gccaccttcccttatatca

SEQ ID NO: 255735 - DNA, 19 bp, Homo sapiens
  siRNA target sequence for SLC6A4 (NM_001045.2,1212-1230).
ggaggggtgttctcttcta

SEQ ID NO: 255736 - DNA, 19 bp, Homo sapiens
  siRNA target sequence for SLC6A4 (NM_001045.2,1261-1279).
gacaggggtgtggatagat

SEQ ID NO: 255737 - DNA, 19 bp, Homo sapiens
  siRNA target sequence for SLC6A4 (NM_001045.2,1331-1349).
gcttttgctagctacaaca

SEQ ID NO: 255738 - DNA, 19 bp, Homo sapiens
  siRNA target sequence for SLC6A4 (NM_001045.2,1825-1843).
cgctgtgtcttggttctat

SEQ ID NO: 255739 - DNA, 19 bp, Homo sapiens
  siRNA target sequence for SLC6A4 (NM_001045.2,1921-1939).
ggccatcagccctctgttt

SEQ ID NO: 255740 - DNA, 19 bp, Homo sapiens
  siRNA target sequence for SLC6A4 (NM_001045.2,1945-1963).
gttcatcatttgcagtttt

SEQ ID NO: 255741 - DNA, 19 bp, Homo sapiens
  siRNA target sequence for SLC6A4 (NM_001045.2,1974-1992).
cgccacaactacgactttt

SEQ ID NO: 255742 - DNA, 19 bp, Homo sapiens
  siRNA target sequence for SLC6A4 (NM_001045.2,1977-1995).
cacaactacgacttttcca

SEQ ID NO: 255743 - DNA, 19 bp, Homo sapiens
  siRNA target sequence for SLC6A4 (NM_001045.2,1982-2000).
ctacgacttttccaatata

SEQ ID NO: 255744 - DNA, 19 bp, Homo sapiens
  siRNA target sequence for SLC6A4 (NM_001045.2,2059-2077).
catccccacatatatagct

SEQ ID NO: 255745 - DNA, 19 bp, Homo sapiens
  siRNA target sequence for SLC6A4 (NM_001045.2,2062-2080).
ccccacatatatagcttat

SEQ ID NO: 255746 - DNA, 19 bp, Homo sapiens
  siRNA target sequence for SLC6A4 (NM_001045.2,2075-2093).
gcttatcggttgatcatca

SEQ ID NO: 255747 - DNA, 19 bp, Homo sapiens
  siRNA target sequence for SLC6A2 (NM_001043.1,338-356).
ccgtacacactgttcctta

SEQ ID NO: 255748 - DNA, 19 bp, Homo sapiens
  siRNA target sequence for SLC6A2 (NM_001043.1,339-357).
cgtacacactgttccttat

SEQ ID NO: 255749 - DNA, 19 bp, Homo sapiens
  siRNA target sequence for SLC6A2 (NM_001043.1,420-438).
ctgccaccgtttggaaaat

SEQ ID NO: 255750 - DNA, 19 bp, Homo sapiens
  siRNA target sequence for SLC6A2 (NM_001043.1,422-440).
gccaccgtttggaaaatct

SEQ ID NO: 255751 - DNA, 19 bp, Homo sapiens
  siRNA target sequence for SLC6A2 (NM_001043.1,485-503).
ctgtacgttggcttctact

SEQ ID NO: 255752 - DNA, 19 bp, Homo sapiens
  siRNA target sequence for SLC6A2 (NM_001043.1,675-693).
cggcagccgagttttatga

SEQ ID NO: 255753 - DNA, 19 bp, Homo sapiens
  siRNA target sequence for SLC6A2 (NM_001043.1,720-738).
gcagcgggattcatgacat

SEQ ID NO: 255754 - DNA, 19 bp, Homo sapiens
  siRNA target sequence for SLC6A2 (NM_001043.1,779-797).
gtcgtcatcgtcttgtatt

SEQ ID NO: 255755 - DNA, 19 bp, Homo sapiens
  siRNA target sequence for SLC6A2 (NM_001043.1,781-799).
cgtcatcgtcttgtatttt

SEQ ID NO: 255756 - DNA, 19 bp, Homo sapiens
  siRNA target sequence for SLC6A2 (NM_001043.1,846-864).
cagccacgctgccttactt

SEQ ID NO: 255757 - DNA, 19 bp, Homo sapiens
  siRNA target sequence for SLC6A2 (NM_001043.1,940-958).
cgacttctaccgcttgaaa

SEQ ID NO: 255758 - DNA, 19 bp, Homo sapiens
  siRNA target sequence for SLC6A2 (NM_001043.1,982-1000).
cgcaactcagatatttttt

SEQ ID NO: 255759 - DNA, 19 bp, Homo sapiens
  siRNA target sequence for SLC6A2 (NM_001043.1,1010-1028).
gctggatttggagtattga

SEQ ID NO: 255760 - DNA, 19 bp, Homo sapiens
  siRNA target sequence for SLC6A2 (NM_001043.1,1031-1049).
gcatttgccagttacaaca

SEQ ID NO: 255761 - DNA, 19 bp, Homo sapiens
  siRNA target sequence for SLC6A2 (NM_001043.1,1086-1104).
ccagcagcatcaactgtat

SEQ ID NO: 255762 - DNA, 19 bp, Homo sapiens
  siRNA target sequence for SLC6A2 (NM_001043.1,1146-1164).
gttacatggcccatgaaca

SEQ ID NO: 255763 - DNA, 19 bp, Homo sapiens
  siRNA target sequence for SLC6A2 (NM_001043.1,1197-1215).
gagctggcctagtgttcat

SEQ ID NO: 255764 - DNA, 19 bp, Homo sapiens
  siRNA target sequence for SLC6A2 (NM_001043.1,1219-1237).
gtatccagaggccatttct

SEQ ID NO: 255765 - DNA, 19 bp, Homo sapiens
  siRNA target sequence for SLC6A2 (NM_001043.1,1241-1259).
ctgtctggatctacattct

SEQ ID NO: 255766 - DNA, 19 bp, Homo sapiens
  siRNA target sequence for SLC6A2 (NM_001043.1,1415-1433).
ctcgccctgttctgcataa

SEQ ID NO: 255767 - DNA, 19 bp, Homo sapiens
  siRNA target sequence for SLC6A2 (NM_001043.1,1418-1436).
gccctgttctgcataacca

SEQ ID NO: 255768 - DNA, 19 bp, Homo sapiens
  siRNA target sequence for SLC6A2 (NM_001043.1,1434-1452).
ccaagggtggaatttacgt

SEQ ID NO: 255769 - DNA, 19 bp, Homo sapiens
  siRNA target sequence for SLC6A2 (NM_001043.1,1519-1537).
cggagtttcctggttttat

SEQ ID NO: 255770 - DNA, 19 bp, Homo sapiens
  siRNA target sequence for SLC6A2 (NM_001043.1,1680-1698).
cctacgacgactacatctt

SEQ ID NO: 255771 - DNA, 19 bp, Homo sapiens
  siRNA target sequence for SLC6A2 (NM_001043.1,1757-1775).
cccatctacgtcatctata

SEQ ID NO: 255772 - DNA, 19 bp, Homo sapiens
  siRNA target sequence for SLC6A8 (NM_005629.1,653-671).
cgccgagaacggcatctat

SEQ ID NO: 255773 - DNA, 19 bp, Homo sapiens
  siRNA target sequence for SLC6A8 (NM_005629.1,654-672).
gccgagaacggcatctata

SEQ ID NO: 255774 - DNA, 19 bp, Homo sapiens
  siRNA target sequence for SLC6A8 (NM_005629.1,805-823).
cgcgccagatggacttcat

SEQ ID NO: 255775 - DNA, 19 bp, Homo sapiens
  siRNA target sequence for SLC6A8 (NM_005629.1,1408-1426).
cgggaaagatcgtgtactt

SEQ ID NO: 255776 - DNA, 19 bp, Homo sapiens
  siRNA target sequence for SLC6A9 (NM_006934.1,340-358).
gcaaccagatcgagtttgt

SEQ ID NO: 255777 - DNA, 19 bp, Homo sapiens
  siRNA target sequence for SLC6A9 (NM_006934.1,341-359).
caaccagatcgagtttgta

SEQ ID NO: 255778 - DNA, 19 bp, Homo sapiens
  siRNA target sequence for SLC6A9 (NM_006934.1,547-565).
ggatcagccccatgttcaa

SEQ ID NO: 255779 - DNA, 19 bp, Homo sapiens
  siRNA target sequence for SLC6A9 (NM_006934.1,548-566).
gatcagccccatgttcaaa

SEQ ID NO: 255780 - DNA, 19 bp, Homo sapiens
  siRNA target sequence for SLC6A9 (NM_006934.1,568-586).
gagtgggctatggtatgat

SEQ ID NO: 255781 - DNA, 19 bp, Homo sapiens
  siRNA target sequence for SLC6A9 (NM_006934.1,602-620).
catcggcatctactacaat

SEQ ID NO: 255782 - DNA, 19 bp, Homo sapiens
  siRNA target sequence for SLC6A9 (NM_006934.1,675-693).
ccctgggcctactgcaata

SEQ ID NO: 255783 - DNA, 19 bp, Homo sapiens
  siRNA target sequence for SLC6A9 (NM_006934.1,1002-1020).
gtggtgctgaccattctgt

SEQ ID NO: 255784 - DNA, 19 bp, Homo sapiens
  siRNA target sequence for SLC6A9 (NM_006934.1,1056-1074).
ggcatcatgtactacctaa

SEQ ID NO: 255785 - DNA, 19 bp, Homo sapiens
  siRNA target sequence for SLC6A9 (NM_006934.1,1075-1093).
ccccgcagtgggacaagat

SEQ ID NO: 255786 - DNA, 19 bp, Homo sapiens
  siRNA target sequence for SLC6A9 (NM_006934.1,1187-1205).
caagttccacaataactgt

SEQ ID NO: 255787 - DNA, 19 bp, Homo sapiens
  siRNA target sequence for SLC6A9 (NM_006934.1,1660-1678).
gtgtggccatcatgtacat

SEQ ID NO: 255788 - DNA, 19 bp, Homo sapiens
  siRNA target sequence for SLC6A9 (NM_006934.1,1729-1747).
caccacccctcttctttca

SEQ ID NO: 255789 - DNA, 19 bp, Homo sapiens
  siRNA target sequence for SLC6A9 (NM_006934.1,1770-1788).
cccgccatcatcttcttta

SEQ ID NO: 255790 - DNA, 19 bp, Homo sapiens
  siRNA target sequence for SLC6A9 (NM_006934.1,2099-2117).
ccccattgtgggcagtaat

SEQ ID NO: 255791 - DNA, 19 bp, Homo sapiens
  siRNA target sequence for FLJ31236 (NM_182632.1,809-827).
ccctgccaggggcaacaaa

SEQ ID NO: 255792 - DNA, 19 bp, Homo sapiens
  siRNA target sequence for FLJ31236 (NM_182632.1,810-828).
cctgccaggggcaacaaaa

SEQ ID NO: 255793 - DNA, 19 bp, Homo sapiens
  siRNA target sequence for FLJ31236 (NM_182632.1,943-961).
gcttttgcaagttacaact

SEQ ID NO: 255794 - DNA, 19 bp, Homo sapiens
  siRNA target sequence for FLJ31236 (NM_182632.1,1056-1074).
ggggttcaaagcaactaat

SEQ ID NO: 255795 - DNA, 19 bp, Homo sapiens
  siRNA target sequence for FLJ31236 (NM_182632.1,1058-1076).
ggttcaaagcaactaatga

SEQ ID NO: 255796 - DNA, 19 bp, Homo sapiens
  siRNA target sequence for FLJ31236 (NM_182632.1,1525-1543).
ctggagattttcgacaatt

SEQ ID NO: 255797 - DNA, 19 bp, Homo sapiens
  siRNA target sequence for FLJ31236 (NM_182632.1,1763-1781).
cctggaaccccaaatacga

SEQ ID NO: 255798 - DNA, 19 bp, Homo sapiens
  siRNA target sequence for NTT5 (NM_014037.1,125-143).
gtcaaacgtgggaagacaa

SEQ ID NO: 255799 - DNA, 19 bp, Homo sapiens
  siRNA target sequence for NTT5 (NM_014037.1,134-152).
gggaagacaagggttcatt

SEQ ID NO: 255800 - DNA, 19 bp, Homo sapiens
  siRNA target sequence for NTT5 (NM_014037.1,153-171).
gacccggtctgcaacatct

SEQ ID NO: 255801 - DNA, 19 bp, Homo sapiens
  siRNA target sequence for NTT5 (NM_014037.1,177-195).
ctcagaggcccaagtttca

SEQ ID NO: 255802 - DNA, 19 bp, Homo sapiens
  siRNA target sequence for NTT5 (NM_014037.1,349-367).
ccgttctggtccagcaaaa

SEQ ID NO: 255803 - DNA, 19 bp, Homo sapiens
  siRNA target sequence for NTT5 (NM_014037.1,351-369).
gttctggtccagcaaaact

SEQ ID NO: 255804 - DNA, 19 bp, Homo sapiens
  siRNA target sequence for NTT5 (NM_014037.1,357-375).
gtccagcaaaactgagtat

SEQ ID NO: 255805 - DNA, 19 bp, Homo sapiens
  siRNA target sequence for NTT5 (NM_014037.1,359-377).
ccagcaaaactgagtatat

SEQ ID NO: 255806 - DNA, 19 bp, Homo sapiens
  siRNA target sequence for NTT5 (NM_014037.1,383-401).
ctcaggtgggcttctctat

SEQ ID NO: 255807 - DNA, 19 bp, Homo sapiens
  siRNA target sequence for NTT5 (NM_014037.1,429-447).
ctacctgtggcttaacagt

SEQ ID NO: 255808 - DNA, 19 bp, Homo sapiens
  siRNA target sequence for NTT5 (NM_014037.1,555-573).
gggtgtatggaagatcatt

SEQ ID NO: 255809 - DNA, 19 bp, Homo sapiens
  siRNA target sequence for NTT5 (NM_014037.1,624-642).
cctcggcctgtacttcaat

SEQ ID NO: 255810 - DNA, 19 bp, Homo sapiens
  siRNA target sequence for NTT5 (NM_014037.1,646-664).
gtcaattcctggatcatct

SEQ ID NO: 255811 - DNA, 19 bp, Homo sapiens
  siRNA target sequence for NTT5 (NM_014037.1,703-721).
gagaaatgtcccttaacga

SEQ ID NO: 255812 - DNA, 19 bp, Homo sapiens
  siRNA target sequence for NTT5 (NM_014037.1,712-730).
cccttaacgatgaactcta

SEQ ID NO: 255813 - DNA, 19 bp, Homo sapiens
  siRNA target sequence for NTT5 (NM_014037.1,723-741).
gaactctagtggctttgat

SEQ ID NO: 255814 - DNA, 19 bp, Homo sapiens
  siRNA target sequence for NTT5 (NM_014037.1,758-776).
caacaccctccatatactt

SEQ ID NO: 255815 - DNA, 19 bp, Homo sapiens
  siRNA target sequence for NTT5 (NM_014037.1,869-887).
gtcttgttggtgctttcat

SEQ ID NO: 255816 - DNA, 19 bp, Homo sapiens
  siRNA target sequence for NTT5 (NM_014037.1,906-924).
cactgggaaggtaatctat

SEQ ID NO: 255817 - DNA, 19 bp, Homo sapiens
  siRNA target sequence for NTT5 (NM_014037.1,908-926).
ctgggaaggtaatctatgt

SEQ ID NO: 255818 - DNA, 19 bp, Homo sapiens
  siRNA target sequence for NTT5 (NM_014037.1,910-928).
gggaaggtaatctatgtct

SEQ ID NO: 255819 - DNA, 19 bp, Homo sapiens
  siRNA target sequence for NTT5 (NM_014037.1,982-1000).
ctcctggaaggggcaaaat

SEQ ID NO: 255820 - DNA, 19 bp, Homo sapiens
  siRNA target sequence for NTT5 (NM_014037.1,1014-1032).
gttggtggttgccaagata

SEQ ID NO: 255821 - DNA, 19 bp, Homo sapiens
  siRNA target sequence for NTT5 (NM_014037.1,1025-1043).
ccaagatatcggatgtgta

SEQ ID NO: 255822 - DNA, 19 bp, Homo sapiens
  siRNA target sequence for NTT5 (NM_014037.1,1029-1047).
gatatcggatgtgtacaat

SEQ ID NO: 255823 - DNA, 19 bp, Homo sapiens
  siRNA target sequence for NTT5 (NM_014037.1,1066-1084).
gcagggggtcaagttttgt

SEQ ID NO: 255824 - DNA, 19 bp, Homo sapiens
  siRNA target sequence for NTT5 (NM_014037.1,1069-1087).
gggggtcaagttttgtcta

SEQ ID NO: 255825 - DNA, 19 bp, Homo sapiens
  siRNA target sequence for NTT5 (NM_014037.1,1070-1088).
ggggtcaagttttgtctaa

SEQ ID NO: 255826 - DNA, 19 bp, Homo sapiens
  siRNA target sequence for NTT5 (NM_014037.1,1072-1090).
ggtcaagttttgtctaaca

SEQ ID NO: 255827 - DNA, 19 bp, Homo sapiens
  siRNA target sequence for NTT5 (NM_014037.1,1164-1182).
ctttctcgtgtctgtgata

SEQ ID NO: 255828 - DNA, 19 bp, Homo sapiens
  siRNA target sequence for NTT5 (NM_014037.1,1191-1209).
cactttgttggttttcaca

SEQ ID NO: 255829 - DNA, 19 bp, Homo sapiens
  siRNA target sequence for NTT5 (NM_014037.1,1333-1351).
cctgtcaacctgctttaca

SEQ ID NO: 255830 - DNA, 19 bp, Homo sapiens
  siRNA target sequence for NTT5 (NM_014037.1,1434-1452).
caacatagagactcagttt

SEQ ID NO: 255831 - DNA, 19 bp, Homo sapiens
  siRNA target sequence for NTT5 (NM_014037.1,1460-1478).
ctagcgagggcccaaagtt

SEQ ID NO: 255832 - DNA, 19 bp, Homo sapiens
  siRNA target sequence for NTT5 (NM_014037.1,1574-1592).
gcagcgcaatagggattat

SEQ ID NO: 255833 - DNA, 19 bp, Homo sapiens
  siRNA target sequence for NTT5 (NM_014037.1,1577-1595).
gcgcaatagggattatgca

SEQ ID NO: 255834 - DNA, 19 bp, Homo sapiens
  siRNA target sequence for NTT5 (NM_014037.1,1612-1630).
ctccaggacaccttctctt

SEQ ID NO: 255835 - DNA, 19 bp, Homo sapiens
  siRNA target sequence for NTT5 (NM_014037.1,1653-1671).
gctcatagtgggagtcttt

SEQ ID NO: 255836 - DNA, 19 bp, Homo sapiens
  siRNA target sequence for NTT5 (NM_014037.1,1654-1672).
ctcatagtgggagtctttt

SEQ ID NO: 255837 - DNA, 19 bp, Homo sapiens
  siRNA target sequence for NTT5 (NM_014037.1,1764-1782).
catcgtcgttgtcgtattt

SEQ ID NO: 255838 - DNA, 19 bp, Homo sapiens
  siRNA target sequence for NTT5 (NM_014037.1,1767-1785).
cgtcgttgtcgtatttgaa

SEQ ID NO: 255839 - DNA, 19 bp, Homo sapiens
  siRNA target sequence for NTT5 (NM_014037.1,1768-1786).
gtcgttgtcgtatttgaaa

SEQ ID NO: 255840 - DNA, 19 bp, Homo sapiens
  siRNA target sequence for NTT5 (NM_014037.1,1897-1915).
ccagttgtgctgctaatca

SEQ ID NO: 255841 - DNA, 19 bp, Homo sapiens
  siRNA target sequence for NTT5 (NM_014037.1,2012-2030).
cgtgggcactgctcttgat

SEQ ID NO: 255842 - DNA, 19 bp, Homo sapiens
  siRNA target sequence for NTT5 (NM_014037.1,2015-2033).
gggcactgctcttgatgat

SEQ ID NO: 255843 - DNA, 19 bp, Homo sapiens
  siRNA target sequence for NTT5 (NM_014037.1,2061-2079).
catccctgcatactttgta

SEQ ID NO: 255844 - DNA, 19 bp, Homo sapiens
  siRNA target sequence for NTT5 (NM_014037.1,2082-2100).
ctgccgcatacataggatt

SEQ ID NO: 255845 - DNA, 19 bp, Homo sapiens
  siRNA target sequence for NTT5 (NM_014037.1,2144-2162).
catccctacccctaagtca

SEQ ID NO: 255846 - DNA, 19 bp, Homo sapiens
  siRNA target sequence for NTT5 (NM_014037.1,2163-2181).
ccagctaacacccagtaaa

SEQ ID NO: 255847 - DNA, 19 bp, Homo sapiens
  siRNA target sequence for NTT73 (NM_018057.2,448-466).
ggtggtaaaaagagaatta

SEQ ID NO: 255848 - DNA, 19 bp, Homo sapiens
  siRNA target sequence for NTT73 (NM_018057.2,514-532).
cgcagctgatgatgctttt

SEQ ID NO: 255849 - DNA, 19 bp, Homo sapiens
  siRNA target sequence for NTT73 (NM_018057.2,515-533).
gcagctgatgatgctttta

SEQ ID NO: 255850 - DNA, 19 bp, Homo sapiens
  siRNA target sequence for NTT73 (NM_018057.2,516-534).
cagctgatgatgcttttaa

SEQ ID NO: 255851 - DNA, 19 bp, Homo sapiens
  siRNA target sequence for NTT73 (NM_018057.2,591-609).
gatctgaagtcgaagatga

SEQ ID NO: 255852 - DNA, 19 bp, Homo sapiens
  siRNA target sequence for NTT73 (NM_018057.2,646-664).
ggcccaagttggattttct

SEQ ID NO: 255853 - DNA, 19 bp, Homo sapiens
  siRNA target sequence for NTT73 (NM_018057.2,648-666).
cccaagttggattttctgt

SEQ ID NO: 255854 - DNA, 19 bp, Homo sapiens
  siRNA target sequence for NTT73 (NM_018057.2,649-667).
ccaagttggattttctgta

SEQ ID NO: 255855 - DNA, 19 bp, Homo sapiens
  siRNA target sequence for NTT73 (NM_018057.2,718-736).
cggtgcatatcttttacca

SEQ ID NO: 255856 - DNA, 19 bp, Homo sapiens
  siRNA target sequence for NTT73 (NM_018057.2,719-737).
ggtgcatatcttttaccat

SEQ ID NO: 255857 - DNA, 19 bp, Homo sapiens
  siRNA target sequence for NTT73 (NM_018057.2,720-738).
gtgcatatcttttaccata

SEQ ID NO: 255858 - DNA, 19 bp, Homo sapiens
  siRNA target sequence for NTT73 (NM_018057.2,734-752).
ccatatttaatactactta

SEQ ID NO: 255859 - DNA, 19 bp, Homo sapiens
  siRNA target sequence for NTT73 (NM_018057.2,746-764).
ctacttatggtaataggta

SEQ ID NO: 255860 - DNA, 19 bp, Homo sapiens
  siRNA target sequence for NTT73 (NM_018057.2,813-831).
gcagcattggtgtatggaa

SEQ ID NO: 255861 - DNA, 19 bp, Homo sapiens
  siRNA target sequence for NTT73 (NM_018057.2,856-874).
gattggatttgcaagttgt

SEQ ID NO: 255862 - DNA, 19 bp, Homo sapiens
  siRNA target sequence for NTT73 (NM_018057.2,993-1011).
cttcacacacttttgtaga

SEQ ID NO: 255863 - DNA, 19 bp, Homo sapiens
  siRNA target sequence for NTT73 (NM_018057.2,1029-1047).
gttctgccaccacctatta

SEQ ID NO: 255864 - DNA, 19 bp, Homo sapiens
  siRNA target sequence for NTT73 (NM_018057.2,1088-1106).
gaaagtgggggcttaaact

SEQ ID NO: 255865 - DNA, 19 bp, Homo sapiens
  siRNA target sequence for NTT73 (NM_018057.2,1233-1251).
gattcatccctctctcaaa

SEQ ID NO: 255866 - DNA, 19 bp, Homo sapiens
  siRNA target sequence for NTT73 (NM_018057.2,1271-1289).
gggcaaatcacacataaca

SEQ ID NO: 255867 - DNA, 19 bp, Homo sapiens
  siRNA target sequence for NTT73 (NM_182767.1,841-859).
ggcattcgccacatgttta

SEQ ID NO: 255868 - DNA, 19 bp, Homo sapiens
  siRNA target sequence for NTT73 (NM_182767.1,860-878).
cccctaagcttgaaataat

SEQ ID NO: 255869 - DNA, 19 bp, Homo sapiens
  siRNA target sequence for NTT73 (NM_182767.1,863-881).
ctaagcttgaaataatgct

SEQ ID NO: 255870 - DNA, 19 bp, Homo sapiens
  siRNA target sequence for NTT73 (NM_182767.1,927-945).
cttaggtctgggatttggt

SEQ ID NO: 255871 - DNA, 19 bp, Homo sapiens
  siRNA target sequence for NTT73 (NM_182767.1,1084-1102).
gtcataaatgagaaatgca

SEQ ID NO: 255872 - DNA, 19 bp, Homo sapiens
  siRNA target sequence for NTT73 (NM_182767.1,1115-1133).
cagagacgatcatgaaatt

SEQ ID NO: 255873 - DNA, 19 bp, Homo sapiens
  siRNA target sequence for NTT73 (NM_182767.1,1117-1135).
gagacgatcatgaaatttt

SEQ ID NO: 255874 - DNA, 19 bp, Homo sapiens
  siRNA target sequence for NTT73 (NM_182767.1,1179-1197).
caacctttcaactgttact

SEQ ID NO: 255875 - DNA, 19 bp, Homo sapiens
  siRNA target sequence for NTT73 (NM_182767.1,1255-1273).
cctgctcttcatctcaatt

SEQ ID NO: 255876 - DNA, 19 bp, Homo sapiens
  siRNA target sequence for NTT73 (NM_182767.1,1264-1282).
catctcaattcctgtaaaa

SEQ ID NO: 255877 - DNA, 19 bp, Homo sapiens
  siRNA target sequence for NTT73 (NM_182767.1,1309-1327).
caggggaccggcttagctt

SEQ ID NO: 255878 - DNA, 19 bp, Homo sapiens
  siRNA target sequence for NTT73 (NM_182767.1,1312-1330).
gggaccggcttagctttta

SEQ ID NO: 255879 - DNA, 19 bp, Homo sapiens
  siRNA target sequence for NTT73 (NM_182767.1,1313-1331).
ggaccggcttagcttttat

SEQ ID NO: 255880 - DNA, 19 bp, Homo sapiens
  siRNA target sequence for NTT73 (NM_182767.1,1314-1332).
gaccggcttagcttttatt

SEQ ID NO: 255881 - DNA, 19 bp, Homo sapiens
  siRNA target sequence for NTT73 (NM_182767.1,1371-1389).
cttctggtcagtgatgttt

SEQ ID NO: 255882 - DNA, 19 bp, Homo sapiens
  siRNA target sequence for NTT73 (NM_182767.1,1392-1410).
cctcatgctggtcaatcta

SEQ ID NO: 255883 - DNA, 19 bp, Homo sapiens
  siRNA target sequence for NTT73 (NM_182767.1,1414-1432).
cttggcagtatgtttggaa

SEQ ID NO: 255884 - DNA, 19 bp, Homo sapiens
  siRNA target sequence for NTT73 (NM_182767.1,1520-1538).
gtattggcctgatatttgt

SEQ ID NO: 255885 - DNA, 19 bp, Homo sapiens
  siRNA target sequence for NTT73 (NM_182767.1,1620-1638).
gaatattgctgtatgcttt

SEQ ID NO: 255886 - DNA, 19 bp, Homo sapiens
  siRNA target sequence for NTT73 (NM_182767.1,1635-1653).
ctttgtttatggcatagat

SEQ ID NO: 255887 - DNA, 19 bp, Homo sapiens
  siRNA target sequence for NTT73 (NM_182767.1,1695-1713).
cagcagatattactactat

SEQ ID NO: 255888 - DNA, 19 bp, Homo sapiens
  siRNA target sequence for NTT73 (NM_182767.1,1794-1812).
ctataacgcatggattgaa

SEQ ID NO: 255889 - DNA, 19 bp, Homo sapiens
  siRNA target sequence for NTT73 (NM_182767.1,1850-1868).
ggggactggttgtttgtgt

SEQ ID NO: 255890 - DNA, 19 bp, Homo sapiens
  siRNA target sequence for NTT73 (NM_182767.1,1894-1912).
ccagtccctgtagttttca

SEQ ID NO: 255891 - DNA, 19 bp, Homo sapiens
  siRNA target sequence for NTT73 (NM_182767.1,1895-1913).
cagtccctgtagttttcat

SEQ ID NO: 255892 - DNA, 19 bp, Homo sapiens
  siRNA target sequence for NTT73 (NM_182767.1,1915-1933).
gttcgtcgcttcaacctta

SEQ ID NO: 255893 - DNA, 19 bp, Homo sapiens
  siRNA target sequence for NTT73 (NM_182767.1,2004-2022).
cttagagggcgatgataca

SEQ ID NO: 255894 - DNA, 19 bp, Homo sapiens
  siRNA target sequence for NTT73 (NM_182767.1,2024-2042).
gcctcattcacggaaaaat

SEQ ID NO: 255895 - DNA, 19 bp, Homo sapiens
  siRNA target sequence for NTT73 (NM_182767.1,2050-2068).
gagatgccatctccaaatt

SEQ ID NO: 255896 - DNA, 19 bp, Homo sapiens
  siRNA target sequence for NTT73 (NM_182767.1,2055-2073).
gccatctccaaattttggt

SEQ ID NO: 255897 - DNA, 19 bp, Homo sapiens
  siRNA target sequence for NTT73 (NM_182767.1,2123-2141).
ccaatggacggtatggaat

SEQ ID NO: 255898 - DNA, 19 bp, Homo sapiens
  siRNA target sequence for NTT73 (NM_182767.1,2124-2142).
caatggacggtatggaata

SEQ ID NO: 255899 - DNA, 19 bp, Homo sapiens
  siRNA target sequence for NTT73 (NM_182767.1,2145-2163).
gtacttgatggcagatatt

SEQ ID NO: 255900 - DNA, 19 bp, Homo sapiens
  siRNA target sequence for NTT73 (NM_182767.1,2170-2188).
gatatgccagaatctgatt

SEQ ID NO: 255901 - DNA, 19 bp, Homo sapiens
  siRNA target sequence for SLC6A11 (NM_014229.1,359-377).
gctctggggcagttcacaa

SEQ ID NO: 255902 - DNA, 19 bp, Homo sapiens
  siRNA target sequence for SLC6A11 (NM_014229.1,456-474).
cccatctgaatgtgtacta

SEQ ID NO: 255903 - DNA, 19 bp, Homo sapiens
  siRNA target sequence for SLC6A11 (NM_014229.1,485-503).
ctggcatgggccatttttt

SEQ ID NO: 255904 - DNA, 19 bp, Homo sapiens
  siRNA target sequence for SLC6A11 (NM_014229.1,577-595).
ggagttccagaaactgaat

SEQ ID NO: 255905 - DNA, 19 bp, Homo sapiens
  siRNA target sequence for SLC6A11 (NM_014229.1,738-756).
cctggaccatctgttactt

SEQ ID NO: 255906 - DNA, 19 bp, Homo sapiens
  siRNA target sequence for SLC6A11 (NM_014229.1,744-762).
ccatctgttacttctgtat

SEQ ID NO: 255907 - DNA, 19 bp, Homo sapiens
  siRNA target sequence for SLC6A11 (NM_014229.1,775-793).
caagtctacaggaaaggtt

SEQ ID NO: 255908 - DNA, 19 bp, Homo sapiens
  siRNA target sequence for SLC6A11 (NM_014229.1,783-801).
caggaaaggttgtatacgt

SEQ ID NO: 255909 - DNA, 19 bp, Homo sapiens
  siRNA target sequence for SLC6A11 (NM_014229.1,866-884).
gcctcagagggcatcaagt

SEQ ID NO: 255910 - DNA, 19 bp, Homo sapiens
  siRNA target sequence for SLC6A11 (NM_014229.1,867-885).
cctcagagggcatcaagtt

SEQ ID NO: 255911 - DNA, 19 bp, Homo sapiens
  siRNA target sequence for SLC6A11 (NM_014229.1,938-956).
gctggaacgcagatctttt

SEQ ID NO: 255912 - DNA, 19 bp, Homo sapiens
  siRNA target sequence for SLC6A11 (NM_014229.1,985-1003).
gaccgctctgggaagttat

SEQ ID NO: 255913 - DNA, 19 bp, Homo sapiens
  siRNA target sequence for SLC6A11 (NM_014229.1,987-1005).
ccgctctgggaagttataa

SEQ ID NO: 255914 - DNA, 19 bp, Homo sapiens
  siRNA target sequence for SLC6A11 (NM_014229.1,989-1007).
gctctgggaagttataaca

SEQ ID NO: 255915 - DNA, 19 bp, Homo sapiens
  siRNA target sequence for SLC6A11 (NM_014229.1,990-1008).
ctctgggaagttataacaa

SEQ ID NO: 255916 - DNA, 19 bp, Homo sapiens
  siRNA target sequence for SLC6A11 (NM_014229.1,992-1010).
ctgggaagttataacaatt

SEQ ID NO: 255917 - DNA, 19 bp, Homo sapiens
  siRNA target sequence for SLC6A11 (NM_014229.1,994-1012).
gggaagttataacaattat

SEQ ID NO: 255918 - DNA, 19 bp, Homo sapiens
  siRNA target sequence for SLC6A11 (NM_014229.1,1220-1238).
gccaccttgttcttcatga

SEQ ID NO: 255919 - DNA, 19 bp, Homo sapiens
  siRNA target sequence for SLC6A11 (NM_014229.1,1221-1239).
ccaccttgttcttcatgat

SEQ ID NO: 255920 - DNA, 19 bp, Homo sapiens
  siRNA target sequence for SLC6A11 (NM_014229.1,1293-1311).
ccgccgtggtggacatgta

SEQ ID NO: 255921 - DNA, 19 bp, Homo sapiens
  siRNA target sequence for SLC6A11 (NM_014229.1,1355-1373).
ctagccttgtctgttatct

SEQ ID NO: 255922 - DNA, 19 bp, Homo sapiens
  siRNA target sequence for SLC6A11 (NM_014229.1,1363-1381).
gtctgttatctcctatttt

SEQ ID NO: 255923 - DNA, 19 bp, Homo sapiens
  siRNA target sequence for SLC6A11 (NM_014229.1,1382-1400).
ctgggcctcgtgatgttaa

SEQ ID NO: 255924 - DNA, 19 bp, Homo sapiens
  siRNA target sequence for SLC6A11 (NM_014229.1,1384-1402).
gggcctcgtgatgttaaca

SEQ ID NO: 255925 - DNA, 19 bp, Homo sapiens
  siRNA target sequence for SLC6A11 (NM_014229.1,1509-1527).
gaagcaaccggttctatga

SEQ ID NO: 255926 - DNA, 19 bp, Homo sapiens
  siRNA target sequence for SLC6A11 (NM_014229.1,1512-1530).
gcaaccggttctatgataa

SEQ ID NO: 255927 - DNA, 19 bp, Homo sapiens
  siRNA target sequence for SLC6A11 (NM_014229.1,1553-1571).
cggccaccgtcgctcatta

SEQ ID NO: 255928 - DNA, 19 bp, Homo sapiens
  siRNA target sequence for SLC6A11 (NM_014229.1,1554-1572).
ggccaccgtcgctcattaa

SEQ ID NO: 255929 - DNA, 19 bp, Homo sapiens
  siRNA target sequence for SLC6A11 (NM_014229.1,1556-1574).
ccaccgtcgctcattaagt

SEQ ID NO: 255930 - DNA, 19 bp, Homo sapiens
  siRNA target sequence for SLC6A11 (NM_014229.1,1844-1862).
ccacggatggtgacagtta

SEQ ID NO: 255931 - DNA, 19 bp, Homo sapiens
  siRNA target sequence for SLC6A11 (NM_014229.1,1845-1863).
cacggatggtgacagttaa

SEQ ID NO: 255932 - DNA, 19 bp, Homo sapiens
  siRNA target sequence for SLC6A11 (NM_014229.1,1848-1866).
ggatggtgacagttaatga

SEQ ID NO: 255933 - DNA, 19 bp, Homo sapiens
  siRNA target sequence for SLC6A12 (NM_003044.2,696-714).
gccaatggaccaacaagat

SEQ ID NO: 255934 - DNA, 19 bp, Homo sapiens
  siRNA target sequence for SLC6A12 (NM_003044.2,795-813).
gaggtggagccttcttcat

SEQ ID NO: 255935 - DNA, 19 bp, Homo sapiens
  siRNA target sequence for SLC6A12 (NM_003044.2,840-858).
gcggcatcccggtgttctt

SEQ ID NO: 255936 - DNA, 19 bp, Homo sapiens
  siRNA target sequence for SLC6A12 (NM_003044.2,866-884).
gtggcgttgggccaataca

SEQ ID NO: 255937 - DNA, 19 bp, Homo sapiens
  siRNA target sequence for SLC6A12 (NM_003044.2,951-969).
ctgtggtcatcgagtcata

SEQ ID NO: 255938 - DNA, 19 bp, Homo sapiens
  siRNA target sequence for SLC6A12 (NM_003044.2,953-971).
gtggtcatcgagtcatatt

SEQ ID NO: 255939 - DNA, 19 bp, Homo sapiens
  siRNA target sequence for SLC6A12 (NM_003044.2,956-974).
gtcatcgagtcatatttga

SEQ ID NO: 255940 - DNA, 19 bp, Homo sapiens
  siRNA target sequence for SLC6A12 (NM_003044.2,1048-1066).
gacgacctgcaacaacttt

SEQ ID NO: 255941 - DNA, 19 bp, Homo sapiens
  siRNA target sequence for SLC6A12 (NM_003044.2,1323-1341).
cgtacctgatgcttgtcat

SEQ ID NO: 255942 - DNA, 19 bp, Homo sapiens
  siRNA target sequence for SLC6A12 (NM_003044.2,1324-1342).
gtacctgatgcttgtcatt

SEQ ID NO: 255943 - DNA, 19 bp, Homo sapiens
  siRNA target sequence for SLC6A12 (NM_003044.2,1689-1707).
ccaaggctgtgactatgat

SEQ ID NO: 255944 - DNA, 19 bp, Homo sapiens
  siRNA target sequence for SLC6A12 (NM_003044.2,1796-1814).
gtgacagcctccatagaca

SEQ ID NO: 255945 - DNA, 19 bp, Homo sapiens
  siRNA target sequence for SLC6A12 (NM_003044.2,1965-1983).
gcctgctgttcctgtcatt

SEQ ID NO: 255946 - DNA, 19 bp, Homo sapiens
  siRNA target sequence for SLC6A12 (NM_003044.2,1969-1987).
gctgttcctgtcattgttt

SEQ ID NO: 255947 - DNA, 19 bp, Homo sapiens
  siRNA target sequence for SLC6A12 (NM_003044.2,1972-1990).
gttcctgtcattgtttgaa

SEQ ID NO: 255948 - DNA, 19 bp, Homo sapiens
  siRNA target sequence for SLC6A12 (NM_003044.2,2018-2036).
gcggaccgtttctatgaca

SEQ ID NO: 255949 - DNA, 19 bp, Homo sapiens
  siRNA target sequence for SLC6A12 (NM_003044.2,2019-2037).
cggaccgtttctatgacaa

SEQ ID NO: 255950 - DNA, 19 bp, Homo sapiens
  siRNA target sequence for SLC6A12 (NM_003044.2,2064-2082).
catggcccctggtgaagat

SEQ ID NO: 255951 - DNA, 19 bp, Homo sapiens
  siRNA target sequence for SLC6A12 (NM_003044.2,2148-2166).
cccccctcaagtacaacaa

SEQ ID NO: 255952 - DNA, 19 bp, Homo sapiens
  siRNA target sequence for SLC6A12 (NM_003044.2,2411-2429).
gagaaggagacccatttgt

SEQ ID NO: 255953 - DNA, 19 bp, Homo sapiens
  siRNA target sequence for SLC6A13 (NM_016615.2,68-86).
ctcaggcacaaccagtaat

SEQ ID NO: 255954 - DNA, 19 bp, Homo sapiens
  siRNA target sequence for SLC6A13 (NM_016615.2,102-120).
gtgtatccagtcatggaaa

SEQ ID NO: 255955 - DNA, 19 bp, Homo sapiens
  siRNA target sequence for SLC6A13 (NM_016615.2,324-342).
gcactaggccagtacacta

SEQ ID NO: 255956 - DNA, 19 bp, Homo sapiens
  siRNA target sequence for SLC6A13 (NM_016615.2,397-415).
gctatgcctcccagatgat

SEQ ID NO: 255957 - DNA, 19 bp, Homo sapiens
  siRNA target sequence for SLC6A13 (NM_016615.2,426-444).
ctcaacgtctactacatca

SEQ ID NO: 255958 - DNA, 19 bp, Homo sapiens
  siRNA target sequence for SLC6A13 (NM_016615.2,428-446).
caacgtctactacatcatt

SEQ ID NO: 255959 - DNA, 19 bp, Homo sapiens
  siRNA target sequence for SLC6A13 (NM_016615.2,785-803).
gctggtggtcctgttaatt

SEQ ID NO: 255960 - DNA, 19 bp, Homo sapiens
  siRNA target sequence for SLC6A13 (NM_016615.2,788-806).
ggtggtcctgttaattcga

SEQ ID NO: 255961 - DNA, 19 bp, Homo sapiens
  siRNA target sequence for SLC6A13 (NM_016615.2,1252-1270).
cagcgctggtggacatgta

SEQ ID NO: 255962 - DNA, 19 bp, Homo sapiens
  siRNA target sequence for SLC6A13 (NM_016615.2,1275-1293).
cacgtgttccgcaagaaga

SEQ ID NO: 255963 - DNA, 19 bp, Homo sapiens
  siRNA target sequence for SLC6A13 (NM_016615.2,1307-1325).
cctcatccttggagtatct

SEQ ID NO: 255964 - DNA, 19 bp, Homo sapiens
  siRNA target sequence for SLC6A13 (NM_016615.2,1513-1531).
ggccatggcctcttatcaa

SEQ ID NO: 255965 - DNA, 19 bp, Homo sapiens
  siRNA target sequence for SLC6A13 (NM_016615.2,1514-1532).
gccatggcctcttatcaaa

SEQ ID NO: 255966 - DNA, 19 bp, Homo sapiens
  siRNA target sequence for SLC6A13 (NM_016615.2,1515-1533).
ccatggcctcttatcaaat

SEQ ID NO: 255967 - DNA, 19 bp, Homo sapiens
  siRNA target sequence for SLC6A13 (NM_016615.2,1578-1596).
ctcttctccctgataaagt

SEQ ID NO: 255968 - DNA, 19 bp, Homo sapiens
  siRNA target sequence for SLC6A13 (NM_016615.2,1600-1618).
ctccgctgacctacaacaa

SEQ ID NO: 255969 - DNA, 19 bp, Homo sapiens
  siRNA target sequence for SLC6A13 (NM_016615.2,1605-1623).
ctgacctacaacaagaagt

SEQ ID NO: 255970 - DNA, 19 bp, Homo sapiens
  siRNA target sequence for SLC6A14 (NM_007231.1,136-154).
gaaagtgtcggcttcatca

SEQ ID NO: 255971 - DNA, 19 bp, Homo sapiens
  siRNA target sequence for SLC6A14 (NM_007231.1,142-160).
gtcggcttcatcagagaat

SEQ ID NO: 255972 - DNA, 19 bp, Homo sapiens
  siRNA target sequence for SLC6A14 (NM_007231.1,194-212).
cgtggtaactggtccaaaa

SEQ ID NO: 255973 - DNA, 19 bp, Homo sapiens
  siRNA target sequence for SLC6A14 (NM_007231.1,197-215).
ggtaactggtccaaaaaat

SEQ ID NO: 255974 - DNA, 19 bp, Homo sapiens
  siRNA target sequence for SLC6A14 (NM_007231.1,207-225).
ccaaaaaatcggattatct

SEQ ID NO: 255975 - DNA, 19 bp, Homo sapiens
  siRNA target sequence for SLC6A14 (NM_007231.1,208-226).
caaaaaatcggattatctt

SEQ ID NO: 255976 - DNA, 19 bp, Homo sapiens
  siRNA target sequence for SLC6A14 (NM_007231.1,216-234).
cggattatcttctatctat

SEQ ID NO: 255977 - DNA, 19 bp, Homo sapiens
  siRNA target sequence for SLC6A14 (NM_007231.1,218-236).
gattatcttctatctatga

SEQ ID NO: 255978 - DNA, 19 bp, Homo sapiens
  siRNA target sequence for SLC6A14 (NM_007231.1,244-262).
cgcagtgggattaggaaat

SEQ ID NO: 255979 - DNA, 19 bp, Homo sapiens
  siRNA target sequence for SLC6A14 (NM_007231.1,297-315).
gtggaggcgccttcttgat

SEQ ID NO: 255980 - DNA, 19 bp, Homo sapiens
  siRNA target sequence for SLC6A14 (NM_007231.1,302-320).
ggcgccttcttgatacctt

SEQ ID NO: 255981 - DNA, 19 bp, Homo sapiens
  siRNA target sequence for SLC6A14 (NM_007231.1,376-394).
gggacaatttgctagctta

SEQ ID NO: 255982 - DNA, 19 bp, Homo sapiens
  siRNA target sequence for SLC6A14 (NM_007231.1,411-429).
ggaggattcttccattgtt

SEQ ID NO: 255983 - DNA, 19 bp, Homo sapiens
  siRNA target sequence for SLC6A14 (NM_007231.1,490-508).
cataattgcctatagtctt

SEQ ID NO: 255984 - DNA, 19 bp, Homo sapiens
  siRNA target sequence for SLC6A14 (NM_007231.1,534-552).
gtgaactaccatggaaaaa

SEQ ID NO: 255985 - DNA, 19 bp, Homo sapiens
  siRNA target sequence for SLC6A14 (NM_007231.1,555-573).
gttcttcgtggtcagataa

SEQ ID NO: 255986 - DNA, 19 bp, Homo sapiens
  siRNA target sequence for SLC6A14 (NM_007231.1,562-580).
gtggtcagataaaaactgt

SEQ ID NO: 255987 - DNA, 19 bp, Homo sapiens
  siRNA target sequence for SLC6A14 (NM_007231.1,577-595).
ctgtagcagatcaccaata

SEQ ID NO: 255988 - DNA, 19 bp, Homo sapiens
  siRNA target sequence for SLC6A14 (NM_007231.1,583-601).
cagatcaccaatagtaact

SEQ ID NO: 255989 - DNA, 19 bp, Homo sapiens
  siRNA target sequence for SLC6A14 (NM_007231.1,661-679).
ctgggtagacatcaacaat

SEQ ID NO: 255990 - DNA, 19 bp, Homo sapiens
  siRNA target sequence for SLC6A14 (NM_007231.1,663-681).
gggtagacatcaacaattt

SEQ ID NO: 255991 - DNA, 19 bp, Homo sapiens
  siRNA target sequence for SLC6A14 (NM_007231.1,664-682).
ggtagacatcaacaatttt

SEQ ID NO: 255992 - DNA, 19 bp, Homo sapiens
  siRNA target sequence for SLC6A14 (NM_007231.1,668-686).
gacatcaacaattttacct

SEQ ID NO: 255993 - DNA, 19 bp, Homo sapiens
  siRNA target sequence for SLC6A14 (NM_007231.1,687-705).
gcatcaacggcagtgaaat

SEQ ID NO: 255994 - DNA, 19 bp, Homo sapiens
  siRNA target sequence for SLC6A14 (NM_007231.1,688-706).
catcaacggcagtgaaatt

SEQ ID NO: 255995 - DNA, 19 bp, Homo sapiens
  siRNA target sequence for SLC6A14 (NM_007231.1,691-709).
caacggcagtgaaatttat

SEQ ID NO: 255996 - DNA, 19 bp, Homo sapiens
  siRNA target sequence for SLC6A14 (NM_007231.1,775-793).
gaatgagactggagtaatt

SEQ ID NO: 255997 - DNA, 19 bp, Homo sapiens
  siRNA target sequence for SLC6A14 (NM_007231.1,779-797).
gagactggagtaattgttt

SEQ ID NO: 255998 - DNA, 19 bp, Homo sapiens
  siRNA target sequence for SLC6A14 (NM_007231.1,836-854).
gttggagcagcactattta

SEQ ID NO: 255999 - DNA, 19 bp, Homo sapiens
  siRNA target sequence for SLC6A14 (NM_007231.1,867-885).
cgtctggcaaggtggtata

SEQ ID NO: 256000 - DNA, 19 bp, Homo sapiens
  siRNA target sequence for SLC6A14 (NM_007231.1,903-921).
cctatgtggtcctactcat

SEQ ID NO: 256001 - DNA, 19 bp, Homo sapiens
  siRNA target sequence for SLC6A14 (NM_007231.1,1034-1052).
gccactcagatattttact

SEQ ID NO: 256002 - DNA, 19 bp, Homo sapiens
  siRNA target sequence for SLC6A14 (NM_007231.1,1063-1081).
ggcttggggtggcttagtt

SEQ ID NO: 256003 - DNA, 19 bp, Homo sapiens
  siRNA target sequence for SLC6A14 (NM_007231.1,1073-1091).
ggcttagttgctctatcat

SEQ ID NO: 256004 - DNA, 19 bp, Homo sapiens
  siRNA target sequence for SLC6A14 (NM_007231.1,1129-1147).
cattgtggtttgtttgaca

SEQ ID NO: 256005 - DNA, 19 bp, Homo sapiens
  siRNA target sequence for SLC6A14 (NM_007231.1,1195-1213).
gggacacatggcccatata

SEQ ID NO: 256006 - DNA, 19 bp, Homo sapiens
  siRNA target sequence for SLC6A14 (NM_007231.1,1196-1214).
ggacacatggcccatatat

SEQ ID NO: 256007 - DNA, 19 bp, Homo sapiens
  siRNA target sequence for SLC6A14 (NM_007231.1,1207-1225).
ccatatatctggaaaggaa

SEQ ID NO: 256008 - DNA, 19 bp, Homo sapiens
  siRNA target sequence for SLC6A14 (NM_007231.1,1349-1367).
ctcgattctcagtttgctt

SEQ ID NO: 256009 - DNA, 19 bp, Homo sapiens
  siRNA target sequence for SLC6A14 (NM_007231.1,1358-1376).
cagtttgcttcgattgaaa

SEQ ID NO: 256010 - DNA, 19 bp, Homo sapiens
  siRNA target sequence for SLC6A14 (NM_007231.1,1377-1395).
cgatcacaacaacaattca

SEQ ID NO: 256011 - DNA, 19 bp, Homo sapiens
  siRNA target sequence for SLC6A14 (NM_007231.1,1378-1396).
gatcacaacaacaattcaa

SEQ ID NO: 256012 - DNA, 19 bp, Homo sapiens
  siRNA target sequence for SLC6A14 (NM_007231.1,1497-1515).
gaatttactgggttcatct

SEQ ID NO: 256013 - DNA, 19 bp, Homo sapiens
  siRNA target sequence for SLC6A14 (NM_007231.1,1532-1550).
gctggatggggcattttaa

SEQ ID NO: 256014 - DNA, 19 bp, Homo sapiens
  siRNA target sequence for SLC6A14 (NM_007231.1,1663-1681).
gagagcttgctggtttgta

SEQ ID NO: 256015 - DNA, 19 bp, Homo sapiens
  siRNA target sequence for SLC6A14 (NM_007231.1,1679-1697).
gtaattacgcctatccttt

SEQ ID NO: 256016 - DNA, 19 bp, Homo sapiens
  siRNA target sequence for SLC6A14 (NM_007231.1,1688-1706).
cctatccttttgattgcaa

SEQ ID NO: 256017 - DNA, 19 bp, Homo sapiens
  siRNA target sequence for SLC6A14 (NM_007231.1,1689-1707).
ctatccttttgattgcaat

SEQ ID NO: 256018 - DNA, 19 bp, Homo sapiens
  siRNA target sequence for SLC6A14 (NM_007231.1,1779-1797).
ctttaggctggtgtatgat

SEQ ID NO: 256019 - DNA, 19 bp, Homo sapiens
  siRNA target sequence for SLC6A14 (NM_007231.1,1785-1803).
gctggtgtatgattgtttt

SEQ ID NO: 256020 - DNA, 19 bp, Homo sapiens
  siRNA target sequence for SLC6A14 (NM_007231.1,1820-1838).
ccaattatggctatcataa

SEQ ID NO: 256021 - DNA, 19 bp, Homo sapiens
  siRNA target sequence for SLC6A14 (NM_007231.1,1847-1865).
caggctaaaggaaacatct

SEQ ID NO: 256022 - DNA, 19 bp, Homo sapiens
  siRNA target sequence for SLC6A14 (NM_007231.1,1861-1879).
catctttcaacgccttata

SEQ ID NO: 256023 - DNA, 19 bp, Homo sapiens
  siRNA target sequence for SLC6A14 (NM_007231.1,1864-1882).
ctttcaacgccttataagt

SEQ ID NO: 256024 - DNA, 19 bp, Homo sapiens
  siRNA target sequence for SLC6A14 (NM_007231.1,1922-1940).
caacatcgtggggaaagat

SEQ ID NO: 256025 - DNA, 19 bp, Homo sapiens
  siRNA target sequence for SLC6A14 (NM_007231.1,1946-1964).
gacatggtagatcctaaaa

SEQ ID NO: 256026 - DNA, 19 bp, Homo sapiens
  siRNA target sequence for SLC6A3 (NM_001044.2,453-471).
gctgggatgccacttttct

SEQ ID NO: 256027 - DNA, 19 bp, Homo sapiens
  siRNA target sequence for SLC6A3 (NM_001044.2,483-501).
gccctcggccagttcaaca

SEQ ID NO: 256028 - DNA, 19 bp, Homo sapiens
  siRNA target sequence for SLC6A3 (NM_001044.2,610-628).
cctgggcgctgcactatct

SEQ ID NO: 256029 - DNA, 19 bp, Homo sapiens
  siRNA target sequence for SLC6A3 (NM_001044.2,733-751).
cgggcctcaacgacacttt

SEQ ID NO: 256030 - DNA, 19 bp, Homo sapiens
  siRNA target sequence for SLC6A3 (NM_001044.2,734-752).
gggcctcaacgacactttt

SEQ ID NO: 256031 - DNA, 19 bp, Homo sapiens
  siRNA target sequence for SLC6A3 (NM_001044.2,1015-1033).
catacctgagcgttgactt

SEQ ID NO: 256032 - DNA, 19 bp, Homo sapiens
  siRNA target sequence for SLC6A3 (NM_001044.2,1290-1308).
gggctgatcttcatcatct

SEQ ID NO: 256033 - DNA, 19 bp, Homo sapiens
  siRNA target sequence for SLC6A3 (NM_001044.2,1423-1441).
ccgggctcatcgatgagtt

SEQ ID NO: 256034 - DNA, 19 bp, Homo sapiens
  siRNA target sequence for SLC6A3 (NM_001044.2,1544-1562).
cacgctcctggaccatttt

SEQ ID NO: 256035 - DNA, 19 bp, Homo sapiens
  siRNA target sequence for SLC6A3 (NM_001044.2,1734-1752).
gtcgtggtcagcattgtga

SEQ ID NO: 256036 - DNA, 19 bp, Homo sapiens
  siRNA target sequence for SLC6A3 (NM_001044.2,1767-1785).
cactacggagcctacatct

SEQ ID NO: 256037 - DNA, 19 bp, Homo sapiens
  siRNA target sequence for SLC6A3 (NM_001044.2,1882-1900).
ggtcctttcgagagaaact

SEQ ID NO: 256038 - DNA, 19 bp, Homo sapiens
  siRNA target sequence for SLC6A5 (NM_004211.1,510-528).
gtggggtcttgcaaactca

SEQ ID NO: 256039 - DNA, 19 bp, Homo sapiens
  siRNA target sequence for SLC6A5 (NM_004211.1,828-846).
gagcaaggggatgagaata

SEQ ID NO: 256040 - DNA, 19 bp, Homo sapiens
  siRNA target sequence for SLC6A5 (NM_004211.1,1002-1020).
ggattacccatcttcttct

SEQ ID NO: 256041 - DNA, 19 bp, Homo sapiens
  siRNA target sequence for SLC6A5 (NM_004211.1,1003-1021).
gattacccatcttcttctt

SEQ ID NO: 256042 - DNA, 19 bp, Homo sapiens
  siRNA target sequence for SLC6A5 (NM_004211.1,1073-1091).
ggccatcccagctctacaa

SEQ ID NO: 256043 - DNA, 19 bp, Homo sapiens
  siRNA target sequence for SLC6A5 (NM_004211.1,1099-1117).
gcatcgcgatgctgatcat

SEQ ID NO: 256044 - DNA, 19 bp, Homo sapiens
  siRNA target sequence for SLC6A5 (NM_004211.1,1120-1138).
ctgtcctaatagccatata

SEQ ID NO: 256045 - DNA, 19 bp, Homo sapiens
  siRNA target sequence for SLC6A5 (NM_004211.1,1122-1140).
gtcctaatagccatatact

SEQ ID NO: 256046 - DNA, 19 bp, Homo sapiens
  siRNA target sequence for SLC6A5 (NM_004211.1,1133-1151).
catatactacaatgtgatt

SEQ ID NO: 256047 - DNA, 19 bp, Homo sapiens
  siRNA target sequence for SLC6A5 (NM_004211.1,1330-1348).
cttatcccaacgtgacaat

SEQ ID NO: 256048 - DNA, 19 bp, Homo sapiens
  siRNA target sequence for SLC6A5 (NM_004211.1,1335-1353).
cccaacgtgacaatggtta

SEQ ID NO: 256049 - DNA, 19 bp, Homo sapiens
  siRNA target sequence for SLC6A5 (NM_004211.1,1336-1354).
ccaacgtgacaatggttaa

SEQ ID NO: 256050 - DNA, 19 bp, Homo sapiens
  siRNA target sequence for SLC6A5 (NM_004211.1,1337-1355).
caacgtgacaatggttaat

SEQ ID NO: 256051 - DNA, 19 bp, Homo sapiens
  siRNA target sequence for SLC6A5 (NM_004211.1,1363-1381).
gccaggccaataagacatt

SEQ ID NO: 256052 - DNA, 19 bp, Homo sapiens
  siRNA target sequence for SLC6A5 (NM_004211.1,1364-1382).
ccaggccaataagacattt

SEQ ID NO: 256053 - DNA, 19 bp, Homo sapiens
  siRNA target sequence for SLC6A5 (NM_004211.1,1387-1405).
gtggaagtgaagagtactt

SEQ ID NO: 256054 - DNA, 19 bp, Homo sapiens
  siRNA target sequence for SLC6A5 (NM_004211.1,1389-1407).
ggaagtgaagagtacttca

SEQ ID NO: 256055 - DNA, 19 bp, Homo sapiens
  siRNA target sequence for SLC6A5 (NM_004211.1,1390-1408).
gaagtgaagagtacttcaa

SEQ ID NO: 256056 - DNA, 19 bp, Homo sapiens
  siRNA target sequence for SLC6A5 (NM_004211.1,1395-1413).
gaagagtacttcaagtact

SEQ ID NO: 256057 - DNA, 19 bp, Homo sapiens
  siRNA target sequence for SLC6A5 (NM_004211.1,1515-1533).
gctaaaggaatcaagactt

SEQ ID NO: 256058 - DNA, 19 bp, Homo sapiens
  siRNA target sequence for SLC6A5 (NM_004211.1,1774-1792).
gctacagggacactctaat

SEQ ID NO: 256059 - DNA, 19 bp, Homo sapiens
  siRNA target sequence for SLC6A5 (NM_004211.1,1775-1793).
ctacagggacactctaatt

SEQ ID NO: 256060 - DNA, 19 bp, Homo sapiens
  siRNA target sequence for SLC6A5 (NM_004211.1,1863-1881).
gccaatgaacgcaaagtca

SEQ ID NO: 256061 - DNA, 19 bp, Homo sapiens
  siRNA target sequence for SLC6A5 (NM_004211.1,1864-1882).
ccaatgaacgcaaagtcaa

SEQ ID NO: 256062 - DNA, 19 bp, Homo sapiens
  siRNA target sequence for SLC6A5 (NM_004211.1,1872-1890).
cgcaaagtcaacattgaga

SEQ ID NO: 256063 - DNA, 19 bp, Homo sapiens
  siRNA target sequence for SLC6A5 (NM_004211.1,1873-1891).
gcaaagtcaacattgagaa

SEQ ID NO: 256064 - DNA, 19 bp, Homo sapiens
  siRNA target sequence for SLC6A5 (NM_004211.1,1902-1920).
caagggccaggcattgcat

SEQ ID NO: 256065 - DNA, 19 bp, Homo sapiens
  siRNA target sequence for SLC6A5 (NM_004211.1,1963-1981).
cgttctgggccatcatctt

SEQ ID NO: 256066 - DNA, 19 bp, Homo sapiens
  siRNA target sequence for SLC6A5 (NM_004211.1,1964-1982).
gttctgggccatcatcttt

SEQ ID NO: 256067 - DNA, 19 bp, Homo sapiens
  siRNA target sequence for SLC6A5 (NM_004211.1,2001-2019).
cttggacttgacactatgt

SEQ ID NO: 256068 - DNA, 19 bp, Homo sapiens
  siRNA target sequence for SLC6A5 (NM_004211.1,2150-2168).
gggtggaatttacatgttt

SEQ ID NO: 256069 - DNA, 19 bp, Homo sapiens
  siRNA target sequence for SLC6A5 (NM_004211.1,2194-2212).
cctatgcccttgtcatcat

SEQ ID NO: 256070 - DNA, 19 bp, Homo sapiens
  siRNA target sequence for SLC6A5 (NM_004211.1,2223-2241).
gagctcgtggggatctctt

SEQ ID NO: 256071 - DNA, 19 bp, Homo sapiens
  siRNA target sequence for SLC6A5 (NM_004211.1,2225-2243).
gctcgtggggatctcttat

SEQ ID NO: 256072 - DNA, 19 bp, Homo sapiens
  siRNA target sequence for SLC6A5 (NM_004211.1,2229-2247).
gtggggatctcttatgtgt

SEQ ID NO: 256073 - DNA, 19 bp, Homo sapiens
  siRNA target sequence for SLC6A5 (NM_004211.1,2231-2249).
ggggatctcttatgtgtat

SEQ ID NO: 256074 - DNA, 19 bp, Homo sapiens
  siRNA target sequence for SLC6A5 (NM_004211.1,2255-2273).
gcaaagattctgtgaagat

SEQ ID NO: 256075 - DNA, 19 bp, Homo sapiens
  siRNA target sequence for SLC6A5 (NM_004211.1,2266-2284).
gtgaagatatagagatgat

SEQ ID NO: 256076 - DNA, 19 bp, Homo sapiens
  siRNA target sequence for SLC6A5 (NM_004211.1,2290-2308).
gattccagcctaacatctt

SEQ ID NO: 256077 - DNA, 19 bp, Homo sapiens
  siRNA target sequence for SLC6A5 (NM_004211.1,2397-2415).
ggctcttaccgctatccta

SEQ ID NO: 256078 - DNA, 19 bp, Homo sapiens
  siRNA target sequence for SLC6A5 (NM_004211.1,2398-2416).
gctcttaccgctatcctaa

SEQ ID NO: 256079 - DNA, 19 bp, Homo sapiens
  siRNA target sequence for SLC6A5 (NM_004211.1,2457-2475).
gtcatctggatcccaatta

SEQ ID NO: 256080 - DNA, 19 bp, Homo sapiens
  siRNA target sequence for SLC6A5 (NM_004211.1,2496-2514).
ctggcccctggaagattta

SEQ ID NO: 256081 - DNA, 19 bp, Homo sapiens
  siRNA target sequence for SLC6A5 (NM_004211.1,2580-2598).
ggggagcgttacaagaaca

SEQ ID NO: 256082 - DNA, 19 bp, Homo sapiens
  siRNA target sequence for SLC6A5 (NM_004211.1,2581-2599).
gggagcgttacaagaacat

SEQ ID NO: 256083 - DNA, 19 bp, Homo sapiens
  siRNA target sequence for SLC6A5 (NM_004211.1,2583-2601).
gagcgttacaagaacatga

SEQ ID NO: 256084 - DNA, 19 bp, Homo sapiens
  siRNA target sequence for SLC6A5 (NM_004211.1,2620-2638).
cttccttgggactcaaact

SEQ ID NO: 256085 - DNA, 19 bp, Homo sapiens
  siRNA target sequence for SLC6A7 (NM_014228.2,1179-1197).
ggcatccagttctatctca

SEQ ID NO: 256086 - DNA, 19 bp, Homo sapiens
  siRNA target sequence for SLC6A7 (NM_014228.2,1242-1260).
gctgctcttcagatcttct

SEQ ID NO: 256087 - DNA, 19 bp, Homo sapiens
  siRNA target sequence for SLC6A7 (NM_014228.2,1245-1263).
gctcttcagatcttctatt

SEQ ID NO: 256088 - DNA, 19 bp, Homo sapiens
  siRNA target sequence for SLC6A7 (NM_014228.2,1312-1330).
cgtttcaccagaacatcta

SEQ ID NO: 256089 - DNA, 19 bp, Homo sapiens
  siRNA target sequence for SLC6A7 (NM_014228.2,1313-1331).
gtttcaccagaacatctat

SEQ ID NO: 256090 - DNA, 19 bp, Homo sapiens
  siRNA target sequence for SLC6A7 (NM_014228.2,1560-1578).
ctagatagccagtttgctt

SEQ ID NO: 256091 - DNA, 19 bp, Homo sapiens
  siRNA target sequence for SLC6A7 (NM_014228.2,1606-1624).
cagatgagttcccatacta

SEQ ID NO: 256092 - DNA, 19 bp, Homo sapiens
  siRNA target sequence for SLC6A7 (NM_014228.2,1794-1812).
cgggtgtatggcattcaga

SEQ ID NO: 256093 - DNA, 19 bp, Homo sapiens
  siRNA target sequence for SLC6A7 (NM_014228.2,1819-1837).
gccgagacatccacatgat

SEQ ID NO: 256094 - DNA, 19 bp, Homo sapiens
  siRNA target sequence for SLC6A7 (NM_014228.2,2126-2144).
gaaccggacgggcatgtat

SEQ ID NO: 256095 - DNA, 19 bp, Homo sapiens
  siRNA target sequence for SLC6A7 (NM_014228.2,2262-2280).
gaggaggagtcgatgatgt

SEQ ID NO: 256096 - DNA, 19 bp, Homo sapiens
  siRNA target sequence for XT3 (NM_020208.1,74-92).
gggccaactcgctacagtt

SEQ ID NO: 256097 - DNA, 19 bp, Homo sapiens
  siRNA target sequence for XT3 (NM_020208.1,181-199).
ctggtcccctacatcatca

SEQ ID NO: 256098 - DNA, 19 bp, Homo sapiens
  siRNA target sequence for XT3 (NM_020208.1,323-341).
gcgtggtggtctctttctt

SEQ ID NO: 256099 - DNA, 19 bp, Homo sapiens
  siRNA target sequence for XT3 (NM_020208.1,476-494).
cgtcctccacacagtactt

SEQ ID NO: 256100 - DNA, 19 bp, Homo sapiens
  siRNA target sequence for XT3 (NM_020208.1,718-736).
ggcctcatgtacatgttca

SEQ ID NO: 256101 - DNA, 19 bp, Homo sapiens
  siRNA target sequence for XT3 (NM_020208.1,954-972).
ggccaccttcaattatgaa

SEQ ID NO: 256102 - DNA, 19 bp, Homo sapiens
  siRNA target sequence for XT3 (NM_020208.1,1018-1036).
cttgaagatggctttttga

SEQ ID NO: 256103 - DNA, 19 bp, Homo sapiens
  siRNA target sequence for XT3 (NM_020208.1,1076-1094).
ctgcctacccaagcaaata

SEQ ID NO: 256104 - DNA, 19 bp, Homo sapiens
  siRNA target sequence for XT3 (NM_020208.1,1088-1106).
gcaaatacagcgagatgtt

SEQ ID NO: 256105 - DNA, 19 bp, Homo sapiens
  siRNA target sequence for XT3 (NM_020208.1,1099-1117).
gagatgttcccgcaaatca

SEQ ID NO: 256106 - DNA, 19 bp, Homo sapiens
  siRNA target sequence for XT3 (NM_020208.1,1101-1119).
gatgttcccgcaaatcaaa

SEQ ID NO: 256107 - DNA, 19 bp, Homo sapiens
  siRNA target sequence for XT3 (NM_020208.1,1182-1200).
ctacacagaggccattaaa

SEQ ID NO: 256108 - DNA, 19 bp, Homo sapiens
  siRNA target sequence for XT3 (NM_020208.1,1355-1373).
gtctggtgtgccttgtcaa

SEQ ID NO: 256109 - DNA, 19 bp, Homo sapiens
  siRNA target sequence for XT3 (NM_020208.1,1408-1426).
gggaactactggtttgaca

SEQ ID NO: 256110 - DNA, 19 bp, Homo sapiens
  siRNA target sequence for XT3 (NM_020208.1,1409-1427).
ggaactactggtttgacat

SEQ ID NO: 256111 - DNA, 19 bp, Homo sapiens
  siRNA target sequence for XT3 (NM_020208.1,1410-1428).
gaactactggtttgacata

SEQ ID NO: 256112 - DNA, 19 bp, Homo sapiens
  siRNA target sequence for XT3 (NM_020208.1,1643-1661).
cggggaccctgaagtatca

SEQ ID NO: 256113 - DNA, 19 bp, Homo sapiens
  siRNA target sequence for XT3 (NM_020208.1,1683-1701).
ccagctcgtgaccaaagat

SEQ ID NO: 256114 - DNA, 19 bp, Homo sapiens
  siRNA target sequence for XT3 (NM_020208.1,1684-1702).
cagctcgtgaccaaagatt

SEQ ID NO: 256115 - DNA, 19 bp, Homo sapiens
  siRNA target sequence for SLC10A1 (NM_003049.1,271-289).
cgccctggtggcacagtat

SEQ ID NO: 256116 - DNA, 19 bp, Homo sapiens
  siRNA target sequence for SLC10A1 (NM_003049.1,488-506).
ctcctcctgtacatctact

SEQ ID NO: 256117 - DNA, 19 bp, Homo sapiens
  siRNA target sequence for SLC10A1 (NM_003049.1,505-523).
ctccagggggatctatgat

SEQ ID NO: 256118 - DNA, 19 bp, Homo sapiens
  siRNA target sequence for SLC10A1 (NM_003049.1,535-553).
ggacaaggtgccctataaa

SEQ ID NO: 256119 - DNA, 19 bp, Homo sapiens
  siRNA target sequence for SLC10A1 (NM_003049.1,572-590).
gtcctggttctcattcctt

SEQ ID NO: 256120 - DNA, 19 bp, Homo sapiens
  siRNA target sequence for SLC10A1 (NM_003049.1,615-633).
ccaaacggccacaatacat

SEQ ID NO: 256121 - DNA, 19 bp, Homo sapiens
  siRNA target sequence for SLC10A1 (NM_003049.1,626-644).
caatacatgcgctatgtca

SEQ ID NO: 256122 - DNA, 19 bp, Homo sapiens
  siRNA target sequence for SLC10A1 (NM_003049.1,712-730).
ggggaagagcatcatgttt

SEQ ID NO: 256123 - DNA, 19 bp, Homo sapiens
  siRNA target sequence for SLC10A1 (NM_003049.1,938-956).
cccctcctctacatgattt

SEQ ID NO: 256124 - DNA, 19 bp, Homo sapiens
  siRNA target sequence for SLC10A2 (NM_000452.1,686-704).
ctaagtgtggtcctaagta

SEQ ID NO: 256125 - DNA, 19 bp, Homo sapiens
  siRNA target sequence for SLC10A2 (NM_000452.1,747-765).
gatgcaacgtggaaatcaa

SEQ ID NO: 256126 - DNA, 19 bp, Homo sapiens
  siRNA target sequence for SLC10A2 (NM_000452.1,790-808).
gccgtggggcatttgtgtt

SEQ ID NO: 256127 - DNA, 19 bp, Homo sapiens
  siRNA target sequence for SLC10A2 (NM_000452.1,854-872).
ctgtcggtggcctttgaca

SEQ ID NO: 256128 - DNA, 19 bp, Homo sapiens
  siRNA target sequence for SLC10A2 (NM_000452.1,887-905).
gccgtagtggtgctcatta

SEQ ID NO: 256129 - DNA, 19 bp, Homo sapiens
  siRNA target sequence for SLC10A2 (NM_000452.1,888-906).
ccgtagtggtgctcattat

SEQ ID NO: 256130 - DNA, 19 bp, Homo sapiens
  siRNA target sequence for SLC10A2 (NM_000452.1,889-907).
cgtagtggtgctcattata

SEQ ID NO: 256131 - DNA, 19 bp, Homo sapiens
  siRNA target sequence for SLC10A2 (NM_000452.1,924-942).
gaactgcctccaatatctt

SEQ ID NO: 256132 - DNA, 19 bp, Homo sapiens
  siRNA target sequence for SLC10A2 (NM_000452.1,1022-1040).
ccgctgtgcctccttatct

SEQ ID NO: 256133 - DNA, 19 bp, Homo sapiens
  siRNA target sequence for SLC10A2 (NM_000452.1,1023-1041).
cgctgtgcctccttatcta

SEQ ID NO: 256134 - DNA, 19 bp, Homo sapiens
  siRNA target sequence for SLC10A2 (NM_000452.1,1034-1052).
cttatctataccaaaatgt

SEQ ID NO: 256135 - DNA, 19 bp, Homo sapiens
  siRNA target sequence for SLC10A2 (NM_000452.1,1058-1076).
gactctgggagcatcgtaa

SEQ ID NO: 256136 - DNA, 19 bp, Homo sapiens
  siRNA target sequence for SLC10A2 (NM_000452.1,1060-1078).
ctctgggagcatcgtaatt

SEQ ID NO: 256137 - DNA, 19 bp, Homo sapiens
  siRNA target sequence for SLC10A2 (NM_000452.1,1133-1151).
ggaatgtttgttaatcaca

SEQ ID NO: 256138 - DNA, 19 bp, Homo sapiens
  siRNA target sequence for SLC10A2 (NM_000452.1,1134-1152).
gaatgtttgttaatcacaa

SEQ ID NO: 256139 - DNA, 19 bp, Homo sapiens
  siRNA target sequence for SLC10A2 (NM_000452.1,1150-1168).
caaatggccccaaaaagca

SEQ ID NO: 256140 - DNA, 19 bp, Homo sapiens
  siRNA target sequence for SLC10A2 (NM_000452.1,1226-1244).
gtggttggaggaatattgt

SEQ ID NO: 256141 - DNA, 19 bp, Homo sapiens
  siRNA target sequence for SLC10A2 (NM_000452.1,1246-1264).
ccaaagcgcctggatcatt

SEQ ID NO: 256142 - DNA, 19 bp, Homo sapiens
  siRNA target sequence for SLC10A2 (NM_000452.1,1359-1377).
ggtgccgaacggttgcttt

SEQ ID NO: 256143 - DNA, 19 bp, Homo sapiens
  siRNA target sequence for SLC10A2 (NM_000452.1,1360-1378).
gtgccgaacggttgctttt

SEQ ID NO: 256144 - DNA, 19 bp, Homo sapiens
  siRNA target sequence for SLC10A2 (NM_000452.1,1362-1380).
gccgaacggttgcttttga

SEQ ID NO: 256145 - DNA, 19 bp, Homo sapiens
  siRNA target sequence for SLC10A2 (NM_000452.1,1363-1381).
ccgaacggttgcttttgaa

SEQ ID NO: 256146 - DNA, 19 bp, Homo sapiens
  siRNA target sequence for SLC10A2 (NM_000452.1,1364-1382).
cgaacggttgcttttgaaa

SEQ ID NO: 256147 - DNA, 19 bp, Homo sapiens
  siRNA target sequence for SLC10A2 (NM_000452.1,1391-1409).
cagaacacgcagctatgtt

SEQ ID NO: 256148 - DNA, 19 bp, Homo sapiens
  siRNA target sequence for SLC10A2 (NM_000452.1,1442-1460).
gagctcaatgtcgtattca

SEQ ID NO: 256149 - DNA, 19 bp, Homo sapiens
  siRNA target sequence for SLC10A2 (NM_000452.1,1467-1485).
cgctcatctacagcatttt

SEQ ID NO: 256150 - DNA, 19 bp, Homo sapiens
  siRNA target sequence for SLC10A2 (NM_000452.1,1490-1508).
ctcgcctttgccgcaatat

SEQ ID NO: 256151 - DNA, 19 bp, Homo sapiens
  siRNA target sequence for SLC10A2 (NM_000452.1,1494-1512).
cctttgccgcaatattctt

SEQ ID NO: 256152 - DNA, 19 bp, Homo sapiens
  siRNA target sequence for SLC10A2 (NM_000452.1,1499-1517).
gccgcaatattcttaggat

SEQ ID NO: 256153 - DNA, 19 bp, Homo sapiens
  siRNA target sequence for SLC10A2 (NM_000452.1,1500-1518).
ccgcaatattcttaggatt

SEQ ID NO: 256154 - DNA, 19 bp, Homo sapiens
  siRNA target sequence for SLC10A2 (NM_000452.1,1591-1609).
gccagagtcatcgttttat

SEQ ID NO: 256155 - DNA, 19 bp, Homo sapiens
  siRNA target sequence for SLC10A2 (NM_000452.1,1592-1610).
ccagagtcatcgttttata

SEQ ID NO: 256156 - DNA, 19 bp, Homo sapiens
  siRNA target sequence for SLC10A3 (NM_019848.2,557-575).
gcacaggtcccttaagcat

SEQ ID NO: 256157 - DNA, 19 bp, Homo sapiens
  siRNA target sequence for SLC10A4 (NM_152679.2,667-685).
cggcaatctctccaatctt

SEQ ID NO: 256158 - DNA, 19 bp, Homo sapiens
  siRNA target sequence for SLC10A4 (NM_152679.2,668-686).
ggcaatctctccaatctta

SEQ ID NO: 256159 - DNA, 19 bp, Homo sapiens
  siRNA target sequence for SLC10A4 (NM_152679.2,669-687).
gcaatctctccaatcttat

SEQ ID NO: 256160 - DNA, 19 bp, Homo sapiens
  siRNA target sequence for SLC10A4 (NM_152679.2,807-825).
cccctatcgtgcagttact

SEQ ID NO: 256161 - DNA, 19 bp, Homo sapiens
  siRNA target sequence for SLC10A4 (NM_152679.2,808-826).
ccctatcgtgcagttacta

SEQ ID NO: 256162 - DNA, 19 bp, Homo sapiens
  siRNA target sequence for SLC10A4 (NM_152679.2,855-873).
gcagcactctcatacctat

SEQ ID NO: 256163 - DNA, 19 bp, Homo sapiens
  siRNA target sequence for SLC10A4 (NM_152679.2,874-892).
cgggttgggcgtcttcatt

SEQ ID NO: 256164 - DNA, 19 bp, Homo sapiens
  siRNA target sequence for SLC10A4 (NM_152679.2,883-901).
cgtcttcattcgctacaaa

SEQ ID NO: 256165 - DNA, 19 bp, Homo sapiens
  siRNA target sequence for SLC10A4 (NM_152679.2,884-902).
gtcttcattcgctacaaat

SEQ ID NO: 256166 - DNA, 19 bp, Homo sapiens
  siRNA target sequence for SLC10A4 (NM_152679.2,906-924).
gccgggtggctgactacat

SEQ ID NO: 256167 - DNA, 19 bp, Homo sapiens
  siRNA target sequence for SLC10A4 (NM_152679.2,907-925).
ccgggtggctgactacatt

SEQ ID NO: 256168 - DNA, 19 bp, Homo sapiens
  siRNA target sequence for SLC10A4 (NM_152679.2,909-927).
gggtggctgactacattgt

SEQ ID NO: 256169 - DNA, 19 bp, Homo sapiens
  siRNA target sequence for SLC10A4 (NM_152679.2,911-929).
gtggctgactacattgtga

SEQ ID NO: 256170 - DNA, 19 bp, Homo sapiens
  siRNA target sequence for SLC10A4 (NM_152679.2,917-935).
gactacattgtgaaggttt

SEQ ID NO: 256171 - DNA, 19 bp, Homo sapiens
  siRNA target sequence for SLC10A4 (NM_152679.2,959-977).
ctggtggtccttttcataa

SEQ ID NO: 256172 - DNA, 19 bp, Homo sapiens
  siRNA target sequence for SLC10A4 (NM_152679.2,1026-1044).
ctgtttatgtgatagcaat

SEQ ID NO: 256173 - DNA, 19 bp, Homo sapiens
  siRNA target sequence for SLC10A4 (NM_152679.2,1028-1046).
gtttatgtgatagcaattt

SEQ ID NO: 256174 - DNA, 19 bp, Homo sapiens
  siRNA target sequence for SLC10A4 (NM_152679.2,1063-1081).
ctacgcttcaggttatggt

SEQ ID NO: 256175 - DNA, 19 bp, Homo sapiens
  siRNA target sequence for SLC10A4 (NM_152679.2,1066-1084).
cgcttcaggttatggttta

SEQ ID NO: 256176 - DNA, 19 bp, Homo sapiens
  siRNA target sequence for SLC10A4 (NM_152679.2,1111-1129).
ctgcaagaggactgtatgt

SEQ ID NO: 256177 - DNA, 19 bp, Homo sapiens
  siRNA target sequence for SLC10A4 (NM_152679.2,1132-1150).
ggaaacaggtagtcagaat

SEQ ID NO: 256178 - DNA, 19 bp, Homo sapiens
  siRNA target sequence for SLC10A4 (NM_152679.2,1156-1174).
gctctgtacagccattcta

SEQ ID NO: 256179 - DNA, 19 bp, Homo sapiens
  siRNA target sequence for SLC10A4 (NM_152679.2,1157-1175).
ctctgtacagccattctaa

SEQ ID NO: 256180 - DNA, 19 bp, Homo sapiens
  siRNA target sequence for SLC10A4 (NM_152679.2,1181-1199).
gcctttccaccgcaattca

SEQ ID NO: 256181 - DNA, 19 bp, Homo sapiens
  siRNA target sequence for SLC10A4 (NM_152679.2,1182-1200).
cctttccaccgcaattcat

SEQ ID NO: 256182 - DNA, 19 bp, Homo sapiens
  siRNA target sequence for SLC10A4 (NM_152679.2,1183-1201).
ctttccaccgcaattcata

SEQ ID NO: 256183 - DNA, 19 bp, Homo sapiens
  siRNA target sequence for SLC10A4 (NM_152679.2,1187-1205).
ccaccgcaattcataggaa

SEQ ID NO: 256184 - DNA, 19 bp, Homo sapiens
  siRNA target sequence for SLC10A4 (NM_152679.2,1206-1224).
gcatgtacatgtttccttt

SEQ ID NO: 256185 - DNA, 19 bp, Homo sapiens
  siRNA target sequence for SLC10A4 (NM_152679.2,1306-1324).
gcgagatcctctagatgaa

SEQ ID NO: 256186 - DNA, 19 bp, Homo sapiens
  siRNA target sequence for SLC5A2 (NM_003041.1,66-84).
cagaaggccctgattgaca

SEQ ID NO: 256187 - DNA, 19 bp, Homo sapiens
  siRNA target sequence for SLC5A2 (NM_003041.1,68-86).
gaaggccctgattgacaat

SEQ ID NO: 256188 - DNA, 19 bp, Homo sapiens
  siRNA target sequence for SLC5A2 (NM_003041.1,98-116).
cctagtcattgctgcatat

SEQ ID NO: 256189 - DNA, 19 bp, Homo sapiens
  siRNA target sequence for SLC5A2 (NM_003041.1,99-117).
ctagtcattgctgcatatt

SEQ ID NO: 256190 - DNA, 19 bp, Homo sapiens
  siRNA target sequence for SLC5A2 (NM_003041.1,700-718).
cgggtctcttcgacaaata

SEQ ID NO: 256191 - DNA, 19 bp, Homo sapiens
  siRNA target sequence for SLC5A2 (NM_003041.1,703-721).
gtctcttcgacaaatacct

SEQ ID NO: 256192 - DNA, 19 bp, Homo sapiens
  siRNA target sequence for SLC5A2 (NM_003041.1,756-774).
ccagccgtgggaaacatct

SEQ ID NO: 256193 - DNA, 19 bp, Homo sapiens
  siRNA target sequence for SLC5A2 (NM_003041.1,980-998).
gaagctgacgcccatgttt

SEQ ID NO: 256194 - DNA, 19 bp, Homo sapiens
  siRNA target sequence for SLC5A2 (NM_003041.1,2015-2033).
gttcctctggggcttctat

SEQ ID NO: 256195 - DNA, 19 bp, Homo sapiens
  siRNA target sequence for SLC5A1 (NM_000343.1,80-98).
cgcaatgcagccgatatct

SEQ ID NO: 256196 - DNA, 19 bp, Homo sapiens
  siRNA target sequence for SLC5A1 (NM_000343.1,92-110).
gatatctccatcatcgtta

SEQ ID NO: 256197 - DNA, 19 bp, Homo sapiens
  siRNA target sequence for SLC5A1 (NM_000343.1,136-154).
cggactgtgggctatgttt

SEQ ID NO: 256198 - DNA, 19 bp, Homo sapiens
  siRNA target sequence for SLC5A1 (NM_000343.1,229-247).
cctctttgctagtaacatt

SEQ ID NO: 256199 - DNA, 19 bp, Homo sapiens
  siRNA target sequence for SLC5A1 (NM_000343.1,355-373).
gtttgtccccatctatatt

SEQ ID NO: 256200 - DNA, 19 bp, Homo sapiens
  siRNA target sequence for SLC5A1 (NM_000343.1,525-543).
ccttaggcctgaatctgta

SEQ ID NO: 256201 - DNA, 19 bp, Homo sapiens
  siRNA target sequence for SLC5A1 (NM_000343.1,526-544).
cttaggcctgaatctgtat

SEQ ID NO: 256202 - DNA, 19 bp, Homo sapiens
  siRNA target sequence for SLC5A1 (NM_000343.1,721-739).
gaaagccattccaaccata

SEQ ID NO: 256203 - DNA, 19 bp, Homo sapiens
  siRNA target sequence for SLC5A1 (NM_000343.1,725-743).
gccattccaaccatagtgt

SEQ ID NO: 256204 - DNA, 19 bp, Homo sapiens
  siRNA target sequence for SLC5A1 (NM_000343.1,833-851).
ccatggcctgggttcatct

SEQ ID NO: 256205 - DNA, 19 bp, Homo sapiens
  siRNA target sequence for SLC5A1 (NM_000343.1,834-852).
catggcctgggttcatctt

SEQ ID NO: 256206 - DNA, 19 bp, Homo sapiens
  siRNA target sequence for SLC5A1 (NM_000343.1,916-934).
ctcagccaagaatatgtct

SEQ ID NO: 256207 - DNA, 19 bp, Homo sapiens
  siRNA target sequence for SLC5A1 (NM_000343.1,1099-1117).
catcgcctatccaacctta

SEQ ID NO: 256208 - DNA, 19 bp, Homo sapiens
  siRNA target sequence for SLC5A1 (NM_000343.1,1284-1302).
ccggaaggttgtttatcct

SEQ ID NO: 256209 - DNA, 19 bp, Homo sapiens
  siRNA target sequence for SLC5A1 (NM_000343.1,1350-1368).
cacaaagtgggcaactctt

SEQ ID NO: 256210 - DNA, 19 bp, Homo sapiens
  siRNA target sequence for SLC5A1 (NM_000343.1,1496-1514).
gggatttcacgtatgatta

SEQ ID NO: 256211 - DNA, 19 bp, Homo sapiens
  siRNA target sequence for SLC5A1 (NM_000343.1,1498-1516).
gatttcacgtatgattact

SEQ ID NO: 256212 - DNA, 19 bp, Homo sapiens
  siRNA target sequence for SLC5A1 (NM_000343.1,1575-1593).
gtggggtgcactacttgta

SEQ ID NO: 256213 - DNA, 19 bp, Homo sapiens
  siRNA target sequence for SLC5A1 (NM_000343.1,1577-1595).
ggggtgcactacttgtact

SEQ ID NO: 256214 - DNA, 19 bp, Homo sapiens
  siRNA target sequence for SLC5A1 (NM_000343.1,1707-1725).
gcaaagaggagcgtattga

SEQ ID NO: 256215 - DNA, 19 bp, Homo sapiens
  siRNA target sequence for SLC5A1 (NM_000343.1,1759-1777).
ccctaaggagaccattgaa

SEQ ID NO: 256216 - DNA, 19 bp, Homo sapiens
  siRNA target sequence for SLC5A1 (NM_000343.1,1761-1779).
ctaaggagaccattgaaat

SEQ ID NO: 256217 - DNA, 19 bp, Homo sapiens
  siRNA target sequence for SLC5A1 (NM_000343.1,1770-1788).
ccattgaaatagaaacaca

SEQ ID NO: 256218 - DNA, 19 bp, Homo sapiens
  siRNA target sequence for SLC5A1 (NM_000343.1,1818-1836).
ggagagcctatgacctatt

SEQ ID NO: 256219 - DNA, 19 bp, Homo sapiens
  siRNA target sequence for SLC5A1 (NM_000343.1,1853-1871).
cacggtgcacccaagatga

SEQ ID NO: 256220 - DNA, 19 bp, Homo sapiens
  siRNA target sequence for SLC5A1 (NM_000343.1,1966-1984).
ggtgaccgtggctgtcttt

SEQ ID NO: 256221 - DNA, 19 bp, Homo sapiens
  siRNA target sequence for SLC5A1 (NM_000343.1,1967-1985).
gtgaccgtggctgtctttt

SEQ ID NO: 256222 - DNA, 19 bp, Homo sapiens
  siRNA target sequence for SLC23A2 (NM_005116.4,378-396).
gatgggtattggtaagaat

SEQ ID NO: 256223 - DNA, 19 bp, Homo sapiens
  siRNA target sequence for SLC23A2 (NM_005116.4,382-400).
ggtattggtaagaatacca

SEQ ID NO: 256224 - DNA, 19 bp, Homo sapiens
  siRNA target sequence for SLC23A2 (NM_005116.4,417-435).
ggctggaagttcaacagaa

SEQ ID NO: 256225 - DNA, 19 bp, Homo sapiens
  siRNA target sequence for SLC23A2 (NM_005116.4,428-446).
caacagaaggcaaatacga

SEQ ID NO: 256226 - DNA, 19 bp, Homo sapiens
  siRNA target sequence for SLC23A2 (NM_005116.4,541-559).
ctcatggcgatctacacta

SEQ ID NO: 256227 - DNA, 19 bp, Homo sapiens
  siRNA target sequence for SLC23A2 (NM_005116.4,626-644).
cccagcgatcagacatgat

SEQ ID NO: 256228 - DNA, 19 bp, Homo sapiens
  siRNA target sequence for SLC23A2 (NM_005116.4,627-645).
ccagcgatcagacatgatt

SEQ ID NO: 256229 - DNA, 19 bp, Homo sapiens
  siRNA target sequence for SLC23A2 (NM_005116.4,628-646).
cagcgatcagacatgattt

SEQ ID NO: 256230 - DNA, 19 bp, Homo sapiens
  siRNA target sequence for SLC23A2 (NM_005116.4,630-648).
gcgatcagacatgatttat

SEQ ID NO: 256231 - DNA, 19 bp, Homo sapiens
  siRNA target sequence for SLC23A2 (NM_005116.4,631-649).
cgatcagacatgatttata

SEQ ID NO: 256232 - DNA, 19 bp, Homo sapiens
  siRNA target sequence for SLC23A2 (NM_005116.4,642-660).
gatttataccatagaagat

SEQ ID NO: 256233 - DNA, 19 bp, Homo sapiens
  siRNA target sequence for SLC23A2 (NM_005116.4,815-833).
gtgtgggaatcactacttt

SEQ ID NO: 256234 - DNA, 19 bp, Homo sapiens
  siRNA target sequence for SLC23A2 (NM_005116.4,835-853).
ctacagacaacgtttggat

SEQ ID NO: 256235 - DNA, 19 bp, Homo sapiens
  siRNA target sequence for SLC23A2 (NM_005116.4,854-872).
gcaggttacccctgtttca

SEQ ID NO: 256236 - DNA, 19 bp, Homo sapiens
  siRNA target sequence for SLC23A2 (NM_005116.4,1038-1056).
gtcctcactgatagaagta

SEQ ID NO: 256237 - DNA, 19 bp, Homo sapiens
  siRNA target sequence for SLC23A2 (NM_005116.4,1101-1119).
cggtcccttgaccattaca

SEQ ID NO: 256238 - DNA, 19 bp, Homo sapiens
  siRNA target sequence for SLC23A2 (NM_005116.4,1226-1244).
ctcaatacgccagaaatgt

SEQ ID NO: 256239 - DNA, 19 bp, Homo sapiens
  siRNA target sequence for SLC23A2 (NM_005116.4,1228-1246).
caatacgccagaaatgtta

SEQ ID NO: 256240 - DNA, 19 bp, Homo sapiens
  siRNA target sequence for SLC23A2 (NM_005116.4,1233-1251).
cgccagaaatgttaaattt

SEQ ID NO: 256241 - DNA, 19 bp, Homo sapiens
  siRNA target sequence for SLC23A2 (NM_005116.4,1255-1273).
ctcccgatttataaatcca

SEQ ID NO: 256242 - DNA, 19 bp, Homo sapiens
  siRNA target sequence for SLC23A2 (NM_005116.4,1280-1298).
gatggactgcgtacaagtt

SEQ ID NO: 256243 - DNA, 19 bp, Homo sapiens
  siRNA target sequence for SLC23A2 (NM_005116.4,1283-1301).
ggactgcgtacaagttaca

SEQ ID NO: 256244 - DNA, 19 bp, Homo sapiens
  siRNA target sequence for SLC23A2 (NM_005116.4,1384-1402).
cctcccgacagcacaaagt

SEQ ID NO: 256245 - DNA, 19 bp, Homo sapiens
  siRNA target sequence for SLC23A2 (NM_005116.4,1444-1462).
ctggtagccccgtggttta

SEQ ID NO: 256246 - DNA, 19 bp, Homo sapiens
  siRNA target sequence for SLC23A2 (NM_005116.4,1454-1472).
cgtggtttaaggttccata

SEQ ID NO: 256247 - DNA, 19 bp, Homo sapiens
  siRNA target sequence for SLC23A2 (NM_005116.4,1541-1559).
ccagcatcatcgagtctat

SEQ ID NO: 256248 - DNA, 19 bp, Homo sapiens
  siRNA target sequence for SLC23A2 (NM_005116.4,1542-1560).
cagcatcatcgagtctatt

SEQ ID NO: 256249 - DNA, 19 bp, Homo sapiens
  siRNA target sequence for SLC23A2 (NM_005116.4,1606-1624).
cccatccacgcaataaaca

SEQ ID NO: 256250 - DNA, 19 bp, Homo sapiens
  siRNA target sequence for SLC23A2 (NM_005116.4,1615-1633).
gcaataaacaggggaattt

SEQ ID NO: 256251 - DNA, 19 bp, Homo sapiens
  siRNA target sequence for SLC23A2 (NM_005116.4,1955-1973).
ggctcgtccttccaagtta

SEQ ID NO: 256252 - DNA, 19 bp, Homo sapiens
  siRNA target sequence for SLC23A2 (NM_005116.4,2056-2074).
gggggctgtgtggctttta

SEQ ID NO: 256253 - DNA, 19 bp, Homo sapiens
  siRNA target sequence for SLC23A2 (NM_005116.4,2068-2086).
gcttttatcctggataaca

SEQ ID NO: 256254 - DNA, 19 bp, Homo sapiens
  siRNA target sequence for SLC23A2 (NM_005116.4,2163-2181).
cggcatggagtcgtacaat

SEQ ID NO: 256255 - DNA, 19 bp, Homo sapiens
  siRNA target sequence for SLC23A2 (NM_005116.4,2164-2182).
ggcatggagtcgtacaatt

SEQ ID NO: 256256 - DNA, 19 bp, Homo sapiens
  siRNA target sequence for SLC23A2 (NM_005116.4,2165-2183).
gcatggagtcgtacaattt

SEQ ID NO: 256257 - DNA, 19 bp, Homo sapiens
  siRNA target sequence for SLC23A2 (NM_005116.4,2184-2202).
gccatttggcatgaacatt

SEQ ID NO: 256258 - DNA, 19 bp, Homo sapiens
  siRNA target sequence for SLC23A2 (NM_005116.4,2186-2204).
catttggcatgaacattat

SEQ ID NO: 256259 - DNA, 19 bp, Homo sapiens
  siRNA target sequence for SLC23A2 (NM_005116.4,2214-2232).
cagatgcttcagctactta

SEQ ID NO: 256260 - DNA, 19 bp, Homo sapiens
  siRNA target sequence for SLC23A2 (NM_005116.4,2286-2304).
caacagccggagttcagat

SEQ ID NO: 256261 - DNA, 19 bp, Homo sapiens
  siRNA target sequence for SLC23A2 (NM_005116.4,2289-2307).
cagccggagttcagatgaa

SEQ ID NO: 256262 - DNA, 19 bp, Homo sapiens
  siRNA target sequence for SLC38A1 (NM_030674.2,466-484).
caaaagtggactcgaatta

SEQ ID NO: 256263 - DNA, 19 bp, Homo sapiens
  siRNA target sequence for SLC38A1 (NM_030674.2,471-489).
gtggactcgaattaactga

SEQ ID NO: 256264 - DNA, 19 bp, Homo sapiens
  siRNA target sequence for SLC38A1 (NM_030674.2,504-522).
cagtgcccgaggatgataa

SEQ ID NO: 256265 - DNA, 19 bp, Homo sapiens
  siRNA target sequence for SLC38A1 (NM_030674.2,506-524).
gtgcccgaggatgataaca

SEQ ID NO: 256266 - DNA, 19 bp, Homo sapiens
  siRNA target sequence for SLC38A1 (NM_030674.2,508-526).
gcccgaggatgataacatt

SEQ ID NO: 256267 - DNA, 19 bp, Homo sapiens
  siRNA target sequence for SLC38A1 (NM_030674.2,509-527).
cccgaggatgataacatta

SEQ ID NO: 256268 - DNA, 19 bp, Homo sapiens
  siRNA target sequence for SLC38A1 (NM_030674.2,514-532).
ggatgataacattagcaat

SEQ ID NO: 256269 - DNA, 19 bp, Homo sapiens
  siRNA target sequence for SLC38A1 (NM_030674.2,518-536).
gataacattagcaatgact

SEQ ID NO: 256270 - DNA, 19 bp, Homo sapiens
  siRNA target sequence for SLC38A1 (NM_030674.2,528-546).
gcaatgactccaatgattt

SEQ ID NO: 256271 - DNA, 19 bp, Homo sapiens
  siRNA target sequence for SLC38A1 (NM_030674.2,590-608).
gatcgtgaaagtagaagaa

SEQ ID NO: 256272 - DNA, 19 bp, Homo sapiens
  siRNA target sequence for SLC38A1 (NM_030674.2,613-631).
cacaaacagccatttggaa

SEQ ID NO: 256273 - DNA, 19 bp, Homo sapiens
  siRNA target sequence for SLC38A1 (NM_030674.2,640-658).
gtgtgatgagtatattcca

SEQ ID NO: 256274 - DNA, 19 bp, Homo sapiens
  siRNA target sequence for SLC38A1 (NM_030674.2,742-760).
ggcaaacactggaatccta

SEQ ID NO: 256275 - DNA, 19 bp, Homo sapiens
  siRNA target sequence for SLC38A1 (NM_030674.2,785-803).
gtgacattgctgtctatat

SEQ ID NO: 256276 - DNA, 19 bp, Homo sapiens
  siRNA target sequence for SLC38A1 (NM_030674.2,787-805).
gacattgctgtctatatat

SEQ ID NO: 256277 - DNA, 19 bp, Homo sapiens
  siRNA target sequence for SLC38A1 (NM_030674.2,793-811).
gctgtctatatattcaata

SEQ ID NO: 256278 - DNA, 19 bp, Homo sapiens
  siRNA target sequence for SLC38A1 (NM_030674.2,794-812).
ctgtctatatattcaataa

SEQ ID NO: 256279 - DNA, 19 bp, Homo sapiens
  siRNA target sequence for SLC38A1 (NM_030674.2,843-861).
gctgcatggtgtatgaaaa

SEQ ID NO: 256280 - DNA, 19 bp, Homo sapiens
  siRNA target sequence for SLC38A1 (NM_030674.2,885-903).
ccacagggaagttcgtaat

SEQ ID NO: 256281 - DNA, 19 bp, Homo sapiens
  siRNA target sequence for SLC38A1 (NM_030674.2,909-927).
gagccacctctctacagaa

SEQ ID NO: 256282 - DNA, 19 bp, Homo sapiens
  siRNA target sequence for SLC38A1 (NM_030674.2,949-967).
cctcttcatcgtaaaaaat

SEQ ID NO: 256283 - DNA, 19 bp, Homo sapiens
  siRNA target sequence for SLC38A1 (NM_030674.2,971-989).
ctaccctctgccataaagt

SEQ ID NO: 256284 - DNA, 19 bp, Homo sapiens
  siRNA target sequence for SLC38A1 (NM_030674.2,975-993).
cctctgccataaagtttct

SEQ ID NO: 256285 - DNA, 19 bp, Homo sapiens
  siRNA target sequence for SLC38A1 (NM_030674.2,1038-1056).
gcgttctggtggtgatagt

SEQ ID NO: 256286 - DNA, 19 bp, Homo sapiens
  siRNA target sequence for SLC38A1 (NM_030674.2,1045-1063).
ggtggtgatagttaccttt

SEQ ID NO: 256287 - DNA, 19 bp, Homo sapiens
  siRNA target sequence for SLC38A1 (NM_030674.2,1128-1146).
ccttgagctgtatggtttt

SEQ ID NO: 256288 - DNA, 19 bp, Homo sapiens
  siRNA target sequence for SLC38A1 (NM_030674.2,1151-1169).
ctaattgtggttatttaca

SEQ ID NO: 256289 - DNA, 19 bp, Homo sapiens
  siRNA target sequence for SLC38A1 (NM_030674.2,1188-1206).
gcattgttccagagctaaa

SEQ ID NO: 256290 - DNA, 19 bp, Homo sapiens
  siRNA target sequence for SLC38A1 (NM_030674.2,1196-1214).
ccagagctaaattcaacaa

SEQ ID NO: 256291 - DNA, 19 bp, Homo sapiens
  siRNA target sequence for SLC38A1 (NM_030674.2,1199-1217).
gagctaaattcaacaataa

SEQ ID NO: 256292 - DNA, 19 bp, Homo sapiens
  siRNA target sequence for SLC38A1 (NM_030674.2,1201-1219).
gctaaattcaacaataagt

SEQ ID NO: 256293 - DNA, 19 bp, Homo sapiens
  siRNA target sequence for SLC38A1 (NM_030674.2,1238-1256).
gacacgtgtacgccaaaat

SEQ ID NO: 256294 - DNA, 19 bp, Homo sapiens
  siRNA target sequence for SLC38A1 (NM_030674.2,1240-1258).
cacgtgtacgccaaaatat

SEQ ID NO: 256295 - DNA, 19 bp, Homo sapiens
  siRNA target sequence for SLC38A1 (NM_030674.2,1242-1260).
cgtgtacgccaaaatatgt

SEQ ID NO: 256296 - DNA, 19 bp, Homo sapiens
  siRNA target sequence for SLC38A1 (NM_030674.2,1243-1261).
gtgtacgccaaaatatgtt

SEQ ID NO: 256297 - DNA, 19 bp, Homo sapiens
  siRNA target sequence for SLC38A1 (NM_030674.2,1248-1266).
cgccaaaatatgttacctt

SEQ ID NO: 256298 - DNA, 19 bp, Homo sapiens
  siRNA target sequence for SLC38A1 (NM_030674.2,1286-1304).
gctttacccaccattgcat

SEQ ID NO: 256299 - DNA, 19 bp, Homo sapiens
  siRNA target sequence for SLC38A1 (NM_030674.2,1287-1305).
ctttacccaccattgcatt

SEQ ID NO: 256300 - DNA, 19 bp, Homo sapiens
  siRNA target sequence for SLC38A1 (NM_030674.2,1294-1312).
caccattgcatttgcattt

SEQ ID NO: 256301 - DNA, 19 bp, Homo sapiens
  siRNA target sequence for SLC38A1 (NM_030674.2,1322-1340).
ccgtcagtcctgccaattt

SEQ ID NO: 256302 - DNA, 19 bp, Homo sapiens
  siRNA target sequence for SLC38A1 (NM_030674.2,1323-1341).
cgtcagtcctgccaattta

SEQ ID NO: 256303 - DNA, 19 bp, Homo sapiens
  siRNA target sequence for SLC38A1 (NM_030674.2,1395-1413).
cctttttcgccatgtttgt

SEQ ID NO: 256304 - DNA, 19 bp, Homo sapiens
  siRNA target sequence for SLC38A1 (NM_030674.2,1470-1488).
ccgacctccttcacaaata

SEQ ID NO: 256305 - DNA, 19 bp, Homo sapiens
  siRNA target sequence for SLC38A1 (NM_030674.2,1471-1489).
cgacctccttcacaaatat

SEQ ID NO: 256306 - DNA, 19 bp, Homo sapiens
  siRNA target sequence for SLC38A1 (NM_030674.2,1522-1540).
gcggctggctgtcattgtt

SEQ ID NO: 256307 - DNA, 19 bp, Homo sapiens
  siRNA target sequence for SLC38A1 (NM_030674.2,1550-1568).
ctcacagtgccggtgttat

SEQ ID NO: 256308 - DNA, 19 bp, Homo sapiens
  siRNA target sequence for SLC38A1 (NM_030674.2,1552-1570).
cacagtgccggtgttattt

SEQ ID NO: 256309 - DNA, 19 bp, Homo sapiens
  siRNA target sequence for SLC38A1 (NM_030674.2,1554-1572).
cagtgccggtgttattttt

SEQ ID NO: 256310 - DNA, 19 bp, Homo sapiens
  siRNA target sequence for SLC38A1 (NM_030674.2,1637-1655).
gtggttacctgcatactct

SEQ ID NO: 256311 - DNA, 19 bp, Homo sapiens
  siRNA target sequence for SLC38A1 (NM_030674.2,1647-1665).
gcatactcttggttgttat

SEQ ID NO: 256312 - DNA, 19 bp, Homo sapiens
  siRNA target sequence for SLC38A1 (NM_030674.2,1688-1706).
ccctccatgaaggatattt

SEQ ID NO: 256313 - DNA, 19 bp, Homo sapiens
  siRNA target sequence for SLC38A1 (NM_030674.2,1709-1727).
ggagtcgtaggagttacat

SEQ ID NO: 256314 - DNA, 19 bp, Homo sapiens
  siRNA target sequence for SLC38A1 (NM_030674.2,1719-1737).
gagttacatctgctaacat

SEQ ID NO: 256315 - DNA, 19 bp, Homo sapiens
  siRNA target sequence for SLC38A1 (NM_030674.2,1725-1743).
catctgctaacatgcttat

SEQ ID NO: 256316 - DNA, 19 bp, Homo sapiens
  siRNA target sequence for SLC38A1 (NM_030674.2,1728-1746).
ctgctaacatgcttatttt

SEQ ID NO: 256317 - DNA, 19 bp, Homo sapiens
  siRNA target sequence for SLC13A2 (NM_003984.1,106-124).
cctacctgatcgtgttctt

SEQ ID NO: 256318 - DNA, 19 bp, Homo sapiens
  siRNA target sequence for SLC13A2 (NM_003984.1,244-262).
ctgccctcttccccttaat

SEQ ID NO: 256319 - DNA, 19 bp, Homo sapiens
  siRNA target sequence for SLC13A2 (NM_003984.1,299-317).
ggttgccgtcgagtatctt

SEQ ID NO: 256320 - DNA, 19 bp, Homo sapiens
  siRNA target sequence for SLC13A2 (NM_003984.1,300-318).
gttgccgtcgagtatctta

SEQ ID NO: 256321 - DNA, 19 bp, Homo sapiens
  siRNA target sequence for SLC13A2 (NM_003984.1,304-322).
ccgtcgagtatcttaagga

SEQ ID NO: 256322 - DNA, 19 bp, Homo sapiens
  siRNA target sequence for SLC13A2 (NM_003984.1,627-645).
gaggtgaccaagcttgata

SEQ ID NO: 256323 - DNA, 19 bp, Homo sapiens
  siRNA target sequence for SLC13A2 (NM_003984.1,629-647).
ggtgaccaagcttgataat

SEQ ID NO: 256324 - DNA, 19 bp, Homo sapiens
  siRNA target sequence for SLC13A2 (NM_003984.1,1179-1197).
gggacagtggccatcttca

SEQ ID NO: 256325 - DNA, 19 bp, Homo sapiens
  siRNA target sequence for SLC13A2 (NM_003984.1,1189-1207).
ccatcttcatcggcataat

SEQ ID NO: 256326 - DNA, 19 bp, Homo sapiens
  siRNA target sequence for SLC13A2 (NM_003984.1,1190-1208).
catcttcatcggcataatt

SEQ ID NO: 256327 - DNA, 19 bp, Homo sapiens
  siRNA target sequence for SLC13A2 (NM_003984.1,1200-1218).
ggcataattatgttcatca

SEQ ID NO: 256328 - DNA, 19 bp, Homo sapiens
  siRNA target sequence for SLC13A2 (NM_003984.1,1202-1220).
cataattatgttcatcata

SEQ ID NO: 256329 - DNA, 19 bp, Homo sapiens
  siRNA target sequence for SLC13A2 (NM_003984.1,1320-1338).
ccgtggaatatcgtgttat

SEQ ID NO: 256330 - DNA, 19 bp, Homo sapiens
  siRNA target sequence for SLC13A2 (NM_003984.1,1321-1339).
cgtggaatatcgtgttatt

SEQ ID NO: 256331 - DNA, 19 bp, Homo sapiens
  siRNA target sequence for SLC13A2 (NM_003984.1,1324-1342).
ggaatatcgtgttattgct

SEQ ID NO: 256332 - DNA, 19 bp, Homo sapiens
  siRNA target sequence for SLC13A2 (NM_003984.1,1686-1704).
ggattcctcctcaacatca

SEQ ID NO: 256333 - DNA, 19 bp, Homo sapiens
  siRNA target sequence for SLC28A1 (NM_004213.2,275-293).
ggggctgatttcttggaaa

SEQ ID NO: 256334 - DNA, 19 bp, Homo sapiens
  siRNA target sequence for SLC28A1 (NM_004213.2,434-452).
cacatgcagctgtttcgat

SEQ ID NO: 256335 - DNA, 19 bp, Homo sapiens
  siRNA target sequence for SLC28A1 (NM_004213.2,831-849).
gacttggactgcagtttgt

SEQ ID NO: 256336 - DNA, 19 bp, Homo sapiens
  siRNA target sequence for SLC28A1 (NM_004213.2,854-872).
ggactcctcgtcatcagaa

SEQ ID NO: 256337 - DNA, 19 bp, Homo sapiens
  siRNA target sequence for SLC28A1 (NM_004213.2,1209-1227).
ctgaagtccacgttgtcat

SEQ ID NO: 256338 - DNA, 19 bp, Homo sapiens
  siRNA target sequence for SLC28A1 (NM_004213.2,1288-1306).
cgatgccacctcgttgatt

SEQ ID NO: 256339 - DNA, 19 bp, Homo sapiens
  siRNA target sequence for SLC28A1 (NM_004213.2,1607-1625).
cggcctgtagccttcttga

SEQ ID NO: 256340 - DNA, 19 bp, Homo sapiens
  siRNA target sequence for SLC28A1 (NM_004213.2,1608-1626).
ggcctgtagccttcttgat

SEQ ID NO: 256341 - DNA, 19 bp, Homo sapiens
  siRNA target sequence for SLC28A1 (NM_004213.2,1690-1708).
cgagtttgtggcctatcaa

SEQ ID NO: 256342 - DNA, 19 bp, Homo sapiens
  siRNA target sequence for SLC28A1 (NM_004213.2,1890-1908).
gcgacttctcccagatagt

SEQ ID NO: 256343 - DNA, 19 bp, Homo sapiens
  siRNA target sequence for SLC28A2 (NM_004212.1,300-318).
ctgttgggcctgttgtgtt

SEQ ID NO: 256344 - DNA, 19 bp, Homo sapiens
  siRNA target sequence for SLC28A2 (NM_004212.1,369-387).
gcactggccttgtttgtca

SEQ ID NO: 256345 - DNA, 19 bp, Homo sapiens
  siRNA target sequence for SLC28A2 (NM_004212.1,370-388).
cactggccttgtttgtcat

SEQ ID NO: 256346 - DNA, 19 bp, Homo sapiens
  siRNA target sequence for SLC28A2 (NM_004212.1,413-431).
ggttcactcgtttttgaaa

SEQ ID NO: 256347 - DNA, 19 bp, Homo sapiens
  siRNA target sequence for SLC28A2 (NM_004212.1,460-478).
gtctgaagccctttgaaaa

SEQ ID NO: 256348 - DNA, 19 bp, Homo sapiens
  siRNA target sequence for SLC28A2 (NM_004212.1,521-539).
ctccttggttggccttata

SEQ ID NO: 256349 - DNA, 19 bp, Homo sapiens
  siRNA target sequence for SLC28A2 (NM_004212.1,601-619).
gcatgttcatccttatcct

SEQ ID NO: 256350 - DNA, 19 bp, Homo sapiens
  siRNA target sequence for SLC28A2 (NM_004212.1,670-688).
cgggcctaggtcttcaatt

SEQ ID NO: 256351 - DNA, 19 bp, Homo sapiens
  siRNA target sequence for SLC28A2 (NM_004212.1,673-691).
gcctaggtcttcaatttgt

SEQ ID NO: 256352 - DNA, 19 bp, Homo sapiens
  siRNA target sequence for SLC28A2 (NM_004212.1,696-714).
gggatcttggtcatcagaa

SEQ ID NO: 256353 - DNA, 19 bp, Homo sapiens
  siRNA target sequence for SLC28A2 (NM_004212.1,701-719).
cttggtcatcagaactgat

SEQ ID NO: 256354 - DNA, 19 bp, Homo sapiens
  siRNA target sequence for SLC28A2 (NM_004212.1,710-728).
cagaactgatcttggatat

SEQ ID NO: 256355 - DNA, 19 bp, Homo sapiens
  siRNA target sequence for SLC28A2 (NM_004212.1,715-733).
ctgatcttggatatactgt

SEQ ID NO: 256356 - DNA, 19 bp, Homo sapiens
  siRNA target sequence for SLC28A2 (NM_004212.1,717-735).
gatcttggatatactgtat

SEQ ID NO: 256357 - DNA, 19 bp, Homo sapiens
  siRNA target sequence for SLC28A2 (NM_004212.1,747-765).
ggagagcaggtccagattt

SEQ ID NO: 256358 - DNA, 19 bp, Homo sapiens
  siRNA target sequence for SLC28A2 (NM_004212.1,748-766).
gagagcaggtccagatttt

SEQ ID NO: 256359 - DNA, 19 bp, Homo sapiens
  siRNA target sequence for SLC28A2 (NM_004212.1,837-855).
caggccttaccaatcatca

SEQ ID NO: 256360 - DNA, 19 bp, Homo sapiens
  siRNA target sequence for SLC28A2 (NM_004212.1,839-857).
ggccttaccaatcatcatt

SEQ ID NO: 256361 - DNA, 19 bp, Homo sapiens
  siRNA target sequence for SLC28A2 (NM_004212.1,840-858).
gccttaccaatcatcattt

SEQ ID NO: 256362 - DNA, 19 bp, Homo sapiens
  siRNA target sequence for SLC28A2 (NM_004212.1,841-859).
ccttaccaatcatcatttt

SEQ ID NO: 256363 - DNA, 19 bp, Homo sapiens
  siRNA target sequence for SLC28A2 (NM_004212.1,917-935).
gaaggtcgcctggttttta

SEQ ID NO: 256364 - DNA, 19 bp, Homo sapiens
  siRNA target sequence for SLC28A2 (NM_004212.1,920-938).
ggtcgcctggtttttacaa

SEQ ID NO: 256365 - DNA, 19 bp, Homo sapiens
  siRNA target sequence for SLC28A2 (NM_004212.1,921-939).
gtcgcctggtttttacaaa

SEQ ID NO: 256366 - DNA, 19 bp, Homo sapiens
  siRNA target sequence for SLC28A2 (NM_004212.1,1131-1149).
gatgcatcatccctgattt

SEQ ID NO: 256367 - DNA, 19 bp, Homo sapiens
  siRNA target sequence for SLC28A2 (NM_004212.1,1174-1192).
gtgctctcgcctcatcaaa

SEQ ID NO: 256368 - DNA, 19 bp, Homo sapiens
  siRNA target sequence for SLC28A2 (NM_004212.1,1306-1324).
ccataggccttgctactaa

SEQ ID NO: 256369 - DNA, 19 bp, Homo sapiens
  siRNA target sequence for SLC28A2 (NM_004212.1,1307-1325).
cataggccttgctactaat

SEQ ID NO: 256370 - DNA, 19 bp, Homo sapiens
  siRNA target sequence for SLC28A2 (NM_004212.1,1443-1461).
ctcctaaggcccatggttt

SEQ ID NO: 256371 - DNA, 19 bp, Homo sapiens
  siRNA target sequence for SLC28A2 (NM_004212.1,1503-1521).
gagatggtgggaatcaagt

SEQ ID NO: 256372 - DNA, 19 bp, Homo sapiens
  siRNA target sequence for SLC28A2 (NM_004212.1,1548-1566).
cagcaactgtctcaataca

SEQ ID NO: 256373 - DNA, 19 bp, Homo sapiens
  siRNA target sequence for SLC28A2 (NM_004212.1,1551-1569).
caactgtctcaatacaaga

SEQ ID NO: 256374 - DNA, 19 bp, Homo sapiens
  siRNA target sequence for SLC28A2 (NM_004212.1,1626-1644).
gtgagagctgaaatcatta

SEQ ID NO: 256375 - DNA, 19 bp, Homo sapiens
  siRNA target sequence for SLC28A2 (NM_004212.1,1632-1650).
gctgaaatcattacaacat

SEQ ID NO: 256376 - DNA, 19 bp, Homo sapiens
  siRNA target sequence for SLC28A2 (NM_004212.1,1662-1680).
ggatttgccaatcttagtt

SEQ ID NO: 256377 - DNA, 19 bp, Homo sapiens
  siRNA target sequence for SLC28A2 (NM_004212.1,1859-1877).
cacaagtttcaccaataga

SEQ ID NO: 256378 - DNA, 19 bp, Homo sapiens
  siRNA target sequence for SLC28A2 (NM_004212.1,1907-1925).
gctctttcagagtacttct

SEQ ID NO: 256379 - DNA, 19 bp, Homo sapiens
  siRNA target sequence for SLC28A2 (NM_004212.1,1981-1999).
gtgctatggcccttactaa

SEQ ID NO: 256380 - DNA, 19 bp, Homo sapiens
  siRNA target sequence for SLC28A2 (NM_004212.1,1983-2001).
gctatggcccttactaact

SEQ ID NO: 256381 - DNA, 19 bp, Homo sapiens
  siRNA target sequence for SLC28A2 (NM_004212.1,2002-2020).
gctgtggattctacaacaa

SEQ ID NO: 256382 - DNA, 19 bp, Homo sapiens
  siRNA target sequence for SLC28A3 (NM_022127.1,140-158).
cgtgggcttccagaatgaa

SEQ ID NO: 256383 - DNA, 19 bp, Homo sapiens
  siRNA target sequence for SLC28A3 (NM_022127.1,356-374).
cacagtatgtggtttctgt

SEQ ID NO: 256384 - DNA, 19 bp, Homo sapiens
  siRNA target sequence for SLC28A3 (NM_022127.1,388-406).
caactcttcggcacatcat

SEQ ID NO: 256385 - DNA, 19 bp, Homo sapiens
  siRNA target sequence for SLC28A3 (NM_022127.1,401-419).
catcatctggggcatttta

SEQ ID NO: 256386 - DNA, 19 bp, Homo sapiens
  siRNA target sequence for SLC28A3 (NM_022127.1,407-425).
ctggggcattttattagca

SEQ ID NO: 256387 - DNA, 19 bp, Homo sapiens
  siRNA target sequence for SLC28A3 (NM_022127.1,474-492).
gcccttcctctttttgtga

SEQ ID NO: 256388 - DNA, 19 bp, Homo sapiens
  siRNA target sequence for SLC28A3 (NM_022127.1,530-548).
cctgatggccaaatacgaa

SEQ ID NO: 256389 - DNA, 19 bp, Homo sapiens
  siRNA target sequence for SLC28A3 (NM_022127.1,538-556).
ccaaatacgaacatcgaat

SEQ ID NO: 256390 - DNA, 19 bp, Homo sapiens
  siRNA target sequence for SLC28A3 (NM_022127.1,539-557).
caaatacgaacatcgaatt

SEQ ID NO: 256391 - DNA, 19 bp, Homo sapiens
  siRNA target sequence for SLC28A3 (NM_022127.1,573-591).
cctggcagaaggcttctaa

SEQ ID NO: 256392 - DNA, 19 bp, Homo sapiens
  siRNA target sequence for SLC28A3 (NM_022127.1,631-649).
ccctggtcctagcagttat

SEQ ID NO: 256393 - DNA, 19 bp, Homo sapiens
  siRNA target sequence for SLC28A3 (NM_022127.1,632-650).
cctggtcctagcagttatt

SEQ ID NO: 256394 - DNA, 19 bp, Homo sapiens
  siRNA target sequence for SLC28A3 (NM_022127.1,633-651).
ctggtcctagcagttattt

SEQ ID NO: 256395 - DNA, 19 bp, Homo sapiens
  siRNA target sequence for SLC28A3 (NM_022127.1,700-718).
ccttcggtgggctcataat

SEQ ID NO: 256396 - DNA, 19 bp, Homo sapiens
  siRNA target sequence for SLC28A3 (NM_022127.1,784-802).
ggggaatcgggctacagtt

SEQ ID NO: 256397 - DNA, 19 bp, Homo sapiens
  siRNA target sequence for SLC28A3 (NM_022127.1,785-803).
gggaatcgggctacagttt

SEQ ID NO: 256398 - DNA, 19 bp, Homo sapiens
  siRNA target sequence for SLC28A3 (NM_022127.1,807-825).
cttgggctcttgattctaa

SEQ ID NO: 256399 - DNA, 19 bp, Homo sapiens
  siRNA target sequence for SLC28A3 (NM_022127.1,827-845).
gactgaccctggatttata

SEQ ID NO: 256400 - DNA, 19 bp, Homo sapiens
  siRNA target sequence for SLC28A3 (NM_022127.1,856-874).
ggttgggcagacaagttca

SEQ ID NO: 256401 - DNA, 19 bp, Homo sapiens
  siRNA target sequence for SLC28A3 (NM_022127.1,897-915).
gctggtgcttcatttgtct

SEQ ID NO: 256402 - DNA, 19 bp, Homo sapiens
  siRNA target sequence for SLC28A3 (NM_022127.1,1008-1026).
ggactgatgcagtggatta

SEQ ID NO: 256403 - DNA, 19 bp, Homo sapiens
  siRNA target sequence for SLC28A3 (NM_022127.1,1009-1027).
gactgatgcagtggattat

SEQ ID NO: 256404 - DNA, 19 bp, Homo sapiens
  siRNA target sequence for SLC28A3 (NM_022127.1,1038-1056).
ggatggatcatgctagtta

SEQ ID NO: 256405 - DNA, 19 bp, Homo sapiens
  siRNA target sequence for SLC28A3 (NM_022127.1,1060-1078).
cgggatcatctcctattga

SEQ ID NO: 256406 - DNA, 19 bp, Homo sapiens
  siRNA target sequence for SLC28A3 (NM_022127.1,1062-1080).
ggatcatctcctattgaat

SEQ ID NO: 256407 - DNA, 19 bp, Homo sapiens
  siRNA target sequence for SLC28A3 (NM_022127.1,1066-1084).
catctcctattgaatctgt

SEQ ID NO: 256408 - DNA, 19 bp, Homo sapiens
  siRNA target sequence for SLC28A3 (NM_022127.1,1128-1146).
ctgctggtccgaccatatt

SEQ ID NO: 256409 - DNA, 19 bp, Homo sapiens
  siRNA target sequence for SLC28A3 (NM_022127.1,1133-1151).
ggtccgaccatatttacct

SEQ ID NO: 256410 - DNA, 19 bp, Homo sapiens
  siRNA target sequence for SLC28A3 (NM_022127.1,1318-1336).
ctgagacagaaaaacctaa

SEQ ID NO: 256411 - DNA, 19 bp, Homo sapiens
  siRNA target sequence for SLC28A3 (NM_022127.1,2108-2126).
ctgctgcacattgttgaat

SEQ ID NO: 256412 - DNA, 19 bp, Homo sapiens
  siRNA target sequence for SLC28A3 (NM_022127.1,2141-2159).
ctgcaatgggatctctaat

SEQ ID NO: 256413 - DNA, 19 bp, Homo sapiens
  siRNA target sequence for SLC28A3 (NM_022127.1,2148-2166).
gggatctctaatacatttt

SEQ ID NO: 256414 - DNA, 19 bp, Homo sapiens
  siRNA target sequence for SLC15A1 (NM_005073.1,156-174).
cgagcaatcctgattctgt

SEQ ID NO: 256415 - DNA, 19 bp, Homo sapiens
  siRNA target sequence for SLC15A1 (NM_005073.1,165-183).
ctgattctgtacttcacaa

SEQ ID NO: 256416 - DNA, 19 bp, Homo sapiens
  siRNA target sequence for SLC15A1 (NM_005073.1,214-232).
ccgccatctaccatacgtt

SEQ ID NO: 256417 - DNA, 19 bp, Homo sapiens
  siRNA target sequence for SLC15A1 (NM_005073.1,215-233).
cgccatctaccatacgttt

SEQ ID NO: 256418 - DNA, 19 bp, Homo sapiens
  siRNA target sequence for SLC15A1 (NM_005073.1,244-262).
gctacctgacgccaattct

SEQ ID NO: 256419 - DNA, 19 bp, Homo sapiens
  siRNA target sequence for SLC15A1 (NM_005073.1,256-274).
caattctcggagctcttat

SEQ ID NO: 256420 - DNA, 19 bp, Homo sapiens
  siRNA target sequence for SLC15A1 (NM_005073.1,309-327).
gtgtcgctctccattgtct

SEQ ID NO: 256421 - DNA, 19 bp, Homo sapiens
  siRNA target sequence for SLC15A1 (NM_005073.1,317-335).
ctccattgtctacacaatt

SEQ ID NO: 256422 - DNA, 19 bp, Homo sapiens
  siRNA target sequence for SLC15A1 (NM_005073.1,339-357).
caagcagtcacctcagtaa

SEQ ID NO: 256423 - DNA, 19 bp, Homo sapiens
  siRNA target sequence for SLC15A1 (NM_005073.1,349-367).
cctcagtaagctccattaa

SEQ ID NO: 256424 - DNA, 19 bp, Homo sapiens
  siRNA target sequence for SLC15A1 (NM_005073.1,350-368).
ctcagtaagctccattaat

SEQ ID NO: 256425 - DNA, 19 bp, Homo sapiens
  siRNA target sequence for SLC15A1 (NM_005073.1,352-370).
cagtaagctccattaatga

SEQ ID NO: 256426 - DNA, 19 bp, Homo sapiens
  siRNA target sequence for SLC15A1 (NM_005073.1,577-595).
gtttgctttccacaatcat

SEQ ID NO: 256427 - DNA, 19 bp, Homo sapiens
  siRNA target sequence for SLC15A1 (NM_005073.1,602-620).
catgctcagagttcaacaa

SEQ ID NO: 256428 - DNA, 19 bp, Homo sapiens
  siRNA target sequence for SLC15A1 (NM_005073.1,684-702).
gctgtagccctgattgtgt

SEQ ID NO: 256429 - DNA, 19 bp, Homo sapiens
  siRNA target sequence for SLC15A1 (NM_005073.1,685-703).
ctgtagccctgattgtgtt

SEQ ID NO: 256430 - DNA, 19 bp, Homo sapiens
  siRNA target sequence for SLC15A1 (NM_005073.1,711-729).
ggcagtgggatgtacaaga

SEQ ID NO: 256431 - DNA, 19 bp, Homo sapiens
  siRNA target sequence for SLC15A1 (NM_005073.1,712-730).
gcagtgggatgtacaagaa

SEQ ID NO: 256432 - DNA, 19 bp, Homo sapiens
  siRNA target sequence for SLC15A1 (NM_005073.1,715-733).
gtgggatgtacaagaagtt

SEQ ID NO: 256433 - DNA, 19 bp, Homo sapiens
  siRNA target sequence for SLC15A1 (NM_005073.1,745-763).
gcaacatcatgggtaaagt

SEQ ID NO: 256434 - DNA, 19 bp, Homo sapiens
  siRNA target sequence for SLC15A1 (NM_005073.1,847-865).
gggctaaagagaaatacga

SEQ ID NO: 256435 - DNA, 19 bp, Homo sapiens
  siRNA target sequence for SLC15A1 (NM_005073.1,869-887).
gcggctcatctcccaaatt

SEQ ID NO: 256436 - DNA, 19 bp, Homo sapiens
  siRNA target sequence for SLC15A1 (NM_005073.1,870-888).
cggctcatctcccaaatta

SEQ ID NO: 256437 - DNA, 19 bp, Homo sapiens
  siRNA target sequence for SLC15A1 (NM_005073.1,871-889).
ggctcatctcccaaattaa

SEQ ID NO: 256438 - DNA, 19 bp, Homo sapiens
  siRNA target sequence for SLC15A1 (NM_005073.1,901-919).
gggtgatgttcctgtatat

SEQ ID NO: 256439 - DNA, 19 bp, Homo sapiens
  siRNA target sequence for SLC15A1 (NM_005073.1,968-986).
gacactgcaggcaacaact

SEQ ID NO: 256440 - DNA, 19 bp, Homo sapiens
  siRNA target sequence for SLC15A1 (NM_005073.1,1088-1106).
gtaccctctcattgcaaaa

SEQ ID NO: 256441 - DNA, 19 bp, Homo sapiens
  siRNA target sequence for SLC15A1 (NM_005073.1,1187-1205).
cgtgcaggtggaaatcgat

SEQ ID NO: 256442 - DNA, 19 bp, Homo sapiens
  siRNA target sequence for SLC15A1 (NM_005073.1,1190-1208).
gcaggtggaaatcgataaa

SEQ ID NO: 256443 - DNA, 19 bp, Homo sapiens
  siRNA target sequence for SLC15A1 (NM_005073.1,1220-1238).
cttccccaaaggaaacgaa

SEQ ID NO: 256444 - DNA, 19 bp, Homo sapiens
  siRNA target sequence for SLC15A1 (NM_005073.1,1235-1253).
cgaagtccaaattaaagtt

SEQ ID NO: 256445 - DNA, 19 bp, Homo sapiens
  siRNA target sequence for SLC15A1 (NM_005073.1,1304-1322).
gacacttggcccaatgtct

SEQ ID NO: 256446 - DNA, 19 bp, Homo sapiens
  siRNA target sequence for SLC15A1 (NM_005073.1,1600-1618).
ccagcacataccagttttt

SEQ ID NO: 256447 - DNA, 19 bp, Homo sapiens
  siRNA target sequence for SLC15A1 (NM_005073.1,1627-1645).
gcataaaaggcttcacaat

SEQ ID NO: 256448 - DNA, 19 bp, Homo sapiens
  siRNA target sequence for SLC15A1 (NM_005073.1,1658-1676).
gattccgccacaatgtcaa

SEQ ID NO: 256449 - DNA, 19 bp, Homo sapiens
  siRNA target sequence for SLC15A1 (NM_005073.1,1701-1719).
gaatttggtagtgcttata

SEQ ID NO: 256450 - DNA, 19 bp, Homo sapiens
  siRNA target sequence for SLC15A1 (NM_005073.1,1707-1725).
ggtagtgcttatacctata

SEQ ID NO: 256451 - DNA, 19 bp, Homo sapiens
  siRNA target sequence for SLC15A1 (NM_005073.1,1711-1729).
gtgcttatacctatatagt

SEQ ID NO: 256452 - DNA, 19 bp, Homo sapiens
  siRNA target sequence for SLC15A1 (NM_005073.1,1850-1868).
ctctgtcacgggattggaa

SEQ ID NO: 256453 - DNA, 19 bp, Homo sapiens
  siRNA target sequence for SLC15A1 (NM_005073.1,1852-1870).
ctgtcacgggattggaatt

SEQ ID NO: 256454 - DNA, 19 bp, Homo sapiens
  siRNA target sequence for SLC15A1 (NM_005073.1,1856-1874).
cacgggattggaattctca

SEQ ID NO: 256455 - DNA, 19 bp, Homo sapiens
  siRNA target sequence for SLC15A1 (NM_005073.1,1860-1878).
ggattggaattctcatatt

SEQ ID NO: 256456 - DNA, 19 bp, Homo sapiens
  siRNA target sequence for SLC15A1 (NM_005073.1,1884-1902).
gctccttccaacatgaagt

SEQ ID NO: 256457 - DNA, 19 bp, Homo sapiens
  siRNA target sequence for SLC15A1 (NM_005073.1,1934-1952).
ggctgttggcaacatcatt

SEQ ID NO: 256458 - DNA, 19 bp, Homo sapiens
  siRNA target sequence for SLC15A1 (NM_005073.1,1991-2009).
gtgggccgagtacattcta

SEQ ID NO: 256459 - DNA, 19 bp, Homo sapiens
  siRNA target sequence for SLC15A1 (NM_005073.1,2048-2066).
catcatggctcggttctat

SEQ ID NO: 256460 - DNA, 19 bp, Homo sapiens
  siRNA target sequence for SLC15A1 (NM_005073.1,2051-2069).
catggctcggttctatact

SEQ ID NO: 256461 - DNA, 19 bp, Homo sapiens
  siRNA target sequence for SLC15A1 (NM_005073.1,2055-2073).
gctcggttctatacttaca

SEQ ID NO: 256462 - DNA, 19 bp, Homo sapiens
  siRNA target sequence for SLC15A1 (NM_005073.1,2056-2074).
ctcggttctatacttacat

SEQ ID NO: 256463 - DNA, 19 bp, Homo sapiens
  siRNA target sequence for SLC15A1 (NM_005073.1,2058-2076).
cggttctatacttacatca

SEQ ID NO: 256464 - DNA, 19 bp, Homo sapiens
  siRNA target sequence for SLC15A1 (NM_005073.1,2059-2077).
ggttctatacttacatcaa

SEQ ID NO: 256465 - DNA, 19 bp, Homo sapiens
  siRNA target sequence for SLC15A1 (NM_005073.1,2083-2101).
cggagatcgaagctcaatt

SEQ ID NO: 256466 - DNA, 19 bp, Homo sapiens
  siRNA target sequence for SLC15A1 (NM_005073.1,2084-2102).
ggagatcgaagctcaattt

SEQ ID NO: 256467 - DNA, 19 bp, Homo sapiens
  siRNA target sequence for SLC15A1 (NM_005073.1,2158-2176).
gggccaattcacagaaaca

SEQ ID NO: 256468 - DNA, 19 bp, Homo sapiens
  siRNA target sequence for SLC15A1 (NM_005073.1,2161-2179).
ccaattcacagaaacagat

SEQ ID NO: 256469 - DNA, 19 bp, Homo sapiens
  siRNA target sequence for SLC15A2 (NM_021082.2,114-132).
cacctagccctccaaagaa

SEQ ID NO: 256470 - DNA, 19 bp, Homo sapiens
  siRNA target sequence for SLC15A2 (NM_021082.2,133-151).
gccatctccgacaatctgt

SEQ ID NO: 256471 - DNA, 19 bp, Homo sapiens
  siRNA target sequence for SLC15A2 (NM_021082.2,199-217).
ctgcgagcgcttttcctat

SEQ ID NO: 256472 - DNA, 19 bp, Homo sapiens
  siRNA target sequence for SLC15A2 (NM_021082.2,201-219).
gcgagcgcttttcctatta

SEQ ID NO: 256473 - DNA, 19 bp, Homo sapiens
  siRNA target sequence for SLC15A2 (NM_021082.2,202-220).
cgagcgcttttcctattat

SEQ ID NO: 256474 - DNA, 19 bp, Homo sapiens
  siRNA target sequence for SLC15A2 (NM_021082.2,206-224).
cgcttttcctattatggaa

SEQ ID NO: 256475 - DNA, 19 bp, Homo sapiens
  siRNA target sequence for SLC15A2 (NM_021082.2,260-278).
ctgcactggaatgaagata

SEQ ID NO: 256476 - DNA, 19 bp, Homo sapiens
  siRNA target sequence for SLC15A2 (NM_021082.2,280-298).
ctccacatctatataccat

SEQ ID NO: 256477 - DNA, 19 bp, Homo sapiens
  siRNA target sequence for SLC15A2 (NM_021082.2,423-441).
ccttgggtgccttaccaat

SEQ ID NO: 256478 - DNA, 19 bp, Homo sapiens
  siRNA target sequence for SLC15A2 (NM_021082.2,424-442).
cttgggtgccttaccaata

SEQ ID NO: 256479 - DNA, 19 bp, Homo sapiens
  siRNA target sequence for SLC15A2 (NM_021082.2,461-479).
cacacagtcctatcattga

SEQ ID NO: 256480 - DNA, 19 bp, Homo sapiens
  siRNA target sequence for SLC15A2 (NM_021082.2,478-496).
gatcggcctgagtctaata

SEQ ID NO: 256481 - DNA, 19 bp, Homo sapiens
  siRNA target sequence for SLC15A2 (NM_021082.2,481-499).
cggcctgagtctaatagct

SEQ ID NO: 256482 - DNA, 19 bp, Homo sapiens
  siRNA target sequence for SLC15A2 (NM_021082.2,483-501).
gcctgagtctaatagcttt

SEQ ID NO: 256483 - DNA, 19 bp, Homo sapiens
  siRNA target sequence for SLC15A2 (NM_021082.2,567-585).
cagaggaacggactagata

SEQ ID NO: 256484 - DNA, 19 bp, Homo sapiens
  siRNA target sequence for SLC15A2 (NM_021082.2,569-587).
gaggaacggactagatact

SEQ ID NO: 256485 - DNA, 19 bp, Homo sapiens
  siRNA target sequence for SLC15A2 (NM_021082.2,572-590).
gaacggactagatacttct

SEQ ID NO: 256486 - DNA, 19 bp, Homo sapiens
  siRNA target sequence for SLC15A2 (NM_021082.2,610-628).
caatgcagggagcttgatt

SEQ ID NO: 256487 - DNA, 19 bp, Homo sapiens
  siRNA target sequence for SLC15A2 (NM_021082.2,621-639).
gcttgatttctacatttat

SEQ ID NO: 256488 - DNA, 19 bp, Homo sapiens
  siRNA target sequence for SLC15A2 (NM_021082.2,685-703).
ctatgcattggcttttgga

SEQ ID NO: 256489 - DNA, 19 bp, Homo sapiens
  siRNA target sequence for SLC15A2 (NM_021082.2,728-746).
gcacttgttgtgtttgcaa

SEQ ID NO: 256490 - DNA, 19 bp, Homo sapiens
  siRNA target sequence for SLC15A2 (NM_021082.2,822-840).
ctatttccaatcgtttcaa

SEQ ID NO: 256491 - DNA, 19 bp, Homo sapiens
  siRNA target sequence for SLC15A2 (NM_021082.2,888-906).
cggctgagaaatatccaaa

SEQ ID NO: 256492 - DNA, 19 bp, Homo sapiens
  siRNA target sequence for SLC15A2 (NM_021082.2,929-947).
gcactgaccagggtactat

SEQ ID NO: 256493 - DNA, 19 bp, Homo sapiens
  siRNA target sequence for SLC15A2 (NM_021082.2,930-948).
cactgaccagggtactatt

SEQ ID NO: 256494 - DNA, 19 bp, Homo sapiens
  siRNA target sequence for SLC15A2 (NM_021082.2,934-952).
gaccagggtactattcctt

SEQ ID NO: 256495 - DNA, 19 bp, Homo sapiens
  siRNA target sequence for SLC15A2 (NM_021082.2,937-955).
cagggtactattcctttat

SEQ ID NO: 256496 - DNA, 19 bp, Homo sapiens
  siRNA target sequence for SLC15A2 (NM_021082.2,1012-1030).
gcaagccatcaggatgaat

SEQ ID NO: 256497 - DNA, 19 bp, Homo sapiens
  siRNA target sequence for SLC15A2 (NM_021082.2,1016-1034).
gccatcaggatgaatagga

SEQ ID NO: 256498 - DNA, 19 bp, Homo sapiens
  siRNA target sequence for SLC15A2 (NM_021082.2,1061-1079).
gaccagatgcaggttctaa

SEQ ID NO: 256499 - DNA, 19 bp, Homo sapiens
  siRNA target sequence for SLC15A2 (NM_021082.2,1085-1103).
cttctggttcttatcttca

SEQ ID NO: 256500 - DNA, 19 bp, Homo sapiens
  siRNA target sequence for SLC15A2 (NM_021082.2,1106-1124).
ccgttgtttgactttgtca

SEQ ID NO: 256501 - DNA, 19 bp, Homo sapiens
  siRNA target sequence for SLC15A2 (NM_021082.2,1107-1125).
cgttgtttgactttgtcat

SEQ ID NO: 256502 - DNA, 19 bp, Homo sapiens
  siRNA target sequence for SLC15A2 (NM_021082.2,1170-1188).
ggaaaatggctgttggtat

SEQ ID NO: 256503 - DNA, 19 bp, Homo sapiens
  siRNA target sequence for SLC15A2 (NM_021082.2,1217-1235).
gcggcagctgtagagataa

SEQ ID NO: 256504 - DNA, 19 bp, Homo sapiens
  siRNA target sequence for SLC15A2 (NM_021082.2,1436-1454).
cacctgaaatatcacaatt

SEQ ID NO: 256505 - DNA, 19 bp, Homo sapiens
  siRNA target sequence for SLC15A2 (NM_021082.2,1514-1532).
gaagatgggaacagtatct

SEQ ID NO: 256506 - DNA, 19 bp, Homo sapiens
  siRNA target sequence for SLC15A2 (NM_021082.2,1579-1597).
gacaaccgtgaggtttgtt

SEQ ID NO: 256507 - DNA, 19 bp, Homo sapiens
  siRNA target sequence for SLC15A2 (NM_021082.2,1581-1599).
caaccgtgaggtttgttaa

SEQ ID NO: 256508 - DNA, 19 bp, Homo sapiens
  siRNA target sequence for SLC15A2 (NM_021082.2,1585-1603).
cgtgaggtttgttaacact

SEQ ID NO: 256509 - DNA, 19 bp, Homo sapiens
  siRNA target sequence for SLC15A2 (NM_021082.2,1586-1604).
gtgaggtttgttaacactt

SEQ ID NO: 256510 - DNA, 19 bp, Homo sapiens
  siRNA target sequence for SLC15A2 (NM_021082.2,1635-1653).
cagatacctctctcaatgt

SEQ ID NO: 256511 - DNA, 19 bp, Homo sapiens
  siRNA target sequence for SLC15A2 (NM_021082.2,1714-1732).
gcactgtagaacagaagat

SEQ ID NO: 256512 - DNA, 19 bp, Homo sapiens
  siRNA target sequence for SLC15A2 (NM_021082.2,1770-1788).
gtgcagcatatctgtttgt

SEQ ID NO: 256513 - DNA, 19 bp, Homo sapiens
  siRNA target sequence for SLC15A2 (NM_021082.2,1775-1793).
gcatatctgtttgttatta

SEQ ID NO: 256514 - DNA, 19 bp, Homo sapiens
  siRNA target sequence for SLC15A2 (NM_021082.2,1863-1881).
cgtggcagctaccacaata

SEQ ID NO: 256515 - DNA, 19 bp, Homo sapiens
  siRNA target sequence for SLC15A2 (NM_021082.2,1864-1882).
gtggcagctaccacaatat

SEQ ID NO: 256516 - DNA, 19 bp, Homo sapiens
  siRNA target sequence for SLC15A2 (NM_021082.2,1893-1911).
cagctggggaggtcatgtt

SEQ ID NO: 256517 - DNA, 19 bp, Homo sapiens
  siRNA target sequence for SLC15A2 (NM_021082.2,1914-1932).
ctgtcacaggtcttgagtt

SEQ ID NO: 256518 - DNA, 19 bp, Homo sapiens
  siRNA target sequence for SLC15A2 (NM_021082.2,1916-1934).
gtcacaggtcttgagtttt

SEQ ID NO: 256519 - DNA, 19 bp, Homo sapiens
  siRNA target sequence for SLC15A2 (NM_021082.2,1975-1993).
ggcagcttggctattgaca

SEQ ID NO: 256520 - DNA, 19 bp, Homo sapiens
  siRNA target sequence for SLC15A2 (NM_021082.2,1976-1994).
gcagcttggctattgacaa

SEQ ID NO: 256521 - DNA, 19 bp, Homo sapiens
  siRNA target sequence for SLC15A2 (NM_021082.2,2045-2063).
gtacagtgggccgaattca

SEQ ID NO: 256522 - DNA, 19 bp, Homo sapiens
  siRNA target sequence for SLC15A2 (NM_021082.2,2054-2072).
gccgaattcattttgtttt

SEQ ID NO: 256523 - DNA, 19 bp, Homo sapiens
  siRNA target sequence for SLC15A2 (NM_021082.2,2107-2125).
catcatgggctactactat

SEQ ID NO: 256524 - DNA, 19 bp, Homo sapiens
  siRNA target sequence for SLC15A2 (NM_021082.2,2110-2128).
catgggctactactatgtt

SEQ ID NO: 256525 - DNA, 19 bp, Homo sapiens
  siRNA target sequence for SLC15A2 (NM_021082.2,2122-2140).
ctatgttcctgtaaagaca

SEQ ID NO: 256526 - DNA, 19 bp, Homo sapiens
  siRNA target sequence for SLC15A2 (NM_021082.2,2151-2169).
ggggtccagcagataagca

SEQ ID NO: 256527 - DNA, 19 bp, Homo sapiens
  siRNA target sequence for SLC15A2 (NM_021082.2,2182-2200).
ccaggggaacatgatcaaa

SEQ ID NO: 256528 - DNA, 19 bp, Homo sapiens
  siRNA target sequence for SLC15A2 (NM_021082.2,2187-2205).
ggaacatgatcaaactaga

SEQ ID NO: 256529 - DNA, 19 bp, Homo sapiens
  siRNA target sequence for SLC17A5 (NM_012434.3,138-156).
ggaccgcacgcctcttcta

SEQ ID NO: 256530 - DNA, 19 bp, Homo sapiens
  siRNA target sequence for SLC17A5 (NM_012434.3,191-209).
gctgctctgctcgttacaa

SEQ ID NO: 256531 - DNA, 19 bp, Homo sapiens
  siRNA target sequence for SLC17A5 (NM_012434.3,195-213).
ctctgctcgttacaactta

SEQ ID NO: 256532 - DNA, 19 bp, Homo sapiens
  siRNA target sequence for SLC17A5 (NM_012434.3,199-217).
gctcgttacaacttagcaa

SEQ ID NO: 256533 - DNA, 19 bp, Homo sapiens
  siRNA target sequence for SLC17A5 (NM_012434.3,200-218).
ctcgttacaacttagcaat

SEQ ID NO: 256534 - DNA, 19 bp, Homo sapiens
  siRNA target sequence for SLC17A5 (NM_012434.3,202-220).
cgttacaacttagcaattt

SEQ ID NO: 256535 - DNA, 19 bp, Homo sapiens
  siRNA target sequence for SLC17A5 (NM_012434.3,240-258).
cattgtgtatgcattacgt

SEQ ID NO: 256536 - DNA, 19 bp, Homo sapiens
  siRNA target sequence for SLC17A5 (NM_012434.3,246-264).
gtatgcattacgtgtgaat

SEQ ID NO: 256537 - DNA, 19 bp, Homo sapiens
  siRNA target sequence for SLC17A5 (NM_012434.3,250-268).
gcattacgtgtgaatctga

SEQ ID NO: 256538 - DNA, 19 bp, Homo sapiens
  siRNA target sequence for SLC17A5 (NM_012434.3,282-300).
ggatatggtagattcaaat

SEQ ID NO: 256539 - DNA, 19 bp, Homo sapiens
  siRNA target sequence for SLC17A5 (NM_012434.3,288-306).
ggtagattcaaatacaact

SEQ ID NO: 256540 - DNA, 19 bp, Homo sapiens
  siRNA target sequence for SLC17A5 (NM_012434.3,342-360).
gcattctgctcccataaaa

SEQ ID NO: 256541 - DNA, 19 bp, Homo sapiens
  siRNA target sequence for SLC17A5 (NM_012434.3,390-408).
ccaatgggatgcagaaact

SEQ ID NO: 256542 - DNA, 19 bp, Homo sapiens
  siRNA target sequence for SLC17A5 (NM_012434.3,417-435).
gattctcggttcctttttt

SEQ ID NO: 256543 - DNA, 19 bp, Homo sapiens
  siRNA target sequence for SLC17A5 (NM_012434.3,491-509).
ggaaaatgctgctaggatt

SEQ ID NO: 256544 - DNA, 19 bp, Homo sapiens
  siRNA target sequence for SLC17A5 (NM_012434.3,492-510).
gaaaatgctgctaggattt

SEQ ID NO: 256545 - DNA, 19 bp, Homo sapiens
  siRNA target sequence for SLC17A5 (NM_012434.3,604-622).
ctaggagagggtgttacat

SEQ ID NO: 256546 - DNA, 19 bp, Homo sapiens
  siRNA target sequence for SLC17A5 (NM_012434.3,675-693).
caaacttcttagcatttca

SEQ ID NO: 256547 - DNA, 19 bp, Homo sapiens
  siRNA target sequence for SLC17A5 (NM_012434.3,703-721).
gcacagcttgggacagtaa

SEQ ID NO: 256548 - DNA, 19 bp, Homo sapiens
  siRNA target sequence for SLC17A5 (NM_012434.3,708-726).
gcttgggacagtaatttct

SEQ ID NO: 256549 - DNA, 19 bp, Homo sapiens
  siRNA target sequence for SLC17A5 (NM_012434.3,753-771).
ctatatgaattggacttat

SEQ ID NO: 256550 - DNA, 19 bp, Homo sapiens
  siRNA target sequence for SLC17A5 (NM_012434.3,787-805).
ggtactattggaatatttt

SEQ ID NO: 256551 - DNA, 19 bp, Homo sapiens
  siRNA target sequence for SLC17A5 (NM_012434.3,791-809).
ctattggaatattttggtt

SEQ ID NO: 256552 - DNA, 19 bp, Homo sapiens
  siRNA target sequence for SLC17A5 (NM_012434.3,816-834).
gtggatctggttagttagt

SEQ ID NO: 256553 - DNA, 19 bp, Homo sapiens
  siRNA target sequence for SLC17A5 (NM_012434.3,818-836).
ggatctggttagttagtga

SEQ ID NO: 256554 - DNA, 19 bp, Homo sapiens
  siRNA target sequence for SLC17A5 (NM_012434.3,882-900).
cattctttcatcattaaga

SEQ ID NO: 256555 - DNA, 19 bp, Homo sapiens
  siRNA target sequence for SLC17A5 (NM_012434.3,929-947).
cgtgggtacccattttaaa

SEQ ID NO: 256556 - DNA, 19 bp, Homo sapiens
  siRNA target sequence for SLC17A5 (NM_012434.3,954-972).
gccactttgggctatcgta

SEQ ID NO: 256557 - DNA, 19 bp, Homo sapiens
  siRNA target sequence for SLC17A5 (NM_012434.3,969-987).
cgtagttgcacacttttct

SEQ ID NO: 256558 - DNA, 19 bp, Homo sapiens
  siRNA target sequence for SLC17A5 (NM_012434.3,973-991).
gttgcacacttttcttaca

SEQ ID NO: 256559 - DNA, 19 bp, Homo sapiens
  siRNA target sequence for SLC17A5 (NM_012434.3,1014-1032).
gacattattgcctacttat

SEQ ID NO: 256560 - DNA, 19 bp, Homo sapiens
  siRNA target sequence for SLC17A5 (NM_012434.3,1041-1059).
gatcctaaggttcaatgtt

SEQ ID NO: 256561 - DNA, 19 bp, Homo sapiens
  siRNA target sequence for SLC17A5 (NM_012434.3,1044-1062).
cctaaggttcaatgttcaa

SEQ ID NO: 256562 - DNA, 19 bp, Homo sapiens
  siRNA target sequence for SLC17A5 (NM_012434.3,1096-1114).
ggctcttggttatgtatga

SEQ ID NO: 256563 - DNA, 19 bp, Homo sapiens
  siRNA target sequence for SLC17A5 (NM_012434.3,1097-1115).
gctcttggttatgtatgat

SEQ ID NO: 256564 - DNA, 19 bp, Homo sapiens
  siRNA target sequence for SLC17A5 (NM_012434.3,1124-1142).
gtcaagctgctgacaattt

SEQ ID NO: 256565 - DNA, 19 bp, Homo sapiens
  siRNA target sequence for SLC17A5 (NM_012434.3,1135-1153).
gacaatttaagggcaaaat

SEQ ID NO: 256566 - DNA, 19 bp, Homo sapiens
  siRNA target sequence for SLC17A5 (NM_012434.3,1179-1197).
cagaatttttagccttata

SEQ ID NO: 256567 - DNA, 19 bp, Homo sapiens
  siRNA target sequence for SLC17A5 (NM_012434.3,1234-1252).
ggcttcattggctgtgatt

SEQ ID NO: 256568 - DNA, 19 bp, Homo sapiens
  siRNA target sequence for SLC17A5 (NM_012434.3,1239-1257).
cattggctgtgattattct

SEQ ID NO: 256569 - DNA, 19 bp, Homo sapiens
  siRNA target sequence for SLC17A5 (NM_012434.3,1261-1279).
gccgttgctttcctaacta

SEQ ID NO: 256570 - DNA, 19 bp, Homo sapiens
  siRNA target sequence for SLC17A5 (NM_012434.3,1262-1280).
ccgttgctttcctaactat

SEQ ID NO: 256571 - DNA, 19 bp, Homo sapiens
  siRNA target sequence for SLC17A5 (NM_012434.3,1263-1281).
cgttgctttcctaactata

SEQ ID NO: 256572 - DNA, 19 bp, Homo sapiens
  siRNA target sequence for SLC17A5 (NM_012434.3,1264-1282).
gttgctttcctaactatat

SEQ ID NO: 256573 - DNA, 19 bp, Homo sapiens
  siRNA target sequence for SLC17A5 (NM_012434.3,1267-1285).
gctttcctaactatatcaa

SEQ ID NO: 256574 - DNA, 19 bp, Homo sapiens
  siRNA target sequence for SLC17A5 (NM_012434.3,1365-1383).
gggcatcacaaatacattt

SEQ ID NO: 256575 - DNA, 19 bp, Homo sapiens
  siRNA target sequence for SLC17A5 (NM_012434.3,1386-1404).
cactattccaggaatggtt

SEQ ID NO: 256576 - DNA, 19 bp, Homo sapiens
  siRNA target sequence for SLC17A5 (NM_012434.3,1454-1472).
ggcaaaccgtgttctatat

SEQ ID NO: 256577 - DNA, 19 bp, Homo sapiens
  siRNA target sequence for SLC17A5 (NM_012434.3,1455-1473).
gcaaaccgtgttctatatt

SEQ ID NO: 256578 - DNA, 19 bp, Homo sapiens
  siRNA target sequence for SLC17A5 (NM_012434.3,1496-1514).
gtgccattttctttacact

SEQ ID NO: 256579 - DNA, 19 bp, Homo sapiens
  siRNA target sequence for SLC17A5 (NM_012434.3,1498-1516).
gccattttctttacactat

SEQ ID NO: 256580 - DNA, 19 bp, Homo sapiens
  siRNA target sequence for SLC12A1 (NM_000338.1,52-70).
ggattcagtgcccagtaat

SEQ ID NO: 256581 - DNA, 19 bp, Homo sapiens
  siRNA target sequence for SLC12A1 (NM_000338.1,53-71).
gattcagtgcccagtaata

SEQ ID NO: 256582 - DNA, 19 bp, Homo sapiens
  siRNA target sequence for SLC12A1 (NM_000338.1,73-91).
caatcgctttcaagttagt

SEQ ID NO: 256583 - DNA, 19 bp, Homo sapiens
  siRNA target sequence for SLC12A1 (NM_000338.1,79-97).
ctttcaagttagtgtcata

SEQ ID NO: 256584 - DNA, 19 bp, Homo sapiens
  siRNA target sequence for SLC12A1 (NM_000338.1,271-289).
cagttttcacgcttatgat

SEQ ID NO: 256585 - DNA, 19 bp, Homo sapiens
  siRNA target sequence for SLC12A1 (NM_000338.1,301-319).
cacatactatctacaaact

SEQ ID NO: 256586 - DNA, 19 bp, Homo sapiens
  siRNA target sequence for SLC12A1 (NM_000338.1,303-321).
catactatctacaaacttt

SEQ ID NO: 256587 - DNA, 19 bp, Homo sapiens
  siRNA target sequence for SLC12A1 (NM_000338.1,337-355).
ggatgccgttcccaagata

SEQ ID NO: 256588 - DNA, 19 bp, Homo sapiens
  siRNA target sequence for SLC12A1 (NM_000338.1,341-359).
gccgttcccaagatagagt

SEQ ID NO: 256589 - DNA, 19 bp, Homo sapiens
  siRNA target sequence for SLC12A1 (NM_000338.1,342-360).
ccgttcccaagatagagta

SEQ ID NO: 256590 - DNA, 19 bp, Homo sapiens
  siRNA target sequence for SLC12A1 (NM_000338.1,424-442).
cgagcaactcgcaaagaat

SEQ ID NO: 256591 - DNA, 19 bp, Homo sapiens
  siRNA target sequence for SLC12A1 (NM_000338.1,490-508).
gatacctggagatgaacaa

SEQ ID NO: 256592 - DNA, 19 bp, Homo sapiens
  siRNA target sequence for SLC12A1 (NM_000338.1,647-665).
ggtcttggagttatcatca

SEQ ID NO: 256593 - DNA, 19 bp, Homo sapiens
  siRNA target sequence for SLC12A1 (NM_000338.1,648-666).
gtcttggagttatcatcat

SEQ ID NO: 256594 - DNA, 19 bp, Homo sapiens
  siRNA target sequence for SLC12A1 (NM_000338.1,719-737).
gccacgaacggagttgtta

SEQ ID NO: 256595 - DNA, 19 bp, Homo sapiens
  siRNA target sequence for SLC12A1 (NM_000338.1,721-739).
cacgaacggagttgttaga

SEQ ID NO: 256596 - DNA, 19 bp, Homo sapiens
  siRNA target sequence for SLC12A1 (NM_000338.1,741-759).
gaggtggggcctactatct

SEQ ID NO: 256597 - DNA, 19 bp, Homo sapiens
  siRNA target sequence for SLC12A1 (NM_000338.1,743-761).
ggtggggcctactatctta

SEQ ID NO: 256598 - DNA, 19 bp, Homo sapiens
  siRNA target sequence for SLC12A1 (NM_000338.1,744-762).
gtggggcctactatcttat

SEQ ID NO: 256599 - DNA, 19 bp, Homo sapiens
  siRNA target sequence for SLC12A1 (NM_000338.1,803-821).
ctgatctttgcttttgcta

SEQ ID NO: 256600 - DNA, 19 bp, Homo sapiens
  siRNA target sequence for SLC12A1 (NM_000338.1,825-843).
cagtggctgttgctatgta

SEQ ID NO: 256601 - DNA, 19 bp, Homo sapiens
  siRNA target sequence for SLC12A1 (NM_000338.1,898-916).
gatggtggatccaaccaat

SEQ ID NO: 256602 - DNA, 19 bp, Homo sapiens
  siRNA target sequence for SLC12A1 (NM_000338.1,902-920).
gtggatccaaccaatgaca

SEQ ID NO: 256603 - DNA, 19 bp, Homo sapiens
  siRNA target sequence for SLC12A1 (NM_000338.1,988-1006).
ggcaaaggcccaagtcatt

SEQ ID NO: 256604 - DNA, 19 bp, Homo sapiens
  siRNA target sequence for SLC12A1 (NM_000338.1,1102-1120).
ccaagcatcaatatttgca

SEQ ID NO: 256605 - DNA, 19 bp, Homo sapiens
  siRNA target sequence for SLC12A1 (NM_000338.1,1293-1311).
cctacttaggggttgcaat

SEQ ID NO: 256606 - DNA, 19 bp, Homo sapiens
  siRNA target sequence for SLC12A1 (NM_000338.1,1294-1312).
ctacttaggggttgcaatt

SEQ ID NO: 256607 - DNA, 19 bp, Homo sapiens
  siRNA target sequence for SLC12A1 (NM_000338.1,1337-1355).
gatgccaccgggaacatga

SEQ ID NO: 256608 - DNA, 19 bp, Homo sapiens
  siRNA target sequence for SLC12A1 (NM_000338.1,1409-1427).
ggctatgacttctcaagat

SEQ ID NO: 256609 - DNA, 19 bp, Homo sapiens
  siRNA target sequence for SLC12A1 (NM_000338.1,1411-1429).
ctatgacttctcaagatgt

SEQ ID NO: 256610 - DNA, 19 bp, Homo sapiens
  siRNA target sequence for SLC12A1 (NM_000338.1,1445-1463).
cagtacgggctgatgaaca

SEQ ID NO: 256611 - DNA, 19 bp, Homo sapiens
  siRNA target sequence for SLC12A1 (NM_000338.1,1447-1465).
gtacgggctgatgaacaat

SEQ ID NO: 256612 - DNA, 19 bp, Homo sapiens
  siRNA target sequence for SLC12A1 (NM_000338.1,1556-1574).
gtcagcgcacccaaagtgt

SEQ ID NO: 256613 - DNA, 19 bp, Homo sapiens
  siRNA target sequence for SLC12A1 (NM_000338.1,1608-1626).
ccctgcagttttttgcaaa

SEQ ID NO: 256614 - DNA, 19 bp, Homo sapiens
  siRNA target sequence for SLC12A1 (NM_000338.1,1646-1664).
gaacccctgagaggatata

SEQ ID NO: 256615 - DNA, 19 bp, Homo sapiens
  siRNA target sequence for SLC12A1 (NM_000338.1,1652-1670).
ctgagaggatatattctca

SEQ ID NO: 256616 - DNA, 19 bp, Homo sapiens
  siRNA target sequence for SLC12A1 (NM_000338.1,1749-1767).
cctcatatgcacttattaa

SEQ ID NO: 256617 - DNA, 19 bp, Homo sapiens
  siRNA target sequence for SLC12A1 (NM_000338.1,1750-1768).
ctcatatgcacttattaat

SEQ ID NO: 256618 - DNA, 19 bp, Homo sapiens
  siRNA target sequence for SLC12A1 (NM_000338.1,1809-1827).
ggagacctgcgtatggaat

SEQ ID NO: 256619 - DNA, 19 bp, Homo sapiens
  siRNA target sequence for SLC12A1 (NM_000338.1,1810-1828).
gagacctgcgtatggaatt

SEQ ID NO: 256620 - DNA, 19 bp, Homo sapiens
  siRNA target sequence for SLC12A1 (NM_000338.1,1812-1830).
gacctgcgtatggaattta

SEQ ID NO: 256621 - DNA, 19 bp, Homo sapiens
  siRNA target sequence for SLC12A1 (NM_000338.1,1814-1832).
cctgcgtatggaatttaca

SEQ ID NO: 256622 - DNA, 19 bp, Homo sapiens
  siRNA target sequence for SLC12A1 (NM_000338.1,1815-1833).
ctgcgtatggaatttacaa

SEQ ID NO: 256623 - DNA, 19 bp, Homo sapiens
  siRNA target sequence for SLC12A1 (NM_000338.1,1817-1835).
gcgtatggaatttacaaca

SEQ ID NO: 256624 - DNA, 19 bp, Homo sapiens
  siRNA target sequence for SLC12A1 (NM_000338.1,1818-1836).
cgtatggaatttacaacat

SEQ ID NO: 256625 - DNA, 19 bp, Homo sapiens
  siRNA target sequence for SLC12A1 (NM_000338.1,1911-1929).
cctatgtcattgaattctt

SEQ ID NO: 256626 - DNA, 19 bp, Homo sapiens
  siRNA target sequence for SLC12A1 (NM_000338.1,1995-2013).
cctacgtgagtgctttaga

SEQ ID NO: 256627 - DNA, 19 bp, Homo sapiens
  siRNA target sequence for SLC12A1 (NM_000338.1,1999-2017).
cgtgagtgctttagacaat

SEQ ID NO: 256628 - DNA, 19 bp, Homo sapiens
  siRNA target sequence for SLC12A1 (NM_000338.1,2062-2080).
gccccagtgcattgtctta

SEQ ID NO: 256629 - DNA, 19 bp, Homo sapiens
  siRNA target sequence for SLC12A1 (NM_000338.1,2063-2081).
ccccagtgcattgtcttaa

SEQ ID NO: 256630 - DNA, 19 bp, Homo sapiens
  siRNA target sequence for SLC12A1 (NM_000338.1,2065-2083).
ccagtgcattgtcttaaca

SEQ ID NO: 256631 - DNA, 19 bp, Homo sapiens
  siRNA target sequence for SLC12A1 (NM_000338.1,2171-2189).
gtgggaccgcgcaaactgt

SEQ ID NO: 256632 - DNA, 19 bp, Homo sapiens
  siRNA target sequence for SLC12A1 (NM_000338.1,2177-2195).
ccgcgcaaactgtgtgtta

SEQ ID NO: 256633 - DNA, 19 bp, Homo sapiens
  siRNA target sequence for SLC12A1 (NM_000338.1,2178-2196).
cgcgcaaactgtgtgttaa

SEQ ID NO: 256634 - DNA, 19 bp, Homo sapiens
  siRNA target sequence for SLC12A1 (NM_000338.1,2181-2199).
gcaaactgtgtgttaagga

SEQ ID NO: 256635 - DNA, 19 bp, Homo sapiens
  siRNA target sequence for SLC12A1 (NM_000338.1,2206-2224).
cagtggcatggcgaaaaaa

SEQ ID NO: 256636 - DNA, 19 bp, Homo sapiens
  siRNA target sequence for SLC12A1 (NM_000338.1,2270-2288).
gtggcggcagactgtttca

SEQ ID NO: 256637 - DNA, 19 bp, Homo sapiens
  siRNA target sequence for SLC12A1 (NM_000338.1,2290-2308).
ggatggtgtccgaagtctt

SEQ ID NO: 256638 - DNA, 19 bp, Homo sapiens
  siRNA target sequence for SLC12A1 (NM_000338.1,2295-2313).
gtgtccgaagtcttcttca

SEQ ID NO: 256639 - DNA, 19 bp, Homo sapiens
  siRNA target sequence for SLC12A1 (NM_000338.1,2316-2334).
cctcaggcttaggaagaat

SEQ ID NO: 256640 - DNA, 19 bp, Homo sapiens
  siRNA target sequence for SLC12A1 (NM_000338.1,2344-2362).
cactctggtgattggatat

SEQ ID NO: 256641 - DNA, 19 bp, Homo sapiens
  siRNA target sequence for SLC12A1 (NM_000338.1,2346-2364).
ctctggtgattggatataa

SEQ ID NO: 256642 - DNA, 19 bp, Homo sapiens
  siRNA target sequence for SLC12A1 (NM_000338.1,2348-2366).
ctggtgattggatataaga

SEQ ID NO: 256643 - DNA, 19 bp, Homo sapiens
  siRNA target sequence for SLC12A1 (NM_000338.1,2382-2400).
ctcccttgacagagattga

SEQ ID NO: 256644 - DNA, 19 bp, Homo sapiens
  siRNA target sequence for SLC12A1 (NM_000338.1,2401-2419).
gaactacgtgggaatcata

SEQ ID NO: 256645 - DNA, 19 bp, Homo sapiens
  siRNA target sequence for SLC12A1 (NM_000338.1,2404-2422).
ctacgtgggaatcatacat

SEQ ID NO: 256646 - DNA, 19 bp, Homo sapiens
  siRNA target sequence for SLC12A1 (NM_000338.1,2407-2425).
cgtgggaatcatacatgat

SEQ ID NO: 256647 - DNA, 19 bp, Homo sapiens
  siRNA target sequence for SLC12A1 (NM_000338.1,2416-2434).
catacatgatgcatttgat

SEQ ID NO: 256648 - DNA, 19 bp, Homo sapiens
  siRNA target sequence for SLC12A1 (NM_000338.1,2445-2463).
gcgtggttatagtcagaat

SEQ ID NO: 256649 - DNA, 19 bp, Homo sapiens
  siRNA target sequence for SLC12A1 (NM_000338.1,2447-2465).
gtggttatagtcagaatca

SEQ ID NO: 256650 - DNA, 19 bp, Homo sapiens
  siRNA target sequence for SLC12A1 (NM_000338.1,2506-2524).
ggaattagagagattagaa

SEQ ID NO: 256651 - DNA, 19 bp, Homo sapiens
  siRNA target sequence for SLC12A1 (NM_000338.1,2537-2555).
gcattggaagcgactatca

SEQ ID NO: 256652 - DNA, 19 bp, Homo sapiens
  siRNA target sequence for SLC12A1 (NM_000338.1,2538-2556).
cattggaagcgactatcaa

SEQ ID NO: 256653 - DNA, 19 bp, Homo sapiens
  siRNA target sequence for SLC12A1 (NM_000338.1,2542-2560).
ggaagcgactatcaaagat

SEQ ID NO: 256654 - DNA, 19 bp, Homo sapiens
  siRNA target sequence for SLC12A1 (NM_000338.1,2543-2561).
gaagcgactatcaaagata

SEQ ID NO: 256655 - DNA, 19 bp, Homo sapiens
  siRNA target sequence for SLC12A1 (NM_000338.1,2547-2565).
cgactatcaaagataatga

SEQ ID NO: 256656 - DNA, 19 bp, Homo sapiens
  siRNA target sequence for SLC12A1 (NM_000338.1,2586-2604).
gcatccgaggcttgtttaa

SEQ ID NO: 256657 - DNA, 19 bp, Homo sapiens
  siRNA target sequence for SLC12A1 (NM_000338.1,2587-2605).
catccgaggcttgtttaaa

SEQ ID NO: 256658 - DNA, 19 bp, Homo sapiens
  siRNA target sequence for SLC12A1 (NM_000338.1,2613-2631).
gcaagttgaacattactaa

SEQ ID NO: 256659 - DNA, 19 bp, Homo sapiens
  siRNA target sequence for SLC12A1 (NM_000338.1,2617-2635).
gttgaacattactaagaca

SEQ ID NO: 256660 - DNA, 19 bp, Homo sapiens
  siRNA target sequence for SLC12A1 (NM_000338.1,2628-2646).
ctaagacaacgcctaaaaa

SEQ ID NO: 256661 - DNA, 19 bp, Homo sapiens
  siRNA target sequence for SLC12A1 (NM_000338.1,2632-2650).
gacaacgcctaaaaaagat

SEQ ID NO: 256662 - DNA, 19 bp, Homo sapiens
  siRNA target sequence for SLC12A1 (NM_000338.1,2648-2666).
gatggcagcattaacacaa

SEQ ID NO: 256663 - DNA, 19 bp, Homo sapiens
  siRNA target sequence for SLC12A1 (NM_000338.1,2778-2796).
gagggttaacacttcttat

SEQ ID NO: 256664 - DNA, 19 bp, Homo sapiens
  siRNA target sequence for SLC12A1 (NM_000338.1,2787-2805).
cacttcttatcccctatat

SEQ ID NO: 256665 - DNA, 19 bp, Homo sapiens
  siRNA target sequence for SLC12A1 (NM_000338.1,2789-2807).
cttcttatcccctatatct

SEQ ID NO: 256666 - DNA, 19 bp, Homo sapiens
  siRNA target sequence for SLC12A1 (NM_000338.1,2835-2853).
gtaaattaagaatctatgt

SEQ ID NO: 256667 - DNA, 19 bp, Homo sapiens
  siRNA target sequence for SLC12A1 (NM_000338.1,2897-2915).
gcttcccttctgagcaaat

SEQ ID NO: 256668 - DNA, 19 bp, Homo sapiens
  siRNA target sequence for SLC12A1 (NM_000338.1,2956-2974).
caacattaggccaaacaaa

SEQ ID NO: 256669 - DNA, 19 bp, Homo sapiens
  siRNA target sequence for SLC12A1 (NM_000338.1,3008-3026).
ccatatcgtctccatgaaa

SEQ ID NO: 256670 - DNA, 19 bp, Homo sapiens
  siRNA target sequence for SLC12A1 (NM_000338.1,3063-3081).
gagaaactccgtggaaaat

SEQ ID NO: 256671 - DNA, 19 bp, Homo sapiens
  siRNA target sequence for SLC12A1 (NM_000338.1,3065-3083).
gaaactccgtggaaaatta

SEQ ID NO: 256672 - DNA, 19 bp, Homo sapiens
  siRNA target sequence for SLC12A1 (NM_000338.1,3102-3120).
cagtcaaggaaaagagtta

SEQ ID NO: 256673 - DNA, 19 bp, Homo sapiens
  siRNA target sequence for SLC12A1 (NM_000338.1,3123-3141).
gccaagttcgactgaatga

SEQ ID NO: 256674 - DNA, 19 bp, Homo sapiens
  siRNA target sequence for SLC12A1 (NM_000338.1,3132-3150).
gactgaatgaactcttaca

SEQ ID NO: 256675 - DNA, 19 bp, Homo sapiens
  siRNA target sequence for SLC12A1 (NM_000338.1,3154-3172).
gcactccagagctgctaat

SEQ ID NO: 256676 - DNA, 19 bp, Homo sapiens
  siRNA target sequence for SLC12A1 (NM_000338.1,3186-3204).
gccttcccgtggcaagaaa

SEQ ID NO: 256677 - DNA, 19 bp, Homo sapiens
  siRNA target sequence for SLC12A1 (NM_000338.1,3197-3215).
gcaagaaagggatccatat

SEQ ID NO: 256678 - DNA, 19 bp, Homo sapiens
  siRNA target sequence for SLC12A1 (NM_000338.1,3206-3224).
ggatccatatcggatttgt

SEQ ID NO: 256679 - DNA, 19 bp, Homo sapiens
  siRNA target sequence for SLC12A1 (NM_000338.1,3237-3255).
ggttggaaatcctcacaaa

SEQ ID NO: 256680 - DNA, 19 bp, Homo sapiens
  siRNA target sequence for SLC12A1 (NM_000338.1,3256-3274).
gaacctcccacctgtctta

SEQ ID NO: 256681 - DNA, 19 bp, Homo sapiens
  siRNA target sequence for SLC12A1 (NM_000338.1,3259-3277).
cctcccacctgtcttacta

SEQ ID NO: 256682 - DNA, 19 bp, Homo sapiens
  siRNA target sequence for SLC12A1 (NM_000338.1,3262-3280).
cccacctgtcttactagtt

SEQ ID NO: 256683 - DNA, 19 bp, Homo sapiens
  siRNA target sequence for SLC12A1 (NM_000338.1,3263-3281).
ccacctgtcttactagtta

SEQ ID NO: 256684 - DNA, 19 bp, Homo sapiens
  siRNA target sequence for SLC12A1 (NM_000338.1,3299-3317).
gtcttgacattttactctt

SEQ ID NO: 256685 - DNA, 19 bp, Homo sapiens
  siRNA target sequence for SLC12A2 (NM_001046.2,749-767).
ccaccagcactactattat

SEQ ID NO: 256686 - DNA, 19 bp, Homo sapiens
  siRNA target sequence for SLC12A2 (NM_001046.2,752-770).
ccagcactactattatgat

SEQ ID NO: 256687 - DNA, 19 bp, Homo sapiens
  siRNA target sequence for SLC12A2 (NM_001046.2,753-771).
cagcactactattatgata

SEQ ID NO: 256688 - DNA, 19 bp, Homo sapiens
  siRNA target sequence for SLC12A2 (NM_001046.2,972-990).
gatgctgtggtcacgtata

SEQ ID NO: 256689 - DNA, 19 bp, Homo sapiens
  siRNA target sequence for SLC12A2 (NM_001046.2,983-1001).
cacgtatactgcagaaagt

SEQ ID NO: 256690 - DNA, 19 bp, Homo sapiens
  siRNA target sequence for SLC12A2 (NM_001046.2,985-1003).
cgtatactgcagaaagtaa

SEQ ID NO: 256691 - DNA, 19 bp, Homo sapiens
  siRNA target sequence for SLC12A2 (NM_001046.2,1000-1018).
gtaaaggagtcgtgaagtt

SEQ ID NO: 256692 - DNA, 19 bp, Homo sapiens
  siRNA target sequence for SLC12A2 (NM_001046.2,1021-1039).
gctggatcaagggtgtatt

SEQ ID NO: 256693 - DNA, 19 bp, Homo sapiens
  siRNA target sequence for SLC12A2 (NM_001046.2,1024-1042).
ggatcaagggtgtattagt

SEQ ID NO: 256694 - DNA, 19 bp, Homo sapiens
  siRNA target sequence for SLC12A2 (NM_001046.2,1025-1043).
gatcaagggtgtattagta

SEQ ID NO: 256695 - DNA, 19 bp, Homo sapiens
  siRNA target sequence for SLC12A2 (NM_001046.2,1041-1059).
gtacgttgtatgttaaaca

SEQ ID NO: 256696 - DNA, 19 bp, Homo sapiens
  siRNA target sequence for SLC12A2 (NM_001046.2,1064-1082).
gggtgtgatgcttttcatt

SEQ ID NO: 256697 - DNA, 19 bp, Homo sapiens
  siRNA target sequence for SLC12A2 (NM_001046.2,1073-1091).
gcttttcattagattgtca

SEQ ID NO: 256698 - DNA, 19 bp, Homo sapiens
  siRNA target sequence for SLC12A2 (NM_001046.2,1079-1097).
cattagattgtcatggatt

SEQ ID NO: 256699 - DNA, 19 bp, Homo sapiens
  siRNA target sequence for SLC12A2 (NM_001046.2,1100-1118).
gggtcaagctggaataggt

SEQ ID NO: 256700 - DNA, 19 bp, Homo sapiens
  siRNA target sequence for SLC12A2 (NM_001046.2,1108-1126).
ctggaataggtctatcagt

SEQ ID NO: 256701 - DNA, 19 bp, Homo sapiens
  siRNA target sequence for SLC12A2 (NM_001046.2,1116-1134).
ggtctatcagtccttgtaa

SEQ ID NO: 256702 - DNA, 19 bp, Homo sapiens
  siRNA target sequence for SLC12A2 (NM_001046.2,1117-1135).
gtctatcagtccttgtaat

SEQ ID NO: 256703 - DNA, 19 bp, Homo sapiens
  siRNA target sequence for SLC12A2 (NM_001046.2,1163-1181).
cacaggattgtctacttca

SEQ ID NO: 256704 - DNA, 19 bp, Homo sapiens
  siRNA target sequence for SLC12A2 (NM_001046.2,1177-1195).
cttcagcaatagcaactaa

SEQ ID NO: 256705 - DNA, 19 bp, Homo sapiens
  siRNA target sequence for SLC12A2 (NM_001046.2,1182-1200).
gcaatagcaactaatggat

SEQ ID NO: 256706 - DNA, 19 bp, Homo sapiens
  siRNA target sequence for SLC12A2 (NM_001046.2,1213-1231).
gaggagcatattatttaat

SEQ ID NO: 256707 - DNA, 19 bp, Homo sapiens
  siRNA target sequence for SLC12A2 (NM_001046.2,1258-1276).
gtggtgcaattggtctaat

SEQ ID NO: 256708 - DNA, 19 bp, Homo sapiens
  siRNA target sequence for SLC12A2 (NM_001046.2,1333-1351).
ccgtggtggagttgcttaa

SEQ ID NO: 256709 - DNA, 19 bp, Homo sapiens
  siRNA target sequence for SLC12A2 (NM_001046.2,1413-1431).
gtcgtgattcttttaggta

SEQ ID NO: 256710 - DNA, 19 bp, Homo sapiens
  siRNA target sequence for SLC12A2 (NM_001046.2,1418-1436).
gattcttttaggtatctca

SEQ ID NO: 256711 - DNA, 19 bp, Homo sapiens
  siRNA target sequence for SLC12A2 (NM_001046.2,1484-1502).
gatcctacttcttgctatt

SEQ ID NO: 256712 - DNA, 19 bp, Homo sapiens
  siRNA target sequence for SLC12A2 (NM_001046.2,1503-1521).
ggtgatttcgtcataggaa

SEQ ID NO: 256713 - DNA, 19 bp, Homo sapiens
  siRNA target sequence for SLC12A2 (NM_001046.2,1668-1686).
ctggctggagcaaatatct

SEQ ID NO: 256714 - DNA, 19 bp, Homo sapiens
  siRNA target sequence for SLC12A2 (NM_001046.2,1731-1749).
ctcctagccattttaatta

SEQ ID NO: 256715 - DNA, 19 bp, Homo sapiens
  siRNA target sequence for SLC12A2 (NM_001046.2,1733-1751).
cctagccattttaattact

SEQ ID NO: 256716 - DNA, 19 bp, Homo sapiens
  siRNA target sequence for SLC12A2 (NM_001046.2,1757-1775).
ggtttacgtaggaattgca

SEQ ID NO: 256717 - DNA, 19 bp, Homo sapiens
  siRNA target sequence for SLC12A2 (NM_001046.2,1813-1831).
gaaacgttaatgacactat

SEQ ID NO: 256718 - DNA, 19 bp, Homo sapiens
  siRNA target sequence for SLC12A2 (NM_001046.2,1817-1835).
cgttaatgacactatcgta

SEQ ID NO: 256719 - DNA, 19 bp, Homo sapiens
  siRNA target sequence for SLC12A2 (NM_001046.2,1818-1836).
gttaatgacactatcgtaa

SEQ ID NO: 256720 - DNA, 19 bp, Homo sapiens
  siRNA target sequence for SLC12A2 (NM_001046.2,1839-1857).
gagctaacaaactgtactt

SEQ ID NO: 256721 - DNA, 19 bp, Homo sapiens
  siRNA target sequence for SLC12A2 (NM_001046.2,1909-1927).
gttcctatggcctaatgaa

SEQ ID NO: 256722 - DNA, 19 bp, Homo sapiens
  siRNA target sequence for SLC12A2 (NM_001046.2,1954-1972).
caggatttacaccactaat

SEQ ID NO: 256723 - DNA, 19 bp, Homo sapiens
  siRNA target sequence for SLC12A2 (NM_001046.2,2073-2091).
gctttccagatgtttgcta

SEQ ID NO: 256724 - DNA, 19 bp, Homo sapiens
  siRNA target sequence for SLC12A2 (NM_001046.2,2081-2099).
gatgtttgctaaaggttat

SEQ ID NO: 256725 - DNA, 19 bp, Homo sapiens
  siRNA target sequence for SLC12A2 (NM_001046.2,2115-2133).
cctcttcgtggctacatct

SEQ ID NO: 256726 - DNA, 19 bp, Homo sapiens
  siRNA target sequence for SLC12A2 (NM_001046.2,2118-2136).
cttcgtggctacatcttaa

SEQ ID NO: 256727 - DNA, 19 bp, Homo sapiens
  siRNA target sequence for SLC12A2 (NM_001046.2,2124-2142).
ggctacatcttaacattct

SEQ ID NO: 256728 - DNA, 19 bp, Homo sapiens
  siRNA target sequence for SLC12A2 (NM_001046.2,2125-2143).
gctacatcttaacattctt

SEQ ID NO: 256729 - DNA, 19 bp, Homo sapiens
  siRNA target sequence for SLC12A2 (NM_001046.2,2148-2166).
gcacttggattcatcttaa

SEQ ID NO: 256730 - DNA, 19 bp, Homo sapiens
  siRNA target sequence for SLC12A2 (NM_001046.2,2177-2195).
gaatgttattgcaccaatt

SEQ ID NO: 256731 - DNA, 19 bp, Homo sapiens
  siRNA target sequence for SLC12A2 (NM_001046.2,2181-2199).
gttattgcaccaattatct

SEQ ID NO: 256732 - DNA, 19 bp, Homo sapiens
  siRNA target sequence for SLC12A2 (NM_001046.2,2188-2206).
caccaattatctcaaactt

SEQ ID NO: 256733 - DNA, 19 bp, Homo sapiens
  siRNA target sequence for SLC12A2 (NM_001046.2,2190-2208).
ccaattatctcaaacttct

SEQ ID NO: 256734 - DNA, 19 bp, Homo sapiens
  siRNA target sequence for SLC12A2 (NM_001046.2,2191-2209).
caattatctcaaacttctt

SEQ ID NO: 256735 - DNA, 19 bp, Homo sapiens
  siRNA target sequence for SLC12A2 (NM_001046.2,2204-2222).
cttcttccttgcatcatat

SEQ ID NO: 256736 - DNA, 19 bp, Homo sapiens
  siRNA target sequence for SLC12A2 (NM_001046.2,2214-2232).
gcatcatatgcattgatca

SEQ ID NO: 256737 - DNA, 19 bp, Homo sapiens
  siRNA target sequence for SLC12A2 (NM_001046.2,2275-2293).
ggcgtcctgcattcaaata

SEQ ID NO: 256738 - DNA, 19 bp, Homo sapiens
  siRNA target sequence for SLC12A2 (NM_001046.2,2277-2295).
cgtcctgcattcaaatact

SEQ ID NO: 256739 - DNA, 19 bp, Homo sapiens
  siRNA target sequence for SLC12A2 (NM_001046.2,2278-2296).
gtcctgcattcaaatacta

SEQ ID NO: 256740 - DNA, 19 bp, Homo sapiens
  siRNA target sequence for SLC12A2 (NM_001046.2,2294-2312).
ctacaacatgtggatatca

SEQ ID NO: 256741 - DNA, 19 bp, Homo sapiens
  siRNA target sequence for SLC12A2 (NM_001046.2,2300-2318).
catgtggatatcacttctt

SEQ ID NO: 256742 - DNA, 19 bp, Homo sapiens
  siRNA target sequence for SLC12A2 (NM_001046.2,2362-2380).
gggctgcattgctaacata

SEQ ID NO: 256743 - DNA, 19 bp, Homo sapiens
  siRNA target sequence for SLC12A2 (NM_001046.2,2367-2385).
gcattgctaacatatgtga

SEQ ID NO: 256744 - DNA, 19 bp, Homo sapiens
  siRNA target sequence for SLC12A2 (NM_001046.2,2368-2386).
cattgctaacatatgtgat

SEQ ID NO: 256745 - DNA, 19 bp, Homo sapiens
  siRNA target sequence for SLC12A2 (NM_001046.2,2446-2464).
ctacacaagccctgactta

SEQ ID NO: 256746 - DNA, 19 bp, Homo sapiens
  siRNA target sequence for SLC12A2 (NM_001046.2,2527-2545).
ggccacagtgtcttgttat

SEQ ID NO: 256747 - DNA, 19 bp, Homo sapiens
  siRNA target sequence for SLC12A2 (NM_001046.2,2563-2581).
cacgtccagctttacttca

SEQ ID NO: 256748 - DNA, 19 bp, Homo sapiens
  siRNA target sequence for SLC12A2 (NM_001046.2,2566-2584).
gtccagctttacttcatct

SEQ ID NO: 256749 - DNA, 19 bp, Homo sapiens
  siRNA target sequence for SLC12A2 (NM_001046.2,2569-2587).
cagctttacttcatcttgt

SEQ ID NO: 256750 - DNA, 19 bp, Homo sapiens
  siRNA target sequence for SLC12A2 (NM_001046.2,2618-2636).
gatctgtggccatgtacat

SEQ ID NO: 256751 - DNA, 19 bp, Homo sapiens
  siRNA target sequence for SLC12A2 (NM_001046.2,2671-2689).
ccatcgatcaagccaaata

SEQ ID NO: 256752 - DNA, 19 bp, Homo sapiens
  siRNA target sequence for SLC12A2 (NM_001046.2,2672-2690).
catcgatcaagccaaatat

SEQ ID NO: 256753 - DNA, 19 bp, Homo sapiens
  siRNA target sequence for SLC12A2 (NM_001046.2,2691-2709).
cagcgatggcttattaaga

SEQ ID NO: 256754 - DNA, 19 bp, Homo sapiens
  siRNA target sequence for SLC12A2 (NM_001046.2,2785-2803).
ctggtcttggtcgtatgaa

SEQ ID NO: 256755 - DNA, 19 bp, Homo sapiens
  siRNA target sequence for SLC12A2 (NM_001046.2,2855-2873).
gagggatgtggatatgtat

SEQ ID NO: 256756 - DNA, 19 bp, Homo sapiens
  siRNA target sequence for SLC12A2 (NM_001046.2,2857-2875).
gggatgtggatatgtatat

SEQ ID NO: 256757 - DNA, 19 bp, Homo sapiens
  siRNA target sequence for SLC12A2 (NM_001046.2,2918-2936).
ggttattcgcctaaaagaa

SEQ ID NO: 256758 - DNA, 19 bp, Homo sapiens
  siRNA target sequence for SLC12A2 (NM_001046.2,2942-2960).
ggatatatctcatcttcaa

SEQ ID NO: 256759 - DNA, 19 bp, Homo sapiens
  siRNA target sequence for SLC12A2 (NM_001046.2,3005-3023).
caaggatgtggtagtaagt

SEQ ID NO: 256760 - DNA, 19 bp, Homo sapiens
  siRNA target sequence for SLC12A2 (NM_001046.2,3034-3052).
gtaaaaagtccgatttaga

SEQ ID NO: 256761 - DNA, 19 bp, Homo sapiens
  siRNA target sequence for SLC12A2 (NM_001046.2,3058-3076).
ccaaaccactcagtgaaaa

SEQ ID NO: 256762 - DNA, 19 bp, Homo sapiens
  siRNA target sequence for SLC12A2 (NM_001046.2,3064-3082).
cactcagtgaaaaaccaat

SEQ ID NO: 256763 - DNA, 19 bp, Homo sapiens
  siRNA target sequence for SLC12A2 (NM_001046.2,3079-3097).
caattacacacaaagttga

SEQ ID NO: 256764 - DNA, 19 bp, Homo sapiens
  siRNA target sequence for SLC12A2 (NM_001046.2,3121-3139).
ctcaaccactgttgaaaaa

SEQ ID NO: 256765 - DNA, 19 bp, Homo sapiens
  siRNA target sequence for SLC12A2 (NM_001046.2,3150-3168).
ggccctattgtgcctttaa

SEQ ID NO: 256766 - DNA, 19 bp, Homo sapiens
  siRNA target sequence for SLC12A2 (NM_001046.2,3151-3169).
gccctattgtgcctttaaa

SEQ ID NO: 256767 - DNA, 19 bp, Homo sapiens
  siRNA target sequence for SLC12A2 (NM_001046.2,3195-3213).
gctagtacacagtttcaga

SEQ ID NO: 256768 - DNA, 19 bp, Homo sapiens
  siRNA target sequence for SLC12A2 (NM_001046.2,3258-3276).
gatggaggtttgaccttat

SEQ ID NO: 256769 - DNA, 19 bp, Homo sapiens
  siRNA target sequence for SLC12A2 (NM_001046.2,3261-3279).
ggaggtttgaccttattga

SEQ ID NO: 256770 - DNA, 19 bp, Homo sapiens
  siRNA target sequence for SLC12A2 (NM_001046.2,3262-3280).
gaggtttgaccttattgat

SEQ ID NO: 256771 - DNA, 19 bp, Homo sapiens
  siRNA target sequence for SLC12A2 (NM_001046.2,3375-3393).
gcgatggctactttgctta

SEQ ID NO: 256772 - DNA, 19 bp, Homo sapiens
  siRNA target sequence for SLC12A2 (NM_001046.2,3394-3412).
gcaagttccggatagactt

SEQ ID NO: 256773 - DNA, 19 bp, Homo sapiens
  siRNA target sequence for SLC12A2 (NM_001046.2,3395-3413).
caagttccggatagacttt

SEQ ID NO: 256774 - DNA, 19 bp, Homo sapiens
  siRNA target sequence for SLC12A2 (NM_001046.2,3401-3419).
ccggatagacttttctgat

SEQ ID NO: 256775 - DNA, 19 bp, Homo sapiens
  siRNA target sequence for SLC12A2 (NM_001046.2,3402-3420).
cggatagacttttctgata

SEQ ID NO: 256776 - DNA, 19 bp, Homo sapiens
  siRNA target sequence for SLC12A2 (NM_001046.2,3426-3444).
gttctaggagatatcaata

SEQ ID NO: 256777 - DNA, 19 bp, Homo sapiens
  siRNA target sequence for SLC12A2 (NM_001046.2,3429-3447).
ctaggagatatcaatacca

SEQ ID NO: 256778 - DNA, 19 bp, Homo sapiens
  siRNA target sequence for SLC12A2 (NM_001046.2,3491-3509).
gccatacagacttcatgaa

SEQ ID NO: 256779 - DNA, 19 bp, Homo sapiens
  siRNA target sequence for SLC12A2 (NM_001046.2,3549-3567).
gatgaaccatggcgaataa

SEQ ID NO: 256780 - DNA, 19 bp, Homo sapiens
  siRNA target sequence for SLC12A2 (NM_001046.2,3555-3573).
ccatggcgaataacagata

SEQ ID NO: 256781 - DNA, 19 bp, Homo sapiens
  siRNA target sequence for SLC12A2 (NM_001046.2,3556-3574).
catggcgaataacagataa

SEQ ID NO: 256782 - DNA, 19 bp, Homo sapiens
  siRNA target sequence for SLC12A2 (NM_001046.2,3559-3577).
ggcgaataacagataatga

SEQ ID NO: 256783 - DNA, 19 bp, Homo sapiens
  siRNA target sequence for SLC12A2 (NM_001046.2,3576-3594).
gagcttgaactttataaga

SEQ ID NO: 256784 - DNA, 19 bp, Homo sapiens
  siRNA target sequence for SLC12A2 (NM_001046.2,3605-3623).
ccggcagatcaggttaaat

SEQ ID NO: 256785 - DNA, 19 bp, Homo sapiens
  siRNA target sequence for SLC12A2 (NM_001046.2,3609-3627).
cagatcaggttaaatgagt

SEQ ID NO: 256786 - DNA, 19 bp, Homo sapiens
  siRNA target sequence for SLC12A2 (NM_001046.2,3611-3629).
gatcaggttaaatgagtta

SEQ ID NO: 256787 - DNA, 19 bp, Homo sapiens
  siRNA target sequence for SLC12A2 (NM_001046.2,3639-3657).
cattcaagcacagctaata

SEQ ID NO: 256788 - DNA, 19 bp, Homo sapiens
  siRNA target sequence for SLC12A2 (NM_001046.2,3649-3667).
cagctaatattattgtcat

SEQ ID NO: 256789 - DNA, 19 bp, Homo sapiens
  siRNA target sequence for SLC12A2 (NM_001046.2,3710-3728).
ctacatggcatggttagaa

SEQ ID NO: 256790 - DNA, 19 bp, Homo sapiens
  siRNA target sequence for SLC12A2 (NM_001046.2,3779-3797).
gagtgtccttaccttctat

SEQ ID NO: 256791 - DNA, 19 bp, Homo sapiens
  siRNA target sequence for SLC12A2 (NM_001046.2,3783-3801).
gtccttaccttctattcat

SEQ ID NO: 256792 - DNA, 19 bp, Homo sapiens
  siRNA target sequence for SLC12A5 (NM_020708.3,1028-1046).
gtctcgccatggctttgat

SEQ ID NO: 256793 - DNA, 19 bp, Homo sapiens
  siRNA target sequence for SLC12A5 (NM_020708.3,1030-1048).
ctcgccatggctttgatgt

SEQ ID NO: 256794 - DNA, 19 bp, Homo sapiens
  siRNA target sequence for SLC12A5 (NM_020708.3,1092-1110).
cggctatggggccttttct

SEQ ID NO: 256795 - DNA, 19 bp, Homo sapiens
  siRNA target sequence for SLC12A5 (NM_020708.3,1329-1347).
gatatgacctcctacttca

SEQ ID NO: 256796 - DNA, 19 bp, Homo sapiens
  siRNA target sequence for SLC12A5 (NM_020708.3,1384-1402).
ggatcatggctggttctaa

SEQ ID NO: 256797 - DNA, 19 bp, Homo sapiens
  siRNA target sequence for SLC12A5 (NM_020708.3,1468-1486).
ccacctctgctgtctacat

SEQ ID NO: 256798 - DNA, 19 bp, Homo sapiens
  siRNA target sequence for SLC12A5 (NM_020708.3,1906-1924).
ggaggccacgctttcgata

SEQ ID NO: 256799 - DNA, 19 bp, Homo sapiens
  siRNA target sequence for SLC12A5 (NM_020708.3,1907-1925).
gaggccacgctttcgatat

SEQ ID NO: 256800 - DNA, 19 bp, Homo sapiens
  siRNA target sequence for SLC12A5 (NM_020708.3,1909-1927).
ggccacgctttcgatatta

SEQ ID NO: 256801 - DNA, 19 bp, Homo sapiens
  siRNA target sequence for SLC12A5 (NM_020708.3,2316-2334).
cgggcagaagagtctatca

SEQ ID NO: 256802 - DNA, 19 bp, Homo sapiens
  siRNA target sequence for SLC12A5 (NM_020708.3,2482-2500).
ggcgccagaaggaagatca

SEQ ID NO: 256803 - DNA, 19 bp, Homo sapiens
  siRNA target sequence for SLC12A5 (NM_020708.3,2483-2501).
gcgccagaaggaagatcat

SEQ ID NO: 256804 - DNA, 19 bp, Homo sapiens
  siRNA target sequence for SLC12A5 (NM_020708.3,2502-2520).
cagacgtggaggaacttca

SEQ ID NO: 256805 - DNA, 19 bp, Homo sapiens
  siRNA target sequence for SLC12A5 (NM_020708.3,2504-2522).
gacgtggaggaacttcatt

SEQ ID NO: 256806 - DNA, 19 bp, Homo sapiens
  siRNA target sequence for SLC12A5 (NM_020708.3,2506-2524).
cgtggaggaacttcattga

SEQ ID NO: 256807 - DNA, 19 bp, Homo sapiens
  siRNA target sequence for SLC12A5 (NM_020708.3,2562-2580).
ctggtcaccaagaacgttt

SEQ ID NO: 256808 - DNA, 19 bp, Homo sapiens
  siRNA target sequence for SLC12A5 (NM_020708.3,2570-2588).
caagaacgtttccatgttt

SEQ ID NO: 256809 - DNA, 19 bp, Homo sapiens
  siRNA target sequence for SLC12A5 (NM_020708.3,2771-2789).
gaccacatttctgtatcat

SEQ ID NO: 256810 - DNA, 19 bp, Homo sapiens
  siRNA target sequence for SLC12A5 (NM_020708.3,2900-2918).
gatgcatttaaccaagaat

SEQ ID NO: 256811 - DNA, 19 bp, Homo sapiens
  siRNA target sequence for SLC12A5 (NM_020708.3,2930-2948).
ggagatccagagtatcaca

SEQ ID NO: 256812 - DNA, 19 bp, Homo sapiens
  siRNA target sequence for SLC12A5 (NM_020708.3,2961-2979).
ggctcaatccggagaaaga

SEQ ID NO: 256813 - DNA, 19 bp, Homo sapiens
  siRNA target sequence for SLC12A5 (NM_020708.3,3317-3335).
cgaggtcatcgtgaagaaa

SEQ ID NO: 256814 - DNA, 19 bp, Homo sapiens
  siRNA target sequence for SLC12A5 (NM_020708.3,3339-3357).
cgggacgccaagcttgttt

SEQ ID NO: 256815 - DNA, 19 bp, Homo sapiens
  siRNA target sequence for SLC12A5 (NM_020708.3,3340-3358).
gggacgccaagcttgtttt

SEQ ID NO: 256816 - DNA, 19 bp, Homo sapiens
  siRNA target sequence for SLC12A7 (NM_006598.1,153-171).
gcccattcctcaacaatgt

SEQ ID NO: 256817 - DNA, 19 bp, Homo sapiens
  siRNA target sequence for SLC12A7 (NM_006598.1,476-494).
gccatgtgctgcacatgta

SEQ ID NO: 256818 - DNA, 19 bp, Homo sapiens
  siRNA target sequence for SLC12A7 (NM_006598.1,478-496).
catgtgctgcacatgtaca

SEQ ID NO: 256819 - DNA, 19 bp, Homo sapiens
  siRNA target sequence for SLC12A7 (NM_006598.1,553-571).
cgggtcctactacatgata

SEQ ID NO: 256820 - DNA, 19 bp, Homo sapiens
  siRNA target sequence for SLC12A7 (NM_006598.1,660-678).
ggaccatcgagatttttct

SEQ ID NO: 256821 - DNA, 19 bp, Homo sapiens
  siRNA target sequence for SLC12A7 (NM_006598.1,802-820).
cttcgtgggcgtcaagtat

SEQ ID NO: 256822 - DNA, 19 bp, Homo sapiens
  siRNA target sequence for SLC12A7 (NM_006598.1,1056-1074).
cctgtgacgagtacttcat

SEQ ID NO: 256823 - DNA, 19 bp, Homo sapiens
  siRNA target sequence for SLC12A7 (NM_006598.1,1165-1183).
ggcgtttgtggagaagaaa

SEQ ID NO: 256824 - DNA, 19 bp, Homo sapiens
  siRNA target sequence for SLC12A7 (NM_006598.1,1290-1308).
cttccgtgaccggtatcat

SEQ ID NO: 256825 - DNA, 19 bp, Homo sapiens
  siRNA target sequence for SLC12A7 (NM_006598.1,1382-1400).
gtgacgacgtctttcatct

SEQ ID NO: 256826 - DNA, 19 bp, Homo sapiens
  siRNA target sequence for SLC12A7 (NM_006598.1,1384-1402).
gacgacgtctttcatctat

SEQ ID NO: 256827 - DNA, 19 bp, Homo sapiens
  siRNA target sequence for SLC12A7 (NM_006598.1,1386-1404).
cgacgtctttcatctatct

SEQ ID NO: 256828 - DNA, 19 bp, Homo sapiens
  siRNA target sequence for SLC12A7 (NM_006598.1,1440-1458).
gcgtggtcttacgagataa

SEQ ID NO: 256829 - DNA, 19 bp, Homo sapiens
  siRNA target sequence for SLC12A7 (NM_006598.1,1442-1460).
gtggtcttacgagataagt

SEQ ID NO: 256830 - DNA, 19 bp, Homo sapiens
  siRNA target sequence for SLC12A7 (NM_006598.1,1824-1842).
ggcgtccacgcttcaagtt

SEQ ID NO: 256831 - DNA, 19 bp, Homo sapiens
  siRNA target sequence for SLC12A7 (NM_006598.1,1826-1844).
cgtccacgcttcaagttct

SEQ ID NO: 256832 - DNA, 19 bp, Homo sapiens
  siRNA target sequence for SLC12A7 (NM_006598.1,1827-1845).
gtccacgcttcaagttcta

SEQ ID NO: 256833 - DNA, 19 bp, Homo sapiens
  siRNA target sequence for SLC12A7 (NM_006598.1,2424-2442).
cctggaagaactttgtaga

SEQ ID NO: 256834 - DNA, 19 bp, Homo sapiens
  siRNA target sequence for SLC12A7 (NM_006598.1,2743-2761).
ggttgaaaacgacatatct

SEQ ID NO: 256835 - DNA, 19 bp, Homo sapiens
  siRNA target sequence for SLC12A7 (NM_006598.1,2769-2787).
cctacgagaggacactaat

SEQ ID NO: 256836 - DNA, 19 bp, Homo sapiens
  siRNA target sequence for SLC12A7 (NM_006598.1,3077-3095).
ggcgtcgtcctcaacaagt

SEQ ID NO: 256837 - DNA, 19 bp, Homo sapiens
  siRNA target sequence for SLC12A7 (NM_006598.1,3147-3165).
ggcagggagacgagaacta

SEQ ID NO: 256838 - DNA, 19 bp, Homo sapiens
  siRNA target sequence for SLC12A3 (NM_000339.1,189-207).
cgatgtggtgcccacatat

SEQ ID NO: 256839 - DNA, 19 bp, Homo sapiens
  siRNA target sequence for SLC12A3 (NM_000339.1,420-438).
ggtcaagggggtgatgatt

SEQ ID NO: 256840 - DNA, 19 bp, Homo sapiens
  siRNA target sequence for SLC12A3 (NM_000339.1,656-674).
gctccatcggcctcatttt

SEQ ID NO: 256841 - DNA, 19 bp, Homo sapiens
  siRNA target sequence for SLC12A3 (NM_000339.1,888-906).
ggtctcctttgccaactat

SEQ ID NO: 256842 - DNA, 19 bp, Homo sapiens
  siRNA target sequence for SLC12A3 (NM_000339.1,889-907).
gtctcctttgccaactatt

SEQ ID NO: 256843 - DNA, 19 bp, Homo sapiens
  siRNA target sequence for SLC12A3 (NM_000339.1,1019-1037).
gcaccttcttcggaatgtt

SEQ ID NO: 256844 - DNA, 19 bp, Homo sapiens
  siRNA target sequence for SLC12A3 (NM_000339.1,1069-1087).
ctggcaggggccaacatat

SEQ ID NO: 256845 - DNA, 19 bp, Homo sapiens
  siRNA target sequence for SLC12A3 (NM_000339.1,1313-1331).
gccactacggcctcatcaa

SEQ ID NO: 256846 - DNA, 19 bp, Homo sapiens
  siRNA target sequence for SLC12A3 (NM_000339.1,1317-1335).
ctacggcctcatcaactat

SEQ ID NO: 256847 - DNA, 19 bp, Homo sapiens
  siRNA target sequence for SLC12A3 (NM_000339.1,1322-1340).
gcctcatcaactattacca

SEQ ID NO: 256848 - DNA, 19 bp, Homo sapiens
  siRNA target sequence for SLC12A3 (NM_000339.1,1679-1697).
ggagaccttcattccaata

SEQ ID NO: 256849 - DNA, 19 bp, Homo sapiens
  siRNA target sequence for SLC12A3 (NM_000339.1,1682-1700).
gaccttcattccaatacta

SEQ ID NO: 256850 - DNA, 19 bp, Homo sapiens
  siRNA target sequence for SLC12A3 (NM_000339.1,1715-1733).
cgctgtttggggctatcat

SEQ ID NO: 256851 - DNA, 19 bp, Homo sapiens
  siRNA target sequence for SLC12A3 (NM_000339.1,1807-1825).
ctctatgtcatctacaaga

SEQ ID NO: 256852 - DNA, 19 bp, Homo sapiens
  siRNA target sequence for SLC12A3 (NM_000339.1,1906-1924).
gtggaagaccacatcaaga

SEQ ID NO: 256853 - DNA, 19 bp, Homo sapiens
  siRNA target sequence for SLC12A3 (NM_000339.1,2126-2144).
ccttctactcggatgtcat

SEQ ID NO: 256854 - DNA, 19 bp, Homo sapiens
  siRNA target sequence for SLC12A3 (NM_000339.1,2127-2145).
cttctactcggatgtcatt

SEQ ID NO: 256855 - DNA, 19 bp, Homo sapiens
  siRNA target sequence for SLC12A3 (NM_000339.1,2218-2236).
ctggtggttgggttcaaga

SEQ ID NO: 256856 - DNA, 19 bp, Homo sapiens
  siRNA target sequence for SLC12A3 (NM_000339.1,2655-2673).
ggagagaaaggcgatcatt

SEQ ID NO: 256857 - DNA, 19 bp, Homo sapiens
  siRNA target sequence for SLC12A3 (NM_000339.1,2658-2676).
gagaaaggcgatcatttct

SEQ ID NO: 256858 - DNA, 19 bp, Homo sapiens
  siRNA target sequence for SLC12A3 (NM_000339.1,2660-2678).
gaaaggcgatcatttctct

SEQ ID NO: 256859 - DNA, 19 bp, Homo sapiens
  siRNA target sequence for SLC12A3 (NM_000339.1,2688-2706).
gttccgactgggattccat

SEQ ID NO: 256860 - DNA, 19 bp, Homo sapiens
  siRNA target sequence for SLC12A3 (NM_000339.1,2780-2798).
cacccttccgtctgaatga

SEQ ID NO: 256861 - DNA, 19 bp, Homo sapiens
  siRNA target sequence for SLC12A3 (NM_000339.1,2897-2915).
ggcaggtgaggctgaatga

SEQ ID NO: 256862 - DNA, 19 bp, Homo sapiens
  siRNA target sequence for SLC12A3 (NM_000339.1,2987-3005).
gccccagctcgctgtacat

SEQ ID NO: 256863 - DNA, 19 bp, Homo sapiens
  siRNA target sequence for SLC12A6 (NM_005135.1,111-129).
ctctcaagagcctagttta

SEQ ID NO: 256864 - DNA, 19 bp, Homo sapiens
  siRNA target sequence for SLC12A6 (NM_005135.1,120-138).
gcctagtttagcagacata

SEQ ID NO: 256865 - DNA, 19 bp, Homo sapiens
  siRNA target sequence for SLC12A6 (NM_005135.1,121-139).
cctagtttagcagacataa

SEQ ID NO: 256866 - DNA, 19 bp, Homo sapiens
  siRNA target sequence for SLC12A6 (NM_005135.1,122-140).
ctagtttagcagacataaa

SEQ ID NO: 256867 - DNA, 19 bp, Homo sapiens
  siRNA target sequence for SLC12A6 (NM_005135.1,144-162).
ccggattcaggattcagat

SEQ ID NO: 256868 - DNA, 19 bp, Homo sapiens
  siRNA target sequence for SLC12A6 (NM_005135.1,232-250).
gctcgaaatgcttatctca

SEQ ID NO: 256869 - DNA, 19 bp, Homo sapiens
  siRNA target sequence for SLC12A6 (NM_005135.1,233-251).
ctcgaaatgcttatctcaa

SEQ ID NO: 256870 - DNA, 19 bp, Homo sapiens
  siRNA target sequence for SLC12A6 (NM_005135.1,235-253).
cgaaatgcttatctcaata

SEQ ID NO: 256871 - DNA, 19 bp, Homo sapiens
  siRNA target sequence for SLC12A6 (NM_005135.1,236-254).
gaaatgcttatctcaataa

SEQ ID NO: 256872 - DNA, 19 bp, Homo sapiens
  siRNA target sequence for SLC12A6 (NM_005135.1,352-370).
cgcatggccaattacacta

SEQ ID NO: 256873 - DNA, 19 bp, Homo sapiens
  siRNA target sequence for SLC12A6 (NM_005135.1,353-371).
gcatggccaattacactaa

SEQ ID NO: 256874 - DNA, 19 bp, Homo sapiens
  siRNA target sequence for SLC12A6 (NM_005135.1,354-372).
catggccaattacactaat

SEQ ID NO: 256875 - DNA, 19 bp, Homo sapiens
  siRNA target sequence for SLC12A6 (NM_005135.1,508-526).
ctttttttacgccttacat

SEQ ID NO: 256876 - DNA, 19 bp, Homo sapiens
  siRNA target sequence for SLC12A6 (NM_005135.1,612-630).
gagtgccattgccactaat

SEQ ID NO: 256877 - DNA, 19 bp, Homo sapiens
  siRNA target sequence for SLC12A6 (NM_005135.1,643-661).
gctgggggctcatacttta

SEQ ID NO: 256878 - DNA, 19 bp, Homo sapiens
  siRNA target sequence for SLC12A6 (NM_005135.1,644-662).
ctgggggctcatactttat

SEQ ID NO: 256879 - DNA, 19 bp, Homo sapiens
  siRNA target sequence for SLC12A6 (NM_005135.1,646-664).
gggggctcatactttatga

SEQ ID NO: 256880 - DNA, 19 bp, Homo sapiens
  siRNA target sequence for SLC12A6 (NM_005135.1,647-665).
ggggctcatactttatgat

SEQ ID NO: 256881 - DNA, 19 bp, Homo sapiens
  siRNA target sequence for SLC12A6 (NM_005135.1,648-666).
gggctcatactttatgatt

SEQ ID NO: 256882 - DNA, 19 bp, Homo sapiens
  siRNA target sequence for SLC12A6 (NM_005135.1,649-667).
ggctcatactttatgattt

SEQ ID NO: 256883 - DNA, 19 bp, Homo sapiens
  siRNA target sequence for SLC12A6 (NM_005135.1,790-808).
cgagctgccatctttcaca

SEQ ID NO: 256884 - DNA, 19 bp, Homo sapiens
  siRNA target sequence for SLC12A6 (NM_005135.1,811-829).
gatgacgcactcaaggaat

SEQ ID NO: 256885 - DNA, 19 bp, Homo sapiens
  siRNA target sequence for SLC12A6 (NM_005135.1,905-923).
gcgtacgctatgtgaacaa

SEQ ID NO: 256886 - DNA, 19 bp, Homo sapiens
  siRNA target sequence for SLC12A6 (NM_005135.1,907-925).
gtacgctatgtgaacaagt

SEQ ID NO: 256887 - DNA, 19 bp, Homo sapiens
  siRNA target sequence for SLC12A6 (NM_005135.1,979-997).
ggagccatcaagtcttctt

SEQ ID NO: 256888 - DNA, 19 bp, Homo sapiens
  siRNA target sequence for SLC12A6 (NM_005135.1,980-998).
gagccatcaagtcttcttt

SEQ ID NO: 256889 - DNA, 19 bp, Homo sapiens
  siRNA target sequence for SLC12A6 (NM_005135.1,984-1002).
catcaagtcttcttttgct

SEQ ID NO: 256890 - DNA, 19 bp, Homo sapiens
  siRNA target sequence for SLC12A6 (NM_005135.1,1030-1048).
ggtaaccgcaccctttcat

SEQ ID NO: 256891 - DNA, 19 bp, Homo sapiens
  siRNA target sequence for SLC12A6 (NM_005135.1,1035-1053).
ccgcaccctttcatcaaga

SEQ ID NO: 256892 - DNA, 19 bp, Homo sapiens
  siRNA target sequence for SLC12A6 (NM_005135.1,1125-1143).
ctgtaactcgagtcaattt

SEQ ID NO: 256893 - DNA, 19 bp, Homo sapiens
  siRNA target sequence for SLC12A6 (NM_005135.1,1127-1145).
gtaactcgagtcaattttt

SEQ ID NO: 256894 - DNA, 19 bp, Homo sapiens
  siRNA target sequence for SLC12A6 (NM_005135.1,1131-1149).
ctcgagtcaatttttcaat

SEQ ID NO: 256895 - DNA, 19 bp, Homo sapiens
  siRNA target sequence for SLC12A6 (NM_005135.1,1174-1192).
cacaataacgtcacttcaa

SEQ ID NO: 256896 - DNA, 19 bp, Homo sapiens
  siRNA target sequence for SLC12A6 (NM_005135.1,1207-1225).
ggattggctagtggtataa

SEQ ID NO: 256897 - DNA, 19 bp, Homo sapiens
  siRNA target sequence for SLC12A6 (NM_005135.1,1208-1226).
gattggctagtggtataat

SEQ ID NO: 256898 - DNA, 19 bp, Homo sapiens
  siRNA target sequence for SLC12A6 (NM_005135.1,1212-1230).
ggctagtggtataattaca

SEQ ID NO: 256899 - DNA, 19 bp, Homo sapiens
  siRNA target sequence for SLC12A6 (NM_005135.1,1306-1324).
ggcagcttaaaccatgaat

SEQ ID NO: 256900 - DNA, 19 bp, Homo sapiens
  siRNA target sequence for SLC12A6 (NM_005135.1,1355-1373).
cgcttctggtgggaatctt

SEQ ID NO: 256901 - DNA, 19 bp, Homo sapiens
  siRNA target sequence for SLC12A6 (NM_005135.1,1379-1397).
cctctgttacaggtatcat

SEQ ID NO: 256902 - DNA, 19 bp, Homo sapiens
  siRNA target sequence for SLC12A6 (NM_005135.1,1410-1428).
cagatctggagatctgaaa

SEQ ID NO: 256903 - DNA, 19 bp, Homo sapiens
  siRNA target sequence for SLC12A6 (NM_005135.1,1412-1430).
gatctggagatctgaaaga

SEQ ID NO: 256904 - DNA, 19 bp, Homo sapiens
  siRNA target sequence for SLC12A6 (NM_005135.1,1442-1460).
ctattccgattggtactat

SEQ ID NO: 256905 - DNA, 19 bp, Homo sapiens
  siRNA target sequence for SLC12A6 (NM_005135.1,1473-1491).
gaccacctcctttgtttat

SEQ ID NO: 256906 - DNA, 19 bp, Homo sapiens
  siRNA target sequence for SLC12A6 (NM_005135.1,1552-1570).
ggtgatgctgtgaaaggta

SEQ ID NO: 256907 - DNA, 19 bp, Homo sapiens
  siRNA target sequence for SLC12A6 (NM_005135.1,1555-1573).
gatgctgtgaaaggtaatt

SEQ ID NO: 256908 - DNA, 19 bp, Homo sapiens
  siRNA target sequence for SLC12A6 (NM_005135.1,1601-1619).
ccccatgggtgattgttat

SEQ ID NO: 256909 - DNA, 19 bp, Homo sapiens
  siRNA target sequence for SLC12A6 (NM_005135.1,1673-1691).
cgaggctgctacaagctat

SEQ ID NO: 256910 - DNA, 19 bp, Homo sapiens
  siRNA target sequence for SLC12A6 (NM_005135.1,1674-1692).
gaggctgctacaagctatt

SEQ ID NO: 256911 - DNA, 19 bp, Homo sapiens
  siRNA target sequence for SLC12A6 (NM_005135.1,1754-1772).
ctacctgggctttacttct

SEQ ID NO: 256912 - DNA, 19 bp, Homo sapiens
  siRNA target sequence for SLC12A6 (NM_005135.1,1781-1799).
ccattgcagagcttggaat

SEQ ID NO: 256913 - DNA, 19 bp, Homo sapiens
  siRNA target sequence for SLC12A6 (NM_005135.1,1782-1800).
cattgcagagcttggaata

SEQ ID NO: 256914 - DNA, 19 bp, Homo sapiens
  siRNA target sequence for SLC12A6 (NM_005135.1,1856-1874).
gttacctctttgtaaactt

SEQ ID NO: 256915 - DNA, 19 bp, Homo sapiens
  siRNA target sequence for SLC12A6 (NM_005135.1,1880-1898).
gtgccttgcaaacattact

SEQ ID NO: 256916 - DNA, 19 bp, Homo sapiens
  siRNA target sequence for SLC12A6 (NM_005135.1,1995-2013).
ctggtattatgccattgta

SEQ ID NO: 256917 - DNA, 19 bp, Homo sapiens
  siRNA target sequence for SLC12A6 (NM_005135.1,2007-2025).
cattgtagccatggtaata

SEQ ID NO: 256918 - DNA, 19 bp, Homo sapiens
  siRNA target sequence for SLC12A6 (NM_005135.1,2020-2038).
gtaatagctggtatgatct

SEQ ID NO: 256919 - DNA, 19 bp, Homo sapiens
  siRNA target sequence for SLC12A6 (NM_005135.1,2026-2044).
gctggtatgatctacaagt

SEQ ID NO: 256920 - DNA, 19 bp, Homo sapiens
  siRNA target sequence for SLC12A6 (NM_005135.1,2027-2045).
ctggtatgatctacaagta

SEQ ID NO: 256921 - DNA, 19 bp, Homo sapiens
  siRNA target sequence for SLC12A6 (NM_005135.1,2114-2132).
ggtttgctttgcttcgatt

SEQ ID NO: 256922 - DNA, 19 bp, Homo sapiens
  siRNA target sequence for SLC12A6 (NM_005135.1,2165-2183).
ggcctcagttgcttgtatt

SEQ ID NO: 256923 - DNA, 19 bp, Homo sapiens
  siRNA target sequence for SLC12A6 (NM_005135.1,2168-2186).
ctcagttgcttgtattact

SEQ ID NO: 256924 - DNA, 19 bp, Homo sapiens
  siRNA target sequence for SLC12A6 (NM_005135.1,2172-2190).
gttgcttgtattactgaaa

SEQ ID NO: 256925 - DNA, 19 bp, Homo sapiens
  siRNA target sequence for SLC12A6 (NM_005135.1,2175-2193).
gcttgtattactgaaacta

SEQ ID NO: 256926 - DNA, 19 bp, Homo sapiens
  siRNA target sequence for SLC12A6 (NM_005135.1,2291-2309).
ggaacttcctagagaacta

SEQ ID NO: 256927 - DNA, 19 bp, Homo sapiens
  siRNA target sequence for SLC12A6 (NM_005135.1,2304-2322).
gaactacggtgaagcttta

SEQ ID NO: 256928 - DNA, 19 bp, Homo sapiens
  siRNA target sequence for SLC12A6 (NM_005135.1,2307-2325).
ctacggtgaagctttagct

SEQ ID NO: 256929 - DNA, 19 bp, Homo sapiens
  siRNA target sequence for SLC12A6 (NM_005135.1,2336-2354).
ccataaagcacctaatgga

SEQ ID NO: 256930 - DNA, 19 bp, Homo sapiens
  siRNA target sequence for SLC12A6 (NM_005135.1,2510-2528).
gcgcttggaagacttttat

SEQ ID NO: 256931 - DNA, 19 bp, Homo sapiens
  siRNA target sequence for SLC12A6 (NM_005135.1,2511-2529).
cgcttggaagacttttatt

SEQ ID NO: 256932 - DNA, 19 bp, Homo sapiens
  siRNA target sequence for SLC12A6 (NM_005135.1,2563-2581).
gcactgctggtggctaaaa

SEQ ID NO: 256933 - DNA, 19 bp, Homo sapiens
  siRNA target sequence for SLC12A6 (NM_005135.1,2564-2582).
cactgctggtggctaaaaa

SEQ ID NO: 256934 - DNA, 19 bp, Homo sapiens
  siRNA target sequence for SLC12A6 (NM_005135.1,2569-2587).
ctggtggctaaaaacatct

SEQ ID NO: 256935 - DNA, 19 bp, Homo sapiens
  siRNA target sequence for SLC12A6 (NM_005135.1,2650-2668).
catgatggggggatgctta

SEQ ID NO: 256936 - DNA, 19 bp, Homo sapiens
  siRNA target sequence for SLC12A6 (NM_005135.1,2730-2748).
cacagtagcccaattagaa

SEQ ID NO: 256937 - DNA, 19 bp, Homo sapiens
  siRNA target sequence for SLC12A6 (NM_005135.1,2775-2793).
cctagccaccttcctatat

SEQ ID NO: 256938 - DNA, 19 bp, Homo sapiens
  siRNA target sequence for SLC12A6 (NM_005135.1,2779-2797).
gccaccttcctatatcact

SEQ ID NO: 256939 - DNA, 19 bp, Homo sapiens
  siRNA target sequence for SLC12A6 (NM_005135.1,2781-2799).
caccttcctatatcactta

SEQ ID NO: 256940 - DNA, 19 bp, Homo sapiens
  siRNA target sequence for SLC12A6 (NM_005135.1,2829-2847).
gatgcatgacagtgatata

SEQ ID NO: 256941 - DNA, 19 bp, Homo sapiens
  siRNA target sequence for SLC12A6 (NM_005135.1,2832-2850).
gcatgacagtgatatatca

SEQ ID NO: 256942 - DNA, 19 bp, Homo sapiens
  siRNA target sequence for SLC12A6 (NM_005135.1,2838-2856).
cagtgatatatcagcatat

SEQ ID NO: 256943 - DNA, 19 bp, Homo sapiens
  siRNA target sequence for SLC12A6 (NM_005135.1,2858-2876).
cttacgagcgcactttgat

SEQ ID NO: 256944 - DNA, 19 bp, Homo sapiens
  siRNA target sequence for SLC12A6 (NM_005135.1,2903-2921).
ggcacatgcggctatccaa

SEQ ID NO: 256945 - DNA, 19 bp, Homo sapiens
  siRNA target sequence for SLC12A6 (NM_005135.1,2904-2922).
gcacatgcggctatccaaa

SEQ ID NO: 256946 - DNA, 19 bp, Homo sapiens
  siRNA target sequence for SLC12A6 (NM_005135.1,2905-2923).
cacatgcggctatccaaaa

SEQ ID NO: 256947 - DNA, 19 bp, Homo sapiens
  siRNA target sequence for SLC12A6 (NM_005135.1,2907-2925).
catgcggctatccaaaaca

SEQ ID NO: 256948 - DNA, 19 bp, Homo sapiens
  siRNA target sequence for SLC12A6 (NM_005135.1,2930-2948).
gagacagagaggcacaatt

SEQ ID NO: 256949 - DNA, 19 bp, Homo sapiens
  siRNA target sequence for SLC12A6 (NM_005135.1,2960-2978).
gaaactcaatgctacgatt

SEQ ID NO: 256950 - DNA, 19 bp, Homo sapiens
  siRNA target sequence for SLC12A6 (NM_005135.1,3033-3051).
gcacatgacttggacaaaa

SEQ ID NO: 256951 - DNA, 19 bp, Homo sapiens
  siRNA target sequence for SLC12A6 (NM_005135.1,3041-3059).
cttggacaaaagacaagta

SEQ ID NO: 256952 - DNA, 19 bp, Homo sapiens
  siRNA target sequence for SLC12A6 (NM_005135.1,3073-3091).
ggacaaaaagcgaagtcaa

SEQ ID NO: 256953 - DNA, 19 bp, Homo sapiens
  siRNA target sequence for SLC12A6 (NM_005135.1,3074-3092).
gacaaaaagcgaagtcaat

SEQ ID NO: 256954 - DNA, 19 bp, Homo sapiens
  siRNA target sequence for SLC12A6 (NM_005135.1,3162-3180).
gaaactcaacgaggttata

SEQ ID NO: 256955 - DNA, 19 bp, Homo sapiens
  siRNA target sequence for SLC12A6 (NM_005135.1,3166-3184).
ctcaacgaggttatagtta

SEQ ID NO: 256956 - DNA, 19 bp, Homo sapiens
  siRNA target sequence for SLC12A6 (NM_005135.1,3328-3346).
gaagtgatcaccatttatt

SEQ ID NO: 256957 - DNA, 19 bp, Homo sapiens
  siRNA target sequence for SLC12A6 (NM_005135.1,3331-3349).
gtgatcaccatttattcat

SEQ ID NO: 256958 - DNA, 19 bp, Homo sapiens
  siRNA target sequence for SLC13A4 (NM_012450.2,1015-1033).
ctctgcgcatggtcttgat

SEQ ID NO: 256959 - DNA, 19 bp, Homo sapiens
  siRNA target sequence for SLC13A4 (NM_012450.2,1222-1240).
ccatcagtctggatgtaaa

SEQ ID NO: 256960 - DNA, 19 bp, Homo sapiens
  siRNA target sequence for SLC13A4 (NM_012450.2,1343-1361).
caccaaccccatcaaaact

SEQ ID NO: 256961 - DNA, 19 bp, Homo sapiens
  siRNA target sequence for SLC13A4 (NM_012450.2,1464-1482).
caccatgaccagatgatct

SEQ ID NO: 256962 - DNA, 19 bp, Homo sapiens
  siRNA target sequence for SLC13A4 (NM_012450.2,1598-1616).
cgcagaggtggtgaacttt

SEQ ID NO: 256963 - DNA, 19 bp, Homo sapiens
  siRNA target sequence for SLC13A4 (NM_012450.2,1698-1716).
ggctgcaattttaaagaga

SEQ ID NO: 256964 - DNA, 19 bp, Homo sapiens
  siRNA target sequence for SLC13A4 (NM_012450.2,1815-1833).
gaaatggtgactggatttt

SEQ ID NO: 256965 - DNA, 19 bp, Homo sapiens
  siRNA target sequence for SLC13A4 (NM_012450.2,2031-2049).
gggaccgagcccatcatca

SEQ ID NO: 256966 - DNA, 19 bp, Homo sapiens
  siRNA target sequence for SLC13A4 (NM_012450.2,2071-2089).
ccatgccctgggagattgt

SEQ ID NO: 256967 - DNA, 19 bp, Homo sapiens
  siRNA target sequence for SLC13A4 (NM_012450.2,2077-2095).
cctgggagattgtcattct

SEQ ID NO: 256968 - DNA, 19 bp, Homo sapiens
  siRNA target sequence for SLC13A4 (NM_012450.2,2152-2170).
ggattgggaaccagatgtt

SEQ ID NO: 256969 - DNA, 19 bp, Homo sapiens
  siRNA target sequence for SLC13A4 (NM_012450.2,2227-2245).
ccattgtcactgagtttgt

SEQ ID NO: 256970 - DNA, 19 bp, Homo sapiens
  siRNA target sequence for SLC13A4 (NM_012450.2,2296-2314).
ctgaaacgctgcacattaa

SEQ ID NO: 256971 - DNA, 19 bp, Homo sapiens
  siRNA target sequence for SLC13A4 (NM_012450.2,2443-2461).
gcctgggagtcaacgttat

SEQ ID NO: 256972 - DNA, 19 bp, Homo sapiens
  siRNA target sequence for SLC13A4 (NM_012450.2,2444-2462).
cctgggagtcaacgttatt

SEQ ID NO: 256973 - DNA, 19 bp, Homo sapiens
  siRNA target sequence for SLC13A4 (NM_012450.2,2447-2465).
gggagtcaacgttattgga

SEQ ID NO: 256974 - DNA, 19 bp, Homo sapiens
  siRNA target sequence for SLC13A4 (NM_012450.2,2464-2482).
gactggtgatagtaatggt

SEQ ID NO: 256975 - DNA, 19 bp, Homo sapiens
  siRNA target sequence for SLC13A4 (NM_012450.2,2538-2556).
gcgagggtcagcaacatca

SEQ ID NO: 256976 - DNA, 19 bp, Homo sapiens
  siRNA target sequence for SLC4A4 (NM_003759.1,226-244).
gggttgtccagccaatgtt

SEQ ID NO: 256977 - DNA, 19 bp, Homo sapiens
  siRNA target sequence for SLC4A4 (NM_003759.1,227-245).
ggttgtccagccaatgttt

SEQ ID NO: 256978 - DNA, 19 bp, Homo sapiens
  siRNA target sequence for SLC4A4 (NM_003759.1,283-301).
cagaacgcatccgattcat

SEQ ID NO: 256979 - DNA, 19 bp, Homo sapiens
  siRNA target sequence for SLC4A4 (NM_003759.1,285-303).
gaacgcatccgattcatct

SEQ ID NO: 256980 - DNA, 19 bp, Homo sapiens
  siRNA target sequence for SLC4A4 (NM_003759.1,459-477).
ccccatgtggccacattgt

SEQ ID NO: 256981 - DNA, 19 bp, Homo sapiens
  siRNA target sequence for SLC4A4 (NM_003759.1,468-486).
gccacattgtcccttcata

SEQ ID NO: 256982 - DNA, 19 bp, Homo sapiens
  siRNA target sequence for SLC4A4 (NM_003759.1,472-490).
cattgtcccttcatagttt

SEQ ID NO: 256983 - DNA, 19 bp, Homo sapiens
  siRNA target sequence for SLC4A4 (NM_003759.1,476-494).
gtcccttcatagtttattt

SEQ ID NO: 256984 - DNA, 19 bp, Homo sapiens
  siRNA target sequence for SLC4A4 (NM_003759.1,478-496).
cccttcatagtttatttga

SEQ ID NO: 256985 - DNA, 19 bp, Homo sapiens
  siRNA target sequence for SLC4A4 (NM_003759.1,576-594).
gttgaccatcagattgaga

SEQ ID NO: 256986 - DNA, 19 bp, Homo sapiens
  siRNA target sequence for SLC4A4 (NM_003759.1,600-618).
ctattgaaacctgaactta

SEQ ID NO: 256987 - DNA, 19 bp, Homo sapiens
  siRNA target sequence for SLC4A4 (NM_003759.1,620-638).
ggataaggtgacctatact

SEQ ID NO: 256988 - DNA, 19 bp, Homo sapiens
  siRNA target sequence for SLC4A4 (NM_003759.1,645-663).
cggaagcaccggcatcaaa

SEQ ID NO: 256989 - DNA, 19 bp, Homo sapiens
  siRNA target sequence for SLC4A4 (NM_003759.1,657-675).
catcaaaccaagaaatcca

SEQ ID NO: 256990 - DNA, 19 bp, Homo sapiens
  siRNA target sequence for SLC4A4 (NM_003759.1,713-731).
cagtgcaagtaggatgttt

SEQ ID NO: 256991 - DNA, 19 bp, Homo sapiens
  siRNA target sequence for SLC4A4 (NM_003759.1,717-735).
gcaagtaggatgtttacca

SEQ ID NO: 256992 - DNA, 19 bp, Homo sapiens
  siRNA target sequence for SLC4A4 (NM_003759.1,728-746).
gtttaccaaccctgataat

SEQ ID NO: 256993 - DNA, 19 bp, Homo sapiens
  siRNA target sequence for SLC4A4 (NM_003759.1,776-794).
gacttcctccagtctgaat

SEQ ID NO: 256994 - DNA, 19 bp, Homo sapiens
  siRNA target sequence for SLC4A4 (NM_003759.1,778-796).
cttcctccagtctgaatga

SEQ ID NO: 256995 - DNA, 19 bp, Homo sapiens
  siRNA target sequence for SLC4A4 (NM_003759.1,787-805).
gtctgaatgacatttctga

SEQ ID NO: 256996 - DNA, 19 bp, Homo sapiens
  siRNA target sequence for SLC4A4 (NM_003759.1,888-906).
gaggttgactttttggata

SEQ ID NO: 256997 - DNA, 19 bp, Homo sapiens
  siRNA target sequence for SLC4A4 (NM_003759.1,909-927).
cctttcattgcctttgtta

SEQ ID NO: 256998 - DNA, 19 bp, Homo sapiens
  siRNA target sequence for SLC4A4 (NM_003759.1,950-968).
gggtgccctgactgaagtt

SEQ ID NO: 256999 - DNA, 19 bp, Homo sapiens
  siRNA target sequence for SLC4A4 (NM_003759.1,976-994).
ccacaaggttcttgttcat

SEQ ID NO: 257000 - DNA, 19 bp, Homo sapiens
  siRNA target sequence for SLC4A4 (NM_003759.1,1073-1091).
gttccatgacattgcttat

SEQ ID NO: 257001 - DNA, 19 bp, Homo sapiens
  siRNA target sequence for SLC4A4 (NM_003759.1,1109-1127).
cgacctgattgctggtatt

SEQ ID NO: 257002 - DNA, 19 bp, Homo sapiens
  siRNA target sequence for SLC4A4 (NM_003759.1,1166-1184).
ggaatgggatccagcaatt

SEQ ID NO: 257003 - DNA, 19 bp, Homo sapiens
  siRNA target sequence for SLC4A4 (NM_003759.1,1167-1185).
gaatgggatccagcaatta

SEQ ID NO: 257004 - DNA, 19 bp, Homo sapiens
  siRNA target sequence for SLC4A4 (NM_003759.1,1171-1189).
gggatccagcaattaggat

SEQ ID NO: 257005 - DNA, 19 bp, Homo sapiens
  siRNA target sequence for SLC4A4 (NM_003759.1,1172-1190).
ggatccagcaattaggata

SEQ ID NO: 257006 - DNA, 19 bp, Homo sapiens
  siRNA target sequence for SLC4A4 (NM_003759.1,1235-1253).
gtactcaggtggagagaat

SEQ ID NO: 257007 - DNA, 19 bp, Homo sapiens
  siRNA target sequence for SLC4A4 (NM_003759.1,1243-1261).
gtggagagaatgttcagat

SEQ ID NO: 257008 - DNA, 19 bp, Homo sapiens
  siRNA target sequence for SLC4A4 (NM_003759.1,1309-1327).
gggattgtgaagaattgca

SEQ ID NO: 257009 - DNA, 19 bp, Homo sapiens
  siRNA target sequence for SLC4A4 (NM_003759.1,1339-1357).
ggttctgtggtggactaat

SEQ ID NO: 257010 - DNA, 19 bp, Homo sapiens
  siRNA target sequence for SLC4A4 (NM_003759.1,1345-1363).
gtggtggactaattaaaga

SEQ ID NO: 257011 - DNA, 19 bp, Homo sapiens
  siRNA target sequence for SLC4A4 (NM_003759.1,1347-1365).
ggtggactaattaaagaca

SEQ ID NO: 257012 - DNA, 19 bp, Homo sapiens
  siRNA target sequence for SLC4A4 (NM_003759.1,1348-1366).
gtggactaattaaagacat

SEQ ID NO: 257013 - DNA, 19 bp, Homo sapiens
  siRNA target sequence for SLC4A4 (NM_003759.1,1350-1368).
ggactaattaaagacataa

SEQ ID NO: 257014 - DNA, 19 bp, Homo sapiens
  siRNA target sequence for SLC4A4 (NM_003759.1,1370-1388).
gaggaaagcgccatttttt

SEQ ID NO: 257015 - DNA, 19 bp, Homo sapiens
  siRNA target sequence for SLC4A4 (NM_003759.1,1422-1440).
gctctttcggcaattctct

SEQ ID NO: 257016 - DNA, 19 bp, Homo sapiens
  siRNA target sequence for SLC4A4 (NM_003759.1,1429-1447).
cggcaattctcttcattta

SEQ ID NO: 257017 - DNA, 19 bp, Homo sapiens
  siRNA target sequence for SLC4A4 (NM_003759.1,1452-1470).
gcaactgtaactaatgcta

SEQ ID NO: 257018 - DNA, 19 bp, Homo sapiens
  siRNA target sequence for SLC4A4 (NM_003759.1,1573-1591).
ctggtcaaccactcactat

SEQ ID NO: 257019 - DNA, 19 bp, Homo sapiens
  siRNA target sequence for SLC4A4 (NM_003759.1,1576-1594).
gtcaaccactcactattct

SEQ ID NO: 257020 - DNA, 19 bp, Homo sapiens
  siRNA target sequence for SLC4A4 (NM_003759.1,1578-1596).
caaccactcactattctga

SEQ ID NO: 257021 - DNA, 19 bp, Homo sapiens
  siRNA target sequence for SLC4A4 (NM_003759.1,1603-1621).
ccggacctgtcctagtttt

SEQ ID NO: 257022 - DNA, 19 bp, Homo sapiens
  siRNA target sequence for SLC4A4 (NM_003759.1,1604-1622).
cggacctgtcctagttttt

SEQ ID NO: 257023 - DNA, 19 bp, Homo sapiens
  siRNA target sequence for SLC4A4 (NM_003759.1,1608-1626).
cctgtcctagtttttgaga

SEQ ID NO: 257024 - DNA, 19 bp, Homo sapiens
  siRNA target sequence for SLC4A4 (NM_003759.1,1617-1635).
gtttttgagaggcttctat

SEQ ID NO: 257025 - DNA, 19 bp, Homo sapiens
  siRNA target sequence for SLC4A4 (NM_003759.1,1645-1663).
gcaaggacaataattttga

SEQ ID NO: 257026 - DNA, 19 bp, Homo sapiens
  siRNA target sequence for SLC4A4 (NM_003759.1,1692-1710).
ctgtggtccgccttcctat

SEQ ID NO: 257027 - DNA, 19 bp, Homo sapiens
  siRNA target sequence for SLC4A4 (NM_003759.1,1700-1718).
cgccttcctatgtctcatt

SEQ ID NO: 257028 - DNA, 19 bp, Homo sapiens
  siRNA target sequence for SLC4A4 (NM_003759.1,1701-1719).
gccttcctatgtctcattt

SEQ ID NO: 257029 - DNA, 19 bp, Homo sapiens
  siRNA target sequence for SLC4A4 (NM_003759.1,1738-1756).
gcttcttggttcaatactt

SEQ ID NO: 257030 - DNA, 19 bp, Homo sapiens
  siRNA target sequence for SLC4A4 (NM_003759.1,1786-1804).
ctctgattagcttcatctt

SEQ ID NO: 257031 - DNA, 19 bp, Homo sapiens
  siRNA target sequence for SLC4A4 (NM_003759.1,1788-1806).
ctgattagcttcatcttta

SEQ ID NO: 257032 - DNA, 19 bp, Homo sapiens
  siRNA target sequence for SLC4A4 (NM_003759.1,1874-1892).
gggctacaacactctcttt

SEQ ID NO: 257033 - DNA, 19 bp, Homo sapiens
  siRNA target sequence for SLC4A4 (NM_003759.1,1911-1929).
cctgacccagctaatatct

SEQ ID NO: 257034 - DNA, 19 bp, Homo sapiens
  siRNA target sequence for SLC4A4 (NM_003759.1,1916-1934).
cccagctaatatctcaata

SEQ ID NO: 257035 - DNA, 19 bp, Homo sapiens
  siRNA target sequence for SLC4A4 (NM_003759.1,1917-1935).
ccagctaatatctcaatat

SEQ ID NO: 257036 - DNA, 19 bp, Homo sapiens
  siRNA target sequence for SLC4A4 (NM_003759.1,1946-1964).
cacactggccccagagtat

SEQ ID NO: 257037 - DNA, 19 bp, Homo sapiens
  siRNA target sequence for SLC4A4 (NM_003759.1,1957-1975).
cagagtatttgccaactat

SEQ ID NO: 257038 - DNA, 19 bp, Homo sapiens
  siRNA target sequence for SLC4A4 (NM_003759.1,1959-1977).
gagtatttgccaactatgt

SEQ ID NO: 257039 - DNA, 19 bp, Homo sapiens
  siRNA target sequence for SLC4A4 (NM_003759.1,1981-1999).
ctactgacatgtaccataa

SEQ ID NO: 257040 - DNA, 19 bp, Homo sapiens
  siRNA target sequence for SLC4A4 (NM_003759.1,2026-2044).
cgaagaaggagtgttcaaa

SEQ ID NO: 257041 - DNA, 19 bp, Homo sapiens
  siRNA target sequence for SLC4A4 (NM_003759.1,2061-2079).
gtcgggaacaactgtaatt

SEQ ID NO: 257042 - DNA, 19 bp, Homo sapiens
  siRNA target sequence for SLC4A4 (NM_003759.1,2063-2081).
cgggaacaactgtaatttt

SEQ ID NO: 257043 - DNA, 19 bp, Homo sapiens
  siRNA target sequence for SLC4A4 (NM_003759.1,2088-2106).
gatatcacactcatgtctt

SEQ ID NO: 257044 - DNA, 19 bp, Homo sapiens
  siRNA target sequence for SLC4A4 (NM_003759.1,2137-2155).
ccatggctctgaaaaaatt

SEQ ID NO: 257045 - DNA, 19 bp, Homo sapiens
  siRNA target sequence for SLC4A4 (NM_003759.1,2257-2275).
gcgtggacaccccaaaact

SEQ ID NO: 257046 - DNA, 19 bp, Homo sapiens
  siRNA target sequence for SLC4A4 (NM_003759.1,2258-2276).
cgtggacaccccaaaacta

SEQ ID NO: 257047 - DNA, 19 bp, Homo sapiens
  siRNA target sequence for SLC4A4 (NM_003759.1,2259-2277).
gtggacaccccaaaactaa

SEQ ID NO: 257048 - DNA, 19 bp, Homo sapiens
  siRNA target sequence for SLC4A4 (NM_003759.1,2368-2386).
ctgctatcccggctttgtt

SEQ ID NO: 257049 - DNA, 19 bp, Homo sapiens
  siRNA target sequence for SLC4A4 (NM_003759.1,2377-2395).
cggctttgttggtcactat

SEQ ID NO: 257050 - DNA, 19 bp, Homo sapiens
  siRNA target sequence for SLC4A4 (NM_003759.1,2378-2396).
ggctttgttggtcactata

SEQ ID NO: 257051 - DNA, 19 bp, Homo sapiens
  siRNA target sequence for SLC4A4 (NM_003759.1,2380-2398).
ctttgttggtcactatact

SEQ ID NO: 257052 - DNA, 19 bp, Homo sapiens
  siRNA target sequence for SLC4A4 (NM_003759.1,2388-2406).
gtcactatactgattttca

SEQ ID NO: 257053 - DNA, 19 bp, Homo sapiens
  siRNA target sequence for SLC4A4 (NM_003759.1,2470-2488).
ggtatcacttggatctctt

SEQ ID NO: 257054 - DNA, 19 bp, Homo sapiens
  siRNA target sequence for SLC4A4 (NM_003759.1,2471-2489).
gtatcacttggatctcttt

SEQ ID NO: 257055 - DNA, 19 bp, Homo sapiens
  siRNA target sequence for SLC4A4 (NM_003759.1,2496-2514).
gccatcctcatggttatat

SEQ ID NO: 257056 - DNA, 19 bp, Homo sapiens
  siRNA target sequence for SLC4A4 (NM_003759.1,2525-2543).
ggctcttccgtggtatgta

SEQ ID NO: 257057 - DNA, 19 bp, Homo sapiens
  siRNA target sequence for SLC4A4 (NM_003759.1,2565-2583).
gctcacatcgacagtttga

SEQ ID NO: 257058 - DNA, 19 bp, Homo sapiens
  siRNA target sequence for SLC4A4 (NM_003759.1,2566-2584).
ctcacatcgacagtttgaa

SEQ ID NO: 257059 - DNA, 19 bp, Homo sapiens
  siRNA target sequence for SLC4A4 (NM_003759.1,2753-2771).
gggagtagcatcccttaat

SEQ ID NO: 257060 - DNA, 19 bp, Homo sapiens
  siRNA target sequence for SLC4A4 (NM_003759.1,2863-2881).
gagtccacctgttcacttt

SEQ ID NO: 257061 - DNA, 19 bp, Homo sapiens
  siRNA target sequence for SLC4A4 (NM_003759.1,2907-2925).
ctttggatcctcaagtcaa

SEQ ID NO: 257062 - DNA, 19 bp, Homo sapiens
  siRNA target sequence for SLC4A4 (NM_003759.1,3120-3138).
gactgcccatactcagaaa

SEQ ID NO: 257063 - DNA, 19 bp, Homo sapiens
  siRNA target sequence for SLC4A4 (NM_003759.1,3125-3143).
cccatactcagaaaaagtt

SEQ ID NO: 257064 - DNA, 19 bp, Homo sapiens
  siRNA target sequence for SLC4A4 (NM_003759.1,3144-3162).
ccaagtattaaaattccaa

SEQ ID NO: 257065 - DNA, 19 bp, Homo sapiens
  siRNA target sequence for SLC4A4 (NM_003759.1,3173-3191).
ggaacagcaacctttccta

SEQ ID NO: 257066 - DNA, 19 bp, Homo sapiens
  siRNA target sequence for SLC4A4 (NM_003759.1,3174-3192).
gaacagcaacctttcctaa

SEQ ID NO: 257067 - DNA, 19 bp, Homo sapiens
  siRNA target sequence for SLC4A4 (NM_003759.1,3184-3202).
ctttcctaagcgatagcaa

SEQ ID NO: 257068 - DNA, 19 bp, Homo sapiens
  siRNA target sequence for SLC4A4 (NM_003759.1,3189-3207).
ctaagcgatagcaaacctt

SEQ ID NO: 257069 - DNA, 19 bp, Homo sapiens
  siRNA target sequence for SLC4A4 (NM_003759.1,3234-3252).
cttgaacgccacacatcat

SEQ ID NO: 257070 - DNA, 19 bp, Homo sapiens
  siRNA target sequence for SLC4A5 (NM_021196.2,59-77).
ggagatttccggatcagaa

SEQ ID NO: 257071 - DNA, 19 bp, Homo sapiens
  siRNA target sequence for SLC4A5 (NM_021196.2,60-78).
gagatttccggatcagaaa

SEQ ID NO: 257072 - DNA, 19 bp, Homo sapiens
  siRNA target sequence for SLC4A5 (NM_021196.2,241-259).
gacagcagcatggatctta

SEQ ID NO: 257073 - DNA, 19 bp, Homo sapiens
  siRNA target sequence for SLC4A5 (NM_021196.2,337-355).
ctctttacagagatggata

SEQ ID NO: 257074 - DNA, 19 bp, Homo sapiens
  siRNA target sequence for SLC4A5 (NM_021196.2,454-472).
ccccacgtgtccacactat

SEQ ID NO: 257075 - DNA, 19 bp, Homo sapiens
  siRNA target sequence for SLC4A5 (NM_021196.2,515-533).
ggacggtgctgctggattt

SEQ ID NO: 257076 - DNA, 19 bp, Homo sapiens
  siRNA target sequence for SLC4A5 (NM_021196.2,546-564).
cttaccacagatcatagat

SEQ ID NO: 257077 - DNA, 19 bp, Homo sapiens
  siRNA target sequence for SLC4A5 (NM_021196.2,675-693).
ccgctccttagctgacatt

SEQ ID NO: 257078 - DNA, 19 bp, Homo sapiens
  siRNA target sequence for SLC4A5 (NM_021196.2,819-837).
ccagagcagaagcatgaat

SEQ ID NO: 257079 - DNA, 19 bp, Homo sapiens
  siRNA target sequence for SLC4A5 (NM_021196.2,830-848).
gcatgaatgacatttctct

SEQ ID NO: 257080 - DNA, 19 bp, Homo sapiens
  siRNA target sequence for SLC4A5 (NM_021196.2,1011-1029).
gcctgtccccaccagattt

SEQ ID NO: 257081 - DNA, 19 bp, Homo sapiens
  siRNA target sequence for SLC4A5 (NM_021196.2,1097-1115).
ccctcatggtagatgatct

SEQ ID NO: 257082 - DNA, 19 bp, Homo sapiens
  siRNA target sequence for SLC4A5 (NM_021196.2,1139-1157).
cccgcaatcgggaagatct

SEQ ID NO: 257083 - DNA, 19 bp, Homo sapiens
  siRNA target sequence for SLC4A5 (NM_021196.2,1142-1160).
gcaatcgggaagatctgat

SEQ ID NO: 257084 - DNA, 19 bp, Homo sapiens
  siRNA target sequence for SLC4A5 (NM_021196.2,1259-1277).
ctgacaagaggaaatctgt

SEQ ID NO: 257085 - DNA, 19 bp, Homo sapiens
  siRNA target sequence for SLC4A5 (NM_021196.2,1487-1505).
gtggcctgtgtctggatat

SEQ ID NO: 257086 - DNA, 19 bp, Homo sapiens
  siRNA target sequence for SLC4A5 (NM_021196.2,1490-1508).
gcctgtgtctggatatcaa

SEQ ID NO: 257087 - DNA, 19 bp, Homo sapiens
  siRNA target sequence for SLC4A5 (NM_021196.2,1524-1542).
gttcccaagtgacttctat

SEQ ID NO: 257088 - DNA, 19 bp, Homo sapiens
  siRNA target sequence for SLC4A5 (NM_021196.2,1630-1648).
ggggatgccaccgacaatt

SEQ ID NO: 257089 - DNA, 19 bp, Homo sapiens
  siRNA target sequence for SLC4A5 (NM_021196.2,1631-1649).
gggatgccaccgacaatta

SEQ ID NO: 257090 - DNA, 19 bp, Homo sapiens
  siRNA target sequence for SLC4A5 (NM_021196.2,1632-1650).
ggatgccaccgacaattat

SEQ ID NO: 257091 - DNA, 19 bp, Homo sapiens
  siRNA target sequence for SLC4A5 (NM_021196.2,1841-1859).
ctgtccagtgccttatcct

SEQ ID NO: 257092 - DNA, 19 bp, Homo sapiens
  siRNA target sequence for SLC4A5 (NM_021196.2,1875-1893).
cagctttatcatcaaatat

SEQ ID NO: 257093 - DNA, 19 bp, Homo sapiens
  siRNA target sequence for SLC4A5 (NM_021196.2,1915-1933).
ggcttctccacccttatca

SEQ ID NO: 257094 - DNA, 19 bp, Homo sapiens
  siRNA target sequence for SLC4A5 (NM_021196.2,1980-1998).
caagtactaccctatcaat

SEQ ID NO: 257095 - DNA, 19 bp, Homo sapiens
  siRNA target sequence for SLC4A5 (NM_021196.2,1991-2009).
ctatcaatatggacttcaa

SEQ ID NO: 257096 - DNA, 19 bp, Homo sapiens
  siRNA target sequence for SLC4A5 (NM_021196.2,2050-2068).
cctgacacagtgaatacaa

SEQ ID NO: 257097 - DNA, 19 bp, Homo sapiens
  siRNA target sequence for SLC4A5 (NM_021196.2,2061-2079).
gaatacaaccgtgttcaat

SEQ ID NO: 257098 - DNA, 19 bp, Homo sapiens
  siRNA target sequence for SLC4A5 (NM_021196.2,2114-2132).
ctctgtacaacctccttaa

SEQ ID NO: 257099 - DNA, 19 bp, Homo sapiens
  siRNA target sequence for SLC4A5 (NM_021196.2,2191-2209).
cgcctgcttgggaattcct

SEQ ID NO: 257100 - DNA, 19 bp, Homo sapiens
  siRNA target sequence for SLC4A5 (NM_021196.2,2200-2218).
gggaattcctgcaagttta

SEQ ID NO: 257101 - DNA, 19 bp, Homo sapiens
  siRNA target sequence for SLC4A5 (NM_021196.2,2201-2219).
ggaattcctgcaagtttat

SEQ ID NO: 257102 - DNA, 19 bp, Homo sapiens
  siRNA target sequence for SLC4A5 (NM_021196.2,2329-2347).
ctggtggctgacttttcca

SEQ ID NO: 257103 - DNA, 19 bp, Homo sapiens
  siRNA target sequence for SLC4A5 (NM_021196.2,2364-2382).
gatgttctgtggaatcgat

SEQ ID NO: 257104 - DNA, 19 bp, Homo sapiens
  siRNA target sequence for SLC4A5 (NM_021196.2,2383-2401).
gcctgttttggcctagaaa

SEQ ID NO: 257105 - DNA, 19 bp, Homo sapiens
  siRNA target sequence for SLC4A5 (NM_021196.2,2575-2593).
cggaaggagaacaaactga

SEQ ID NO: 257106 - DNA, 19 bp, Homo sapiens
  siRNA target sequence for SLC4A5 (NM_021196.2,2789-2807).
ccggcatcatcgtcttcat

SEQ ID NO: 257107 - DNA, 19 bp, Homo sapiens
  siRNA target sequence for SLC4A5 (NM_021196.2,2832-2850).
ggctcccatcctaaagtgt

SEQ ID NO: 257108 - DNA, 19 bp, Homo sapiens
  siRNA target sequence for SLC4A5 (NM_021196.2,2833-2851).
gctcccatcctaaagtgta

SEQ ID NO: 257109 - DNA, 19 bp, Homo sapiens
  siRNA target sequence for SLC4A5 (NM_021196.2,2921-2939).
ggaccggagggtcagaatt

SEQ ID NO: 257110 - DNA, 19 bp, Homo sapiens
  siRNA target sequence for SLC4A5 (NM_021196.2,2924-2942).
ccggagggtcagaattcaa

SEQ ID NO: 257111 - DNA, 19 bp, Homo sapiens
  siRNA target sequence for SLC4A5 (NM_021196.2,2925-2943).
cggagggtcagaattcaaa

SEQ ID NO: 257112 - DNA, 19 bp, Homo sapiens
  siRNA target sequence for SLC4A5 (NM_021196.2,2927-2945).
gagggtcagaattcaaaat

SEQ ID NO: 257113 - DNA, 19 bp, Homo sapiens
  siRNA target sequence for SLC4A5 (NM_021196.2,3091-3109).
ctctggatcctcaaatcca

SEQ ID NO: 257114 - DNA, 19 bp, Homo sapiens
  siRNA target sequence for SLC4A5 (NM_021196.2,3305-3323).
ctcctccctcggttataaa

SEQ ID NO: 257115 - DNA, 19 bp, Homo sapiens
  siRNA target sequence for SLC4A5 (NM_021196.2,3307-3325).
cctccctcggttataaaga

SEQ ID NO: 257116 - DNA, 19 bp, Homo sapiens
  siRNA target sequence for SLC4A5 (NM_021196.2,3308-3326).
ctccctcggttataaagat

SEQ ID NO: 257117 - DNA, 19 bp, Homo sapiens
  siRNA target sequence for SLC4A7 (NM_003615.2,79-97).
gatttcgtctggagaagaa

SEQ ID NO: 257118 - DNA, 19 bp, Homo sapiens
  siRNA target sequence for SLC4A7 (NM_003615.2,210-228).
gttcacgtcccgtttagta

SEQ ID NO: 257119 - DNA, 19 bp, Homo sapiens
  siRNA target sequence for SLC4A7 (NM_003615.2,216-234).
gtcccgtttagtaaagaga

SEQ ID NO: 257120 - DNA, 19 bp, Homo sapiens
  siRNA target sequence for SLC4A7 (NM_003615.2,250-268).
ggcatcgcggacacaaaca

SEQ ID NO: 257121 - DNA, 19 bp, Homo sapiens
  siRNA target sequence for SLC4A7 (NM_003615.2,318-336).
gaatctccttcttatgata

SEQ ID NO: 257122 - DNA, 19 bp, Homo sapiens
  siRNA target sequence for SLC4A7 (NM_003615.2,343-361).
cccagagagttcagtttat

SEQ ID NO: 257123 - DNA, 19 bp, Homo sapiens
  siRNA target sequence for SLC4A7 (NM_003615.2,347-365).
gagagttcagtttatcctt

SEQ ID NO: 257124 - DNA, 19 bp, Homo sapiens
  siRNA target sequence for SLC4A7 (NM_003615.2,506-524).
cggtgaccgatggagtaaa

SEQ ID NO: 257125 - DNA, 19 bp, Homo sapiens
  siRNA target sequence for SLC4A7 (NM_003615.2,510-528).
gaccgatggagtaaacctt

SEQ ID NO: 257126 - DNA, 19 bp, Homo sapiens
  siRNA target sequence for SLC4A7 (NM_003615.2,512-530).
ccgatggagtaaaccttat

SEQ ID NO: 257127 - DNA, 19 bp, Homo sapiens
  siRNA target sequence for SLC4A7 (NM_003615.2,514-532).
gatggagtaaaccttatgt

SEQ ID NO: 257128 - DNA, 19 bp, Homo sapiens
  siRNA target sequence for SLC4A7 (NM_003615.2,548-566).
gcacagtctttttgaacta

SEQ ID NO: 257129 - DNA, 19 bp, Homo sapiens
  siRNA target sequence for SLC4A7 (NM_003615.2,549-567).
cacagtctttttgaactaa

SEQ ID NO: 257130 - DNA, 19 bp, Homo sapiens
  siRNA target sequence for SLC4A7 (NM_003615.2,605-623).
gagagcaagcactctagat

SEQ ID NO: 257131 - DNA, 19 bp, Homo sapiens
  siRNA target sequence for SLC4A7 (NM_003615.2,638-656).
ggtattagacaacatgata

SEQ ID NO: 257132 - DNA, 19 bp, Homo sapiens
  siRNA target sequence for SLC4A7 (NM_003615.2,653-671).
gatagcttctggccaatta

SEQ ID NO: 257133 - DNA, 19 bp, Homo sapiens
  siRNA target sequence for SLC4A7 (NM_003615.2,674-692).
cgagtccatacgagagaat

SEQ ID NO: 257134 - DNA, 19 bp, Homo sapiens
  siRNA target sequence for SLC4A7 (NM_003615.2,726-744).
cagaatgagaaaagattca

SEQ ID NO: 257135 - DNA, 19 bp, Homo sapiens
  siRNA target sequence for SLC4A7 (NM_003615.2,746-764).
cagtcggattcctcttgtt

SEQ ID NO: 257136 - DNA, 19 bp, Homo sapiens
  siRNA target sequence for SLC4A7 (NM_003615.2,887-905).
gagaggagaatcaccttta

SEQ ID NO: 257137 - DNA, 19 bp, Homo sapiens
  siRNA target sequence for SLC4A7 (NM_003615.2,892-910).
gagaatcacctttatctct

SEQ ID NO: 257138 - DNA, 19 bp, Homo sapiens
  siRNA target sequence for SLC4A7 (NM_003615.2,978-996).
gtacccacccctcaaaaca

SEQ ID NO: 257139 - DNA, 19 bp, Homo sapiens
  siRNA target sequence for SLC4A7 (NM_003615.2,1055-1073).
gcgtcaggccccagaacta

SEQ ID NO: 257140 - DNA, 19 bp, Homo sapiens
  siRNA target sequence for SLC4A7 (NM_003615.2,1057-1075).
gtcaggccccagaactact

SEQ ID NO: 257141 - DNA, 19 bp, Homo sapiens
  siRNA target sequence for SLC4A7 (NM_003615.2,1081-1099).
cacctgccagtgatgatat

SEQ ID NO: 257142 - DNA, 19 bp, Homo sapiens
  siRNA target sequence for SLC4A7 (NM_003615.2,1182-1200).
gacttaactccaggtattt

SEQ ID NO: 257143 - DNA, 19 bp, Homo sapiens
  siRNA target sequence for SLC4A7 (NM_003615.2,1225-1243).
gaaacttggacaatagtaa

SEQ ID NO: 257144 - DNA, 19 bp, Homo sapiens
  siRNA target sequence for SLC4A7 (NM_003615.2,1229-1247).
cttggacaatagtaaaagt

SEQ ID NO: 257145 - DNA, 19 bp, Homo sapiens
  siRNA target sequence for SLC4A7 (NM_003615.2,1372-1390).
gcgaagtagactttttgga

SEQ ID NO: 257146 - DNA, 19 bp, Homo sapiens
  siRNA target sequence for SLC4A7 (NM_003615.2,1373-1391).
cgaagtagactttttggaa

SEQ ID NO: 257147 - DNA, 19 bp, Homo sapiens
  siRNA target sequence for SLC4A7 (NM_003615.2,1455-1473).
cctgttccaaccaggtttt

SEQ ID NO: 257148 - DNA, 19 bp, Homo sapiens
  siRNA target sequence for SLC4A7 (NM_003615.2,1458-1476).
gttccaaccaggtttttgt

SEQ ID NO: 257149 - DNA, 19 bp, Homo sapiens
  siRNA target sequence for SLC4A7 (NM_003615.2,1562-1580).
ccatgatgtagcttataaa

SEQ ID NO: 257150 - DNA, 19 bp, Homo sapiens
  siRNA target sequence for SLC4A7 (NM_003615.2,1598-1616).
cctcttatctggaattgat

SEQ ID NO: 257151 - DNA, 19 bp, Homo sapiens
  siRNA target sequence for SLC4A7 (NM_003615.2,1601-1619).
cttatctggaattgatgaa

SEQ ID NO: 257152 - DNA, 19 bp, Homo sapiens
  siRNA target sequence for SLC4A7 (NM_003615.2,1617-1635).
gaatttttagatcaagtaa

SEQ ID NO: 257153 - DNA, 19 bp, Homo sapiens
  siRNA target sequence for SLC4A7 (NM_003615.2,1671-1689).
cgcatagaaccaccaaaaa

SEQ ID NO: 257154 - DNA, 19 bp, Homo sapiens
  siRNA target sequence for SLC4A7 (NM_003615.2,1719-1737).
cctgtgtttcacaatggat

SEQ ID NO: 257155 - DNA, 19 bp, Homo sapiens
  siRNA target sequence for SLC4A7 (NM_003615.2,1822-1840).
gtttgatacttgacatcaa

SEQ ID NO: 257156 - DNA, 19 bp, Homo sapiens
  siRNA target sequence for SLC4A7 (NM_003615.2,1898-1916).
ggcctcgattcttttccta

SEQ ID NO: 257157 - DNA, 19 bp, Homo sapiens
  siRNA target sequence for SLC4A7 (NM_003615.2,1899-1917).
gcctcgattcttttcctat

SEQ ID NO: 257158 - DNA, 19 bp, Homo sapiens
  siRNA target sequence for SLC4A7 (NM_003615.2,1900-1918).
cctcgattcttttcctata

SEQ ID NO: 257159 - DNA, 19 bp, Homo sapiens
  siRNA target sequence for SLC4A7 (NM_003615.2,1904-1922).
gattcttttcctatactgt

SEQ ID NO: 257160 - DNA, 19 bp, Homo sapiens
  siRNA target sequence for SLC4A7 (NM_003615.2,1987-2005).
gtgcaatagagtctctttt

SEQ ID NO: 257161 - DNA, 19 bp, Homo sapiens
  siRNA target sequence for SLC4A7 (NM_003615.2,1999-2017).
ctctttttggagcatcatt

SEQ ID NO: 257162 - DNA, 19 bp, Homo sapiens
  siRNA target sequence for SLC4A7 (NM_003615.2,2043-2061).
gctgggcaacctctaacaa

SEQ ID NO: 257163 - DNA, 19 bp, Homo sapiens
  siRNA target sequence for SLC4A7 (NM_003615.2,2069-2087).
gagcacaggtccagttcta

SEQ ID NO: 257164 - DNA, 19 bp, Homo sapiens
  siRNA target sequence for SLC4A7 (NM_003615.2,2071-2089).
gcacaggtccagttctagt

SEQ ID NO: 257165 - DNA, 19 bp, Homo sapiens
  siRNA target sequence for SLC4A7 (NM_003615.2,2114-2132).
ctgcagagattatcaactt

SEQ ID NO: 257166 - DNA, 19 bp, Homo sapiens
  siRNA target sequence for SLC4A7 (NM_003615.2,2219-2237).
gtgttatattactcgattt

SEQ ID NO: 257167 - DNA, 19 bp, Homo sapiens
  siRNA target sequence for SLC4A7 (NM_003615.2,2354-2372).
gaccagctactcatgtgta

SEQ ID NO: 257168 - DNA, 19 bp, Homo sapiens
  siRNA target sequence for SLC4A7 (NM_003615.2,2514-2532).
ggtcatcatggaccttata

SEQ ID NO: 257169 - DNA, 19 bp, Homo sapiens
  siRNA target sequence for SLC4A7 (NM_003615.2,2633-2651).
ggtgcgatcgacaatcagt

SEQ ID NO: 257170 - DNA, 19 bp, Homo sapiens
  siRNA target sequence for SLC4A7 (NM_003615.2,2637-2655).
cgatcgacaatcagtgatt

SEQ ID NO: 257171 - DNA, 19 bp, Homo sapiens
  siRNA target sequence for SLC4A7 (NM_003615.2,2638-2656).
gatcgacaatcagtgattt

SEQ ID NO: 257172 - DNA, 19 bp, Homo sapiens
  siRNA target sequence for SLC4A7 (NM_003615.2,2642-2660).
gacaatcagtgattttgct

SEQ ID NO: 257173 - DNA, 19 bp, Homo sapiens
  siRNA target sequence for SLC4A7 (NM_003615.2,2713-2731).
catctcctaaacttcatgt

SEQ ID NO: 257174 - DNA, 19 bp, Homo sapiens
  siRNA target sequence for SLC4A7 (NM_003615.2,2780-2798).
cccactgggagataatcct

SEQ ID NO: 257175 - DNA, 19 bp, Homo sapiens
  siRNA target sequence for SLC4A7 (NM_003615.2,2781-2799).
ccactgggagataatcctt

SEQ ID NO: 257176 - DNA, 19 bp, Homo sapiens
  siRNA target sequence for SLC4A7 (NM_003615.2,2796-2814).
ccttggtggaccttattaa

SEQ ID NO: 257177 - DNA, 19 bp, Homo sapiens
  siRNA target sequence for SLC4A7 (NM_003615.2,2801-2819).
gtggaccttattaatagct

SEQ ID NO: 257178 - DNA, 19 bp, Homo sapiens
  siRNA target sequence for SLC4A7 (NM_003615.2,2807-2825).
cttattaatagctgctatt

SEQ ID NO: 257179 - DNA, 19 bp, Homo sapiens
  siRNA target sequence for SLC4A7 (NM_003615.2,2920-2938).
gctatcaccttgatttgct

SEQ ID NO: 257180 - DNA, 19 bp, Homo sapiens
  siRNA target sequence for SLC4A7 (NM_003615.2,2937-2955).
ctcatggttggcgttatgt

SEQ ID NO: 257181 - DNA, 19 bp, Homo sapiens
  siRNA target sequence for SLC4A7 (NM_003615.2,3016-3034).
gtcatgtcaacagcttaaa

SEQ ID NO: 257182 - DNA, 19 bp, Homo sapiens
  siRNA target sequence for SLC4A7 (NM_003615.2,3071-3089).
caagtttttgggaattcgt

SEQ ID NO: 257183 - DNA, 19 bp, Homo sapiens
  siRNA target sequence for SLC4A7 (NM_003615.2,3096-3114).
cgggttacagggctaatga

SEQ ID NO: 257184 - DNA, 19 bp, Homo sapiens
  siRNA target sequence for SLC4A7 (NM_003615.2,3146-3164).
gacttcagtcctaaagttt

SEQ ID NO: 257185 - DNA, 19 bp, Homo sapiens
  siRNA target sequence for SLC4A7 (NM_003615.2,3203-3221).
gggagtttcctcattaaaa

SEQ ID NO: 257186 - DNA, 19 bp, Homo sapiens
  siRNA target sequence for SLC4A7 (NM_003615.2,3228-3246).
cagttatttgaccgtataa

SEQ ID NO: 257187 - DNA, 19 bp, Homo sapiens
  siRNA target sequence for SLC4A7 (NM_003615.2,3230-3248).
gttatttgaccgtataaaa

SEQ ID NO: 257188 - DNA, 19 bp, Homo sapiens
  siRNA target sequence for SLC4A7 (NM_003615.2,3269-3287).
gcatcagcctgatttgata

SEQ ID NO: 257189 - DNA, 19 bp, Homo sapiens
  siRNA target sequence for SLC4A7 (NM_003615.2,3305-3323).
gctctggaaggtccatatt

SEQ ID NO: 257190 - DNA, 19 bp, Homo sapiens
  siRNA target sequence for SLC4A7 (NM_003615.2,3311-3329).
gaaggtccatattttcaca

SEQ ID NO: 257191 - DNA, 19 bp, Homo sapiens
  siRNA target sequence for SLC4A7 (NM_003615.2,3398-3416).
catgatggttcttgcatta

SEQ ID NO: 257192 - DNA, 19 bp, Homo sapiens
  siRNA target sequence for SLC4A7 (NM_003615.2,3466-3484).
gttggcttgatgatcttat

SEQ ID NO: 257193 - DNA, 19 bp, Homo sapiens
  siRNA target sequence for SLC4A7 (NM_003615.2,3541-3559).
ctgaacggatgcttcaaga

SEQ ID NO: 257194 - DNA, 19 bp, Homo sapiens
  siRNA target sequence for SLC4A7 (NM_003615.2,3591-3609).
gggggaagtctcttgcaaa

SEQ ID NO: 257195 - DNA, 19 bp, Homo sapiens
  siRNA target sequence for SLC4A7 (NM_003615.2,3613-3631).
cagtcaaggccctaaaata

SEQ ID NO: 257196 - DNA, 19 bp, Homo sapiens
  siRNA target sequence for SLC4A7 (NM_003615.2,3615-3633).
gtcaaggccctaaaatata

SEQ ID NO: 257197 - DNA, 19 bp, Homo sapiens
  siRNA target sequence for SLC4A7 (NM_003615.2,3617-3635).
caaggccctaaaatatagt

SEQ ID NO: 257198 - DNA, 19 bp, Homo sapiens
  siRNA target sequence for SLC4A7 (NM_003615.2,3693-3711).
gtggatgctgaaacttcat

SEQ ID NO: 257199 - DNA, 19 bp, Homo sapiens
  siRNA target sequence for SLC4A7 (NM_003615.2,3695-3713).
ggatgctgaaacttcatta

SEQ ID NO: 257200 - DNA, 19 bp, Homo sapiens
  siRNA target sequence for SLC4A7 (NM_003615.2,3696-3714).
gatgctgaaacttcattat

SEQ ID NO: 257201 - DNA, 19 bp, Homo sapiens
  siRNA target sequence for SLC12A4 (NM_005072.3,236-254).
ccagaggaattgactacta

SEQ ID NO: 257202 - DNA, 19 bp, Homo sapiens
  siRNA target sequence for SLC12A4 (NM_005072.3,288-306).
ggacatccgcccaaaggta

SEQ ID NO: 257203 - DNA, 19 bp, Homo sapiens
  siRNA target sequence for SLC12A4 (NM_005072.3,289-307).
gacatccgcccaaaggtat

SEQ ID NO: 257204 - DNA, 19 bp, Homo sapiens
  siRNA target sequence for SLC12A4 (NM_005072.3,613-631).
gctgggggctcctatttca

SEQ ID NO: 257205 - DNA, 19 bp, Homo sapiens
  siRNA target sequence for SLC12A4 (NM_005072.3,614-632).
ctgggggctcctatttcat

SEQ ID NO: 257206 - DNA, 19 bp, Homo sapiens
  siRNA target sequence for SLC12A4 (NM_005072.3,619-637).
ggctcctatttcatgatct

SEQ ID NO: 257207 - DNA, 19 bp, Homo sapiens
  siRNA target sequence for SLC12A4 (NM_005072.3,641-659).
gttcactggggccagaatt

SEQ ID NO: 257208 - DNA, 19 bp, Homo sapiens
  siRNA target sequence for SLC12A4 (NM_005072.3,681-699).
cttctacctgggaacaaca

SEQ ID NO: 257209 - DNA, 19 bp, Homo sapiens
  siRNA target sequence for SLC12A4 (NM_005072.3,756-774).
cccaccagctgccattttt

SEQ ID NO: 257210 - DNA, 19 bp, Homo sapiens
  siRNA target sequence for SLC12A4 (NM_005072.3,797-815).
cgtcgaatgccactttgaa

SEQ ID NO: 257211 - DNA, 19 bp, Homo sapiens
  siRNA target sequence for SLC12A4 (NM_005072.3,949-967).
gggggcataaagtctatat

SEQ ID NO: 257212 - DNA, 19 bp, Homo sapiens
  siRNA target sequence for SLC12A4 (NM_005072.3,950-968).
ggggcataaagtctatatt

SEQ ID NO: 257213 - DNA, 19 bp, Homo sapiens
  siRNA target sequence for SLC12A4 (NM_005072.3,953-971).
gcataaagtctatatttga

SEQ ID NO: 257214 - DNA, 19 bp, Homo sapiens
  siRNA target sequence for SLC12A4 (NM_005072.3,977-995).
ccgtgtttccggtatgcat

SEQ ID NO: 257215 - DNA, 19 bp, Homo sapiens
  siRNA target sequence for SLC12A4 (NM_005072.3,1076-1094).
cccagctatggagtttctt

SEQ ID NO: 257216 - DNA, 19 bp, Homo sapiens
  siRNA target sequence for SLC12A4 (NM_005072.3,1190-1208).
gtgtgctccaggaaaacct

SEQ ID NO: 257217 - DNA, 19 bp, Homo sapiens
  siRNA target sequence for SLC12A4 (NM_005072.3,1403-1421).
gtgacgcccagaagtctat

SEQ ID NO: 257218 - DNA, 19 bp, Homo sapiens
  siRNA target sequence for SLC12A4 (NM_005072.3,1438-1456).
ctggccatcattacaactt

SEQ ID NO: 257219 - DNA, 19 bp, Homo sapiens
  siRNA target sequence for SLC12A4 (NM_005072.3,1451-1469).
caacttccctcgtgtactt

SEQ ID NO: 257220 - DNA, 19 bp, Homo sapiens
  siRNA target sequence for SLC12A4 (NM_005072.3,1509-1527).
ggttctccgggacaagtat

SEQ ID NO: 257221 - DNA, 19 bp, Homo sapiens
  siRNA target sequence for SLC12A4 (NM_005072.3,1897-1915).
cggttcaagtactatcact

SEQ ID NO: 257222 - DNA, 19 bp, Homo sapiens
  siRNA target sequence for SLC12A4 (NM_005072.3,2990-3008).
cagtgggggctgacaagat

SEQ ID NO: 257223 - DNA, 19 bp, Homo sapiens
  siRNA target sequence for SLC12A4 (NM_005072.3,3020-3038).
ggaccagggacaagtacat

SEQ ID NO: 257224 - DNA, 19 bp, Homo sapiens
  siRNA target sequence for SLC12A4 (NM_005072.3,3079-3097).
cgggagctggtgcacatta

SEQ ID NO: 257225 - DNA, 19 bp, Homo sapiens
  siRNA target sequence for SLC12A4 (NM_005072.3,3178-3196).
cgcctggttctcctaaaca

SEQ ID NO: 257226 - DNA, 19 bp, Homo sapiens
  siRNA target sequence for SLC12A4 (NM_005072.3,3179-3197).
gcctggttctcctaaacat

SEQ ID NO: 257227 - DNA, 19 bp, Homo sapiens
  siRNA target sequence for SLC13A1 (NM_022444.3,50-68).
gtttatcgccgatttctct

SEQ ID NO: 257228 - DNA, 19 bp, Homo sapiens
  siRNA target sequence for SLC13A1 (NM_022444.3,135-153).
gtgcctacacactctttgt

SEQ ID NO: 257229 - DNA, 19 bp, Homo sapiens
  siRNA target sequence for SLC13A1 (NM_022444.3,148-166).
ctttgtggtcgccacattt

SEQ ID NO: 257230 - DNA, 19 bp, Homo sapiens
  siRNA target sequence for SLC13A1 (NM_022444.3,190-208).
gtcggtaacagctttgcta

SEQ ID NO: 257231 - DNA, 19 bp, Homo sapiens
  siRNA target sequence for SLC13A1 (NM_022444.3,205-223).
gctacctagtttaatgtta

SEQ ID NO: 257232 - DNA, 19 bp, Homo sapiens
  siRNA target sequence for SLC13A1 (NM_022444.3,233-251).
gggatcatgccttctaaga

SEQ ID NO: 257233 - DNA, 19 bp, Homo sapiens
  siRNA target sequence for SLC13A1 (NM_022444.3,234-252).
ggatcatgccttctaagaa

SEQ ID NO: 257234 - DNA, 19 bp, Homo sapiens
  siRNA target sequence for SLC13A1 (NM_022444.3,254-272).
gtggcatctgcttatttca

SEQ ID NO: 257235 - DNA, 19 bp, Homo sapiens
  siRNA target sequence for SLC13A1 (NM_022444.3,261-279).
ctgcttatttcaaggattt

SEQ ID NO: 257236 - DNA, 19 bp, Homo sapiens
  siRNA target sequence for SLC13A1 (NM_022444.3,264-282).
cttatttcaaggattttca

SEQ ID NO: 257237 - DNA, 19 bp, Homo sapiens
  siRNA target sequence for SLC13A1 (NM_022444.3,304-322).
ctgtttagcaacatccata

SEQ ID NO: 257238 - DNA, 19 bp, Homo sapiens
  siRNA target sequence for SLC13A1 (NM_022444.3,367-385).
gatggttggtgtaaatcct

SEQ ID NO: 257239 - DNA, 19 bp, Homo sapiens
  siRNA target sequence for SLC13A1 (NM_022444.3,555-573).
ccaaccacggactagaaat

SEQ ID NO: 257240 - DNA, 19 bp, Homo sapiens
  siRNA target sequence for SLC13A1 (NM_022444.3,556-574).
caaccacggactagaaatt

SEQ ID NO: 257241 - DNA, 19 bp, Homo sapiens
  siRNA target sequence for SLC13A1 (NM_022444.3,559-577).
ccacggactagaaattgat

SEQ ID NO: 257242 - DNA, 19 bp, Homo sapiens
  siRNA target sequence for SLC13A1 (NM_022444.3,562-580).
cggactagaaattgatgaa

SEQ ID NO: 257243 - DNA, 19 bp, Homo sapiens
  siRNA target sequence for SLC13A1 (NM_022444.3,632-650).
ccaggatacaataatgata

SEQ ID NO: 257244 - DNA, 19 bp, Homo sapiens
  siRNA target sequence for SLC13A1 (NM_022444.3,647-665).
gatacagggaaaatttcaa

SEQ ID NO: 257245 - DNA, 19 bp, Homo sapiens
  siRNA target sequence for SLC13A1 (NM_022444.3,694-712).
catgagaaccaaatatcga

SEQ ID NO: 257246 - DNA, 19 bp, Homo sapiens
  siRNA target sequence for SLC13A1 (NM_022444.3,702-720).
ccaaatatcgaacaaagaa

SEQ ID NO: 257247 - DNA, 19 bp, Homo sapiens
  siRNA target sequence for SLC13A1 (NM_022444.3,721-739).
gggccacgtgacacgtaaa

SEQ ID NO: 257248 - DNA, 19 bp, Homo sapiens
  siRNA target sequence for SLC13A1 (NM_022444.3,723-741).
gccacgtgacacgtaaact

SEQ ID NO: 257249 - DNA, 19 bp, Homo sapiens
  siRNA target sequence for SLC13A1 (NM_022444.3,725-743).
cacgtgacacgtaaactta

SEQ ID NO: 257250 - DNA, 19 bp, Homo sapiens
  siRNA target sequence for SLC13A1 (NM_022444.3,734-752).
cgtaaacttacgtgtttgt

SEQ ID NO: 257251 - DNA, 19 bp, Homo sapiens
  siRNA target sequence for SLC13A1 (NM_022444.3,797-815).
ggtacctccaccaacttga

SEQ ID NO: 257252 - DNA, 19 bp, Homo sapiens
  siRNA target sequence for SLC13A1 (NM_022444.3,798-816).
gtacctccaccaacttgat

SEQ ID NO: 257253 - DNA, 19 bp, Homo sapiens
  siRNA target sequence for SLC13A1 (NM_022444.3,850-868).
ctgtcgttgcctcaacttt

SEQ ID NO: 257254 - DNA, 19 bp, Homo sapiens
  siRNA target sequence for SLC13A1 (NM_022444.3,854-872).
cgttgcctcaactttggat

SEQ ID NO: 257255 - DNA, 19 bp, Homo sapiens
  siRNA target sequence for SLC13A1 (NM_022444.3,862-880).
caactttggatcatggttt

SEQ ID NO: 257256 - DNA, 19 bp, Homo sapiens
  siRNA target sequence for SLC13A1 (NM_022444.3,869-887).
ggatcatggtttacgtttt

SEQ ID NO: 257257 - DNA, 19 bp, Homo sapiens
  siRNA target sequence for SLC13A1 (NM_022444.3,897-915).
ctgcccttatcattctact

SEQ ID NO: 257258 - DNA, 19 bp, Homo sapiens
  siRNA target sequence for SLC13A1 (NM_022444.3,939-957).
ggcttttcctaggattcaa

SEQ ID NO: 257259 - DNA, 19 bp, Homo sapiens
  siRNA target sequence for SLC13A1 (NM_022444.3,941-959).
cttttcctaggattcaatt

SEQ ID NO: 257260 - DNA, 19 bp, Homo sapiens
  siRNA target sequence for SLC13A1 (NM_022444.3,1007-1025).
gcttgtgctgaggtgatta

SEQ ID NO: 257261 - DNA, 19 bp, Homo sapiens
  siRNA target sequence for SLC13A1 (NM_022444.3,1021-1039).
gattaagcaagaataccaa

SEQ ID NO: 257262 - DNA, 19 bp, Homo sapiens
  siRNA target sequence for SLC13A1 (NM_022444.3,1042-1060).
gcttgggccaataaggtat

SEQ ID NO: 257263 - DNA, 19 bp, Homo sapiens
  siRNA target sequence for SLC13A1 (NM_022444.3,1047-1065).
ggccaataaggtatcaaga

SEQ ID NO: 257264 - DNA, 19 bp, Homo sapiens
  siRNA target sequence for SLC13A1 (NM_022444.3,1113-1131).
gtcgagaccccggatttgt

SEQ ID NO: 257265 - DNA, 19 bp, Homo sapiens
  siRNA target sequence for SLC13A1 (NM_022444.3,1140-1158).
ggtctgcacttttttcaga

SEQ ID NO: 257266 - DNA, 19 bp, Homo sapiens
  siRNA target sequence for SLC13A1 (NM_022444.3,1157-1175).
gagtaccctggttttgcta

SEQ ID NO: 257267 - DNA, 19 bp, Homo sapiens
  siRNA target sequence for SLC13A1 (NM_022444.3,1176-1194).
cagattcaactgttgcttt

SEQ ID NO: 257268 - DNA, 19 bp, Homo sapiens
  siRNA target sequence for SLC13A1 (NM_022444.3,1196-1214).
cttatagggctgctattct

SEQ ID NO: 257269 - DNA, 19 bp, Homo sapiens
  siRNA target sequence for SLC13A1 (NM_022444.3,1248-1266).
cacctacaggagaaattgt

SEQ ID NO: 257270 - DNA, 19 bp, Homo sapiens
  siRNA target sequence for SLC13A1 (NM_022444.3,1274-1292).
gattactctccactgatta

SEQ ID NO: 257271 - DNA, 19 bp, Homo sapiens
  siRNA target sequence for SLC13A1 (NM_022444.3,1376-1394).
gagtctggattatctaagt

SEQ ID NO: 257272 - DNA, 19 bp, Homo sapiens
  siRNA target sequence for SLC13A1 (NM_022444.3,1433-1451).
gcatggctaataattctga

SEQ ID NO: 257273 - DNA, 19 bp, Homo sapiens
  siRNA target sequence for SLC13A1 (NM_022444.3,1438-1456).
gctaataattctgatatct

SEQ ID NO: 257274 - DNA, 19 bp, Homo sapiens
  siRNA target sequence for SLC13A1 (NM_022444.3,1439-1457).
ctaataattctgatatctt

SEQ ID NO: 257275 - DNA, 19 bp, Homo sapiens
  siRNA target sequence for SLC13A1 (NM_022444.3,1458-1476).
ctttgatggtgacatcttt

SEQ ID NO: 257276 - DNA, 19 bp, Homo sapiens
  siRNA target sequence for SLC13A1 (NM_022444.3,1492-1510).
caatccagctaccattaca

SEQ ID NO: 257277 - DNA, 19 bp, Homo sapiens
  siRNA target sequence for SLC13A1 (NM_022444.3,1500-1518).
ctaccattacactctttct

SEQ ID NO: 257278 - DNA, 19 bp, Homo sapiens
  siRNA target sequence for SLC13A1 (NM_022444.3,1550-1568).
catgtgaaccctctttata

SEQ ID NO: 257279 - DNA, 19 bp, Homo sapiens
  siRNA target sequence for SLC13A1 (NM_022444.3,1558-1576).
ccctctttatattctgata

SEQ ID NO: 257280 - DNA, 19 bp, Homo sapiens
  siRNA target sequence for SLC13A1 (NM_022444.3,1577-1595).
ccttctactctgtgtactt

SEQ ID NO: 257281 - DNA, 19 bp, Homo sapiens
  siRNA target sequence for SLC13A1 (NM_022444.3,1586-1604).
ctgtgtacttcatttgcat

SEQ ID NO: 257282 - DNA, 19 bp, Homo sapiens
  siRNA target sequence for SLC13A1 (NM_022444.3,1619-1637).
gcaaatccacccaatgcta

SEQ ID NO: 257283 - DNA, 19 bp, Homo sapiens
  siRNA target sequence for SLC13A1 (NM_022444.3,1625-1643).
ccacccaatgctattgtct

SEQ ID NO: 257284 - DNA, 19 bp, Homo sapiens
  siRNA target sequence for SLC13A1 (NM_022444.3,1666-1684).
cattgacatggttaaagct

SEQ ID NO: 257285 - DNA, 19 bp, Homo sapiens
  siRNA target sequence for SLC13A1 (NM_022444.3,1707-1725).
gtgttgctgtggttatgct

SEQ ID NO: 257286 - DNA, 19 bp, Homo sapiens
  siRNA target sequence for SLC13A1 (NM_022444.3,1717-1735).
ggttatgcttggcatatgt

SEQ ID NO: 257287 - DNA, 19 bp, Homo sapiens
  siRNA target sequence for SLC13A1 (NM_022444.3,1718-1736).
gttatgcttggcatatgta

SEQ ID NO: 257288 - DNA, 19 bp, Homo sapiens
  siRNA target sequence for SLC13A1 (NM_022444.3,1729-1747).
catatgtacttggattgta

SEQ ID NO: 257289 - DNA, 19 bp, Homo sapiens
  siRNA target sequence for SLC13A1 (NM_022444.3,1779-1797).
gggctcctgctatgagtaa

SEQ ID NO: 257290 - DNA, 19 bp, Homo sapiens
  siRNA target sequence for SLC13A1 (NM_022444.3,1780-1798).
ggctcctgctatgagtaat

SEQ ID NO: 257291 - DNA, 19 bp, Homo sapiens
  siRNA target sequence for SLC13A3 (NM_022829.3,153-171).
ggccgctgcttgtttgtca

SEQ ID NO: 257292 - DNA, 19 bp, Homo sapiens
  siRNA target sequence for SLC13A3 (NM_022829.3,154-172).
gccgctgcttgtttgtcat

SEQ ID NO: 257293 - DNA, 19 bp, Homo sapiens
  siRNA target sequence for SLC13A3 (NM_022829.3,367-385).
ggcgaatcgccctcaagat

SEQ ID NO: 257294 - DNA, 19 bp, Homo sapiens
  siRNA target sequence for SLC13A3 (NM_022829.3,435-453).
gtgaccacctcgttcttgt

SEQ ID NO: 257295 - DNA, 19 bp, Homo sapiens
  siRNA target sequence for SLC13A3 (NM_022829.3,613-631).
ccacggagatgcagtttct

SEQ ID NO: 257296 - DNA, 19 bp, Homo sapiens
  siRNA target sequence for SLC13A3 (NM_022829.3,711-729).
gaatatcgtcggaacatct

SEQ ID NO: 257297 - DNA, 19 bp, Homo sapiens
  siRNA target sequence for SLC13A3 (NM_022829.3,752-770).
cccctactcagccagtatt

SEQ ID NO: 257298 - DNA, 19 bp, Homo sapiens
  siRNA target sequence for SLC13A3 (NM_022829.3,819-837).
ggccagctcaagagtttct

SEQ ID NO: 257299 - DNA, 19 bp, Homo sapiens
  siRNA target sequence for SLC13A3 (NM_022829.3,843-861).
cagtgtgacgtggtgaatt

SEQ ID NO: 257300 - DNA, 19 bp, Homo sapiens
  siRNA target sequence for SLC13A3 (NM_022829.3,1015-1033).
ctgtaattcgggaagaata

SEQ ID NO: 257301 - DNA, 19 bp, Homo sapiens
  siRNA target sequence for SLC13A3 (NM_022829.3,1059-1077).
gccgaacaggctgttttca

SEQ ID NO: 257302 - DNA, 19 bp, Homo sapiens
  siRNA target sequence for SLC13A3 (NM_022829.3,1111-1129).
cccgggacccgaagttcat

SEQ ID NO: 257303 - DNA, 19 bp, Homo sapiens
  siRNA target sequence for SLC13A3 (NM_022829.3,1188-1206).
gctattgtcaccatcttgt

SEQ ID NO: 257304 - DNA, 19 bp, Homo sapiens
  siRNA target sequence for SLC13A3 (NM_022829.3,1233-1251).
ctcaagtggtggtttgact

SEQ ID NO: 257305 - DNA, 19 bp, Homo sapiens
  siRNA target sequence for SLC13A3 (NM_022829.3,1238-1256).
gtggtggtttgacttcaaa

SEQ ID NO: 257306 - DNA, 19 bp, Homo sapiens
  siRNA target sequence for SLC13A3 (NM_022829.3,1371-1389).
gaatcggggctgtctgtat

SEQ ID NO: 257307 - DNA, 19 bp, Homo sapiens
  siRNA target sequence for SLC13A3 (NM_022829.3,1463-1481).
cgccttcttcactgagttt

SEQ ID NO: 257308 - DNA, 19 bp, Homo sapiens
  siRNA target sequence for SLC13A3 (NM_022829.3,1492-1510).
cggcgaccatcatcatctt

SEQ ID NO: 257309 - DNA, 19 bp, Homo sapiens
  siRNA target sequence for SLC13A3 (NM_022829.3,1546-1564).
gagtgcaccccctgtatct

SEQ ID NO: 257310 - DNA, 19 bp, Homo sapiens
  siRNA target sequence for SLC13A3 (NM_022829.3,1548-1566).
gtgcaccccctgtatctga

SEQ ID NO: 257311 - DNA, 19 bp, Homo sapiens
  siRNA target sequence for SLC13A3 (NM_022829.3,1648-1666).
gacacttgctggtcaaaga

SEQ ID NO: 257312 - DNA, 19 bp, Homo sapiens
  siRNA target sequence for SLC13A3 (NM_022829.3,1702-1720).
gtgtcctgctgctcagttt

SEQ ID NO: 257313 - DNA, 19 bp, Homo sapiens
  siRNA target sequence for SLC13A3 (NM_022829.3,1713-1731).
ctcagtttggctatgaata

SEQ ID NO: 257314 - DNA, 19 bp, Homo sapiens
  siRNA target sequence for SLC13A3 (NM_022829.3,1767-1785).
ccggactgggctgatatgt

SEQ ID NO: 257315 - DNA, 19 bp, Homo sapiens
  siRNA target sequence for SLC13A3 (NM_022829.3,1768-1786).
cggactgggctgatatgta

SEQ ID NO: 257316 - DNA, 19 bp, Homo sapiens
  siRNA target sequence for SLC16A1 (NM_003051.2,246-264).
ggggctgggcagtggtaat

SEQ ID NO: 257317 - DNA, 19 bp, Homo sapiens
  siRNA target sequence for SLC16A1 (NM_003051.2,259-277).
ggtaattggagctttcatt

SEQ ID NO: 257318 - DNA, 19 bp, Homo sapiens
  siRNA target sequence for SLC16A1 (NM_003051.2,331-349).
gattgaaggtatattccat

SEQ ID NO: 257319 - DNA, 19 bp, Homo sapiens
  siRNA target sequence for SLC16A1 (NM_003051.2,372-390).
ggatatcctccataatgtt

SEQ ID NO: 257320 - DNA, 19 bp, Homo sapiens
  siRNA target sequence for SLC16A1 (NM_003051.2,444-462).
gaagtcgtatagtcatgat

SEQ ID NO: 257321 - DNA, 19 bp, Homo sapiens
  siRNA target sequence for SLC16A1 (NM_003051.2,489-507).
gcttgattgcagcttcttt

SEQ ID NO: 257322 - DNA, 19 bp, Homo sapiens
  siRNA target sequence for SLC16A1 (NM_003051.2,523-541).
gcaactatacgtctgtatt

SEQ ID NO: 257323 - DNA, 19 bp, Homo sapiens
  siRNA target sequence for SLC16A1 (NM_003051.2,532-550).
cgtctgtattggagtcatt

SEQ ID NO: 257324 - DNA, 19 bp, Homo sapiens
  siRNA target sequence for SLC16A1 (NM_003051.2,680-698).
cccctcaatcaggttttct

SEQ ID NO: 257325 - DNA, 19 bp, Homo sapiens
  siRNA target sequence for SLC16A1 (NM_003051.2,681-699).
ccctcaatcaggttttctt

SEQ ID NO: 257326 - DNA, 19 bp, Homo sapiens
  siRNA target sequence for SLC16A1 (NM_003051.2,714-732).
ggagaggaagctttctaat

SEQ ID NO: 257327 - DNA, 19 bp, Homo sapiens
  siRNA target sequence for SLC16A1 (NM_003051.2,737-755).
gggggcttgctactaaact

SEQ ID NO: 257328 - DNA, 19 bp, Homo sapiens
  siRNA target sequence for SLC16A1 (NM_003051.2,805-823).
ggcagggaaagataagtct

SEQ ID NO: 257329 - DNA, 19 bp, Homo sapiens
  siRNA target sequence for SLC16A1 (NM_003051.2,897-915).
gaagacaccctaaacaaga

SEQ ID NO: 257330 - DNA, 19 bp, Homo sapiens
  siRNA target sequence for SLC16A1 (NM_003051.2,900-918).
gacaccctaaacaagagaa

SEQ ID NO: 257331 - DNA, 19 bp, Homo sapiens
  siRNA target sequence for SLC16A1 (NM_003051.2,905-923).
cctaaacaagagaaacgat

SEQ ID NO: 257332 - DNA, 19 bp, Homo sapiens
  siRNA target sequence for SLC16A1 (NM_003051.2,921-939).
gatcagtcttccaaacaat

SEQ ID NO: 257333 - DNA, 19 bp, Homo sapiens
  siRNA target sequence for SLC16A1 (NM_003051.2,950-968).
ctggacttaaccctattca

SEQ ID NO: 257334 - DNA, 19 bp, Homo sapiens
  siRNA target sequence for SLC16A1 (NM_003051.2,985-1003).
gctatacctctctggaaat

SEQ ID NO: 257335 - DNA, 19 bp, Homo sapiens
  siRNA target sequence for SLC16A1 (NM_003051.2,1036-1054).
ggtgtttcttagtagttat

SEQ ID NO: 257336 - DNA, 19 bp, Homo sapiens
  siRNA target sequence for SLC16A1 (NM_003051.2,1055-1073).
gggaagagtcagcattatt

SEQ ID NO: 257337 - DNA, 19 bp, Homo sapiens
  siRNA target sequence for SLC16A1 (NM_003051.2,1057-1075).
gaagagtcagcattattct

SEQ ID NO: 257338 - DNA, 19 bp, Homo sapiens
  siRNA target sequence for SLC16A1 (NM_003051.2,1142-1160).
ggacttgtagccaacacaa

SEQ ID NO: 257339 - DNA, 19 bp, Homo sapiens
  siRNA target sequence for SLC16A1 (NM_003051.2,1151-1169).
gccaacacaaagccaataa

SEQ ID NO: 257340 - DNA, 19 bp, Homo sapiens
  siRNA target sequence for SLC16A1 (NM_003051.2,1164-1182).
caataagacctcgaattca

SEQ ID NO: 257341 - DNA, 19 bp, Homo sapiens
  siRNA target sequence for SLC16A1 (NM_003051.2,1194-1212).
cggcttccgttgttgcaaa

SEQ ID NO: 257342 - DNA, 19 bp, Homo sapiens
  siRNA target sequence for SLC16A1 (NM_003051.2,1195-1213).
ggcttccgttgttgcaaat

SEQ ID NO: 257343 - DNA, 19 bp, Homo sapiens
  siRNA target sequence for SLC16A1 (NM_003051.2,1208-1226).
gcaaatggagtgtgtcata

SEQ ID NO: 257344 - DNA, 19 bp, Homo sapiens
  siRNA target sequence for SLC16A1 (NM_003051.2,1223-1241).
catatgctagcacctttat

SEQ ID NO: 257345 - DNA, 19 bp, Homo sapiens
  siRNA target sequence for SLC16A1 (NM_003051.2,1242-1260).
ccactacctatgttggatt

SEQ ID NO: 257346 - DNA, 19 bp, Homo sapiens
  siRNA target sequence for SLC16A1 (NM_003051.2,1299-1317).
ggctcagctccgtattgtt

SEQ ID NO: 257347 - DNA, 19 bp, Homo sapiens
  siRNA target sequence for SLC16A1 (NM_003051.2,1300-1318).
gctcagctccgtattgttt

SEQ ID NO: 257348 - DNA, 19 bp, Homo sapiens
  siRNA target sequence for SLC16A1 (NM_003051.2,1303-1321).
cagctccgtattgtttgaa

SEQ ID NO: 257349 - DNA, 19 bp, Homo sapiens
  siRNA target sequence for SLC16A1 (NM_003051.2,1306-1324).
ctccgtattgtttgaaaca

SEQ ID NO: 257350 - DNA, 19 bp, Homo sapiens
  siRNA target sequence for SLC16A1 (NM_003051.2,1405-1423).
ggggccaccacttttaggt

SEQ ID NO: 257351 - DNA, 19 bp, Homo sapiens
  siRNA target sequence for SLC16A1 (NM_003051.2,1422-1440).
gtcggctcaatgacatgta

SEQ ID NO: 257352 - DNA, 19 bp, Homo sapiens
  siRNA target sequence for SLC16A1 (NM_003051.2,1443-1461).
gagactacaaatacacata

SEQ ID NO: 257353 - DNA, 19 bp, Homo sapiens
  siRNA target sequence for SLC16A1 (NM_003051.2,1445-1463).
gactacaaatacacatact

SEQ ID NO: 257354 - DNA, 19 bp, Homo sapiens
  siRNA target sequence for SLC16A1 (NM_003051.2,1467-1485).
catgtggcgtcgtcctaat

SEQ ID NO: 257355 - DNA, 19 bp, Homo sapiens
  siRNA target sequence for SLC16A1 (NM_003051.2,1470-1488).
gtggcgtcgtcctaattat

SEQ ID NO: 257356 - DNA, 19 bp, Homo sapiens
  siRNA target sequence for SLC16A1 (NM_003051.2,1472-1490).
ggcgtcgtcctaattattt

SEQ ID NO: 257357 - DNA, 19 bp, Homo sapiens
  siRNA target sequence for SLC16A1 (NM_003051.2,1474-1492).
cgtcgtcctaattatttca

SEQ ID NO: 257358 - DNA, 19 bp, Homo sapiens
  siRNA target sequence for SLC16A1 (NM_003051.2,1491-1509).
caggtatctatctcttcat

SEQ ID NO: 257359 - DNA, 19 bp, Homo sapiens
  siRNA target sequence for SLC16A1 (NM_003051.2,1513-1531).
catgggcatcaattatcga

SEQ ID NO: 257360 - DNA, 19 bp, Homo sapiens
  siRNA target sequence for SLC16A1 (NM_003051.2,1518-1536).
gcatcaattatcgactttt

SEQ ID NO: 257361 - DNA, 19 bp, Homo sapiens
  siRNA target sequence for SLC16A1 (NM_003051.2,1582-1600).
ggaagagaccagtatagat

SEQ ID NO: 257362 - DNA, 19 bp, Homo sapiens
  siRNA target sequence for SLC16A2 (NM_006517.1,730-748).
cttcggcatccataactct

SEQ ID NO: 257363 - DNA, 19 bp, Homo sapiens
  siRNA target sequence for SLC16A2 (NM_006517.1,831-849).
ccctcgcgatgggtatgat

SEQ ID NO: 257364 - DNA, 19 bp, Homo sapiens
  siRNA target sequence for SLC16A2 (NM_006517.1,833-851).
ctcgcgatgggtatgatct

SEQ ID NO: 257365 - DNA, 19 bp, Homo sapiens
  siRNA target sequence for SLC16A2 (NM_006517.1,858-876).
gttctcccattgtgagtat

SEQ ID NO: 257366 - DNA, 19 bp, Homo sapiens
  siRNA target sequence for SLC16A2 (NM_006517.1,865-883).
cattgtgagtatattcact

SEQ ID NO: 257367 - DNA, 19 bp, Homo sapiens
  siRNA target sequence for SLC16A2 (NM_006517.1,1140-1158).
gaatgctgggggataagat

SEQ ID NO: 257368 - DNA, 19 bp, Homo sapiens
  siRNA target sequence for SLC16A2 (NM_006517.1,1186-1204).
gagtaccttcatgtttgtt

SEQ ID NO: 257369 - DNA, 19 bp, Homo sapiens
  siRNA target sequence for SLC16A2 (NM_006517.1,1357-1375).
ctgggccttcggaattgct

SEQ ID NO: 257370 - DNA, 19 bp, Homo sapiens
  siRNA target sequence for SLC16A2 (NM_006517.1,1390-1408).
ctactttgttccctatgta

SEQ ID NO: 257371 - DNA, 19 bp, Homo sapiens
  siRNA target sequence for SLC16A2 (NM_006517.1,1458-1476).
gggtgctcttggtgtgtat

SEQ ID NO: 257372 - DNA, 19 bp, Homo sapiens
  siRNA target sequence for SLC16A2 (NM_006517.1,1533-1551).
ctggacttaagaagatcta

SEQ ID NO: 257373 - DNA, 19 bp, Homo sapiens
  siRNA target sequence for SLC16A2 (NM_006517.1,1535-1553).
ggacttaagaagatctact

SEQ ID NO: 257374 - DNA, 19 bp, Homo sapiens
  siRNA target sequence for SLC16A2 (NM_006517.1,1536-1554).
gacttaagaagatctactt

SEQ ID NO: 257375 - DNA, 19 bp, Homo sapiens
  siRNA target sequence for SLC16A2 (NM_006517.1,1625-1643).
cttatcgtcgtctgtcttt

SEQ ID NO: 257376 - DNA, 19 bp, Homo sapiens
  siRNA target sequence for SLC16A2 (NM_006517.1,1652-1670).
ctttgcgatggcttcttca

SEQ ID NO: 257377 - DNA, 19 bp, Homo sapiens
  siRNA target sequence for SLC16A2 (NM_006517.1,1848-1866).
ccatcatcggggctgtaat

SEQ ID NO: 257378 - DNA, 19 bp, Homo sapiens
  siRNA target sequence for SLC16A2 (NM_006517.1,1877-1895).
gtccctctgatgcatcaaa

SEQ ID NO: 257379 - DNA, 19 bp, Homo sapiens
  siRNA target sequence for SLC16A3 (NM_004207.1,335-353).
gcttgtggggggtctcttt

SEQ ID NO: 257380 - DNA, 19 bp, Homo sapiens
  siRNA target sequence for SLC16A3 (NM_004207.1,1275-1293).
ggcaacttcttctgcatta

SEQ ID NO: 257381 - DNA, 19 bp, Homo sapiens
  siRNA target sequence for SLC16A4 (NM_004696.1,203-221).
ggtccaaccttacactaaa

SEQ ID NO: 257382 - DNA, 19 bp, Homo sapiens
  siRNA target sequence for SLC16A4 (NM_004696.1,238-256).
ggggatggatgattgtgat

SEQ ID NO: 257383 - DNA, 19 bp, Homo sapiens
  siRNA target sequence for SLC16A4 (NM_004696.1,287-305).
ggggatgaccaagactttt

SEQ ID NO: 257384 - DNA, 19 bp, Homo sapiens
  siRNA target sequence for SLC16A4 (NM_004696.1,293-311).
gaccaagacttttgcaatt

SEQ ID NO: 257385 - DNA, 19 bp, Homo sapiens
  siRNA target sequence for SLC16A4 (NM_004696.1,380-398).
gtcatctcttcgtttttgt

SEQ ID NO: 257386 - DNA, 19 bp, Homo sapiens
  siRNA target sequence for SLC16A4 (NM_004696.1,400-418).
caggtcccctggttgctat

SEQ ID NO: 257387 - DNA, 19 bp, Homo sapiens
  siRNA target sequence for SLC16A4 (NM_004696.1,402-420).
ggtcccctggttgctatta

SEQ ID NO: 257388 - DNA, 19 bp, Homo sapiens
  siRNA target sequence for SLC16A4 (NM_004696.1,403-421).
gtcccctggttgctattat

SEQ ID NO: 257389 - DNA, 19 bp, Homo sapiens
  siRNA target sequence for SLC16A4 (NM_004696.1,452-470).
cattcttggggctttcgtt

SEQ ID NO: 257390 - DNA, 19 bp, Homo sapiens
  siRNA target sequence for SLC16A4 (NM_004696.1,467-485).
cgttgttactggtggatat

SEQ ID NO: 257391 - DNA, 19 bp, Homo sapiens
  siRNA target sequence for SLC16A4 (NM_004696.1,582-600).
gtggtaactaccaaatact

SEQ ID NO: 257392 - DNA, 19 bp, Homo sapiens
  siRNA target sequence for SLC16A4 (NM_004696.1,614-632).
ggctctttctacagctatt

SEQ ID NO: 257393 - DNA, 19 bp, Homo sapiens
  siRNA target sequence for SLC16A4 (NM_004696.1,643-661).
ggatgggactgacttttct

SEQ ID NO: 257394 - DNA, 19 bp, Homo sapiens
  siRNA target sequence for SLC16A4 (NM_004696.1,667-685).
caccctttacaaaattcct

SEQ ID NO: 257395 - DNA, 19 bp, Homo sapiens
  siRNA target sequence for SLC16A4 (NM_004696.1,701-719).
ctggacaggagcccttata

SEQ ID NO: 257396 - DNA, 19 bp, Homo sapiens
  siRNA target sequence for SLC16A4 (NM_004696.1,704-722).
gacaggagcccttatatta

SEQ ID NO: 257397 - DNA, 19 bp, Homo sapiens
  siRNA target sequence for SLC16A4 (NM_004696.1,726-744).
ggagctatcgcattgaatt

SEQ ID NO: 257398 - DNA, 19 bp, Homo sapiens
  siRNA target sequence for SLC16A4 (NM_004696.1,727-745).
gagctatcgcattgaattt

SEQ ID NO: 257399 - DNA, 19 bp, Homo sapiens
  siRNA target sequence for SLC16A4 (NM_004696.1,730-748).
ctatcgcattgaatttggt

SEQ ID NO: 257400 - DNA, 19 bp, Homo sapiens
  siRNA target sequence for SLC16A4 (NM_004696.1,740-758).
gaatttggtgccttctagt

SEQ ID NO: 257401 - DNA, 19 bp, Homo sapiens
  siRNA target sequence for SLC16A4 (NM_004696.1,762-780).
ctcttaagacccatccata

SEQ ID NO: 257402 - DNA, 19 bp, Homo sapiens
  siRNA target sequence for SLC16A4 (NM_004696.1,794-812).
caattctggtattaaagat

SEQ ID NO: 257403 - DNA, 19 bp, Homo sapiens
  siRNA target sequence for SLC16A4 (NM_004696.1,983-1001).
caggaacagactgttatta

SEQ ID NO: 257404 - DNA, 19 bp, Homo sapiens
  siRNA target sequence for SLC16A4 (NM_004696.1,1033-1051).
cgtggagctgcaaacaact

SEQ ID NO: 257405 - DNA, 19 bp, Homo sapiens
  siRNA target sequence for SLC16A4 (NM_004696.1,1107-1125).
ctcctcagtcagttagcat

SEQ ID NO: 257406 - DNA, 19 bp, Homo sapiens
  siRNA target sequence for SLC16A4 (NM_004696.1,1114-1132).
gtcagttagcatacttcat

SEQ ID NO: 257407 - DNA, 19 bp, Homo sapiens
  siRNA target sequence for SLC16A4 (NM_004696.1,1165-1183).
cactggggattgacatcat

SEQ ID NO: 257408 - DNA, 19 bp, Homo sapiens
  siRNA target sequence for SLC16A4 (NM_004696.1,1246-1264).
gatgggttgctgatcaaaa

SEQ ID NO: 257409 - DNA, 19 bp, Homo sapiens
  siRNA target sequence for SLC16A4 (NM_004696.1,1340-1358).
caccacatttccactactt

SEQ ID NO: 257410 - DNA, 19 bp, Homo sapiens
  siRNA target sequence for SLC16A4 (NM_004696.1,1393-1411).
gtggttacctggcattgat

SEQ ID NO: 257411 - DNA, 19 bp, Homo sapiens
  siRNA target sequence for SLC16A4 (NM_004696.1,1396-1414).
gttacctggcattgatact

SEQ ID NO: 257412 - DNA, 19 bp, Homo sapiens
  siRNA target sequence for SLC16A4 (NM_004696.1,1428-1446).
gatctgtgtaggaattcta

SEQ ID NO: 257413 - DNA, 19 bp, Homo sapiens
  siRNA target sequence for SLC16A4 (NM_004696.1,1435-1453).
gtaggaattctacagtaaa

SEQ ID NO: 257414 - DNA, 19 bp, Homo sapiens
  siRNA target sequence for SLC16A4 (NM_004696.1,1509-1527).
cctatagcaggctggttat

SEQ ID NO: 257415 - DNA, 19 bp, Homo sapiens
  siRNA target sequence for SLC16A4 (NM_004696.1,1510-1528).
ctatagcaggctggttata

SEQ ID NO: 257416 - DNA, 19 bp, Homo sapiens
  siRNA target sequence for SLC16A4 (NM_004696.1,1530-1548).
gattatacccagacataca

SEQ ID NO: 257417 - DNA, 19 bp, Homo sapiens
  siRNA target sequence for SLC16A4 (NM_004696.1,1543-1561).
catacaatggctctttcta

SEQ ID NO: 257418 - DNA, 19 bp, Homo sapiens
  siRNA target sequence for SLC16A4 (NM_004696.1,1608-1626).
gtaccattggccgaaagat

SEQ ID NO: 257419 - DNA, 19 bp, Homo sapiens
  siRNA target sequence for SLC16A5 (NM_004695.2,382-400).
cgtgtatcggcatcttctt

SEQ ID NO: 257420 - DNA, 19 bp, Homo sapiens
  siRNA target sequence for SLC16A5 (NM_004695.2,667-685).
cggtgctgggcttctactt

SEQ ID NO: 257421 - DNA, 19 bp, Homo sapiens
  siRNA target sequence for SLC16A5 (NM_004695.2,994-1012).
caggctactgcgtgtacat

SEQ ID NO: 257422 - DNA, 19 bp, Homo sapiens
  siRNA target sequence for SLC16A5 (NM_004695.2,1451-1469).
ggacgccaccaacaacttt

SEQ ID NO: 257423 - DNA, 19 bp, Homo sapiens
  siRNA target sequence for SLC16A5 (NM_004695.2,1452-1470).
gacgccaccaacaacttta

SEQ ID NO: 257424 - DNA, 19 bp, Homo sapiens
  siRNA target sequence for SLC16A5 (NM_004695.2,1674-1692).
cgtccagctggcgtcaata

SEQ ID NO: 257425 - DNA, 19 bp, Homo sapiens
  siRNA target sequence for SLC16A5 (NM_004695.2,1675-1693).
gtccagctggcgtcaataa

SEQ ID NO: 257426 - DNA, 19 bp, Homo sapiens
  siRNA target sequence for SLC16A5 (NM_004695.2,1683-1701).
ggcgtcaataagcatcttt

SEQ ID NO: 257427 - DNA, 19 bp, Homo sapiens
  siRNA target sequence for SLC16A6 (NM_004694.2,260-278).
ctgggcggtagctgtttca

SEQ ID NO: 257428 - DNA, 19 bp, Homo sapiens
  siRNA target sequence for SLC16A6 (NM_004694.2,262-280).
gggcggtagctgtttcatt

SEQ ID NO: 257429 - DNA, 19 bp, Homo sapiens
  siRNA target sequence for SLC16A6 (NM_004694.2,263-281).
ggcggtagctgtttcattt

SEQ ID NO: 257430 - DNA, 19 bp, Homo sapiens
  siRNA target sequence for SLC16A6 (NM_004694.2,305-323).
cggcatcatcaagacattt

SEQ ID NO: 257431 - DNA, 19 bp, Homo sapiens
  siRNA target sequence for SLC16A6 (NM_004694.2,319-337).
catttggtgtcttctttaa

SEQ ID NO: 257432 - DNA, 19 bp, Homo sapiens
  siRNA target sequence for SLC16A6 (NM_004694.2,374-392).
gatctcatggataatctca

SEQ ID NO: 257433 - DNA, 19 bp, Homo sapiens
  siRNA target sequence for SLC16A6 (NM_004694.2,454-472).
gacaccgtctggtagtgat

SEQ ID NO: 257434 - DNA, 19 bp, Homo sapiens
  siRNA target sequence for SLC16A6 (NM_004694.2,520-538).
cacaagaggtttctcatat

SEQ ID NO: 257435 - DNA, 19 bp, Homo sapiens
  siRNA target sequence for SLC16A6 (NM_004694.2,522-540).
caagaggtttctcatatgt

SEQ ID NO: 257436 - DNA, 19 bp, Homo sapiens
  siRNA target sequence for SLC16A6 (NM_004694.2,543-561).
gtcgccatcggcatcatct

SEQ ID NO: 257437 - DNA, 19 bp, Homo sapiens
  siRNA target sequence for SLC16A6 (NM_004694.2,569-587).
gggatactgctttagtttt

SEQ ID NO: 257438 - DNA, 19 bp, Homo sapiens
  siRNA target sequence for SLC16A6 (NM_004694.2,602-620).
catcctatcacaatatttt

SEQ ID NO: 257439 - DNA, 19 bp, Homo sapiens
  siRNA target sequence for SLC16A6 (NM_004694.2,682-700).
ctttcgcaccagcaatcat

SEQ ID NO: 257440 - DNA, 19 bp, Homo sapiens
  siRNA target sequence for SLC16A6 (NM_004694.2,1246-1264).
gggagcccattcgtaagat

SEQ ID NO: 257441 - DNA, 19 bp, Homo sapiens
  siRNA target sequence for SLC16A6 (NM_004694.2,1247-1265).
ggagcccattcgtaagatt

SEQ ID NO: 257442 - DNA, 19 bp, Homo sapiens
  siRNA target sequence for SLC16A7 (NM_004731.3,223-241).
gttggagcagcttttatct

SEQ ID NO: 257443 - DNA, 19 bp, Homo sapiens
  siRNA target sequence for SLC16A7 (NM_004731.3,271-289).
gctgtcaccgtattcttca

SEQ ID NO: 257444 - DNA, 19 bp, Homo sapiens
  siRNA target sequence for SLC16A7 (NM_004731.3,278-296).
ccgtattcttcaaagaaat

SEQ ID NO: 257445 - DNA, 19 bp, Homo sapiens
  siRNA target sequence for SLC16A7 (NM_004731.3,366-384).
cgcaggaggtcctgtaagt

SEQ ID NO: 257446 - DNA, 19 bp, Homo sapiens
  siRNA target sequence for SLC16A7 (NM_004731.3,367-385).
gcaggaggtcctgtaagta

SEQ ID NO: 257447 - DNA, 19 bp, Homo sapiens
  siRNA target sequence for SLC16A7 (NM_004731.3,373-391).
ggtcctgtaagtagtgttt

SEQ ID NO: 257448 - DNA, 19 bp, Homo sapiens
  siRNA target sequence for SLC16A7 (NM_004731.3,374-392).
gtcctgtaagtagtgtttt

SEQ ID NO: 257449 - DNA, 19 bp, Homo sapiens
  siRNA target sequence for SLC16A7 (NM_004731.3,427-445).
gcaggaggcttattatgct

SEQ ID NO: 257450 - DNA, 19 bp, Homo sapiens
  siRNA target sequence for SLC16A7 (NM_004731.3,496-514).
ctcactatgggattcatta

SEQ ID NO: 257451 - DNA, 19 bp, Homo sapiens
  siRNA target sequence for SLC16A7 (NM_004731.3,498-516).
cactatgggattcattaca

SEQ ID NO: 257452 - DNA, 19 bp, Homo sapiens
  siRNA target sequence for SLC16A7 (NM_004731.3,504-522).
gggattcattacaggttta

SEQ ID NO: 257453 - DNA, 19 bp, Homo sapiens
  siRNA target sequence for SLC16A7 (NM_004731.3,540-558).
gcaacccgccttaaccata

SEQ ID NO: 257454 - DNA, 19 bp, Homo sapiens
  siRNA target sequence for SLC16A7 (NM_004731.3,541-559).
caacccgccttaaccataa

SEQ ID NO: 257455 - DNA, 19 bp, Homo sapiens
  siRNA target sequence for SLC16A7 (NM_004731.3,562-580).
ggcaaatacttctatagga

SEQ ID NO: 257456 - DNA, 19 bp, Homo sapiens
  siRNA target sequence for SLC16A7 (NM_004731.3,583-601).
cgacccatggcaaatggat

SEQ ID NO: 257457 - DNA, 19 bp, Homo sapiens
  siRNA target sequence for SLC16A7 (NM_004731.3,584-602).
gacccatggcaaatggatt

SEQ ID NO: 257458 - DNA, 19 bp, Homo sapiens
  siRNA target sequence for SLC16A7 (NM_004731.3,635-653).
cattggctcctttcaatca

SEQ ID NO: 257459 - DNA, 19 bp, Homo sapiens
  siRNA target sequence for SLC16A7 (NM_004731.3,643-661).
cctttcaatcagtaccttt

SEQ ID NO: 257460 - DNA, 19 bp, Homo sapiens
  siRNA target sequence for SLC16A7 (NM_004731.3,690-708).
cctgattttgggaagtcta

SEQ ID NO: 257461 - DNA, 19 bp, Homo sapiens
  siRNA target sequence for SLC16A7 (NM_004731.3,693-711).
gattttgggaagtctactt

SEQ ID NO: 257462 - DNA, 19 bp, Homo sapiens
  siRNA target sequence for SLC16A7 (NM_004731.3,745-763).
ccccttggacccaatcaaa

SEQ ID NO: 257463 - DNA, 19 bp, Homo sapiens
  siRNA target sequence for SLC16A7 (NM_004731.3,754-772).
cccaatcaaaccacttcta

SEQ ID NO: 257464 - DNA, 19 bp, Homo sapiens
  siRNA target sequence for SLC16A7 (NM_004731.3,755-773).
ccaatcaaaccacttctaa

SEQ ID NO: 257465 - DNA, 19 bp, Homo sapiens
  siRNA target sequence for SLC16A7 (NM_004731.3,764-782).
ccacttctaagtctaaaaa

SEQ ID NO: 257466 - DNA, 19 bp, Homo sapiens
  siRNA target sequence for SLC16A7 (NM_004731.3,853-871).
gttaataagtatttagatt

SEQ ID NO: 257467 - DNA, 19 bp, Homo sapiens
  siRNA target sequence for SLC16A7 (NM_004731.3,890-908).
gaggatttctgatatatct

SEQ ID NO: 257468 - DNA, 19 bp, Homo sapiens
  siRNA target sequence for SLC16A7 (NM_004731.3,892-910).
ggatttctgatatatctgt

SEQ ID NO: 257469 - DNA, 19 bp, Homo sapiens
  siRNA target sequence for SLC16A7 (NM_004731.3,957-975).
cttggctccatatgctaaa

SEQ ID NO: 257470 - DNA, 19 bp, Homo sapiens
  siRNA target sequence for SLC16A7 (NM_004731.3,1018-1036).
gttatggctttcgttgata

SEQ ID NO: 257471 - DNA, 19 bp, Homo sapiens
  siRNA target sequence for SLC16A7 (NM_004731.3,1023-1041).
ggctttcgttgatatgttt

SEQ ID NO: 257472 - DNA, 19 bp, Homo sapiens
  siRNA target sequence for SLC16A7 (NM_004731.3,1038-1056).
gtttgctaggccttctgta

SEQ ID NO: 257473 - DNA, 19 bp, Homo sapiens
  siRNA target sequence for SLC16A7 (NM_004731.3,1046-1064).
ggccttctgtaggattaat

SEQ ID NO: 257474 - DNA, 19 bp, Homo sapiens
  siRNA target sequence for SLC16A7 (NM_004731.3,1153-1171).
ctggcacaggactacacaa

SEQ ID NO: 257475 - DNA, 19 bp, Homo sapiens
  siRNA target sequence for SLC16A7 (NM_004731.3,1164-1182).
ctacacaagcctggtatta

SEQ ID NO: 257476 - DNA, 19 bp, Homo sapiens
  siRNA target sequence for SLC16A7 (NM_004731.3,1167-1185).
cacaagcctggtattatat

SEQ ID NO: 257477 - DNA, 19 bp, Homo sapiens
  siRNA target sequence for SLC16A7 (NM_004731.3,1201-1219).
cttggatttgggagtgtta

SEQ ID NO: 257478 - DNA, 19 bp, Homo sapiens
  siRNA target sequence for SLC16A7 (NM_004731.3,1214-1232).
gtgttagcagtgttctctt

SEQ ID NO: 257479 - DNA, 19 bp, Homo sapiens
  siRNA target sequence for SLC16A7 (NM_004731.3,1223-1241).
gtgttctctttgaaactct

SEQ ID NO: 257480 - DNA, 19 bp, Homo sapiens
  siRNA target sequence for SLC16A7 (NM_004731.3,1251-1269).
cgtgggtgcaccaagattt

SEQ ID NO: 257481 - DNA, 19 bp, Homo sapiens
  siRNA target sequence for SLC16A7 (NM_004731.3,1252-1270).
gtgggtgcaccaagatttt

SEQ ID NO: 257482 - DNA, 19 bp, Homo sapiens
  siRNA target sequence for SLC16A7 (NM_004731.3,1255-1273).
ggtgcaccaagattttcca

SEQ ID NO: 257483 - DNA, 19 bp, Homo sapiens
  siRNA target sequence for SLC16A7 (NM_004731.3,1277-1295).
ccgtcggacttgtcacaat

SEQ ID NO: 257484 - DNA, 19 bp, Homo sapiens
  siRNA target sequence for SLC16A7 (NM_004731.3,1278-1296).
cgtcggacttgtcacaatt

SEQ ID NO: 257485 - DNA, 19 bp, Homo sapiens
  siRNA target sequence for SLC16A7 (NM_004731.3,1328-1346).
ctcttgcaggtaaattggt

SEQ ID NO: 257486 - DNA, 19 bp, Homo sapiens
  siRNA target sequence for SLC16A7 (NM_004731.3,1334-1352).
caggtaaattggtggattt

SEQ ID NO: 257487 - DNA, 19 bp, Homo sapiens
  siRNA target sequence for SLC16A7 (NM_004731.3,1348-1366).
gatttaactggagaatata

SEQ ID NO: 257488 - DNA, 19 bp, Homo sapiens
  siRNA target sequence for SLC16A7 (NM_004731.3,1357-1375).
ggagaatataaatacatgt

SEQ ID NO: 257489 - DNA, 19 bp, Homo sapiens
  siRNA target sequence for SLC16A7 (NM_004731.3,1426-1444).
ggcaatgctatcaactata

SEQ ID NO: 257490 - DNA, 19 bp, Homo sapiens
  siRNA target sequence for SLC16A7 (NM_004731.3,1482-1500).
gcagaagaccagagaatct

SEQ ID NO: 257491 - DNA, 19 bp, Homo sapiens
  siRNA target sequence for SLC16A7 (NM_004731.3,1505-1523).
ccttgagcaaatctaaaca

SEQ ID NO: 257492 - DNA, 19 bp, Homo sapiens
  siRNA target sequence for SLC16A7 (NM_004731.3,1534-1552).
gttaacgtcaaagtttcaa

SEQ ID NO: 257493 - DNA, 19 bp, Homo sapiens
  siRNA target sequence for SLC16A7 (NM_004731.3,1539-1557).
cgtcaaagtttcaaatgca

SEQ ID NO: 257494 - DNA, 19 bp, Homo sapiens
  siRNA target sequence for SLC16A8 (NM_013356.1,1059-1077).
cgcacgtcccgtatctgtt

SEQ ID NO: 257495 - DNA, 19 bp, Homo sapiens
  siRNA target sequence for SLC16A8 (NM_013356.1,1408-1426).
ctgcctgcgttgtgctaaa

SEQ ID NO: 257496 - DNA, 19 bp, Homo sapiens
  siRNA target sequence for SLC16A8 (NM_013356.1,1411-1429).
cctgcgttgtgctaaagct

SEQ ID NO: 257497 - DNA, 19 bp, Homo sapiens
  siRNA target sequence for SLC16A8 (NM_013356.1,1604-1622).
ctggctgccgagtctgtat

SEQ ID NO: 257498 - DNA, 19 bp, Homo sapiens
  siRNA target sequence for SLC17A1 (NM_005074.1,29-47).
ggttgcctcccaaaaaagt

SEQ ID NO: 257499 - DNA, 19 bp, Homo sapiens
  siRNA target sequence for SLC17A1 (NM_005074.1,63-81).
ctttcgctatggattgtct

SEQ ID NO: 257500 - DNA, 19 bp, Homo sapiens
  siRNA target sequence for SLC17A1 (NM_005074.1,129-147).
cctgaacctcacaatggta

SEQ ID NO: 257501 - DNA, 19 bp, Homo sapiens
  siRNA target sequence for SLC17A1 (NM_005074.1,145-163).
gtagtcatggtgaatagca

SEQ ID NO: 257502 - DNA, 19 bp, Homo sapiens
  siRNA target sequence for SLC17A1 (NM_005074.1,161-179).
gcacagatccacatggttt

SEQ ID NO: 257503 - DNA, 19 bp, Homo sapiens
  siRNA target sequence for SLC17A1 (NM_005074.1,507-525).
ggaacgaggccgacttact

SEQ ID NO: 257504 - DNA, 19 bp, Homo sapiens
  siRNA target sequence for SLC17A1 (NM_005074.1,511-529).
cgaggccgacttacttcta

SEQ ID NO: 257505 - DNA, 19 bp, Homo sapiens
  siRNA target sequence for SLC17A1 (NM_005074.1,512-530).
gaggccgacttacttctat

SEQ ID NO: 257506 - DNA, 19 bp, Homo sapiens
  siRNA target sequence for SLC17A1 (NM_005074.1,514-532).
ggccgacttacttctatga

SEQ ID NO: 257507 - DNA, 19 bp, Homo sapiens
  siRNA target sequence for SLC17A1 (NM_005074.1,516-534).
ccgacttacttctatgagt

SEQ ID NO: 257508 - DNA, 19 bp, Homo sapiens
  siRNA target sequence for SLC17A1 (NM_005074.1,517-535).
cgacttacttctatgagta

SEQ ID NO: 257509 - DNA, 19 bp, Homo sapiens
  siRNA target sequence for SLC17A1 (NM_005074.1,520-538).
cttacttctatgagtacat

SEQ ID NO: 257510 - DNA, 19 bp, Homo sapiens
  siRNA target sequence for SLC17A1 (NM_005074.1,557-575).
cctttattgtcctacttgt

SEQ ID NO: 257511 - DNA, 19 bp, Homo sapiens
  siRNA target sequence for SLC17A1 (NM_005074.1,603-621).
ctggcccatggtcttctat

SEQ ID NO: 257512 - DNA, 19 bp, Homo sapiens
  siRNA target sequence for SLC17A1 (NM_005074.1,606-624).
gcccatggtcttctatatt

SEQ ID NO: 257513 - DNA, 19 bp, Homo sapiens
  siRNA target sequence for SLC17A1 (NM_005074.1,607-625).
cccatggtcttctatattt

SEQ ID NO: 257514 - DNA, 19 bp, Homo sapiens
  siRNA target sequence for SLC17A1 (NM_005074.1,608-626).
ccatggtcttctatatttt

SEQ ID NO: 257515 - DNA, 19 bp, Homo sapiens
  siRNA target sequence for SLC17A1 (NM_005074.1,609-627).
catggtcttctatattttt

SEQ ID NO: 257516 - DNA, 19 bp, Homo sapiens
  siRNA target sequence for SLC17A1 (NM_005074.1,655-673).
ctctggttcgttctgtttt

SEQ ID NO: 257517 - DNA, 19 bp, Homo sapiens
  siRNA target sequence for SLC17A1 (NM_005074.1,660-678).
gttcgttctgttttatgat

SEQ ID NO: 257518 - DNA, 19 bp, Homo sapiens
  siRNA target sequence for SLC17A1 (NM_005074.1,683-701).
ccaaagaccacccatgtat

SEQ ID NO: 257519 - DNA, 19 bp, Homo sapiens
  siRNA target sequence for SLC17A1 (NM_005074.1,741-759).
ccagcaggtcagttcaagt

SEQ ID NO: 257520 - DNA, 19 bp, Homo sapiens
  siRNA target sequence for SLC17A1 (NM_005074.1,742-760).
cagcaggtcagttcaagta

SEQ ID NO: 257521 - DNA, 19 bp, Homo sapiens
  siRNA target sequence for SLC17A1 (NM_005074.1,744-762).
gcaggtcagttcaagtaga

SEQ ID NO: 257522 - DNA, 19 bp, Homo sapiens
  siRNA target sequence for SLC17A1 (NM_005074.1,747-765).
ggtcagttcaagtagacaa

SEQ ID NO: 257523 - DNA, 19 bp, Homo sapiens
  siRNA target sequence for SLC17A1 (NM_005074.1,752-770).
gttcaagtagacaatctct

SEQ ID NO: 257524 - DNA, 19 bp, Homo sapiens
  siRNA target sequence for SLC17A1 (NM_005074.1,761-779).
gacaatctctgcctatcaa

SEQ ID NO: 257525 - DNA, 19 bp, Homo sapiens
  siRNA target sequence for SLC17A1 (NM_005074.1,772-790).
cctatcaaggctatactta

SEQ ID NO: 257526 - DNA, 19 bp, Homo sapiens
  siRNA target sequence for SLC17A1 (NM_005074.1,773-791).
ctatcaaggctatacttaa

SEQ ID NO: 257527 - DNA, 19 bp, Homo sapiens
  siRNA target sequence for SLC17A1 (NM_005074.1,796-814).
cttccagtctgggctattt

SEQ ID NO: 257528 - DNA, 19 bp, Homo sapiens
  siRNA target sequence for SLC17A1 (NM_005074.1,799-817).
ccagtctgggctatttcca

SEQ ID NO: 257529 - DNA, 19 bp, Homo sapiens
  siRNA target sequence for SLC17A1 (NM_005074.1,844-862).
cataacatcatgacactat

SEQ ID NO: 257530 - DNA, 19 bp, Homo sapiens
  siRNA target sequence for SLC17A1 (NM_005074.1,849-867).
catcatgacactatacact

SEQ ID NO: 257531 - DNA, 19 bp, Homo sapiens
  siRNA target sequence for SLC17A1 (NM_005074.1,857-875).
cactatacactccaatgtt

SEQ ID NO: 257532 - DNA, 19 bp, Homo sapiens
  siRNA target sequence for SLC17A1 (NM_005074.1,945-963).
ctggatctgtggtaaccta

SEQ ID NO: 257533 - DNA, 19 bp, Homo sapiens
  siRNA target sequence for SLC17A1 (NM_005074.1,960-978).
cctagcaggtcagttatca

SEQ ID NO: 257534 - DNA, 19 bp, Homo sapiens
  siRNA target sequence for SLC17A1 (NM_005074.1,988-1006).
ctgaccaggaatattctca

SEQ ID NO: 257535 - DNA, 19 bp, Homo sapiens
  siRNA target sequence for SLC17A1 (NM_005074.1,996-1014).
gaatattctcagcgtaatt

SEQ ID NO: 257536 - DNA, 19 bp, Homo sapiens
  siRNA target sequence for SLC17A1 (NM_005074.1,1084-1102).
ctgagttccaccttctaca

SEQ ID NO: 257537 - DNA, 19 bp, Homo sapiens
  siRNA target sequence for SLC17A1 (NM_005074.1,1132-1150).
gcaacaggcagcttttgct

SEQ ID NO: 257538 - DNA, 19 bp, Homo sapiens
  siRNA target sequence for SLC17A1 (NM_005074.1,1183-1201).
gctcccagatattttggat

SEQ ID NO: 257539 - DNA, 19 bp, Homo sapiens
  siRNA target sequence for SLC17A1 (NM_005074.1,1233-1251).
gataggaggactaattgct

SEQ ID NO: 257540 - DNA, 19 bp, Homo sapiens
  siRNA target sequence for SLC17A1 (NM_005074.1,1262-1280).
ctggattgatccttaagca

SEQ ID NO: 257541 - DNA, 19 bp, Homo sapiens
  siRNA target sequence for SLC17A1 (NM_005074.1,1285-1303).
ccggaatccgcctggttta

SEQ ID NO: 257542 - DNA, 19 bp, Homo sapiens
  siRNA target sequence for SLC17A1 (NM_005074.1,1286-1304).
cggaatccgcctggtttaa

SEQ ID NO: 257543 - DNA, 19 bp, Homo sapiens
  siRNA target sequence for SLC17A1 (NM_005074.1,1287-1305).
ggaatccgcctggtttaaa

SEQ ID NO: 257544 - DNA, 19 bp, Homo sapiens
  siRNA target sequence for SLC17A1 (NM_005074.1,1288-1306).
gaatccgcctggtttaaaa

SEQ ID NO: 257545 - DNA, 19 bp, Homo sapiens
  siRNA target sequence for SLC17A1 (NM_005074.1,1292-1310).
ccgcctggtttaaaacctt

SEQ ID NO: 257546 - DNA, 19 bp, Homo sapiens
  siRNA target sequence for SLC17A1 (NM_005074.1,1314-1332).
cctgatggcagccattaat

SEQ ID NO: 257547 - DNA, 19 bp, Homo sapiens
  siRNA target sequence for SLC17A2 (NM_005835.1,446-464).
ggtccagatttctgttcat

SEQ ID NO: 257548 - DNA, 19 bp, Homo sapiens
  siRNA target sequence for SLC17A2 (NM_005835.1,605-623).
gttgcagatgccttcaata

SEQ ID NO: 257549 - DNA, 19 bp, Homo sapiens
  siRNA target sequence for SLC17A2 (NM_005835.1,608-626).
gcagatgccttcaataact

SEQ ID NO: 257550 - DNA, 19 bp, Homo sapiens
  siRNA target sequence for SLC17A2 (NM_005835.1,631-649).
catatccatcaaggaattt

SEQ ID NO: 257551 - DNA, 19 bp, Homo sapiens
  siRNA target sequence for SLC17A2 (NM_005835.1,637-655).
catcaaggaatttgataca

SEQ ID NO: 257552 - DNA, 19 bp, Homo sapiens
  siRNA target sequence for SLC17A2 (NM_005835.1,654-672).
caaaggcctctgtgtatca

SEQ ID NO: 257553 - DNA, 19 bp, Homo sapiens
  siRNA target sequence for SLC17A2 (NM_005835.1,689-707).
cagggtatcatctttagct

SEQ ID NO: 257554 - DNA, 19 bp, Homo sapiens
  siRNA target sequence for SLC17A2 (NM_005835.1,709-727).
catcaactatgggataata

SEQ ID NO: 257555 - DNA, 19 bp, Homo sapiens
  siRNA target sequence for SLC17A2 (NM_005835.1,736-754).
gatcccaagtggatattta

SEQ ID NO: 257556 - DNA, 19 bp, Homo sapiens
  siRNA target sequence for SLC17A2 (NM_005835.1,836-854).
gctgacttcggagtgattt

SEQ ID NO: 257557 - DNA, 19 bp, Homo sapiens
  siRNA target sequence for SLC17A2 (NM_005835.1,846-864).
gagtgattttggtcatcat

SEQ ID NO: 257558 - DNA, 19 bp, Homo sapiens
  siRNA target sequence for SLC17A2 (NM_005835.1,899-917).
gcatggacaggtcagttta

SEQ ID NO: 257559 - DNA, 19 bp, Homo sapiens
  siRNA target sequence for SLC17A2 (NM_005835.1,903-921).
ggacaggtcagtttactat

SEQ ID NO: 257560 - DNA, 19 bp, Homo sapiens
  siRNA target sequence for SLC17A2 (NM_005835.1,904-922).
gacaggtcagtttactatt

SEQ ID NO: 257561 - DNA, 19 bp, Homo sapiens
  siRNA target sequence for SLC17A2 (NM_005835.1,931-949).
gtgggctcctccacttgaa

SEQ ID NO: 257562 - DNA, 19 bp, Homo sapiens
  siRNA target sequence for SLC17A2 (NM_005835.1,1035-1053).
ccttgagctggccttttat

SEQ ID NO: 257563 - DNA, 19 bp, Homo sapiens
  siRNA target sequence for SLC17A2 (NM_005835.1,1044-1062).
ggccttttatcttctacat

SEQ ID NO: 257564 - DNA, 19 bp, Homo sapiens
  siRNA target sequence for SLC17A2 (NM_005835.1,1126-1144).
gcatcacccgtgcataagt

SEQ ID NO: 257565 - DNA, 19 bp, Homo sapiens
  siRNA target sequence for SLC17A2 (NM_005835.1,1130-1148).
cacccgtgcataagtgtta

SEQ ID NO: 257566 - DNA, 19 bp, Homo sapiens
  siRNA target sequence for SLC17A2 (NM_005835.1,1200-1218).
gacgagctgtccccataaa

SEQ ID NO: 257567 - DNA, 19 bp, Homo sapiens
  siRNA target sequence for SLC17A2 (NM_005835.1,1284-1302).
gcaccatcatcctaacata

SEQ ID NO: 257568 - DNA, 19 bp, Homo sapiens
  siRNA target sequence for SLC17A2 (NM_005835.1,1288-1306).
catcatcctaacataccta

SEQ ID NO: 257569 - DNA, 19 bp, Homo sapiens
  siRNA target sequence for SLC17A2 (NM_005835.1,1299-1317).
catacctaccaacgtatat

SEQ ID NO: 257570 - DNA, 19 bp, Homo sapiens
  siRNA target sequence for SLC17A2 (NM_005835.1,1303-1321).
cctaccaacgtatatcagt

SEQ ID NO: 257571 - DNA, 19 bp, Homo sapiens
  siRNA target sequence for SLC17A2 (NM_005835.1,1320-1338).
gtactctgctccatgttaa

SEQ ID NO: 257572 - DNA, 19 bp, Homo sapiens
  siRNA target sequence for SLC17A2 (NM_005835.1,1323-1341).
ctctgctccatgttaacat

SEQ ID NO: 257573 - DNA, 19 bp, Homo sapiens
  siRNA target sequence for SLC17A2 (NM_005835.1,1325-1343).
ctgctccatgttaacatca

SEQ ID NO: 257574 - DNA, 19 bp, Homo sapiens
  siRNA target sequence for SLC17A2 (NM_005835.1,1457-1475).
gtgcgaaagctcttttcat

SEQ ID NO: 257575 - DNA, 19 bp, Homo sapiens
  siRNA target sequence for SLC17A2 (NM_005835.1,1465-1483).
gctcttttcatctcttgat

SEQ ID NO: 257576 - DNA, 19 bp, Homo sapiens
  siRNA target sequence for SLC17A2 (NM_005835.1,1522-1540).
ctcatcgcaggaatcatct

SEQ ID NO: 257577 - DNA, 19 bp, Homo sapiens
  siRNA target sequence for SLC17A2 (NM_005835.1,1697-1715).
cccgcctctgaggacataa

SEQ ID NO: 257578 - DNA, 19 bp, Homo sapiens
  siRNA target sequence for SLC17A2 (NM_005835.1,1698-1716).
ccgcctctgaggacataaa

SEQ ID NO: 257579 - DNA, 19 bp, Homo sapiens
  siRNA target sequence for SLC17A2 (NM_005835.1,1702-1720).
ctctgaggacataaagtta

SEQ ID NO: 257580 - DNA, 19 bp, Homo sapiens
  siRNA target sequence for SLC17A3 (NM_006632.1,406-424).
gaaaggtccaagtttatgt

SEQ ID NO: 257581 - DNA, 19 bp, Homo sapiens
  siRNA target sequence for SLC17A3 (NM_006632.1,438-456).
gaatagccctcgtcttaca

SEQ ID NO: 257582 - DNA, 19 bp, Homo sapiens
  siRNA target sequence for SLC17A3 (NM_006632.1,443-461).
gccctcgtcttacatttct

SEQ ID NO: 257583 - DNA, 19 bp, Homo sapiens
  siRNA target sequence for SLC17A3 (NM_006632.1,460-478).
ctgcaatttcacaacgata

SEQ ID NO: 257584 - DNA, 19 bp, Homo sapiens
  siRNA target sequence for SLC17A3 (NM_006632.1,469-487).
cacaacgatagcacaaaat

SEQ ID NO: 257585 - DNA, 19 bp, Homo sapiens
  siRNA target sequence for SLC17A3 (NM_006632.1,471-489).
caacgatagcacaaaatgt

SEQ ID NO: 257586 - DNA, 19 bp, Homo sapiens
  siRNA target sequence for SLC17A3 (NM_006632.1,474-492).
cgatagcacaaaatgtcat

SEQ ID NO: 257587 - DNA, 19 bp, Homo sapiens
  siRNA target sequence for SLC17A3 (NM_006632.1,479-497).
gcacaaaatgtcatcatga

SEQ ID NO: 257588 - DNA, 19 bp, Homo sapiens
  siRNA target sequence for SLC17A3 (NM_006632.1,635-653).
gggggtcagtttgcaattt

SEQ ID NO: 257589 - DNA, 19 bp, Homo sapiens
  siRNA target sequence for SLC17A3 (NM_006632.1,691-709).
ctgcagcattgctttatca

SEQ ID NO: 257590 - DNA, 19 bp, Homo sapiens
  siRNA target sequence for SLC17A3 (NM_006632.1,746-764).
ggtggcttcattagtgaaa

SEQ ID NO: 257591 - DNA, 19 bp, Homo sapiens
  siRNA target sequence for SLC17A3 (NM_006632.1,767-785).
cttgggtggccctttgtct

SEQ ID NO: 257592 - DNA, 19 bp, Homo sapiens
  siRNA target sequence for SLC17A3 (NM_006632.1,867-885).
ggataagcacctcagaaaa

SEQ ID NO: 257593 - DNA, 19 bp, Homo sapiens
  siRNA target sequence for SLC17A3 (NM_006632.1,868-886).
gataagcacctcagaaaaa

SEQ ID NO: 257594 - DNA, 19 bp, Homo sapiens
  siRNA target sequence for SLC17A3 (NM_006632.1,892-910).
catcatatcctccttgaaa

SEQ ID NO: 257595 - DNA, 19 bp, Homo sapiens
  siRNA target sequence for SLC17A3 (NM_006632.1,911-929).
caacaggtcgggtcttcta

SEQ ID NO: 257596 - DNA, 19 bp, Homo sapiens
  siRNA target sequence for SLC17A3 (NM_006632.1,965-983).
ctacccatttggtccatat

SEQ ID NO: 257597 - DNA, 19 bp, Homo sapiens
  siRNA target sequence for SLC17A3 (NM_006632.1,968-986).
cccatttggtccatatgtt

SEQ ID NO: 257598 - DNA, 19 bp, Homo sapiens
  siRNA target sequence for SLC17A3 (NM_006632.1,989-1007).
ggctgtttcagccatcaat

SEQ ID NO: 257599 - DNA, 19 bp, Homo sapiens
  siRNA target sequence for SLC17A3 (NM_006632.1,993-1011).
gtttcagccatcaatggtt

SEQ ID NO: 257600 - DNA, 19 bp, Homo sapiens
  siRNA target sequence for SLC17A3 (NM_006632.1,1148-1166).
gatttccttctaaccaaaa

SEQ ID NO: 257601 - DNA, 19 bp, Homo sapiens
  siRNA target sequence for SLC17A3 (NM_006632.1,1189-1207).
gaaaattgccacaatttta

SEQ ID NO: 257602 - DNA, 19 bp, Homo sapiens
  siRNA target sequence for SLC17A3 (NM_006632.1,1250-1268).
ctcaattccggctatatca

SEQ ID NO: 257603 - DNA, 19 bp, Homo sapiens
  siRNA target sequence for SLC17A3 (NM_006632.1,1252-1270).
caattccggctatatcaca

SEQ ID NO: 257604 - DNA, 19 bp, Homo sapiens
  siRNA target sequence for SLC17A3 (NM_006632.1,1297-1315).
cggattaagcacattgtgt

SEQ ID NO: 257605 - DNA, 19 bp, Homo sapiens
  siRNA target sequence for SLC17A3 (NM_006632.1,1375-1393).
gggagcatcaagaggattt

SEQ ID NO: 257606 - DNA, 19 bp, Homo sapiens
  siRNA target sequence for SLC17A3 (NM_006632.1,1379-1397).
gcatcaagaggattttcga

SEQ ID NO: 257607 - DNA, 19 bp, Homo sapiens
  siRNA target sequence for SLC17A3 (NM_006632.1,1396-1414).
gagcatagcacctgtcatt

SEQ ID NO: 257608 - DNA, 19 bp, Homo sapiens
  siRNA target sequence for SLC17A3 (NM_006632.1,1398-1416).
gcatagcacctgtcattgt

SEQ ID NO: 257609 - DNA, 19 bp, Homo sapiens
  siRNA target sequence for SLC17A3 (NM_006632.1,1508-1526).
ctactcttctacctcatat

SEQ ID NO: 257610 - DNA, 19 bp, Homo sapiens
  siRNA target sequence for SLC17A3 (NM_006632.1,1551-1569).
gggctaaagagagaaaact

SEQ ID NO: 257611 - DNA, 19 bp, Homo sapiens
  siRNA target sequence for SLC17A3 (NM_006632.1,1561-1579).
gagaaaactcactcgttta

SEQ ID NO: 257612 - DNA, 19 bp, Homo sapiens
  siRNA target sequence for SLC1A1 (NM_004170.3,276-294).
cgcttcctgaagaataact

SEQ ID NO: 257613 - DNA, 19 bp, Homo sapiens
  siRNA target sequence for SLC1A1 (NM_004170.3,321-339).
gtggtgctaggcattacca

SEQ ID NO: 257614 - DNA, 19 bp, Homo sapiens
  siRNA target sequence for SLC1A1 (NM_004170.3,421-439).
ggatgctgaaactcatcat

SEQ ID NO: 257615 - DNA, 19 bp, Homo sapiens
  siRNA target sequence for SLC1A1 (NM_004170.3,480-498).
gcactggattccaacgtat

SEQ ID NO: 257616 - DNA, 19 bp, Homo sapiens
  siRNA target sequence for SLC1A1 (NM_004170.3,490-508).
ccaacgtatccggaaaaat

SEQ ID NO: 257617 - DNA, 19 bp, Homo sapiens
  siRNA target sequence for SLC1A1 (NM_004170.3,491-509).
caacgtatccggaaaaatt

SEQ ID NO: 257618 - DNA, 19 bp, Homo sapiens
  siRNA target sequence for SLC1A1 (NM_004170.3,494-512).
cgtatccggaaaaattggt

SEQ ID NO: 257619 - DNA, 19 bp, Homo sapiens
  siRNA target sequence for SLC1A1 (NM_004170.3,515-533).
gcgcgctgtcgtgtattat

SEQ ID NO: 257620 - DNA, 19 bp, Homo sapiens
  siRNA target sequence for SLC1A1 (NM_004170.3,516-534).
cgcgctgtcgtgtattatt

SEQ ID NO: 257621 - DNA, 19 bp, Homo sapiens
  siRNA target sequence for SLC1A1 (NM_004170.3,517-535).
gcgctgtcgtgtattattt

SEQ ID NO: 257622 - DNA, 19 bp, Homo sapiens
  siRNA target sequence for SLC1A1 (NM_004170.3,519-537).
gctgtcgtgtattatttct

SEQ ID NO: 257623 - DNA, 19 bp, Homo sapiens
  siRNA target sequence for SLC1A1 (NM_004170.3,522-540).
gtcgtgtattatttctgta

SEQ ID NO: 257624 - DNA, 19 bp, Homo sapiens
  siRNA target sequence for SLC1A1 (NM_004170.3,541-559).
ccactctcattgctgttat

SEQ ID NO: 257625 - DNA, 19 bp, Homo sapiens
  siRNA target sequence for SLC1A1 (NM_004170.3,553-571).
ctgttattctaggtattgt

SEQ ID NO: 257626 - DNA, 19 bp, Homo sapiens
  siRNA target sequence for SLC1A1 (NM_004170.3,652-670).
cggtggatgccatgttaga

SEQ ID NO: 257627 - DNA, 19 bp, Homo sapiens
  siRNA target sequence for SLC1A1 (NM_004170.3,709-727).
cctgttttcagcagtacaa

SEQ ID NO: 257628 - DNA, 19 bp, Homo sapiens
  siRNA target sequence for SLC1A1 (NM_004170.3,710-728).
ctgttttcagcagtacaaa

SEQ ID NO: 257629 - DNA, 19 bp, Homo sapiens
  siRNA target sequence for SLC1A1 (NM_004170.3,725-743).
caaaactaagcgtgaagaa

SEQ ID NO: 257630 - DNA, 19 bp, Homo sapiens
  siRNA target sequence for SLC1A1 (NM_004170.3,730-748).
ctaagcgtgaagaagtgaa

SEQ ID NO: 257631 - DNA, 19 bp, Homo sapiens
  siRNA target sequence for SLC1A1 (NM_004170.3,757-775).
gcgatccagagatgaacat

SEQ ID NO: 257632 - DNA, 19 bp, Homo sapiens
  siRNA target sequence for SLC1A1 (NM_004170.3,873-891).
gtcctgggcttgattgtct

SEQ ID NO: 257633 - DNA, 19 bp, Homo sapiens
  siRNA target sequence for SLC1A1 (NM_004170.3,937-955).
gacaaattctggtggattt

SEQ ID NO: 257634 - DNA, 19 bp, Homo sapiens
  siRNA target sequence for SLC1A1 (NM_004170.3,979-997).
ccatgaaaatcgttcagat

SEQ ID NO: 257635 - DNA, 19 bp, Homo sapiens
  siRNA target sequence for SLC1A1 (NM_004170.3,990-1008).
gttcagatcatcatgtgtt

SEQ ID NO: 257636 - DNA, 19 bp, Homo sapiens
  siRNA target sequence for SLC1A1 (NM_004170.3,1006-1024).
gttatatgccactaggtat

SEQ ID NO: 257637 - DNA, 19 bp, Homo sapiens
  siRNA target sequence for SLC1A1 (NM_004170.3,1077-1095).
cgcaagctgggcctttaca

SEQ ID NO: 257638 - DNA, 19 bp, Homo sapiens
  siRNA target sequence for SLC1A1 (NM_004170.3,1078-1096).
gcaagctgggcctttacat

SEQ ID NO: 257639 - DNA, 19 bp, Homo sapiens
  siRNA target sequence for SLC1A1 (NM_004170.3,1119-1137).
gcaatccactccattgtaa

SEQ ID NO: 257640 - DNA, 19 bp, Homo sapiens
  siRNA target sequence for SLC1A1 (NM_004170.3,1120-1138).
caatccactccattgtaat

SEQ ID NO: 257641 - DNA, 19 bp, Homo sapiens
  siRNA target sequence for SLC1A1 (NM_004170.3,1134-1152).
gtaattctcccgctgatat

SEQ ID NO: 257642 - DNA, 19 bp, Homo sapiens
  siRNA target sequence for SLC1A1 (NM_004170.3,1142-1160).
cccgctgatatatttcata

SEQ ID NO: 257643 - DNA, 19 bp, Homo sapiens
  siRNA target sequence for SLC1A1 (NM_004170.3,1317-1335).
cccgttggtgcaacaatca

SEQ ID NO: 257644 - DNA, 19 bp, Homo sapiens
  siRNA target sequence for SLC1A1 (NM_004170.3,1318-1336).
ccgttggtgcaacaatcaa

SEQ ID NO: 257645 - DNA, 19 bp, Homo sapiens
  siRNA target sequence for SLC1A1 (NM_004170.3,1363-1381).
cagtggcagcggtgtttat

SEQ ID NO: 257646 - DNA, 19 bp, Homo sapiens
  siRNA target sequence for SLC1A1 (NM_004170.3,1367-1385).
ggcagcggtgtttattgca

SEQ ID NO: 257647 - DNA, 19 bp, Homo sapiens
  siRNA target sequence for SLC1A1 (NM_004170.3,1592-1610).
cgtccttggtgatgctttt

SEQ ID NO: 257648 - DNA, 19 bp, Homo sapiens
  siRNA target sequence for SLC1A1 (NM_004170.3,1612-1630).
ggacgggcattgtggaaaa

SEQ ID NO: 257649 - DNA, 19 bp, Homo sapiens
  siRNA target sequence for SLC1A1 (NM_004170.3,1655-1673).
gatggatgtttcatctgaa

SEQ ID NO: 257650 - DNA, 19 bp, Homo sapiens
  siRNA target sequence for SLC1A1 (NM_004170.3,1666-1684).
catctgaagtcaacattgt

SEQ ID NO: 257651 - DNA, 19 bp, Homo sapiens
  siRNA target sequence for SLC1A3 (NM_004172.3,376-394).
cctgtttcggaatgctttt

SEQ ID NO: 257652 - DNA, 19 bp, Homo sapiens
  siRNA target sequence for SLC1A3 (NM_004172.3,414-432).
ctgtcattgtgggtacaat

SEQ ID NO: 257653 - DNA, 19 bp, Homo sapiens
  siRNA target sequence for SLC1A3 (NM_004172.3,444-462).
ccctccgaccatacagaat

SEQ ID NO: 257654 - DNA, 19 bp, Homo sapiens
  siRNA target sequence for SLC1A3 (NM_004172.3,446-464).
ctccgaccatacagaatga

SEQ ID NO: 257655 - DNA, 19 bp, Homo sapiens
  siRNA target sequence for SLC1A3 (NM_004172.3,527-545).
ctggtcttaccacttatca

SEQ ID NO: 257656 - DNA, 19 bp, Homo sapiens
  siRNA target sequence for SLC1A3 (NM_004172.3,603-621).
gaatgcgagctgtagtcta

SEQ ID NO: 257657 - DNA, 19 bp, Homo sapiens
  siRNA target sequence for SLC1A3 (NM_004172.3,607-625).
gcgagctgtagtctattat

SEQ ID NO: 257658 - DNA, 19 bp, Homo sapiens
  siRNA target sequence for SLC1A3 (NM_004172.3,608-626).
cgagctgtagtctattata

SEQ ID NO: 257659 - DNA, 19 bp, Homo sapiens
  siRNA target sequence for SLC1A3 (NM_004172.3,609-627).
gagctgtagtctattatat

SEQ ID NO: 257660 - DNA, 19 bp, Homo sapiens
  siRNA target sequence for SLC1A3 (NM_004172.3,614-632).
gtagtctattatatgacta

SEQ ID NO: 257661 - DNA, 19 bp, Homo sapiens
  siRNA target sequence for SLC1A3 (NM_004172.3,647-665).
gtggtgattggcataatca

SEQ ID NO: 257662 - DNA, 19 bp, Homo sapiens
  siRNA target sequence for SLC1A3 (NM_004172.3,769-787).
gaacatgttccctccaaat

SEQ ID NO: 257663 - DNA, 19 bp, Homo sapiens
  siRNA target sequence for SLC1A3 (NM_004172.3,790-808).
ggtagaagcctgctttaaa

SEQ ID NO: 257664 - DNA, 19 bp, Homo sapiens
  siRNA target sequence for SLC1A3 (NM_004172.3,848-866).
cccatccaggccaacgaaa

SEQ ID NO: 257665 - DNA, 19 bp, Homo sapiens
  siRNA target sequence for SLC1A3 (NM_004172.3,910-928).
gactcttacccgaatcaca

SEQ ID NO: 257666 - DNA, 19 bp, Homo sapiens
  siRNA target sequence for SLC1A3 (NM_004172.3,1039-1057).
ggccctgagagagttcttt

SEQ ID NO: 257667 - DNA, 19 bp, Homo sapiens
  siRNA target sequence for SLC1A3 (NM_004172.3,1047-1065).
gagagttctttgattctct

SEQ ID NO: 257668 - DNA, 19 bp, Homo sapiens
  siRNA target sequence for SLC1A3 (NM_004172.3,1049-1067).
gagttctttgattctctta

SEQ ID NO: 257669 - DNA, 19 bp, Homo sapiens
  siRNA target sequence for SLC1A3 (NM_004172.3,1064-1082).
cttaacgaagccatcatga

SEQ ID NO: 257670 - DNA, 19 bp, Homo sapiens
  siRNA target sequence for SLC1A3 (NM_004172.3,1083-1101).
gactggtagcagtaataat

SEQ ID NO: 257671 - DNA, 19 bp, Homo sapiens
  siRNA target sequence for SLC1A3 (NM_004172.3,1085-1103).
ctggtagcagtaataatgt

SEQ ID NO: 257672 - DNA, 19 bp, Homo sapiens
  siRNA target sequence for SLC1A3 (NM_004172.3,1192-1210).
gtacaccgtgactgtcatt

SEQ ID NO: 257673 - DNA, 19 bp, Homo sapiens
  siRNA target sequence for SLC1A3 (NM_004172.3,1276-1294).
cccttgggtttttattgga

SEQ ID NO: 257674 - DNA, 19 bp, Homo sapiens
  siRNA target sequence for SLC1A3 (NM_004172.3,1319-1337).
gctctggggacctcttcaa

SEQ ID NO: 257675 - DNA, 19 bp, Homo sapiens
  siRNA target sequence for SLC1A3 (NM_004172.3,1322-1340).
ctggggacctcttcaagtt

SEQ ID NO: 257676 - DNA, 19 bp, Homo sapiens
  siRNA target sequence for SLC1A3 (NM_004172.3,1419-1437).
ccgtaggagccaccattaa

SEQ ID NO: 257677 - DNA, 19 bp, Homo sapiens
  siRNA target sequence for SLC1A3 (NM_004172.3,1505-1523).
ctgaacttcggacaaatta

SEQ ID NO: 257678 - DNA, 19 bp, Homo sapiens
  siRNA target sequence for SLC1A3 (NM_004172.3,1514-1532).
ggacaaattattacaatca

SEQ ID NO: 257679 - DNA, 19 bp, Homo sapiens
  siRNA target sequence for SLC1A3 (NM_004172.3,1729-1747).
gcacttgtcacgacatgaa

SEQ ID NO: 257680 - DNA, 19 bp, Homo sapiens
  siRNA target sequence for SLC1A3 (NM_004172.3,1739-1757).
cgacatgaactgaagaaca

SEQ ID NO: 257681 - DNA, 19 bp, Homo sapiens
  siRNA target sequence for SLC1A4 (NM_003038.2,529-547).
catcgctgtcgcctacttt

SEQ ID NO: 257682 - DNA, 19 bp, Homo sapiens
  siRNA target sequence for SLC1A4 (NM_003038.2,753-771).
cgtatgcaaccgattataa

SEQ ID NO: 257683 - DNA, 19 bp, Homo sapiens
  siRNA target sequence for SLC1A4 (NM_003038.2,822-840).
ccataggcactgagataga

SEQ ID NO: 257684 - DNA, 19 bp, Homo sapiens
  siRNA target sequence for SLC1A4 (NM_003038.2,835-853).
gatagaagggatgaacatt

SEQ ID NO: 257685 - DNA, 19 bp, Homo sapiens
  siRNA target sequence for SLC1A4 (NM_003038.2,920-938).
gacctcatccgtttcttca

SEQ ID NO: 257686 - DNA, 19 bp, Homo sapiens
  siRNA target sequence for SLC1A4 (NM_003038.2,922-940).
cctcatccgtttcttcaat

SEQ ID NO: 257687 - DNA, 19 bp, Homo sapiens
  siRNA target sequence for SLC1A4 (NM_003038.2,1113-1131).
gaattgttctgccacttat

SEQ ID NO: 257688 - DNA, 19 bp, Homo sapiens
  siRNA target sequence for SLC1A4 (NM_003038.2,1186-1204).
cccatttgcgacagcattt

SEQ ID NO: 257689 - DNA, 19 bp, Homo sapiens
  siRNA target sequence for SLC1A4 (NM_003038.2,1223-1241).
gcgacccttccctctatga

SEQ ID NO: 257690 - DNA, 19 bp, Homo sapiens
  siRNA target sequence for SLC1A4 (NM_003038.2,1224-1242).
cgacccttccctctatgat

SEQ ID NO: 257691 - DNA, 19 bp, Homo sapiens
  siRNA target sequence for SLC1A4 (NM_003038.2,1227-1245).
cccttccctctatgatgaa

SEQ ID NO: 257692 - DNA, 19 bp, Homo sapiens
  siRNA target sequence for SLC1A4 (NM_003038.2,1385-1403).
ctcaacgcaggacagattt

SEQ ID NO: 257693 - DNA, 19 bp, Homo sapiens
  siRNA target sequence for SLC1A4 (NM_003038.2,1495-1513).
cattgggctgcctactcat

SEQ ID NO: 257694 - DNA, 19 bp, Homo sapiens
  siRNA target sequence for SLC1A6 (NM_005071.1,167-185).
gcgccgaaacgccttcatt

SEQ ID NO: 257695 - DNA, 19 bp, Homo sapiens
  siRNA target sequence for SLC1A6 (NM_005071.1,169-187).
gccgaaacgccttcattct

SEQ ID NO: 257696 - DNA, 19 bp, Homo sapiens
  siRNA target sequence for SLC1A6 (NM_005071.1,253-271).
cctaccgccagatcaagta

SEQ ID NO: 257697 - DNA, 19 bp, Homo sapiens
  siRNA target sequence for SLC1A6 (NM_005071.1,258-276).
cgccagatcaagtacttct

SEQ ID NO: 257698 - DNA, 19 bp, Homo sapiens
  siRNA target sequence for SLC1A6 (NM_005071.1,396-414).
cgggcagctgtgtactaca

SEQ ID NO: 257699 - DNA, 19 bp, Homo sapiens
  siRNA target sequence for SLC1A6 (NM_005071.1,397-415).
gggcagctgtgtactacat

SEQ ID NO: 257700 - DNA, 19 bp, Homo sapiens
  siRNA target sequence for SLC1A6 (NM_005071.1,546-564).
gacctgatcagaaatatgt

SEQ ID NO: 257701 - DNA, 19 bp, Homo sapiens
  siRNA target sequence for SLC1A6 (NM_005071.1,903-921).
ctcaatgaggctattatga

SEQ ID NO: 257702 - DNA, 19 bp, Homo sapiens
  siRNA target sequence for SLC1A6 (NM_005071.1,1017-1035).
ggtcagctgggcatgtaca

SEQ ID NO: 257703 - DNA, 19 bp, Homo sapiens
  siRNA target sequence for SLC1A6 (NM_005071.1,1459-1477).
gcttgcccacggaagacat

SEQ ID NO: 257704 - DNA, 19 bp, Homo sapiens
  siRNA target sequence for SLC1A6 (NM_005071.1,1509-1527).
gaccggcttcgcacaatga

SEQ ID NO: 257705 - DNA, 19 bp, Homo sapiens
  siRNA target sequence for SLC1A6 (NM_005071.1,1532-1550).
cgtactgggggactcaatt

SEQ ID NO: 257706 - DNA, 19 bp, Homo sapiens
  siRNA target sequence for SLC1A6 (NM_005071.1,1623-1641).
ctggggaaaccctacaagt

SEQ ID NO: 257707 - DNA, 19 bp, Homo sapiens
  siRNA target sequence for SLC1A7 (NM_006671.3,222-240).
ctcctcggcttcttcttga

SEQ ID NO: 257708 - DNA, 19 bp, Homo sapiens
  siRNA target sequence for SLC1A7 (NM_006671.3,259-277).
cacaggaaattagttactt

SEQ ID NO: 257709 - DNA, 19 bp, Homo sapiens
  siRNA target sequence for SLC1A7 (NM_006671.3,585-603).
gaagccacattcaaacagt

SEQ ID NO: 257710 - DNA, 19 bp, Homo sapiens
  siRNA target sequence for SLC1A7 (NM_006671.3,664-682).
ctcggcggatcctcatcta

SEQ ID NO: 257711 - DNA, 19 bp, Homo sapiens
  siRNA target sequence for SLC1A7 (NM_006671.3,703-721).
gctcccatgtgcagaactt

SEQ ID NO: 257712 - DNA, 19 bp, Homo sapiens
  siRNA target sequence for SLC1A7 (NM_006671.3,775-793).
ccagcgatggcatgaatgt

SEQ ID NO: 257713 - DNA, 19 bp, Homo sapiens
  siRNA target sequence for SLC1A7 (NM_006671.3,912-930).
gcggtggctgtgtggtatt

SEQ ID NO: 257714 - DNA, 19 bp, Homo sapiens
  siRNA target sequence for SLC1A7 (NM_006671.3,913-931).
cggtggctgtgtggtattt

SEQ ID NO: 257715 - DNA, 19 bp, Homo sapiens
  siRNA target sequence for SLC1A7 (NM_006671.3,1493-1511).
ccgtttccgcaccatgatt

SEQ ID NO: 257716 - DNA, 19 bp, Homo sapiens
  siRNA target sequence for SLC1A7 (NM_006671.3,1494-1512).
cgtttccgcaccatgatta

SEQ ID NO: 257717 - DNA, 19 bp, Homo sapiens
  siRNA target sequence for SLC1A7 (NM_006671.3,1495-1513).
gtttccgcaccatgattaa

SEQ ID NO: 257718 - DNA, 19 bp, Homo sapiens
  siRNA target sequence for SLC1A7 (NM_006671.3,1551-1569).
catatatgtcggaaggatt

SEQ ID NO: 257719 - DNA, 19 bp, Homo sapiens
  siRNA target sequence for SLC23A1 (NM_005847.2,102-120).
ccacagagcctaagtttga

SEQ ID NO: 257720 - DNA, 19 bp, Homo sapiens
  siRNA target sequence for SLC23A1 (NM_005847.2,989-1007).
gctgtcctgggaatgttca

SEQ ID NO: 257721 - DNA, 19 bp, Homo sapiens
  siRNA target sequence for SLC23A1 (NM_005847.2,1031-1049).
gagtccatcggagattact

SEQ ID NO: 257722 - DNA, 19 bp, Homo sapiens
  siRNA target sequence for SLC23A1 (NM_005847.2,1080-1098).
cccctccagtacatgctat

SEQ ID NO: 257723 - DNA, 19 bp, Homo sapiens
  siRNA target sequence for SLC23A1 (NM_005847.2,1085-1103).
ccagtacatgctatcaaca

SEQ ID NO: 257724 - DNA, 19 bp, Homo sapiens
  siRNA target sequence for SLC23A1 (NM_005847.2,1190-1208).
ggcgtcctgggaattacca

SEQ ID NO: 257725 - DNA, 19 bp, Homo sapiens
  siRNA target sequence for SLC23A1 (NM_005847.2,1330-1348).
cactctctttggcatgatt

SEQ ID NO: 257726 - DNA, 19 bp, Homo sapiens
  siRNA target sequence for SLC23A1 (NM_005847.2,1359-1377).
ggctgtccaacctgcaatt

SEQ ID NO: 257727 - DNA, 19 bp, Homo sapiens
  siRNA target sequence for SLC23A1 (NM_005847.2,1360-1378).
gctgtccaacctgcaattt

SEQ ID NO: 257728 - DNA, 19 bp, Homo sapiens
  siRNA target sequence for SLC23A1 (NM_005847.2,1434-1452).
ggctcacgctgcccaatta

SEQ ID NO: 257729 - DNA, 19 bp, Homo sapiens
  siRNA target sequence for SLC23A1 (NM_005847.2,1465-1483).
ccctggcgccatcaataca

SEQ ID NO: 257730 - DNA, 19 bp, Homo sapiens
  siRNA target sequence for SLC23A1 (NM_005847.2,1543-1561).
cgggtgccttgctttcata

SEQ ID NO: 257731 - DNA, 19 bp, Homo sapiens
  siRNA target sequence for SLC23A1 (NM_005847.2,1592-1610).
gagcgtggtctgatacagt

SEQ ID NO: 257732 - DNA, 19 bp, Homo sapiens
  siRNA target sequence for SLC23A1 (NM_005847.2,1628-1646).
gccaacagtgacatgtctt

SEQ ID NO: 257733 - DNA, 19 bp, Homo sapiens
  siRNA target sequence for SLC23A1 (NM_005847.2,1650-1668).
gcctcaagagctacgattt

SEQ ID NO: 257734 - DNA, 19 bp, Homo sapiens
  siRNA target sequence for SLC23A1 (NM_005847.2,1719-1737).
ctatctgcccagtcttcaa

SEQ ID NO: 257735 - DNA, 19 bp, Homo sapiens
  siRNA target sequence for SLC23A1 (NM_005847.2,1730-1748).
gtcttcaaaggattttctt

SEQ ID NO: 257736 - DNA, 19 bp, Homo sapiens
  siRNA target sequence for SLC24A1 (NM_004727.1,333-351).
cggacaaagcggcttcatt

SEQ ID NO: 257737 - DNA, 19 bp, Homo sapiens
  siRNA target sequence for SLC24A1 (NM_004727.1,380-398).
gttgatcatcggttctact

SEQ ID NO: 257738 - DNA, 19 bp, Homo sapiens
  siRNA target sequence for SLC24A1 (NM_004727.1,383-401).
gatcatcggttctacttat

SEQ ID NO: 257739 - DNA, 19 bp, Homo sapiens
  siRNA target sequence for SLC24A1 (NM_004727.1,454-472).
ctcatcagcctataaaact

SEQ ID NO: 257740 - DNA, 19 bp, Homo sapiens
  siRNA target sequence for SLC24A1 (NM_004727.1,515-533).
cagcagcccttcaaaacct

SEQ ID NO: 257741 - DNA, 19 bp, Homo sapiens
  siRNA target sequence for SLC24A1 (NM_004727.1,538-556).
ccgaaatggggggtaagat

SEQ ID NO: 257742 - DNA, 19 bp, Homo sapiens
  siRNA target sequence for SLC24A1 (NM_004727.1,601-619).
gcatgacagtggagaatat

SEQ ID NO: 257743 - DNA, 19 bp, Homo sapiens
  siRNA target sequence for SLC24A1 (NM_004727.1,730-748).
gtagaacactgacttacta

SEQ ID NO: 257744 - DNA, 19 bp, Homo sapiens
  siRNA target sequence for SLC24A1 (NM_004727.1,812-830).
gagctacagcccaactcaa

SEQ ID NO: 257745 - DNA, 19 bp, Homo sapiens
  siRNA target sequence for SLC24A1 (NM_004727.1,891-909).
ccgtccacattcatgacaa

SEQ ID NO: 257746 - DNA, 19 bp, Homo sapiens
  siRNA target sequence for SLC24A1 (NM_004727.1,892-910).
cgtccacattcatgacaat

SEQ ID NO: 257747 - DNA, 19 bp, Homo sapiens
  siRNA target sequence for SLC24A1 (NM_004727.1,945-963).
gtgaaagacagtgacatta

SEQ ID NO: 257748 - DNA, 19 bp, Homo sapiens
  siRNA target sequence for SLC24A1 (NM_004727.1,964-982).
cagcaacctataaaatact

SEQ ID NO: 257749 - DNA, 19 bp, Homo sapiens
  siRNA target sequence for SLC24A1 (NM_004727.1,994-1012).
ctcttaagagaataatgga

SEQ ID NO: 257750 - DNA, 19 bp, Homo sapiens
  siRNA target sequence for SLC24A1 (NM_004727.1,1027-1045).
ccactctcaagggaatgtt

SEQ ID NO: 257751 - DNA, 19 bp, Homo sapiens
  siRNA target sequence for SLC24A1 (NM_004727.1,1028-1046).
cactctcaagggaatgttt

SEQ ID NO: 257752 - DNA, 19 bp, Homo sapiens
  siRNA target sequence for SLC24A1 (NM_004727.1,1212-1230).
ggaacagtcctgttgcata

SEQ ID NO: 257753 - DNA, 19 bp, Homo sapiens
  siRNA target sequence for SLC24A1 (NM_004727.1,1248-1266).
gggcaggtgacaataagca

SEQ ID NO: 257754 - DNA, 19 bp, Homo sapiens
  siRNA target sequence for SLC24A1 (NM_004727.1,1648-1666).
gggtggtcctgcacgtttt

SEQ ID NO: 257755 - DNA, 19 bp, Homo sapiens
  siRNA target sequence for SLC24A1 (NM_004727.1,1649-1667).
ggtggtcctgcacgttttt

SEQ ID NO: 257756 - DNA, 19 bp, Homo sapiens
  siRNA target sequence for SLC24A1 (NM_004727.1,1659-1677).
cacgtttttggcatgatgt

SEQ ID NO: 257757 - DNA, 19 bp, Homo sapiens
  siRNA target sequence for SLC24A1 (NM_004727.1,1661-1679).
cgtttttggcatgatgtat

SEQ ID NO: 257758 - DNA, 19 bp, Homo sapiens
  siRNA target sequence for SLC24A1 (NM_004727.1,1669-1687).
gcatgatgtatgtgtttgt

SEQ ID NO: 257759 - DNA, 19 bp, Homo sapiens
  siRNA target sequence for SLC24A1 (NM_004727.1,1853-1871).
cgtgggcattggtaccatt

SEQ ID NO: 257760 - DNA, 19 bp, Homo sapiens
  siRNA target sequence for SLC24A1 (NM_004727.1,2509-2527).
caggcggtcaggaagatgt

SEQ ID NO: 257761 - DNA, 19 bp, Homo sapiens
  siRNA target sequence for SLC24A1 (NM_004727.1,2801-2819).
cggtgaagccaaaaatgat

SEQ ID NO: 257762 - DNA, 19 bp, Homo sapiens
  siRNA target sequence for SLC24A1 (NM_004727.1,3077-3095).
gcaggagtctaggaagttt

SEQ ID NO: 257763 - DNA, 19 bp, Homo sapiens
  siRNA target sequence for SLC24A1 (NM_004727.1,3078-3096).
caggagtctaggaagtttt

SEQ ID NO: 257764 - DNA, 19 bp, Homo sapiens
  siRNA target sequence for SLC24A1 (NM_004727.1,3106-3124).
ccttcctgggatctatcat

SEQ ID NO: 257765 - DNA, 19 bp, Homo sapiens
  siRNA target sequence for SLC24A1 (NM_004727.1,3302-3320).
ctctgtgggcagtaacata

SEQ ID NO: 257766 - DNA, 19 bp, Homo sapiens
  siRNA target sequence for SLC24A1 (NM_004727.1,3304-3322).
ctgtgggcagtaacatatt

SEQ ID NO: 257767 - DNA, 19 bp, Homo sapiens
  siRNA target sequence for SLC24A1 (NM_004727.1,3309-3327).
ggcagtaacatatttgata

SEQ ID NO: 257768 - DNA, 19 bp, Homo sapiens
  siRNA target sequence for SLC24A1 (NM_004727.1,3310-3328).
gcagtaacatatttgatat

SEQ ID NO: 257769 - DNA, 19 bp, Homo sapiens
  siRNA target sequence for SLC24A1 (NM_004727.1,3362-3380).
ctctcttatcaatggatta

SEQ ID NO: 257770 - DNA, 19 bp, Homo sapiens
  siRNA target sequence for SLC24A1 (NM_004727.1,3364-3382).
ctcttatcaatggattaca

SEQ ID NO: 257771 - DNA, 19 bp, Homo sapiens
  siRNA target sequence for SLC24A1 (NM_004727.1,3457-3475).
cttcaattgcgtcatgtaa

SEQ ID NO: 257772 - DNA, 19 bp, Homo sapiens
  siRNA target sequence for SLC24A1 (NM_004727.1,3539-3557).
cagtgtgatgttagaagat

SEQ ID NO: 257773 - DNA, 19 bp, Homo sapiens
  siRNA target sequence for SLC24A1 (NM_004727.1,3552-3570).
gaagatcgaatcatatcct

SEQ ID NO: 257774 - DNA, 19 bp, Homo sapiens
  siRNA target sequence for SLC24A2 (NM_020344.1,133-151).
gcagaagacattatagtgt

SEQ ID NO: 257775 - DNA, 19 bp, Homo sapiens
  siRNA target sequence for SLC24A2 (NM_020344.1,174-192).
cgagtcttaggccttttca

SEQ ID NO: 257776 - DNA, 19 bp, Homo sapiens
  siRNA target sequence for SLC24A2 (NM_020344.1,195-213).
ggtctggtagccattagca

SEQ ID NO: 257777 - DNA, 19 bp, Homo sapiens
  siRNA target sequence for SLC24A2 (NM_020344.1,226-244).
caatcagtgccttttctga

SEQ ID NO: 257778 - DNA, 19 bp, Homo sapiens
  siRNA target sequence for SLC24A2 (NM_020344.1,308-326).
ccatcagagaactctctta

SEQ ID NO: 257779 - DNA, 19 bp, Homo sapiens
  siRNA target sequence for SLC24A2 (NM_020344.1,316-334).
gaactctcttagatttaaa

SEQ ID NO: 257780 - DNA, 19 bp, Homo sapiens
  siRNA target sequence for SLC24A2 (NM_020344.1,336-354).
gacaagattctggattata

SEQ ID NO: 257781 - DNA, 19 bp, Homo sapiens
  siRNA target sequence for SLC24A2 (NM_020344.1,378-396).
gaaggcgagtctgagaata

SEQ ID NO: 257782 - DNA, 19 bp, Homo sapiens
  siRNA target sequence for SLC24A2 (NM_020344.1,381-399).
ggcgagtctgagaatagta

SEQ ID NO: 257783 - DNA, 19 bp, Homo sapiens
  siRNA target sequence for SLC24A2 (NM_020344.1,383-401).
cgagtctgagaatagtaca

SEQ ID NO: 257784 - DNA, 19 bp, Homo sapiens
  siRNA target sequence for SLC24A2 (NM_020344.1,414-432).
ggagactacccgaaagaca

SEQ ID NO: 257785 - DNA, 19 bp, Homo sapiens
  siRNA target sequence for SLC24A2 (NM_020344.1,415-433).
gagactacccgaaagacat

SEQ ID NO: 257786 - DNA, 19 bp, Homo sapiens
  siRNA target sequence for SLC24A2 (NM_020344.1,419-437).
ctacccgaaagacatcttt

SEQ ID NO: 257787 - DNA, 19 bp, Homo sapiens
  siRNA target sequence for SLC24A2 (NM_020344.1,463-481).
cgatcattctgcatgtcat

SEQ ID NO: 257788 - DNA, 19 bp, Homo sapiens
  siRNA target sequence for SLC24A2 (NM_020344.1,464-482).
gatcattctgcatgtcatt

SEQ ID NO: 257789 - DNA, 19 bp, Homo sapiens
  siRNA target sequence for SLC24A2 (NM_020344.1,637-655).
ctctcataggggtatttat

SEQ ID NO: 257790 - DNA, 19 bp, Homo sapiens
  siRNA target sequence for SLC24A2 (NM_020344.1,668-686).
cgttggcataggcacaatt

SEQ ID NO: 257791 - DNA, 19 bp, Homo sapiens
  siRNA target sequence for SLC24A2 (NM_020344.1,687-705).
gtaggttcagcagtattca

SEQ ID NO: 257792 - DNA, 19 bp, Homo sapiens
  siRNA target sequence for SLC24A2 (NM_020344.1,742-760).
ctagagaaatcttaaacct

SEQ ID NO: 257793 - DNA, 19 bp, Homo sapiens
  siRNA target sequence for SLC24A2 (NM_020344.1,780-798).
cgagatgtgtctttctaca

SEQ ID NO: 257794 - DNA, 19 bp, Homo sapiens
  siRNA target sequence for SLC24A2 (NM_020344.1,790-808).
ctttctacattgttgactt

SEQ ID NO: 257795 - DNA, 19 bp, Homo sapiens
  siRNA target sequence for SLC24A2 (NM_020344.1,806-824).
cttgatcatgctgatcata

SEQ ID NO: 257796 - DNA, 19 bp, Homo sapiens
  siRNA target sequence for SLC24A2 (NM_020344.1,908-926).
caacgtccaagtagaaaaa

SEQ ID NO: 257797 - DNA, 19 bp, Homo sapiens
  siRNA target sequence for SLC24A2 (NM_020344.1,1127-1145).
cccactcgccgaagaactt

SEQ ID NO: 257798 - DNA, 19 bp, Homo sapiens
  siRNA target sequence for SLC24A2 (NM_020344.1,1135-1153).
ccgaagaacttggatcata

SEQ ID NO: 257799 - DNA, 19 bp, Homo sapiens
  siRNA target sequence for SLC24A2 (NM_020344.1,1136-1154).
cgaagaacttggatcatat

SEQ ID NO: 257800 - DNA, 19 bp, Homo sapiens
  siRNA target sequence for SLC24A2 (NM_020344.1,1146-1164).
ggatcatatggaaaactaa

SEQ ID NO: 257801 - DNA, 19 bp, Homo sapiens
  siRNA target sequence for SLC24A2 (NM_020344.1,1210-1228).
cttcaattctccacaagat

SEQ ID NO: 257802 - DNA, 19 bp, Homo sapiens
  siRNA target sequence for SLC24A2 (NM_020344.1,1315-1333).
ccagcacagatgttgaaat

SEQ ID NO: 257803 - DNA, 19 bp, Homo sapiens
  siRNA target sequence for SLC24A2 (NM_020344.1,1360-1378).
ctgtacaaaatggaaatct

SEQ ID NO: 257804 - DNA, 19 bp, Homo sapiens
  siRNA target sequence for SLC24A2 (NM_020344.1,1524-1542).
cctgacgttcgcaaacctt

SEQ ID NO: 257805 - DNA, 19 bp, Homo sapiens
  siRNA target sequence for SLC24A2 (NM_020344.1,1586-1604).
ctggattgcagtattctct

SEQ ID NO: 257806 - DNA, 19 bp, Homo sapiens
  siRNA target sequence for SLC24A2 (NM_020344.1,1588-1606).
ggattgcagtattctctta

SEQ ID NO: 257807 - DNA, 19 bp, Homo sapiens
  siRNA target sequence for SLC24A2 (NM_020344.1,1628-1646).
ccaggttggagagacaatt

SEQ ID NO: 257808 - DNA, 19 bp, Homo sapiens
  siRNA target sequence for SLC24A2 (NM_020344.1,1648-1666).
gcatcagtgaagagattat

SEQ ID NO: 257809 - DNA, 19 bp, Homo sapiens
  siRNA target sequence for SLC24A2 (NM_020344.1,1763-1781).
ctctgttggaagcaacatt

SEQ ID NO: 257810 - DNA, 19 bp, Homo sapiens
  siRNA target sequence for SLC24A2 (NM_020344.1,1765-1783).
ctgttggaagcaacatttt

SEQ ID NO: 257811 - DNA, 19 bp, Homo sapiens
  siRNA target sequence for SLC24A2 (NM_020344.1,1818-1836).
ctgtacaccgtcattcaca

SEQ ID NO: 257812 - DNA, 19 bp, Homo sapiens
  siRNA target sequence for SLC24A2 (NM_020344.1,1933-1951).
gcaagtggcgaatgaacaa

SEQ ID NO: 257813 - DNA, 19 bp, Homo sapiens
  siRNA target sequence for SLC24A2 (NM_020344.1,1934-1952).
caagtggcgaatgaacaaa

SEQ ID NO: 257814 - DNA, 19 bp, Homo sapiens
  siRNA target sequence for SLC24A3 (NM_020689.3,540-558).
ctctgtgccatatacatgt

SEQ ID NO: 257815 - DNA, 19 bp, Homo sapiens
  siRNA target sequence for SLC24A3 (NM_020689.3,697-715).
cggtcataggggtcttcat

SEQ ID NO: 257816 - DNA, 19 bp, Homo sapiens
  siRNA target sequence for SLC24A3 (NM_020689.3,832-850).
gcctgctgagggattctat

SEQ ID NO: 257817 - DNA, 19 bp, Homo sapiens
  siRNA target sequence for SLC24A3 (NM_020689.3,872-890).
cgcgctcatcgtgtttatt

SEQ ID NO: 257818 - DNA, 19 bp, Homo sapiens
  siRNA target sequence for SLC24A3 (NM_020689.3,873-891).
gcgctcatcgtgtttattt

SEQ ID NO: 257819 - DNA, 19 bp, Homo sapiens
  siRNA target sequence for SLC24A3 (NM_020689.3,874-892).
cgctcatcgtgtttattta

SEQ ID NO: 257820 - DNA, 19 bp, Homo sapiens
  siRNA target sequence for SLC24A3 (NM_020689.3,907-925).
cctggtgggagtctttagt

SEQ ID NO: 257821 - DNA, 19 bp, Homo sapiens
  siRNA target sequence for SLC24A3 (NM_020689.3,926-944).
ccttgtgctgatgtatctt

SEQ ID NO: 257822 - DNA, 19 bp, Homo sapiens
  siRNA target sequence for SLC24A3 (NM_020689.3,962-980).
gaaatataacgcttgcata

SEQ ID NO: 257823 - DNA, 19 bp, Homo sapiens
  siRNA target sequence for SLC24A3 (NM_020689.3,1025-1043).
caacggattggccaacaat

SEQ ID NO: 257824 - DNA, 19 bp, Homo sapiens
  siRNA target sequence for SLC24A3 (NM_020689.3,1074-1092).
gcaactgtggtgctactta

SEQ ID NO: 257825 - DNA, 19 bp, Homo sapiens
  siRNA target sequence for SLC24A3 (NM_020689.3,1078-1096).
ctgtggtgctacttaagaa

SEQ ID NO: 257826 - DNA, 19 bp, Homo sapiens
  siRNA target sequence for SLC24A3 (NM_020689.3,1083-1101).
gtgctacttaagaaagcaa

SEQ ID NO: 257827 - DNA, 19 bp, Homo sapiens
  siRNA target sequence for SLC24A3 (NM_020689.3,1111-1129).
gcaaagcatcagtgatcat

SEQ ID NO: 257828 - DNA, 19 bp, Homo sapiens
  siRNA target sequence for SLC24A3 (NM_020689.3,1174-1192).
ctgaggctggccttcgaat

SEQ ID NO: 257829 - DNA, 19 bp, Homo sapiens
  siRNA target sequence for SLC24A3 (NM_020689.3,1179-1197).
gctggccttcgaatcatga

SEQ ID NO: 257830 - DNA, 19 bp, Homo sapiens
  siRNA target sequence for SLC24A3 (NM_020689.3,1180-1198).
ctggccttcgaatcatgat

SEQ ID NO: 257831 - DNA, 19 bp, Homo sapiens
  siRNA target sequence for SLC24A3 (NM_020689.3,1182-1200).
ggccttcgaatcatgataa

SEQ ID NO: 257832 - DNA, 19 bp, Homo sapiens
  siRNA target sequence for SLC24A3 (NM_020689.3,1185-1203).
cttcgaatcatgataacca

SEQ ID NO: 257833 - DNA, 19 bp, Homo sapiens
  siRNA target sequence for SLC24A3 (NM_020689.3,1236-1254).
gccagtcgcatgttgatca

SEQ ID NO: 257834 - DNA, 19 bp, Homo sapiens
  siRNA target sequence for SLC24A3 (NM_020689.3,1237-1255).
ccagtcgcatgttgatcaa

SEQ ID NO: 257835 - DNA, 19 bp, Homo sapiens
  siRNA target sequence for SLC24A3 (NM_020689.3,1238-1256).
cagtcgcatgttgatcaat

SEQ ID NO: 257836 - DNA, 19 bp, Homo sapiens
  siRNA target sequence for SLC24A3 (NM_020689.3,1240-1258).
gtcgcatgttgatcaatga

SEQ ID NO: 257837 - DNA, 19 bp, Homo sapiens
  siRNA target sequence for SLC24A3 (NM_020689.3,1242-1260).
cgcatgttgatcaatgaga

SEQ ID NO: 257838 - DNA, 19 bp, Homo sapiens
  siRNA target sequence for SLC24A3 (NM_020689.3,1390-1408).
cacggagggacgatgttgt

SEQ ID NO: 257839 - DNA, 19 bp, Homo sapiens
  siRNA target sequence for SLC24A3 (NM_020689.3,1560-1578).
ccgctgagtttcgtcttat

SEQ ID NO: 257840 - DNA, 19 bp, Homo sapiens
  siRNA target sequence for SLC24A3 (NM_020689.3,1561-1579).
cgctgagtttcgtcttata

SEQ ID NO: 257841 - DNA, 19 bp, Homo sapiens
  siRNA target sequence for SLC24A3 (NM_020689.3,1660-1678).
cagccttctcctacatgat

SEQ ID NO: 257842 - DNA, 19 bp, Homo sapiens
  siRNA target sequence for SLC24A3 (NM_020689.3,1682-1700).
gtggatggtcacaatcatt

SEQ ID NO: 257843 - DNA, 19 bp, Homo sapiens
  siRNA target sequence for SLC34A1 (NM_003052.2,743-761).
cggtgcatgactgctttaa

SEQ ID NO: 257844 - DNA, 19 bp, Homo sapiens
  siRNA target sequence for SLC34A1 (NM_003052.2,869-887).
ctcctgacctgctcaagat

SEQ ID NO: 257845 - DNA, 19 bp, Homo sapiens
  siRNA target sequence for SLC34A1 (NM_003052.2,921-939).
gctggacgagtctgtgata

SEQ ID NO: 257846 - DNA, 19 bp, Homo sapiens
  siRNA target sequence for SLC34A1 (NM_003052.2,922-940).
ctggacgagtctgtgataa

SEQ ID NO: 257847 - DNA, 19 bp, Homo sapiens
  siRNA target sequence for SLC34A1 (NM_003052.2,925-943).
gacgagtctgtgataacca

SEQ ID NO: 257848 - DNA, 19 bp, Homo sapiens
  siRNA target sequence for SLC34A1 (NM_003052.2,1521-1539).
caacatctcgggtatcctt

SEQ ID NO: 257849 - DNA, 19 bp, Homo sapiens
  siRNA target sequence for SLC34A1 (NM_003052.2,1619-1637).
ggtttgccgtcctctatct

SEQ ID NO: 257850 - DNA, 19 bp, Homo sapiens
  siRNA target sequence for SLC5A4 (NM_014227.1,163-181).
gaccaaccgaggtactata

SEQ ID NO: 257851 - DNA, 19 bp, Homo sapiens
  siRNA target sequence for SLC5A4 (NM_014227.1,166-184).
caaccgaggtactatagga

SEQ ID NO: 257852 - DNA, 19 bp, Homo sapiens
  siRNA target sequence for SLC5A4 (NM_014227.1,299-317).
ggagtcgccaccgtaacat

SEQ ID NO: 257853 - DNA, 19 bp, Homo sapiens
  siRNA target sequence for SLC5A4 (NM_014227.1,300-318).
gagtcgccaccgtaacatt

SEQ ID NO: 257854 - DNA, 19 bp, Homo sapiens
  siRNA target sequence for SLC5A4 (NM_014227.1,304-322).
cgccaccgtaacatttgaa

SEQ ID NO: 257855 - DNA, 19 bp, Homo sapiens
  siRNA target sequence for SLC5A4 (NM_014227.1,305-323).
gccaccgtaacatttgaat

SEQ ID NO: 257856 - DNA, 19 bp, Homo sapiens
  siRNA target sequence for SLC5A4 (NM_014227.1,346-364).
gattcttgggtggatcttt

SEQ ID NO: 257857 - DNA, 19 bp, Homo sapiens
  siRNA target sequence for SLC5A4 (NM_014227.1,365-383).
gtccctatctacatcaagt

SEQ ID NO: 257858 - DNA, 19 bp, Homo sapiens
  siRNA target sequence for SLC5A4 (NM_014227.1,673-691).
ggggtttgcatttaacgaa

SEQ ID NO: 257859 - DNA, 19 bp, Homo sapiens
  siRNA target sequence for SLC5A4 (NM_014227.1,689-707).
gaagttggaggttatgaga

SEQ ID NO: 257860 - DNA, 19 bp, Homo sapiens
  siRNA target sequence for SLC5A4 (NM_014227.1,824-842).
gtgactggggacattccat

SEQ ID NO: 257861 - DNA, 19 bp, Homo sapiens
  siRNA target sequence for SLC5A4 (NM_014227.1,839-857).
ccatggccaggaattatat

SEQ ID NO: 257862 - DNA, 19 bp, Homo sapiens
  siRNA target sequence for SLC5A4 (NM_014227.1,840-858).
catggccaggaattatatt

SEQ ID NO: 257863 - DNA, 19 bp, Homo sapiens
  siRNA target sequence for SLC5A4 (NM_014227.1,943-961).
cgtgaaggccgcttgcatt

SEQ ID NO: 257864 - DNA, 19 bp, Homo sapiens
  siRNA target sequence for SLC5A4 (NM_014227.1,944-962).
gtgaaggccgcttgcatta

SEQ ID NO: 257865 - DNA, 19 bp, Homo sapiens
  siRNA target sequence for SLC5A4 (NM_014227.1,949-967).
ggccgcttgcattatgtgt

SEQ ID NO: 257866 - DNA, 19 bp, Homo sapiens
  siRNA target sequence for SLC5A4 (NM_014227.1,1023-1041).
gcatcctgtacacagatat

SEQ ID NO: 257867 - DNA, 19 bp, Homo sapiens
  siRNA target sequence for SLC5A4 (NM_014227.1,1059-1077).
cttctgaatgcgtgaaaca

SEQ ID NO: 257868 - DNA, 19 bp, Homo sapiens
  siRNA target sequence for SLC5A4 (NM_014227.1,1285-1303).
gatagctggacggatattt

SEQ ID NO: 257869 - DNA, 19 bp, Homo sapiens
  siRNA target sequence for SLC5A4 (NM_014227.1,1290-1308).
ctggacggatatttgttct

SEQ ID NO: 257870 - DNA, 19 bp, Homo sapiens
  siRNA target sequence for SLC5A4 (NM_014227.1,1293-1311).
gacggatatttgttcttct

SEQ ID NO: 257871 - DNA, 19 bp, Homo sapiens
  siRNA target sequence for SLC5A4 (NM_014227.1,1335-1353).
gggtcccactggtacaagt

SEQ ID NO: 257872 - DNA, 19 bp, Homo sapiens
  siRNA target sequence for SLC5A4 (NM_014227.1,1336-1354).
ggtcccactggtacaagtt

SEQ ID NO: 257873 - DNA, 19 bp, Homo sapiens
  siRNA target sequence for SLC5A4 (NM_014227.1,1337-1355).
gtcccactggtacaagttt

SEQ ID NO: 257874 - DNA, 19 bp, Homo sapiens
  siRNA target sequence for SLC5A4 (NM_014227.1,1339-1357).
cccactggtacaagtttct

SEQ ID NO: 257875 - DNA, 19 bp, Homo sapiens
  siRNA target sequence for SLC5A4 (NM_014227.1,1341-1359).
cactggtacaagtttctca

SEQ ID NO: 257876 - DNA, 19 bp, Homo sapiens
  siRNA target sequence for SLC5A4 (NM_014227.1,1343-1361).
ctggtacaagtttctcaaa

SEQ ID NO: 257877 - DNA, 19 bp, Homo sapiens
  siRNA target sequence for SLC5A4 (NM_014227.1,1399-1417).
ctaccttgggcctccaatt

SEQ ID NO: 257878 - DNA, 19 bp, Homo sapiens
  siRNA target sequence for SLC5A4 (NM_014227.1,1430-1448).
gtgcttgccatcttctgta

SEQ ID NO: 257879 - DNA, 19 bp, Homo sapiens
  siRNA target sequence for SLC5A4 (NM_014227.1,1441-1459).
cttctgtaaaagagtcaat

SEQ ID NO: 257880 - DNA, 19 bp, Homo sapiens
  siRNA target sequence for SLC5A4 (NM_014227.1,1496-1514).
gcaatgggcctcattcgta

SEQ ID NO: 257881 - DNA, 19 bp, Homo sapiens
  siRNA target sequence for SLC5A4 (NM_014227.1,1497-1515).
caatgggcctcattcgtat

SEQ ID NO: 257882 - DNA, 19 bp, Homo sapiens
  siRNA target sequence for SLC5A4 (NM_014227.1,1501-1519).
gggcctcattcgtatgata

SEQ ID NO: 257883 - DNA, 19 bp, Homo sapiens
  siRNA target sequence for SLC5A4 (NM_014227.1,1502-1520).
ggcctcattcgtatgataa

SEQ ID NO: 257884 - DNA, 19 bp, Homo sapiens
  siRNA target sequence for SLC5A4 (NM_014227.1,1504-1522).
cctcattcgtatgataaca

SEQ ID NO: 257885 - DNA, 19 bp, Homo sapiens
  siRNA target sequence for SLC5A4 (NM_014227.1,1581-1599).
gtggagtgcactatctgta

SEQ ID NO: 257886 - DNA, 19 bp, Homo sapiens
  siRNA target sequence for SLC5A4 (NM_014227.1,1584-1602).
gagtgcactatctgtactt

SEQ ID NO: 257887 - DNA, 19 bp, Homo sapiens
  siRNA target sequence for SLC5A4 (NM_014227.1,1586-1604).
gtgcactatctgtactttt

SEQ ID NO: 257888 - DNA, 19 bp, Homo sapiens
  siRNA target sequence for SLC5A4 (NM_014227.1,1640-1658).
ctgggaatttccctcttaa

SEQ ID NO: 257889 - DNA, 19 bp, Homo sapiens
  siRNA target sequence for SLC5A4 (NM_014227.1,1716-1734).
cagaggagcgaatcgatat

SEQ ID NO: 257890 - DNA, 19 bp, Homo sapiens
  siRNA target sequence for SLC5A4 (NM_014227.1,1720-1738).
ggagcgaatcgatatagat

SEQ ID NO: 257891 - DNA, 19 bp, Homo sapiens
  siRNA target sequence for SLC5A4 (NM_014227.1,1800-1818).
cacgtggatgcctcaagaa

SEQ ID NO: 257892 - DNA, 19 bp, Homo sapiens
  siRNA target sequence for SLC5A4 (NM_014227.1,1805-1823).
ggatgcctcaagaaagctt

SEQ ID NO: 257893 - DNA, 19 bp, Homo sapiens
  siRNA target sequence for SLC5A4 (NM_014227.1,1844-1862).
cagaagggacccaagctaa

SEQ ID NO: 257894 - DNA, 19 bp, Homo sapiens
  siRNA target sequence for SLC5A4 (NM_014227.1,1917-1935).
cctcgtggaggacaatagt

SEQ ID NO: 257895 - DNA, 19 bp, Homo sapiens
  siRNA target sequence for SLC5A5 (NM_000453.1,472-490).
gcagcgctgaggacttctt

SEQ ID NO: 257896 - DNA, 19 bp, Homo sapiens
  siRNA target sequence for SLC5A5 (NM_000453.1,742-760).
gcgggactttgcagtacat

SEQ ID NO: 257897 - DNA, 19 bp, Homo sapiens
  siRNA target sequence for SLC5A5 (NM_000453.1,745-763).
ggactttgcagtacattgt

SEQ ID NO: 257898 - DNA, 19 bp, Homo sapiens
  siRNA target sequence for SLC5A5 (NM_000453.1,774-792).
ctgtacaccggcatcgtaa

SEQ ID NO: 257899 - DNA, 19 bp, Homo sapiens
  siRNA target sequence for SLC5A5 (NM_000453.1,849-867).
ctcctgtccaccggaatta

SEQ ID NO: 257900 - DNA, 19 bp, Homo sapiens
  siRNA target sequence for SLC5A5 (NM_000453.1,927-945).
caggtcgtggtgatgctaa

SEQ ID NO: 257901 - DNA, 19 bp, Homo sapiens
  siRNA target sequence for SLC5A5 (NM_000453.1,1058-1076).
cccgaggagccgctataca

SEQ ID NO: 257902 - DNA, 19 bp, Homo sapiens
  siRNA target sequence for SLC5A5 (NM_000453.1,1059-1077).
ccgaggagccgctatacat

SEQ ID NO: 257903 - DNA, 19 bp, Homo sapiens
  siRNA target sequence for SLC5A5 (NM_000453.1,1060-1078).
cgaggagccgctatacatt

SEQ ID NO: 257904 - DNA, 19 bp, Homo sapiens
  siRNA target sequence for SLC5A5 (NM_000453.1,1240-1258).
gctgtggcatcgtcatgtt

SEQ ID NO: 257905 - DNA, 19 bp, Homo sapiens
  siRNA target sequence for SLC5A5 (NM_000453.1,1433-1451).
ggctgcagtcactgtagaa

SEQ ID NO: 257906 - DNA, 19 bp, Homo sapiens
  siRNA target sequence for SLC5A5 (NM_000453.1,1901-1919).
cttagctgacagcttctat

SEQ ID NO: 257907 - DNA, 19 bp, Homo sapiens
  siRNA target sequence for SLC5A5 (NM_000453.1,1921-1939).
ccatctcctatctctatta

SEQ ID NO: 257908 - DNA, 19 bp, Homo sapiens
  siRNA target sequence for TSCOT (NM_033051.2,295-313).
cagagagccatctccaatt

SEQ ID NO: 257909 - DNA, 19 bp, Homo sapiens
  siRNA target sequence for TSCOT (NM_033051.2,299-317).
gagccatctccaatttcta

SEQ ID NO: 257910 - DNA, 19 bp, Homo sapiens
  siRNA target sequence for TSCOT (NM_033051.2,388-406).
cgctaccaccgaaagatct

SEQ ID NO: 257911 - DNA, 19 bp, Homo sapiens
  siRNA target sequence for TSCOT (NM_033051.2,653-671).
cttccgggcatctcttcaa

SEQ ID NO: 257912 - DNA, 19 bp, Homo sapiens
  siRNA target sequence for TSCOT (NM_033051.2,752-770).
gccttttggtgctaaaggt

SEQ ID NO: 257913 - DNA, 19 bp, Homo sapiens
  siRNA target sequence for TSCOT (NM_033051.2,987-1005).
ggacgtgatccctcttttt

SEQ ID NO: 257914 - DNA, 19 bp, Homo sapiens
  siRNA target sequence for TSCOT (NM_033051.2,1036-1054).
gtgcaggtgggctatggta

SEQ ID NO: 257915 - DNA, 19 bp, Homo sapiens
  siRNA target sequence for TSCOT (NM_033051.2,1060-1078).
gcagggtacaccatcttca

SEQ ID NO: 257916 - DNA, 19 bp, Homo sapiens
  siRNA target sequence for TSCOT (NM_033051.2,1192-1210).
gagacatacatgttctata

SEQ ID NO: 257917 - DNA, 19 bp, Homo sapiens
  siRNA target sequence for TSCOT (NM_033051.2,1194-1212).
gacatacatgttctatatt

SEQ ID NO: 257918 - DNA, 19 bp, Homo sapiens
  siRNA target sequence for TSCOT (NM_033051.2,1264-1282).
gctatgtccaaactcataa

SEQ ID NO: 257919 - DNA, 19 bp, Homo sapiens
  siRNA target sequence for TSCOT (NM_033051.2,1265-1283).
ctatgtccaaactcataaa

SEQ ID NO: 257920 - DNA, 19 bp, Homo sapiens
  siRNA target sequence for TSCOT (NM_033051.2,1298-1316).
gaaaggtgttcgtcatact

SEQ ID NO: 257921 - DNA, 19 bp, Homo sapiens
  siRNA target sequence for TSCOT (NM_033051.2,1345-1363).
gtgacatccaccttgtaca

SEQ ID NO: 257922 - DNA, 19 bp, Homo sapiens
  siRNA target sequence for TSCOT (NM_033051.2,1349-1367).
catccaccttgtacaacaa

SEQ ID NO: 257923 - DNA, 19 bp, Homo sapiens
  siRNA target sequence for TSCOT (NM_033051.2,1352-1370).
ccaccttgtacaacaagat

SEQ ID NO: 257924 - DNA, 19 bp, Homo sapiens
  siRNA target sequence for TSCOT (NM_033051.2,1355-1373).
ccttgtacaacaagatcta

SEQ ID NO: 257925 - DNA, 19 bp, Homo sapiens
  siRNA target sequence for TSCOT (NM_033051.2,1434-1452).
cctggccatcattccaatt

SEQ ID NO: 257926 - DNA, 19 bp, Homo sapiens
  siRNA target sequence for TSCOT (NM_033051.2,1435-1453).
ctggccatcattccaatta

SEQ ID NO: 257927 - DNA, 19 bp, Homo sapiens
  siRNA target sequence for TSCOT (NM_033051.2,1438-1456).
gccatcattccaattagca

SEQ ID NO: 257928 - DNA, 19 bp, Homo sapiens
  siRNA target sequence for TSCOT (NM_033051.2,1439-1457).
ccatcattccaattagcat

SEQ ID NO: 257929 - DNA, 19 bp, Homo sapiens
  siRNA target sequence for TSCOT (NM_033051.2,1492-1510).
ggagacatcatagagaaat

SEQ ID NO: 257930 - DNA, 19 bp, Homo sapiens
  siRNA target sequence for FLJ14753 (NM_032558.1,261-279).
ctggggagctcagatttct

SEQ ID NO: 257931 - DNA, 19 bp, Homo sapiens
  siRNA target sequence for FLJ14753 (NM_032558.1,296-314).
cttttgcgtcgttgaagaa

SEQ ID NO: 257932 - DNA, 19 bp, Homo sapiens
  siRNA target sequence for FLJ14753 (NM_032558.1,345-363).
ctgcatcaccgtgtttctt

SEQ ID NO: 257933 - DNA, 19 bp, Homo sapiens
  siRNA target sequence for FLJ14753 (NM_032558.1,379-397).
gctggacagtattcaagtt

SEQ ID NO: 257934 - DNA, 19 bp, Homo sapiens
  siRNA target sequence for FLJ14753 (NM_032558.1,392-410).
caagtttttttctctatct

SEQ ID NO: 257935 - DNA, 19 bp, Homo sapiens
  siRNA target sequence for FLJ14753 (NM_032558.1,409-427).
ctcaggcaggtcataggtt

SEQ ID NO: 257936 - DNA, 19 bp, Homo sapiens
  siRNA target sequence for FLJ14753 (NM_032558.1,414-432).
gcaggtcataggttttgga

SEQ ID NO: 257937 - DNA, 19 bp, Homo sapiens
  siRNA target sequence for FLJ14753 (NM_032558.1,415-433).
caggtcataggttttggat

SEQ ID NO: 257938 - DNA, 19 bp, Homo sapiens
  siRNA target sequence for FLJ14753 (NM_032558.1,453-471).
catagctatggtaggaatt

SEQ ID NO: 257939 - DNA, 19 bp, Homo sapiens
  siRNA target sequence for FLJ14753 (NM_032558.1,483-501).
ggctcagacggcctttctt

SEQ ID NO: 257940 - DNA, 19 bp, Homo sapiens
  siRNA target sequence for FLJ14753 (NM_032558.1,484-502).
gctcagacggcctttctta

SEQ ID NO: 257941 - DNA, 19 bp, Homo sapiens
  siRNA target sequence for FLJ14753 (NM_032558.1,503-521).
gcatcttgatgagatcatt

SEQ ID NO: 257942 - DNA, 19 bp, Homo sapiens
  siRNA target sequence for FLJ14753 (NM_032558.1,504-522).
catcttgatgagatcatta

SEQ ID NO: 257943 - DNA, 19 bp, Homo sapiens
  siRNA target sequence for FLJ14753 (NM_032558.1,645-663).
cacgtttccggcaatcagt

SEQ ID NO: 257944 - DNA, 19 bp, Homo sapiens
  siRNA target sequence for FLJ14753 (NM_032558.1,703-721).
gttgcccaggggatcataa

SEQ ID NO: 257945 - DNA, 19 bp, Homo sapiens
  siRNA target sequence for FLJ14753 (NM_032558.1,711-729).
ggggatcataactggaata

SEQ ID NO: 257946 - DNA, 19 bp, Homo sapiens
  siRNA target sequence for FLJ14753 (NM_032558.1,712-730).
gggatcataactggaataa

SEQ ID NO: 257947 - DNA, 19 bp, Homo sapiens
  siRNA target sequence for FLJ14753 (NM_032558.1,725-743).
gaataagaggactatgcaa

SEQ ID NO: 257948 - DNA, 19 bp, Homo sapiens
  siRNA target sequence for FLJ14753 (NM_032558.1,757-775).
gcactgtatggcttcatat

SEQ ID NO: 257949 - DNA, 19 bp, Homo sapiens
  siRNA target sequence for FLJ14753 (NM_032558.1,760-778).
ctgtatggcttcatattct

SEQ ID NO: 257950 - DNA, 19 bp, Homo sapiens
  siRNA target sequence for FLJ14753 (NM_032558.1,878-896).
gggcatgtatagtccttat

SEQ ID NO: 257951 - DNA, 19 bp, Homo sapiens
  siRNA target sequence for FLJ14753 (NM_032558.1,1046-1064).
gggagctctcttcatttga

SEQ ID NO: 257952 - DNA, 19 bp, Homo sapiens
  siRNA target sequence for HIAT1 (NM_033055.2,77-95).
gaggcacgcctcaaggaat

SEQ ID NO: 257953 - DNA, 19 bp, Homo sapiens
  siRNA target sequence for HIAT1 (NM_033055.2,81-99).
cacgcctcaaggaataggt

SEQ ID NO: 257954 - DNA, 19 bp, Homo sapiens
  siRNA target sequence for HIAT1 (NM_033055.2,98-116).
gttctcctagtgtctatca

SEQ ID NO: 257955 - DNA, 19 bp, Homo sapiens
  siRNA target sequence for HIAT1 (NM_033055.2,170-188).
ccaccttggtggtattaca

SEQ ID NO: 257956 - DNA, 19 bp, Homo sapiens
  siRNA target sequence for HIAT1 (NM_033055.2,190-208).
gaaacctttcctaaacata

SEQ ID NO: 257957 - DNA, 19 bp, Homo sapiens
  siRNA target sequence for HIAT1 (NM_033055.2,200-218).
ctaaacatacatttctgat

SEQ ID NO: 257958 - DNA, 19 bp, Homo sapiens
  siRNA target sequence for HIAT1 (NM_033055.2,224-242).
gcttaattcaaggagtaaa

SEQ ID NO: 257959 - DNA, 19 bp, Homo sapiens
  siRNA target sequence for HIAT1 (NM_033055.2,238-256).
gtaaagggtttgttgtcat

SEQ ID NO: 257960 - DNA, 19 bp, Homo sapiens
  siRNA target sequence for HIAT1 (NM_033055.2,316-334).
ctgctaacggtgtttttca

SEQ ID NO: 257961 - DNA, 19 bp, Homo sapiens
  siRNA target sequence for HIAT1 (NM_033055.2,318-336).
gctaacggtgtttttcaca

SEQ ID NO: 257962 - DNA, 19 bp, Homo sapiens
  siRNA target sequence for HIAT1 (NM_033055.2,333-351).
cacatgtgccccaattcct

SEQ ID NO: 257963 - DNA, 19 bp, Homo sapiens
  siRNA target sequence for HIAT1 (NM_033055.2,453-471).
ccaagagcatgaaagaagt

SEQ ID NO: 257964 - DNA, 19 bp, Homo sapiens
  siRNA target sequence for HIAT1 (NM_033055.2,454-472).
caagagcatgaaagaagta

SEQ ID NO: 257965 - DNA, 19 bp, Homo sapiens
  siRNA target sequence for HIAT1 (NM_033055.2,516-534).
caccagtcctgcaattgga

SEQ ID NO: 257966 - DNA, 19 bp, Homo sapiens
  siRNA target sequence for HIAT1 (NM_033055.2,536-554).
cttatcttggacgagtata

SEQ ID NO: 257967 - DNA, 19 bp, Homo sapiens
  siRNA target sequence for HIAT1 (NM_033055.2,592-610).
gctttgctagatatttgtt

SEQ ID NO: 257968 - DNA, 19 bp, Homo sapiens
  siRNA target sequence for HIAT1 (NM_033055.2,631-649).
gagtcgttgcctgagaaaa

SEQ ID NO: 257969 - DNA, 19 bp, Homo sapiens
  siRNA target sequence for HIAT1 (NM_033055.2,696-714).
cccttttgcgtccttaaaa

SEQ ID NO: 257970 - DNA, 19 bp, Homo sapiens
  siRNA target sequence for HIAT1 (NM_033055.2,778-796).
gaggcaggccaatattcca

SEQ ID NO: 257971 - DNA, 19 bp, Homo sapiens
  siRNA target sequence for HIAT1 (NM_033055.2,893-911).
ccatagtcttgagtttact

SEQ ID NO: 257972 - DNA, 19 bp, Homo sapiens
  siRNA target sequence for HIAT1 (NM_033055.2,1103-1121).
gtgtcgttcaaggaatgat

SEQ ID NO: 257973 - DNA, 19 bp, Homo sapiens
  siRNA target sequence for HIAT1 (NM_033055.2,1107-1125).
cgttcaaggaatgataaca

SEQ ID NO: 257974 - DNA, 19 bp, Homo sapiens
  siRNA target sequence for HIAT1 (NM_033055.2,1126-1144).
ggaattcgaggattatgca

SEQ ID NO: 257975 - DNA, 19 bp, Homo sapiens
  siRNA target sequence for HIAT1 (NM_033055.2,1127-1145).
gaattcgaggattatgcaa

SEQ ID NO: 257976 - DNA, 19 bp, Homo sapiens
  siRNA target sequence for HIAT1 (NM_033055.2,1244-1262).
gccctcagcaccactttga

SEQ ID NO: 257977 - DNA, 19 bp, Homo sapiens
  siRNA target sequence for HIAT1 (NM_033055.2,1345-1363).
ccggaacataccaatttaa

SEQ ID NO: 257978 - DNA, 19 bp, Homo sapiens
  siRNA target sequence for HIAT1 (NM_033055.2,1348-1366).
gaacataccaatttaagct

SEQ ID NO: 257979 - DNA, 19 bp, Homo sapiens
  siRNA target sequence for MGC11332 (NM_032718.2,55-73).
ggggtcactgggacatgaa

SEQ ID NO: 257980 - DNA, 19 bp, Homo sapiens
  siRNA target sequence for MGC11332 (NM_032718.2,298-316).
gctcctcctatggcatttt

SEQ ID NO: 257981 - DNA, 19 bp, Homo sapiens
  siRNA target sequence for MGC11332 (NM_032718.2,301-319).
cctcctatggcattttgca

SEQ ID NO: 257982 - DNA, 19 bp, Homo sapiens
  siRNA target sequence for MGC11332 (NM_032718.2,343-361).
gctgctggagcgatgtagt

SEQ ID NO: 257983 - DNA, 19 bp, Homo sapiens
  siRNA target sequence for MGC11332 (NM_032718.2,427-445).
cagccaccaatgtgtttct

SEQ ID NO: 257984 - DNA, 19 bp, Homo sapiens
  siRNA target sequence for MGC11332 (NM_032718.2,429-447).
gccaccaatgtgtttctgt

SEQ ID NO: 257985 - DNA, 19 bp, Homo sapiens
  siRNA target sequence for MGC11332 (NM_032718.2,433-451).
ccaatgtgtttctgtttgt

SEQ ID NO: 257986 - DNA, 19 bp, Homo sapiens
  siRNA target sequence for MGC11332 (NM_032718.2,460-478).
gagtcccggcaggtatttt

SEQ ID NO: 257987 - DNA, 19 bp, Homo sapiens
  siRNA target sequence for MGC11332 (NM_032718.2,462-480).
gtcccggcaggtattttta

SEQ ID NO: 257988 - DNA, 19 bp, Homo sapiens
  siRNA target sequence for MGC11332 (NM_032718.2,464-482).
cccggcaggtatttttaaa

SEQ ID NO: 257989 - DNA, 19 bp, Homo sapiens
  siRNA target sequence for MGC11332 (NM_032718.2,466-484).
cggcaggtatttttaaaca

SEQ ID NO: 257990 - DNA, 19 bp, Homo sapiens
  siRNA target sequence for MGC11332 (NM_032718.2,497-515).
ctcaagggctctactttct

SEQ ID NO: 257991 - DNA, 19 bp, Homo sapiens
  siRNA target sequence for MGC11332 (NM_032718.2,546-564).
gtaatcggacacttcaaca

SEQ ID NO: 257992 - DNA, 19 bp, Homo sapiens
  siRNA target sequence for MGC11332 (NM_032718.2,624-642).
gaggatgggttttatctca

SEQ ID NO: 257993 - DNA, 19 bp, Homo sapiens
  siRNA target sequence for MGC11332 (NM_032718.2,646-664).
ccttcatctgctttttggt

SEQ ID NO: 257994 - DNA, 19 bp, Homo sapiens
  siRNA target sequence for MGC11332 (NM_032718.2,841-859).
cctgggtcgaagtagtgtt

SEQ ID NO: 257995 - DNA, 19 bp, Homo sapiens
  siRNA target sequence for MGC11332 (NM_032718.2,939-957).
gtcatgctgtactacagta

SEQ ID NO: 257996 - DNA, 19 bp, Homo sapiens
  siRNA target sequence for MGC11332 (NM_032718.2,944-962).
gctgtactacagtaacttt

SEQ ID NO: 257997 - DNA, 19 bp, Homo sapiens
  siRNA target sequence for MGC11332 (NM_032718.2,1006-1024).
caggctacctcatcagtta

SEQ ID NO: 257998 - DNA, 19 bp, Homo sapiens
  siRNA target sequence for MGC11332 (NM_032718.2,1066-1084).
caatcctacggctgtacaa

SEQ ID NO: 257999 - DNA, 19 bp, Homo sapiens
  siRNA target sequence for MGC11332 (NM_032718.2,1262-1280).
ggccagcggcacccttatt

SEQ ID NO: 258000 - DNA, 19 bp, Homo sapiens
  siRNA target sequence for MGC11332 (NM_032718.2,1397-1415).
ggccattttcataatgtct

SEQ ID NO: 258001 - DNA, 19 bp, Homo sapiens
  siRNA target sequence for SLC22A1L (NM_002555.3,275-293).
cggtcatcttgcttaccta

SEQ ID NO: 258002 - DNA, 19 bp, Homo sapiens
  siRNA target sequence for SLC22A1L (NM_002555.3,819-837).
caccaaaggggccaaaact

SEQ ID NO: 258003 - DNA, 19 bp, Homo sapiens
  siRNA target sequence for LOC133308 (NM_178833.2,227-245).
cgccctccatgcatcaaga

SEQ ID NO: 258004 - DNA, 19 bp, Homo sapiens
  siRNA target sequence for LOC133308 (NM_178833.2,228-246).
gccctccatgcatcaagaa

SEQ ID NO: 258005 - DNA, 19 bp, Homo sapiens
  siRNA target sequence for LOC133308 (NM_178833.2,248-266).
cacaggaggagacagttat

SEQ ID NO: 258006 - DNA, 19 bp, Homo sapiens
  siRNA target sequence for LOC133308 (NM_178833.2,267-285).
gaagctcaaaggtatagat

SEQ ID NO: 258007 - DNA, 19 bp, Homo sapiens
  siRNA target sequence for LOC133308 (NM_178833.2,299-317).
cagaaggaagtattctttt

SEQ ID NO: 258008 - DNA, 19 bp, Homo sapiens
  siRNA target sequence for LOC133308 (NM_178833.2,392-410).
cttgccctccacatggttt

SEQ ID NO: 258009 - DNA, 19 bp, Homo sapiens
  siRNA target sequence for LOC133308 (NM_178833.2,395-413).
gccctccacatggtttact

SEQ ID NO: 258010 - DNA, 19 bp, Homo sapiens
  siRNA target sequence for LOC133308 (NM_178833.2,412-430).
ctggacagggtcataacaa

SEQ ID NO: 258011 - DNA, 19 bp, Homo sapiens
  siRNA target sequence for LOC133308 (NM_178833.2,414-432).
ggacagggtcataacaaat

SEQ ID NO: 258012 - DNA, 19 bp, Homo sapiens
  siRNA target sequence for LOC133308 (NM_178833.2,417-435).
cagggtcataacaaatgtt

SEQ ID NO: 258013 - DNA, 19 bp, Homo sapiens
  siRNA target sequence for LOC133308 (NM_178833.2,511-529).
ggaattataatcctattct

SEQ ID NO: 258014 - DNA, 19 bp, Homo sapiens
  siRNA target sequence for LOC133308 (NM_178833.2,512-530).
gaattataatcctattcta

SEQ ID NO: 258015 - DNA, 19 bp, Homo sapiens
  siRNA target sequence for LOC133308 (NM_178833.2,536-554).
ccatcattggtggtaaact

SEQ ID NO: 258016 - DNA, 19 bp, Homo sapiens
  siRNA target sequence for LOC133308 (NM_178833.2,616-634).
gcagggtttctcatcagaa

SEQ ID NO: 258017 - DNA, 19 bp, Homo sapiens
  siRNA target sequence for LOC133308 (NM_178833.2,619-637).
gggtttctcatcagaaata

SEQ ID NO: 258018 - DNA, 19 bp, Homo sapiens
  siRNA target sequence for LOC133308 (NM_178833.2,639-657).
cccagtcatcaacgataat

SEQ ID NO: 258019 - DNA, 19 bp, Homo sapiens
  siRNA target sequence for LOC133308 (NM_178833.2,695-713).
gcatagccctgtctatcat

SEQ ID NO: 258020 - DNA, 19 bp, Homo sapiens
  siRNA target sequence for LOC133308 (NM_178833.2,696-714).
catagccctgtctatcatt

SEQ ID NO: 258021 - DNA, 19 bp, Homo sapiens
  siRNA target sequence for LOC133308 (NM_178833.2,727-745).
ggccttggtctggattcaa

SEQ ID NO: 258022 - DNA, 19 bp, Homo sapiens
  siRNA target sequence for LOC133308 (NM_178833.2,728-746).
gccttggtctggattcaaa

SEQ ID NO: 258023 - DNA, 19 bp, Homo sapiens
  siRNA target sequence for LOC133308 (NM_178833.2,759-777).
gttaaagggcgtttgtgta

SEQ ID NO: 258024 - DNA, 19 bp, Homo sapiens
  siRNA target sequence for LOC133308 (NM_178833.2,783-801).
gtccatgggtccctgtatt

SEQ ID NO: 258025 - DNA, 19 bp, Homo sapiens
  siRNA target sequence for LOC133308 (NM_178833.2,850-868).
ccatggcaatggggattta

SEQ ID NO: 258026 - DNA, 19 bp, Homo sapiens
  siRNA target sequence for LOC133308 (NM_178833.2,854-872).
ggcaatggggatttatact

SEQ ID NO: 258027 - DNA, 19 bp, Homo sapiens
  siRNA target sequence for LOC133308 (NM_178833.2,902-920).
ctgttgtggtgccttcaat

SEQ ID NO: 258028 - DNA, 19 bp, Homo sapiens
  siRNA target sequence for LOC133308 (NM_178833.2,914-932).
cttcaatgctccttttgca

SEQ ID NO: 258029 - DNA, 19 bp, Homo sapiens
  siRNA target sequence for LOC133308 (NM_178833.2,938-956).
gaggctatggtgttgagaa

SEQ ID NO: 258030 - DNA, 19 bp, Homo sapiens
  siRNA target sequence for LOC133308 (NM_178833.2,1006-1024).
gccatcactggcttcaaca

SEQ ID NO: 258031 - DNA, 19 bp, Homo sapiens
  siRNA target sequence for LOC133308 (NM_178833.2,1049-1067).
caggctctactgtctttaa

SEQ ID NO: 258032 - DNA, 19 bp, Homo sapiens
  siRNA target sequence for LOC133308 (NM_178833.2,1104-1122).
ggcaactggatctgttctt

SEQ ID NO: 258033 - DNA, 19 bp, Homo sapiens
  siRNA target sequence for LOC133308 (NM_178833.2,1109-1127).
ctggatctgttcttggatt

SEQ ID NO: 258034 - DNA, 19 bp, Homo sapiens
  siRNA target sequence for LOC133308 (NM_178833.2,1111-1129).
ggatctgttcttggatttt

SEQ ID NO: 258035 - DNA, 19 bp, Homo sapiens
  siRNA target sequence for LOC133308 (NM_178833.2,1149-1167).
ccgtgaccaggacaaactt

SEQ ID NO: 258036 - DNA, 19 bp, Homo sapiens
  siRNA target sequence for LOC133308 (NM_178833.2,1433-1451).
ccgtaggcattgcagtatt

SEQ ID NO: 258037 - DNA, 19 bp, Homo sapiens
  siRNA target sequence for LOC133308 (NM_178833.2,1435-1453).
gtaggcattgcagtattga

SEQ ID NO: 258038 - DNA, 19 bp, Homo sapiens
  siRNA target sequence for LOC133308 (NM_178833.2,1444-1462).
gcagtattgatacgaattt

SEQ ID NO: 258039 - DNA, 19 bp, Homo sapiens
  siRNA target sequence for LOC133308 (NM_178833.2,1445-1463).
cagtattgatacgaatttt

SEQ ID NO: 258040 - DNA, 19 bp, Homo sapiens
  siRNA target sequence for LOC133308 (NM_178833.2,1447-1465).
gtattgatacgaattttga

SEQ ID NO: 258041 - DNA, 19 bp, Homo sapiens
  siRNA target sequence for LOC133308 (NM_178833.2,1659-1677).
catcacagccccaattgga

SEQ ID NO: 258042 - DNA, 19 bp, Homo sapiens
  siRNA target sequence for LOC133308 (NM_178833.2,1706-1724).
ggcttctgcagaaagttga

SEQ ID NO: 258043 - DNA, 19 bp, Homo sapiens
  siRNA target sequence for LOC133308 (NM_178833.2,1707-1725).
gcttctgcagaaagttgaa

SEQ ID NO: 258044 - DNA, 19 bp, Homo sapiens
  siRNA target sequence for LOC133308 (NM_178833.2,1756-1774).
gagacttctgtgcaagttt

SEQ ID NO: 258045 - DNA, 19 bp, Homo sapiens
  siRNA target sequence for MGC43026 (NM_178527.2,432-450).
cagctgactaccttgttga

SEQ ID NO: 258046 - DNA, 19 bp, Homo sapiens
  siRNA target sequence for MGC43026 (NM_178527.2,458-476).
catttcacaacgcttgtat

SEQ ID NO: 258047 - DNA, 19 bp, Homo sapiens
  siRNA target sequence for MGC43026 (NM_178527.2,497-515).
gggcttttgaagatgtgtt

SEQ ID NO: 258048 - DNA, 19 bp, Homo sapiens
  siRNA target sequence for MGC43026 (NM_178527.2,532-550).
cattgttttgacgattctt

SEQ ID NO: 258049 - DNA, 19 bp, Homo sapiens
  siRNA target sequence for MGC43026 (NM_178527.2,541-559).
gacgattctttctctatca

SEQ ID NO: 258050 - DNA, 19 bp, Homo sapiens
  siRNA target sequence for MGC43026 (NM_178527.2,572-590).
ggacacatggcctacaatt

SEQ ID NO: 258051 - DNA, 19 bp, Homo sapiens
  siRNA target sequence for MGC43026 (NM_178527.2,596-614).
gaggtgcaccaaattgtct

SEQ ID NO: 258052 - DNA, 19 bp, Homo sapiens
  siRNA target sequence for MGC43026 (NM_178527.2,611-629).
gtctaccctcttctaagaa

SEQ ID NO: 258053 - DNA, 19 bp, Homo sapiens
  siRNA target sequence for MGC43026 (NM_178527.2,620-638).
cttctaagaacatcaagtt

SEQ ID NO: 258054 - DNA, 19 bp, Homo sapiens
  siRNA target sequence for MGC43026 (NM_178527.2,627-645).
gaacatcaagtttttcact

SEQ ID NO: 258055 - DNA, 19 bp, Homo sapiens
  siRNA target sequence for MGC43026 (NM_178527.2,630-648).
catcaagtttttcacttta

SEQ ID NO: 258056 - DNA, 19 bp, Homo sapiens
  siRNA target sequence for MGC43026 (NM_178527.2,727-745).
ggtcttgttaactggatta

SEQ ID NO: 258057 - DNA, 19 bp, Homo sapiens
  siRNA target sequence for MGC43026 (NM_178527.2,730-748).
cttgttaactggattaatt

SEQ ID NO: 258058 - DNA, 19 bp, Homo sapiens
  siRNA target sequence for MGC43026 (NM_178527.2,762-780).
caagcatcataattggata

SEQ ID NO: 258059 - DNA, 19 bp, Homo sapiens
  siRNA target sequence for MGC43026 (NM_178527.2,776-794).
ggatatgtcgttataaaat

SEQ ID NO: 258060 - DNA, 19 bp, Homo sapiens
  siRNA target sequence for MGC43026 (NM_178527.2,777-795).
gatatgtcgttataaaatt

SEQ ID NO: 258061 - DNA, 19 bp, Homo sapiens
  siRNA target sequence for MGC43026 (NM_178527.2,803-821).
gattcatgggatttgcaat

SEQ ID NO: 258062 - DNA, 19 bp, Homo sapiens
  siRNA target sequence for MGC43026 (NM_178527.2,822-840).
cttgcctactctttagcat

SEQ ID NO: 258063 - DNA, 19 bp, Homo sapiens
  siRNA target sequence for MGC43026 (NM_178527.2,837-855).
gcatcacccttggcattat

SEQ ID NO: 258064 - DNA, 19 bp, Homo sapiens
  siRNA target sequence for MGC43026 (NM_178527.2,838-856).
catcacccttggcattata

SEQ ID NO: 258065 - DNA, 19 bp, Homo sapiens
  siRNA target sequence for MGC43026 (NM_178527.2,841-859).
cacccttggcattatagat

SEQ ID NO: 258066 - DNA, 19 bp, Homo sapiens
  siRNA target sequence for MGC43026 (NM_178527.2,860-878).
cctcttcgttctgtgaatt

SEQ ID NO: 258067 - DNA, 19 bp, Homo sapiens
  siRNA target sequence for MGC43026 (NM_178527.2,866-884).
cgttctgtgaattcactaa

SEQ ID NO: 258068 - DNA, 19 bp, Homo sapiens
  siRNA target sequence for MGC43026 (NM_178527.2,900-918).
ctaaaatatacattgatct

SEQ ID NO: 258069 - DNA, 19 bp, Homo sapiens
  siRNA target sequence for MGC43026 (NM_178527.2,924-942).
gaggagaatcattgatcat

SEQ ID NO: 258070 - DNA, 19 bp, Homo sapiens
  siRNA target sequence for MGC43026 (NM_178527.2,985-1003).
cagaatccacttttctatt

SEQ ID NO: 258071 - DNA, 19 bp, Homo sapiens
  siRNA target sequence for MGC43026 (NM_178527.2,1048-1066).
gggaagcataatatttgga

SEQ ID NO: 258072 - DNA, 19 bp, Homo sapiens
  siRNA target sequence for MGC43026 (NM_178527.2,1071-1089).
ggtgtgcaaaaatcattca

SEQ ID NO: 258073 - DNA, 19 bp, Homo sapiens
  siRNA target sequence for MGC43026 (NM_178527.2,1099-1117).
ggctgacgtttttagcaat

SEQ ID NO: 258074 - DNA, 19 bp, Homo sapiens
  siRNA target sequence for MGC43026 (NM_178527.2,1100-1118).
gctgacgtttttagcaata

SEQ ID NO: 258075 - DNA, 19 bp, Homo sapiens
  siRNA target sequence for MGC43026 (NM_178527.2,1101-1119).
ctgacgtttttagcaatat

SEQ ID NO: 258076 - DNA, 19 bp, Homo sapiens
  siRNA target sequence for MGC43026 (NM_178527.2,1113-1131).
gcaatatgctgactaatat

SEQ ID NO: 258077 - DNA, 19 bp, Homo sapiens
  siRNA target sequence for MGC43026 (NM_178527.2,1209-1227).
ccgctgtaggactgaattt

SEQ ID NO: 258078 - DNA, 19 bp, Homo sapiens
  siRNA target sequence for MGC43026 (NM_178527.2,1210-1228).
cgctgtaggactgaattta

SEQ ID NO: 258079 - DNA, 19 bp, Homo sapiens
  siRNA target sequence for MGC43026 (NM_178527.2,1212-1230).
ctgtaggactgaatttaga

SEQ ID NO: 258080 - DNA, 19 bp, Homo sapiens
  siRNA target sequence for MGC43026 (NM_178527.2,1214-1232).
gtaggactgaatttagatt

SEQ ID NO: 258081 - DNA, 19 bp, Homo sapiens
  siRNA target sequence for MGC43026 (NM_178527.2,1217-1235).
ggactgaatttagattctt

SEQ ID NO: 258082 - DNA, 19 bp, Homo sapiens
  siRNA target sequence for MGC43026 (NM_178527.2,1247-1265).
ccgaagatcgaacttgtaa

SEQ ID NO: 258083 - DNA, 19 bp, Homo sapiens
  siRNA target sequence for MGC43026 (NM_178527.2,1248-1266).
cgaagatcgaacttgtaat

SEQ ID NO: 258084 - DNA, 19 bp, Homo sapiens
  siRNA target sequence for MGC43026 (NM_178527.2,1249-1267).
gaagatcgaacttgtaatt

SEQ ID NO: 258085 - DNA, 19 bp, Homo sapiens
  siRNA target sequence for MGC43026 (NM_178527.2,1252-1270).
gatcgaacttgtaattact

SEQ ID NO: 258086 - DNA, 19 bp, Homo sapiens
  siRNA target sequence for MGC43026 (NM_178527.2,1256-1274).
gaacttgtaattactaagt

SEQ ID NO: 258087 - DNA, 19 bp, Homo sapiens
  siRNA target sequence for MGC43026 (NM_178527.2,1346-1364).
gaactcagccactatgaat

SEQ ID NO: 258088 - DNA, 19 bp, Homo sapiens
  siRNA target sequence for MGC43026 (NM_178527.2,1371-1389).
ctatacctttcatattcat

SEQ ID NO: 258089 - DNA, 19 bp, Homo sapiens
  siRNA target sequence for MGC43026 (NM_178527.2,1411-1429).
ggtaaggttgcttactatt

SEQ ID NO: 258090 - DNA, 19 bp, Homo sapiens
  siRNA target sequence for MGC43026 (NM_178527.2,1476-1494).
ggcgatggggagttgtaat

SEQ ID NO: 258091 - DNA, 19 bp, Homo sapiens
  siRNA target sequence for MGC43026 (NM_178527.2,1478-1496).
cgatggggagttgtaatca

SEQ ID NO: 258092 - DNA, 19 bp, Homo sapiens
  siRNA target sequence for MGC43026 (NM_178527.2,1495-1513).
cacgtggtctggaattaaa

SEQ ID NO: 258093 - DNA, 19 bp, Homo sapiens
  siRNA target sequence for MGC43026 (NM_178527.2,1533-1551).
gggctcctgatgtttataa

SEQ ID NO: 258094 - DNA, 19 bp, Homo sapiens
  siRNA target sequence for MGC43026 (NM_178527.2,1536-1554).
ctcctgatgtttataatct

SEQ ID NO: 258095 - DNA, 19 bp, Homo sapiens
  siRNA target sequence for MGC43026 (NM_178527.2,1592-1610).
ctctatgtacaagtaatat

SEQ ID NO: 258096 - DNA, 19 bp, Homo sapiens
  siRNA target sequence for MGC43026 (NM_178527.2,1594-1612).
ctatgtacaagtaatatca

SEQ ID NO: 258097 - DNA, 19 bp, Homo sapiens
  siRNA target sequence for MGC43026 (NM_178527.2,1598-1616).
gtacaagtaatatcattat

SEQ ID NO: 258098 - DNA, 19 bp, Homo sapiens
  siRNA target sequence for MGC43026 (NM_178527.2,1679-1697).
ctttccctcccaagacaaa

SEQ ID NO: 258099 - DNA, 19 bp, Homo sapiens
  siRNA target sequence for MGC43026 (NM_178527.2,1730-1748).
gagatagtacagaacacaa

SEQ ID NO: 258100 - DNA, 19 bp, Homo sapiens
  siRNA target sequence for MGC43026 (NM_178527.2,1805-1823).
gataaaacgaggatcgaat

SEQ ID NO: 258101 - DNA, 19 bp, Homo sapiens
  siRNA target sequence for MGC43026 (NM_178527.2,1815-1833).
ggatcgaatacattccttt

SEQ ID NO: 258102 - DNA, 19 bp, Homo sapiens
  siRNA target sequence for MGC43026 (NM_178527.2,1836-1854).
cccacgtttcacataatga

SEQ ID NO: 258103 - DNA, 19 bp, Homo sapiens
  siRNA target sequence for MGC43026 (NM_178527.2,1837-1855).
ccacgtttcacataatgat

SEQ ID NO: 258104 - DNA, 19 bp, Homo sapiens
  siRNA target sequence for MGC43026 (NM_178527.2,1841-1859).
gtttcacataatgatatga

SEQ ID NO: 258105 - DNA, 19 bp, Homo sapiens
  siRNA target sequence for MGC43026 (NM_178527.2,1907-1925).
catgtagctgcaatacaaa

SEQ ID NO: 258106 - DNA, 19 bp, Homo sapiens
  siRNA target sequence for MGC43026 (NM_178527.2,1945-1963).
gcgtaacaatggaattctt

SEQ ID NO: 258107 - DNA, 19 bp, Homo sapiens
  siRNA target sequence for MGC43026 (NM_178527.2,1970-1988).
gaggcagcccggatattaa

SEQ ID NO: 258108 - DNA, 19 bp, Homo sapiens
  siRNA target sequence for MGC43026 (NM_178527.2,1972-1990).
ggcagcccggatattaatt

SEQ ID NO: 258109 - DNA, 19 bp, Homo sapiens
  siRNA target sequence for MGC43026 (NM_178527.2,2042-2060).
gatgtttcaacttatatga

SEQ ID NO: 258110 - DNA, 19 bp, Homo sapiens
  siRNA target sequence for MGC43026 (NM_178527.2,2067-2085).
gaagttggcttataaagtt

SEQ ID NO: 258111 - DNA, 19 bp, Homo sapiens
  siRNA target sequence for MGC43026 (NM_178527.2,2070-2088).
gttggcttataaagtttaa

SEQ ID NO: 258112 - DNA, 19 bp, Homo sapiens
  siRNA target sequence for MGC43026 (NM_178527.2,2073-2091).
ggcttataaagtttaaaaa

SEQ ID NO: 258113 - DNA, 19 bp, Homo sapiens
  siRNA target sequence for MGC43026 (NM_178527.2,2138-2156).
ccacctgagagtaatacat

SEQ ID NO: 258114 - DNA, 19 bp, Homo sapiens
  siRNA target sequence for MGC43026 (NM_178527.2,2139-2157).
cacctgagagtaatacatt

SEQ ID NO: 258115 - DNA, 19 bp, Homo sapiens
  siRNA target sequence for MGC43026 (NM_178527.2,2144-2162).
gagagtaatacatttctga

SEQ ID NO: 258116 - DNA, 19 bp, Homo sapiens
  siRNA target sequence for MGC43026 (NM_178527.2,2279-2297).
gtatcagcactgatatcaa

SEQ ID NO: 258117 - DNA, 19 bp, Homo sapiens
  siRNA target sequence for MGC43026 (NM_178527.2,2285-2303).
gcactgatatcaataaact

SEQ ID NO: 258118 - DNA, 19 bp, Homo sapiens
  siRNA target sequence for MGC43026 (NM_178527.2,2288-2306).
ctgatatcaataaactact

SEQ ID NO: 258119 - DNA, 19 bp, Homo sapiens
  siRNA target sequence for MGC43026 (NM_178527.2,2290-2308).
gatatcaataaactactat

SEQ ID NO: 258120 - DNA, 19 bp, Homo sapiens
  siRNA target sequence for MGC43026 (NM_178527.2,2407-2425).
ggttattggaatcattgat

SEQ ID NO: 258121 - DNA, 19 bp, Homo sapiens
  siRNA target sequence for MGC43026 (NM_178527.2,2414-2432).
ggaatcattgatatctttt

SEQ ID NO: 258122 - DNA, 19 bp, Homo sapiens
  siRNA target sequence for MGC43026 (NM_178527.2,2457-2475).
cagacaacttggctcttat

SEQ ID NO: 258123 - DNA, 19 bp, Homo sapiens
  siRNA target sequence for MGC43026 (NM_178527.2,2469-2487).
ctcttatacagcttacagt

SEQ ID NO: 258124 - DNA, 19 bp, Homo sapiens
  siRNA target sequence for MGC43026 (NM_178527.2,2471-2489).
cttatacagcttacagtaa

SEQ ID NO: 258125 - DNA, 19 bp, Homo sapiens
  siRNA target sequence for MGC43026 (NM_178527.2,2523-2541).
ctctcttcaagataatagt

SEQ ID NO: 258126 - DNA, 19 bp, Homo sapiens
  siRNA target sequence for MGC43026 (NM_178527.2,2540-2558).
gtaccaatactgataagaa

SEQ ID NO: 258127 - DNA, 19 bp, Homo sapiens
  siRNA target sequence for MGC43026 (NM_178527.2,2581-2599).
gcgcctcagcttgatgtat

SEQ ID NO: 258128 - DNA, 19 bp, Homo sapiens
  siRNA target sequence for MGC43026 (NM_178527.2,2582-2600).
cgcctcagcttgatgtata

SEQ ID NO: 258129 - DNA, 19 bp, Homo sapiens
  siRNA target sequence for MGC43026 (NM_178527.2,2584-2602).
cctcagcttgatgtatagt

SEQ ID NO: 258130 - DNA, 19 bp, Homo sapiens
  siRNA target sequence for MGC43026 (NM_178527.2,2585-2603).
ctcagcttgatgtatagta

SEQ ID NO: 258131 - DNA, 19 bp, Homo sapiens
  siRNA target sequence for MGC43026 (NM_178527.2,2587-2605).
cagcttgatgtatagtatt

SEQ ID NO: 258132 - DNA, 19 bp, Homo sapiens
  siRNA target sequence for MGC43026 (NM_178527.2,2633-2651).
gatgccaaacttctaataa

SEQ ID NO: 258133 - DNA, 19 bp, Homo sapiens
  siRNA target sequence for MGC43026 (NM_178527.2,2654-2672).
caaatagctgtctgtgaat

SEQ ID NO: 258134 - DNA, 19 bp, Homo sapiens
  siRNA target sequence for MGC43026 (NM_178527.2,2667-2685).
gtgaatcaatatatcagaa

SEQ ID NO: 258135 - DNA, 19 bp, Homo sapiens
  siRNA target sequence for MGC43026 (NM_178527.2,2714-2732).
caggatgctgtcaaagaat

SEQ ID NO: 258136 - DNA, 19 bp, Homo sapiens
  siRNA target sequence for MGC43026 (NM_178527.2,2716-2734).
ggatgctgtcaaagaatta

SEQ ID NO: 258137 - DNA, 19 bp, Homo sapiens
  siRNA target sequence for MGC43026 (NM_178527.2,2721-2739).
ctgtcaaagaattagtact

SEQ ID NO: 258138 - DNA, 19 bp, Homo sapiens
  siRNA target sequence for MGC43026 (NM_178527.2,2752-2770).
gggtcgtgatgttgtcatt

SEQ ID NO: 258139 - DNA, 19 bp, Homo sapiens
  siRNA target sequence for MGC43026 (NM_178527.2,2765-2783).
gtcattgctttgaagacta

SEQ ID NO: 258140 - DNA, 19 bp, Homo sapiens
  siRNA target sequence for MGC43026 (NM_178527.2,2786-2804).
caggcaatccggaatgtga

SEQ ID NO: 258141 - DNA, 19 bp, Homo sapiens
  siRNA target sequence for MGC43026 (NM_178527.2,2788-2806).
ggcaatccggaatgtgatt

SEQ ID NO: 258142 - DNA, 19 bp, Homo sapiens
  siRNA target sequence for MGC43026 (NM_178527.2,2794-2812).
ccggaatgtgattgctaaa

SEQ ID NO: 258143 - DNA, 19 bp, Homo sapiens
  siRNA target sequence for MGC43026 (NM_178527.2,2797-2815).
gaatgtgattgctaaagct

SEQ ID NO: 258144 - DNA, 19 bp, Homo sapiens
  siRNA target sequence for MGC43026 (NM_178527.2,2803-2821).
gattgctaaagctctaaaa

SEQ ID NO: 258145 - DNA, 19 bp, Homo sapiens
  siRNA target sequence for MGC43026 (NM_178527.2,2844-2862).
gaggcattattgataagca

SEQ ID NO: 258146 - DNA, 19 bp, Homo sapiens
  siRNA target sequence for MGC43026 (NM_178527.2,2907-2925).
cactaaataactttccaaa

SEQ ID NO: 258147 - DNA, 19 bp, Homo sapiens
  siRNA target sequence for MGC43026 (NM_178527.2,2937-2955).
ccccaactcctgacatata

SEQ ID NO: 258148 - DNA, 19 bp, Homo sapiens
  siRNA target sequence for MGC43026 (NM_178527.2,3039-3057).
ctggagataccatttgtaa

SEQ ID NO: 258149 - DNA, 19 bp, Homo sapiens
  siRNA target sequence for MGC43026 (NM_178527.2,3096-3114).
caggaatggcaattttgca

SEQ ID NO: 258150 - DNA, 19 bp, Homo sapiens
  siRNA target sequence for MGC43026 (NM_178527.2,3123-3141).
ctcctacctttggaataga

SEQ ID NO: 258151 - DNA, 19 bp, Homo sapiens
  siRNA target sequence for MGC43026 (NM_178527.2,3125-3143).
cctacctttggaatagaga

SEQ ID NO: 258152 - DNA, 19 bp, Homo sapiens
  siRNA target sequence for MGC43026 (NM_178527.2,3130-3148).
ctttggaatagagagtaat

SEQ ID NO: 258153 - DNA, 19 bp, Homo sapiens
  siRNA target sequence for MGC43026 (NM_178527.2,3192-3210).
gtactactggggacataat

SEQ ID NO: 258154 - DNA, 19 bp, Homo sapiens
  siRNA target sequence for MGC43026 (NM_178527.2,3225-3243).
gtctgcttaagcgtgaaat

SEQ ID NO: 258155 - DNA, 19 bp, Homo sapiens
  siRNA target sequence for MGC43026 (NM_178527.2,3256-3274).
catctgtgaaactagttta

SEQ ID NO: 258156 - DNA, 19 bp, Homo sapiens
  siRNA target sequence for MGC43026 (NM_178527.2,3367-3385).
cagtactgcctatcagtat

SEQ ID NO: 258157 - DNA, 19 bp, Homo sapiens
  siRNA target sequence for MGC43026 (NM_178527.2,3407-3425).
gaggacttaaggtttcaga

SEQ ID NO: 258158 - DNA, 19 bp, Homo sapiens
  siRNA target sequence for MGC43026 (NM_178527.2,3427-3445).
ctgtgtgatgttcaatcaa

SEQ ID NO: 258159 - DNA, 19 bp, Homo sapiens
  siRNA target sequence for MGC43026 (NM_178527.2,3433-3451).
gatgttcaatcaagcatat

SEQ ID NO: 258160 - DNA, 19 bp, Homo sapiens
  siRNA target sequence for MGC43026 (NM_178527.2,3468-3486).
gctatagtgacatgattat

SEQ ID NO: 258161 - DNA, 19 bp, Homo sapiens
  siRNA target sequence for MGC43026 (NM_178527.2,3469-3487).
ctatagtgacatgattatt

SEQ ID NO: 258162 - DNA, 19 bp, Homo sapiens
  siRNA target sequence for MGC43026 (NM_178527.2,3563-3581).
gcaccttgcattataccta

SEQ ID NO: 258163 - DNA, 19 bp, Homo sapiens
  siRNA target sequence for MGC43026 (NM_178527.2,3595-3613).
ggttcagggaacttctgat

SEQ ID NO: 258164 - DNA, 19 bp, Homo sapiens
  siRNA target sequence for MGC43026 (NM_178527.2,3618-3636).
gcaagctgctgataatcca

SEQ ID NO: 258165 - DNA, 19 bp, Homo sapiens
  siRNA target sequence for MGC43026 (NM_178527.2,3684-3702).
cagtcaacacggtctttga

SEQ ID NO: 258166 - DNA, 19 bp, Homo sapiens
  siRNA target sequence for MGC43026 (NM_178527.2,3688-3706).
caacacggtctttgaacaa

SEQ ID NO: 258167 - DNA, 19 bp, Homo sapiens
  siRNA target sequence for SLC9A1 (NM_003047.2,1220-1238).
ggcggtgagcagatcaaca

SEQ ID NO: 258168 - DNA, 19 bp, Homo sapiens
  siRNA target sequence for SLC9A1 (NM_003047.2,1221-1239).
gcggtgagcagatcaacaa

SEQ ID NO: 258169 - DNA, 19 bp, Homo sapiens
  siRNA target sequence for SLC9A1 (NM_003047.2,1224-1242).
gtgagcagatcaacaacat

SEQ ID NO: 258170 - DNA, 19 bp, Homo sapiens
  siRNA target sequence for SLC9A1 (NM_003047.2,1299-1317).
cggttctggctgtctttga

SEQ ID NO: 258171 - DNA, 19 bp, Homo sapiens
  siRNA target sequence for SLC9A1 (NM_003047.2,1310-1328).
gtctttgaggaaattcaca

SEQ ID NO: 258172 - DNA, 19 bp, Homo sapiens
  siRNA target sequence for SLC9A1 (NM_003047.2,1526-1544).
gccttcacctcccgattta

SEQ ID NO: 258173 - DNA, 19 bp, Homo sapiens
  siRNA target sequence for SLC9A1 (NM_003047.2,1699-1717).
gtcccacaccaccatcaaa

SEQ ID NO: 258174 - DNA, 19 bp, Homo sapiens
  siRNA target sequence for SLC9A1 (NM_003047.2,2124-2142).
gctccatcaacgaagagat

SEQ ID NO: 258175 - DNA, 19 bp, Homo sapiens
  siRNA target sequence for SLC9A1 (NM_003047.2,2221-2239).
caagctcaaccggtttaat

SEQ ID NO: 258176 - DNA, 19 bp, Homo sapiens
  siRNA target sequence for SLC9A1 (NM_003047.2,2225-2243).
ctcaaccggtttaataaga

SEQ ID NO: 258177 - DNA, 19 bp, Homo sapiens
  siRNA target sequence for SLC9A1 (NM_003047.2,2230-2248).
ccggtttaataagaaatat

SEQ ID NO: 258178 - DNA, 19 bp, Homo sapiens
  siRNA target sequence for SLC9A1 (NM_003047.2,2785-2803).
gctgaagggcaaagtctta

SEQ ID NO: 258179 - DNA, 19 bp, Homo sapiens
  siRNA target sequence for SLC9A1 (NM_003047.2,2892-2910).
caggaaccgacgatgtctt

SEQ ID NO: 258180 - DNA, 19 bp, Homo sapiens
  siRNA target sequence for SLC9A2 (NM_003048.3,348-366).
ctgtgtttacgctggatta

SEQ ID NO: 258181 - DNA, 19 bp, Homo sapiens
  siRNA target sequence for SLC9A2 (NM_003048.3,431-449).
ggcttccatctgtatcaca

SEQ ID NO: 258182 - DNA, 19 bp, Homo sapiens
  siRNA target sequence for SLC9A2 (NM_003048.3,432-450).
gcttccatctgtatcacaa

SEQ ID NO: 258183 - DNA, 19 bp, Homo sapiens
  siRNA target sequence for SLC9A2 (NM_003048.3,545-563).
gcaatgaagactgatgtat

SEQ ID NO: 258184 - DNA, 19 bp, Homo sapiens
  siRNA target sequence for SLC9A2 (NM_003048.3,613-631).
gcccactcgcccattcttt

SEQ ID NO: 258185 - DNA, 19 bp, Homo sapiens
  siRNA target sequence for SLC9A2 (NM_003048.3,615-633).
ccactcgcccattctttga

SEQ ID NO: 258186 - DNA, 19 bp, Homo sapiens
  siRNA target sequence for SLC9A2 (NM_003048.3,659-677).
gctgtggtagggacacttt

SEQ ID NO: 258187 - DNA, 19 bp, Homo sapiens
  siRNA target sequence for SLC9A2 (NM_003048.3,665-683).
gtagggacactttggaatt

SEQ ID NO: 258188 - DNA, 19 bp, Homo sapiens
  siRNA target sequence for SLC9A2 (NM_003048.3,735-753).
gcctcagcgacatcacttt

SEQ ID NO: 258189 - DNA, 19 bp, Homo sapiens
  siRNA target sequence for SLC9A2 (NM_003048.3,769-787).
ctttggcagcttaatctca

SEQ ID NO: 258190 - DNA, 19 bp, Homo sapiens
  siRNA target sequence for SLC9A2 (NM_003048.3,891-909).
cagtggtcctgtacaactt

SEQ ID NO: 258191 - DNA, 19 bp, Homo sapiens
  siRNA target sequence for SLC9A2 (NM_003048.3,893-911).
gtggtcctgtacaacttgt

SEQ ID NO: 258192 - DNA, 19 bp, Homo sapiens
  siRNA target sequence for SLC9A2 (NM_003048.3,1008-1026).
gcatcttcttgggctttat

SEQ ID NO: 258193 - DNA, 19 bp, Homo sapiens
  siRNA target sequence for SLC9A2 (NM_003048.3,1009-1027).
catcttcttgggctttata

SEQ ID NO: 258194 - DNA, 19 bp, Homo sapiens
  siRNA target sequence for SLC9A2 (NM_003048.3,1021-1039).
ctttatagcggcatttact

SEQ ID NO: 258195 - DNA, 19 bp, Homo sapiens
  siRNA target sequence for SLC9A2 (NM_003048.3,1041-1059).
ctcgattcacccataatat

SEQ ID NO: 258196 - DNA, 19 bp, Homo sapiens
  siRNA target sequence for SLC9A2 (NM_003048.3,1066-1084).
gatcgagccactgtttgtt

SEQ ID NO: 258197 - DNA, 19 bp, Homo sapiens
  siRNA target sequence for SLC9A2 (NM_003048.3,1152-1170).
ctgcttgtgcaatgactat

SEQ ID NO: 258198 - DNA, 19 bp, Homo sapiens
  siRNA target sequence for SLC9A2 (NM_003048.3,1161-1179).
caatgactatgaataagta

SEQ ID NO: 258199 - DNA, 19 bp, Homo sapiens
  siRNA target sequence for SLC9A2 (NM_003048.3,1180-1198).
cgtagaagaaaatgtatct

SEQ ID NO: 258200 - DNA, 19 bp, Homo sapiens
  siRNA target sequence for SLC9A2 (NM_003048.3,1353-1371).
ggcgagccctgggtgtttt

SEQ ID NO: 258201 - DNA, 19 bp, Homo sapiens
  siRNA target sequence for SLC9A2 (NM_003048.3,1354-1372).
gcgagccctgggtgttttt

SEQ ID NO: 258202 - DNA, 19 bp, Homo sapiens
  siRNA target sequence for SLC9A2 (NM_003048.3,1467-1485).
gttttgcgttagtgtttct

SEQ ID NO: 258203 - DNA, 19 bp, Homo sapiens
  siRNA target sequence for SLC9A2 (NM_003048.3,1505-1523).
cctcggaaaaaattgttta

SEQ ID NO: 258204 - DNA, 19 bp, Homo sapiens
  siRNA target sequence for SLC9A2 (NM_003048.3,1529-1547).
gctgccattgttgtcatat

SEQ ID NO: 258205 - DNA, 19 bp, Homo sapiens
  siRNA target sequence for SLC9A2 (NM_003048.3,1561-1579).
cattctgggaataactatt

SEQ ID NO: 258206 - DNA, 19 bp, Homo sapiens
  siRNA target sequence for SLC9A2 (NM_003048.3,1581-1599).
gaccactggtggagtttct

SEQ ID NO: 258207 - DNA, 19 bp, Homo sapiens
  siRNA target sequence for SLC9A2 (NM_003048.3,1584-1602).
cactggtggagtttcttga

SEQ ID NO: 258208 - DNA, 19 bp, Homo sapiens
  siRNA target sequence for SLC9A2 (NM_003048.3,1601-1619).
gatgtcaagaggtccaata

SEQ ID NO: 258209 - DNA, 19 bp, Homo sapiens
  siRNA target sequence for SLC9A2 (NM_003048.3,1611-1629).
ggtccaataagaaacaaca

SEQ ID NO: 258210 - DNA, 19 bp, Homo sapiens
  siRNA target sequence for SLC9A2 (NM_003048.3,1632-1650).
ctgtcagtgaagaaatcta

SEQ ID NO: 258211 - DNA, 19 bp, Homo sapiens
  siRNA target sequence for SLC9A2 (NM_003048.3,1653-1671).
gtcggttgtttgatcatgt

SEQ ID NO: 258212 - DNA, 19 bp, Homo sapiens
  siRNA target sequence for SLC9A2 (NM_003048.3,1656-1674).
ggttgtttgatcatgtgaa

SEQ ID NO: 258213 - DNA, 19 bp, Homo sapiens
  siRNA target sequence for SLC9A2 (NM_003048.3,1774-1792).
ggaaaaccaaccaaagtca

SEQ ID NO: 258214 - DNA, 19 bp, Homo sapiens
  siRNA target sequence for SLC9A2 (NM_003048.3,1780-1798).
ccaaccaaagtcaagtatt

SEQ ID NO: 258215 - DNA, 19 bp, Homo sapiens
  siRNA target sequence for SLC9A2 (NM_003048.3,1791-1809).
caagtattgtatctttata

SEQ ID NO: 258216 - DNA, 19 bp, Homo sapiens
  siRNA target sequence for SLC9A2 (NM_003048.3,1870-1888).
ccctacatttgcatctcta

SEQ ID NO: 258217 - DNA, 19 bp, Homo sapiens
  siRNA target sequence for SLC9A2 (NM_003048.3,1898-1916).
cgtgaagaaaaaataagga

SEQ ID NO: 258218 - DNA, 19 bp, Homo sapiens
  siRNA target sequence for SLC9A2 (NM_003048.3,1918-1936).
ggtcacgtccagtgaaact

SEQ ID NO: 258219 - DNA, 19 bp, Homo sapiens
  siRNA target sequence for SLC9A2 (NM_003048.3,1921-1939).
cacgtccagtgaaactgat

SEQ ID NO: 258220 - DNA, 19 bp, Homo sapiens
  siRNA target sequence for SLC9A2 (NM_003048.3,1940-1958).
gaaattcgagaactcttat

SEQ ID NO: 258221 - DNA, 19 bp, Homo sapiens
  siRNA target sequence for SLC9A2 (NM_003048.3,1946-1964).
cgagaactcttatcaagaa

SEQ ID NO: 258222 - DNA, 19 bp, Homo sapiens
  siRNA target sequence for SLC9A2 (NM_003048.3,1979-1997).
cgtcagcgaactttatcct

SEQ ID NO: 258223 - DNA, 19 bp, Homo sapiens
  siRNA target sequence for SLC9A2 (NM_003048.3,1980-1998).
gtcagcgaactttatccta

SEQ ID NO: 258224 - DNA, 19 bp, Homo sapiens
  siRNA target sequence for SLC9A2 (NM_003048.3,1985-2003).
cgaactttatcctacaaca

SEQ ID NO: 258225 - DNA, 19 bp, Homo sapiens
  siRNA target sequence for SLC9A2 (NM_003048.3,2127-2145).
cttcaacctcccgatattt

SEQ ID NO: 258226 - DNA, 19 bp, Homo sapiens
  siRNA target sequence for SLC9A2 (NM_003048.3,2139-2157).
gatatttatccttacctaa

SEQ ID NO: 258227 - DNA, 19 bp, Homo sapiens
  siRNA target sequence for SLC9A2 (NM_003048.3,2243-2261).
gggaccaccgtgctcaatt

SEQ ID NO: 258228 - DNA, 19 bp, Homo sapiens
  siRNA target sequence for SLC9A2 (NM_003048.3,2244-2262).
ggaccaccgtgctcaattt

SEQ ID NO: 258229 - DNA, 19 bp, Homo sapiens
  siRNA target sequence for SLC9A2 (NM_003048.3,2247-2265).
ccaccgtgctcaatttgca

SEQ ID NO: 258230 - DNA, 19 bp, Homo sapiens
  siRNA target sequence for SLC9A2 (NM_003048.3,2413-2431).
ccagacgtcaggcttacta

SEQ ID NO: 258231 - DNA, 19 bp, Homo sapiens
  siRNA target sequence for SLC9A3 (NM_004174.1,342-360).
cgcccaccgtcttcttctt

SEQ ID NO: 258232 - DNA, 19 bp, Homo sapiens
  siRNA target sequence for SLC9A3 (NM_004174.1,846-864).
ccaagcatgtgcgtatcat

SEQ ID NO: 258233 - DNA, 19 bp, Homo sapiens
  siRNA target sequence for SLC9A3 (NM_004174.1,1329-1347).
ccaccatcatcgtagtgtt

SEQ ID NO: 258234 - DNA, 19 bp, Homo sapiens
  siRNA target sequence for SLC9A3 (NM_004174.1,1332-1350).
ccatcatcgtagtgttctt

SEQ ID NO: 258235 - DNA, 19 bp, Homo sapiens
  siRNA target sequence for SLC9A3 (NM_004174.1,1496-1514).
ggacagatcgggcacaatt

SEQ ID NO: 258236 - DNA, 19 bp, Homo sapiens
  siRNA target sequence for SLC9A3 (NM_004174.1,1497-1515).
gacagatcgggcacaatta

SEQ ID NO: 258237 - DNA, 19 bp, Homo sapiens
  siRNA target sequence for SLC9A3 (NM_004174.1,1595-1613).
gaccggatcctgaatgtct

SEQ ID NO: 258238 - DNA, 19 bp, Homo sapiens
  siRNA target sequence for SLC9A3 (NM_004174.1,1761-1779).
cctacctcctgagagaaaa

SEQ ID NO: 258239 - DNA, 19 bp, Homo sapiens
  siRNA target sequence for SLC9A3 (NM_004174.1,1762-1780).
ctacctcctgagagaaaat

SEQ ID NO: 258240 - DNA, 19 bp, Homo sapiens
  siRNA target sequence for SLC9A3 (NM_004174.1,2018-2036).
gggctcaaccagaacaaga

SEQ ID NO: 258241 - DNA, 19 bp, Homo sapiens
  siRNA target sequence for SLC9A3 (NM_004174.1,2114-2132).
gagagccctgcgcagaatt

SEQ ID NO: 258242 - DNA, 19 bp, Homo sapiens
  siRNA target sequence for SLC9A3 (NM_004174.1,2253-2271).
cccctgcaggaattgacaa

SEQ ID NO: 258243 - DNA, 19 bp, Homo sapiens
  siRNA target sequence for SLC9A5 (NM_004594.1,264-282).
cctgtctcggaaagtaaca

SEQ ID NO: 258244 - DNA, 19 bp, Homo sapiens
  siRNA target sequence for SLC9A5 (NM_004594.1,265-283).
ctgtctcggaaagtaacat

SEQ ID NO: 258245 - DNA, 19 bp, Homo sapiens
  siRNA target sequence for SLC9A5 (NM_004594.1,267-285).
gtctcggaaagtaacatct

SEQ ID NO: 258246 - DNA, 19 bp, Homo sapiens
  siRNA target sequence for SLC9A5 (NM_004594.1,324-342).
ggtgctagggggaattgtt

SEQ ID NO: 258247 - DNA, 19 bp, Homo sapiens
  siRNA target sequence for SLC9A5 (NM_004594.1,325-343).
gtgctagggggaattgttt

SEQ ID NO: 258248 - DNA, 19 bp, Homo sapiens
  siRNA target sequence for SLC9A5 (NM_004594.1,443-461).
gcaggctgttctttgacaa

SEQ ID NO: 258249 - DNA, 19 bp, Homo sapiens
  siRNA target sequence for SLC9A5 (NM_004594.1,652-670).
gaggtgcacgtcaatgaga

SEQ ID NO: 258250 - DNA, 19 bp, Homo sapiens
  siRNA target sequence for SLC9A5 (NM_004594.1,660-678).
cgtcaatgagactctcttt

SEQ ID NO: 258251 - DNA, 19 bp, Homo sapiens
  siRNA target sequence for SLC9A5 (NM_004594.1,832-850).
gcagccgtgggcttagtct

SEQ ID NO: 258252 - DNA, 19 bp, Homo sapiens
  siRNA target sequence for SLC9A5 (NM_004594.1,960-978).
ctcgctctccgccattctt

SEQ ID NO: 258253 - DNA, 19 bp, Homo sapiens
  siRNA target sequence for SLC9A5 (NM_004594.1,1042-1060).
cgcacaactgtcaaatata

SEQ ID NO: 258254 - DNA, 19 bp, Homo sapiens
  siRNA target sequence for SLC9A5 (NM_004594.1,1051-1069).
gtcaaatatacaatgaaga

SEQ ID NO: 258255 - DNA, 19 bp, Homo sapiens
  siRNA target sequence for SLC9A5 (NM_004594.1,1217-1235).
cctgggtgctgaatcagtt

SEQ ID NO: 258256 - DNA, 19 bp, Homo sapiens
  siRNA target sequence for SLC9A5 (NM_004594.1,1370-1388).
ctattgtagtggtcttctt

SEQ ID NO: 258257 - DNA, 19 bp, Homo sapiens
  siRNA target sequence for SLC9A5 (NM_004594.1,1446-1464).
gaggagtgagcatcacaaa

SEQ ID NO: 258258 - DNA, 19 bp, Homo sapiens
  siRNA target sequence for SLC9A5 (NM_004594.1,1696-1714).
ggaggccacgtcttgtctt

SEQ ID NO: 258259 - DNA, 19 bp, Homo sapiens
  siRNA target sequence for SLC9A5 (NM_004594.1,2096-2114).
cgaatgctgaggctacaaa

SEQ ID NO: 258260 - DNA, 19 bp, Homo sapiens
  siRNA target sequence for SLC9A5 (NM_004594.1,2097-2115).
gaatgctgaggctacaaat

SEQ ID NO: 258261 - DNA, 19 bp, Homo sapiens
  siRNA target sequence for SLC9A5 (NM_004594.1,2142-2160).
ggacacagctgctgtgata

SEQ ID NO: 258262 - DNA, 19 bp, Homo sapiens
  siRNA target sequence for SLC9A5 (NM_004594.1,2303-2321).
gcccaagcccacgaatcat

SEQ ID NO: 258263 - DNA, 19 bp, Homo sapiens
  siRNA target sequence for SLC9A5 (NM_004594.1,2304-2322).
cccaagcccacgaatcatt

SEQ ID NO: 258264 - DNA, 19 bp, Homo sapiens
  siRNA target sequence for SLC9A5 (NM_004594.1,2486-2504).
gtaaccaggccccaattct

SEQ ID NO: 258265 - DNA, 19 bp, Homo sapiens
  siRNA target sequence for SLC9A6 (NM_006359.1,132-150).
gcagtgggcgtctttgact

SEQ ID NO: 258266 - DNA, 19 bp, Homo sapiens
  siRNA target sequence for SLC9A6 (NM_006359.1,340-358).
ccggcctggctatgattta

SEQ ID NO: 258267 - DNA, 19 bp, Homo sapiens
  siRNA target sequence for SLC9A6 (NM_006359.1,341-359).
cggcctggctatgatttat

SEQ ID NO: 258268 - DNA, 19 bp, Homo sapiens
  siRNA target sequence for SLC9A6 (NM_006359.1,344-362).
cctggctatgatttatggt

SEQ ID NO: 258269 - DNA, 19 bp, Homo sapiens
  siRNA target sequence for SLC9A6 (NM_006359.1,396-414).
catgttccgagtgatgtaa

SEQ ID NO: 258270 - DNA, 19 bp, Homo sapiens
  siRNA target sequence for SLC9A6 (NM_006359.1,399-417).
gttccgagtgatgtaaata

SEQ ID NO: 258271 - DNA, 19 bp, Homo sapiens
  siRNA target sequence for SLC9A6 (NM_006359.1,443-461).
gtcaagtccaactacctta

SEQ ID NO: 258272 - DNA, 19 bp, Homo sapiens
  siRNA target sequence for SLC9A6 (NM_006359.1,454-472).
ctaccttactggttacttt

SEQ ID NO: 258273 - DNA, 19 bp, Homo sapiens
  siRNA target sequence for SLC9A6 (NM_006359.1,522-540).
gcaggttatagcctgaaaa

SEQ ID NO: 258274 - DNA, 19 bp, Homo sapiens
  siRNA target sequence for SLC9A6 (NM_006359.1,612-630).
gttattgggtcaataatgt

SEQ ID NO: 258275 - DNA, 19 bp, Homo sapiens
  siRNA target sequence for SLC9A6 (NM_006359.1,634-652).
gctgtgtaacgctgatgaa

SEQ ID NO: 258276 - DNA, 19 bp, Homo sapiens
  siRNA target sequence for SLC9A6 (NM_006359.1,650-668).
gaaggtaacgggacaactt

SEQ ID NO: 258277 - DNA, 19 bp, Homo sapiens
  siRNA target sequence for SLC9A6 (NM_006359.1,699-717).
ctgtttggtgccattgtat

SEQ ID NO: 258278 - DNA, 19 bp, Homo sapiens
  siRNA target sequence for SLC9A6 (NM_006359.1,701-719).
gtttggtgccattgtatca

SEQ ID NO: 258279 - DNA, 19 bp, Homo sapiens
  siRNA target sequence for SLC9A6 (NM_006359.1,758-776).
gcttcaagttgatgttgaa

SEQ ID NO: 258280 - DNA, 19 bp, Homo sapiens
  siRNA target sequence for SLC9A6 (NM_006359.1,929-947).
cttcagtggatcttttgca

SEQ ID NO: 258281 - DNA, 19 bp, Homo sapiens
  siRNA target sequence for SLC9A6 (NM_006359.1,964-982).
gagtggtgacagctttagt

SEQ ID NO: 258282 - DNA, 19 bp, Homo sapiens
  siRNA target sequence for SLC9A6 (NM_006359.1,981-999).
gtgacaaagttcaccaaat

SEQ ID NO: 258283 - DNA, 19 bp, Homo sapiens
  siRNA target sequence for SLC9A6 (NM_006359.1,1076-1094).
gggcttcacaggtgtagtt

SEQ ID NO: 258284 - DNA, 19 bp, Homo sapiens
  siRNA target sequence for SLC9A6 (NM_006359.1,1084-1102).
caggtgtagttgcagtatt

SEQ ID NO: 258285 - DNA, 19 bp, Homo sapiens
  siRNA target sequence for SLC9A6 (NM_006359.1,1087-1105).
gtgtagttgcagtattgtt

SEQ ID NO: 258286 - DNA, 19 bp, Homo sapiens
  siRNA target sequence for SLC9A6 (NM_006359.1,1122-1140).
gcacattatacgtataata

SEQ ID NO: 258287 - DNA, 19 bp, Homo sapiens
  siRNA target sequence for SLC9A6 (NM_006359.1,1125-1143).
cattatacgtataataatt

SEQ ID NO: 258288 - DNA, 19 bp, Homo sapiens
  siRNA target sequence for SLC9A6 (NM_006359.1,1281-1299).
ggagcatttgttgctattt

SEQ ID NO: 258289 - DNA, 19 bp, Homo sapiens
  siRNA target sequence for SLC9A6 (NM_006359.1,1341-1359).
cttaatttgggtagaagaa

SEQ ID NO: 258290 - DNA, 19 bp, Homo sapiens
  siRNA target sequence for SLC9A6 (NM_006359.1,1427-1445).
cttggccattcgagatact

SEQ ID NO: 258291 - DNA, 19 bp, Homo sapiens
  siRNA target sequence for SLC9A6 (NM_006359.1,1450-1468).
cttatgcacggcaaatgat

SEQ ID NO: 258292 - DNA, 19 bp, Homo sapiens
  siRNA target sequence for SLC9A6 (NM_006359.1,1455-1473).
gcacggcaaatgatgttca

SEQ ID NO: 258293 - DNA, 19 bp, Homo sapiens
  siRNA target sequence for SLC9A6 (NM_006359.1,1472-1490).
cagcaccacgcttctgatt

SEQ ID NO: 258294 - DNA, 19 bp, Homo sapiens
  siRNA target sequence for SLC9A6 (NM_006359.1,1474-1492).
gcaccacgcttctgattgt

SEQ ID NO: 258295 - DNA, 19 bp, Homo sapiens
  siRNA target sequence for SLC9A6 (NM_006359.1,1478-1496).
cacgcttctgattgtgttt

SEQ ID NO: 258296 - DNA, 19 bp, Homo sapiens
  siRNA target sequence for SLC9A6 (NM_006359.1,1536-1554).
ctgtcatgcttgcatatca

SEQ ID NO: 258297 - DNA, 19 bp, Homo sapiens
  siRNA target sequence for SLC9A6 (NM_006359.1,1555-1573).
gggttggtgttgattcaga

SEQ ID NO: 258298 - DNA, 19 bp, Homo sapiens
  siRNA target sequence for SLC9A6 (NM_006359.1,1640-1658).
ccggatgtggtacaacttt

SEQ ID NO: 258299 - DNA, 19 bp, Homo sapiens
  siRNA target sequence for SLC9A6 (NM_006359.1,1754-1772).
cagcccccaggcttacgaa

SEQ ID NO: 258300 - DNA, 19 bp, Homo sapiens
  siRNA target sequence for SLC9A6 (NM_006359.1,1756-1774).
gcccccaggcttacgaaaa

SEQ ID NO: 258301 - DNA, 19 bp, Homo sapiens
  siRNA target sequence for SLC9A6 (NM_006359.1,1797-1815).
gattctgatcttattctca

SEQ ID NO: 258302 - DNA, 19 bp, Homo sapiens
  siRNA target sequence for SLC9A6 (NM_006359.1,1818-1836).
gatggtgacatcagtttga

SEQ ID NO: 258303 - DNA, 19 bp, Homo sapiens
  siRNA target sequence for SLC9A6 (NM_006359.1,1898-1916).
gggaaacagttctgaagat

SEQ ID NO: 258304 - DNA, 19 bp, Homo sapiens
  siRNA target sequence for SLC9A6 (NM_006359.1,1969-1987).
cacgcctggttcttccaat

SEQ ID NO: 258305 - DNA, 19 bp, Homo sapiens
  siRNA target sequence for SLC9A6 (NM_006359.1,1973-1991).
cctggttcttccaatggat

SEQ ID NO: 258306 - DNA, 19 bp, Homo sapiens
  siRNA target sequence for SLC9A6 (NM_006359.1,1977-1995).
gttcttccaatggatgatt

SEQ ID NO: 258307 - DNA, 19 bp, Homo sapiens
  siRNA target sequence for SLC9A6 (NM_006359.1,2004-2022).
ccgctaaatttgttagata

SEQ ID NO: 258308 - DNA, 19 bp, Homo sapiens
  siRNA target sequence for SLC9A6 (NM_006359.1,2005-2023).
cgctaaatttgttagataa

SEQ ID NO: 258309 - DNA, 19 bp, Homo sapiens
  siRNA target sequence for SLC9A7 (NM_032591.1,416-434).
cagggccttcagtacctta

SEQ ID NO: 258310 - DNA, 19 bp, Homo sapiens
  siRNA target sequence for SLC9A7 (NM_032591.1,418-436).
gggccttcagtaccttatt

SEQ ID NO: 258311 - DNA, 19 bp, Homo sapiens
  siRNA target sequence for SLC9A7 (NM_032591.1,427-445).
gtaccttattagtgaatgt

SEQ ID NO: 258312 - DNA, 19 bp, Homo sapiens
  siRNA target sequence for SLC9A7 (NM_032591.1,623-641).
cagaaatcttggatctata

SEQ ID NO: 258313 - DNA, 19 bp, Homo sapiens
  siRNA target sequence for SLC9A7 (NM_032591.1,814-832).
cgatatttaatgaattgca

SEQ ID NO: 258314 - DNA, 19 bp, Homo sapiens
  siRNA target sequence for SLC9A7 (NM_032591.1,842-860).
ggatctttacgcacttctt

SEQ ID NO: 258315 - DNA, 19 bp, Homo sapiens
  siRNA target sequence for SLC9A7 (NM_032591.1,938-956).
gaacactcacgcctttgat

SEQ ID NO: 258316 - DNA, 19 bp, Homo sapiens
  siRNA target sequence for SLC9A7 (NM_032591.1,1041-1059).
gccaacgtgactaagttta

SEQ ID NO: 258317 - DNA, 19 bp, Homo sapiens
  siRNA target sequence for SLC9A7 (NM_032591.1,1241-1259).
gctctttgaggtgttacat

SEQ ID NO: 258318 - DNA, 19 bp, Homo sapiens
  siRNA target sequence for SLC9A7 (NM_032591.1,1540-1558).
cgaccacccttctcattgt

SEQ ID NO: 258319 - DNA, 19 bp, Homo sapiens
  siRNA target sequence for SLC9A9 (NM_173653.1,139-157).
caagggttatgtcagaaaa

SEQ ID NO: 258320 - DNA, 19 bp, Homo sapiens
  siRNA target sequence for SLC9A9 (NM_173653.1,263-281).
ccgcttcttgcatgaaact

SEQ ID NO: 258321 - DNA, 19 bp, Homo sapiens
  siRNA target sequence for SLC9A9 (NM_173653.1,301-319).
gccttataatgggactaat

SEQ ID NO: 258322 - DNA, 19 bp, Homo sapiens
  siRNA target sequence for SLC9A9 (NM_173653.1,311-329).
gggactaattttacgatat

SEQ ID NO: 258323 - DNA, 19 bp, Homo sapiens
  siRNA target sequence for SLC9A9 (NM_173653.1,331-349).
ctacagcaccaactgatat

SEQ ID NO: 258324 - DNA, 19 bp, Homo sapiens
  siRNA target sequence for SLC9A9 (NM_173653.1,336-354).
gcaccaactgatattgaaa

SEQ ID NO: 258325 - DNA, 19 bp, Homo sapiens
  siRNA target sequence for SLC9A9 (NM_173653.1,470-488).
caatcctcatcaaggaaat

SEQ ID NO: 258326 - DNA, 19 bp, Homo sapiens
  siRNA target sequence for SLC9A9 (NM_173653.1,474-492).
cctcatcaaggaaatgcta

SEQ ID NO: 258327 - DNA, 19 bp, Homo sapiens
  siRNA target sequence for SLC9A9 (NM_173653.1,489-507).
gctatacttgaaaagatga

SEQ ID NO: 258328 - DNA, 19 bp, Homo sapiens
  siRNA target sequence for SLC9A9 (NM_173653.1,513-531).
gatccagaaatcttcttca

SEQ ID NO: 258329 - DNA, 19 bp, Homo sapiens
  siRNA target sequence for SLC9A9 (NM_173653.1,519-537).
gaaatcttcttcaatgttt

SEQ ID NO: 258330 - DNA, 19 bp, Homo sapiens
  siRNA target sequence for SLC9A9 (NM_173653.1,534-552).
gttttactgccaccaatta

SEQ ID NO: 258331 - DNA, 19 bp, Homo sapiens
  siRNA target sequence for SLC9A9 (NM_173653.1,561-579).
gcaggatatagtctaaaga

SEQ ID NO: 258332 - DNA, 19 bp, Homo sapiens
  siRNA target sequence for SLC9A9 (NM_173653.1,646-664).
gcatcgtcatagggttaat

SEQ ID NO: 258333 - DNA, 19 bp, Homo sapiens
  siRNA target sequence for SLC9A9 (NM_173653.1,647-665).
catcgtcatagggttaatt

SEQ ID NO: 258334 - DNA, 19 bp, Homo sapiens
  siRNA target sequence for SLC9A9 (NM_173653.1,657-675).
gggttaattatgtatggtt

SEQ ID NO: 258335 - DNA, 19 bp, Homo sapiens
  siRNA target sequence for SLC9A9 (NM_173653.1,658-676).
ggttaattatgtatggttt

SEQ ID NO: 258336 - DNA, 19 bp, Homo sapiens
  siRNA target sequence for SLC9A9 (NM_173653.1,659-677).
gttaattatgtatggtttt

SEQ ID NO: 258337 - DNA, 19 bp, Homo sapiens
  siRNA target sequence for SLC9A9 (NM_173653.1,673-691).
gttttgtgaaggctatgat

SEQ ID NO: 258338 - DNA, 19 bp, Homo sapiens
  siRNA target sequence for SLC9A9 (NM_173653.1,693-711).
catgctggccagctgaaaa

SEQ ID NO: 258339 - DNA, 19 bp, Homo sapiens
  siRNA target sequence for SLC9A9 (NM_173653.1,861-879).
gtggccatagtccttacat

SEQ ID NO: 258340 - DNA, 19 bp, Homo sapiens
  siRNA target sequence for SLC9A9 (NM_173653.1,863-881).
ggccatagtccttacatat

SEQ ID NO: 258341 - DNA, 19 bp, Homo sapiens
  siRNA target sequence for SLC9A9 (NM_173653.1,864-882).
gccatagtccttacatatt

SEQ ID NO: 258342 - DNA, 19 bp, Homo sapiens
  siRNA target sequence for SLC9A9 (NM_173653.1,870-888).
gtccttacatattctatat

SEQ ID NO: 258343 - DNA, 19 bp, Homo sapiens
  siRNA target sequence for SLC9A9 (NM_173653.1,873-891).
cttacatattctatatcca

SEQ ID NO: 258344 - DNA, 19 bp, Homo sapiens
  siRNA target sequence for SLC9A9 (NM_173653.1,1012-1030).
cagcactgttgaccaaatt

SEQ ID NO: 258345 - DNA, 19 bp, Homo sapiens
  siRNA target sequence for SLC9A9 (NM_173653.1,1014-1032).
gcactgttgaccaaattta

SEQ ID NO: 258346 - DNA, 19 bp, Homo sapiens
  siRNA target sequence for SLC9A9 (NM_173653.1,1184-1202).
gtcttcggattccaaaata

SEQ ID NO: 258347 - DNA, 19 bp, Homo sapiens
  siRNA target sequence for SLC9A9 (NM_173653.1,1242-1260).
gagaacgtcatcttctgtt

SEQ ID NO: 258348 - DNA, 19 bp, Homo sapiens
  siRNA target sequence for SLC9A9 (NM_173653.1,1286-1304).
ccagaatcatatctttaat

SEQ ID NO: 258349 - DNA, 19 bp, Homo sapiens
  siRNA target sequence for SLC9A9 (NM_173653.1,1320-1338).
ggagcctttctagcaattt

SEQ ID NO: 258350 - DNA, 19 bp, Homo sapiens
  siRNA target sequence for SLC9A9 (NM_173653.1,1400-1418).
gaagatcccctggaacttt

SEQ ID NO: 258351 - DNA, 19 bp, Homo sapiens
  siRNA target sequence for SLC9A9 (NM_173653.1,1457-1475).
cgcatttgccttagctatt

SEQ ID NO: 258352 - DNA, 19 bp, Homo sapiens
  siRNA target sequence for SLC9A9 (NM_173653.1,1470-1488).
gctattcggaacacagaat

SEQ ID NO: 258353 - DNA, 19 bp, Homo sapiens
  siRNA target sequence for SLC9A9 (NM_173653.1,1489-1507).
ctcagcccaaacaaatgat

SEQ ID NO: 258354 - DNA, 19 bp, Homo sapiens
  siRNA target sequence for SLC9A9 (NM_173653.1,1538-1556).
cactgtctgggtatttgga

SEQ ID NO: 258355 - DNA, 19 bp, Homo sapiens
  siRNA target sequence for SLC9A9 (NM_173653.1,1599-1617).
ggcgtggacctggatgaaa

SEQ ID NO: 258356 - DNA, 19 bp, Homo sapiens
  siRNA target sequence for SLC9A9 (NM_173653.1,1601-1619).
cgtggacctggatgaaaat

SEQ ID NO: 258357 - DNA, 19 bp, Homo sapiens
  siRNA target sequence for SLC9A9 (NM_173653.1,1690-1708).
gtgctcggctcttcagaat

SEQ ID NO: 258358 - DNA, 19 bp, Homo sapiens
  siRNA target sequence for SLC9A9 (NM_173653.1,1692-1710).
gctcggctcttcagaatgt

SEQ ID NO: 258359 - DNA, 19 bp, Homo sapiens
  siRNA target sequence for SLC9A9 (NM_173653.1,1854-1872).
gatgtggaatgcattgtaa

SEQ ID NO: 258360 - DNA, 19 bp, Homo sapiens
  siRNA target sequence for SLC9A9 (NM_173653.1,1878-1896).
gatgaactagccataaatt

SEQ ID NO: 258361 - DNA, 19 bp, Homo sapiens
  siRNA target sequence for SLC9A9 (NM_173653.1,1971-1989).
ccaggcaaggaaaacattt

SEQ ID NO: 258362 - DNA, 19 bp, Homo sapiens
  siRNA target sequence for SLC9A9 (NM_173653.1,2022-2040).
ctcaagcttgagcaaactt

SEQ ID NO: 258363 - DNA, 19 bp, Homo sapiens
  siRNA target sequence for SLC9A9 (NM_173653.1,2042-2060).
gggtcaatcccagttgaat

SEQ ID NO: 258364 - DNA, 19 bp, Homo sapiens
  siRNA target sequence for SLC4A1 (NM_000342.1,272-290).
gtacccacaaggtctatgt

SEQ ID NO: 258365 - DNA, 19 bp, Homo sapiens
  siRNA target sequence for SLC4A1 (NM_000342.1,517-535).
ctgctagacaggtttatct

SEQ ID NO: 258366 - DNA, 19 bp, Homo sapiens
  siRNA target sequence for SLC4A1 (NM_000342.1,744-762).
gcactcaccatctggaatt

SEQ ID NO: 258367 - DNA, 19 bp, Homo sapiens
  siRNA target sequence for SLC4A1 (NM_000342.1,752-770).
catctggaattctggaaaa

SEQ ID NO: 258368 - DNA, 19 bp, Homo sapiens
  siRNA target sequence for SLC4A1 (NM_000342.1,896-914).
ctatacgcttcctctttgt

SEQ ID NO: 258369 - DNA, 19 bp, Homo sapiens
  siRNA target sequence for SLC4A1 (NM_000342.1,987-1005).
gagggtgttccgcatagat

SEQ ID NO: 258370 - DNA, 19 bp, Homo sapiens
  siRNA target sequence for SLC4A1 (NM_000342.1,1141-1159).
cttcgaaggcgctatcagt

SEQ ID NO: 258371 - DNA, 19 bp, Homo sapiens
  siRNA target sequence for SLC4A1 (NM_000342.1,1191-1209).
caagggcctagacttaaat

SEQ ID NO: 258372 - DNA, 19 bp, Homo sapiens
  siRNA target sequence for SLC4A1 (NM_000342.1,1556-1574).
ccaacggtctagagtacat

SEQ ID NO: 258373 - DNA, 19 bp, Homo sapiens
  siRNA target sequence for SLC4A1 (NM_000342.1,1753-1771).
cacccactacagaagactt

SEQ ID NO: 258374 - DNA, 19 bp, Homo sapiens
  siRNA target sequence for SLC4A1 (NM_000342.1,1755-1773).
cccactacagaagacttat

SEQ ID NO: 258375 - DNA, 19 bp, Homo sapiens
  siRNA target sequence for SLC4A1 (NM_000342.1,1759-1777).
ctacagaagacttataact

SEQ ID NO: 258376 - DNA, 19 bp, Homo sapiens
  siRNA target sequence for SLC4A1 (NM_000342.1,1848-1866).
ggccggtaccttcttcttt

SEQ ID NO: 258377 - DNA, 19 bp, Homo sapiens
  siRNA target sequence for SLC4A1 (NM_000342.1,2550-2568).
gttcaagccacccaagtat

SEQ ID NO: 258378 - DNA, 19 bp, Homo sapiens
  siRNA target sequence for SLC4A1 (NM_000342.1,2806-2824).
gaggaaggtcgggatgaat

SEQ ID NO: 258379 - DNA, 19 bp, Homo sapiens
  siRNA target sequence for SLC4A11 (NM_032034.1,166-184).
ggatacttcgaggattcaa

SEQ ID NO: 258380 - DNA, 19 bp, Homo sapiens
  siRNA target sequence for SLC4A11 (NM_032034.1,175-193).
gaggattcaagctactaca

SEQ ID NO: 258381 - DNA, 19 bp, Homo sapiens
  siRNA target sequence for SLC4A11 (NM_032034.1,178-196).
gattcaagctactacaagt

SEQ ID NO: 258382 - DNA, 19 bp, Homo sapiens
  siRNA target sequence for SLC4A11 (NM_032034.1,280-298).
ggcgagagtatccgttttt

SEQ ID NO: 258383 - DNA, 19 bp, Homo sapiens
  siRNA target sequence for SLC4A11 (NM_032034.1,281-299).
gcgagagtatccgtttttt

SEQ ID NO: 258384 - DNA, 19 bp, Homo sapiens
  siRNA target sequence for SLC4A11 (NM_032034.1,282-300).
cgagagtatccgttttttt

SEQ ID NO: 258385 - DNA, 19 bp, Homo sapiens
  siRNA target sequence for SLC4A11 (NM_032034.1,287-305).
gtatccgtttttttgtcaa

SEQ ID NO: 258386 - DNA, 19 bp, Homo sapiens
  siRNA target sequence for SLC4A11 (NM_032034.1,292-310).
cgtttttttgtcaatgtca

SEQ ID NO: 258387 - DNA, 19 bp, Homo sapiens
  siRNA target sequence for SLC4A11 (NM_032034.1,381-399).
ccgaaagtacctgaagtta

SEQ ID NO: 258388 - DNA, 19 bp, Homo sapiens
  siRNA target sequence for SLC4A11 (NM_032034.1,482-500).
ccacctccctggataacgt

SEQ ID NO: 258389 - DNA, 19 bp, Homo sapiens
  siRNA target sequence for SLC4A11 (NM_032034.1,913-931).
cgcacagaggaggaattca

SEQ ID NO: 258390 - DNA, 19 bp, Homo sapiens
  siRNA target sequence for SLC4A11 (NM_032034.1,1128-1146).
cttcactgatggcattatt

SEQ ID NO: 258391 - DNA, 19 bp, Homo sapiens
  siRNA target sequence for SLC4A11 (NM_032034.1,1159-1177).
gctgtgggcaaatacatca

SEQ ID NO: 258392 - DNA, 19 bp, Homo sapiens
  siRNA target sequence for SLC4A11 (NM_032034.1,1221-1239).
cgctttcgggtctctcaat

SEQ ID NO: 258393 - DNA, 19 bp, Homo sapiens
  siRNA target sequence for SLC4A11 (NM_032034.1,1434-1452).
gacgggcctgtggaatagt

SEQ ID NO: 258394 - DNA, 19 bp, Homo sapiens
  siRNA target sequence for SLC4A11 (NM_032034.1,1436-1454).
cgggcctgtggaatagttt

SEQ ID NO: 258395 - DNA, 19 bp, Homo sapiens
  siRNA target sequence for SLC4A11 (NM_032034.1,1463-1481).
cgctttatgcctttttcaa

SEQ ID NO: 258396 - DNA, 19 bp, Homo sapiens
  siRNA target sequence for SLC4A11 (NM_032034.1,1566-1584).
cgtcaagggcacggttaaa

SEQ ID NO: 258397 - DNA, 19 bp, Homo sapiens
  siRNA target sequence for SLC4A11 (NM_032034.1,1567-1585).
gtcaagggcacggttaaaa

SEQ ID NO: 258398 - DNA, 19 bp, Homo sapiens
  siRNA target sequence for SLC4A11 (NM_032034.1,1573-1591).
ggcacggttaaaatcttct

SEQ ID NO: 258399 - DNA, 19 bp, Homo sapiens
  siRNA target sequence for SLC4A11 (NM_032034.1,1587-1605).
cttctggaagtactactat

SEQ ID NO: 258400 - DNA, 19 bp, Homo sapiens
  siRNA target sequence for SLC4A11 (NM_032034.1,1617-1635).
ggacgactatcacacaaaa

SEQ ID NO: 258401 - DNA, 19 bp, Homo sapiens
  siRNA target sequence for SLC4A11 (NM_032034.1,1810-1828).
ggctacaccctctaccaat

SEQ ID NO: 258402 - DNA, 19 bp, Homo sapiens
  siRNA target sequence for SLC4A11 (NM_032034.1,1811-1829).
gctacaccctctaccaatt

SEQ ID NO: 258403 - DNA, 19 bp, Homo sapiens
  siRNA target sequence for SLC4A11 (NM_032034.1,1817-1835).
ccctctaccaattcaagaa

SEQ ID NO: 258404 - DNA, 19 bp, Homo sapiens
  siRNA target sequence for SLC4A11 (NM_032034.1,1819-1837).
ctctaccaattcaagaaga

SEQ ID NO: 258405 - DNA, 19 bp, Homo sapiens
  siRNA target sequence for SLC4A11 (NM_032034.1,2169-2187).
cacagggctgtctctgttt

SEQ ID NO: 258406 - DNA, 19 bp, Homo sapiens
  siRNA target sequence for SLC4A11 (NM_032034.1,2661-2679).
cctgctgccccgaatcatt

SEQ ID NO: 258407 - DNA, 19 bp, Homo sapiens
  siRNA target sequence for SLC4A11 (NM_032034.1,2664-2682).
gctgccccgaatcattgaa

SEQ ID NO: 258408 - DNA, 19 bp, Homo sapiens
  siRNA target sequence for SLC4A11 (NM_032034.1,2684-2702).
ccaagtacttggatgtcat

SEQ ID NO: 258409 - DNA, 19 bp, Homo sapiens
  siRNA target sequence for SLC4A2 (NM_003040.2,198-216).
cgccaagggcgcagattct

SEQ ID NO: 258410 - DNA, 19 bp, Homo sapiens
  siRNA target sequence for SLC4A2 (NM_003040.2,199-217).
gccaagggcgcagattctt

SEQ ID NO: 258411 - DNA, 19 bp, Homo sapiens
  siRNA target sequence for SLC4A2 (NM_003040.2,200-218).
ccaagggcgcagattcttt

SEQ ID NO: 258412 - DNA, 19 bp, Homo sapiens
  siRNA target sequence for SLC4A2 (NM_003040.2,204-222).
gggcgcagattctttctgt

SEQ ID NO: 258413 - DNA, 19 bp, Homo sapiens
  siRNA target sequence for SLC4A2 (NM_003040.2,205-223).
ggcgcagattctttctgta

SEQ ID NO: 258414 - DNA, 19 bp, Homo sapiens
  siRNA target sequence for SLC4A2 (NM_003040.2,620-638).
cctcctcggtgcagttctt

SEQ ID NO: 258415 - DNA, 19 bp, Homo sapiens
  siRNA target sequence for SLC4A2 (NM_003040.2,935-953).
gggtccccacggatgagat

SEQ ID NO: 258416 - DNA, 19 bp, Homo sapiens
  siRNA target sequence for SLC4A2 (NM_003040.2,977-995).
ccgacctagacctcatgaa

SEQ ID NO: 258417 - DNA, 19 bp, Homo sapiens
  siRNA target sequence for SLC4A2 (NM_003040.2,979-997).
gacctagacctcatgaaga

SEQ ID NO: 258418 - DNA, 19 bp, Homo sapiens
  siRNA target sequence for SLC4A2 (NM_003040.2,1032-1050).
gcacttggtgcggaagaat

SEQ ID NO: 258419 - DNA, 19 bp, Homo sapiens
  siRNA target sequence for SLC4A2 (NM_003040.2,1042-1060).
cggaagaatgccaaaggtt

SEQ ID NO: 258420 - DNA, 19 bp, Homo sapiens
  siRNA target sequence for SLC4A2 (NM_003040.2,1200-1218).
gacagctcgctggatcaaa

SEQ ID NO: 258421 - DNA, 19 bp, Homo sapiens
  siRNA target sequence for SLC4A2 (NM_003040.2,1202-1220).
cagctcgctggatcaaatt

SEQ ID NO: 258422 - DNA, 19 bp, Homo sapiens
  siRNA target sequence for SLC4A2 (NM_003040.2,1434-1452).
gcgggctctgctgttgaaa

SEQ ID NO: 258423 - DNA, 19 bp, Homo sapiens
  siRNA target sequence for SLC4A2 (NM_003040.2,1909-1927).
ctcatgtcagacaagcaat

SEQ ID NO: 258424 - DNA, 19 bp, Homo sapiens
  siRNA target sequence for SLC4A2 (NM_003040.2,2004-2022).
ggtgctgccgccttcagaa

SEQ ID NO: 258425 - DNA, 19 bp, Homo sapiens
  siRNA target sequence for SLC4A2 (NM_003040.2,2297-2315).
gcctggccgcagtcatctt

SEQ ID NO: 258426 - DNA, 19 bp, Homo sapiens
  siRNA target sequence for SLC4A2 (NM_003040.2,2389-2407).
ggggtgtcggagctgatta

SEQ ID NO: 258427 - DNA, 19 bp, Homo sapiens
  siRNA target sequence for SLC4A2 (NM_003040.2,2390-2408).
gggtgtcggagctgattat

SEQ ID NO: 258428 - DNA, 19 bp, Homo sapiens
  siRNA target sequence for SLC4A2 (NM_003040.2,2392-2410).
gtgtcggagctgattatgt

SEQ ID NO: 258429 - DNA, 19 bp, Homo sapiens
  siRNA target sequence for SLC4A2 (NM_003040.2,2764-2782).
gacggcggtgagaacatga

SEQ ID NO: 258430 - DNA, 19 bp, Homo sapiens
  siRNA target sequence for SLC4A2 (NM_003040.2,2767-2785).
ggcggtgagaacatgacat

SEQ ID NO: 258431 - DNA, 19 bp, Homo sapiens
  siRNA target sequence for SLC4A2 (NM_003040.2,2937-2955).
caagaacagccggttcttt

SEQ ID NO: 258432 - DNA, 19 bp, Homo sapiens
  siRNA target sequence for SLC4A2 (NM_003040.2,3016-3034).
gtgcttgtggattacagta

SEQ ID NO: 258433 - DNA, 19 bp, Homo sapiens
  siRNA target sequence for SLC4A2 (NM_003040.2,3080-3098).
cggtgactgccccagaaaa

SEQ ID NO: 258434 - DNA, 19 bp, Homo sapiens
  siRNA target sequence for SLC4A2 (NM_003040.2,3519-3537).
ggccgtgctctttggaatt

SEQ ID NO: 258435 - DNA, 19 bp, Homo sapiens
  siRNA target sequence for SLC4A2 (NM_003040.2,3520-3538).
gccgtgctctttggaattt

SEQ ID NO: 258436 - DNA, 19 bp, Homo sapiens
  siRNA target sequence for SLC4A2 (NM_003040.2,3521-3539).
ccgtgctctttggaatttt

SEQ ID NO: 258437 - DNA, 19 bp, Homo sapiens
  siRNA target sequence for SLC4A2 (NM_003040.2,3798-3816).
caccgaccgagagatgaaa

SEQ ID NO: 258438 - DNA, 19 bp, Homo sapiens
  siRNA target sequence for SLC4A2 (NM_003040.2,3801-3819).
cgaccgagagatgaaatgt

SEQ ID NO: 258439 - DNA, 19 bp, Homo sapiens
  siRNA target sequence for SLC4A2 (NM_003040.2,3834-3852).
ggcagagccggtgtttgat

SEQ ID NO: 258440 - DNA, 19 bp, Homo sapiens
  siRNA target sequence for SLC4A2 (NM_003040.2,3861-3879).
gggtgtggacgagtacaat

SEQ ID NO: 258441 - DNA, 19 bp, Homo sapiens
  siRNA target sequence for SLC4A2 (NM_003040.2,3863-3881).
gtgtggacgagtacaatga

SEQ ID NO: 258442 - DNA, 19 bp, Homo sapiens
  siRNA target sequence for SLC4A3 (NM_005070.1,212-230).
cgagcgggactttgagttt

SEQ ID NO: 258443 - DNA, 19 bp, Homo sapiens
  siRNA target sequence for SLC4A3 (NM_005070.1,651-669).
cgactcgctggggagaaaa

SEQ ID NO: 258444 - DNA, 19 bp, Homo sapiens
  siRNA target sequence for SLC4A3 (NM_005070.1,680-698).
gagcccatcggccagttat

SEQ ID NO: 258445 - DNA, 19 bp, Homo sapiens
  siRNA target sequence for SLC4A3 (NM_005070.1,682-700).
gcccatcggccagttatga

SEQ ID NO: 258446 - DNA, 19 bp, Homo sapiens
  siRNA target sequence for SLC4A3 (NM_005070.1,847-865).
gtgtgcggcgacacttagt

SEQ ID NO: 258447 - DNA, 19 bp, Homo sapiens
  siRNA target sequence for SLC4A3 (NM_005070.1,849-867).
gtgcggcgacacttagtga

SEQ ID NO: 258448 - DNA, 19 bp, Homo sapiens
  siRNA target sequence for SLC4A3 (NM_005070.1,852-870).
cggcgacacttagtgaaaa

SEQ ID NO: 258449 - DNA, 19 bp, Homo sapiens
  siRNA target sequence for SLC4A3 (NM_005070.1,853-871).
ggcgacacttagtgaaaaa

SEQ ID NO: 258450 - DNA, 19 bp, Homo sapiens
  siRNA target sequence for SLC4A3 (NM_005070.1,1205-1223).
cgtggtggagaccatgatt

SEQ ID NO: 258451 - DNA, 19 bp, Homo sapiens
  siRNA target sequence for SLC4A3 (NM_005070.1,1352-1370).
ctcggttctggggaatcat

SEQ ID NO: 258452 - DNA, 19 bp, Homo sapiens
  siRNA target sequence for SLC4A3 (NM_005070.1,1354-1372).
cggttctggggaatcatca

SEQ ID NO: 258453 - DNA, 19 bp, Homo sapiens
  siRNA target sequence for SLC4A3 (NM_005070.1,1606-1624).
ccttcgtgcgtctgaatga

SEQ ID NO: 258454 - DNA, 19 bp, Homo sapiens
  siRNA target sequence for SLC4A3 (NM_005070.1,1748-1766).
gtctgacaagctgtttcat

SEQ ID NO: 258455 - DNA, 19 bp, Homo sapiens
  siRNA target sequence for SLC4A3 (NM_005070.1,2039-2057).
gcggacgggctcggtattt

SEQ ID NO: 258456 - DNA, 19 bp, Homo sapiens
  siRNA target sequence for SLC4A3 (NM_005070.1,2711-2729).
gctcgggaccttcttcata

SEQ ID NO: 258457 - DNA, 19 bp, Homo sapiens
  siRNA target sequence for SLC4A3 (NM_005070.1,3435-3453).
cctgagcagccctatgtga

SEQ ID NO: 258458 - DNA, 19 bp, Homo sapiens
  siRNA target sequence for SLC4A8 (NM_004858.1,46-64).
ggcgtcctcagctatcaga

SEQ ID NO: 258459 - DNA, 19 bp, Homo sapiens
  siRNA target sequence for SLC4A8 (NM_004858.1,91-109).
cagggtgggaccagtacaa

SEQ ID NO: 258460 - DNA, 19 bp, Homo sapiens
  siRNA target sequence for SLC4A8 (NM_004858.1,93-111).
gggtgggaccagtacaatt

SEQ ID NO: 258461 - DNA, 19 bp, Homo sapiens
  siRNA target sequence for SLC4A8 (NM_004858.1,95-113).
gtgggaccagtacaattct

SEQ ID NO: 258462 - DNA, 19 bp, Homo sapiens
  siRNA target sequence for SLC4A8 (NM_004858.1,98-116).
ggaccagtacaattctcaa

SEQ ID NO: 258463 - DNA, 19 bp, Homo sapiens
  siRNA target sequence for SLC4A8 (NM_004858.1,101-119).
ccagtacaattctcaacat

SEQ ID NO: 258464 - DNA, 19 bp, Homo sapiens
  siRNA target sequence for SLC4A8 (NM_004858.1,102-120).
cagtacaattctcaacatt

SEQ ID NO: 258465 - DNA, 19 bp, Homo sapiens
  siRNA target sequence for SLC4A8 (NM_004858.1,107-125).
caattctcaacattcacta

SEQ ID NO: 258466 - DNA, 19 bp, Homo sapiens
  siRNA target sequence for SLC4A8 (NM_004858.1,112-130).
ctcaacattcactatgaaa

SEQ ID NO: 258467 - DNA, 19 bp, Homo sapiens
  siRNA target sequence for SLC4A8 (NM_004858.1,299-317).
catctcagcgtgttcagtt

SEQ ID NO: 258468 - DNA, 19 bp, Homo sapiens
  siRNA target sequence for SLC4A8 (NM_004858.1,302-320).
ctcagcgtgttcagttcat

SEQ ID NO: 258469 - DNA, 19 bp, Homo sapiens
  siRNA target sequence for SLC4A8 (NM_004858.1,519-537).
gctaaggagctgccttatt

SEQ ID NO: 258470 - DNA, 19 bp, Homo sapiens
  siRNA target sequence for SLC4A8 (NM_004858.1,520-538).
ctaaggagctgccttatta

SEQ ID NO: 258471 - DNA, 19 bp, Homo sapiens
  siRNA target sequence for SLC4A8 (NM_004858.1,545-563).
cagtcctcctggatatgca

SEQ ID NO: 258472 - DNA, 19 bp, Homo sapiens
  siRNA target sequence for SLC4A8 (NM_004858.1,561-579).
gcatgcaaatagcatagaa

SEQ ID NO: 258473 - DNA, 19 bp, Homo sapiens
  siRNA target sequence for SLC4A8 (NM_004858.1,748-766).
cagtctgatcctcatttga

SEQ ID NO: 258474 - DNA, 19 bp, Homo sapiens
  siRNA target sequence for SLC4A8 (NM_004858.1,758-776).
ctcatttgatggataaaca

SEQ ID NO: 258475 - DNA, 19 bp, Homo sapiens
  siRNA target sequence for SLC4A8 (NM_004858.1,800-818).
ctgttccaactacaaatct

SEQ ID NO: 258476 - DNA, 19 bp, Homo sapiens
  siRNA target sequence for SLC4A8 (NM_004858.1,806-824).
caactacaaatcttgaagt

SEQ ID NO: 258477 - DNA, 19 bp, Homo sapiens
  siRNA target sequence for SLC4A8 (NM_004858.1,866-884).
gcaaggtagaccttcattt

SEQ ID NO: 258478 - DNA, 19 bp, Homo sapiens
  siRNA target sequence for SLC4A8 (NM_004858.1,871-889).
gtagaccttcatttcatga

SEQ ID NO: 258479 - DNA, 19 bp, Homo sapiens
  siRNA target sequence for SLC4A8 (NM_004858.1,1215-1233).
gtgggatccctccattaga

SEQ ID NO: 258480 - DNA, 19 bp, Homo sapiens
  siRNA target sequence for SLC4A8 (NM_004858.1,1524-1542).
cactgagggacgcataagt

SEQ ID NO: 258481 - DNA, 19 bp, Homo sapiens
  siRNA target sequence for SLC4A8 (NM_004858.1,1530-1548).
gggacgcataagtgcaatt

SEQ ID NO: 258482 - DNA, 19 bp, Homo sapiens
  siRNA target sequence for SLC4A8 (NM_004858.1,1568-1586).
ccatgactgggattgctta

SEQ ID NO: 258483 - DNA, 19 bp, Homo sapiens
  siRNA target sequence for SLC4A8 (NM_004858.1,1569-1587).
catgactgggattgcttat

SEQ ID NO: 258484 - DNA, 19 bp, Homo sapiens
  siRNA target sequence for SLC4A8 (NM_004858.1,1695-1713).
ctccctgcgagcttgtatt

SEQ ID NO: 258485 - DNA, 19 bp, Homo sapiens
  siRNA target sequence for SLC4A8 (NM_004858.1,1698-1716).
cctgcgagcttgtattgga

SEQ ID NO: 258486 - DNA, 19 bp, Homo sapiens
  siRNA target sequence for SLC4A8 (NM_004858.1,1721-1739).
ggaccgctttcctgtgtat

SEQ ID NO: 258487 - DNA, 19 bp, Homo sapiens
  siRNA target sequence for SLC4A8 (NM_004858.1,1724-1742).
ccgctttcctgtgtattgt

SEQ ID NO: 258488 - DNA, 19 bp, Homo sapiens
  siRNA target sequence for SLC4A8 (NM_004858.1,1776-1794).
ctacattacccgtttcact

SEQ ID NO: 258489 - DNA, 19 bp, Homo sapiens
  siRNA target sequence for SLC4A8 (NM_004858.1,1801-1819).
gcatttgcctccctaattt

SEQ ID NO: 258490 - DNA, 19 bp, Homo sapiens
  siRNA target sequence for SLC4A8 (NM_004858.1,1900-1918).
gaccaccttagcctctatt

SEQ ID NO: 258491 - DNA, 19 bp, Homo sapiens
  siRNA target sequence for SLC4A8 (NM_004858.1,1903-1921).
caccttagcctctattact

SEQ ID NO: 258492 - DNA, 19 bp, Homo sapiens
  siRNA target sequence for SLC4A8 (NM_004858.1,1926-1944).
gtgtactctgccagagaat

SEQ ID NO: 258493 - DNA, 19 bp, Homo sapiens
  siRNA target sequence for SLC4A8 (NM_004858.1,1931-1949).
ctctgccagagaatccaaa

SEQ ID NO: 258494 - DNA, 19 bp, Homo sapiens
  siRNA target sequence for SLC4A8 (NM_004858.1,2137-2155).
ctctcaagcaccttaaaga

SEQ ID NO: 258495 - DNA, 19 bp, Homo sapiens
  siRNA target sequence for SLC4A8 (NM_004858.1,2144-2162).
gcaccttaaagacgtttaa

SEQ ID NO: 258496 - DNA, 19 bp, Homo sapiens
  siRNA target sequence for SLC4A8 (NM_004858.1,2311-2329).
gatgatcgcggatggatta

SEQ ID NO: 258497 - DNA, 19 bp, Homo sapiens
  siRNA target sequence for SLC4A8 (NM_004858.1,2314-2332).
gatcgcggatggattatta

SEQ ID NO: 258498 - DNA, 19 bp, Homo sapiens
  siRNA target sequence for SLC4A8 (NM_004858.1,2358-2376).
gactgtgatagctgcaatt

SEQ ID NO: 258499 - DNA, 19 bp, Homo sapiens
  siRNA target sequence for SLC4A8 (NM_004858.1,2393-2411).
gtactatcttgatattcat

SEQ ID NO: 258500 - DNA, 19 bp, Homo sapiens
  siRNA target sequence for SLC4A8 (NM_004858.1,2655-2673).
gacaggccttatgatcttt

SEQ ID NO: 258501 - DNA, 19 bp, Homo sapiens
  siRNA target sequence for SLC4A8 (NM_004858.1,2657-2675).
caggccttatgatctttgt

SEQ ID NO: 258502 - DNA, 19 bp, Homo sapiens
  siRNA target sequence for SLC4A8 (NM_004858.1,2694-2712).
cttcatgacggctatctta

SEQ ID NO: 258503 - DNA, 19 bp, Homo sapiens
  siRNA target sequence for SLC4A8 (NM_004858.1,2700-2718).
gacggctatcttaaagttt

SEQ ID NO: 258504 - DNA, 19 bp, Homo sapiens
  siRNA target sequence for SLC4A8 (NM_004858.1,2729-2747).
cagtactctacggagtttt

SEQ ID NO: 258505 - DNA, 19 bp, Homo sapiens
  siRNA target sequence for SLC4A8 (NM_004858.1,2734-2752).
ctctacggagttttccttt

SEQ ID NO: 258506 - DNA, 19 bp, Homo sapiens
  siRNA target sequence for SLC4A8 (NM_004858.1,2971-2989).
gtctttgtcaggaaagtca

SEQ ID NO: 258507 - DNA, 19 bp, Homo sapiens
  siRNA target sequence for SLC4A8 (NM_004858.1,3103-3121).
gtccttgcaccaactgtat

SEQ ID NO: 258508 - DNA, 19 bp, Homo sapiens
  siRNA target sequence for SLC7A11 (NM_014331.2,41-59).
gttacctgcagggaaatgt

SEQ ID NO: 258509 - DNA, 19 bp, Homo sapiens
  siRNA target sequence for SLC7A11 (NM_014331.2,95-113).
cacctgggcaggagaaagt

SEQ ID NO: 258510 - DNA, 19 bp, Homo sapiens
  siRNA target sequence for SLC7A11 (NM_014331.2,139-157).
ctgaggggagtctccatta

SEQ ID NO: 258511 - DNA, 19 bp, Homo sapiens
  siRNA target sequence for SLC7A11 (NM_014331.2,257-275).
gtggggtcctgtcactatt

SEQ ID NO: 258512 - DNA, 19 bp, Homo sapiens
  siRNA target sequence for SLC7A11 (NM_014331.2,292-310).
gctgaattgggaacaacta

SEQ ID NO: 258513 - DNA, 19 bp, Homo sapiens
  siRNA target sequence for SLC7A11 (NM_014331.2,323-341).
gaggtcattacacatatat

SEQ ID NO: 258514 - DNA, 19 bp, Homo sapiens
  siRNA target sequence for SLC7A11 (NM_014331.2,325-343).
ggtcattacacatatattt

SEQ ID NO: 258515 - DNA, 19 bp, Homo sapiens
  siRNA target sequence for SLC7A11 (NM_014331.2,356-374).
gtccattaccagcttttgt

SEQ ID NO: 258516 - DNA, 19 bp, Homo sapiens
  siRNA target sequence for SLC7A11 (NM_014331.2,383-401).
gggtggaactcctcataat

SEQ ID NO: 258517 - DNA, 19 bp, Homo sapiens
  siRNA target sequence for SLC7A11 (NM_014331.2,384-402).
ggtggaactcctcataata

SEQ ID NO: 258518 - DNA, 19 bp, Homo sapiens
  siRNA target sequence for SLC7A11 (NM_014331.2,423-441).
gatatccctggcatttgga

SEQ ID NO: 258519 - DNA, 19 bp, Homo sapiens
  siRNA target sequence for SLC7A11 (NM_014331.2,434-452).
catttggacgctacattct

SEQ ID NO: 258520 - DNA, 19 bp, Homo sapiens
  siRNA target sequence for SLC7A11 (NM_014331.2,444-462).
ctacattctggaaccattt

SEQ ID NO: 258521 - DNA, 19 bp, Homo sapiens
  siRNA target sequence for SLC7A11 (NM_014331.2,487-505).
cttgcgatcaagctcatta

SEQ ID NO: 258522 - DNA, 19 bp, Homo sapiens
  siRNA target sequence for SLC7A11 (NM_014331.2,526-544).
gtgatggtcctaaatagca

SEQ ID NO: 258523 - DNA, 19 bp, Homo sapiens
  siRNA target sequence for SLC7A11 (NM_014331.2,564-582).
ccggatccagattttctta

SEQ ID NO: 258524 - DNA, 19 bp, Homo sapiens
  siRNA target sequence for SLC7A11 (NM_014331.2,565-583).
cggatccagattttcttaa

SEQ ID NO: 258525 - DNA, 19 bp, Homo sapiens
  siRNA target sequence for SLC7A11 (NM_014331.2,623-641).
ctggagttatgcagctaat

SEQ ID NO: 258526 - DNA, 19 bp, Homo sapiens
  siRNA target sequence for SLC7A11 (NM_014331.2,646-664).
ggtcaaacgcagaacttta

SEQ ID NO: 258527 - DNA, 19 bp, Homo sapiens
  siRNA target sequence for SLC7A11 (NM_014331.2,647-665).
gtcaaacgcagaactttaa

SEQ ID NO: 258528 - DNA, 19 bp, Homo sapiens
  siRNA target sequence for SLC7A11 (NM_014331.2,701-719).
ggttgccactggcttttta

SEQ ID NO: 258529 - DNA, 19 bp, Homo sapiens
  siRNA target sequence for SLC7A11 (NM_014331.2,743-761).
gctggttttacctcaactt

SEQ ID NO: 258530 - DNA, 19 bp, Homo sapiens
  siRNA target sequence for SLC7A11 (NM_014331.2,799-817).
ccccttgcaatatgtatat

SEQ ID NO: 258531 - DNA, 19 bp, Homo sapiens
  siRNA target sequence for SLC7A11 (NM_014331.2,839-857).
gctatgtgctgacaaatgt

SEQ ID NO: 258532 - DNA, 19 bp, Homo sapiens
  siRNA target sequence for SLC7A11 (NM_014331.2,859-877).
gcctactttacgaccatta

SEQ ID NO: 258533 - DNA, 19 bp, Homo sapiens
  siRNA target sequence for SLC7A11 (NM_014331.2,860-878).
cctactttacgaccattaa

SEQ ID NO: 258534 - DNA, 19 bp, Homo sapiens
  siRNA target sequence for SLC7A11 (NM_014331.2,861-879).
ctactttacgaccattaat

SEQ ID NO: 258535 - DNA, 19 bp, Homo sapiens
  siRNA target sequence for SLC7A11 (NM_014331.2,864-882).
ctttacgaccattaatgct

SEQ ID NO: 258536 - DNA, 19 bp, Homo sapiens
  siRNA target sequence for SLC7A11 (NM_014331.2,883-901).
gaggagctgctgctttcaa

SEQ ID NO: 258537 - DNA, 19 bp, Homo sapiens
  siRNA target sequence for SLC7A11 (NM_014331.2,888-906).
gctgctgctttcaaatgca

SEQ ID NO: 258538 - DNA, 19 bp, Homo sapiens
  siRNA target sequence for SLC7A11 (NM_014331.2,936-954).
gggaaatttctcattagca

SEQ ID NO: 258539 - DNA, 19 bp, Homo sapiens
  siRNA target sequence for SLC7A11 (NM_014331.2,1014-1032).
ctccaggttattctatgtt

SEQ ID NO: 258540 - DNA, 19 bp, Homo sapiens
  siRNA target sequence for SLC7A11 (NM_014331.2,1094-1112).
ctctaccagctgttattgt

SEQ ID NO: 258541 - DNA, 19 bp, Homo sapiens
  siRNA target sequence for SLC7A11 (NM_014331.2,1096-1114).
ctaccagctgttattgttt

SEQ ID NO: 258542 - DNA, 19 bp, Homo sapiens
  siRNA target sequence for SLC7A11 (NM_014331.2,1100-1118).
cagctgttattgttttgca

SEQ ID NO: 258543 - DNA, 19 bp, Homo sapiens
  siRNA target sequence for SLC7A11 (NM_014331.2,1111-1129).
gttttgcaccctttgacaa

SEQ ID NO: 258544 - DNA, 19 bp, Homo sapiens
  siRNA target sequence for SLC7A11 (NM_014331.2,1117-1135).
caccctttgacaatgataa

SEQ ID NO: 258545 - DNA, 19 bp, Homo sapiens
  siRNA target sequence for SLC7A11 (NM_014331.2,1150-1168).
gacctcgacagtcttttga

SEQ ID NO: 258546 - DNA, 19 bp, Homo sapiens
  siRNA target sequence for SLC7A11 (NM_014331.2,1152-1170).
cctcgacagtcttttgaat

SEQ ID NO: 258547 - DNA, 19 bp, Homo sapiens
  siRNA target sequence for SLC7A11 (NM_014331.2,1153-1171).
ctcgacagtcttttgaatt

SEQ ID NO: 258548 - DNA, 19 bp, Homo sapiens
  siRNA target sequence for SLC7A11 (NM_014331.2,1217-1235).
ggctgatttatcttcgata

SEQ ID NO: 258549 - DNA, 19 bp, Homo sapiens
  siRNA target sequence for SLC7A11 (NM_014331.2,1221-1239).
gatttatcttcgatacaaa

SEQ ID NO: 258550 - DNA, 19 bp, Homo sapiens
  siRNA target sequence for SLC7A11 (NM_014331.2,1236-1254).
caaatgcccagatatgcat

SEQ ID NO: 258551 - DNA, 19 bp, Homo sapiens
  siRNA target sequence for SLC7A11 (NM_014331.2,1327-1345).
ctctattcggacccattta

SEQ ID NO: 258552 - DNA, 19 bp, Homo sapiens
  siRNA target sequence for SLC7A11 (NM_014331.2,1329-1347).
ctattcggacccatttagt

SEQ ID NO: 258553 - DNA, 19 bp, Homo sapiens
  siRNA target sequence for SLC7A11 (NM_014331.2,1376-1394).
ctggagtccctgcgtatta

SEQ ID NO: 258554 - DNA, 19 bp, Homo sapiens
  siRNA target sequence for SLC7A11 (NM_014331.2,1379-1397).
gagtccctgcgtattatct

SEQ ID NO: 258555 - DNA, 19 bp, Homo sapiens
  siRNA target sequence for SLC7A11 (NM_014331.2,1381-1399).
gtccctgcgtattatctct

SEQ ID NO: 258556 - DNA, 19 bp, Homo sapiens
  siRNA target sequence for SLC7A11 (NM_014331.2,1383-1401).
ccctgcgtattatctcttt

SEQ ID NO: 258557 - DNA, 19 bp, Homo sapiens
  siRNA target sequence for SLC7A11 (NM_014331.2,1384-1402).
cctgcgtattatctcttta

SEQ ID NO: 258558 - DNA, 19 bp, Homo sapiens
  siRNA target sequence for SLC7A11 (NM_014331.2,1420-1438).
cccaggtggtttagaataa

SEQ ID NO: 258559 - DNA, 19 bp, Homo sapiens
  siRNA target sequence for SLC7A11 (NM_014331.2,1421-1439).
ccaggtggtttagaataat

SEQ ID NO: 258560 - DNA, 19 bp, Homo sapiens
  siRNA target sequence for SLC7A11 (NM_014331.2,1483-1501).
gtaccagaagaagataagt

SEQ ID NO: 258561 - DNA, 19 bp, Homo sapiens
  siRNA target sequence for FLJ10847 (NM_018242.2,246-264).
ctgatcagcttcataagct

SEQ ID NO: 258562 - DNA, 19 bp, Homo sapiens
  siRNA target sequence for FLJ10847 (NM_018242.2,314-332).
ggcaatcgcggttatcaat

SEQ ID NO: 258563 - DNA, 19 bp, Homo sapiens
  siRNA target sequence for FLJ10847 (NM_018242.2,316-334).
caatcgcggttatcaatgt

SEQ ID NO: 258564 - DNA, 19 bp, Homo sapiens
  siRNA target sequence for FLJ10847 (NM_018242.2,348-366).
gtgggattcggcttatctt

SEQ ID NO: 258565 - DNA, 19 bp, Homo sapiens
  siRNA target sequence for FLJ10847 (NM_018242.2,350-368).
gggattcggcttatcttct

SEQ ID NO: 258566 - DNA, 19 bp, Homo sapiens
  siRNA target sequence for FLJ10847 (NM_018242.2,553-571).
cctatgtcacgatcttcat

SEQ ID NO: 258567 - DNA, 19 bp, Homo sapiens
  siRNA target sequence for FLJ10847 (NM_018242.2,554-572).
ctatgtcacgatcttcatt

SEQ ID NO: 258568 - DNA, 19 bp, Homo sapiens
  siRNA target sequence for FLJ10847 (NM_018242.2,585-603).
gcaacctttctttatatgt

SEQ ID NO: 258569 - DNA, 19 bp, Homo sapiens
  siRNA target sequence for FLJ10847 (NM_018242.2,636-654).
gtactgccccagatcgtaa

SEQ ID NO: 258570 - DNA, 19 bp, Homo sapiens
  siRNA target sequence for FLJ10847 (NM_018242.2,681-699).
gccctcgccaactatctgt

SEQ ID NO: 258571 - DNA, 19 bp, Homo sapiens
  siRNA target sequence for FLJ10847 (NM_018242.2,730-748).
gctctgcactggcaaactt

SEQ ID NO: 258572 - DNA, 19 bp, Homo sapiens
  siRNA target sequence for FLJ10847 (NM_018242.2,733-751).
ctgcactggcaaacttgat

SEQ ID NO: 258573 - DNA, 19 bp, Homo sapiens
  siRNA target sequence for FLJ10847 (NM_018242.2,735-753).
gcactggcaaacttgattt

SEQ ID NO: 258574 - DNA, 19 bp, Homo sapiens
  siRNA target sequence for FLJ10847 (NM_018242.2,967-985).
ctcagtccatcgtgtatga

SEQ ID NO: 258575 - DNA, 19 bp, Homo sapiens
  siRNA target sequence for FLJ10847 (NM_018242.2,984-1002).
gaactggccatcattgtgt

SEQ ID NO: 258576 - DNA, 19 bp, Homo sapiens
  siRNA target sequence for FLJ10847 (NM_018242.2,1033-1051).
ccagtgtccgggtaggaaa

SEQ ID NO: 258577 - DNA, 19 bp, Homo sapiens
  siRNA target sequence for FLJ10847 (NM_018242.2,1161-1179).
gatcacgtggggtacattt

SEQ ID NO: 258578 - DNA, 19 bp, Homo sapiens
  siRNA target sequence for FLJ10847 (NM_018242.2,1164-1182).
cacgtggggtacattttta

SEQ ID NO: 258579 - DNA, 19 bp, Homo sapiens
  siRNA target sequence for FLJ10847 (NM_018242.2,1166-1184).
cgtggggtacatttttact

SEQ ID NO: 258580 - DNA, 19 bp, Homo sapiens
  siRNA target sequence for FLJ10847 (NM_018242.2,1183-1201).
ctaccgaccgagacatcat

SEQ ID NO: 258581 - DNA, 19 bp, Homo sapiens
  siRNA target sequence for FLJ10847 (NM_018242.2,1186-1204).
ccgaccgagacatcattaa

SEQ ID NO: 258582 - DNA, 19 bp, Homo sapiens
  siRNA target sequence for FLJ10847 (NM_018242.2,1187-1205).
cgaccgagacatcattaat

SEQ ID NO: 258583 - DNA, 19 bp, Homo sapiens
  siRNA target sequence for FLJ10847 (NM_018242.2,1304-1322).
ggttggagccattgtgaat

SEQ ID NO: 258584 - DNA, 19 bp, Homo sapiens
  siRNA target sequence for FLJ10847 (NM_018242.2,1305-1323).
gttggagccattgtgaata

SEQ ID NO: 258585 - DNA, 19 bp, Homo sapiens
  siRNA target sequence for FLJ10847 (NM_018242.2,1319-1337).
gaataccattgggtactat

SEQ ID NO: 258586 - DNA, 19 bp, Homo sapiens
  siRNA target sequence for FLJ10847 (NM_018242.2,1355-1373).
cgggatcgcgctgatgttt

SEQ ID NO: 258587 - DNA, 19 bp, Homo sapiens
  siRNA target sequence for FLJ10847 (NM_018242.2,1450-1468).
gctttattattcagctaaa

SEQ ID NO: 258588 - DNA, 19 bp, Homo sapiens
  siRNA target sequence for FLJ10847 (NM_018242.2,1492-1510).
ctcaggtacacgccaattt

SEQ ID NO: 258589 - DNA, 19 bp, Homo sapiens
  siRNA target sequence for FLJ10847 (NM_018242.2,1494-1512).
caggtacacgccaatttga

SEQ ID NO: 258590 - DNA, 19 bp, Homo sapiens
  siRNA target sequence for FLJ10847 (NM_018242.2,1496-1514).
ggtacacgccaatttgaaa

SEQ ID NO: 258591 - DNA, 19 bp, Homo sapiens
  siRNA target sequence for FLJ10847 (NM_018242.2,1500-1518).
cacgccaatttgaaagtaa

SEQ ID NO: 258592 - DNA, 19 bp, Homo sapiens
  siRNA target sequence for FLJ10847 (NM_018242.2,1526-1544).
gcctcggagtgggaattct

SEQ ID NO: 258593 - DNA, 19 bp, Homo sapiens
  siRNA target sequence for FLJ10847 (NM_018242.2,1587-1605).
cttgaaggaattttaacga

SEQ ID NO: 258594 - DNA, 19 bp, Homo sapiens
  siRNA target sequence for FLJ10847 (NM_018242.2,1604-1622).
gaacgatgttggaaagaca

SEQ ID NO: 258595 - DNA, 19 bp, Homo sapiens
  siRNA target sequence for FLJ10847 (NM_018242.2,1680-1698).
caggacggcgctaaattgt

SEQ ID NO: 258596 - DNA, 19 bp, Homo sapiens
  siRNA target sequence for FLJ10847 (NM_018242.2,1737-1755).
ctgggggtcttcttaatct

SEQ ID NO: 258597 - DNA, 19 bp, Homo sapiens
  siRNA target sequence for FLJ10847 (NM_018242.2,1766-1784).
gattttagtgagattctat

SEQ ID NO: 258598 - DNA, 19 bp, Homo sapiens
  siRNA target sequence for FLJ31196 (NM_152908.2,191-209).
gtgctgacttttatgatct

SEQ ID NO: 258599 - DNA, 19 bp, Homo sapiens
  siRNA target sequence for FLJ31196 (NM_152908.2,271-289).
cgcggtggcctttgtcaat

SEQ ID NO: 258600 - DNA, 19 bp, Homo sapiens
  siRNA target sequence for FLJ31196 (NM_152908.2,273-291).
cggtggcctttgtcaatgt

SEQ ID NO: 258601 - DNA, 19 bp, Homo sapiens
  siRNA target sequence for FLJ31196 (NM_152908.2,286-304).
caatgtctgcggagtttct

SEQ ID NO: 258602 - DNA, 19 bp, Homo sapiens
  siRNA target sequence for FLJ31196 (NM_152908.2,305-323).
gtaggagttggtttgtctt

SEQ ID NO: 258603 - DNA, 19 bp, Homo sapiens
  siRNA target sequence for FLJ31196 (NM_152908.2,326-344).
gcatgtgacaccttgatgt

SEQ ID NO: 258604 - DNA, 19 bp, Homo sapiens
  siRNA target sequence for FLJ31196 (NM_152908.2,498-516).
ggttgacccaggactatgt

SEQ ID NO: 258605 - DNA, 19 bp, Homo sapiens
  siRNA target sequence for FLJ31196 (NM_152908.2,499-517).
gttgacccaggactatgta

SEQ ID NO: 258606 - DNA, 19 bp, Homo sapiens
  siRNA target sequence for FLJ31196 (NM_152908.2,530-548).
ccaggacttccggtgattt

SEQ ID NO: 258607 - DNA, 19 bp, Homo sapiens
  siRNA target sequence for FLJ31196 (NM_152908.2,531-549).
caggacttccggtgatttt

SEQ ID NO: 258608 - DNA, 19 bp, Homo sapiens
  siRNA target sequence for FLJ31196 (NM_152908.2,607-625).
ggaggagtccccattccaa

SEQ ID NO: 258609 - DNA, 19 bp, Homo sapiens
  siRNA target sequence for FLJ31196 (NM_152908.2,798-816).
ccgcctatgccaacatcat

SEQ ID NO: 258610 - DNA, 19 bp, Homo sapiens
  siRNA target sequence for FLJ31196 (NM_152908.2,1165-1183).
gggcgtgctcagcatagtt

SEQ ID NO: 258611 - DNA, 19 bp, Homo sapiens
  siRNA target sequence for FLJ31196 (NM_152908.2,1280-1298).
caggtcttgccggtttata

SEQ ID NO: 258612 - DNA, 19 bp, Homo sapiens
  siRNA target sequence for FLJ31196 (NM_152908.2,1282-1300).
ggtcttgccggtttatagt

SEQ ID NO: 258613 - DNA, 19 bp, Homo sapiens
  siRNA target sequence for FLJ31196 (NM_152908.2,1288-1306).
gccggtttatagtgtcttt

SEQ ID NO: 258614 - DNA, 19 bp, Homo sapiens
  siRNA target sequence for FLJ31196 (NM_152908.2,1290-1308).
cggtttatagtgtctttca

SEQ ID NO: 258615 - DNA, 19 bp, Homo sapiens
  siRNA target sequence for FLJ31196 (NM_152908.2,1380-1398).
ctgtgaatgccatcacata

SEQ ID NO: 258616 - DNA, 19 bp, Homo sapiens
  siRNA target sequence for FLJ31196 (NM_152908.2,1382-1400).
gtgaatgccatcacatatt

SEQ ID NO: 258617 - DNA, 19 bp, Homo sapiens
  siRNA target sequence for FLJ31196 (NM_152908.2,1388-1406).
gccatcacatattacatca

SEQ ID NO: 258618 - DNA, 19 bp, Homo sapiens
  siRNA target sequence for FLJ31196 (NM_152908.2,1389-1407).
ccatcacatattacatcat

SEQ ID NO: 258619 - DNA, 19 bp, Homo sapiens
  siRNA target sequence for FLJ31196 (NM_152908.2,1439-1457).
gtggtcagaatgagaatca

SEQ ID NO: 258620 - DNA, 19 bp, Homo sapiens
  siRNA target sequence for FLJ31196 (NM_152908.2,1622-1640).
gagaaagcagtcctatctt

SEQ ID NO: 258621 - DNA, 19 bp, Homo sapiens
  siRNA target sequence for FLJ31196 (NM_152908.2,1656-1674).
gttcccctggcattacctt

SEQ ID NO: 258622 - DNA, 19 bp, Homo sapiens
  siRNA target sequence for CHDC1 (NM_015116.1,243-261).
gaagcgaaccccaaccttt

SEQ ID NO: 258623 - DNA, 19 bp, Homo sapiens
  siRNA target sequence for CHDC1 (NM_015116.1,461-479).
ctgagcgccaggaaattga

SEQ ID NO: 258624 - DNA, 19 bp, Homo sapiens
  siRNA target sequence for CHDC1 (NM_015116.1,523-541).
cacggtgcaggcagactta

SEQ ID NO: 258625 - DNA, 19 bp, Homo sapiens
  siRNA target sequence for CHDC1 (NM_015116.1,529-547).
gcaggcagacttatctaaa

SEQ ID NO: 258626 - DNA, 19 bp, Homo sapiens
  siRNA target sequence for CHDC1 (NM_015116.1,530-548).
caggcagacttatctaaaa

SEQ ID NO: 258627 - DNA, 19 bp, Homo sapiens
  siRNA target sequence for CHDC1 (NM_015116.1,533-551).
gcagacttatctaaaaaca

SEQ ID NO: 258628 - DNA, 19 bp, Homo sapiens
  siRNA target sequence for CHDC1 (NM_015116.1,572-590).
gaattgtgccattttgtat

SEQ ID NO: 258629 - DNA, 19 bp, Homo sapiens
  siRNA target sequence for CHDC1 (NM_015116.1,595-613).
ggaaattcttaatctgtat

SEQ ID NO: 258630 - DNA, 19 bp, Homo sapiens
  siRNA target sequence for CHDC1 (NM_015116.1,608-626).
ctgtatcacaactgtatca

SEQ ID NO: 258631 - DNA, 19 bp, Homo sapiens
  siRNA target sequence for CHDC1 (NM_015116.1,610-628).
gtatcacaactgtatcaga

SEQ ID NO: 258632 - DNA, 19 bp, Homo sapiens
  siRNA target sequence for CHDC1 (NM_015116.1,616-634).
caactgtatcagagtcatt

SEQ ID NO: 258633 - DNA, 19 bp, Homo sapiens
  siRNA target sequence for CHDC1 (NM_015116.1,636-654).
ctgaggccatcgttaatct

SEQ ID NO: 258634 - DNA, 19 bp, Homo sapiens
  siRNA target sequence for CHDC1 (NM_015116.1,719-737).
ggtctgcctctcaaagtct

SEQ ID NO: 258635 - DNA, 19 bp, Homo sapiens
  siRNA target sequence for CHDC1 (NM_015116.1,722-740).
ctgcctctcaaagtcttaa

SEQ ID NO: 258636 - DNA, 19 bp, Homo sapiens
  siRNA target sequence for CHDC1 (NM_015116.1,734-752).
gtcttaatcgcaagtaaca

SEQ ID NO: 258637 - DNA, 19 bp, Homo sapiens
  siRNA target sequence for CHDC1 (NM_015116.1,754-772).
caaacttggatcattacca

SEQ ID NO: 258638 - DNA, 19 bp, Homo sapiens
  siRNA target sequence for CHDC1 (NM_015116.1,762-780).
gatcattaccagaagagat

SEQ ID NO: 258639 - DNA, 19 bp, Homo sapiens
  siRNA target sequence for CHDC1 (NM_015116.1,782-800).
ggtcagctcaaacagttaa

SEQ ID NO: 258640 - DNA, 19 bp, Homo sapiens
  siRNA target sequence for CHDC1 (NM_015116.1,783-801).
gtcagctcaaacagttaat

SEQ ID NO: 258641 - DNA, 19 bp, Homo sapiens
  siRNA target sequence for CHDC1 (NM_015116.1,847-865).
gataggtcagttgaaatct

SEQ ID NO: 258642 - DNA, 19 bp, Homo sapiens
  siRNA target sequence for CHDC1 (NM_015116.1,864-882).
ctctacgagaactgaatgt

SEQ ID NO: 258643 - DNA, 19 bp, Homo sapiens
  siRNA target sequence for CHDC1 (NM_015116.1,930-948).
ccttggtaaagtttgactt

SEQ ID NO: 258644 - DNA, 19 bp, Homo sapiens
  siRNA target sequence for CHDC1 (NM_015116.1,962-980).
gtgctcgtgattccaattt

SEQ ID NO: 258645 - DNA, 19 bp, Homo sapiens
  siRNA target sequence for CHDC1 (NM_015116.1,964-982).
gctcgtgattccaatttgt

SEQ ID NO: 258646 - DNA, 19 bp, Homo sapiens
  siRNA target sequence for CHDC1 (NM_015116.1,965-983).
ctcgtgattccaatttgtt

SEQ ID NO: 258647 - DNA, 19 bp, Homo sapiens
  siRNA target sequence for CHDC1 (NM_015116.1,1000-1018).
gctgcaagtgttactactt

SEQ ID NO: 258648 - DNA, 19 bp, Homo sapiens
  siRNA target sequence for CHDC1 (NM_015116.1,1040-1058).
cctccagcacagatttgca

SEQ ID NO: 258649 - DNA, 19 bp, Homo sapiens
  siRNA target sequence for CHDC1 (NM_015116.1,1056-1074).
gcacaaagggcaaagttca

SEQ ID NO: 258650 - DNA, 19 bp, Homo sapiens
  siRNA target sequence for CHDC1 (NM_015116.1,1097-1115).
caagcatgccagattaaga

SEQ ID NO: 258651 - DNA, 19 bp, Homo sapiens
  siRNA target sequence for CHDC1 (NM_015116.1,1114-1132).
gacagctgactccctttat

SEQ ID NO: 258652 - DNA, 19 bp, Homo sapiens
  siRNA target sequence for CHDC1 (NM_015116.1,1116-1134).
cagctgactccctttatct

SEQ ID NO: 258653 - DNA, 19 bp, Homo sapiens
  siRNA target sequence for CHDC1 (NM_015116.1,1267-1285).
cctcaatgtgccaatgtca

SEQ ID NO: 258654 - DNA, 19 bp, Homo sapiens
  siRNA target sequence for CHDC1 (NM_015116.1,1342-1360).
cgttaaaggggaatttcat

SEQ ID NO: 258655 - DNA, 19 bp, Homo sapiens
  siRNA target sequence for CHDC1 (NM_015116.1,1350-1368).
gggaatttcatcaggaatt

SEQ ID NO: 258656 - DNA, 19 bp, Homo sapiens
  siRNA target sequence for CHDC1 (NM_015116.1,1448-1466).
ctccattcggaatttatga

SEQ ID NO: 258657 - DNA, 19 bp, Homo sapiens
  siRNA target sequence for CHDC1 (NM_015116.1,1451-1469).
cattcggaatttatgaact

SEQ ID NO: 258658 - DNA, 19 bp, Homo sapiens
  siRNA target sequence for CHDC1 (NM_015116.1,1527-1545).
ggcaaactgagggcataat

SEQ ID NO: 258659 - DNA, 19 bp, Homo sapiens
  siRNA target sequence for CHDC1 (NM_015116.1,1528-1546).
gcaaactgagggcataata

SEQ ID NO: 258660 - DNA, 19 bp, Homo sapiens
  siRNA target sequence for CHDC1 (NM_015116.1,1529-1547).
caaactgagggcataataa

SEQ ID NO: 258661 - DNA, 19 bp, Homo sapiens
  siRNA target sequence for CHDC1 (NM_015116.1,1535-1553).
gagggcataataagttcat

SEQ ID NO: 258662 - DNA, 19 bp, Homo sapiens
  siRNA target sequence for CHDC1 (NM_015116.1,1540-1558).
cataataagttcatccaaa

SEQ ID NO: 258663 - DNA, 19 bp, Homo sapiens
  siRNA target sequence for CHDC1 (NM_015116.1,1562-1580).
caggacatggatatagcaa

SEQ ID NO: 258664 - DNA, 19 bp, Homo sapiens
  siRNA target sequence for CHDC1 (NM_015116.1,1613-1631).
ctgcaagatcccaatggat

SEQ ID NO: 258665 - DNA, 19 bp, Homo sapiens
  siRNA target sequence for CHDC1 (NM_015116.1,1615-1633).
gcaagatcccaatggatta

SEQ ID NO: 258666 - DNA, 19 bp, Homo sapiens
  siRNA target sequence for CHDC1 (NM_015116.1,1616-1634).
caagatcccaatggattaa

SEQ ID NO: 258667 - DNA, 19 bp, Homo sapiens
  siRNA target sequence for CHDC1 (NM_015116.1,1619-1637).
gatcccaatggattaagca

SEQ ID NO: 258668 - DNA, 19 bp, Homo sapiens
  siRNA target sequence for CHDC1 (NM_015116.1,1658-1676).
gttttaaacctatatccta

SEQ ID NO: 258669 - DNA, 19 bp, Homo sapiens
  siRNA target sequence for CHDC1 (NM_015116.1,1691-1709).
gccttagaattacaagatt

SEQ ID NO: 258670 - DNA, 19 bp, Homo sapiens
  siRNA target sequence for CHDC1 (NM_015116.1,1750-1768).
gtgtgaggtgcaaagtgat

SEQ ID NO: 258671 - DNA, 19 bp, Homo sapiens
  siRNA target sequence for CHDC1 (NM_015116.1,1754-1772).
gaggtgcaaagtgatctaa

SEQ ID NO: 258672 - DNA, 19 bp, Homo sapiens
  siRNA target sequence for CHDC1 (NM_015116.1,1791-1809).
gccagtattctccaaatga

SEQ ID NO: 258673 - DNA, 19 bp, Homo sapiens
  siRNA target sequence for CHDC1 (NM_015116.1,1800-1818).
ctccaaatgagattagaga

SEQ ID NO: 258674 - DNA, 19 bp, Homo sapiens
  siRNA target sequence for CHDC1 (NM_015116.1,1870-1888).
gaagcctcgatcagtgttt

SEQ ID NO: 258675 - DNA, 19 bp, Homo sapiens
  siRNA target sequence for CHDC1 (NM_015116.1,1873-1891).
gcctcgatcagtgtttcta

SEQ ID NO: 258676 - DNA, 19 bp, Homo sapiens
  siRNA target sequence for CHDC1 (NM_015116.1,1889-1907).
ctaagacctcagagaaatt

SEQ ID NO: 258677 - DNA, 19 bp, Homo sapiens
  siRNA target sequence for CHDC1 (NM_015116.1,1893-1911).
gacctcagagaaatttgga

SEQ ID NO: 258678 - DNA, 19 bp, Homo sapiens
  siRNA target sequence for CHDC1 (NM_015116.1,1902-1920).
gaaatttggaatctataga

SEQ ID NO: 258679 - DNA, 19 bp, Homo sapiens
  siRNA target sequence for CHDC1 (NM_015116.1,1932-1950).
caatccggaggaaaatgga

SEQ ID NO: 258680 - DNA, 19 bp, Homo sapiens
  siRNA target sequence for CHDC1 (NM_015116.1,1985-2003).
cttcgtgagagcattgaga

SEQ ID NO: 258681 - DNA, 19 bp, Homo sapiens
  siRNA target sequence for CHDC1 (NM_015116.1,1995-2013).
gcattgagatgagattgaa

SEQ ID NO: 258682 - DNA, 19 bp, Homo sapiens
  siRNA target sequence for CHDC1 (NM_015116.1,2127-2145).
cggttcccaaacttagcat

SEQ ID NO: 258683 - DNA, 19 bp, Homo sapiens
  siRNA target sequence for CHDC1 (NM_015116.1,2138-2156).
cttagcatggccaaatgca

SEQ ID NO: 258684 - DNA, 19 bp, Homo sapiens
  siRNA target sequence for CHDC1 (NM_015116.1,2236-2254).
cctgcagttggattttcgt

SEQ ID NO: 258685 - DNA, 19 bp, Homo sapiens
  siRNA target sequence for CHDC1 (NM_015116.1,2246-2264).
gattttcgtcacattcgaa

SEQ ID NO: 258686 - DNA, 19 bp, Homo sapiens
  siRNA target sequence for CHDC1 (NM_015116.1,2343-2361).
gcttctgtcttgtccatat

SEQ ID NO: 258687 - DNA, 19 bp, Homo sapiens
  siRNA target sequence for CHDC1 (NM_015116.1,2349-2367).
gtcttgtccatattctctt

SEQ ID NO: 258688 - DNA, 19 bp, Homo sapiens
  siRNA target sequence for CHDC1 (NM_015116.1,2351-2369).
cttgtccatattctcttta

SEQ ID NO: 258689 - DNA, 19 bp, Homo sapiens
  siRNA target sequence for FLJ10560 (NM_018138.1,173-191).
ccctccatccaagtttagt

SEQ ID NO: 258690 - DNA, 19 bp, Homo sapiens
  siRNA target sequence for FLJ10560 (NM_018138.1,181-199).
ccaagtttagtcttcacta

SEQ ID NO: 258691 - DNA, 19 bp, Homo sapiens
  siRNA target sequence for FLJ10560 (NM_018138.1,182-200).
caagtttagtcttcactat

SEQ ID NO: 258692 - DNA, 19 bp, Homo sapiens
  siRNA target sequence for FLJ10560 (NM_018138.1,255-273).
cgcctctactggtctacat

SEQ ID NO: 258693 - DNA, 19 bp, Homo sapiens
  siRNA target sequence for FLJ10560 (NM_018138.1,318-336).
gcgtggctttacttcgaaa

SEQ ID NO: 258694 - DNA, 19 bp, Homo sapiens
  siRNA target sequence for FLJ10560 (NM_018138.1,319-337).
cgtggctttacttcgaaat

SEQ ID NO: 258695 - DNA, 19 bp, Homo sapiens
  siRNA target sequence for FLJ10560 (NM_018138.1,320-338).
gtggctttacttcgaaata

SEQ ID NO: 258696 - DNA, 19 bp, Homo sapiens
  siRNA target sequence for FLJ10560 (NM_018138.1,329-347).
cttcgaaatatttgatagt

SEQ ID NO: 258697 - DNA, 19 bp, Homo sapiens
  siRNA target sequence for FLJ10560 (NM_018138.1,445-463).
cagtggacacgctacagtt

SEQ ID NO: 258698 - DNA, 19 bp, Homo sapiens
  siRNA target sequence for FLJ10560 (NM_018138.1,534-552).
cccagtcccagaaacaaat

SEQ ID NO: 258699 - DNA, 19 bp, Homo sapiens
  siRNA target sequence for FLJ10560 (NM_018138.1,566-584).
cctgactgaaaaatctaat

SEQ ID NO: 258700 - DNA, 19 bp, Homo sapiens
  siRNA target sequence for FLJ10560 (NM_018138.1,650-668).
cctcgagctgcttttagat

SEQ ID NO: 258701 - DNA, 19 bp, Homo sapiens
  siRNA target sequence for FLJ10560 (NM_018138.1,678-696).
ctcactgcatcatttcatt

SEQ ID NO: 258702 - DNA, 19 bp, Homo sapiens
  siRNA target sequence for FLJ10560 (NM_018138.1,732-750).
gtggcgctcagcttcctta

SEQ ID NO: 258703 - DNA, 19 bp, Homo sapiens
  siRNA target sequence for FLJ10560 (NM_018138.1,746-764).
ccttattgaaggtacaata

SEQ ID NO: 258704 - DNA, 19 bp, Homo sapiens
  siRNA target sequence for FLJ10560 (NM_018138.1,776-794).
gaagatctatccacttcat

SEQ ID NO: 258705 - DNA, 19 bp, Homo sapiens
  siRNA target sequence for FLJ10560 (NM_018138.1,822-840).
gcagatagtggcttctcaa

SEQ ID NO: 258706 - DNA, 19 bp, Homo sapiens
  siRNA target sequence for FLJ10560 (NM_018138.1,823-841).
cagatagtggcttctcaaa

SEQ ID NO: 258707 - DNA, 19 bp, Homo sapiens
  siRNA target sequence for FLJ10560 (NM_018138.1,836-854).
ctcaaagatctctaagact

SEQ ID NO: 258708 - DNA, 19 bp, Homo sapiens
  siRNA target sequence for FLJ10560 (NM_018138.1,842-860).
gatctctaagactttctct

SEQ ID NO: 258709 - DNA, 19 bp, Homo sapiens
  siRNA target sequence for FLJ10560 (NM_018138.1,881-899).
gttgaggtcctgtttgact

SEQ ID NO: 258710 - DNA, 19 bp, Homo sapiens
  siRNA target sequence for FLJ10560 (NM_018138.1,896-914).
gactgggaatccatttggt

SEQ ID NO: 258711 - DNA, 19 bp, Homo sapiens
  siRNA target sequence for FLJ10560 (NM_018138.1,902-920).
gaatccatttggtacatca

SEQ ID NO: 258712 - DNA, 19 bp, Homo sapiens
  siRNA target sequence for FLJ10560 (NM_018138.1,947-965).
ggcttgggctcatcaagtt

SEQ ID NO: 258713 - DNA, 19 bp, Homo sapiens
  siRNA target sequence for FLJ10560 (NM_018138.1,963-981).
gttgaagggaccaccaaaa

SEQ ID NO: 258714 - DNA, 19 bp, Homo sapiens
  siRNA target sequence for FLJ10560 (NM_018138.1,984-1002).
gctaagattgcttgtaata

SEQ ID NO: 258715 - DNA, 19 bp, Homo sapiens
  siRNA target sequence for FLJ10560 (NM_018138.1,1035-1053).
gtgatgagccaggtttaca

SEQ ID NO: 258716 - DNA, 19 bp, Homo sapiens
  siRNA target sequence for FLJ10560 (NM_018138.1,1107-1125).
catcgttgcaacgaatctt

SEQ ID NO: 258717 - DNA, 19 bp, Homo sapiens
  siRNA target sequence for FLJ10560 (NM_018138.1,1110-1128).
cgttgcaacgaatctttta

SEQ ID NO: 258718 - DNA, 19 bp, Homo sapiens
  siRNA target sequence for FLJ10560 (NM_018138.1,1111-1129).
gttgcaacgaatcttttat

SEQ ID NO: 258719 - DNA, 19 bp, Homo sapiens
  siRNA target sequence for FLJ10560 (NM_018138.1,1114-1132).
gcaacgaatcttttatata

SEQ ID NO: 258720 - DNA, 19 bp, Homo sapiens
  siRNA target sequence for FLJ10560 (NM_018138.1,1115-1133).
caacgaatcttttatatat

SEQ ID NO: 258721 - DNA, 19 bp, Homo sapiens
  siRNA target sequence for FLJ10560 (NM_018138.1,1145-1163).
cttacgatctgtgacaatt

SEQ ID NO: 258722 - DNA, 19 bp, Homo sapiens
  siRNA target sequence for FLJ10560 (NM_018138.1,1149-1167).
cgatctgtgacaattgaga

SEQ ID NO: 258723 - DNA, 19 bp, Homo sapiens
  siRNA target sequence for FLJ10560 (NM_018138.1,1150-1168).
gatctgtgacaattgagaa

SEQ ID NO: 258724 - DNA, 19 bp, Homo sapiens
  siRNA target sequence for FLJ10560 (NM_018138.1,1169-1187).
gtgcaggaatagcatcttt

SEQ ID NO: 258725 - DNA, 19 bp, Homo sapiens
  siRNA target sequence for FLJ10560 (NM_018138.1,1174-1192).
ggaatagcatctttgtctt

SEQ ID NO: 258726 - DNA, 19 bp, Homo sapiens
  siRNA target sequence for FLJ10560 (NM_018138.1,1196-1214).
ccctgtagggactacactt

SEQ ID NO: 258727 - DNA, 19 bp, Homo sapiens
  siRNA target sequence for FLJ10560 (NM_018138.1,1260-1278).
cgtttgtccatctcttcta

SEQ ID NO: 258728 - DNA, 19 bp, Homo sapiens
  siRNA target sequence for FLJ10560 (NM_018138.1,1306-1324).
cgcctacacgcccacttat

SEQ ID NO: 258729 - DNA, 19 bp, Homo sapiens
  siRNA target sequence for FLJ10560 (NM_018138.1,1309-1327).
ctacacgcccacttattct

SEQ ID NO: 258730 - DNA, 19 bp, Homo sapiens
  siRNA target sequence for FLJ10560 (NM_018138.1,1333-1351).
ggaaccagacagtaacttt

SEQ ID NO: 258731 - DNA, 19 bp, Homo sapiens
  siRNA target sequence for FLJ10560 (NM_018138.1,1418-1436).
gcctaactattgggataat

SEQ ID NO: 258732 - DNA, 19 bp, Homo sapiens
  siRNA target sequence for FLJ10560 (NM_018138.1,1481-1499).
gcttttaccaccttgtgaa

SEQ ID NO: 258733 - DNA, 19 bp, Homo sapiens
  siRNA target sequence for FLJ10560 (NM_018138.1,1489-1507).
caccttgtgaattctatgt

SEQ ID NO: 258734 - DNA, 19 bp, Homo sapiens
  siRNA target sequence for FLJ10560 (NM_018138.1,1555-1573).
ggggtcttccatctgtata

SEQ ID NO: 258735 - DNA, 19 bp, Homo sapiens
  siRNA target sequence for FLJ10560 (NM_018138.1,1556-1574).
gggtcttccatctgtatat

SEQ ID NO: 258736 - DNA, 19 bp, Homo sapiens
  siRNA target sequence for FLJ10560 (NM_018138.1,1626-1644).
gtgaaggaggctcatttga

SEQ ID NO: 258737 - DNA, 19 bp, Homo sapiens
  siRNA target sequence for FLJ10560 (NM_018138.1,1628-1646).
gaaggaggctcatttgaca

SEQ ID NO: 258738 - DNA, 19 bp, Homo sapiens
  siRNA target sequence for FLJ10560 (NM_018138.1,1634-1652).
ggctcatttgacaaaggat

SEQ ID NO: 258739 - DNA, 19 bp, Homo sapiens
  siRNA target sequence for FLJ10560 (NM_018138.1,1688-1706).
gttttatgaatggttgatt

SEQ ID NO: 258740 - DNA, 19 bp, Homo sapiens
  siRNA target sequence for FLJ37307 (NM_178515.2,538-556).
gaggcacctcccttcatca

SEQ ID NO: 258741 - DNA, 19 bp, Homo sapiens
  siRNA target sequence for FLJ37307 (NM_178515.2,590-608).
ctccgtagctttaagagaa

SEQ ID NO: 258742 - DNA, 19 bp, Homo sapiens
  siRNA target sequence for HT008 (NM_018469.3,167-185).
ggtcgccatgccgagaaaa

SEQ ID NO: 258743 - DNA, 19 bp, Homo sapiens
  siRNA target sequence for HT008 (NM_018469.3,170-188).
cgccatgccgagaaaacca

SEQ ID NO: 258744 - DNA, 19 bp, Homo sapiens
  siRNA target sequence for HT008 (NM_018469.3,234-252).
ccgtgtcccgagataccat

SEQ ID NO: 258745 - DNA, 19 bp, Homo sapiens
  siRNA target sequence for HT008 (NM_018469.3,245-263).
gataccatcgccattcact

SEQ ID NO: 258746 - DNA, 19 bp, Homo sapiens
  siRNA target sequence for HT008 (NM_018469.3,327-345).
ggctggatgaccaaagcat

SEQ ID NO: 258747 - DNA, 19 bp, Homo sapiens
  siRNA target sequence for HT008 (NM_018469.3,328-346).
gctggatgaccaaagcatt

SEQ ID NO: 258748 - DNA, 19 bp, Homo sapiens
  siRNA target sequence for HT008 (NM_018469.3,332-350).
gatgaccaaagcattgtaa

SEQ ID NO: 258749 - DNA, 19 bp, Homo sapiens
  siRNA target sequence for HT008 (NM_018469.3,518-536).
gcagcacaagtattaagta

SEQ ID NO: 258750 - DNA, 19 bp, Homo sapiens
  siRNA target sequence for HT008 (NM_018469.3,639-657).
cattgtcctctccttctaa

SEQ ID NO: 258751 - DNA, 19 bp, Homo sapiens
  siRNA target sequence for HT008 (NM_018469.3,691-709).
caccctttccagtgcaaaa

SEQ ID NO: 258752 - DNA, 19 bp, Homo sapiens
  siRNA target sequence for HT008 (NM_018469.3,711-729).
ccttcatgagccttgtgaa

SEQ ID NO: 258753 - DNA, 19 bp, Homo sapiens
  siRNA target sequence for HT008 (NM_018469.3,831-849).
ggcaggagtcggatacagt

SEQ ID NO: 258754 - DNA, 19 bp, Homo sapiens
  siRNA target sequence for HT008 (NM_018469.3,840-858).
cggatacagtgtcctataa

SEQ ID NO: 258755 - DNA, 19 bp, Homo sapiens
  siRNA target sequence for HT008 (NM_018469.3,861-879).
cacctgattccaaactgaa

SEQ ID NO: 258756 - DNA, 19 bp, Homo sapiens
  siRNA target sequence for HT008 (NM_018469.3,955-973).
gacttctccctctgatact

SEQ ID NO: 258757 - DNA, 19 bp, Homo sapiens
  siRNA target sequence for HT008 (NM_018469.3,993-1011).
ccgaaatggaggctaaaat

SEQ ID NO: 258758 - DNA, 19 bp, Homo sapiens
  siRNA target sequence for HT008 (NM_018469.3,1004-1022).
gctaaaattgaagatacta

SEQ ID NO: 258759 - DNA, 19 bp, Homo sapiens
  siRNA target sequence for HT008 (NM_018469.3,1005-1023).
ctaaaattgaagatactaa

SEQ ID NO: 258760 - DNA, 19 bp, Homo sapiens
  siRNA target sequence for HT008 (NM_018469.3,1058-1076).
cagctccttagtaaaatta

SEQ ID NO: 258761 - DNA, 19 bp, Homo sapiens
  siRNA target sequence for HT008 (NM_018469.3,1105-1123).
caaagccttatcttcaagt

SEQ ID NO: 258762 - DNA, 19 bp, Homo sapiens
  siRNA target sequence for HT008 (NM_018469.3,1276-1294).
gcccacaagagagatagaa

SEQ ID NO: 258763 - DNA, 19 bp, Homo sapiens
  siRNA target sequence for HT008 (NM_018469.3,1278-1296).
ccacaagagagatagaact

SEQ ID NO: 258764 - DNA, 19 bp, Homo sapiens
  siRNA target sequence for HT008 (NM_018469.3,1281-1299).
caagagagatagaactgaa

SEQ ID NO: 258765 - DNA, 19 bp, Homo sapiens
  siRNA target sequence for HT008 (NM_018469.3,1336-1354).
gaagacaagttctctagtt

SEQ ID NO: 258766 - DNA, 19 bp, Homo sapiens
  siRNA target sequence for HT008 (NM_018469.3,1352-1370).
gttctggagaaatgttctt

SEQ ID NO: 258767 - DNA, 19 bp, Homo sapiens
  siRNA target sequence for HT008 (NM_018469.3,1421-1439).
gaggacttcgatttggaaa

SEQ ID NO: 258768 - DNA, 19 bp, Homo sapiens
  siRNA target sequence for HT008 (NM_018469.3,1444-1462).
gggggagagtaaagttgat

SEQ ID NO: 258769 - DNA, 19 bp, Homo sapiens
  siRNA target sequence for HT008 (NM_018469.3,1575-1593).
cgttgggcttctttataat

SEQ ID NO: 258770 - DNA, 19 bp, Homo sapiens
  siRNA target sequence for HT008 (NM_018469.3,1579-1597).
gggcttctttataatgtgt

SEQ ID NO: 258771 - DNA, 19 bp, Homo sapiens
  siRNA target sequence for HT008 (NM_018469.3,1684-1702).
cgtgatttggttttttaca

SEQ ID NO: 258772 - DNA, 19 bp, Homo sapiens
  siRNA target sequence for HT008 (NM_018469.3,1707-1725).
caagtgctcataaatatca

SEQ ID NO: 258773 - DNA, 19 bp, Homo sapiens
  siRNA target sequence for HT008 (NM_018469.3,1713-1731).
ctcataaatatcacaagtt

SEQ ID NO: 258774 - DNA, 19 bp, Homo sapiens
  siRNA target sequence for HT008 (NM_018469.3,1742-1760).
ctgcgacactggaacacaa

SEQ ID NO: 258775 - DNA, 19 bp, Homo sapiens
  siRNA target sequence for HT008 (NM_018469.3,1745-1763).
cgacactggaacacaagat

SEQ ID NO: 258776 - DNA, 19 bp, Homo sapiens
  siRNA target sequence for HT008 (NM_018469.3,1804-1822).
gaatgagatttacaactat

SEQ ID NO: 258777 - DNA, 19 bp, Homo sapiens
  siRNA target sequence for HT008 (NM_018469.3,1834-1852).
ctaccatgcgactttgaca

SEQ ID NO: 258778 - DNA, 19 bp, Homo sapiens
  siRNA target sequence for HT008 (NM_018469.3,1871-1889).
cttgagggtggaaccttaa

SEQ ID NO: 258779 - DNA, 19 bp, Homo sapiens
  siRNA target sequence for HT008 (NM_018469.3,1881-1899).
gaaccttaagactttcaaa

SEQ ID NO: 258780 - DNA, 19 bp, Homo sapiens
  siRNA target sequence for HT008 (NM_018469.3,1890-1908).
gactttcaaagcccaataa

SEQ ID NO: 258781 - DNA, 19 bp, Homo sapiens
  siRNA target sequence for HT008 (NM_018469.3,1918-1936).
caggagggccagctacaat

SEQ ID NO: 258782 - DNA, 19 bp, Homo sapiens
  siRNA target sequence for HT008 (NM_018469.3,1921-1939).
gagggccagctacaatgaa

SEQ ID NO: 258783 - DNA, 19 bp, Homo sapiens
  siRNA target sequence for HT008 (NM_018469.3,1990-2008).
cagcaagatttatcttgta

SEQ ID NO: 258784 - DNA, 19 bp, Homo sapiens
  siRNA target sequence for HT008 (NM_018469.3,2069-2087).
ggtcagcaagatgacttta

SEQ ID NO: 258785 - DNA, 19 bp, Homo sapiens
  siRNA target sequence for HT008 (NM_018469.3,2072-2090).
cagcaagatgactttatgt

SEQ ID NO: 258786 - DNA, 19 bp, Homo sapiens
  siRNA target sequence for HT008 (NM_018469.3,2091-2109).
ctaaagctcagactgataa

SEQ ID NO: 258787 - DNA, 19 bp, Homo sapiens
  siRNA target sequence for HT008 (NM_018469.3,2190-2208).
ctagccagcgagatcagat

SEQ ID NO: 258788 - DNA, 19 bp, Homo sapiens
  siRNA target sequence for HT008 (NM_018469.3,2223-2241).
ggagaactggccgagaaaa

SEQ ID NO: 258789 - DNA, 19 bp, Homo sapiens
  siRNA target sequence for HT008 (NM_018469.3,2245-2263).
ggaatggtttaggagattt

SEQ ID NO: 258790 - DNA, 19 bp, Homo sapiens
  siRNA target sequence for HT008 (NM_018469.3,2246-2264).
gaatggtttaggagattta

SEQ ID NO: 258791 - DNA, 19 bp, Homo sapiens
  siRNA target sequence for HT008 (NM_018469.3,2250-2268).
ggtttaggagatttattct

SEQ ID NO: 258792 - DNA, 19 bp, Homo sapiens
  siRNA target sequence for HT008 (NM_018469.3,2672-2690).
gacttcttaggagagaaat

SEQ ID NO: 258793 - DNA, 19 bp, Homo sapiens
  siRNA target sequence for HT008 (NM_018469.3,2699-2717).
gatctggtgtctaagaaga

SEQ ID NO: 258794 - DNA, 19 bp, Homo sapiens
  siRNA target sequence for HT008 (NM_018469.3,2709-2727).
ctaagaagatccaaatgaa

SEQ ID NO: 258795 - DNA, 19 bp, Homo sapiens
  siRNA target sequence for HT008 (NM_018469.3,2743-2761).
gctcccctactttatgaat

SEQ ID NO: 258796 - DNA, 19 bp, Homo sapiens
  siRNA target sequence for HT008 (NM_018469.3,2769-2787).
ctctgacggaacttgacat

SEQ ID NO: 258797 - DNA, 19 bp, Homo sapiens
  siRNA target sequence for HT008 (NM_018469.3,2789-2807).
ggcgtggctgtgccaaaaa

SEQ ID NO: 258798 - DNA, 19 bp, Homo sapiens
  siRNA target sequence for HT008 (NM_018469.3,2790-2808).
gcgtggctgtgccaaaaat

SEQ ID NO: 258799 - DNA, 19 bp, Homo sapiens
  siRNA target sequence for HT008 (NM_018469.3,2815-2833).
ggccttcaagccttacgtt

SEQ ID NO: 258800 - DNA, 19 bp, Homo sapiens
  siRNA target sequence for HT008 (NM_018469.3,2839-2857).
ccaaggactctggattgat

SEQ ID NO: 258801 - DNA, 19 bp, Homo sapiens
  siRNA target sequence for HT008 (NM_018469.3,3111-3129).
gaggtcatcgaacaagtaa

SEQ ID NO: 258802 - DNA, 19 bp, Homo sapiens
  siRNA target sequence for HT008 (NM_018469.3,3113-3131).
ggtcatcgaacaagtaaga

SEQ ID NO: 258803 - DNA, 19 bp, Homo sapiens
  siRNA target sequence for HT008 (NM_018469.3,3114-3132).
gtcatcgaacaagtaagat

SEQ ID NO: 258804 - DNA, 19 bp, Homo sapiens
  siRNA target sequence for HT008 (NM_018469.3,3116-3134).
catcgaacaagtaagatta

SEQ ID NO: 258805 - DNA, 19 bp, Homo sapiens
  siRNA target sequence for HT008 (NM_018469.3,3119-3137).
cgaacaagtaagattatga

SEQ ID NO: 258806 - DNA, 19 bp, Homo sapiens
  siRNA target sequence for HT008 (NM_018469.3,3130-3148).
gattatgaggtttgttgat

SEQ ID NO: 258807 - DNA, 19 bp, Homo sapiens
  siRNA target sequence for HT008 (NM_018469.3,3235-3253).
gctgctcactgttgaagta

SEQ ID NO: 258808 - DNA, 19 bp, Homo sapiens
  siRNA target sequence for HT008 (NM_018469.3,3267-3285).
gaaccttggcggtcaacat

SEQ ID NO: 258809 - DNA, 19 bp, Homo sapiens
  siRNA target sequence for HT008 (NM_018469.3,3297-3315).
cgactgaccgagtatggta

SEQ ID NO: 258810 - DNA, 19 bp, Homo sapiens
  siRNA target sequence for HT008 (NM_018469.3,3298-3316).
gactgaccgagtatggtat

SEQ ID NO: 258811 - DNA, 19 bp, Homo sapiens
  siRNA target sequence for HT008 (NM_018469.3,3302-3320).
gaccgagtatggtatggtt

SEQ ID NO: 258812 - DNA, 19 bp, Homo sapiens
  siRNA target sequence for HT008 (NM_018469.3,3448-3466).
gccaaacatggatgatgtt

SEQ ID NO: 258813 - DNA, 19 bp, Homo sapiens
  siRNA target sequence for KST1 (NM_052944.2,255-273).
ctcagcctccacagttaga

SEQ ID NO: 258814 - DNA, 19 bp, Homo sapiens
  siRNA target sequence for KST1 (NM_052944.2,509-527).
gctacgggcatttctgtat

SEQ ID NO: 258815 - DNA, 19 bp, Homo sapiens
  siRNA target sequence for KST1 (NM_052944.2,609-627).
ccacgatgccagaatacct

SEQ ID NO: 258816 - DNA, 19 bp, Homo sapiens
  siRNA target sequence for KST1 (NM_052944.2,610-628).
cacgatgccagaataccta

SEQ ID NO: 258817 - DNA, 19 bp, Homo sapiens
  siRNA target sequence for KST1 (NM_052944.2,635-653).
cgcttcggtggcatcagaa

SEQ ID NO: 258818 - DNA, 19 bp, Homo sapiens
  siRNA target sequence for KST1 (NM_052944.2,636-654).
gcttcggtggcatcagaat

SEQ ID NO: 258819 - DNA, 19 bp, Homo sapiens
  siRNA target sequence for KST1 (NM_052944.2,671-689).
gtactctacctatttatct

SEQ ID NO: 258820 - DNA, 19 bp, Homo sapiens
  siRNA target sequence for KST1 (NM_052944.2,703-721).
gatctcggtagacatgtat

SEQ ID NO: 258821 - DNA, 19 bp, Homo sapiens
  siRNA target sequence for KST1 (NM_052944.2,747-765).
ctttgcacctggatctgta

SEQ ID NO: 258822 - DNA, 19 bp, Homo sapiens
  siRNA target sequence for KST1 (NM_052944.2,851-869).
cagacgctgatcatgctta

SEQ ID NO: 258823 - DNA, 19 bp, Homo sapiens
  siRNA target sequence for KST1 (NM_052944.2,853-871).
gacgctgatcatgcttata

SEQ ID NO: 258824 - DNA, 19 bp, Homo sapiens
  siRNA target sequence for KST1 (NM_052944.2,856-874).
gctgatcatgcttatagga

SEQ ID NO: 258825 - DNA, 19 bp, Homo sapiens
  siRNA target sequence for KST1 (NM_052944.2,992-1010).
cgggaagatgccttccata

SEQ ID NO: 258826 - DNA, 19 bp, Homo sapiens
  siRNA target sequence for KST1 (NM_052944.2,994-1012).
ggaagatgccttccatatt

SEQ ID NO: 258827 - DNA, 19 bp, Homo sapiens
  siRNA target sequence for KST1 (NM_052944.2,1180-1198).
ggtgctgcccctcttcata

SEQ ID NO: 258828 - DNA, 19 bp, Homo sapiens
  siRNA target sequence for KST1 (NM_052944.2,1181-1199).
gtgctgcccctcttcataa

SEQ ID NO: 258829 - DNA, 19 bp, Homo sapiens
  siRNA target sequence for KST1 (NM_052944.2,1347-1365).
ggctccgtgggctgatgat

SEQ ID NO: 258830 - DNA, 19 bp, Homo sapiens
  siRNA target sequence for KST1 (NM_052944.2,1566-1584).
gccagctcttcatctatat

SEQ ID NO: 258831 - DNA, 19 bp, Homo sapiens
  siRNA target sequence for KST1 (NM_052944.2,1888-1906).
ccacctgacctggtttact

SEQ ID NO: 258832 - DNA, 19 bp, Homo sapiens
  siRNA target sequence for KST1 (NM_052944.2,2014-2032).
gttcgagatggttcaagaa

SEQ ID NO: 258833 - DNA, 19 bp, Homo sapiens
  siRNA target sequence for KST1 (NM_052944.2,2221-2239).
cgtgagctgcgccatcttt

SEQ ID NO: 258834 - DNA, 19 bp, Homo sapiens
  siRNA target sequence for KST1 (NM_052944.2,2222-2240).
gtgagctgcgccatcttta

SEQ ID NO: 258835 - DNA, 19 bp, Homo sapiens
  siRNA target sequence for MGC34837 (NM_152377.1,110-128).
gactccccgtggatcagat

SEQ ID NO: 258836 - DNA, 19 bp, Homo sapiens
  siRNA target sequence for MGC34837 (NM_152377.1,115-133).
cccgtggatcagatgcaat

SEQ ID NO: 258837 - DNA, 19 bp, Homo sapiens
  siRNA target sequence for MGC34837 (NM_152377.1,159-177).
ggaagtaaacactttcaat

SEQ ID NO: 258838 - DNA, 19 bp, Homo sapiens
  siRNA target sequence for MGC34837 (NM_152377.1,183-201).
gtggagaagccaaagatca

SEQ ID NO: 258839 - DNA, 19 bp, Homo sapiens
  siRNA target sequence for MGC34837 (NM_152377.1,249-267).
ccaatgactgataatgcaa

SEQ ID NO: 258840 - DNA, 19 bp, Homo sapiens
  siRNA target sequence for MGC34837 (NM_152377.1,396-414).
ctaacaggggcaaacagta

SEQ ID NO: 258841 - DNA, 19 bp, Homo sapiens
  siRNA target sequence for MGC34837 (NM_152377.1,418-436).
gattcctggatggcaatat

SEQ ID NO: 258842 - DNA, 19 bp, Homo sapiens
  siRNA target sequence for MGC34837 (NM_152377.1,478-496).
gagaccagtccttatccta

SEQ ID NO: 258843 - DNA, 19 bp, Homo sapiens
  siRNA target sequence for MGC34837 (NM_152377.1,511-529).
ccaggagaaagcttagaga

SEQ ID NO: 258844 - DNA, 19 bp, Homo sapiens
  siRNA target sequence for MGC34837 (NM_152377.1,647-665).
caagtcacgtcctttgagt

SEQ ID NO: 258845 - DNA, 19 bp, Homo sapiens
  siRNA target sequence for MGC34837 (NM_152377.1,657-675).
cctttgagttccaacttat

SEQ ID NO: 258846 - DNA, 19 bp, Homo sapiens
  siRNA target sequence for MGC34837 (NM_152377.1,741-759).
cagctgagccgcctctttt

SEQ ID NO: 258847 - DNA, 19 bp, Homo sapiens
  siRNA target sequence for MGC34837 (NM_152377.1,771-789).
gtccctctacagttaccaa

SEQ ID NO: 258848 - DNA, 19 bp, Homo sapiens
  siRNA target sequence for MGC34837 (NM_152377.1,829-847).
ctcctgaaatggtgaatta

SEQ ID NO: 258849 - DNA, 19 bp, Homo sapiens
  siRNA target sequence for MGC34837 (NM_152377.1,1022-1040).
ggcactaaggacaaccaat

SEQ ID NO: 258850 - DNA, 19 bp, Homo sapiens
  siRNA target sequence for MGC34837 (NM_152377.1,1045-1063).
gactcaacatagacaatct

SEQ ID NO: 258851 - DNA, 19 bp, Homo sapiens
  siRNA target sequence for MGC34837 (NM_152377.1,1062-1080).
ctcaatctgagttttcgaa

SEQ ID NO: 258852 - DNA, 19 bp, Homo sapiens
  siRNA target sequence for MGC34837 (NM_152377.1,1064-1082).
caatctgagttttcgaaaa

SEQ ID NO: 258853 - DNA, 19 bp, Homo sapiens
  siRNA target sequence for MGC34837 (NM_152377.1,1070-1088).
gagttttcgaaaagaagat

SEQ ID NO: 258854 - DNA, 19 bp, Homo sapiens
  siRNA target sequence for MGC34837 (NM_152377.1,1102-1120).
gctgcctccctctacctaa

SEQ ID NO: 258855 - DNA, 19 bp, Homo sapiens
  siRNA target sequence for MGC34837 (NM_152377.1,1116-1134).
cctaaggtcagggctatat

SEQ ID NO: 258856 - DNA, 19 bp, Homo sapiens
  siRNA target sequence for MGC34837 (NM_152377.1,1172-1190).
ggaaacattgcttaaccat

SEQ ID NO: 258857 - DNA, 19 bp, Homo sapiens
  siRNA target sequence for MGC34837 (NM_152377.1,1191-1209).
caagatttgggttaccaaa

SEQ ID NO: 258858 - DNA, 19 bp, Homo sapiens
  siRNA target sequence for MGC34837 (NM_152377.1,1251-1269).
gcttcttctgatttgttat

SEQ ID NO: 258859 - DNA, 19 bp, Homo sapiens
  siRNA target sequence for MGC34837 (NM_152377.1,1329-1347).
gtccccgagatgtctcaaa

SEQ ID NO: 258860 - DNA, 19 bp, Homo sapiens
  siRNA target sequence for MGC34837 (NM_152377.1,1333-1351).
ccgagatgtctcaaagcaa

SEQ ID NO: 258861 - DNA, 19 bp, Homo sapiens
  siRNA target sequence for MGC34837 (NM_152377.1,1334-1352).
cgagatgtctcaaagcaaa

SEQ ID NO: 258862 - DNA, 19 bp, Homo sapiens
  siRNA target sequence for MGC34837 (NM_152377.1,1551-1569).
ctgtgtgatctgagtaaca

SEQ ID NO: 258863 - DNA, 19 bp, Homo sapiens
  siRNA target sequence for MGC34837 (NM_152377.1,1553-1571).
gtgtgatctgagtaacaca

SEQ ID NO: 258864 - DNA, 19 bp, Homo sapiens
  siRNA target sequence for MGC34837 (NM_152377.1,1591-1609).
gagccagacgcctcattca

SEQ ID NO: 258865 - DNA, 19 bp, Homo sapiens
  siRNA target sequence for MGC34837 (NM_152377.1,1597-1615).
gacgcctcattcacaacta

SEQ ID NO: 258866 - DNA, 19 bp, Homo sapiens
  siRNA target sequence for MGC34837 (NM_152377.1,1599-1617).
cgcctcattcacaactaca

SEQ ID NO: 258867 - DNA, 19 bp, Homo sapiens
  siRNA target sequence for MGC34837 (NM_152377.1,1600-1618).
gcctcattcacaactacaa

SEQ ID NO: 258868 - DNA, 19 bp, Homo sapiens
  siRNA target sequence for MGC34837 (NM_152377.1,1601-1619).
cctcattcacaactacaat

SEQ ID NO: 258869 - DNA, 19 bp, Homo sapiens
  siRNA target sequence for MGC34837 (NM_152377.1,1672-1690).
gattccgttcgggagaaaa

SEQ ID NO: 258870 - DNA, 19 bp, Homo sapiens
  siRNA target sequence for MGC34837 (NM_152377.1,1678-1696).
gttcgggagaaaatatgct

SEQ ID NO: 258871 - DNA, 19 bp, Homo sapiens
  siRNA target sequence for MGC34837 (NM_152377.1,1703-1721).
gccagcactgcggtactta

SEQ ID NO: 258872 - DNA, 19 bp, Homo sapiens
  siRNA target sequence for MGC34837 (NM_152377.1,1704-1722).
ccagcactgcggtacttaa

SEQ ID NO: 258873 - DNA, 19 bp, Homo sapiens
  siRNA target sequence for MGC34837 (NM_152377.1,1705-1723).
cagcactgcggtacttaaa

SEQ ID NO: 258874 - DNA, 19 bp, Homo sapiens
  siRNA target sequence for MGC34837 (NM_152377.1,1708-1726).
cactgcggtacttaaagga

SEQ ID NO: 258875 - DNA, 19 bp, Homo sapiens
  siRNA target sequence for NALP13 (NM_176810.1,161-179).
gtatcccctgggcaaactt

SEQ ID NO: 258876 - DNA, 19 bp, Homo sapiens
  siRNA target sequence for NALP13 (NM_176810.1,187-205).
gccgaccctttgaatctgt

SEQ ID NO: 258877 - DNA, 19 bp, Homo sapiens
  siRNA target sequence for NALP13 (NM_176810.1,259-277).
ggcatcttccagacaatga

SEQ ID NO: 258878 - DNA, 19 bp, Homo sapiens
  siRNA target sequence for NALP13 (NM_176810.1,260-278).
gcatcttccagacaatgaa

SEQ ID NO: 258879 - DNA, 19 bp, Homo sapiens
  siRNA target sequence for NALP13 (NM_176810.1,546-564).
gaacatgaaggctgaacta

SEQ ID NO: 258880 - DNA, 19 bp, Homo sapiens
  siRNA target sequence for NALP13 (NM_176810.1,568-586).
gagacatgggacaacatca

SEQ ID NO: 258881 - DNA, 19 bp, Homo sapiens
  siRNA target sequence for NALP13 (NM_176810.1,590-608).
ggcctaaagaccacgtata

SEQ ID NO: 258882 - DNA, 19 bp, Homo sapiens
  siRNA target sequence for NALP13 (NM_176810.1,591-609).
gcctaaagaccacgtatat

SEQ ID NO: 258883 - DNA, 19 bp, Homo sapiens
  siRNA target sequence for NALP13 (NM_176810.1,592-610).
cctaaagaccacgtatata

SEQ ID NO: 258884 - DNA, 19 bp, Homo sapiens
  siRNA target sequence for NALP13 (NM_176810.1,601-619).
cacgtatatatccgtaata

SEQ ID NO: 258885 - DNA, 19 bp, Homo sapiens
  siRNA target sequence for NALP13 (NM_176810.1,603-621).
cgtatatatccgtaataca

SEQ ID NO: 258886 - DNA, 19 bp, Homo sapiens
  siRNA target sequence for NALP13 (NM_176810.1,604-622).
gtatatatccgtaatacat

SEQ ID NO: 258887 - DNA, 19 bp, Homo sapiens
  siRNA target sequence for NALP13 (NM_176810.1,620-638).
catcaaaggacgaacatga

SEQ ID NO: 258888 - DNA, 19 bp, Homo sapiens
  siRNA target sequence for NALP13 (NM_176810.1,648-666).
gcgcctactggatcctaat

SEQ ID NO: 258889 - DNA, 19 bp, Homo sapiens
  siRNA target sequence for NALP13 (NM_176810.1,649-667).
cgcctactggatcctaata

SEQ ID NO: 258890 - DNA, 19 bp, Homo sapiens
  siRNA target sequence for NALP13 (NM_176810.1,652-670).
ctactggatcctaatagga

SEQ ID NO: 258891 - DNA, 19 bp, Homo sapiens
  siRNA target sequence for NALP13 (NM_176810.1,798-816).
ctatctcagctgccataaa

SEQ ID NO: 258892 - DNA, 19 bp, Homo sapiens
  siRNA target sequence for NALP13 (NM_176810.1,802-820).
ctcagctgccataaaataa

SEQ ID NO: 258893 - DNA, 19 bp, Homo sapiens
  siRNA target sequence for NALP13 (NM_176810.1,836-854).
ctacctttgctgaattgat

SEQ ID NO: 258894 - DNA, 19 bp, Homo sapiens
  siRNA target sequence for NALP13 (NM_176810.1,1111-1129).
cttaaggcctcattagtga

SEQ ID NO: 258895 - DNA, 19 bp, Homo sapiens
  siRNA target sequence for NALP13 (NM_176810.1,1117-1135).
gcctcattagtgaatccat

SEQ ID NO: 258896 - DNA, 19 bp, Homo sapiens
  siRNA target sequence for NALP13 (NM_176810.1,1128-1146).
gaatccatgctttgtacaa

SEQ ID NO: 258897 - DNA, 19 bp, Homo sapiens
  siRNA target sequence for NALP13 (NM_176810.1,1132-1150).
ccatgctttgtacaaatta

SEQ ID NO: 258898 - DNA, 19 bp, Homo sapiens
  siRNA target sequence for NALP13 (NM_176810.1,1164-1182).
ggacgacctacgggtatat

SEQ ID NO: 258899 - DNA, 19 bp, Homo sapiens
  siRNA target sequence for NALP13 (NM_176810.1,1165-1183).
gacgacctacgggtatatt

SEQ ID NO: 258900 - DNA, 19 bp, Homo sapiens
  siRNA target sequence for NALP13 (NM_176810.1,1171-1189).
ctacgggtatatttcatga

SEQ ID NO: 258901 - DNA, 19 bp, Homo sapiens
  siRNA target sequence for NALP13 (NM_176810.1,1313-1331).
cgaaggtgaggtattacga

SEQ ID NO: 258902 - DNA, 19 bp, Homo sapiens
  siRNA target sequence for NALP13 (NM_176810.1,1329-1347).
cgatctccagtcaatcact

SEQ ID NO: 258903 - DNA, 19 bp, Homo sapiens
  siRNA target sequence for NALP13 (NM_176810.1,1350-1368).
gactaccaccagtctgtat

SEQ ID NO: 258904 - DNA, 19 bp, Homo sapiens
  siRNA target sequence for NALP13 (NM_176810.1,1358-1376).
ccagtctgtatgcctattt

SEQ ID NO: 258905 - DNA, 19 bp, Homo sapiens
  siRNA target sequence for NALP13 (NM_176810.1,1359-1377).
cagtctgtatgcctatttt

SEQ ID NO: 258906 - DNA, 19 bp, Homo sapiens
  siRNA target sequence for NALP13 (NM_176810.1,1394-1412).
ccacagcagaggtagattt

SEQ ID NO: 258907 - DNA, 19 bp, Homo sapiens
  siRNA target sequence for NALP13 (NM_176810.1,1465-1483).
gaagggctgtggtctatga

SEQ ID NO: 258908 - DNA, 19 bp, Homo sapiens
  siRNA target sequence for NALP13 (NM_176810.1,1468-1486).
gggctgtggtctatgaact

SEQ ID NO: 258909 - DNA, 19 bp, Homo sapiens
  siRNA target sequence for NALP13 (NM_176810.1,1469-1487).
ggctgtggtctatgaactt

SEQ ID NO: 258910 - DNA, 19 bp, Homo sapiens
  siRNA target sequence for NALP13 (NM_176810.1,1524-1542).
ggaagtgcctttcattgat

SEQ ID NO: 258911 - DNA, 19 bp, Homo sapiens
  siRNA target sequence for NALP13 (NM_176810.1,1548-1566).
ctacgagttcaatattctt

SEQ ID NO: 258912 - DNA, 19 bp, Homo sapiens
  siRNA target sequence for NALP13 (NM_176810.1,1551-1569).
cgagttcaatattcttcaa

SEQ ID NO: 258913 - DNA, 19 bp, Homo sapiens
  siRNA target sequence for NALP13 (NM_176810.1,1552-1570).
gagttcaatattcttcaaa

SEQ ID NO: 258914 - DNA, 19 bp, Homo sapiens
  siRNA target sequence for NALP13 (NM_176810.1,1583-1601).
gtgggggttgcactacttt

SEQ ID NO: 258915 - DNA, 19 bp, Homo sapiens
  siRNA target sequence for NALP13 (NM_176810.1,1585-1603).
gggggttgcactactttca

SEQ ID NO: 258916 - DNA, 19 bp, Homo sapiens
  siRNA target sequence for NALP13 (NM_176810.1,1742-1760).
ggactccagtggttctgtt

SEQ ID NO: 258917 - DNA, 19 bp, Homo sapiens
  siRNA target sequence for NALP13 (NM_176810.1,1833-1851).
ggtaatggaggaattatta

SEQ ID NO: 258918 - DNA, 19 bp, Homo sapiens
  siRNA target sequence for NALP13 (NM_176810.1,1886-1904).
cctctctccaatttcacat

SEQ ID NO: 258919 - DNA, 19 bp, Homo sapiens
  siRNA target sequence for NALP13 (NM_176810.1,1889-1907).
ctctccaatttcacattct

SEQ ID NO: 258920 - DNA, 19 bp, Homo sapiens
  siRNA target sequence for NALP13 (NM_176810.1,1959-1977).
gatgttgggtcgtatcttt

SEQ ID NO: 258921 - DNA, 19 bp, Homo sapiens
  siRNA target sequence for NALP13 (NM_176810.1,1965-1983).
gggtcgtatctttgaagtt

SEQ ID NO: 258922 - DNA, 19 bp, Homo sapiens
  siRNA target sequence for NALP13 (NM_176810.1,1967-1985).
gtcgtatctttgaagttga

SEQ ID NO: 258923 - DNA, 19 bp, Homo sapiens
  siRNA target sequence for NALP13 (NM_176810.1,2042-2060).
gtaaaaggttaaataagct

SEQ ID NO: 258924 - DNA, 19 bp, Homo sapiens
  siRNA target sequence for NALP13 (NM_176810.1,2109-2127).
ggagacaagcaagtttgat

SEQ ID NO: 258925 - DNA, 19 bp, Homo sapiens
  siRNA target sequence for NALP13 (NM_176810.1,2140-2158).
gcatggaacagcatttgct

SEQ ID NO: 258926 - DNA, 19 bp, Homo sapiens
  siRNA target sequence for NALP13 (NM_176810.1,2156-2174).
gctctacgttggtcacaaa

SEQ ID NO: 258927 - DNA, 19 bp, Homo sapiens
  siRNA target sequence for NALP13 (NM_176810.1,2157-2175).
ctctacgttggtcacaaat

SEQ ID NO: 258928 - DNA, 19 bp, Homo sapiens
  siRNA target sequence for NALP13 (NM_176810.1,2159-2177).
ctacgttggtcacaaatga

SEQ ID NO: 258929 - DNA, 19 bp, Homo sapiens
  siRNA target sequence for NALP13 (NM_176810.1,2196-2214).
cctgagtaacagcaaactt

SEQ ID NO: 258930 - DNA, 19 bp, Homo sapiens
  siRNA target sequence for NALP13 (NM_176810.1,2261-2279).
gatgcaaagtccagaaact

SEQ ID NO: 258931 - DNA, 19 bp, Homo sapiens
  siRNA target sequence for NALP13 (NM_176810.1,2394-2412).
ccccctgattcttaaagct

SEQ ID NO: 258932 - DNA, 19 bp, Homo sapiens
  siRNA target sequence for NALP13 (NM_176810.1,2426-2444).
cttgcaacctcaagtatct

SEQ ID NO: 258933 - DNA, 19 bp, Homo sapiens
  siRNA target sequence for NALP13 (NM_176810.1,2524-2542).
cgattgtgcctgggattta

SEQ ID NO: 258934 - DNA, 19 bp, Homo sapiens
  siRNA target sequence for NALP13 (NM_176810.1,2525-2543).
gattgtgcctgggatttaa

SEQ ID NO: 258935 - DNA, 19 bp, Homo sapiens
  siRNA target sequence for NALP13 (NM_176810.1,2557-2575).
gatggcataaagctattgt

SEQ ID NO: 258936 - DNA, 19 bp, Homo sapiens
  siRNA target sequence for NALP13 (NM_176810.1,2593-2611).
cccaagtgtgccttagaga

SEQ ID NO: 258937 - DNA, 19 bp, Homo sapiens
  siRNA target sequence for NALP13 (NM_176810.1,2793-2811).
gtcaggttgttctttcaca

SEQ ID NO: 258938 - DNA, 19 bp, Homo sapiens
  siRNA target sequence for NALP13 (NM_176810.1,2839-2857).
gccctcagccataatcata

SEQ ID NO: 258939 - DNA, 19 bp, Homo sapiens
  siRNA target sequence for NALP13 (NM_176810.1,2953-2971).
cttgggttggcgaaatgca

SEQ ID NO: 258940 - DNA, 19 bp, Homo sapiens
  siRNA target sequence for NALP13 (NM_176810.1,3046-3064).
ctaggcaatgaattggata

SEQ ID NO: 258941 - DNA, 19 bp, Homo sapiens
  siRNA target sequence for NALP13 (NM_176810.1,3050-3068).
gcaatgaattggatactga

SEQ ID NO: 258942 - DNA, 19 bp, Homo sapiens
  siRNA target sequence for NALP13 (NM_176810.1,3067-3085).
gatggtgtcaagatgctat

SEQ ID NO: 258943 - DNA, 19 bp, Homo sapiens
  siRNA target sequence for PTD015 (NM_024684.2,101-119).
gacttcccctgaaattgct

SEQ ID NO: 258944 - DNA, 19 bp, Homo sapiens
  siRNA target sequence for PTD015 (NM_024684.2,144-162).
gtaaaaggctctaatacaa

SEQ ID NO: 258945 - DNA, 19 bp, Homo sapiens
  siRNA target sequence for PTD015 (NM_024684.2,150-168).
ggctctaatacaacctata

SEQ ID NO: 258946 - DNA, 19 bp, Homo sapiens
  siRNA target sequence for PTD015 (NM_024684.2,151-169).
gctctaatacaacctataa

SEQ ID NO: 258947 - DNA, 19 bp, Homo sapiens
  siRNA target sequence for PTD015 (NM_024684.2,154-172).
ctaatacaacctataagga

SEQ ID NO: 258948 - DNA, 19 bp, Homo sapiens
  siRNA target sequence for PTD015 (NM_024684.2,164-182).
ctataaggactgcaaagta

SEQ ID NO: 258949 - DNA, 19 bp, Homo sapiens
  siRNA target sequence for PTD015 (NM_024684.2,393-411).
caggcagtgaaggagtata

SEQ ID NO: 258950 - DNA, 19 bp, Homo sapiens
  siRNA target sequence for PTD015 (NM_024684.2,395-413).
ggcagtgaaggagtataat

SEQ ID NO: 258951 - DNA, 19 bp, Homo sapiens
  siRNA target sequence for PTD015 (NM_024684.2,438-456).
gtgggaggtgtcttccatt

SEQ ID NO: 258952 - DNA, 19 bp, Homo sapiens
  siRNA target sequence for SLC2A1 (NM_006516.1,422-440).
ctctgtgggccttttcgtt

SEQ ID NO: 258953 - DNA, 19 bp, Homo sapiens
  siRNA target sequence for SLC2A1 (NM_006516.1,424-442).
ctgtgggccttttcgttaa

SEQ ID NO: 258954 - DNA, 19 bp, Homo sapiens
  siRNA target sequence for SLC2A1 (NM_006516.1,592-610).
gcttcgtgcccatgtatgt

SEQ ID NO: 258955 - DNA, 19 bp, Homo sapiens
  siRNA target sequence for SLC2A1 (NM_006516.1,1141-1159).
ctgtcgtgtcgctgtttgt

SEQ ID NO: 258956 - DNA, 19 bp, Homo sapiens
  siRNA target sequence for SLC2A1 (NM_006516.1,1213-1231).
cgggttgtgccatactcat

SEQ ID NO: 258957 - DNA, 19 bp, Homo sapiens
  siRNA target sequence for SLC2A1 (NM_006516.1,1280-1298).
gagcatcgtggccatcttt

SEQ ID NO: 258958 - DNA, 19 bp, Homo sapiens
  siRNA target sequence for SLC2A1 (NM_006516.1,1465-1483).
gtggtccctacgtcttcat

SEQ ID NO: 258959 - DNA, 19 bp, Homo sapiens
  siRNA target sequence for SLC2A1 (NM_006516.1,1467-1485).
ggtccctacgtcttcatca

SEQ ID NO: 258960 - DNA, 19 bp, Homo sapiens
  siRNA target sequence for SLC2A1 (NM_006516.1,1468-1486).
gtccctacgtcttcatcat

SEQ ID NO: 258961 - DNA, 19 bp, Homo sapiens
  siRNA target sequence for SLC2A1 (NM_006516.1,1500-1518).
ctggttctgttcttcatct

SEQ ID NO: 258962 - DNA, 19 bp, Homo sapiens
  siRNA target sequence for SLC2A1 (NM_006516.1,1549-1567).
gccggaccttcgatgagat

SEQ ID NO: 258963 - DNA, 19 bp, Homo sapiens
  siRNA target sequence for SLC2A10 (NM_030777.3,150-168).
gtggcctgacctttggtta

SEQ ID NO: 258964 - DNA, 19 bp, Homo sapiens
  siRNA target sequence for SLC2A10 (NM_030777.3,153-171).
gcctgacctttggttatga

SEQ ID NO: 258965 - DNA, 19 bp, Homo sapiens
  siRNA target sequence for SLC2A10 (NM_030777.3,199-217).
gccactgcagcttgacttt

SEQ ID NO: 258966 - DNA, 19 bp, Homo sapiens
  siRNA target sequence for SLC2A10 (NM_030777.3,444-462).
ccatggcttgctgtatcta

SEQ ID NO: 258967 - DNA, 19 bp, Homo sapiens
  siRNA target sequence for SLC2A10 (NM_030777.3,544-562).
ctcctatgccctcaactat

SEQ ID NO: 258968 - DNA, 19 bp, Homo sapiens
  siRNA target sequence for SLC2A10 (NM_030777.3,812-830).
gtgctcttccagcaactaa

SEQ ID NO: 258969 - DNA, 19 bp, Homo sapiens
  siRNA target sequence for SLC2A10 (NM_030777.3,871-889).
cagctccgttggtttccat

SEQ ID NO: 258970 - DNA, 19 bp, Homo sapiens
  siRNA target sequence for SLC2A10 (NM_030777.3,1561-1579).
cggcctgggcttcatctat

SEQ ID NO: 258971 - DNA, 19 bp, Homo sapiens
  siRNA target sequence for SLC2A10 (NM_030777.3,1562-1580).
ggcctgggcttcatctatt

SEQ ID NO: 258972 - DNA, 19 bp, Homo sapiens
  siRNA target sequence for SLC2A10 (NM_030777.3,1564-1582).
cctgggcttcatctattta

SEQ ID NO: 258973 - DNA, 19 bp, Homo sapiens
  siRNA target sequence for SLC2A10 (NM_030777.3,1565-1583).
ctgggcttcatctatttat

SEQ ID NO: 258974 - DNA, 19 bp, Homo sapiens
  siRNA target sequence for SLC2A10 (NM_030777.3,1603-1621).
ccagtcgttggcagagata

SEQ ID NO: 258975 - DNA, 19 bp, Homo sapiens
  siRNA target sequence for SLC2A11 (NM_030807.2,218-236).
ggcctcggacgcagattca

SEQ ID NO: 258976 - DNA, 19 bp, Homo sapiens
  siRNA target sequence for SLC2A11 (NM_030807.2,320-338).
ccccgaccttgcacattca

SEQ ID NO: 258977 - DNA, 19 bp, Homo sapiens
  siRNA target sequence for SLC2A11 (NM_030807.2,414-432).
cctcatcgtgtctctgtat

SEQ ID NO: 258978 - DNA, 19 bp, Homo sapiens
  siRNA target sequence for SLC2A11 (NM_030807.2,563-581).
caggctcctttgagatgat

SEQ ID NO: 258979 - DNA, 19 bp, Homo sapiens
  siRNA target sequence for SLC2A11 (NM_030807.2,1063-1081).
gagctctgcgggaatgact

SEQ ID NO: 258980 - DNA, 19 bp, Homo sapiens
  siRNA target sequence for SLC2A11 (NM_030807.2,1174-1192).
ctgctcacggcggttgtta

SEQ ID NO: 258981 - DNA, 19 bp, Homo sapiens
  siRNA target sequence for SLC2A11 (NM_030807.2,1176-1194).
gctcacggcggttgttagt

SEQ ID NO: 258982 - DNA, 19 bp, Homo sapiens
  siRNA target sequence for SLC2A11 (NM_030807.2,1177-1195).
ctcacggcggttgttagtt

SEQ ID NO: 258983 - DNA, 19 bp, Homo sapiens
  siRNA target sequence for SLC2A11 (NM_030807.2,1179-1197).
cacggcggttgttagttgt

SEQ ID NO: 258984 - DNA, 19 bp, Homo sapiens
  siRNA target sequence for SLC2A11 (NM_030807.2,1546-1564).
gtctgtggggccatctaca

SEQ ID NO: 258985 - DNA, 19 bp, Homo sapiens
  siRNA target sequence for SLC2A11 (NM_030807.2,1592-1610).
gcaagaccttccaagagat

SEQ ID NO: 258986 - DNA, 19 bp, Homo sapiens
  siRNA target sequence for SLC2A11 (NM_030807.2,1664-1682).
ggaggagcctggaggttat

SEQ ID NO: 258987 - DNA, 19 bp, Homo sapiens
  siRNA target sequence for SLC2A11 (NM_030807.2,1677-1695).
ggttatccagtcaacagaa

SEQ ID NO: 258988 - DNA, 19 bp, Homo sapiens
  siRNA target sequence for SLC2A12 (NM_145176.1,237-255).
gctgcggcatgtttacctt

SEQ ID NO: 258989 - DNA, 19 bp, Homo sapiens
  siRNA target sequence for SLC2A12 (NM_145176.1,289-307).
cctggtgggttatgaactt

SEQ ID NO: 258990 - DNA, 19 bp, Homo sapiens
  siRNA target sequence for SLC2A12 (NM_145176.1,321-339).
gggctcttcttcagatcaa

SEQ ID NO: 258991 - DNA, 19 bp, Homo sapiens
  siRNA target sequence for SLC2A12 (NM_145176.1,322-340).
ggctcttcttcagatcaaa

SEQ ID NO: 258992 - DNA, 19 bp, Homo sapiens
  siRNA target sequence for SLC2A12 (NM_145176.1,420-438).
ccggaggggtcctgataga

SEQ ID NO: 258993 - DNA, 19 bp, Homo sapiens
  siRNA target sequence for SLC2A12 (NM_145176.1,422-440).
ggaggggtcctgatagaca

SEQ ID NO: 258994 - DNA, 19 bp, Homo sapiens
  siRNA target sequence for SLC2A12 (NM_145176.1,427-445).
ggtcctgatagacagatat

SEQ ID NO: 258995 - DNA, 19 bp, Homo sapiens
  siRNA target sequence for SLC2A12 (NM_145176.1,481-499).
gcttggactcggaagctta

SEQ ID NO: 258996 - DNA, 19 bp, Homo sapiens
  siRNA target sequence for SLC2A12 (NM_145176.1,486-504).
gactcggaagcttagtctt

SEQ ID NO: 258997 - DNA, 19 bp, Homo sapiens
  siRNA target sequence for SLC2A12 (NM_145176.1,519-537).
cctacacggttcttatagt

SEQ ID NO: 258998 - DNA, 19 bp, Homo sapiens
  siRNA target sequence for SLC2A12 (NM_145176.1,628-646).
ccttcttgtgtcactgaat

SEQ ID NO: 258999 - DNA, 19 bp, Homo sapiens
  siRNA target sequence for SLC2A12 (NM_145176.1,655-673).
gattgtcatcggcattctt

SEQ ID NO: 259000 - DNA, 19 bp, Homo sapiens
  siRNA target sequence for SLC2A12 (NM_145176.1,666-684).
gcattctttctgcctatat

SEQ ID NO: 259001 - DNA, 19 bp, Homo sapiens
  siRNA target sequence for SLC2A12 (NM_145176.1,667-685).
cattctttctgcctatatt

SEQ ID NO: 259002 - DNA, 19 bp, Homo sapiens
  siRNA target sequence for SLC2A12 (NM_145176.1,713-731).
catggctggaagtacatgt

SEQ ID NO: 259003 - DNA, 19 bp, Homo sapiens
  siRNA target sequence for SLC2A12 (NM_145176.1,761-779).
caagcaattgcaatgtatt

SEQ ID NO: 259004 - DNA, 19 bp, Homo sapiens
  siRNA target sequence for SLC2A12 (NM_145176.1,835-853).
caaggttcttggaaggtta

SEQ ID NO: 259005 - DNA, 19 bp, Homo sapiens
  siRNA target sequence for SLC2A12 (NM_145176.1,838-856).
ggttcttggaaggttaaga

SEQ ID NO: 259006 - DNA, 19 bp, Homo sapiens
  siRNA target sequence for SLC2A12 (NM_145176.1,877-895).
ggaactcactgtgatcaaa

SEQ ID NO: 259007 - DNA, 19 bp, Homo sapiens
  siRNA target sequence for SLC2A12 (NM_145176.1,930-948).
gggatctgtttcgttcaaa

SEQ ID NO: 259008 - DNA, 19 bp, Homo sapiens
  siRNA target sequence for SLC2A12 (NM_145176.1,931-949).
ggatctgtttcgttcaaaa

SEQ ID NO: 259009 - DNA, 19 bp, Homo sapiens
  siRNA target sequence for SLC2A12 (NM_145176.1,935-953).
ctgtttcgttcaaaagaca

SEQ ID NO: 259010 - DNA, 19 bp, Homo sapiens
  siRNA target sequence for SLC2A12 (NM_145176.1,958-976).
gcggacccgaataatgata

SEQ ID NO: 259011 - DNA, 19 bp, Homo sapiens
  siRNA target sequence for SLC2A12 (NM_145176.1,973-991).
gataggactaacactagta

SEQ ID NO: 259012 - DNA, 19 bp, Homo sapiens
  siRNA target sequence for SLC2A12 (NM_145176.1,977-995).
ggactaacactagtatttt

SEQ ID NO: 259013 - DNA, 19 bp, Homo sapiens
  siRNA target sequence for SLC2A12 (NM_145176.1,1010-1028).
ggccaaccaaacatattgt

SEQ ID NO: 259014 - DNA, 19 bp, Homo sapiens
  siRNA target sequence for SLC2A12 (NM_145176.1,1011-1029).
gccaaccaaacatattgtt

SEQ ID NO: 259015 - DNA, 19 bp, Homo sapiens
  siRNA target sequence for SLC2A12 (NM_145176.1,1013-1031).
caaccaaacatattgttct

SEQ ID NO: 259016 - DNA, 19 bp, Homo sapiens
  siRNA target sequence for SLC2A12 (NM_145176.1,1027-1045).
gttctatgcatcaactgtt

SEQ ID NO: 259017 - DNA, 19 bp, Homo sapiens
  siRNA target sequence for SLC2A12 (NM_145176.1,1034-1052).
gcatcaactgttttgaagt

SEQ ID NO: 259018 - DNA, 19 bp, Homo sapiens
  siRNA target sequence for SLC2A12 (NM_145176.1,1103-1121).
ggagtcgtcaaggtcatta

SEQ ID NO: 259019 - DNA, 19 bp, Homo sapiens
  siRNA target sequence for SLC2A12 (NM_145176.1,1150-1168).
ccatgtcggcagcaaaaca

SEQ ID NO: 259020 - DNA, 19 bp, Homo sapiens
  siRNA target sequence for SLC2A12 (NM_145176.1,1151-1169).
catgtcggcagcaaaacat

SEQ ID NO: 259021 - DNA, 19 bp, Homo sapiens
  siRNA target sequence for SLC2A12 (NM_145176.1,1210-1228).
gaccatgggcatcgtaaat

SEQ ID NO: 259022 - DNA, 19 bp, Homo sapiens
  siRNA target sequence for SLC2A12 (NM_145176.1,1212-1230).
ccatgggcatcgtaaatct

SEQ ID NO: 259023 - DNA, 19 bp, Homo sapiens
  siRNA target sequence for SLC2A12 (NM_145176.1,1229-1247).
ctcaacatccacatgaact

SEQ ID NO: 259024 - DNA, 19 bp, Homo sapiens
  siRNA target sequence for SLC2A12 (NM_145176.1,1260-1278).
gcagaagccacaattctat

SEQ ID NO: 259025 - DNA, 19 bp, Homo sapiens
  siRNA target sequence for SLC2A12 (NM_145176.1,1263-1281).
gaagccacaattctatcaa

SEQ ID NO: 259026 - DNA, 19 bp, Homo sapiens
  siRNA target sequence for SLC2A12 (NM_145176.1,1321-1339).
cctgtcaaccaacaacaat

SEQ ID NO: 259027 - DNA, 19 bp, Homo sapiens
  siRNA target sequence for SLC2A12 (NM_145176.1,1322-1340).
ctgtcaaccaacaacaata

SEQ ID NO: 259028 - DNA, 19 bp, Homo sapiens
  siRNA target sequence for SLC2A12 (NM_145176.1,1431-1449).
cctcagcatccttgctaaa

SEQ ID NO: 259029 - DNA, 19 bp, Homo sapiens
  siRNA target sequence for SLC2A12 (NM_145176.1,1493-1511).
ggggacgtcccagcttttt

SEQ ID NO: 259030 - DNA, 19 bp, Homo sapiens
  siRNA target sequence for SLC2A12 (NM_145176.1,1496-1514).
gacgtcccagcttttttga

SEQ ID NO: 259031 - DNA, 19 bp, Homo sapiens
  siRNA target sequence for SLC2A12 (NM_145176.1,1588-1606).
ggtgctcagcgagatcttt

SEQ ID NO: 259032 - DNA, 19 bp, Homo sapiens
  siRNA target sequence for SLC2A12 (NM_145176.1,1622-1640).
ggacgagccatggctttaa

SEQ ID NO: 259033 - DNA, 19 bp, Homo sapiens
  siRNA target sequence for SLC2A12 (NM_145176.1,1625-1643).
cgagccatggctttaactt

SEQ ID NO: 259034 - DNA, 19 bp, Homo sapiens
  siRNA target sequence for SLC2A12 (NM_145176.1,1628-1646).
gccatggctttaacttcta

SEQ ID NO: 259035 - DNA, 19 bp, Homo sapiens
  siRNA target sequence for SLC2A12 (NM_145176.1,1670-1688).
ctcatctcgctgacatttt

SEQ ID NO: 259036 - DNA, 19 bp, Homo sapiens
  siRNA target sequence for SLC2A12 (NM_145176.1,1683-1701).
catttttgactgtaactga

SEQ ID NO: 259037 - DNA, 19 bp, Homo sapiens
  siRNA target sequence for SLC2A12 (NM_145176.1,1714-1732).
gccatgggtgtgctttata

SEQ ID NO: 259038 - DNA, 19 bp, Homo sapiens
  siRNA target sequence for SLC2A12 (NM_145176.1,1715-1733).
ccatgggtgtgctttatat

SEQ ID NO: 259039 - DNA, 19 bp, Homo sapiens
  siRNA target sequence for SLC2A12 (NM_145176.1,1720-1738).
ggtgtgctttatatataca

SEQ ID NO: 259040 - DNA, 19 bp, Homo sapiens
  siRNA target sequence for SLC2A12 (NM_145176.1,1822-1840).
gctagcaaaagtgaactat

SEQ ID NO: 259041 - DNA, 19 bp, Homo sapiens
  siRNA target sequence for SLC2A12 (NM_145176.1,1826-1844).
gcaaaagtgaactatgtga

SEQ ID NO: 259042 - DNA, 19 bp, Homo sapiens
  siRNA target sequence for SLC2A13 (NM_052885.1,598-616).
ctcggcatcggcattgctt

SEQ ID NO: 259043 - DNA, 19 bp, Homo sapiens
  siRNA target sequence for SLC2A13 (NM_052885.1,602-620).
gcatcggcattgcttctat

SEQ ID NO: 259044 - DNA, 19 bp, Homo sapiens
  siRNA target sequence for SLC2A13 (NM_052885.1,606-624).
cggcattgcttctatgaca

SEQ ID NO: 259045 - DNA, 19 bp, Homo sapiens
  siRNA target sequence for SLC2A13 (NM_052885.1,646-664).
gtctcaccacccaatttaa

SEQ ID NO: 259046 - DNA, 19 bp, Homo sapiens
  siRNA target sequence for SLC2A13 (NM_052885.1,667-685).
ggccgattagtcaccatta

SEQ ID NO: 259047 - DNA, 19 bp, Homo sapiens
  siRNA target sequence for SLC2A13 (NM_052885.1,668-686).
gccgattagtcaccattaa

SEQ ID NO: 259048 - DNA, 19 bp, Homo sapiens
  siRNA target sequence for SLC2A13 (NM_052885.1,669-687).
ccgattagtcaccattaat

SEQ ID NO: 259049 - DNA, 19 bp, Homo sapiens
  siRNA target sequence for SLC2A13 (NM_052885.1,670-688).
cgattagtcaccattaata

SEQ ID NO: 259050 - DNA, 19 bp, Homo sapiens
  siRNA target sequence for SLC2A13 (NM_052885.1,699-717).
cacaggagggcagttcttt

SEQ ID NO: 259051 - DNA, 19 bp, Homo sapiens
  siRNA target sequence for SLC2A13 (NM_052885.1,836-854).
gccctcgatggcttattca

SEQ ID NO: 259052 - DNA, 19 bp, Homo sapiens
  siRNA target sequence for SLC2A13 (NM_052885.1,866-884).
ctcagaaggcccgtagaat

SEQ ID NO: 259053 - DNA, 19 bp, Homo sapiens
  siRNA target sequence for SLC2A13 (NM_052885.1,868-886).
cagaaggcccgtagaattt

SEQ ID NO: 259054 - DNA, 19 bp, Homo sapiens
  siRNA target sequence for SLC2A13 (NM_052885.1,870-888).
gaaggcccgtagaatttta

SEQ ID NO: 259055 - DNA, 19 bp, Homo sapiens
  siRNA target sequence for SLC2A13 (NM_052885.1,873-891).
ggcccgtagaattttatct

SEQ ID NO: 259056 - DNA, 19 bp, Homo sapiens
  siRNA target sequence for SLC2A13 (NM_052885.1,875-893).
cccgtagaattttatctca

SEQ ID NO: 259057 - DNA, 19 bp, Homo sapiens
  siRNA target sequence for SLC2A13 (NM_052885.1,909-927).
gaccattgatgaggaatat

SEQ ID NO: 259058 - DNA, 19 bp, Homo sapiens
  siRNA target sequence for SLC2A13 (NM_052885.1,932-950).
gcatcaaaaacaacattga

SEQ ID NO: 259059 - DNA, 19 bp, Homo sapiens
  siRNA target sequence for SLC2A13 (NM_052885.1,1012-1030).
ccaactcgccgagctttaa

SEQ ID NO: 259060 - DNA, 19 bp, Homo sapiens
  siRNA target sequence for SLC2A13 (NM_052885.1,1013-1031).
caactcgccgagctttaat

SEQ ID NO: 259061 - DNA, 19 bp, Homo sapiens
  siRNA target sequence for SLC2A13 (NM_052885.1,1016-1034).
ctcgccgagctttaattgt

SEQ ID NO: 259062 - DNA, 19 bp, Homo sapiens
  siRNA target sequence for SLC2A13 (NM_052885.1,1037-1055).
gttgtggcctacaaatgtt

SEQ ID NO: 259063 - DNA, 19 bp, Homo sapiens
  siRNA target sequence for SLC2A13 (NM_052885.1,1070-1088).
gcattaacaccatcatgta

SEQ ID NO: 259064 - DNA, 19 bp, Homo sapiens
  siRNA target sequence for SLC2A13 (NM_052885.1,1086-1104).
gtactacagtgcaaccatt

SEQ ID NO: 259065 - DNA, 19 bp, Homo sapiens
  siRNA target sequence for SLC2A13 (NM_052885.1,1118-1136).
gtgttgaagatgatagact

SEQ ID NO: 259066 - DNA, 19 bp, Homo sapiens
  siRNA target sequence for SLC2A13 (NM_052885.1,1218-1236).
ccgcagaaagcttaccttt

SEQ ID NO: 259067 - DNA, 19 bp, Homo sapiens
  siRNA target sequence for SLC2A13 (NM_052885.1,1227-1245).
gcttacctttggtagttta

SEQ ID NO: 259068 - DNA, 19 bp, Homo sapiens
  siRNA target sequence for SLC2A13 (NM_052885.1,1253-1271).
ccaccgtagcactcattat

SEQ ID NO: 259069 - DNA, 19 bp, Homo sapiens
  siRNA target sequence for SLC2A13 (NM_052885.1,1254-1272).
caccgtagcactcattatt

SEQ ID NO: 259070 - DNA, 19 bp, Homo sapiens
  siRNA target sequence for SLC2A13 (NM_052885.1,1256-1274).
ccgtagcactcattattct

SEQ ID NO: 259071 - DNA, 19 bp, Homo sapiens
  siRNA target sequence for SLC2A13 (NM_052885.1,1257-1275).
cgtagcactcattattctt

SEQ ID NO: 259072 - DNA, 19 bp, Homo sapiens
  siRNA target sequence for SLC2A13 (NM_052885.1,1303-1321).
gtttccccacgcatcactt

SEQ ID NO: 259073 - DNA, 19 bp, Homo sapiens
  siRNA target sequence for SLC2A13 (NM_052885.1,1307-1325).
ccccacgcatcacttttaa

SEQ ID NO: 259074 - DNA, 19 bp, Homo sapiens
  siRNA target sequence for SLC2A13 (NM_052885.1,1317-1335).
cacttttaagccaatagct

SEQ ID NO: 259075 - DNA, 19 bp, Homo sapiens
  siRNA target sequence for SLC2A13 (NM_052885.1,1351-1369).
gccacttgcacaagataca

SEQ ID NO: 259076 - DNA, 19 bp, Homo sapiens
  siRNA target sequence for SLC2A13 (NM_052885.1,1353-1371).
cacttgcacaagatacagt

SEQ ID NO: 259077 - DNA, 19 bp, Homo sapiens
  siRNA target sequence for SLC2A13 (NM_052885.1,1355-1373).
cttgcacaagatacagtta

SEQ ID NO: 259078 - DNA, 19 bp, Homo sapiens
  siRNA target sequence for SLC2A13 (NM_052885.1,1446-1464).
ctcctgtgttccagttaat

SEQ ID NO: 259079 - DNA, 19 bp, Homo sapiens
  siRNA target sequence for SLC2A13 (NM_052885.1,1453-1471).
gttccagttaataaagcat

SEQ ID NO: 259080 - DNA, 19 bp, Homo sapiens
  siRNA target sequence for SLC2A13 (NM_052885.1,1488-1506).
ctggggcaggtgtgaaaat

SEQ ID NO: 259081 - DNA, 19 bp, Homo sapiens
  siRNA target sequence for SLC2A13 (NM_052885.1,1634-1652).
cttggactgtgaattctga

SEQ ID NO: 259082 - DNA, 19 bp, Homo sapiens
  siRNA target sequence for SLC2A13 (NM_052885.1,1638-1656).
gactgtgaattctgaaata

SEQ ID NO: 259083 - DNA, 19 bp, Homo sapiens
  siRNA target sequence for SLC2A13 (NM_052885.1,1660-1678).
cccctttgggcaagaagta

SEQ ID NO: 259084 - DNA, 19 bp, Homo sapiens
  siRNA target sequence for SLC2A13 (NM_052885.1,1716-1734).
caatgtcctggtttcacta

SEQ ID NO: 259085 - DNA, 19 bp, Homo sapiens
  siRNA target sequence for SLC2A13 (NM_052885.1,1720-1738).
gtcctggtttcactaacat

SEQ ID NO: 259086 - DNA, 19 bp, Homo sapiens
  siRNA target sequence for SLC2A13 (NM_052885.1,1746-1764).
cacagcagagtatcttaca

SEQ ID NO: 259087 - DNA, 19 bp, Homo sapiens
  siRNA target sequence for SLC2A13 (NM_052885.1,1748-1766).
cagcagagtatcttacata

SEQ ID NO: 259088 - DNA, 19 bp, Homo sapiens
  siRNA target sequence for SLC2A13 (NM_052885.1,1750-1768).
gcagagtatcttacatact

SEQ ID NO: 259089 - DNA, 19 bp, Homo sapiens
  siRNA target sequence for SLC2A13 (NM_052885.1,1782-1800).
cctctatgctggatttgct

SEQ ID NO: 259090 - DNA, 19 bp, Homo sapiens
  siRNA target sequence for SLC2A13 (NM_052885.1,1802-1820).
ctgtgggactccttttcat

SEQ ID NO: 259091 - DNA, 19 bp, Homo sapiens
  siRNA target sequence for SLC2A13 (NM_052885.1,1804-1822).
gtgggactccttttcatct

SEQ ID NO: 259092 - DNA, 19 bp, Homo sapiens
  siRNA target sequence for SLC2A13 (NM_052885.1,1806-1824).
gggactccttttcatctat

SEQ ID NO: 259093 - DNA, 19 bp, Homo sapiens
  siRNA target sequence for SLC2A13 (NM_052885.1,1879-1897).
gacaacaggctatgtacat

SEQ ID NO: 259094 - DNA, 19 bp, Homo sapiens
  siRNA target sequence for SLC2A13 (NM_052885.1,1921-1939).
gggagatatattgaatata

SEQ ID NO: 259095 - DNA, 19 bp, Homo sapiens
  siRNA target sequence for SLC2A13 (NM_052885.1,1922-1940).
ggagatatattgaatatat

SEQ ID NO: 259096 - DNA, 19 bp, Homo sapiens
  siRNA target sequence for SLC2A13 (NM_052885.1,1942-1960).
cgggtaaagggaagtaact

SEQ ID NO: 259097 - DNA, 19 bp, Homo sapiens
  siRNA target sequence for SLC2A13 (NM_052885.1,1943-1961).
gggtaaagggaagtaacta

SEQ ID NO: 259098 - DNA, 19 bp, Homo sapiens
  siRNA target sequence for SLC2A13 (NM_052885.1,1944-1962).
ggtaaagggaagtaactat

SEQ ID NO: 259099 - DNA, 19 bp, Homo sapiens
  siRNA target sequence for SLC2A13 (NM_052885.1,1950-1968).
gggaagtaactatcatctt

SEQ ID NO: 259100 - DNA, 19 bp, Homo sapiens
  siRNA target sequence for SLC2A13 (NM_052885.1,1955-1973).
gtaactatcatctttctga

SEQ ID NO: 259101 - DNA, 19 bp, Homo sapiens
  siRNA target sequence for SLC2A2 (NM_000340.1,367-385).
ggttccttccagtttggat

SEQ ID NO: 259102 - DNA, 19 bp, Homo sapiens
  siRNA target sequence for SLC2A2 (NM_000340.1,368-386).
gttccttccagtttggata

SEQ ID NO: 259103 - DNA, 19 bp, Homo sapiens
  siRNA target sequence for SLC2A2 (NM_000340.1,463-481).
gaccgaaaagctatcaaca

SEQ ID NO: 259104 - DNA, 19 bp, Homo sapiens
  siRNA target sequence for SLC2A2 (NM_000340.1,466-484).
cgaaaagctatcaacaact

SEQ ID NO: 259105 - DNA, 19 bp, Homo sapiens
  siRNA target sequence for SLC2A2 (NM_000340.1,467-485).
gaaaagctatcaacaacta

SEQ ID NO: 259106 - DNA, 19 bp, Homo sapiens
  siRNA target sequence for SLC2A2 (NM_000340.1,473-491).
ctatcaacaactatgttat

SEQ ID NO: 259107 - DNA, 19 bp, Homo sapiens
  siRNA target sequence for SLC2A2 (NM_000340.1,510-528).
gcccacaatctcatactca

SEQ ID NO: 259108 - DNA, 19 bp, Homo sapiens
  siRNA target sequence for SLC2A2 (NM_000340.1,571-589).
gcagctgctcaactaatca

SEQ ID NO: 259109 - DNA, 19 bp, Homo sapiens
  siRNA target sequence for SLC2A2 (NM_000340.1,680-698).
gaatcaaagccatgttagt

SEQ ID NO: 259110 - DNA, 19 bp, Homo sapiens
  siRNA target sequence for SLC2A2 (NM_000340.1,750-768).
gggaccatctcatatactt

SEQ ID NO: 259111 - DNA, 19 bp, Homo sapiens
  siRNA target sequence for SLC2A2 (NM_000340.1,752-770).
gaccatctcatatacttat

SEQ ID NO: 259112 - DNA, 19 bp, Homo sapiens
  siRNA target sequence for SLC2A2 (NM_000340.1,782-800).
gaagcatatcaggactata

SEQ ID NO: 259113 - DNA, 19 bp, Homo sapiens
  siRNA target sequence for SLC2A2 (NM_000340.1,796-814).
ctatattgtgggctaattt

SEQ ID NO: 259114 - DNA, 19 bp, Homo sapiens
  siRNA target sequence for SLC2A2 (NM_000340.1,815-833).
caggcctggttcctatgta

SEQ ID NO: 259115 - DNA, 19 bp, Homo sapiens
  siRNA target sequence for SLC2A2 (NM_000340.1,831-849).
gtatatcggtgaaattgct

SEQ ID NO: 259116 - DNA, 19 bp, Homo sapiens
  siRNA target sequence for SLC2A2 (NM_000340.1,894-912).
catcgtcacgggcattctt

SEQ ID NO: 259117 - DNA, 19 bp, Homo sapiens
  siRNA target sequence for SLC2A2 (NM_000340.1,897-915).
cgtcacgggcattcttatt

SEQ ID NO: 259118 - DNA, 19 bp, Homo sapiens
  siRNA target sequence for SLC2A2 (NM_000340.1,900-918).
cacgggcattcttattagt

SEQ ID NO: 259119 - DNA, 19 bp, Homo sapiens
  siRNA target sequence for SLC2A2 (NM_000340.1,902-920).
cgggcattcttattagtca

SEQ ID NO: 259120 - DNA, 19 bp, Homo sapiens
  siRNA target sequence for SLC2A2 (NM_000340.1,906-924).
cattcttattagtcagatt

SEQ ID NO: 259121 - DNA, 19 bp, Homo sapiens
  siRNA target sequence for SLC2A2 (NM_000340.1,1034-1052).
gccccagatacctttacat

SEQ ID NO: 259122 - DNA, 19 bp, Homo sapiens
  siRNA target sequence for SLC2A2 (NM_000340.1,1036-1054).
cccagatacctttacatca

SEQ ID NO: 259123 - DNA, 19 bp, Homo sapiens
  siRNA target sequence for SLC2A2 (NM_000340.1,1037-1055).
ccagatacctttacatcaa

SEQ ID NO: 259124 - DNA, 19 bp, Homo sapiens
  siRNA target sequence for SLC2A2 (NM_000340.1,1040-1058).
gatacctttacatcaagtt

SEQ ID NO: 259125 - DNA, 19 bp, Homo sapiens
  siRNA target sequence for SLC2A2 (NM_000340.1,1044-1062).
cctttacatcaagttagat

SEQ ID NO: 259126 - DNA, 19 bp, Homo sapiens
  siRNA target sequence for SLC2A2 (NM_000340.1,1089-1107).
gaaaagactcagaggatat

SEQ ID NO: 259127 - DNA, 19 bp, Homo sapiens
  siRNA target sequence for SLC2A2 (NM_000340.1,1165-1183).
gagcagaaagtctctataa

SEQ ID NO: 259128 - DNA, 19 bp, Homo sapiens
  siRNA target sequence for SLC2A2 (NM_000340.1,1167-1185).
gcagaaagtctctataatt

SEQ ID NO: 259129 - DNA, 19 bp, Homo sapiens
  siRNA target sequence for SLC2A2 (NM_000340.1,1239-1257).
gcatgtggctcagcaattt

SEQ ID NO: 259130 - DNA, 19 bp, Homo sapiens
  siRNA target sequence for SLC2A2 (NM_000340.1,1240-1258).
catgtggctcagcaatttt

SEQ ID NO: 259131 - DNA, 19 bp, Homo sapiens
  siRNA target sequence for SLC2A2 (NM_000340.1,1270-1288).
ggcattttttactactcaa

SEQ ID NO: 259132 - DNA, 19 bp, Homo sapiens
  siRNA target sequence for SLC2A2 (NM_000340.1,1310-1328).
gtatcagcaaacctgttta

SEQ ID NO: 259133 - DNA, 19 bp, Homo sapiens
  siRNA target sequence for SLC2A2 (NM_000340.1,1339-1357).
ggagttggcgctgtaaaca

SEQ ID NO: 259134 - DNA, 19 bp, Homo sapiens
  siRNA target sequence for SLC2A2 (NM_000340.1,1340-1358).
gagttggcgctgtaaacat

SEQ ID NO: 259135 - DNA, 19 bp, Homo sapiens
  siRNA target sequence for SLC2A2 (NM_000340.1,1345-1363).
ggcgctgtaaacatggttt

SEQ ID NO: 259136 - DNA, 19 bp, Homo sapiens
  siRNA target sequence for SLC2A2 (NM_000340.1,1346-1364).
gcgctgtaaacatggtttt

SEQ ID NO: 259137 - DNA, 19 bp, Homo sapiens
  siRNA target sequence for SLC2A2 (NM_000340.1,1400-1418).
ggcgacgttctctctttct

SEQ ID NO: 259138 - DNA, 19 bp, Homo sapiens
  siRNA target sequence for SLC2A2 (NM_000340.1,1401-1419).
gcgacgttctctctttcta

SEQ ID NO: 259139 - DNA, 19 bp, Homo sapiens
  siRNA target sequence for SLC2A2 (NM_000340.1,1402-1420).
cgacgttctctctttctaa

SEQ ID NO: 259140 - DNA, 19 bp, Homo sapiens
  siRNA target sequence for SLC2A2 (NM_000340.1,1424-1442).
gaatgagtgggatgtttgt

SEQ ID NO: 259141 - DNA, 19 bp, Homo sapiens
  siRNA target sequence for SLC2A2 (NM_000340.1,1441-1459).
gtttgtgccatcttcatgt

SEQ ID NO: 259142 - DNA, 19 bp, Homo sapiens
  siRNA target sequence for SLC2A2 (NM_000340.1,1465-1483).
ggacttgtgctgctgaata

SEQ ID NO: 259143 - DNA, 19 bp, Homo sapiens
  siRNA target sequence for SLC2A2 (NM_000340.1,1466-1484).
gacttgtgctgctgaataa

SEQ ID NO: 259144 - DNA, 19 bp, Homo sapiens
  siRNA target sequence for SLC2A2 (NM_000340.1,1468-1486).
cttgtgctgctgaataagt

SEQ ID NO: 259145 - DNA, 19 bp, Homo sapiens
  siRNA target sequence for SLC2A2 (NM_000340.1,1474-1492).
ctgctgaataagttctctt

SEQ ID NO: 259146 - DNA, 19 bp, Homo sapiens
  siRNA target sequence for SLC2A2 (NM_000340.1,1624-1642).
gctgcattcagcaattgga

SEQ ID NO: 259147 - DNA, 19 bp, Homo sapiens
  siRNA target sequence for SLC2A2 (NM_000340.1,1634-1652).
gcaattggacctgcaattt

SEQ ID NO: 259148 - DNA, 19 bp, Homo sapiens
  siRNA target sequence for SLC2A2 (NM_000340.1,1689-1707).
ctgtggaccttatgtgttt

SEQ ID NO: 259149 - DNA, 19 bp, Homo sapiens
  siRNA target sequence for SLC2A2 (NM_000340.1,1691-1709).
gtggaccttatgtgttttt

SEQ ID NO: 259150 - DNA, 19 bp, Homo sapiens
  siRNA target sequence for SLC2A2 (NM_000340.1,1739-1757).
ccctgttcacattttttaa

SEQ ID NO: 259151 - DNA, 19 bp, Homo sapiens
  siRNA target sequence for SLC2A3 (NM_006931.1,339-357).
gctcctgagaagatcataa

SEQ ID NO: 259152 - DNA, 19 bp, Homo sapiens
  siRNA target sequence for SLC2A3 (NM_006931.1,343-361).
ctgagaagatcataaagga

SEQ ID NO: 259153 - DNA, 19 bp, Homo sapiens
  siRNA target sequence for SLC2A3 (NM_006931.1,353-371).
cataaaggaatttatcaat

SEQ ID NO: 259154 - DNA, 19 bp, Homo sapiens
  siRNA target sequence for SLC2A3 (NM_006931.1,462-480).
ggtatgatcggctcctttt

SEQ ID NO: 259155 - DNA, 19 bp, Homo sapiens
  siRNA target sequence for SLC2A3 (NM_006931.1,583-601).
ctaagtcggttgaaatgct

SEQ ID NO: 259156 - DNA, 19 bp, Homo sapiens
  siRNA target sequence for SLC2A3 (NM_006931.1,605-623).
cctgggtcgcttggttatt

SEQ ID NO: 259157 - DNA, 19 bp, Homo sapiens
  siRNA target sequence for SLC2A3 (NM_006931.1,795-813).
ccgctgctactgggtttta

SEQ ID NO: 259158 - DNA, 19 bp, Homo sapiens
  siRNA target sequence for SLC2A3 (NM_006931.1,1174-1192).
cgggtgtggttaatactat

SEQ ID NO: 259159 - DNA, 19 bp, Homo sapiens
  siRNA target sequence for SLC2A3 (NM_006931.1,1176-1194).
ggtgtggttaatactatct

SEQ ID NO: 259160 - DNA, 19 bp, Homo sapiens
  siRNA target sequence for SLC2A3 (NM_006931.1,1179-1197).
gtggttaatactatcttca

SEQ ID NO: 259161 - DNA, 19 bp, Homo sapiens
  siRNA target sequence for SLC2A3 (NM_006931.1,1196-1214).
cactgtagtttctctattt

SEQ ID NO: 259162 - DNA, 19 bp, Homo sapiens
  siRNA target sequence for SLC2A3 (NM_006931.1,1280-1298).
cacgctcatgactgtttct

SEQ ID NO: 259163 - DNA, 19 bp, Homo sapiens
  siRNA target sequence for SLC2A3 (NM_006931.1,1390-1408).
ccattccctggtttattgt

SEQ ID NO: 259164 - DNA, 19 bp, Homo sapiens
  siRNA target sequence for SLC2A4 (NM_001042.1,150-168).
cgtcgggcttccaacagat

SEQ ID NO: 259165 - DNA, 19 bp, Homo sapiens
  siRNA target sequence for SLC2A4 (NM_001042.1,151-169).
gtcgggcttccaacagata

SEQ ID NO: 259166 - DNA, 19 bp, Homo sapiens
  siRNA target sequence for SLC2A4 (NM_001042.1,298-316).
gattgaacagagctacaat

SEQ ID NO: 259167 - DNA, 19 bp, Homo sapiens
  siRNA target sequence for SLC2A4 (NM_001042.1,1318-1336).
cgtggcattttttgagatt

SEQ ID NO: 259168 - DNA, 19 bp, Homo sapiens
  siRNA target sequence for SLC2A4 (NM_001042.1,1484-1502).
ccctacgtcttccttctat

SEQ ID NO: 259169 - DNA, 19 bp, Homo sapiens
  siRNA target sequence for SLC2A4 (NM_001042.1,1595-1613).
caccggacaccctctcttt

SEQ ID NO: 259170 - DNA, 19 bp, Homo sapiens
  siRNA target sequence for SLC2A4 (NM_001042.1,1632-1650).
ccagcacagaacttgagta

SEQ ID NO: 259171 - DNA, 19 bp, Homo sapiens
  siRNA target sequence for SLC2A4 (NM_001042.1,1633-1651).
cagcacagaacttgagtat

SEQ ID NO: 259172 - DNA, 19 bp, Homo sapiens
  siRNA target sequence for SLC2A4 (NM_001042.1,1635-1653).
gcacagaacttgagtattt

SEQ ID NO: 259173 - DNA, 19 bp, Homo sapiens
  siRNA target sequence for SLC2A4 (NM_001042.1,1636-1654).
cacagaacttgagtattta

SEQ ID NO: 259174 - DNA, 19 bp, Homo sapiens
  siRNA target sequence for SLC2A5 (NM_003039.1,202-220).
gcactgctcatgcaacaat

SEQ ID NO: 259175 - DNA, 19 bp, Homo sapiens
  siRNA target sequence for SLC2A5 (NM_003039.1,205-223).
ctgctcatgcaacaatttt

SEQ ID NO: 259176 - DNA, 19 bp, Homo sapiens
  siRNA target sequence for SLC2A5 (NM_003039.1,241-259).
ggtaggaccggtgaattca

SEQ ID NO: 259177 - DNA, 19 bp, Homo sapiens
  siRNA target sequence for SLC2A5 (NM_003039.1,242-260).
gtaggaccggtgaattcat

SEQ ID NO: 259178 - DNA, 19 bp, Homo sapiens
  siRNA target sequence for SLC2A5 (NM_003039.1,297-315).
cgtgtccatgtttccattt

SEQ ID NO: 259179 - DNA, 19 bp, Homo sapiens
  siRNA target sequence for SLC2A5 (NM_003039.1,345-363).
ccccttggtgaataaattt

SEQ ID NO: 259180 - DNA, 19 bp, Homo sapiens
  siRNA target sequence for SLC2A5 (NM_003039.1,434-452).
gagtcgccacatcatttga

SEQ ID NO: 259181 - DNA, 19 bp, Homo sapiens
  siRNA target sequence for SLC2A5 (NM_003039.1,440-458).
ccacatcatttgagcttat

SEQ ID NO: 259182 - DNA, 19 bp, Homo sapiens
  siRNA target sequence for SLC2A5 (NM_003039.1,443-461).
catcatttgagcttatcat

SEQ ID NO: 259183 - DNA, 19 bp, Homo sapiens
  siRNA target sequence for SLC2A5 (NM_003039.1,527-545).
gggagctggcccctaaaaa

SEQ ID NO: 259184 - DNA, 19 bp, Homo sapiens
  siRNA target sequence for SLC2A5 (NM_003039.1,624-642).
gaatctccttgcaaacgta

SEQ ID NO: 259185 - DNA, 19 bp, Homo sapiens
  siRNA target sequence for SLC2A5 (NM_003039.1,947-965).
cgggcgtcaacgctatcta

SEQ ID NO: 259186 - DNA, 19 bp, Homo sapiens
  siRNA target sequence for SLC2A5 (NM_003039.1,949-967).
ggcgtcaacgctatctact

SEQ ID NO: 259187 - DNA, 19 bp, Homo sapiens
  siRNA target sequence for SLC2A5 (NM_003039.1,950-968).
gcgtcaacgctatctacta

SEQ ID NO: 259188 - DNA, 19 bp, Homo sapiens
  siRNA target sequence for SLC2A5 (NM_003039.1,1390-1408).
ccgtacagcttcattgtct

SEQ ID NO: 259189 - DNA, 19 bp, Homo sapiens
  siRNA target sequence for SLC2A5 (NM_003039.1,1468-1486).
gccaagacgttcatagaga

SEQ ID NO: 259190 - DNA, 19 bp, Homo sapiens
  siRNA target sequence for SLC2A5 (NM_003039.1,1469-1487).
ccaagacgttcatagagat

SEQ ID NO: 259191 - DNA, 19 bp, Homo sapiens
  siRNA target sequence for SLC2A6 (NM_017585.2,127-145).
cgggaccctgcagaacaaa

SEQ ID NO: 259192 - DNA, 19 bp, Homo sapiens
  siRNA target sequence for SLC2A6 (NM_017585.2,168-186).
ccgcagtgctcggcaattt

SEQ ID NO: 259193 - DNA, 19 bp, Homo sapiens
  siRNA target sequence for SLC2A6 (NM_017585.2,254-272).
gacctgcatctgaccaaat

SEQ ID NO: 259194 - DNA, 19 bp, Homo sapiens
  siRNA target sequence for SLC2A6 (NM_017585.2,359-377).
cggaagctgagcatcatgt

SEQ ID NO: 259195 - DNA, 19 bp, Homo sapiens
  siRNA target sequence for SLC2A6 (NM_017585.2,499-517).
ggtgtacgtgtctgagatt

SEQ ID NO: 259196 - DNA, 19 bp, Homo sapiens
  siRNA target sequence for SLC2A6 (NM_017585.2,641-659).
gcgcctgtgctcatcatga

SEQ ID NO: 259197 - DNA, 19 bp, Homo sapiens
  siRNA target sequence for SLC2A6 (NM_017585.2,642-660).
cgcctgtgctcatcatgat

SEQ ID NO: 259198 - DNA, 19 bp, Homo sapiens
  siRNA target sequence for SLC2A8 (NM_014580.2,527-545).
gctcctgtgtgcagctaat

SEQ ID NO: 259199 - DNA, 19 bp, Homo sapiens
  siRNA target sequence for SLC2A8 (NM_014580.2,866-884).
gggtcaacgccgtcatgtt

SEQ ID NO: 259200 - DNA, 19 bp, Homo sapiens
  siRNA target sequence for SLC2A8 (NM_014580.2,868-886).
gtcaacgccgtcatgttct

SEQ ID NO: 259201 - DNA, 19 bp, Homo sapiens
  siRNA target sequence for SLC2A8 (NM_014580.2,870-888).
caacgccgtcatgttctat

SEQ ID NO: 259202 - DNA, 19 bp, Homo sapiens
  siRNA target sequence for SLC2A8 (NM_014580.2,974-992).
ctgtggcggctctcatcat

SEQ ID NO: 259203 - DNA, 19 bp, Homo sapiens
  siRNA target sequence for SLC2A9 (NM_020041.1,293-311).
cccccaccccgtacatcaa

SEQ ID NO: 259204 - DNA, 19 bp, Homo sapiens
  siRNA target sequence for SLC2A9 (NM_020041.1,302-320).
cgtacatcaaggcctttta

SEQ ID NO: 259205 - DNA, 19 bp, Homo sapiens
  siRNA target sequence for SLC2A9 (NM_020041.1,306-324).
catcaaggccttttacaat

SEQ ID NO: 259206 - DNA, 19 bp, Homo sapiens
  siRNA target sequence for SLC2A9 (NM_020041.1,341-359).
ggcatggacgtccaataga

SEQ ID NO: 259207 - DNA, 19 bp, Homo sapiens
  siRNA target sequence for SLC2A9 (NM_020041.1,471-489).
cactttgctggccaataat

SEQ ID NO: 259208 - DNA, 19 bp, Homo sapiens
  siRNA target sequence for SLC2A9 (NM_020041.1,482-500).
ccaataatgggtttgcaat

SEQ ID NO: 259209 - DNA, 19 bp, Homo sapiens
  siRNA target sequence for SLC2A9 (NM_020041.1,531-549).
ccaggcaggagcctttgaa

SEQ ID NO: 259210 - DNA, 19 bp, Homo sapiens
  siRNA target sequence for SLC2A9 (NM_020041.1,567-585).
cttcatcatgggcatagat

SEQ ID NO: 259211 - DNA, 19 bp, Homo sapiens
  siRNA target sequence for SLC2A9 (NM_020041.1,661-679).
caggtgactgccatcttta

SEQ ID NO: 259212 - DNA, 19 bp, Homo sapiens
  siRNA target sequence for SLC2A9 (NM_020041.1,664-682).
gtgactgccatctttatct

SEQ ID NO: 259213 - DNA, 19 bp, Homo sapiens
  siRNA target sequence for SLC2A9 (NM_020041.1,1054-1072).
gcaatttggttctatacca

SEQ ID NO: 259214 - DNA, 19 bp, Homo sapiens
  siRNA target sequence for SLC2A9 (NM_020041.1,1114-1132).
ccatacgtcaccttgagta

SEQ ID NO: 259215 - DNA, 19 bp, Homo sapiens
  siRNA target sequence for SLC2A9 (NM_020041.1,1133-1151).
cagggggcatcgagacttt

SEQ ID NO: 259216 - DNA, 19 bp, Homo sapiens
  siRNA target sequence for SLC2A9 (NM_020041.1,1283-1301).
gggtcccctacctgagtat

SEQ ID NO: 259217 - DNA, 19 bp, Homo sapiens
  siRNA target sequence for SLC2A9 (NM_020041.1,1345-1363).
ggtggcatcccgttcatct

SEQ ID NO: 259218 - DNA, 19 bp, Homo sapiens
  siRNA target sequence for SLC2A9 (NM_020041.1,1348-1366).
ggcatcccgttcatcttga

SEQ ID NO: 259219 - DNA, 19 bp, Homo sapiens
  siRNA target sequence for SLC2A9 (NM_020041.1,1451-1469).
ggctcctcttcccattcat

SEQ ID NO: 259220 - DNA, 19 bp, Homo sapiens
  siRNA target sequence for SLC2A9 (NM_020041.1,1482-1500).
ggacacctactgtttccta

SEQ ID NO: 259221 - DNA, 19 bp, Homo sapiens
  siRNA target sequence for SLC2A9 (NM_020041.1,1517-1535).
gtatcacaggtgctatcta

SEQ ID NO: 259222 - DNA, 19 bp, Homo sapiens
  siRNA target sequence for SLC2A9 (NM_020041.1,1525-1543).
ggtgctatctacctgtatt

SEQ ID NO: 259223 - DNA, 19 bp, Homo sapiens
  siRNA target sequence for SLC2A9 (NM_020041.1,1526-1544).
gtgctatctacctgtattt

SEQ ID NO: 259224 - DNA, 19 bp, Homo sapiens
  siRNA target sequence for SLC2A9 (NM_020041.1,1529-1547).
ctatctacctgtattttgt

SEQ ID NO: 259225 - DNA, 19 bp, Homo sapiens
  siRNA target sequence for SLC2A9 (NM_020041.1,1640-1658).
cagctgtcactgatggtaa

SEQ ID NO: 259226 - DNA, 19 bp, Homo sapiens
  siRNA target sequence for SLC2A9 (NM_020041.1,1645-1663).
gtcactgatggtaagataa

SEQ ID NO: 259227 - DNA, 19 bp, Homo sapiens
  siRNA target sequence for SLC35A2 (NM_005660.1,100-118).
caggcgcctgaagtacata

SEQ ID NO: 259228 - DNA, 19 bp, Homo sapiens
  siRNA target sequence for SLC35A2 (NM_005660.1,389-407).
cagtatgttgccatctcta

SEQ ID NO: 259229 - DNA, 19 bp, Homo sapiens
  siRNA target sequence for SLC35A2 (NM_005660.1,645-663).
gcttcgcaggtgtctactt

SEQ ID NO: 259230 - DNA, 19 bp, Homo sapiens
  siRNA target sequence for SLC35A2 (NM_005660.1,869-887).
gtcaagtacgctgacaata

SEQ ID NO: 259231 - DNA, 19 bp, Homo sapiens
  siRNA target sequence for SLC35A3 (NM_012243.1,203-221).
cgccaacctaaaatacgtt

SEQ ID NO: 259232 - DNA, 19 bp, Homo sapiens
  siRNA target sequence for SLC35A3 (NM_012243.1,204-222).
gccaacctaaaatacgttt

SEQ ID NO: 259233 - DNA, 19 bp, Homo sapiens
  siRNA target sequence for SLC35A3 (NM_012243.1,228-246).
ggaattttggtctttcaga

SEQ ID NO: 259234 - DNA, 19 bp, Homo sapiens
  siRNA target sequence for SLC35A3 (NM_012243.1,258-276).
gttctaacaatgcgttatt

SEQ ID NO: 259235 - DNA, 19 bp, Homo sapiens
  siRNA target sequence for SLC35A3 (NM_012243.1,261-279).
ctaacaatgcgttattcca

SEQ ID NO: 259236 - DNA, 19 bp, Homo sapiens
  siRNA target sequence for SLC35A3 (NM_012243.1,269-287).
gcgttattccagaacttta

SEQ ID NO: 259237 - DNA, 19 bp, Homo sapiens
  siRNA target sequence for SLC35A3 (NM_012243.1,270-288).
cgttattccagaactttaa

SEQ ID NO: 259238 - DNA, 19 bp, Homo sapiens
  siRNA target sequence for SLC35A3 (NM_012243.1,294-312).
gaaggacctcgttatctat

SEQ ID NO: 259239 - DNA, 19 bp, Homo sapiens
  siRNA target sequence for SLC35A3 (NM_012243.1,297-315).
ggacctcgttatctatctt

SEQ ID NO: 259240 - DNA, 19 bp, Homo sapiens
  siRNA target sequence for SLC35A3 (NM_012243.1,347-365).
gataatggcctgcatttta

SEQ ID NO: 259241 - DNA, 19 bp, Homo sapiens
  siRNA target sequence for SLC35A3 (NM_012243.1,378-396).
gacagcaaatgtagtctaa

SEQ ID NO: 259242 - DNA, 19 bp, Homo sapiens
  siRNA target sequence for SLC35A3 (NM_012243.1,380-398).
cagcaaatgtagtctaaga

SEQ ID NO: 259243 - DNA, 19 bp, Homo sapiens
  siRNA target sequence for SLC35A3 (NM_012243.1,400-418).
cactgaatcgagtactaca

SEQ ID NO: 259244 - DNA, 19 bp, Homo sapiens
  siRNA target sequence for SLC35A3 (NM_012243.1,404-422).
gaatcgagtactacatgat

SEQ ID NO: 259245 - DNA, 19 bp, Homo sapiens
  siRNA target sequence for SLC35A3 (NM_012243.1,417-435).
catgatgaaattcttaata

SEQ ID NO: 259246 - DNA, 19 bp, Homo sapiens
  siRNA target sequence for SLC35A3 (NM_012243.1,450-468).
cttaaacttgctattccat

SEQ ID NO: 259247 - DNA, 19 bp, Homo sapiens
  siRNA target sequence for SLC35A3 (NM_012243.1,466-484).
catcagggatctatactct

SEQ ID NO: 259248 - DNA, 19 bp, Homo sapiens
  siRNA target sequence for SLC35A3 (NM_012243.1,472-490).
ggatctatactcttcagaa

SEQ ID NO: 259249 - DNA, 19 bp, Homo sapiens
  siRNA target sequence for SLC35A3 (NM_012243.1,500-518).
gtatgtggcactatcaaat

SEQ ID NO: 259250 - DNA, 19 bp, Homo sapiens
  siRNA target sequence for SLC35A3 (NM_012243.1,506-524).
ggcactatcaaatctagat

SEQ ID NO: 259251 - DNA, 19 bp, Homo sapiens
  siRNA target sequence for SLC35A3 (NM_012243.1,537-555).
caggtcacgtatcagttaa

SEQ ID NO: 259252 - DNA, 19 bp, Homo sapiens
  siRNA target sequence for SLC35A3 (NM_012243.1,540-558).
gtcacgtatcagttaaaaa

SEQ ID NO: 259253 - DNA, 19 bp, Homo sapiens
  siRNA target sequence for SLC35A3 (NM_012243.1,542-560).
cacgtatcagttaaaaatt

SEQ ID NO: 259254 - DNA, 19 bp, Homo sapiens
  siRNA target sequence for SLC35A3 (NM_012243.1,580-598).
ctgtgtctatgcttagtaa

SEQ ID NO: 259255 - DNA, 19 bp, Homo sapiens
  siRNA target sequence for SLC35A3 (NM_012243.1,615-633).
cagtggctgtccctagtaa

SEQ ID NO: 259256 - DNA, 19 bp, Homo sapiens
  siRNA target sequence for SLC35A3 (NM_012243.1,617-635).
gtggctgtccctagtaatt

SEQ ID NO: 259257 - DNA, 19 bp, Homo sapiens
  siRNA target sequence for SLC35A3 (NM_012243.1,638-656).
gatgacaggagttgctttt

SEQ ID NO: 259258 - DNA, 19 bp, Homo sapiens
  siRNA target sequence for SLC35A3 (NM_012243.1,657-675).
gtacagtggccctcagatt

SEQ ID NO: 259259 - DNA, 19 bp, Homo sapiens
  siRNA target sequence for SLC35A3 (NM_012243.1,762-780).
gctggggtttactttgaga

SEQ ID NO: 259260 - DNA, 19 bp, Homo sapiens
  siRNA target sequence for SLC35A3 (NM_012243.1,887-905).
ggtatcaaagaatggattt

SEQ ID NO: 259261 - DNA, 19 bp, Homo sapiens
  siRNA target sequence for SLC35A3 (NM_012243.1,920-938).
ccgactgacctggatagta

SEQ ID NO: 259262 - DNA, 19 bp, Homo sapiens
  siRNA target sequence for SLC35A3 (NM_012243.1,929-947).
ctggatagtagttgttctt

SEQ ID NO: 259263 - DNA, 19 bp, Homo sapiens
  siRNA target sequence for SLC35A3 (NM_012243.1,931-949).
ggatagtagttgttcttca

SEQ ID NO: 259264 - DNA, 19 bp, Homo sapiens
  siRNA target sequence for SLC35A3 (NM_012243.1,951-969).
gcacttggaggccttgtaa

SEQ ID NO: 259265 - DNA, 19 bp, Homo sapiens
  siRNA target sequence for SLC35A3 (NM_012243.1,952-970).
cacttggaggccttgtaat

SEQ ID NO: 259266 - DNA, 19 bp, Homo sapiens
  siRNA target sequence for SLC35A3 (NM_012243.1,1014-1032).
gcaacctctttatcgataa

SEQ ID NO: 259267 - DNA, 19 bp, Homo sapiens
  siRNA target sequence for SLC35A3 (NM_012243.1,1015-1033).
caacctctttatcgataat

SEQ ID NO: 259268 - DNA, 19 bp, Homo sapiens
  siRNA target sequence for SLC35A3 (NM_012243.1,1018-1036).
cctctttatcgataatatt

SEQ ID NO: 259269 - DNA, 19 bp, Homo sapiens
  siRNA target sequence for SLC35A3 (NM_012243.1,1019-1037).
ctctttatcgataatatta

SEQ ID NO: 259270 - DNA, 19 bp, Homo sapiens
  siRNA target sequence for SLC35A3 (NM_012243.1,1027-1045).
cgataatattatcaacatt

SEQ ID NO: 259271 - DNA, 19 bp, Homo sapiens
  siRNA target sequence for SLC35A3 (NM_012243.1,1039-1057).
caacattgatctcctattt

SEQ ID NO: 259272 - DNA, 19 bp, Homo sapiens
  siRNA target sequence for SLC35A3 (NM_012243.1,1052-1070).
ctatttttggcttcaagat

SEQ ID NO: 259273 - DNA, 19 bp, Homo sapiens
  siRNA target sequence for SLC35A3 (NM_012243.1,1095-1113).
cttggagccatccttgtaa

SEQ ID NO: 259274 - DNA, 19 bp, Homo sapiens
  siRNA target sequence for SLC35C1 (NM_018389.3,694-712).
gcatctggcgcctgacttt

SEQ ID NO: 259275 - DNA, 19 bp, Homo sapiens
  siRNA target sequence for SLC35C1 (NM_018389.3,700-718).
ggcgcctgactttctacaa

SEQ ID NO: 259276 - DNA, 19 bp, Homo sapiens
  siRNA target sequence for SLC35C1 (NM_018389.3,892-910).
gtccgctgacccacaatgt

SEQ ID NO: 259277 - DNA, 19 bp, Homo sapiens
  siRNA target sequence for SLC35C1 (NM_018389.3,894-912).
ccgctgacccacaatgtgt

SEQ ID NO: 259278 - DNA, 19 bp, Homo sapiens
  siRNA target sequence for SLC35D1 (NM_015139.1,218-236).
cgtgctcaccaattacaga

SEQ ID NO: 259279 - DNA, 19 bp, Homo sapiens
  siRNA target sequence for SLC35D1 (NM_015139.1,219-237).
gtgctcaccaattacagat

SEQ ID NO: 259280 - DNA, 19 bp, Homo sapiens
  siRNA target sequence for SLC35D1 (NM_015139.1,221-239).
gctcaccaattacagattt

SEQ ID NO: 259281 - DNA, 19 bp, Homo sapiens
  siRNA target sequence for SLC35D1 (NM_015139.1,307-325).
cgctcagagtagtcaagtt

SEQ ID NO: 259282 - DNA, 19 bp, Homo sapiens
  siRNA target sequence for SLC35D1 (NM_015139.1,308-326).
gctcagagtagtcaagttt

SEQ ID NO: 259283 - DNA, 19 bp, Homo sapiens
  siRNA target sequence for SLC35D1 (NM_015139.1,363-381).
ccactacctctactatatt

SEQ ID NO: 259284 - DNA, 19 bp, Homo sapiens
  siRNA target sequence for SLC35D1 (NM_015139.1,458-476).
catcctgtttacaatgttt

SEQ ID NO: 259285 - DNA, 19 bp, Homo sapiens
  siRNA target sequence for SLC35D1 (NM_015139.1,477-495).
gctgaaggagttttactca

SEQ ID NO: 259286 - DNA, 19 bp, Homo sapiens
  siRNA target sequence for SLC35D1 (NM_015139.1,478-496).
ctgaaggagttttactcaa

SEQ ID NO: 259287 - DNA, 19 bp, Homo sapiens
  siRNA target sequence for SLC35D1 (NM_015139.1,502-520).
ctttttcttggggtattaa

SEQ ID NO: 259288 - DNA, 19 bp, Homo sapiens
  siRNA target sequence for SLC35D1 (NM_015139.1,568-586).
ctgacttggcatttgatct

SEQ ID NO: 259289 - DNA, 19 bp, Homo sapiens
  siRNA target sequence for SLC35D1 (NM_015139.1,585-603).
ctggaaggatatgctttta

SEQ ID NO: 259290 - DNA, 19 bp, Homo sapiens
  siRNA target sequence for SLC35D1 (NM_015139.1,620-638).
cctaacagcagcaaatggt

SEQ ID NO: 259291 - DNA, 19 bp, Homo sapiens
  siRNA target sequence for SLC35D1 (NM_015139.1,630-648).
gcaaatggtgcatacgtaa

SEQ ID NO: 259292 - DNA, 19 bp, Homo sapiens
  siRNA target sequence for SLC35D1 (NM_015139.1,636-654).
ggtgcatacgtaaaacaaa

SEQ ID NO: 259293 - DNA, 19 bp, Homo sapiens
  siRNA target sequence for SLC35D1 (NM_015139.1,820-838).
gtgtgatggggtttatctt

SEQ ID NO: 259294 - DNA, 19 bp, Homo sapiens
  siRNA target sequence for SLC35D1 (NM_015139.1,852-870).
gtactctgcacgcagtata

SEQ ID NO: 259295 - DNA, 19 bp, Homo sapiens
  siRNA target sequence for SLC35D1 (NM_015139.1,857-875).
ctgcacgcagtataattct

SEQ ID NO: 259296 - DNA, 19 bp, Homo sapiens
  siRNA target sequence for SLC35D1 (NM_015139.1,877-895).
ctcttacaactacaatagt

SEQ ID NO: 259297 - DNA, 19 bp, Homo sapiens
  siRNA target sequence for SLC35D1 (NM_015139.1,889-907).
caatagttggctgtattaa

SEQ ID NO: 259298 - DNA, 19 bp, Homo sapiens
  siRNA target sequence for SLC35D1 (NM_015139.1,935-953).
ggtctttggtggagattat

SEQ ID NO: 259299 - DNA, 19 bp, Homo sapiens
  siRNA target sequence for SLC35D1 (NM_015139.1,965-983).
gacaaacttcattggttta

SEQ ID NO: 259300 - DNA, 19 bp, Homo sapiens
  siRNA target sequence for SLC35D1 (NM_015139.1,996-1014).
gctgggagcctggtatatt

SEQ ID NO: 259301 - DNA, 19 bp, Homo sapiens
  siRNA target sequence for SLC35D1 (NM_015139.1,1000-1018).
ggagcctggtatattccta

SEQ ID NO: 259302 - DNA, 19 bp, Homo sapiens
  siRNA target sequence for SLC35D1 (NM_015139.1,1003-1021).
gcctggtatattcctatat

SEQ ID NO: 259303 - DNA, 19 bp, Homo sapiens
  siRNA target sequence for SLC35D1 (NM_015139.1,1007-1025).
ggtatattcctatatcact

SEQ ID NO: 259304 - DNA, 19 bp, Homo sapiens
  siRNA target sequence for SLC35D1 (NM_015139.1,1050-1068).
cagtcagaggctaataaca

SEQ ID NO: 259305 - DNA, 19 bp, Homo sapiens
  siRNA target sequence for SLC37A1 (NM_018964.2,998-1016).
gctggcattcgcttcatca

SEQ ID NO: 259306 - DNA, 19 bp, Homo sapiens
  siRNA target sequence for SLC37A1 (NM_018964.2,1038-1056).
ggtacagagccttcatttt

SEQ ID NO: 259307 - DNA, 19 bp, Homo sapiens
  siRNA target sequence for SLC37A1 (NM_018964.2,1121-1139).
ggtgagctccacaagtact

SEQ ID NO: 259308 - DNA, 19 bp, Homo sapiens
  siRNA target sequence for SLC37A1 (NM_018964.2,1207-1225).
ccaccagctccctgacaat

SEQ ID NO: 259309 - DNA, 19 bp, Homo sapiens
  siRNA target sequence for SLC37A1 (NM_018964.2,1239-1257).
gctgggcaccgtttgataa

SEQ ID NO: 259310 - DNA, 19 bp, Homo sapiens
  siRNA target sequence for SLC37A1 (NM_018964.2,1245-1263).
caccgtttgataagaacaa

SEQ ID NO: 259311 - DNA, 19 bp, Homo sapiens
  siRNA target sequence for SLC37A1 (NM_018964.2,1247-1265).
ccgtttgataagaacaact

SEQ ID NO: 259312 - DNA, 19 bp, Homo sapiens
  siRNA target sequence for SLC37A1 (NM_018964.2,1248-1266).
cgtttgataagaacaacta

SEQ ID NO: 259313 - DNA, 19 bp, Homo sapiens
  siRNA target sequence for SLC37A1 (NM_018964.2,1346-1364).
gagcgcctgccgattaggt

SEQ ID NO: 259314 - DNA, 19 bp, Homo sapiens
  siRNA target sequence for SLC37A1 (NM_018964.2,1348-1366).
gcgcctgccgattaggtat

SEQ ID NO: 259315 - DNA, 19 bp, Homo sapiens
  siRNA target sequence for SLC37A1 (NM_018964.2,1349-1367).
cgcctgccgattaggtatt

SEQ ID NO: 259316 - DNA, 19 bp, Homo sapiens
  siRNA target sequence for SLC37A1 (NM_018964.2,1350-1368).
gcctgccgattaggtatta

SEQ ID NO: 259317 - DNA, 19 bp, Homo sapiens
  siRNA target sequence for SLC37A1 (NM_018964.2,1354-1372).
gccgattaggtattaccta

SEQ ID NO: 259318 - DNA, 19 bp, Homo sapiens
  siRNA target sequence for SLC37A1 (NM_018964.2,1355-1373).
ccgattaggtattacctaa

SEQ ID NO: 259319 - DNA, 19 bp, Homo sapiens
  siRNA target sequence for SLC37A1 (NM_018964.2,1415-1433).
ggcttagggtatttctaca

SEQ ID NO: 259320 - DNA, 19 bp, Homo sapiens
  siRNA target sequence for SLC37A1 (NM_018964.2,1449-1467).
gattctacgtggtaactca

SEQ ID NO: 259321 - DNA, 19 bp, Homo sapiens
  siRNA target sequence for SLC37A1 (NM_018964.2,1525-1543).
caactggtttggaaaagga

SEQ ID NO: 259322 - DNA, 19 bp, Homo sapiens
  siRNA target sequence for SLC37A1 (NM_018964.2,1683-1701).
ggatagtgtgctttctctt

SEQ ID NO: 259323 - DNA, 19 bp, Homo sapiens
  siRNA target sequence for SLC37A1 (NM_018964.2,1741-1759).
cctggtgacgcactcaaaa

SEQ ID NO: 259324 - DNA, 19 bp, Homo sapiens
  siRNA target sequence for SLC37A1 (NM_018964.2,1751-1769).
cactcaaaaggctatgaga

SEQ ID NO: 259325 - DNA, 19 bp, Homo sapiens
  siRNA target sequence for SLC37A1 (NM_018964.2,2318-2336).
gccgacctggggactcata

SEQ ID NO: 259326 - DNA, 19 bp, Homo sapiens
  siRNA target sequence for SLC37A1 (NM_018964.2,2319-2337).
ccgacctggggactcataa

SEQ ID NO: 259327 - DNA, 19 bp, Homo sapiens
  siRNA target sequence for SLC37A1 (NM_018964.2,2320-2338).
cgacctggggactcataaa

SEQ ID NO: 259328 - DNA, 19 bp, Homo sapiens
  siRNA target sequence for SLC37A1 (NM_018964.2,2321-2339).
gacctggggactcataaaa

SEQ ID NO: 259329 - DNA, 19 bp, Homo sapiens
  siRNA target sequence for SLC37A1 (NM_018964.2,2329-2347).
gactcataaaagtctgaaa

SEQ ID NO: 259330 - DNA, 19 bp, Homo sapiens
  siRNA target sequence for SLC37A1 (NM_018964.2,2449-2467).
cggctggagcaatgtgttt

SEQ ID NO: 259331 - DNA, 19 bp, Homo sapiens
  siRNA target sequence for SLC37A1 (NM_018964.2,2451-2469).
gctggagcaatgtgtttta

SEQ ID NO: 259332 - DNA, 19 bp, Homo sapiens
  siRNA target sequence for SLC37A4 (NM_001467.2,691-709).
ccagggctatggctattat

SEQ ID NO: 259333 - DNA, 19 bp, Homo sapiens
  siRNA target sequence for SLC37A4 (NM_001467.2,718-736).
gatcttctcagccatgttt

SEQ ID NO: 259334 - DNA, 19 bp, Homo sapiens
  siRNA target sequence for SLC37A4 (NM_001467.2,737-755).
gggggctacagcctgtatt

SEQ ID NO: 259335 - DNA, 19 bp, Homo sapiens
  siRNA target sequence for SLC37A4 (NM_001467.2,738-756).
ggggctacagcctgtatta

SEQ ID NO: 259336 - DNA, 19 bp, Homo sapiens
  siRNA target sequence for SLC37A4 (NM_001467.2,741-759).
gctacagcctgtattactt

SEQ ID NO: 259337 - DNA, 19 bp, Homo sapiens
  siRNA target sequence for SLC37A4 (NM_001467.2,809-827).
cctttggacaaggatgatt

SEQ ID NO: 259338 - DNA, 19 bp, Homo sapiens
  siRNA target sequence for SLC37A4 (NM_001467.2,941-959).
gttggcctggtcaacatat

SEQ ID NO: 259339 - DNA, 19 bp, Homo sapiens
  siRNA target sequence for SLC37A4 (NM_001467.2,944-962).
ggcctggtcaacatattct

SEQ ID NO: 259340 - DNA, 19 bp, Homo sapiens
  siRNA target sequence for SLC37A4 (NM_001467.2,1234-1252).
cctgctcatccacaatgaa

SEQ ID NO: 259341 - DNA, 19 bp, Homo sapiens
  siRNA target sequence for SLC37A4 (NM_001467.2,1419-1437).
ggggccagttcttccttat

SEQ ID NO: 259342 - DNA, 19 bp, Homo sapiens
  siRNA target sequence for SLC37A4 (NM_001467.2,1422-1440).
gccagttcttccttatcca

SEQ ID NO: 259343 - DNA, 19 bp, Homo sapiens
  siRNA target sequence for SLC37A4 (NM_001467.2,1463-1481).
gtaggtagctcctacatga

SEQ ID NO: 259344 - DNA, 19 bp, Homo sapiens
  siRNA target sequence for SLC37A4 (NM_001467.2,1678-1696).
ggtattgggagctgtattt

SEQ ID NO: 259345 - DNA, 19 bp, Homo sapiens
  siRNA target sequence for SLC7A7 (NM_003982.2,529-547).
ggttgacagcactgagtat

SEQ ID NO: 259346 - DNA, 19 bp, Homo sapiens
  siRNA target sequence for SLC7A7 (NM_003982.2,828-846).
gggccagctatgcctatat

SEQ ID NO: 259347 - DNA, 19 bp, Homo sapiens
  siRNA target sequence for SLC7A7 (NM_003982.2,976-994).
ctgcttcgccccttatgct

SEQ ID NO: 259348 - DNA, 19 bp, Homo sapiens
  siRNA target sequence for SLC7A7 (NM_003982.2,1028-1046).
ctcttaaccttcattaact

SEQ ID NO: 259349 - DNA, 19 bp, Homo sapiens
  siRNA target sequence for SLC7A7 (NM_003982.2,1030-1048).
cttaaccttcattaactgt

SEQ ID NO: 259350 - DNA, 19 bp, Homo sapiens
  siRNA target sequence for SLC7A7 (NM_003982.2,1063-1081).
gggaaccctggtacaagat

SEQ ID NO: 259351 - DNA, 19 bp, Homo sapiens
  siRNA target sequence for SLC7A7 (NM_003982.2,1079-1097).
gatattttcacctatgcta

SEQ ID NO: 259352 - DNA, 19 bp, Homo sapiens
  siRNA target sequence for SLC7A7 (NM_003982.2,1123-1141).
cgttgcaggcattgttaga

SEQ ID NO: 259353 - DNA, 19 bp, Homo sapiens
  siRNA target sequence for SLC7A7 (NM_003982.2,1148-1166).
cagggagcctctactcatt

SEQ ID NO: 259354 - DNA, 19 bp, Homo sapiens
  siRNA target sequence for SLC7A7 (NM_003982.2,1150-1168).
gggagcctctactcatttt

SEQ ID NO: 259355 - DNA, 19 bp, Homo sapiens
  siRNA target sequence for SLC7A7 (NM_003982.2,1152-1170).
gagcctctactcattttga

SEQ ID NO: 259356 - DNA, 19 bp, Homo sapiens
  siRNA target sequence for SLC7A7 (NM_003982.2,1176-1194).
cctttgagggttcatcatt

SEQ ID NO: 259357 - DNA, 19 bp, Homo sapiens
  siRNA target sequence for SLC7A7 (NM_003982.2,1249-1267).
ctgggacaccctcaactat

SEQ ID NO: 259358 - DNA, 19 bp, Homo sapiens
  siRNA target sequence for SLC7A7 (NM_003982.2,1430-1448).
gatcagatatttggaatat

SEQ ID NO: 259359 - DNA, 19 bp, Homo sapiens
  siRNA target sequence for SLC7A7 (NM_003982.2,1466-1484).
ctgtcagttgcattatcct

SEQ ID NO: 259360 - DNA, 19 bp, Homo sapiens
  siRNA target sequence for SLC7A7 (NM_003982.2,1622-1640).
ggtatcatggcattgatct

SEQ ID NO: 259361 - DNA, 19 bp, Homo sapiens
  siRNA target sequence for SLC7A7 (NM_003982.2,1713-1731).
ctattgtgggtcagcttta

SEQ ID NO: 259362 - DNA, 19 bp, Homo sapiens
  siRNA target sequence for SLC7A7 (NM_003982.2,1766-1784).
ctcaagctcagcgttttct

SEQ ID NO: 259363 - DNA, 19 bp, Homo sapiens
  siRNA target sequence for SLC7A7 (NM_003982.2,1778-1796).
gttttcttcccgattgtct

SEQ ID NO: 259364 - DNA, 19 bp, Homo sapiens
  siRNA target sequence for SLC7A2 (NM_003046.1,254-272).
gaccctggacagtctagaa

SEQ ID NO: 259365 - DNA, 19 bp, Homo sapiens
  siRNA target sequence for SLC7A2 (NM_003046.1,265-283).
gtctagaagacaccaaatt

SEQ ID NO: 259366 - DNA, 19 bp, Homo sapiens
  siRNA target sequence for SLC7A2 (NM_003046.1,267-285).
ctagaagacaccaaattat

SEQ ID NO: 259367 - DNA, 19 bp, Homo sapiens
  siRNA target sequence for SLC7A2 (NM_003046.1,476-494).
caagacggggtctgcatat

SEQ ID NO: 259368 - DNA, 19 bp, Homo sapiens
  siRNA target sequence for SLC7A2 (NM_003046.1,481-499).
cggggtctgcatatttgta

SEQ ID NO: 259369 - DNA, 19 bp, Homo sapiens
  siRNA target sequence for SLC7A2 (NM_003046.1,483-501).
gggtctgcatatttgtaca

SEQ ID NO: 259370 - DNA, 19 bp, Homo sapiens
  siRNA target sequence for SLC7A2 (NM_003046.1,540-558).
ggctggaatctcattttat

SEQ ID NO: 259371 - DNA, 19 bp, Homo sapiens
  siRNA target sequence for SLC7A2 (NM_003046.1,544-562).
ggaatctcattttatcgta

SEQ ID NO: 259372 - DNA, 19 bp, Homo sapiens
  siRNA target sequence for SLC7A2 (NM_003046.1,560-578).
gtatgtgataggtacatca

SEQ ID NO: 259373 - DNA, 19 bp, Homo sapiens
  siRNA target sequence for SLC7A2 (NM_003046.1,566-584).
gataggtacatcaagtgtt

SEQ ID NO: 259374 - DNA, 19 bp, Homo sapiens
  siRNA target sequence for SLC7A2 (NM_003046.1,593-611).
ctggagtggcacctttgat

SEQ ID NO: 259375 - DNA, 19 bp, Homo sapiens
  siRNA target sequence for SLC7A2 (NM_003046.1,612-630).
gaacttcttagcaaacaga

SEQ ID NO: 259376 - DNA, 19 bp, Homo sapiens
  siRNA target sequence for SLC7A2 (NM_003046.1,647-665).
gacatacttcagaatgaat

SEQ ID NO: 259377 - DNA, 19 bp, Homo sapiens
  siRNA target sequence for SLC7A2 (NM_003046.1,756-774).
gcttgggtgaataaagtct

SEQ ID NO: 259378 - DNA, 19 bp, Homo sapiens
  siRNA target sequence for SLC7A2 (NM_003046.1,861-879).
gagtttctcaaaaatatat

SEQ ID NO: 259379 - DNA, 19 bp, Homo sapiens
  siRNA target sequence for SLC7A2 (NM_003046.1,904-922).
ctgaaaacggaacaagtat

SEQ ID NO: 259380 - DNA, 19 bp, Homo sapiens
  siRNA target sequence for SLC7A2 (NM_003046.1,906-924).
gaaaacggaacaagtatct

SEQ ID NO: 259381 - DNA, 19 bp, Homo sapiens
  siRNA target sequence for SLC7A2 (NM_003046.1,1018-1036).
caacaactggtgaagaagt

SEQ ID NO: 259382 - DNA, 19 bp, Homo sapiens
  siRNA target sequence for SLC7A2 (NM_003046.1,1039-1057).
ggaatccccagaaagctat

SEQ ID NO: 259383 - DNA, 19 bp, Homo sapiens
  siRNA target sequence for SLC7A2 (NM_003046.1,1054-1072).
ctattcccattggaattgt

SEQ ID NO: 259384 - DNA, 19 bp, Homo sapiens
  siRNA target sequence for SLC7A2 (NM_003046.1,1171-1189).
ctgtagcgtttgaatatgt

SEQ ID NO: 259385 - DNA, 19 bp, Homo sapiens
  siRNA target sequence for SLC7A2 (NM_003046.1,1195-1213).
ggggtcctgccaaatatgt

SEQ ID NO: 259386 - DNA, 19 bp, Homo sapiens
  siRNA target sequence for SLC7A2 (NM_003046.1,1230-1248).
ctctgcgccttgtcaacaa

SEQ ID NO: 259387 - DNA, 19 bp, Homo sapiens
  siRNA target sequence for SLC7A2 (NM_003046.1,1232-1250).
ctgcgccttgtcaacaagt

SEQ ID NO: 259388 - DNA, 19 bp, Homo sapiens
  siRNA target sequence for SLC7A2 (NM_003046.1,1235-1253).
cgccttgtcaacaagtctt

SEQ ID NO: 259389 - DNA, 19 bp, Homo sapiens
  siRNA target sequence for SLC7A2 (NM_003046.1,1256-1274).
gggctctatgtttccttta

SEQ ID NO: 259390 - DNA, 19 bp, Homo sapiens
  siRNA target sequence for SLC7A2 (NM_003046.1,1269-1287).
cctttaccccgaattctgt

SEQ ID NO: 259391 - DNA, 19 bp, Homo sapiens
  siRNA target sequence for SLC7A2 (NM_003046.1,1306-1324).
gcttactgtttagatttct

SEQ ID NO: 259392 - DNA, 19 bp, Homo sapiens
  siRNA target sequence for SLC7A2 (NM_003046.1,1323-1341).
cttgccagagtgagtaaga

SEQ ID NO: 259393 - DNA, 19 bp, Homo sapiens
  siRNA target sequence for SLC7A2 (NM_003046.1,1676-1694).
ctttctggtaggattccta

SEQ ID NO: 259394 - DNA, 19 bp, Homo sapiens
  siRNA target sequence for SLC7A2 (NM_003046.1,1724-1742).
gaccacttacggagttcat

SEQ ID NO: 259395 - DNA, 19 bp, Homo sapiens
  siRNA target sequence for SLC7A2 (NM_003046.1,1892-1910).
cagcatcttggtgaacatt

SEQ ID NO: 259396 - DNA, 19 bp, Homo sapiens
  siRNA target sequence for SLC7A2 (NM_003046.1,1913-1931).
cttgatggtccagttaagt

SEQ ID NO: 259397 - DNA, 19 bp, Homo sapiens
  siRNA target sequence for SLC7A2 (NM_003046.1,1944-1962).
gtcagattcagcatttgga

SEQ ID NO: 259398 - DNA, 19 bp, Homo sapiens
  siRNA target sequence for SLC7A2 (NM_003046.1,1966-1984).
caattggcttcctgattta

SEQ ID NO: 259399 - DNA, 19 bp, Homo sapiens
  siRNA target sequence for SLC7A2 (NM_003046.1,2124-2142).
ctcagttcacctttcatat

SEQ ID NO: 259400 - DNA, 19 bp, Homo sapiens
  siRNA target sequence for SLC7A2 (NM_003046.1,2138-2156).
catattccatgaaaagaca

SEQ ID NO: 259401 - DNA, 19 bp, Homo sapiens
  siRNA target sequence for SLC7A3 (NM_032803.3,222-240).
cctaagcaccctggattta

SEQ ID NO: 259402 - DNA, 19 bp, Homo sapiens
  siRNA target sequence for SLC7A3 (NM_032803.3,292-310).
ggcgaggtggccaaagata

SEQ ID NO: 259403 - DNA, 19 bp, Homo sapiens
  siRNA target sequence for SLC7A3 (NM_032803.3,293-311).
gcgaggtggccaaagataa

SEQ ID NO: 259404 - DNA, 19 bp, Homo sapiens
  siRNA target sequence for SLC7A3 (NM_032803.3,294-312).
cgaggtggccaaagataaa

SEQ ID NO: 259405 - DNA, 19 bp, Homo sapiens
  siRNA target sequence for SLC7A3 (NM_032803.3,297-315).
ggtggccaaagataaagca

SEQ ID NO: 259406 - DNA, 19 bp, Homo sapiens
  siRNA target sequence for SLC7A3 (NM_032803.3,407-425).
gttctggttcggcatatct

SEQ ID NO: 259407 - DNA, 19 bp, Homo sapiens
  siRNA target sequence for SLC7A3 (NM_032803.3,410-428).
ctggttcggcatatctcta

SEQ ID NO: 259408 - DNA, 19 bp, Homo sapiens
  siRNA target sequence for SLC7A3 (NM_032803.3,524-542).
ggagctctgcttttgacaa

SEQ ID NO: 259409 - DNA, 19 bp, Homo sapiens
  siRNA target sequence for SLC7A3 (NM_032803.3,550-568).
gggaaccacatctctaaga

SEQ ID NO: 259410 - DNA, 19 bp, Homo sapiens
  siRNA target sequence for SLC7A3 (NM_032803.3,599-617).
cccatgtccttgcagaata

SEQ ID NO: 259411 - DNA, 19 bp, Homo sapiens
  siRNA target sequence for SLC7A3 (NM_032803.3,710-728).
caggcgtgaaccttttggt

SEQ ID NO: 259412 - DNA, 19 bp, Homo sapiens
  siRNA target sequence for SLC7A3 (NM_032803.3,788-806).
cagaagaggactacgaatt

SEQ ID NO: 259413 - DNA, 19 bp, Homo sapiens
  siRNA target sequence for SLC7A3 (NM_032803.3,817-835).
gaactcaatgacacctata

SEQ ID NO: 259414 - DNA, 19 bp, Homo sapiens
  siRNA target sequence for SLC7A3 (NM_032803.3,820-838).
ctcaatgacacctatagct

SEQ ID NO: 259415 - DNA, 19 bp, Homo sapiens
  siRNA target sequence for SLC7A3 (NM_032803.3,896-914).
gagcagcgacctgtttcta

SEQ ID NO: 259416 - DNA, 19 bp, Homo sapiens
  siRNA target sequence for SLC7A3 (NM_032803.3,901-919).
gcgacctgtttctatgcat

SEQ ID NO: 259417 - DNA, 19 bp, Homo sapiens
  siRNA target sequence for SLC7A3 (NM_032803.3,902-920).
cgacctgtttctatgcatt

SEQ ID NO: 259418 - DNA, 19 bp, Homo sapiens
  siRNA target sequence for SLC7A3 (NM_032803.3,925-943).
ggtttcgactgtattgcta

SEQ ID NO: 259419 - DNA, 19 bp, Homo sapiens
  siRNA target sequence for SLC7A3 (NM_032803.3,1011-1029).
ctgctttttggcgtatttt

SEQ ID NO: 259420 - DNA, 19 bp, Homo sapiens
  siRNA target sequence for SLC7A3 (NM_032803.3,1119-1137).
ggctcctgcccgctatgtt

SEQ ID NO: 259421 - DNA, 19 bp, Homo sapiens
  siRNA target sequence for SLC7A3 (NM_032803.3,1121-1139).
ctcctgcccgctatgttgt

SEQ ID NO: 259422 - DNA, 19 bp, Homo sapiens
  siRNA target sequence for SLC7A3 (NM_032803.3,1230-1248).
cctcctgttccgtgtactt

SEQ ID NO: 259423 - DNA, 19 bp, Homo sapiens
  siRNA target sequence for SLC7A3 (NM_032803.3,1289-1307).
ccgtggtctctggcattat

SEQ ID NO: 259424 - DNA, 19 bp, Homo sapiens
  siRNA target sequence for SLC7A3 (NM_032803.3,1290-1308).
cgtggtctctggcattatt

SEQ ID NO: 259425 - DNA, 19 bp, Homo sapiens
  siRNA target sequence for SLC7A3 (NM_032803.3,1293-1311).
ggtctctggcattattgca

SEQ ID NO: 259426 - DNA, 19 bp, Homo sapiens
  siRNA target sequence for SLC7A3 (NM_032803.3,1301-1319).
gcattattgcagcattcat

SEQ ID NO: 259427 - DNA, 19 bp, Homo sapiens
  siRNA target sequence for SLC7A3 (NM_032803.3,1345-1363).
cttgtggacctcatgtcaa

SEQ ID NO: 259428 - DNA, 19 bp, Homo sapiens
  siRNA target sequence for SLC7A3 (NM_032803.3,1385-1403).
ccctggtgtcgatttgtgt

SEQ ID NO: 259429 - DNA, 19 bp, Homo sapiens
  siRNA target sequence for SLC7A3 (NM_032803.3,1464-1482).
ggaggaggcaataactact

SEQ ID NO: 259430 - DNA, 19 bp, Homo sapiens
  siRNA target sequence for SLC7A3 (NM_032803.3,1467-1485).
ggaggcaataactactgaa

SEQ ID NO: 259431 - DNA, 19 bp, Homo sapiens
  siRNA target sequence for SLC7A3 (NM_032803.3,1468-1486).
gaggcaataactactgaat

SEQ ID NO: 259432 - DNA, 19 bp, Homo sapiens
  siRNA target sequence for SLC7A3 (NM_032803.3,1497-1515).
gaccctatggggactattt

SEQ ID NO: 259433 - DNA, 19 bp, Homo sapiens
  siRNA target sequence for SLC7A3 (NM_032803.3,1499-1517).
ccctatggggactattttt

SEQ ID NO: 259434 - DNA, 19 bp, Homo sapiens
  siRNA target sequence for SLC7A3 (NM_032803.3,1545-1563).
ctctggccaaattgtctat

SEQ ID NO: 259435 - DNA, 19 bp, Homo sapiens
  siRNA target sequence for SLC7A3 (NM_032803.3,1547-1565).
ctggccaaattgtctatgt

SEQ ID NO: 259436 - DNA, 19 bp, Homo sapiens
  siRNA target sequence for SLC7A3 (NM_032803.3,1549-1567).
ggccaaattgtctatgttt

SEQ ID NO: 259437 - DNA, 19 bp, Homo sapiens
  siRNA target sequence for SLC7A3 (NM_032803.3,1616-1634).
cccagtggtcagttccatt

SEQ ID NO: 259438 - DNA, 19 bp, Homo sapiens
  siRNA target sequence for SLC7A3 (NM_032803.3,1620-1638).
gtggtcagttccattgctt

SEQ ID NO: 259439 - DNA, 19 bp, Homo sapiens
  siRNA target sequence for SLC7A3 (NM_032803.3,1730-1748).
ccactccccttcactttaa

SEQ ID NO: 259440 - DNA, 19 bp, Homo sapiens
  siRNA target sequence for SLC7A3 (NM_032803.3,1733-1751).
ctccccttcactttaaggt

SEQ ID NO: 259441 - DNA, 19 bp, Homo sapiens
  siRNA target sequence for SLC7A3 (NM_032803.3,1770-1788).
cccactaatgagcatcttt

SEQ ID NO: 259442 - DNA, 19 bp, Homo sapiens
  siRNA target sequence for SLC7A3 (NM_032803.3,1772-1790).
cactaatgagcatctttgt

SEQ ID NO: 259443 - DNA, 19 bp, Homo sapiens
  siRNA target sequence for SLC7A3 (NM_032803.3,1774-1792).
ctaatgagcatctttgtga

SEQ ID NO: 259444 - DNA, 19 bp, Homo sapiens
  siRNA target sequence for SLC7A3 (NM_032803.3,1789-1807).
gtgaatatttaccttatga

SEQ ID NO: 259445 - DNA, 19 bp, Homo sapiens
  siRNA target sequence for SLC7A3 (NM_032803.3,1896-1914).
cctggaagagattaagagt

SEQ ID NO: 259446 - DNA, 19 bp, Homo sapiens
  siRNA target sequence for SLC7A3 (NM_032803.3,1918-1936).
caaccctcacgcaagtcta

SEQ ID NO: 259447 - DNA, 19 bp, Homo sapiens
  siRNA target sequence for SLC7A3 (NM_032803.3,1932-1950).
gtctagagccaaaactgta

SEQ ID NO: 259448 - DNA, 19 bp, Homo sapiens
  siRNA target sequence for SLC7A5 (NM_003486.4,776-794).
ctagatcccaacttctcat

SEQ ID NO: 259449 - DNA, 19 bp, Homo sapiens
  siRNA target sequence for SLC7A5 (NM_003486.4,855-873).
cctatggaggatggaatta

SEQ ID NO: 259450 - DNA, 19 bp, Homo sapiens
  siRNA target sequence for SLC7A5 (NM_003486.4,1033-1051).
cgtggacttcgggaactat

SEQ ID NO: 259451 - DNA, 19 bp, Homo sapiens
  siRNA target sequence for SLC7A5 (NM_003486.4,1497-1515).
gcgggctgcccgtctactt

SEQ ID NO: 259452 - DNA, 19 bp, Homo sapiens
  siRNA target sequence for SLC7A8 (NM_012244.2,739-757).
gccaggcaccgaaacaaca

SEQ ID NO: 259453 - DNA, 19 bp, Homo sapiens
  siRNA target sequence for SLC7A8 (NM_012244.2,748-766).
cgaaacaacaccgaaaaga

SEQ ID NO: 259454 - DNA, 19 bp, Homo sapiens
  siRNA target sequence for SLC7A8 (NM_012244.2,821-839).
gcggagtagccctgaagaa

SEQ ID NO: 259455 - DNA, 19 bp, Homo sapiens
  siRNA target sequence for SLC7A8 (NM_012244.2,885-903).
catcggctctggaatcttt

SEQ ID NO: 259456 - DNA, 19 bp, Homo sapiens
  siRNA target sequence for SLC7A8 (NM_012244.2,952-970).
ctcatcgtctggattgtga

SEQ ID NO: 259457 - DNA, 19 bp, Homo sapiens
  siRNA target sequence for SLC7A8 (NM_012244.2,1240-1258).
ctcacatgggtcaactgtt

SEQ ID NO: 259458 - DNA, 19 bp, Homo sapiens
  siRNA target sequence for SLC7A8 (NM_012244.2,1279-1297).
cgggttcaagacatcttca

SEQ ID NO: 259459 - DNA, 19 bp, Homo sapiens
  siRNA target sequence for SLC7A8 (NM_012244.2,1316-1334).
ccttggccctgattatcat

SEQ ID NO: 259460 - DNA, 19 bp, Homo sapiens
  siRNA target sequence for SLC7A8 (NM_012244.2,1340-1358).
ggattgtacagatatgcaa

SEQ ID NO: 259461 - DNA, 19 bp, Homo sapiens
  siRNA target sequence for SLC7A8 (NM_012244.2,1425-1443).
cgtcgcactggctttcctt

SEQ ID NO: 259462 - DNA, 19 bp, Homo sapiens
  siRNA target sequence for SLC7A8 (NM_012244.2,1469-1487).
ggaactttctgaattacgt

SEQ ID NO: 259463 - DNA, 19 bp, Homo sapiens
  siRNA target sequence for SLC7A8 (NM_012244.2,1488-1506).
gactgaggagcttgttgat

SEQ ID NO: 259464 - DNA, 19 bp, Homo sapiens
  siRNA target sequence for SLC7A8 (NM_012244.2,1498-1516).
cttgttgatccctacaaga

SEQ ID NO: 259465 - DNA, 19 bp, Homo sapiens
  siRNA target sequence for SLC7A8 (NM_012244.2,1626-1644).
cgccgtcgctgtgactttt

SEQ ID NO: 259466 - DNA, 19 bp, Homo sapiens
  siRNA target sequence for SLC7A8 (NM_012244.2,1629-1647).
cgtcgctgtgacttttgga

SEQ ID NO: 259467 - DNA, 19 bp, Homo sapiens
  siRNA target sequence for SLC7A8 (NM_012244.2,2097-2115).
gacaggagtgcctgtctat

SEQ ID NO: 259468 - DNA, 19 bp, Homo sapiens
  siRNA target sequence for SLC7A8 (NM_012244.2,2102-2120).
gagtgcctgtctatttcct

SEQ ID NO: 259469 - DNA, 19 bp, Homo sapiens
  siRNA target sequence for SLC7A8 (NM_012244.2,2134-2152).
caacacaagcccaagtgtt

SEQ ID NO: 259470 - DNA, 19 bp, Homo sapiens
  siRNA target sequence for SLC7A8 (NM_012244.2,2234-2252).
ggacagaggaggctaatga

SEQ ID NO: 259471 - DNA, 19 bp, Homo sapiens
  siRNA target sequence for FLJ10815 (NM_018231.1,586-604).
ctgggtgcagggttactca

SEQ ID NO: 259472 - DNA, 19 bp, Homo sapiens
  siRNA target sequence for FLJ10815 (NM_018231.1,846-864).
cgaccagcaggacaagatt

SEQ ID NO: 259473 - DNA, 19 bp, Homo sapiens
  siRNA target sequence for FLJ10815 (NM_018231.1,849-867).
ccagcaggacaagattata

SEQ ID NO: 259474 - DNA, 19 bp, Homo sapiens
  siRNA target sequence for FLJ10815 (NM_018231.1,1040-1058).
ccatcgttatcatcaagta

SEQ ID NO: 259475 - DNA, 19 bp, Homo sapiens
  siRNA target sequence for FLJ10815 (NM_018231.1,1045-1063).
gttatcatcaagtacatct

SEQ ID NO: 259476 - DNA, 19 bp, Homo sapiens
  siRNA target sequence for FLJ10815 (NM_018231.1,1056-1074).
gtacatctggccagataaa

SEQ ID NO: 259477 - DNA, 19 bp, Homo sapiens
  siRNA target sequence for FLJ10815 (NM_018231.1,1748-1766).
cagccaacgccatctttgt

SEQ ID NO: 259478 - DNA, 19 bp, Homo sapiens
  siRNA target sequence for FLJ39822 (NM_173512.1,373-391).
ctgggtttcatatgttaca

SEQ ID NO: 259479 - DNA, 19 bp, Homo sapiens
  siRNA target sequence for FLJ39822 (NM_173512.1,375-393).
gggtttcatatgttacaga

SEQ ID NO: 259480 - DNA, 19 bp, Homo sapiens
  siRNA target sequence for FLJ39822 (NM_173512.1,570-588).
gactttccacagttacctt

SEQ ID NO: 259481 - DNA, 19 bp, Homo sapiens
  siRNA target sequence for FLJ39822 (NM_173512.1,576-594).
ccacagttacctttactct

SEQ ID NO: 259482 - DNA, 19 bp, Homo sapiens
  siRNA target sequence for FLJ39822 (NM_173512.1,610-628).
ccgaaatatagcaaagctt

SEQ ID NO: 259483 - DNA, 19 bp, Homo sapiens
  siRNA target sequence for FLJ39822 (NM_173512.1,646-664).
ctctacaggtttaacaact

SEQ ID NO: 259484 - DNA, 19 bp, Homo sapiens
  siRNA target sequence for FLJ39822 (NM_173512.1,660-678).
caactctgattcttggaat

SEQ ID NO: 259485 - DNA, 19 bp, Homo sapiens
  siRNA target sequence for FLJ39822 (NM_173512.1,703-721).
gggtccacacataccaaaa

SEQ ID NO: 259486 - DNA, 19 bp, Homo sapiens
  siRNA target sequence for FLJ39822 (NM_173512.1,704-722).
ggtccacacataccaaaaa

SEQ ID NO: 259487 - DNA, 19 bp, Homo sapiens
  siRNA target sequence for FLJ39822 (NM_173512.1,728-746).
gacgcttgggtatttgcaa

SEQ ID NO: 259488 - DNA, 19 bp, Homo sapiens
  siRNA target sequence for FLJ39822 (NM_173512.1,761-779).
caagcggtcggggttatgt

SEQ ID NO: 259489 - DNA, 19 bp, Homo sapiens
  siRNA target sequence for FLJ39822 (NM_173512.1,764-782).
gcggtcggggttatgtctt

SEQ ID NO: 259490 - DNA, 19 bp, Homo sapiens
  siRNA target sequence for FLJ39822 (NM_173512.1,765-783).
cggtcggggttatgtcttt

SEQ ID NO: 259491 - DNA, 19 bp, Homo sapiens
  siRNA target sequence for FLJ39822 (NM_173512.1,769-787).
cggggttatgtcttttgca

SEQ ID NO: 259492 - DNA, 19 bp, Homo sapiens
  siRNA target sequence for FLJ39822 (NM_173512.1,796-814).
ccaccataactccttctta

SEQ ID NO: 259493 - DNA, 19 bp, Homo sapiens
  siRNA target sequence for FLJ39822 (NM_173512.1,850-868).
gtggtcccgccttatccat

SEQ ID NO: 259494 - DNA, 19 bp, Homo sapiens
  siRNA target sequence for FLJ39822 (NM_173512.1,852-870).
ggtcccgccttatccatat

SEQ ID NO: 259495 - DNA, 19 bp, Homo sapiens
  siRNA target sequence for FLJ39822 (NM_173512.1,866-884).
catatgtccatcgtgattt

SEQ ID NO: 259496 - DNA, 19 bp, Homo sapiens
  siRNA target sequence for FLJ39822 (NM_173512.1,871-889).
gtccatcgtgatttctgta

SEQ ID NO: 259497 - DNA, 19 bp, Homo sapiens
  siRNA target sequence for FLJ39822 (NM_173512.1,873-891).
ccatcgtgatttctgtatt

SEQ ID NO: 259498 - DNA, 19 bp, Homo sapiens
  siRNA target sequence for FLJ39822 (NM_173512.1,940-958).
cacccaaggggacttattt

SEQ ID NO: 259499 - DNA, 19 bp, Homo sapiens
  siRNA target sequence for FLJ39822 (NM_173512.1,943-961).
ccaaggggacttatttgaa

SEQ ID NO: 259500 - DNA, 19 bp, Homo sapiens
  siRNA target sequence for FLJ39822 (NM_173512.1,948-966).
gggacttatttgaaaatta

SEQ ID NO: 259501 - DNA, 19 bp, Homo sapiens
  siRNA target sequence for FLJ39822 (NM_173512.1,980-998).
gacctggtaacatttggaa

SEQ ID NO: 259502 - DNA, 19 bp, Homo sapiens
  siRNA target sequence for FLJ39822 (NM_173512.1,985-1003).
ggtaacatttggaagattt

SEQ ID NO: 259503 - DNA, 19 bp, Homo sapiens
  siRNA target sequence for FLJ39822 (NM_173512.1,1061-1079).
gtaattgccaatgtgtttt

SEQ ID NO: 259504 - DNA, 19 bp, Homo sapiens
  siRNA target sequence for FLJ39822 (NM_173512.1,1098-1116).
cggttttccacattgttgt

SEQ ID NO: 259505 - DNA, 19 bp, Homo sapiens
  siRNA target sequence for FLJ39822 (NM_173512.1,1099-1117).
ggttttccacattgttgta

SEQ ID NO: 259506 - DNA, 19 bp, Homo sapiens
  siRNA target sequence for FLJ39822 (NM_173512.1,1100-1118).
gttttccacattgttgtaa

SEQ ID NO: 259507 - DNA, 19 bp, Homo sapiens
  siRNA target sequence for FLJ39822 (NM_173512.1,1167-1185).
gcctcgggatagttctaga

SEQ ID NO: 259508 - DNA, 19 bp, Homo sapiens
  siRNA target sequence for FLJ39822 (NM_173512.1,1168-1186).
cctcgggatagttctagaa

SEQ ID NO: 259509 - DNA, 19 bp, Homo sapiens
  siRNA target sequence for FLJ39822 (NM_173512.1,1173-1191).
ggatagttctagaactcaa

SEQ ID NO: 259510 - DNA, 19 bp, Homo sapiens
  siRNA target sequence for FLJ39822 (NM_173512.1,1174-1192).
gatagttctagaactcaat

SEQ ID NO: 259511 - DNA, 19 bp, Homo sapiens
  siRNA target sequence for FLJ39822 (NM_173512.1,1229-1247).
ccatcagcctgttatctga

SEQ ID NO: 259512 - DNA, 19 bp, Homo sapiens
  siRNA target sequence for FLJ39822 (NM_173512.1,1230-1248).
catcagcctgttatctgaa

SEQ ID NO: 259513 - DNA, 19 bp, Homo sapiens
  siRNA target sequence for FLJ39822 (NM_173512.1,1233-1251).
cagcctgttatctgaaact

SEQ ID NO: 259514 - DNA, 19 bp, Homo sapiens
  siRNA target sequence for FLJ39822 (NM_173512.1,1266-1284).
ggacacactccgataagat

SEQ ID NO: 259515 - DNA, 19 bp, Homo sapiens
  siRNA target sequence for FLJ39822 (NM_173512.1,1267-1285).
gacacactccgataagatt

SEQ ID NO: 259516 - DNA, 19 bp, Homo sapiens
  siRNA target sequence for FLJ39822 (NM_173512.1,1273-1291).
ctccgataagattatgtct

SEQ ID NO: 259517 - DNA, 19 bp, Homo sapiens
  siRNA target sequence for FLJ39822 (NM_173512.1,1331-1349).
ggattcgtcatggctatta

SEQ ID NO: 259518 - DNA, 19 bp, Homo sapiens
  siRNA target sequence for FLJ39822 (NM_173512.1,1339-1357).
catggctattacaaatact

SEQ ID NO: 259519 - DNA, 19 bp, Homo sapiens
  siRNA target sequence for FLJ39822 (NM_173512.1,1342-1360).
ggctattacaaatactcaa

SEQ ID NO: 259520 - DNA, 19 bp, Homo sapiens
  siRNA target sequence for FLJ39822 (NM_173512.1,1365-1383).
gcacccatgggcaggaaat

SEQ ID NO: 259521 - DNA, 19 bp, Homo sapiens
  siRNA target sequence for FLJ39822 (NM_173512.1,1387-1405).
ctactgctttcctgacaat

SEQ ID NO: 259522 - DNA, 19 bp, Homo sapiens
  siRNA target sequence for FLJ39822 (NM_173512.1,1393-1411).
ctttcctgacaatttctct

SEQ ID NO: 259523 - DNA, 19 bp, Homo sapiens
  siRNA target sequence for FLJ39822 (NM_173512.1,1444-1462).
gacaacacaactttctact

SEQ ID NO: 259524 - DNA, 19 bp, Homo sapiens
  siRNA target sequence for FLJ90709 (NM_173514.1,136-154).
ggcaaatatgaatagtgat

SEQ ID NO: 259525 - DNA, 19 bp, Homo sapiens
  siRNA target sequence for FLJ90709 (NM_173514.1,169-187).
cacctctgaggtagatcat

SEQ ID NO: 259526 - DNA, 19 bp, Homo sapiens
  siRNA target sequence for FLJ90709 (NM_173514.1,171-189).
cctctgaggtagatcatga

SEQ ID NO: 259527 - DNA, 19 bp, Homo sapiens
  siRNA target sequence for FLJ90709 (NM_173514.1,194-212).
gatcctggacctatgaata

SEQ ID NO: 259528 - DNA, 19 bp, Homo sapiens
  siRNA target sequence for FLJ90709 (NM_173514.1,198-216).
ctggacctatgaatatcca

SEQ ID NO: 259529 - DNA, 19 bp, Homo sapiens
  siRNA target sequence for FLJ90709 (NM_173514.1,221-239).
gagccatcggatctaagat

SEQ ID NO: 259530 - DNA, 19 bp, Homo sapiens
  siRNA target sequence for FLJ90709 (NM_173514.1,264-282).
ccacaaacatcgtgaatgt

SEQ ID NO: 259531 - DNA, 19 bp, Homo sapiens
  siRNA target sequence for FLJ90709 (NM_173514.1,267-285).
caaacatcgtgaatgtgaa

SEQ ID NO: 259532 - DNA, 19 bp, Homo sapiens
  siRNA target sequence for FLJ90709 (NM_173514.1,271-289).
catcgtgaatgtgaatcat

SEQ ID NO: 259533 - DNA, 19 bp, Homo sapiens
  siRNA target sequence for FLJ90709 (NM_173514.1,410-428).
gaagagtgctatgtgtata

SEQ ID NO: 259534 - DNA, 19 bp, Homo sapiens
  siRNA target sequence for FLJ90709 (NM_173514.1,436-454).
gggctctgcttataaactt

SEQ ID NO: 259535 - DNA, 19 bp, Homo sapiens
  siRNA target sequence for FLJ90709 (NM_173514.1,443-461).
gcttataaacttcaaagtt

SEQ ID NO: 259536 - DNA, 19 bp, Homo sapiens
  siRNA target sequence for FLJ90709 (NM_173514.1,465-483).
ctgaaggatacggtaaaaa

SEQ ID NO: 259537 - DNA, 19 bp, Homo sapiens
  siRNA target sequence for FLJ90709 (NM_173514.1,467-485).
gaaggatacggtaaaaaca

SEQ ID NO: 259538 - DNA, 19 bp, Homo sapiens
  siRNA target sequence for FLJ90709 (NM_173514.1,475-493).
cggtaaaaacaccagttta

SEQ ID NO: 259539 - DNA, 19 bp, Homo sapiens
  siRNA target sequence for FLJ90709 (NM_173514.1,543-561).
gcattccttggggcataaa

SEQ ID NO: 259540 - DNA, 19 bp, Homo sapiens
  siRNA target sequence for FLJ90709 (NM_173514.1,556-574).
cataaaacaggctggattt

SEQ ID NO: 259541 - DNA, 19 bp, Homo sapiens
  siRNA target sequence for FLJ90709 (NM_173514.1,579-597).
ctggaatgtgtgtcatcat

SEQ ID NO: 259542 - DNA, 19 bp, Homo sapiens
  siRNA target sequence for FLJ90709 (NM_173514.1,604-622).
gggccttttaacactttat

SEQ ID NO: 259543 - DNA, 19 bp, Homo sapiens
  siRNA target sequence for FLJ90709 (NM_173514.1,624-642).
gctgctacagagtagtgaa

SEQ ID NO: 259544 - DNA, 19 bp, Homo sapiens
  siRNA target sequence for FLJ90709 (NM_173514.1,638-656).
gtgaaatcacggactatga

SEQ ID NO: 259545 - DNA, 19 bp, Homo sapiens
  siRNA target sequence for FLJ90709 (NM_173514.1,756-774).
ctctcattggagcaatgat

SEQ ID NO: 259546 - DNA, 19 bp, Homo sapiens
  siRNA target sequence for FLJ90709 (NM_173514.1,760-778).
cattggagcaatgatagtt

SEQ ID NO: 259547 - DNA, 19 bp, Homo sapiens
  siRNA target sequence for FLJ90709 (NM_173514.1,764-782).
ggagcaatgatagtttatt

SEQ ID NO: 259548 - DNA, 19 bp, Homo sapiens
  siRNA target sequence for FLJ90709 (NM_173514.1,776-794).
gtttattgggtgcttatgt

SEQ ID NO: 259549 - DNA, 19 bp, Homo sapiens
  siRNA target sequence for FLJ90709 (NM_173514.1,783-801).
gggtgcttatgtcaaattt

SEQ ID NO: 259550 - DNA, 19 bp, Homo sapiens
  siRNA target sequence for FLJ90709 (NM_173514.1,784-802).
ggtgcttatgtcaaatttt

SEQ ID NO: 259551 - DNA, 19 bp, Homo sapiens
  siRNA target sequence for FLJ90709 (NM_173514.1,861-879).
ctatactgagtaccaataa

SEQ ID NO: 259552 - DNA, 19 bp, Homo sapiens
  siRNA target sequence for FLJ90709 (NM_173514.1,866-884).
ctgagtaccaataatagca

SEQ ID NO: 259553 - DNA, 19 bp, Homo sapiens
  siRNA target sequence for FLJ90709 (NM_173514.1,958-976).
cacaggagcccaacagttt

SEQ ID NO: 259554 - DNA, 19 bp, Homo sapiens
  siRNA target sequence for FLJ90709 (NM_173514.1,960-978).
caggagcccaacagtttga

SEQ ID NO: 259555 - DNA, 19 bp, Homo sapiens
  siRNA target sequence for FLJ90709 (NM_173514.1,999-1017).
ggacagtccccttttatct

SEQ ID NO: 259556 - DNA, 19 bp, Homo sapiens
  siRNA target sequence for FLJ90709 (NM_173514.1,1000-1018).
gacagtccccttttatctt

SEQ ID NO: 259557 - DNA, 19 bp, Homo sapiens
  siRNA target sequence for FLJ90709 (NM_173514.1,1002-1020).
cagtccccttttatcttgt

SEQ ID NO: 259558 - DNA, 19 bp, Homo sapiens
  siRNA target sequence for FLJ90709 (NM_173514.1,1087-1105).
cacagtgtctgtcctttat

SEQ ID NO: 259559 - DNA, 19 bp, Homo sapiens
  siRNA target sequence for FLJ90709 (NM_173514.1,1131-1149).
ctgttcgcttgggatttca

SEQ ID NO: 259560 - DNA, 19 bp, Homo sapiens
  siRNA target sequence for FLJ90709 (NM_173514.1,1306-1324).
ggacttgtgcattgcttat

SEQ ID NO: 259561 - DNA, 19 bp, Homo sapiens
  siRNA target sequence for FLJ90709 (NM_173514.1,1320-1338).
cttatatgctggtgacatt

SEQ ID NO: 259562 - DNA, 19 bp, Homo sapiens
  siRNA target sequence for FLJ90709 (NM_173514.1,1388-1406).
ccattatccaaagattgta

SEQ ID NO: 259563 - DNA, 19 bp, Homo sapiens
  siRNA target sequence for FLJ90709 (NM_173514.1,1409-1427).
gagcagaattttttagaca

SEQ ID NO: 259564 - DNA, 19 bp, Homo sapiens
  siRNA target sequence for FLJ90709 (NM_173514.1,1489-1507).
gactgtatacccactctta

SEQ ID NO: 259565 - DNA, 19 bp, Homo sapiens
  siRNA target sequence for FLJ90709 (NM_173514.1,1538-1556).
catatcttcggtgacattt

SEQ ID NO: 259566 - DNA, 19 bp, Homo sapiens
  siRNA target sequence for FLJ90709 (NM_173514.1,1570-1588).
ccatgtgctgattcttaat

SEQ ID NO: 259567 - DNA, 19 bp, Homo sapiens
  siRNA target sequence for FLJ90709 (NM_173514.1,1610-1628).
gtgatcatggcctgtttct

SEQ ID NO: 259568 - DNA, 19 bp, Homo sapiens
  siRNA target sequence for FLJ90709 (NM_173514.1,1621-1639).
ctgtttctacccaaacata

SEQ ID NO: 259569 - DNA, 19 bp, Homo sapiens
  siRNA target sequence for FLJ90709 (NM_173514.1,1636-1654).
cataggagggatcataaga

SEQ ID NO: 259570 - DNA, 19 bp, Homo sapiens
  siRNA target sequence for FLJ90709 (NM_173514.1,1640-1658).
ggagggatcataagatatt

SEQ ID NO: 259571 - DNA, 19 bp, Homo sapiens
  siRNA target sequence for FLJ90709 (NM_173514.1,1671-1689).
gtggactggcctttgtatt

SEQ ID NO: 259572 - DNA, 19 bp, Homo sapiens
  siRNA target sequence for FLJ90709 (NM_173514.1,1737-1755).
gtctgacatggcctaaatt

SEQ ID NO: 259573 - DNA, 19 bp, Homo sapiens
  siRNA target sequence for FLJ90709 (NM_173514.1,1763-1781).
cacgttttcatcatcattt

SEQ ID NO: 259574 - DNA, 19 bp, Homo sapiens
  siRNA target sequence for FLJ90709 (NM_173514.1,1785-1803).
gcgtggctaacctgattgt

SEQ ID NO: 259575 - DNA, 19 bp, Homo sapiens
  siRNA target sequence for FLJ90709 (NM_173514.1,1786-1804).
cgtggctaacctgattgtt

SEQ ID NO: 259576 - DNA, 19 bp, Homo sapiens
  siRNA target sequence for FLJ90709 (NM_173514.1,1791-1809).
ctaacctgattgttcagtt

SEQ ID NO: 259577 - DNA, 19 bp, Homo sapiens
  siRNA target sequence for MGC15523 (NM_138570.1,427-445).
cccttctgcttcaaacagt

SEQ ID NO: 259578 - DNA, 19 bp, Homo sapiens
  siRNA target sequence for MGC15523 (NM_138570.1,661-679).
gacttggggtccaacttct

SEQ ID NO: 259579 - DNA, 19 bp, Homo sapiens
  siRNA target sequence for MGC15523 (NM_138570.1,999-1017).
ggatgagccgtcagtgaaa

SEQ ID NO: 259580 - DNA, 19 bp, Homo sapiens
  siRNA target sequence for MGC15523 (NM_138570.1,1000-1018).
gatgagccgtcagtgaaaa

SEQ ID NO: 259581 - DNA, 19 bp, Homo sapiens
  siRNA target sequence for MGC15523 (NM_138570.1,1165-1183).
cgtgtgggcttcatgatgt

SEQ ID NO: 259582 - DNA, 19 bp, Homo sapiens
  siRNA target sequence for MGC15523 (NM_138570.1,1293-1311).
gccccctctccggtttaaa

SEQ ID NO: 259583 - DNA, 19 bp, Homo sapiens
  siRNA target sequence for MGC15523 (NM_138570.1,1296-1314).
ccctctccggtttaaagca

SEQ ID NO: 259584 - DNA, 19 bp, Homo sapiens
  siRNA target sequence for MGC15523 (NM_138570.1,1432-1450).
gcgctgatctacaagaaaa

SEQ ID NO: 259585 - DNA, 19 bp, Homo sapiens
  siRNA target sequence for MGC15523 (NM_138570.1,1589-1607).
gagaggccgagggtttgat

SEQ ID NO: 259586 - DNA, 19 bp, Homo sapiens
  siRNA target sequence for MGC15523 (NM_138570.1,1591-1609).
gaggccgagggtttgatga

SEQ ID NO: 259587 - DNA, 19 bp, Homo sapiens
  siRNA target sequence for MGC15523 (NM_138570.1,1966-1984).
cctctgcccgactcagaaa

SEQ ID NO: 259588 - DNA, 19 bp, Homo sapiens
  siRNA target sequence for MGC15523 (NM_138570.1,2641-2659).
cgtcacatggcttgtgatt

SEQ ID NO: 259589 - DNA, 19 bp, Homo sapiens
  siRNA target sequence for SLC12A8 (NM_024628.3,225-243).
catcctgcatgatcaacat

SEQ ID NO: 259590 - DNA, 19 bp, Homo sapiens
  siRNA target sequence for SLC12A8 (NM_024628.3,398-416).
ggcgtctactccatgatct

SEQ ID NO: 259591 - DNA, 19 bp, Homo sapiens
  siRNA target sequence for SLC12A8 (NM_024628.3,447-465).
ccatcgggctgctctatgt

SEQ ID NO: 259592 - DNA, 19 bp, Homo sapiens
  siRNA target sequence for SLC12A8 (NM_024628.3,482-500).
gcaggtgccatgtatatca

SEQ ID NO: 259593 - DNA, 19 bp, Homo sapiens
  siRNA target sequence for SLC12A8 (NM_024628.3,530-548).
ctgggcctcgggaatatct

SEQ ID NO: 259594 - DNA, 19 bp, Homo sapiens
  siRNA target sequence for SLC12A8 (NM_024628.3,552-570).
ctgtgcgaggaatttcagt

SEQ ID NO: 259595 - DNA, 19 bp, Homo sapiens
  siRNA target sequence for SLC12A8 (NM_024628.3,585-603).
ccttgctgggcattaacct

SEQ ID NO: 259596 - DNA, 19 bp, Homo sapiens
  siRNA target sequence for SLC12A8 (NM_024628.3,605-623).
gcaggtgtcaaatggataa

SEQ ID NO: 259597 - DNA, 19 bp, Homo sapiens
  siRNA target sequence for SLC12A8 (NM_024628.3,606-624).
caggtgtcaaatggataat

SEQ ID NO: 259598 - DNA, 19 bp, Homo sapiens
  siRNA target sequence for SLC12A8 (NM_024628.3,703-721).
cccagaacatggtttcatt

SEQ ID NO: 259599 - DNA, 19 bp, Homo sapiens
  siRNA target sequence for SLC12A8 (NM_024628.3,734-752).
gaactgctacagaacaaca

SEQ ID NO: 259600 - DNA, 19 bp, Homo sapiens
  siRNA target sequence for SLC12A8 (NM_024628.3,903-921).
gcatctcgtggtttctgta

SEQ ID NO: 259601 - DNA, 19 bp, Homo sapiens
  siRNA target sequence for SLC12A8 (NM_024628.3,962-980).
gaggcccttcgctatgact

SEQ ID NO: 259602 - DNA, 19 bp, Homo sapiens
  siRNA target sequence for SLC12A8 (NM_024628.3,982-1000).
cctgatagcggaaaaggta

SEQ ID NO: 259603 - DNA, 19 bp, Homo sapiens
  siRNA target sequence for SLC12A8 (NM_024628.3,983-1001).
ctgatagcggaaaaggtat

SEQ ID NO: 259604 - DNA, 19 bp, Homo sapiens
  siRNA target sequence for SLC12A8 (NM_024628.3,1053-1071).
cctgcatgggaggacttta

SEQ ID NO: 259605 - DNA, 19 bp, Homo sapiens
  siRNA target sequence for SLC12A8 (NM_024628.3,1255-1273).
cttcatgctgacatacgtt

SEQ ID NO: 259606 - DNA, 19 bp, Homo sapiens
  siRNA target sequence for SLC12A8 (NM_024628.3,1271-1289).
gttgcagtggactactctt

SEQ ID NO: 259607 - DNA, 19 bp, Homo sapiens
  siRNA target sequence for SLC12A8 (NM_024628.3,1274-1292).
gcagtggactactcttact

SEQ ID NO: 259608 - DNA, 19 bp, Homo sapiens
  siRNA target sequence for SLC12A8 (NM_024628.3,1442-1460).
ggcacgctactggaattca

SEQ ID NO: 259609 - DNA, 19 bp, Homo sapiens
  siRNA target sequence for SLC12A8 (NM_024628.3,1575-1593).
ccaagcagaccctacaaga

SEQ ID NO: 259610 - DNA, 19 bp, Homo sapiens
  siRNA target sequence for SLC12A8 (NM_024628.3,1576-1594).
caagcagaccctacaagat

SEQ ID NO: 259611 - DNA, 19 bp, Homo sapiens
  siRNA target sequence for SLC12A8 (NM_024628.3,1719-1737).
ctcagcctgagggaacata

SEQ ID NO: 259612 - DNA, 19 bp, Homo sapiens
  siRNA target sequence for SLC12A8 (NM_024628.3,1754-1772).
cctgagctgtgcaaccaat

SEQ ID NO: 259613 - DNA, 19 bp, Homo sapiens
  siRNA target sequence for SLC12A8 (NM_024628.3,1895-1913).
gggtcccttctcatcatgt

SEQ ID NO: 259614 - DNA, 19 bp, Homo sapiens
  siRNA target sequence for SLC12A8 (NM_024628.3,1899-1917).
cccttctcatcatgtttgt

SEQ ID NO: 259615 - DNA, 19 bp, Homo sapiens
  siRNA target sequence for SLC12A8 (NM_024628.3,1916-1934).
gtgatacagtgggtgtata

SEQ ID NO: 259616 - DNA, 19 bp, Homo sapiens
  siRNA target sequence for SLC12A8 (NM_024628.3,1926-1944).
gggtgtataccctggttaa

SEQ ID NO: 259617 - DNA, 19 bp, Homo sapiens
  siRNA target sequence for SLC12A8 (NM_024628.3,1928-1946).
gtgtataccctggttaaca

SEQ ID NO: 259618 - DNA, 19 bp, Homo sapiens
  siRNA target sequence for SLC12A8 (NM_024628.3,1952-1970).
gttgctgccatcgtgtatt

SEQ ID NO: 259619 - DNA, 19 bp, Homo sapiens
  siRNA target sequence for SLC12A8 (NM_024628.3,1956-1974).
ctgccatcgtgtatttcta

SEQ ID NO: 259620 - DNA, 19 bp, Homo sapiens
  siRNA target sequence for SLC12A8 (NM_024628.3,1958-1976).
gccatcgtgtatttctaca

SEQ ID NO: 259621 - DNA, 19 bp, Homo sapiens
  siRNA target sequence for SLC12A8 (NM_024628.3,1960-1978).
catcgtgtatttctacatt

SEQ ID NO: 259622 - DNA, 19 bp, Homo sapiens
  siRNA target sequence for SLC36A1 (NM_078483.1,267-285).
cgtcggaaggcctcaacaa

SEQ ID NO: 259623 - DNA, 19 bp, Homo sapiens
  siRNA target sequence for SLC36A1 (NM_078483.1,310-328).
gcgctttggtcaaagcaat

SEQ ID NO: 259624 - DNA, 19 bp, Homo sapiens
  siRNA target sequence for SLC36A1 (NM_078483.1,311-329).
cgctttggtcaaagcaata

SEQ ID NO: 259625 - DNA, 19 bp, Homo sapiens
  siRNA target sequence for SLC36A1 (NM_078483.1,348-366).
ccttgatccacctgttaaa

SEQ ID NO: 259626 - DNA, 19 bp, Homo sapiens
  siRNA target sequence for SLC36A1 (NM_078483.1,349-367).
cttgatccacctgttaaaa

SEQ ID NO: 259627 - DNA, 19 bp, Homo sapiens
  siRNA target sequence for SLC36A1 (NM_078483.1,358-376).
cctgttaaaaggcaacatt

SEQ ID NO: 259628 - DNA, 19 bp, Homo sapiens
  siRNA target sequence for SLC36A1 (NM_078483.1,478-496).
gggtatcctggtgaaatgt

SEQ ID NO: 259629 - DNA, 19 bp, Homo sapiens
  siRNA target sequence for SLC36A1 (NM_078483.1,512-530).
cgcaggctgaataaatcct

SEQ ID NO: 259630 - DNA, 19 bp, Homo sapiens
  siRNA target sequence for SLC36A1 (NM_078483.1,612-630).
gacgtgttgtggacttctt

SEQ ID NO: 259631 - DNA, 19 bp, Homo sapiens
  siRNA target sequence for SLC36A1 (NM_078483.1,673-691).
gtttctggctgacaacttt

SEQ ID NO: 259632 - DNA, 19 bp, Homo sapiens
  siRNA target sequence for SLC36A1 (NM_078483.1,688-706).
ctttaaacaggtgatagaa

SEQ ID NO: 259633 - DNA, 19 bp, Homo sapiens
  siRNA target sequence for SLC36A1 (NM_078483.1,711-729).
ccaatgggaccaccaataa

SEQ ID NO: 259634 - DNA, 19 bp, Homo sapiens
  siRNA target sequence for SLC36A1 (NM_078483.1,836-854).
cgagccctgtccatcttct

SEQ ID NO: 259635 - DNA, 19 bp, Homo sapiens
  siRNA target sequence for SLC36A1 (NM_078483.1,892-910).
catgatctaccagttcatt

SEQ ID NO: 259636 - DNA, 19 bp, Homo sapiens
  siRNA target sequence for SLC36A1 (NM_078483.1,895-913).
gatctaccagttcattgtt

SEQ ID NO: 259637 - DNA, 19 bp, Homo sapiens
  siRNA target sequence for SLC36A1 (NM_078483.1,976-994).
ctttggcacagcgattttt

SEQ ID NO: 259638 - DNA, 19 bp, Homo sapiens
  siRNA target sequence for SLC36A1 (NM_078483.1,980-998).
ggcacagcgattttttcat

SEQ ID NO: 259639 - DNA, 19 bp, Homo sapiens
  siRNA target sequence for SLC36A1 (NM_078483.1,981-999).
gcacagcgattttttcatt

SEQ ID NO: 259640 - DNA, 19 bp, Homo sapiens
  siRNA target sequence for SLC36A1 (NM_078483.1,982-1000).
cacagcgattttttcattt

SEQ ID NO: 259641 - DNA, 19 bp, Homo sapiens
  siRNA target sequence for SLC36A1 (NM_078483.1,1116-1134).
gtctggggtacctgcaatt

SEQ ID NO: 259642 - DNA, 19 bp, Homo sapiens
  siRNA target sequence for SLC36A1 (NM_078483.1,1120-1138).
ggggtacctgcaatttgga

SEQ ID NO: 259643 - DNA, 19 bp, Homo sapiens
  siRNA target sequence for SLC36A1 (NM_078483.1,1230-1248).
cctacgcactccagttcta

SEQ ID NO: 259644 - DNA, 19 bp, Homo sapiens
  siRNA target sequence for SLC36A1 (NM_078483.1,1420-1438).
gacctatgaggctctctat

SEQ ID NO: 259645 - DNA, 19 bp, Homo sapiens
  siRNA target sequence for SLC36A1 (NM_078483.1,1422-1440).
cctatgaggctctctatga

SEQ ID NO: 259646 - DNA, 19 bp, Homo sapiens
  siRNA target sequence for SLC36A1 (NM_078483.1,1460-1478).
gctcccatcttcatcaatt

SEQ ID NO: 259647 - DNA, 19 bp, Homo sapiens
  siRNA target sequence for SLC36A4 (NM_152313.2,138-156).
ggcgcgaggagctagatat

SEQ ID NO: 259648 - DNA, 19 bp, Homo sapiens
  siRNA target sequence for SLC36A4 (NM_152313.2,142-160).
cgaggagctagatatggat

SEQ ID NO: 259649 - DNA, 19 bp, Homo sapiens
  siRNA target sequence for SLC36A4 (NM_152313.2,149-167).
ctagatatggatgtaatga

SEQ ID NO: 259650 - DNA, 19 bp, Homo sapiens
  siRNA target sequence for SLC36A4 (NM_152313.2,161-179).
gtaatgaggcccttgataa

SEQ ID NO: 259651 - DNA, 19 bp, Homo sapiens
  siRNA target sequence for SLC36A4 (NM_152313.2,244-262).
gcattaccaacttgatgat

SEQ ID NO: 259652 - DNA, 19 bp, Homo sapiens
  siRNA target sequence for SLC36A4 (NM_152313.2,332-350).
ggacttccattggcaataa

SEQ ID NO: 259653 - DNA, 19 bp, Homo sapiens
  siRNA target sequence for SLC36A4 (NM_152313.2,427-445).
ggtacgttgcagtcacttt

SEQ ID NO: 259654 - DNA, 19 bp, Homo sapiens
  siRNA target sequence for SLC36A4 (NM_152313.2,431-449).
cgttgcagtcactttctat

SEQ ID NO: 259655 - DNA, 19 bp, Homo sapiens
  siRNA target sequence for SLC36A4 (NM_152313.2,435-453).
gcagtcactttctatgtct

SEQ ID NO: 259656 - DNA, 19 bp, Homo sapiens
  siRNA target sequence for SLC36A4 (NM_152313.2,468-486).
caacattaggttatagtga

SEQ ID NO: 259657 - DNA, 19 bp, Homo sapiens
  siRNA target sequence for SLC36A4 (NM_152313.2,516-534).
cttggagttgtcttcagaa

SEQ ID NO: 259658 - DNA, 19 bp, Homo sapiens
  siRNA target sequence for SLC36A4 (NM_152313.2,555-573).
gtgtggttgacttttttct

SEQ ID NO: 259659 - DNA, 19 bp, Homo sapiens
  siRNA target sequence for SLC36A4 (NM_152313.2,648-666).
gattcctggagagtaaagt

SEQ ID NO: 259660 - DNA, 19 bp, Homo sapiens
  siRNA target sequence for SLC36A4 (NM_152313.2,716-734).
gttgacctaaggatatata

SEQ ID NO: 259661 - DNA, 19 bp, Homo sapiens
  siRNA target sequence for SLC36A4 (NM_152313.2,766-784).
ggtcttcattcgtgaacta

SEQ ID NO: 259662 - DNA, 19 bp, Homo sapiens
  siRNA target sequence for SLC36A4 (NM_152313.2,767-785).
gtcttcattcgtgaactaa

SEQ ID NO: 259663 - DNA, 19 bp, Homo sapiens
  siRNA target sequence for SLC36A4 (NM_152313.2,772-790).
cattcgtgaactaaagaat

SEQ ID NO: 259664 - DNA, 19 bp, Homo sapiens
  siRNA target sequence for SLC36A4 (NM_152313.2,776-794).
cgtgaactaaagaatctat

SEQ ID NO: 259665 - DNA, 19 bp, Homo sapiens
  siRNA target sequence for SLC36A4 (NM_152313.2,827-845).
gctgtcagtcttgtgataa

SEQ ID NO: 259666 - DNA, 19 bp, Homo sapiens
  siRNA target sequence for SLC36A4 (NM_152313.2,907-925).
gaagaaatacccactcttt

SEQ ID NO: 259667 - DNA, 19 bp, Homo sapiens
  siRNA target sequence for SLC36A4 (NM_152313.2,929-947).
ggtactgctgtatttgctt

SEQ ID NO: 259668 - DNA, 19 bp, Homo sapiens
  siRNA target sequence for SLC36A4 (NM_152313.2,967-985).
ccttccactggaaaaccaa

SEQ ID NO: 259669 - DNA, 19 bp, Homo sapiens
  siRNA target sequence for SLC36A4 (NM_152313.2,1006-1024).
ccctcaagcgttgaatatt

SEQ ID NO: 259670 - DNA, 19 bp, Homo sapiens
  siRNA target sequence for SLC36A4 (NM_152313.2,1025-1043).
ggcatggggattgttacaa

SEQ ID NO: 259671 - DNA, 19 bp, Homo sapiens
  siRNA target sequence for SLC36A4 (NM_152313.2,1121-1139).
ccccaagatgtatggttat

SEQ ID NO: 259672 - DNA, 19 bp, Homo sapiens
  siRNA target sequence for SLC36A4 (NM_152313.2,1122-1140).
cccaagatgtatggttata

SEQ ID NO: 259673 - DNA, 19 bp, Homo sapiens
  siRNA target sequence for SLC36A4 (NM_152313.2,1135-1153).
gttatatcaatcagtgaaa

SEQ ID NO: 259674 - DNA, 19 bp, Homo sapiens
  siRNA target sequence for SLC36A4 (NM_152313.2,1178-1196).
gtgacatattcaattcagt

SEQ ID NO: 259675 - DNA, 19 bp, Homo sapiens
  siRNA target sequence for SLC36A4 (NM_152313.2,1182-1200).
catattcaattcagttcta

SEQ ID NO: 259676 - DNA, 19 bp, Homo sapiens
  siRNA target sequence for SLC36A4 (NM_152313.2,1222-1240).
ccctgggatcacatccaaa

SEQ ID NO: 259677 - DNA, 19 bp, Homo sapiens
  siRNA target sequence for SLC36A4 (NM_152313.2,1223-1241).
cctgggatcacatccaaat

SEQ ID NO: 259678 - DNA, 19 bp, Homo sapiens
  siRNA target sequence for SLC36A4 (NM_152313.2,1244-1262).
catactaaatggaagcaaa

SEQ ID NO: 259679 - DNA, 19 bp, Homo sapiens
  siRNA target sequence for SLC36A4 (NM_152313.2,1264-1282).
ctgtgaatttgggataaga

SEQ ID NO: 259680 - DNA, 19 bp, Homo sapiens
  siRNA target sequence for SLC36A4 (NM_152313.2,1281-1299).
gatccttcttggttagtat

SEQ ID NO: 259681 - DNA, 19 bp, Homo sapiens
  siRNA target sequence for SLC36A4 (NM_152313.2,1285-1303).
cttcttggttagtattact

SEQ ID NO: 259682 - DNA, 19 bp, Homo sapiens
  siRNA target sequence for SLC36A4 (NM_152313.2,1288-1306).
cttggttagtattacttgt

SEQ ID NO: 259683 - DNA, 19 bp, Homo sapiens
  siRNA target sequence for SLC36A4 (NM_152313.2,1302-1320).
cttgtgccggagcaattct

SEQ ID NO: 259684 - DNA, 19 bp, Homo sapiens
  siRNA target sequence for SLC36A4 (NM_152313.2,1305-1323).
gtgccggagcaattcttat

SEQ ID NO: 259685 - DNA, 19 bp, Homo sapiens
  siRNA target sequence for SLC36A4 (NM_152313.2,1309-1327).
cggagcaattcttattcct

SEQ ID NO: 259686 - DNA, 19 bp, Homo sapiens
  siRNA target sequence for SLC36A4 (NM_152313.2,1319-1337).
cttattcctcgtttagaca

SEQ ID NO: 259687 - DNA, 19 bp, Homo sapiens
  siRNA target sequence for SLC36A4 (NM_152313.2,1325-1343).
cctcgtttagacattgtga

SEQ ID NO: 259688 - DNA, 19 bp, Homo sapiens
  siRNA target sequence for SLC36A4 (NM_152313.2,1326-1344).
ctcgtttagacattgtgat

SEQ ID NO: 259689 - DNA, 19 bp, Homo sapiens
  siRNA target sequence for SLC36A4 (NM_152313.2,1328-1346).
cgtttagacattgtgattt

SEQ ID NO: 259690 - DNA, 19 bp, Homo sapiens
  siRNA target sequence for SLC36A4 (NM_152313.2,1371-1389).
gcacattggccctaatcct

SEQ ID NO: 259691 - DNA, 19 bp, Homo sapiens
  siRNA target sequence for SLC36A4 (NM_152313.2,1413-1431).
cattttcgaaggaacatta

SEQ ID NO: 259692 - DNA, 19 bp, Homo sapiens
  siRNA target sequence for SLC36A4 (NM_152313.2,1420-1438).
gaaggaacattataatata

SEQ ID NO: 259693 - DNA, 19 bp, Homo sapiens
  siRNA target sequence for SLC36A4 (NM_152313.2,1475-1493).
ggagttgttggcttcttat

SEQ ID NO: 259694 - DNA, 19 bp, Homo sapiens
  siRNA target sequence for SLC36A4 (NM_152313.2,1481-1499).
gttggcttcttattaggta

SEQ ID NO: 259695 - DNA, 19 bp, Homo sapiens
  siRNA target sequence for SLC36A4 (NM_152313.2,1591-1609).
cttaacatctggtttgaaa

SEQ ID NO: 259696 - DNA, 19 bp, Homo sapiens
  siRNA target sequence for SLC38A3 (NM_006841.3,165-183).
gtgcccaatggcaaacact

SEQ ID NO: 259697 - DNA, 19 bp, Homo sapiens
  siRNA target sequence for SLC38A3 (NM_006841.3,403-421).
ccaatacgggcattatcct

SEQ ID NO: 259698 - DNA, 19 bp, Homo sapiens
  siRNA target sequence for SLC38A3 (NM_006841.3,404-422).
caatacgggcattatcctt

SEQ ID NO: 259699 - DNA, 19 bp, Homo sapiens
  siRNA target sequence for SLC38A3 (NM_006841.3,409-427).
cgggcattatccttttcct

SEQ ID NO: 259700 - DNA, 19 bp, Homo sapiens
  siRNA target sequence for SLC38A3 (NM_006841.3,571-589).
ccatcacgctccagaacat

SEQ ID NO: 259701 - DNA, 19 bp, Homo sapiens
  siRNA target sequence for SLC38A3 (NM_006841.3,625-643).
ctgagctgccacttgtcat

SEQ ID NO: 259702 - DNA, 19 bp, Homo sapiens
  siRNA target sequence for SLC38A3 (NM_006841.3,630-648).
ctgccacttgtcatacaga

SEQ ID NO: 259703 - DNA, 19 bp, Homo sapiens
  siRNA target sequence for SLC38A3 (NM_006841.3,673-691).
cctcggactggtacatgaa

SEQ ID NO: 259704 - DNA, 19 bp, Homo sapiens
  siRNA target sequence for SLC38A3 (NM_006841.3,694-712).
ggaactacctggtaatcct

SEQ ID NO: 259705 - DNA, 19 bp, Homo sapiens
  siRNA target sequence for SLC38A3 (NM_006841.3,695-713).
gaactacctggtaatcctt

SEQ ID NO: 259706 - DNA, 19 bp, Homo sapiens
  siRNA target sequence for SLC38A3 (NM_006841.3,796-814).
gcatggtgttcttcctaat

SEQ ID NO: 259707 - DNA, 19 bp, Homo sapiens
  siRNA target sequence for SLC38A3 (NM_006841.3,800-818).
ggtgttcttcctaattgca

SEQ ID NO: 259708 - DNA, 19 bp, Homo sapiens
  siRNA target sequence for SLC38A3 (NM_006841.3,810-828).
ctaattgcagtcatctaca

SEQ ID NO: 259709 - DNA, 19 bp, Homo sapiens
  siRNA target sequence for SLC38A3 (NM_006841.3,1102-1120).
ccatcgctgtcatgtacat

SEQ ID NO: 259710 - DNA, 19 bp, Homo sapiens
  siRNA target sequence for SLC38A3 (NM_006841.3,1267-1285).
cagtgcccatcgttctgtt

SEQ ID NO: 259711 - DNA, 19 bp, Homo sapiens
  siRNA target sequence for SLC38A3 (NM_006841.3,1362-1380).
gttggcctgctcacttgta

SEQ ID NO: 259712 - DNA, 19 bp, Homo sapiens
  siRNA target sequence for SLC38A3 (NM_006841.3,1365-1383).
ggcctgctcacttgtatca

SEQ ID NO: 259713 - DNA, 19 bp, Homo sapiens
  siRNA target sequence for SLC38A3 (NM_006841.3,1366-1384).
gcctgctcacttgtatcaa

SEQ ID NO: 259714 - DNA, 19 bp, Homo sapiens
  siRNA target sequence for SLC38A4 (NM_018018.2,442-460).
ctacatcgggataggaaat

SEQ ID NO: 259715 - DNA, 19 bp, Homo sapiens
  siRNA target sequence for SLC38A4 (NM_018018.2,445-463).
catcgggataggaaattca

SEQ ID NO: 259716 - DNA, 19 bp, Homo sapiens
  siRNA target sequence for SLC38A4 (NM_018018.2,449-467).
gggataggaaattcagaaa

SEQ ID NO: 259717 - DNA, 19 bp, Homo sapiens
  siRNA target sequence for SLC38A4 (NM_018018.2,470-488).
gcagcaatgagcagtcaat

SEQ ID NO: 259718 - DNA, 19 bp, Homo sapiens
  siRNA target sequence for SLC38A4 (NM_018018.2,478-496).
gagcagtcaatttgctaat

SEQ ID NO: 259719 - DNA, 19 bp, Homo sapiens
  siRNA target sequence for SLC38A4 (NM_018018.2,480-498).
gcagtcaatttgctaatga

SEQ ID NO: 259720 - DNA, 19 bp, Homo sapiens
  siRNA target sequence for SLC38A4 (NM_018018.2,664-682).
ggccaacacagggatcata

SEQ ID NO: 259721 - DNA, 19 bp, Homo sapiens
  siRNA target sequence for SLC38A4 (NM_018018.2,666-684).
ccaacacagggatcatact

SEQ ID NO: 259722 - DNA, 19 bp, Homo sapiens
  siRNA target sequence for SLC38A4 (NM_018018.2,667-685).
caacacagggatcatactt

SEQ ID NO: 259723 - DNA, 19 bp, Homo sapiens
  siRNA target sequence for SLC38A4 (NM_018018.2,672-690).
cagggatcatactttttat

SEQ ID NO: 259724 - DNA, 19 bp, Homo sapiens
  siRNA target sequence for SLC38A4 (NM_018018.2,710-728).
gcaatattatcactgtatt

SEQ ID NO: 259725 - DNA, 19 bp, Homo sapiens
  siRNA target sequence for SLC38A4 (NM_018018.2,729-747).
cagttcaccttttattaaa

SEQ ID NO: 259726 - DNA, 19 bp, Homo sapiens
  siRNA target sequence for SLC38A4 (NM_018018.2,757-775).
ggaaggagggtctttgatt

SEQ ID NO: 259727 - DNA, 19 bp, Homo sapiens
  siRNA target sequence for SLC38A4 (NM_018018.2,758-776).
gaaggagggtctttgattt

SEQ ID NO: 259728 - DNA, 19 bp, Homo sapiens
  siRNA target sequence for SLC38A4 (NM_018018.2,762-780).
gagggtctttgatttatga

SEQ ID NO: 259729 - DNA, 19 bp, Homo sapiens
  siRNA target sequence for SLC38A4 (NM_018018.2,764-782).
gggtctttgatttatgaaa

SEQ ID NO: 259730 - DNA, 19 bp, Homo sapiens
  siRNA target sequence for SLC38A4 (NM_018018.2,765-783).
ggtctttgatttatgaaaa

SEQ ID NO: 259731 - DNA, 19 bp, Homo sapiens
  siRNA target sequence for SLC38A4 (NM_018018.2,919-937).
gggacttgaagaaaatact

SEQ ID NO: 259732 - DNA, 19 bp, Homo sapiens
  siRNA target sequence for SLC38A4 (NM_018018.2,956-974).
ggcaactacctcatcatat

SEQ ID NO: 259733 - DNA, 19 bp, Homo sapiens
  siRNA target sequence for SLC38A4 (NM_018018.2,958-976).
caactacctcatcatattt

SEQ ID NO: 259734 - DNA, 19 bp, Homo sapiens
  siRNA target sequence for SLC38A4 (NM_018018.2,998-1016).
ccactttcgctccttaaaa

SEQ ID NO: 259735 - DNA, 19 bp, Homo sapiens
  siRNA target sequence for SLC38A4 (NM_018018.2,999-1017).
cactttcgctccttaaaaa

SEQ ID NO: 259736 - DNA, 19 bp, Homo sapiens
  siRNA target sequence for SLC38A4 (NM_018018.2,1056-1074).
cctgcatggtgttttttgt

SEQ ID NO: 259737 - DNA, 19 bp, Homo sapiens
  siRNA target sequence for SLC38A4 (NM_018018.2,1073-1091).
gttagtgtggtgatttaca

SEQ ID NO: 259738 - DNA, 19 bp, Homo sapiens
  siRNA target sequence for SLC38A4 (NM_018018.2,1110-1128).
gccctctacctgttttgga

SEQ ID NO: 259739 - DNA, 19 bp, Homo sapiens
  siRNA target sequence for SLC38A4 (NM_018018.2,1111-1129).
ccctctacctgttttggat

SEQ ID NO: 259740 - DNA, 19 bp, Homo sapiens
  siRNA target sequence for SLC38A4 (NM_018018.2,1126-1144).
ggatcacagtgttggaaat

SEQ ID NO: 259741 - DNA, 19 bp, Homo sapiens
  siRNA target sequence for SLC38A4 (NM_018018.2,1130-1148).
cacagtgttggaaatctgt

SEQ ID NO: 259742 - DNA, 19 bp, Homo sapiens
  siRNA target sequence for SLC38A4 (NM_018018.2,1136-1154).
gttggaaatctgtcattca

SEQ ID NO: 259743 - DNA, 19 bp, Homo sapiens
  siRNA target sequence for SLC38A4 (NM_018018.2,1156-1174).
caacacgcttccaatgcat

SEQ ID NO: 259744 - DNA, 19 bp, Homo sapiens
  siRNA target sequence for SLC38A4 (NM_018018.2,1178-1196).
gtaatgttacccaacaact

SEQ ID NO: 259745 - DNA, 19 bp, Homo sapiens
  siRNA target sequence for SLC38A4 (NM_018018.2,1267-1285).
ggccaagggctctcttcat

SEQ ID NO: 259746 - DNA, 19 bp, Homo sapiens
  siRNA target sequence for SLC38A4 (NM_018018.2,1324-1342).
gtgtgaacccaaatacttt

SEQ ID NO: 259747 - DNA, 19 bp, Homo sapiens
  siRNA target sequence for SLC38A4 (NM_018018.2,1353-1371).
cccggacggcctatgcaat

SEQ ID NO: 259748 - DNA, 19 bp, Homo sapiens
  siRNA target sequence for SLC38A4 (NM_018018.2,1354-1372).
ccggacggcctatgcaatt

SEQ ID NO: 259749 - DNA, 19 bp, Homo sapiens
  siRNA target sequence for SLC38A4 (NM_018018.2,1357-1375).
gacggcctatgcaattcct

SEQ ID NO: 259750 - DNA, 19 bp, Homo sapiens
  siRNA target sequence for SLC38A4 (NM_018018.2,1359-1377).
cggcctatgcaattcctat

SEQ ID NO: 259751 - DNA, 19 bp, Homo sapiens
  siRNA target sequence for SLC38A4 (NM_018018.2,1367-1385).
gcaattcctatcctagtat

SEQ ID NO: 259752 - DNA, 19 bp, Homo sapiens
  siRNA target sequence for SLC38A4 (NM_018018.2,1368-1386).
caattcctatcctagtatt

SEQ ID NO: 259753 - DNA, 19 bp, Homo sapiens
  siRNA target sequence for SLC38A4 (NM_018018.2,1378-1396).
cctagtatttgcttttgta

SEQ ID NO: 259754 - DNA, 19 bp, Homo sapiens
  siRNA target sequence for SLC38A4 (NM_018018.2,1406-1424).
gaggtccttcccatctaca

SEQ ID NO: 259755 - DNA, 19 bp, Homo sapiens
  siRNA target sequence for SLC38A4 (NM_018018.2,1436-1454).
gatcggtcccggagaaaaa

SEQ ID NO: 259756 - DNA, 19 bp, Homo sapiens
  siRNA target sequence for SLC38A4 (NM_018018.2,1440-1458).
ggtcccggagaaaaatgca

SEQ ID NO: 259757 - DNA, 19 bp, Homo sapiens
  siRNA target sequence for SLC38A4 (NM_018018.2,1441-1459).
gtcccggagaaaaatgcaa

SEQ ID NO: 259758 - DNA, 19 bp, Homo sapiens
  siRNA target sequence for SLC38A4 (NM_018018.2,1456-1474).
gcaaacggtgtcaaatatt

SEQ ID NO: 259759 - DNA, 19 bp, Homo sapiens
  siRNA target sequence for SLC38A4 (NM_018018.2,1457-1475).
caaacggtgtcaaatattt

SEQ ID NO: 259760 - DNA, 19 bp, Homo sapiens
  siRNA target sequence for SLC38A4 (NM_018018.2,1461-1479).
cggtgtcaaatatttccat

SEQ ID NO: 259761 - DNA, 19 bp, Homo sapiens
  siRNA target sequence for SLC38A4 (NM_018018.2,1482-1500).
cggggatgcttgtcatgta

SEQ ID NO: 259762 - DNA, 19 bp, Homo sapiens
  siRNA target sequence for SLC38A4 (NM_018018.2,1572-1590).
gcaaagtgtatacattaga

SEQ ID NO: 259763 - DNA, 19 bp, Homo sapiens
  siRNA target sequence for SLC38A4 (NM_018018.2,1729-1747).
gattgcagctgtgcttatt

SEQ ID NO: 259764 - DNA, 19 bp, Homo sapiens
  siRNA target sequence for SLC38A4 (NM_018018.2,1768-1786).
catccttgtgccaactata

SEQ ID NO: 259765 - DNA, 19 bp, Homo sapiens
  siRNA target sequence for SLC38A4 (NM_018018.2,1771-1789).
ccttgtgccaactataaaa

SEQ ID NO: 259766 - DNA, 19 bp, Homo sapiens
  siRNA target sequence for SLC38A4 (NM_018018.2,1778-1796).
ccaactataaaatacatct

SEQ ID NO: 259767 - DNA, 19 bp, Homo sapiens
  siRNA target sequence for SLC38A4 (NM_018018.2,1868-1886).
gtcaagaaagaaactttta

SEQ ID NO: 259768 - DNA, 19 bp, Homo sapiens
  siRNA target sequence for SLC38A4 (NM_018018.2,1895-1913).
caaaaggtcggggctttaa

SEQ ID NO: 259769 - DNA, 19 bp, Homo sapiens
  siRNA target sequence for SLC38A4 (NM_018018.2,1903-1921).
cggggctttaattttcctt

SEQ ID NO: 259770 - DNA, 19 bp, Homo sapiens
  siRNA target sequence for SLC38A4 (NM_018018.2,1946-1964).
ggaagcatggcactcatta

SEQ ID NO: 259771 - DNA, 19 bp, Homo sapiens
  siRNA target sequence for SLC38A4 (NM_018018.2,1947-1965).
gaagcatggcactcattat

SEQ ID NO: 259772 - DNA, 19 bp, Homo sapiens
  siRNA target sequence for SLC38A4 (NM_018018.2,1950-1968).
gcatggcactcattataat

SEQ ID NO: 259773 - DNA, 19 bp, Homo sapiens
  siRNA target sequence for SLC38A5 (NM_033518.1,852-870).
gcaggatccaaagatgaat

SEQ ID NO: 259774 - DNA, 19 bp, Homo sapiens
  siRNA target sequence for SLC38A5 (NM_033518.1,950-968).
gcaagccggtccagttcat

SEQ ID NO: 259775 - DNA, 19 bp, Homo sapiens
  siRNA target sequence for SLC38A5 (NM_033518.1,956-974).
cggtccagttcatggattt

SEQ ID NO: 259776 - DNA, 19 bp, Homo sapiens
  siRNA target sequence for SLC38A5 (NM_033518.1,979-997).
gggaagacatcgtttggaa

SEQ ID NO: 259777 - DNA, 19 bp, Homo sapiens
  siRNA target sequence for SLC38A5 (NM_033518.1,984-1002).
gacatcgtttggaatgtca

SEQ ID NO: 259778 - DNA, 19 bp, Homo sapiens
  siRNA target sequence for SLC38A5 (NM_033518.1,1233-1251).
catctgtctgcacaatgtt

SEQ ID NO: 259779 - DNA, 19 bp, Homo sapiens
  siRNA target sequence for SLC38A5 (NM_033518.1,1286-1304).
ctgagctccccctggttat

SEQ ID NO: 259780 - DNA, 19 bp, Homo sapiens
  siRNA target sequence for SLC38A5 (NM_033518.1,1330-1348).
gagggggactggttcttga

SEQ ID NO: 259781 - DNA, 19 bp, Homo sapiens
  siRNA target sequence for SLC38A5 (NM_033518.1,1394-1412).
ccctcgccctcatgaaaca

SEQ ID NO: 259782 - DNA, 19 bp, Homo sapiens
  siRNA target sequence for SLC38A5 (NM_033518.1,1396-1414).
ctcgccctcatgaaacact

SEQ ID NO: 259783 - DNA, 19 bp, Homo sapiens
  siRNA target sequence for SLC38A5 (NM_033518.1,1468-1486).
cttgtttcggtcatctaca

SEQ ID NO: 259784 - DNA, 19 bp, Homo sapiens
  siRNA target sequence for SLC38A5 (NM_033518.1,1494-1512).
ccaacttggctgtgctata

SEQ ID NO: 259785 - DNA, 19 bp, Homo sapiens
  siRNA target sequence for SLC38A5 (NM_033518.1,1507-1525).
gctataggccacaatgaaa

SEQ ID NO: 259786 - DNA, 19 bp, Homo sapiens
  siRNA target sequence for SLC38A5 (NM_033518.1,2026-2044).
ccaaccatccgggatatct

SEQ ID NO: 259787 - DNA, 19 bp, Homo sapiens
  siRNA target sequence for SLC38A5 (NM_033518.1,2027-2045).
caaccatccgggatatctt

SEQ ID NO: 259788 - DNA, 19 bp, Homo sapiens
  siRNA target sequence for SLC38A5 (NM_033518.1,2100-2118).
cttctacctccgcattgta

SEQ ID NO: 259789 - DNA, 19 bp, Homo sapiens
  siRNA target sequence for SLC38A5 (NM_033518.1,2125-2143).
gaggtggagcctttcttat

SEQ ID NO: 259790 - DNA, 19 bp, Homo sapiens
  siRNA target sequence for SLC38A5 (NM_033518.1,2128-2146).
gtggagcctttcttatcct

SEQ ID NO: 259791 - DNA, 19 bp, Homo sapiens
  siRNA target sequence for SLC7A10 (NM_019849.1,422-440).
cctacgtcacagagatctt

SEQ ID NO: 259792 - DNA, 19 bp, Homo sapiens
  siRNA target sequence for SLC7A10 (NM_019849.1,650-668).
cgcgcatccaggacatgtt

SEQ ID NO: 259793 - DNA, 19 bp, Homo sapiens
  siRNA target sequence for SLC7A10 (NM_019849.1,652-670).
cgcatccaggacatgttca

SEQ ID NO: 259794 - DNA, 19 bp, Homo sapiens
  siRNA target sequence for SLC7A10 (NM_019849.1,754-772).
cccagcaatgcctttgctt

SEQ ID NO: 259795 - DNA, 19 bp, Homo sapiens
  siRNA target sequence for SLC7A10 (NM_019849.1,892-910).
ctacctcgcgccatcttca

SEQ ID NO: 259796 - DNA, 19 bp, Homo sapiens
  siRNA target sequence for SLC7A10 (NM_019849.1,895-913).
cctcgcgccatcttcatct

SEQ ID NO: 259797 - DNA, 19 bp, Homo sapiens
  siRNA target sequence for SLC7A10 (NM_019849.1,1026-1044).
gctgctgggctacttttct

SEQ ID NO: 259798 - DNA, 19 bp, Homo sapiens
  siRNA target sequence for SLC7A10 (NM_019849.1,1445-1463).
gtggggtcggcgtcatcat

SEQ ID NO: 259799 - DNA, 19 bp, Homo sapiens
  siRNA target sequence for SLC7A10 (NM_019849.1,1447-1465).
ggggtcggcgtcatcatca

SEQ ID NO: 259800 - DNA, 19 bp, Homo sapiens
  siRNA target sequence for SLC7A10 (NM_019849.1,1472-1490).
cgggggtgcccattttctt

SEQ ID NO: 259801 - DNA, 19 bp, Homo sapiens
  siRNA target sequence for SLC7A13 (NM_138817.1,152-170).
cacaagttttttgcttatt

SEQ ID NO: 259802 - DNA, 19 bp, Homo sapiens
  siRNA target sequence for SLC7A13 (NM_138817.1,267-285).
gccatactggccatgacat

SEQ ID NO: 259803 - DNA, 19 bp, Homo sapiens
  siRNA target sequence for SLC7A13 (NM_138817.1,275-293).
ggccatgacatcaactctt

SEQ ID NO: 259804 - DNA, 19 bp, Homo sapiens
  siRNA target sequence for SLC7A13 (NM_138817.1,276-294).
gccatgacatcaactcttt

SEQ ID NO: 259805 - DNA, 19 bp, Homo sapiens
  siRNA target sequence for SLC7A13 (NM_138817.1,295-313).
gctctgcagagataagtat

SEQ ID NO: 259806 - DNA, 19 bp, Homo sapiens
  siRNA target sequence for SLC7A13 (NM_138817.1,296-314).
ctctgcagagataagtata

SEQ ID NO: 259807 - DNA, 19 bp, Homo sapiens
  siRNA target sequence for SLC7A13 (NM_138817.1,300-318).
gcagagataagtataagct

SEQ ID NO: 259808 - DNA, 19 bp, Homo sapiens
  siRNA target sequence for SLC7A13 (NM_138817.1,301-319).
cagagataagtataagctt

SEQ ID NO: 259809 - DNA, 19 bp, Homo sapiens
  siRNA target sequence for SLC7A13 (NM_138817.1,326-344).
cagtggagctcaatactat

SEQ ID NO: 259810 - DNA, 19 bp, Homo sapiens
  siRNA target sequence for SLC7A13 (NM_138817.1,364-382).
gctccacggttgctttttt

SEQ ID NO: 259811 - DNA, 19 bp, Homo sapiens
  siRNA target sequence for SLC7A13 (NM_138817.1,367-385).
ccacggttgcttttttgaa

SEQ ID NO: 259812 - DNA, 19 bp, Homo sapiens
  siRNA target sequence for SLC7A13 (NM_138817.1,521-539).
gttgtggattgtaggaatt

SEQ ID NO: 259813 - DNA, 19 bp, Homo sapiens
  siRNA target sequence for SLC7A13 (NM_138817.1,542-560).
gacttctcgtggtgtgaaa

SEQ ID NO: 259814 - DNA, 19 bp, Homo sapiens
  siRNA target sequence for SLC7A13 (NM_138817.1,544-562).
cttctcgtggtgtgaaaga

SEQ ID NO: 259815 - DNA, 19 bp, Homo sapiens
  siRNA target sequence for SLC7A13 (NM_138817.1,622-640).
ccctaactggagtagtgtt

SEQ ID NO: 259816 - DNA, 19 bp, Homo sapiens
  siRNA target sequence for SLC7A13 (NM_138817.1,630-648).
ggagtagtgttcctgataa

SEQ ID NO: 259817 - DNA, 19 bp, Homo sapiens
  siRNA target sequence for SLC7A13 (NM_138817.1,659-677).
ggagaatgtagaacgattt

SEQ ID NO: 259818 - DNA, 19 bp, Homo sapiens
  siRNA target sequence for SLC7A13 (NM_138817.1,703-721).
cagatatctctcaccttat

SEQ ID NO: 259819 - DNA, 19 bp, Homo sapiens
  siRNA target sequence for SLC7A13 (NM_138817.1,727-745).
ccatcttccaaggatattt

SEQ ID NO: 259820 - DNA, 19 bp, Homo sapiens
  siRNA target sequence for SLC7A13 (NM_138817.1,760-778).
gggcatgctttacacttat

SEQ ID NO: 259821 - DNA, 19 bp, Homo sapiens
  siRNA target sequence for SLC7A13 (NM_138817.1,761-779).
ggcatgctttacacttata

SEQ ID NO: 259822 - DNA, 19 bp, Homo sapiens
  siRNA target sequence for SLC7A13 (NM_138817.1,794-812).
gaagcccagaacaacaatt

SEQ ID NO: 259823 - DNA, 19 bp, Homo sapiens
  siRNA target sequence for SLC7A13 (NM_138817.1,805-823).
caacaattcccaaatgcat

SEQ ID NO: 259824 - DNA, 19 bp, Homo sapiens
  siRNA target sequence for SLC7A13 (NM_138817.1,852-870).
gtttatttactggttaaca

SEQ ID NO: 259825 - DNA, 19 bp, Homo sapiens
  siRNA target sequence for SLC7A13 (NM_138817.1,1000-1018).
gcaaccttctgatttctat

SEQ ID NO: 259826 - DNA, 19 bp, Homo sapiens
  siRNA target sequence for SLC7A13 (NM_138817.1,1001-1019).
caaccttctgatttctata

SEQ ID NO: 259827 - DNA, 19 bp, Homo sapiens
  siRNA target sequence for SLC7A13 (NM_138817.1,1073-1091).
gctatttaatacacttaat

SEQ ID NO: 259828 - DNA, 19 bp, Homo sapiens
  siRNA target sequence for SLC7A13 (NM_138817.1,1138-1156).
gatcccttgcaattatctt

SEQ ID NO: 259829 - DNA, 19 bp, Homo sapiens
  siRNA target sequence for SLC7A13 (NM_138817.1,1196-1214).
gggttcattatggtctata

SEQ ID NO: 259830 - DNA, 19 bp, Homo sapiens
  siRNA target sequence for SLC7A13 (NM_138817.1,1197-1215).
ggttcattatggtctatat

SEQ ID NO: 259831 - DNA, 19 bp, Homo sapiens
  siRNA target sequence for SLC7A13 (NM_138817.1,1207-1225).
ggtctatattattaatgat

SEQ ID NO: 259832 - DNA, 19 bp, Homo sapiens
  siRNA target sequence for SLC7A13 (NM_138817.1,1247-1265).
ccaggaacccaatctatct

SEQ ID NO: 259833 - DNA, 19 bp, Homo sapiens
  siRNA target sequence for SLC7A13 (NM_138817.1,1248-1266).
caggaacccaatctatcta

SEQ ID NO: 259834 - DNA, 19 bp, Homo sapiens
  siRNA target sequence for SLC7A13 (NM_138817.1,1250-1268).
ggaacccaatctatctata

SEQ ID NO: 259835 - DNA, 19 bp, Homo sapiens
  siRNA target sequence for SLC7A13 (NM_138817.1,1254-1272).
cccaatctatctatacctt

SEQ ID NO: 259836 - DNA, 19 bp, Homo sapiens
  siRNA target sequence for SLC7A13 (NM_138817.1,1255-1273).
ccaatctatctatacctta

SEQ ID NO: 259837 - DNA, 19 bp, Homo sapiens
  siRNA target sequence for SLC7A13 (NM_138817.1,1277-1295).
ggtgtttttgtcatttcca

SEQ ID NO: 259838 - DNA, 19 bp, Homo sapiens
  siRNA target sequence for SLC7A13 (NM_138817.1,1293-1311).
ccattagcaacaatagtca

SEQ ID NO: 259839 - DNA, 19 bp, Homo sapiens
  siRNA target sequence for SLC7A13 (NM_138817.1,1294-1312).
cattagcaacaatagtcat

SEQ ID NO: 259840 - DNA, 19 bp, Homo sapiens
  siRNA target sequence for SLC7A13 (NM_138817.1,1316-1334).
cgtgggcttggttgtgata

SEQ ID NO: 259841 - DNA, 19 bp, Homo sapiens
  siRNA target sequence for SLC7A13 (NM_138817.1,1320-1338).
ggcttggttgtgataccat

SEQ ID NO: 259842 - DNA, 19 bp, Homo sapiens
  siRNA target sequence for SLC7A13 (NM_138817.1,1321-1339).
gcttggttgtgataccatt

SEQ ID NO: 259843 - DNA, 19 bp, Homo sapiens
  siRNA target sequence for SLC7A13 (NM_138817.1,1348-1366).
ctccaaatgtgcattatgt

SEQ ID NO: 259844 - DNA, 19 bp, Homo sapiens
  siRNA target sequence for SLC7A13 (NM_138817.1,1351-1369).
caaatgtgcattatgtcta

SEQ ID NO: 259845 - DNA, 19 bp, Homo sapiens
  siRNA target sequence for SLC7A13 (NM_138817.1,1367-1385).
ctacgtgcttctgttagtt

SEQ ID NO: 259846 - DNA, 19 bp, Homo sapiens
  siRNA target sequence for SLC7A13 (NM_138817.1,1386-1404).
ctcagcggattactatttt

SEQ ID NO: 259847 - DNA, 19 bp, Homo sapiens
  siRNA target sequence for SLC7A13 (NM_138817.1,1390-1408).
gcggattactattttacat

SEQ ID NO: 259848 - DNA, 19 bp, Homo sapiens
  siRNA target sequence for SLC7A13 (NM_138817.1,1391-1409).
cggattactattttacata

SEQ ID NO: 259849 - DNA, 19 bp, Homo sapiens
  siRNA target sequence for SLC7A13 (NM_138817.1,1432-1450).
gattggcttggtttgagaa

SEQ ID NO: 259850 - DNA, 19 bp, Homo sapiens
  siRNA target sequence for SLC7A13 (NM_138817.1,1448-1466).
gaagatgacttgctattta

SEQ ID NO: 259851 - DNA, 19 bp, Homo sapiens
  siRNA target sequence for SLC7A4 (NM_004173.1,437-455).
ggaatgttctcctcgaata

SEQ ID NO: 259852 - DNA, 19 bp, Homo sapiens
  siRNA target sequence for SLC7A4 (NM_004173.1,442-460).
gttctcctcgaatacatca

SEQ ID NO: 259853 - DNA, 19 bp, Homo sapiens
  siRNA target sequence for SLC7A4 (NM_004173.1,493-511).
ggctacctggactctatgt

SEQ ID NO: 259854 - DNA, 19 bp, Homo sapiens
  siRNA target sequence for SLC7A4 (NM_004173.1,1097-1115).
ccctgccacgcattgtcta

SEQ ID NO: 259855 - DNA, 19 bp, Homo sapiens
  siRNA target sequence for SLC7A4 (NM_004173.1,1098-1116).
cctgccacgcattgtctat

SEQ ID NO: 259856 - DNA, 19 bp, Homo sapiens
  siRNA target sequence for SLC7A4 (NM_004173.1,1293-1311).
cgtggccaccagtatcatt

SEQ ID NO: 259857 - DNA, 19 bp, Homo sapiens
  siRNA target sequence for SLC7A6 (NM_003983.1,358-376).
caaaggtcctccgaaacta

SEQ ID NO: 259858 - DNA, 19 bp, Homo sapiens
  siRNA target sequence for SLC7A6 (NM_003983.1,493-511).
gggatgtcactgattgtgt

SEQ ID NO: 259859 - DNA, 19 bp, Homo sapiens
  siRNA target sequence for SLC7A6 (NM_003983.1,535-553).
gttgtgggtgccctttgtt

SEQ ID NO: 259860 - DNA, 19 bp, Homo sapiens
  siRNA target sequence for SLC7A6 (NM_003983.1,540-558).
gggtgccctttgttatgca

SEQ ID NO: 259861 - DNA, 19 bp, Homo sapiens
  siRNA target sequence for SLC7A6 (NM_003983.1,586-604).
ggagccagctacgcttata

SEQ ID NO: 259862 - DNA, 19 bp, Homo sapiens
  siRNA target sequence for SLC7A6 (NM_003983.1,590-608).
ccagctacgcttatattct

SEQ ID NO: 259863 - DNA, 19 bp, Homo sapiens
  siRNA target sequence for SLC7A6 (NM_003983.1,591-609).
cagctacgcttatattcta

SEQ ID NO: 259864 - DNA, 19 bp, Homo sapiens
  siRNA target sequence for SLC7A6 (NM_003983.1,593-611).
gctacgcttatattctaga

SEQ ID NO: 259865 - DNA, 19 bp, Homo sapiens
  siRNA target sequence for SLC7A6 (NM_003983.1,648-666).
ggtctcactgctagttgtt

SEQ ID NO: 259866 - DNA, 19 bp, Homo sapiens
  siRNA target sequence for SLC7A6 (NM_003983.1,765-783).
cctggctgctgcttgcata

SEQ ID NO: 259867 - DNA, 19 bp, Homo sapiens
  siRNA target sequence for SLC7A6 (NM_003983.1,779-797).
gcatatgtctgctgacatt

SEQ ID NO: 259868 - DNA, 19 bp, Homo sapiens
  siRNA target sequence for SLC7A6 (NM_003983.1,832-850).
gtgcaggacacgttcactt

SEQ ID NO: 259869 - DNA, 19 bp, Homo sapiens
  siRNA target sequence for SLC7A6 (NM_003983.1,911-929).
gacactctgagcactttca

SEQ ID NO: 259870 - DNA, 19 bp, Homo sapiens
  siRNA target sequence for SLC7A6 (NM_003983.1,1006-1024).
ggttgggacacccttaatt

SEQ ID NO: 259871 - DNA, 19 bp, Homo sapiens
  siRNA target sequence for SLC7A6 (NM_003983.1,1007-1025).
gttgggacacccttaattt

SEQ ID NO: 259872 - DNA, 19 bp, Homo sapiens
  siRNA target sequence for SLC7A6 (NM_003983.1,1017-1035).
ccttaattttgtaacagaa

SEQ ID NO: 259873 - DNA, 19 bp, Homo sapiens
  siRNA target sequence for SLC7A6 (NM_003983.1,1088-1106).
caattgtgacgctcatcta

SEQ ID NO: 259874 - DNA, 19 bp, Homo sapiens
  siRNA target sequence for SLC7A6 (NM_003983.1,1274-1292).
cttcatcaaggttgttctt

SEQ ID NO: 259875 - DNA, 19 bp, Homo sapiens
  siRNA target sequence for SLC7A6 (NM_003983.1,1338-1356).
ccacattgagcgttttaca

SEQ ID NO: 259876 - DNA, 19 bp, Homo sapiens
  siRNA target sequence for SLC7A6 (NM_003983.1,1355-1373).
cacctatccctgctttact

SEQ ID NO: 259877 - DNA, 19 bp, Homo sapiens
  siRNA target sequence for SLC7A6 (NM_003983.1,1357-1375).
cctatccctgctttactgt

SEQ ID NO: 259878 - DNA, 19 bp, Homo sapiens
  siRNA target sequence for SLC7A6 (NM_003983.1,1358-1376).
ctatccctgctttactgtt

SEQ ID NO: 259879 - DNA, 19 bp, Homo sapiens
  siRNA target sequence for SLC7A6 (NM_003983.1,1362-1380).
ccctgctttactgttcaat

SEQ ID NO: 259880 - DNA, 19 bp, Homo sapiens
  siRNA target sequence for SLC7A6 (NM_003983.1,1363-1381).
cctgctttactgttcaatt

SEQ ID NO: 259881 - DNA, 19 bp, Homo sapiens
  siRNA target sequence for SLC7A6 (NM_003983.1,1461-1479).
cgtgggcctgtctgttgtt

SEQ ID NO: 259882 - DNA, 19 bp, Homo sapiens
  siRNA target sequence for SLC7A6 (NM_003983.1,1546-1564).
cccatcgtgttctgcatat

SEQ ID NO: 259883 - DNA, 19 bp, Homo sapiens
  siRNA target sequence for SLC7A6 (NM_003983.1,1559-1577).
gcatatgctccgtgtttct

SEQ ID NO: 259884 - DNA, 19 bp, Homo sapiens
  siRNA target sequence for SLC7A6 (NM_003983.1,1568-1586).
ccgtgtttctggtgatagt

SEQ ID NO: 259885 - DNA, 19 bp, Homo sapiens
  siRNA target sequence for SLC7A6 (NM_003983.1,1593-1611).
cttcactgacaccattaat

SEQ ID NO: 259886 - DNA, 19 bp, Homo sapiens
  siRNA target sequence for SLC7A6 (NM_003983.1,1643-1661).
gagtccctttctacttcat

SEQ ID NO: 259887 - DNA, 19 bp, Homo sapiens
  siRNA target sequence for SLC7A6 (NM_003983.1,1683-1701).
ccggaggccattgtttatt

SEQ ID NO: 259888 - DNA, 19 bp, Homo sapiens
  siRNA target sequence for SLC7A9 (NM_014270.1,190-208).
gggatactggcctgagaaa

SEQ ID NO: 259889 - DNA, 19 bp, Homo sapiens
  siRNA target sequence for SLC7A9 (NM_014270.1,318-336).
ggctctgggatcttcgttt

SEQ ID NO: 259890 - DNA, 19 bp, Homo sapiens
  siRNA target sequence for SLC7A9 (NM_014270.1,435-453).
gcggagcttggcacaatga

SEQ ID NO: 259891 - DNA, 19 bp, Homo sapiens
  siRNA target sequence for SLC7A9 (NM_014270.1,436-454).
cggagcttggcacaatgat

SEQ ID NO: 259892 - DNA, 19 bp, Homo sapiens
  siRNA target sequence for SLC7A9 (NM_014270.1,438-456).
gagcttggcacaatgatca

SEQ ID NO: 259893 - DNA, 19 bp, Homo sapiens
  siRNA target sequence for SLC7A9 (NM_014270.1,529-547).
ccagcctgatcgtcattaa

SEQ ID NO: 259894 - DNA, 19 bp, Homo sapiens
  siRNA target sequence for SLC7A9 (NM_014270.1,616-634).
gcaagcctcctcaaatcgt

SEQ ID NO: 259895 - DNA, 19 bp, Homo sapiens
  siRNA target sequence for SLC7A9 (NM_014270.1,617-635).
caagcctcctcaaatcgtt

SEQ ID NO: 259896 - DNA, 19 bp, Homo sapiens
  siRNA target sequence for SLC7A9 (NM_014270.1,624-642).
cctcaaatcgttgtgaaat

SEQ ID NO: 259897 - DNA, 19 bp, Homo sapiens
  siRNA target sequence for SLC7A9 (NM_014270.1,703-721).
gaagctacgtccagaacat

SEQ ID NO: 259898 - DNA, 19 bp, Homo sapiens
  siRNA target sequence for SLC7A9 (NM_014270.1,848-866).
cagcctggcgttttacaat

SEQ ID NO: 259899 - DNA, 19 bp, Homo sapiens
  siRNA target sequence for SLC7A9 (NM_014270.1,875-893).
ggcctatgatggatggaat

SEQ ID NO: 259900 - DNA, 19 bp, Homo sapiens
  siRNA target sequence for SLC7A9 (NM_014270.1,878-896).
ctatgatggatggaatcaa

SEQ ID NO: 259901 - DNA, 19 bp, Homo sapiens
  siRNA target sequence for SLC7A9 (NM_014270.1,885-903).
ggatggaatcaactcaatt

SEQ ID NO: 259902 - DNA, 19 bp, Homo sapiens
  siRNA target sequence for SLC7A9 (NM_014270.1,889-907).
ggaatcaactcaattacat

SEQ ID NO: 259903 - DNA, 19 bp, Homo sapiens
  siRNA target sequence for SLC7A9 (NM_014270.1,918-936).
cttagaaacccttacagaa

SEQ ID NO: 259904 - DNA, 19 bp, Homo sapiens
  siRNA target sequence for SLC7A9 (NM_014270.1,979-997).
cgtgctacatcctcatgaa

SEQ ID NO: 259905 - DNA, 19 bp, Homo sapiens
  siRNA target sequence for SLC7A9 (NM_014270.1,1090-1108).
cttggatcgttccactttt

SEQ ID NO: 259906 - DNA, 19 bp, Homo sapiens
  siRNA target sequence for SLC7A9 (NM_014270.1,1153-1171).
cagcgggcagactcattta

SEQ ID NO: 259907 - DNA, 19 bp, Homo sapiens
  siRNA target sequence for SLC7A9 (NM_014270.1,1156-1174).
cgggcagactcatttacgt

SEQ ID NO: 259908 - DNA, 19 bp, Homo sapiens
  siRNA target sequence for SLC7A9 (NM_014270.1,1244-1262).
cgccatcatcttttatggt

SEQ ID NO: 259909 - DNA, 19 bp, Homo sapiens
  siRNA target sequence for SLC7A9 (NM_014270.1,1260-1278).
ggtatcatagcaacgattt

SEQ ID NO: 259910 - DNA, 19 bp, Homo sapiens
  siRNA target sequence for SLC7A9 (NM_014270.1,1261-1279).
gtatcatagcaacgattta

SEQ ID NO: 259911 - DNA, 19 bp, Homo sapiens
  siRNA target sequence for SLC7A9 (NM_014270.1,1295-1313).
cataaactcgttagtcaat

SEQ ID NO: 259912 - DNA, 19 bp, Homo sapiens
  siRNA target sequence for SLC7A9 (NM_014270.1,1359-1377).
ggactcatcgtgatgagat

SEQ ID NO: 259913 - DNA, 19 bp, Homo sapiens
  siRNA target sequence for SLC7A9 (NM_014270.1,1360-1378).
gactcatcgtgatgagatt

SEQ ID NO: 259914 - DNA, 19 bp, Homo sapiens
  siRNA target sequence for SLC7A9 (NM_014270.1,1362-1380).
ctcatcgtgatgagattta

SEQ ID NO: 259915 - DNA, 19 bp, Homo sapiens
  siRNA target sequence for SLC7A9 (NM_014270.1,1364-1382).
catcgtgatgagatttaca

SEQ ID NO: 259916 - DNA, 19 bp, Homo sapiens
  siRNA target sequence for SLC7A9 (NM_014270.1,1436-1454).
gacactcatctctgtgttt

SEQ ID NO: 259917 - DNA, 19 bp, Homo sapiens
  siRNA target sequence for SLC7A9 (NM_014270.1,1458-1476).
gttctggctccaatcatca

SEQ ID NO: 259918 - DNA, 19 bp, Homo sapiens
  siRNA target sequence for SLC7A9 (NM_014270.1,1544-1562).
gtttgtccactacaagttt

SEQ ID NO: 259919 - DNA, 19 bp, Homo sapiens
  siRNA target sequence for SLC7A9 (NM_014270.1,1567-1585).
gggctcagaaaatctcaaa

SEQ ID NO: 259920 - DNA, 19 bp, Homo sapiens
  siRNA target sequence for VIAAT (NM_080552.2,498-516).
gtcgagggagacatccatt

SEQ ID NO: 259921 - DNA, 19 bp, Homo sapiens
  siRNA target sequence for VIAAT (NM_080552.2,500-518).
cgagggagacatccattat

SEQ ID NO: 259922 - DNA, 19 bp, Homo sapiens
  siRNA target sequence for VIAAT (NM_080552.2,695-713).
cggctacctggggttgttt

SEQ ID NO: 259923 - DNA, 19 bp, Homo sapiens
  siRNA target sequence for VIAAT (NM_080552.2,697-715).
gctacctggggttgtttct

SEQ ID NO: 259924 - DNA, 19 bp, Homo sapiens
  siRNA target sequence for VIAAT (NM_080552.2,937-955).
gtggcaacctcatgtacaa

SEQ ID NO: 259925 - DNA, 19 bp, Homo sapiens
  siRNA target sequence for VIAAT (NM_080552.2,1017-1035).
ctgccttgcgccttcctta

SEQ ID NO: 259926 - DNA, 19 bp, Homo sapiens
  siRNA target sequence for VIAAT (NM_080552.2,1020-1038).
ccttgcgccttccttaaga

SEQ ID NO: 259927 - DNA, 19 bp, Homo sapiens
  siRNA target sequence for VIAAT (NM_080552.2,1079-1097).
ggcccacttcgtcatcaat

SEQ ID NO: 259928 - DNA, 19 bp, Homo sapiens
  siRNA target sequence for VIAAT (NM_080552.2,1080-1098).
gcccacttcgtcatcaata

SEQ ID NO: 259929 - DNA, 19 bp, Homo sapiens
  siRNA target sequence for VIAAT (NM_080552.2,1081-1099).
cccacttcgtcatcaatat

SEQ ID NO: 259930 - DNA, 19 bp, Homo sapiens
  siRNA target sequence for VIAAT (NM_080552.2,1104-1122).
gtcatagcctactgtctat

SEQ ID NO: 259931 - DNA, 19 bp, Homo sapiens
  siRNA target sequence for VIAAT (NM_080552.2,1144-1162).
gggagaaggtcaagttcta

SEQ ID NO: 259932 - DNA, 19 bp, Homo sapiens
  siRNA target sequence for VIAAT (NM_080552.2,1441-1459).
cctatcctctgccattctt

SEQ ID NO: 259933 - DNA, 19 bp, Homo sapiens
  siRNA target sequence for VIAAT (NM_080552.2,1592-1610).
gctgctcatggccatttat

SEQ ID NO: 259934 - DNA, 19 bp, Homo sapiens
  siRNA target sequence for SLC17A4 (NM_005495.1,113-131).
ctaccggaccagatgtcaa

SEQ ID NO: 259935 - DNA, 19 bp, Homo sapiens
  siRNA target sequence for SLC17A4 (NM_005495.1,155-173).
gtgatggcaatttaaacgt

SEQ ID NO: 259936 - DNA, 19 bp, Homo sapiens
  siRNA target sequence for SLC17A4 (NM_005495.1,364-382).
cagggctactggaatgaaa

SEQ ID NO: 259937 - DNA, 19 bp, Homo sapiens
  siRNA target sequence for SLC17A4 (NM_005495.1,375-393).
gaatgaaactctaaaagaa

SEQ ID NO: 259938 - DNA, 19 bp, Homo sapiens
  siRNA target sequence for SLC17A4 (NM_005495.1,401-419).
caatggcccctgcatatga

SEQ ID NO: 259939 - DNA, 19 bp, Homo sapiens
  siRNA target sequence for SLC17A4 (NM_005495.1,457-475).
ctcaactatggctcattct

SEQ ID NO: 259940 - DNA, 19 bp, Homo sapiens
  siRNA target sequence for SLC17A4 (NM_005495.1,493-511).
ggctatgtggctggaatat

SEQ ID NO: 259941 - DNA, 19 bp, Homo sapiens
  siRNA target sequence for SLC17A4 (NM_005495.1,630-648).
catagcccaggttatggta

SEQ ID NO: 259942 - DNA, 19 bp, Homo sapiens
  siRNA target sequence for SLC17A4 (NM_005495.1,634-652).
gcccaggttatggtattaa

SEQ ID NO: 259943 - DNA, 19 bp, Homo sapiens
  siRNA target sequence for SLC17A4 (NM_005495.1,636-654).
ccaggttatggtattaact

SEQ ID NO: 259944 - DNA, 19 bp, Homo sapiens
  siRNA target sequence for SLC17A4 (NM_005495.1,645-663).
ggtattaactggtcagtat

SEQ ID NO: 259945 - DNA, 19 bp, Homo sapiens
  siRNA target sequence for SLC17A4 (NM_005495.1,646-664).
gtattaactggtcagtatt

SEQ ID NO: 259946 - DNA, 19 bp, Homo sapiens
  siRNA target sequence for SLC17A4 (NM_005495.1,735-753).
gctggggtccttcattgtt

SEQ ID NO: 259947 - DNA, 19 bp, Homo sapiens
  siRNA target sequence for SLC17A4 (NM_005495.1,738-756).
ggggtccttcattgttcta

SEQ ID NO: 259948 - DNA, 19 bp, Homo sapiens
  siRNA target sequence for SLC17A4 (NM_005495.1,740-758).
ggtccttcattgttctact

SEQ ID NO: 259949 - DNA, 19 bp, Homo sapiens
  siRNA target sequence for SLC17A4 (NM_005495.1,772-790).
ctctgccagaccataggat

SEQ ID NO: 259950 - DNA, 19 bp, Homo sapiens
  siRNA target sequence for SLC17A4 (NM_005495.1,788-806).
gatggccttacgtcttcta

SEQ ID NO: 259951 - DNA, 19 bp, Homo sapiens
  siRNA target sequence for SLC17A4 (NM_005495.1,793-811).
ccttacgtcttctatatct

SEQ ID NO: 259952 - DNA, 19 bp, Homo sapiens
  siRNA target sequence for SLC17A4 (NM_005495.1,794-812).
cttacgtcttctatatctt

SEQ ID NO: 259953 - DNA, 19 bp, Homo sapiens
  siRNA target sequence for SLC17A4 (NM_005495.1,871-889).
gtgaatcatccctttatca

SEQ ID NO: 259954 - DNA, 19 bp, Homo sapiens
  siRNA target sequence for SLC17A4 (NM_005495.1,905-923).
gatacattgtgtgttcatt

SEQ ID NO: 259955 - DNA, 19 bp, Homo sapiens
  siRNA target sequence for SLC17A4 (NM_005495.1,965-983).
gggctatgatcaaatcctt

SEQ ID NO: 259956 - DNA, 19 bp, Homo sapiens
  siRNA target sequence for SLC17A4 (NM_005495.1,966-984).
ggctatgatcaaatcctta

SEQ ID NO: 259957 - DNA, 19 bp, Homo sapiens
  siRNA target sequence for SLC17A4 (NM_005495.1,992-1010).
gggccattttagtctctta

SEQ ID NO: 259958 - DNA, 19 bp, Homo sapiens
  siRNA target sequence for SLC17A4 (NM_005495.1,993-1011).
ggccattttagtctcttat

SEQ ID NO: 259959 - DNA, 19 bp, Homo sapiens
  siRNA target sequence for SLC17A4 (NM_005495.1,1118-1136).
cgtttgttgttggatgtat

SEQ ID NO: 259960 - DNA, 19 bp, Homo sapiens
  siRNA target sequence for SLC17A4 (NM_005495.1,1340-1358).
caggagcccttgttaactt

SEQ ID NO: 259961 - DNA, 19 bp, Homo sapiens
  siRNA target sequence for SLC17A4 (NM_005495.1,1342-1360).
ggagcccttgttaacttct

SEQ ID NO: 259962 - DNA, 19 bp, Homo sapiens
  siRNA target sequence for SLC17A4 (NM_005495.1,1375-1393).
cggtacactggctttctca

SEQ ID NO: 259963 - DNA, 19 bp, Homo sapiens
  siRNA target sequence for SLC17A4 (NM_005495.1,1376-1394).
ggtacactggctttctcaa

SEQ ID NO: 259964 - DNA, 19 bp, Homo sapiens
  siRNA target sequence for SLC17A4 (NM_005495.1,1404-1422).
gcaagtctttgcacacata

SEQ ID NO: 259965 - DNA, 19 bp, Homo sapiens
  siRNA target sequence for SLC17A4 (NM_005495.1,1465-1483).
caggattcagagtttggtt

SEQ ID NO: 259966 - DNA, 19 bp, Homo sapiens
  siRNA target sequence for SLC17A7 (NM_020309.1,373-391).
ctcatacacggctcctttt

SEQ ID NO: 259967 - DNA, 19 bp, Homo sapiens
  siRNA target sequence for SLC17A7 (NM_020309.1,425-443).
gatttatctgtcaaaaatt

SEQ ID NO: 259968 - DNA, 19 bp, Homo sapiens
  siRNA target sequence for SLC17A7 (NM_020309.1,455-473).
gagttttcggctttgctat

SEQ ID NO: 259969 - DNA, 19 bp, Homo sapiens
  siRNA target sequence for SLC17A7 (NM_020309.1,639-657).
ggcgacgacagccttttgt

SEQ ID NO: 259970 - DNA, 19 bp, Homo sapiens
  siRNA target sequence for SLC17A7 (NM_020309.1,880-898).
cccctcacgaagtttagca

SEQ ID NO: 259971 - DNA, 19 bp, Homo sapiens
  siRNA target sequence for SLC17A7 (NM_020309.1,1147-1165).
gtgcgcaagttgatgaact

SEQ ID NO: 259972 - DNA, 19 bp, Homo sapiens
  siRNA target sequence for SLC17A7 (NM_020309.1,1424-1442).
ggcagtacgtgttcctaat

SEQ ID NO: 259973 - DNA, 19 bp, Homo sapiens
  siRNA target sequence for SLC17A7 (NM_020309.1,1425-1443).
gcagtacgtgttcctaatt

SEQ ID NO: 259974 - DNA, 19 bp, Homo sapiens
  siRNA target sequence for SLC17A7 (NM_020309.1,1577-1595).
gtgacgacagcgaaatgga

SEQ ID NO: 259975 - DNA, 19 bp, Homo sapiens
  siRNA target sequence for SLC34A2 (NM_006424.1,94-112).
cagcccaaccccgataagt

SEQ ID NO: 259976 - DNA, 19 bp, Homo sapiens
  siRNA target sequence for SLC34A2 (NM_006424.1,163-181).
gagaccaacaaaacagata

SEQ ID NO: 259977 - DNA, 19 bp, Homo sapiens
  siRNA target sequence for SLC34A2 (NM_006424.1,189-207).
ggcacctgtaaccaagatt

SEQ ID NO: 259978 - DNA, 19 bp, Homo sapiens
  siRNA target sequence for SLC34A2 (NM_006424.1,228-246).
cacggctacactgatagat

SEQ ID NO: 259979 - DNA, 19 bp, Homo sapiens
  siRNA target sequence for SLC34A2 (NM_006424.1,230-248).
cggctacactgatagatga

SEQ ID NO: 259980 - DNA, 19 bp, Homo sapiens
  siRNA target sequence for SLC34A2 (NM_006424.1,328-346).
gggaagattctctgtttct

SEQ ID NO: 259981 - DNA, 19 bp, Homo sapiens
  siRNA target sequence for SLC34A2 (NM_006424.1,349-367).
caagggattgggagattga

SEQ ID NO: 259982 - DNA, 19 bp, Homo sapiens
  siRNA target sequence for SLC34A2 (NM_006424.1,354-372).
gattgggagattgatttta

SEQ ID NO: 259983 - DNA, 19 bp, Homo sapiens
  siRNA target sequence for SLC34A2 (NM_006424.1,396-414).
cgtgtgctccctggatatt

SEQ ID NO: 259984 - DNA, 19 bp, Homo sapiens
  siRNA target sequence for SLC34A2 (NM_006424.1,402-420).
ctccctggatattcttagt

SEQ ID NO: 259985 - DNA, 19 bp, Homo sapiens
  siRNA target sequence for SLC34A2 (NM_006424.1,599-617).
gggctgccatccccattat

SEQ ID NO: 259986 - DNA, 19 bp, Homo sapiens
  siRNA target sequence for SLC34A2 (NM_006424.1,638-656).
cgtcaatcaccaacactat

SEQ ID NO: 259987 - DNA, 19 bp, Homo sapiens
  siRNA target sequence for SLC34A2 (NM_006424.1,639-657).
gtcaatcaccaacactatt

SEQ ID NO: 259988 - DNA, 19 bp, Homo sapiens
  siRNA target sequence for SLC34A2 (NM_006424.1,679-697).
gatcggagtgagttcagaa

SEQ ID NO: 259989 - DNA, 19 bp, Homo sapiens
  siRNA target sequence for SLC34A2 (NM_006424.1,776-794).
cccattacctcgagatcat

SEQ ID NO: 259990 - DNA, 19 bp, Homo sapiens
  siRNA target sequence for SLC34A2 (NM_006424.1,777-795).
ccattacctcgagatcata

SEQ ID NO: 259991 - DNA, 19 bp, Homo sapiens
  siRNA target sequence for SLC34A2 (NM_006424.1,778-796).
cattacctcgagatcataa

SEQ ID NO: 259992 - DNA, 19 bp, Homo sapiens
  siRNA target sequence for SLC34A2 (NM_006424.1,789-807).
gatcataacccagcttata

SEQ ID NO: 259993 - DNA, 19 bp, Homo sapiens
  siRNA target sequence for SLC34A2 (NM_006424.1,892-910).
cagctggataaaaaagtta

SEQ ID NO: 259994 - DNA, 19 bp, Homo sapiens
  siRNA target sequence for SLC34A2 (NM_006424.1,1105-1123).
gccaaatgccagcatatct

SEQ ID NO: 259995 - DNA, 19 bp, Homo sapiens
  siRNA target sequence for SLC34A2 (NM_006424.1,1157-1175).
gcaccatcttgctcatact

SEQ ID NO: 259996 - DNA, 19 bp, Homo sapiens
  siRNA target sequence for SLC34A2 (NM_006424.1,1193-1211).
gtggttgcctgatcatgat

SEQ ID NO: 259997 - DNA, 19 bp, Homo sapiens
  siRNA target sequence for SLC34A2 (NM_006424.1,1196-1214).
gttgcctgatcatgattgt

SEQ ID NO: 259998 - DNA, 19 bp, Homo sapiens
  siRNA target sequence for SLC34A2 (NM_006424.1,1199-1217).
gcctgatcatgattgtcaa

SEQ ID NO: 259999 - DNA, 19 bp, Homo sapiens
  siRNA target sequence for SLC34A2 (NM_006424.1,1246-1264).
gtcgccactgtcatcaaga

SEQ ID NO: 260000 - DNA, 19 bp, Homo sapiens
  siRNA target sequence for SLC34A2 (NM_006424.1,1396-1414).
ggaatcggcgtgataacca

SEQ ID NO: 260001 - DNA, 19 bp, Homo sapiens
  siRNA target sequence for SLC34A2 (NM_006424.1,1397-1415).
gaatcggcgtgataaccat

SEQ ID NO: 260002 - DNA, 19 bp, Homo sapiens
  siRNA target sequence for SLC34A2 (NM_006424.1,1402-1420).
ggcgtgataaccattgaga

SEQ ID NO: 260003 - DNA, 19 bp, Homo sapiens
  siRNA target sequence for SLC34A2 (NM_006424.1,1413-1431).
cattgagagggcttatcca

SEQ ID NO: 260004 - DNA, 19 bp, Homo sapiens
  siRNA target sequence for SLC34A2 (NM_006424.1,1739-1757).
gggttcccgtcgtcttcat

SEQ ID NO: 260005 - DNA, 19 bp, Homo sapiens
  siRNA target sequence for SLC34A2 (NM_006424.1,1741-1759).
gttcccgtcgtcttcatca

SEQ ID NO: 260006 - DNA, 19 bp, Homo sapiens
  siRNA target sequence for SLC34A2 (NM_006424.1,1805-1823).
gcgtcctgccgaagaaact

SEQ ID NO: 260007 - DNA, 19 bp, Homo sapiens
  siRNA target sequence for SLC34A2 (NM_006424.1,1876-1894).
gccgtcgtctccaagttca

SEQ ID NO: 260008 - DNA, 19 bp, Homo sapiens
  siRNA target sequence for SLC34A2 (NM_006424.1,2044-2062).
gctcctgagacctttgata

SEQ ID NO: 260009 - DNA, 19 bp, Homo sapiens
  siRNA target sequence for SLC34A2 (NM_006424.1,2045-2063).
ctcctgagacctttgataa

SEQ ID NO: 260010 - DNA, 19 bp, Homo sapiens
  siRNA target sequence for SLC34A2 (NM_006424.1,2050-2068).
gagacctttgataacataa

SEQ ID NO: 260011 - DNA, 19 bp, Homo sapiens
  siRNA target sequence for SLC34A2 (NM_006424.1,2054-2072).
cctttgataacataaccat

SEQ ID NO: 260012 - DNA, 19 bp, Homo sapiens
  siRNA target sequence for ANKH (NM_054027.3,483-501).
gcgtactccctcatgaagt

SEQ ID NO: 260013 - DNA, 19 bp, Homo sapiens
  siRNA target sequence for ANKH (NM_054027.3,484-502).
cgtactccctcatgaagtt

SEQ ID NO: 260014 - DNA, 19 bp, Homo sapiens
  siRNA target sequence for ANKH (NM_054027.3,571-589).
ccaaagccgtcctgtgtat

SEQ ID NO: 260015 - DNA, 19 bp, Homo sapiens
  siRNA target sequence for ANKH (NM_054027.3,604-622).
ccatcgctgccgtctttca

SEQ ID NO: 260016 - DNA, 19 bp, Homo sapiens
  siRNA target sequence for ANKH (NM_054027.3,627-645).
ctgatagcttatagtgatt

SEQ ID NO: 260017 - DNA, 19 bp, Homo sapiens
  siRNA target sequence for ANKH (NM_054027.3,629-647).
gatagcttatagtgattta

SEQ ID NO: 260018 - DNA, 19 bp, Homo sapiens
  siRNA target sequence for ANKH (NM_054027.3,633-651).
gcttatagtgatttaggat

SEQ ID NO: 260019 - DNA, 19 bp, Homo sapiens
  siRNA target sequence for ANKH (NM_054027.3,648-666).
ggatactacattatcaata

SEQ ID NO: 260020 - DNA, 19 bp, Homo sapiens
  siRNA target sequence for ANKH (NM_054027.3,649-667).
gatactacattatcaataa

SEQ ID NO: 260021 - DNA, 19 bp, Homo sapiens
  siRNA target sequence for ANKH (NM_054027.3,766-784).
ctggcattctcttaaaaca

SEQ ID NO: 260022 - DNA, 19 bp, Homo sapiens
  siRNA target sequence for ANKH (NM_054027.3,768-786).
ggcattctcttaaaacaca

SEQ ID NO: 260023 - DNA, 19 bp, Homo sapiens
  siRNA target sequence for ANKH (NM_054027.3,801-819).
gtgggatgtgcctcaatct

SEQ ID NO: 260024 - DNA, 19 bp, Homo sapiens
  siRNA target sequence for ANKH (NM_054027.3,803-821).
gggatgtgcctcaatctca

SEQ ID NO: 260025 - DNA, 19 bp, Homo sapiens
  siRNA target sequence for ANKH (NM_054027.3,811-829).
cctcaatctcagatgtcat

SEQ ID NO: 260026 - DNA, 19 bp, Homo sapiens
  siRNA target sequence for ANKH (NM_054027.3,812-830).
ctcaatctcagatgtcata

SEQ ID NO: 260027 - DNA, 19 bp, Homo sapiens
  siRNA target sequence for ANKH (NM_054027.3,897-915).
ccgatcctctccttgtaca

SEQ ID NO: 260028 - DNA, 19 bp, Homo sapiens
  siRNA target sequence for ANKH (NM_054027.3,898-916).
cgatcctctccttgtacat

SEQ ID NO: 260029 - DNA, 19 bp, Homo sapiens
  siRNA target sequence for ANKH (NM_054027.3,946-964).
gcctgggctactacaagaa

SEQ ID NO: 260030 - DNA, 19 bp, Homo sapiens
  siRNA target sequence for ANKH (NM_054027.3,1042-1060).
ggtggcctttggctctaat

SEQ ID NO: 260031 - DNA, 19 bp, Homo sapiens
  siRNA target sequence for ANKH (NM_054027.3,1043-1061).
gtggcctttggctctaatt

SEQ ID NO: 260032 - DNA, 19 bp, Homo sapiens
  siRNA target sequence for ANKH (NM_054027.3,1075-1093).
gaatcagtcggcctattgt

SEQ ID NO: 260033 - DNA, 19 bp, Homo sapiens
  siRNA target sequence for ANKH (NM_054027.3,1140-1158).
gaggcagtggcgattttga

SEQ ID NO: 260034 - DNA, 19 bp, Homo sapiens
  siRNA target sequence for ANKH (NM_054027.3,1202-1220).
ggaaatccgtgctgtgtat

SEQ ID NO: 260035 - DNA, 19 bp, Homo sapiens
  siRNA target sequence for ANKH (NM_054027.3,1221-1239).
cctgctttcgacaagaata

SEQ ID NO: 260036 - DNA, 19 bp, Homo sapiens
  siRNA target sequence for ANKH (NM_054027.3,1222-1240).
ctgctttcgacaagaataa

SEQ ID NO: 260037 - DNA, 19 bp, Homo sapiens
  siRNA target sequence for ANKH (NM_054027.3,1279-1297).
cggcagcccacatcaagaa

SEQ ID NO: 260038 - DNA, 19 bp, Homo sapiens
  siRNA target sequence for ANKH (NM_054027.3,1330-1348).
cgctctgtttcgtgatgtt

SEQ ID NO: 260039 - DNA, 19 bp, Homo sapiens
  siRNA target sequence for ANKH (NM_054027.3,1331-1349).
gctctgtttcgtgatgttt

SEQ ID NO: 260040 - DNA, 19 bp, Homo sapiens
  siRNA target sequence for ANKH (NM_054027.3,1357-1375).
ccaacgtgtctgagaaaat

SEQ ID NO: 260041 - DNA, 19 bp, Homo sapiens
  siRNA target sequence for ANKH (NM_054027.3,1425-1443).
gttcctttgcggatcttct

SEQ ID NO: 260042 - DNA, 19 bp, Homo sapiens
  siRNA target sequence for ANKH (NM_054027.3,1671-1689).
gtctaccggaagcagaaaa

SEQ ID NO: 260043 - DNA, 19 bp, Homo sapiens
  siRNA target sequence for SLC26A1 (NM_022042.2,414-432).
cccatctacagcctctata

SEQ ID NO: 260044 - DNA, 19 bp, Homo sapiens
  siRNA target sequence for SLC26A1 (NM_022042.2,2074-2092).
cgcctgtgagagacattct

SEQ ID NO: 260045 - DNA, 19 bp, Homo sapiens
  siRNA target sequence for SLC26A1 (NM_022042.2,2076-2094).
cctgtgagagacattctga

SEQ ID NO: 260046 - DNA, 19 bp, Homo sapiens
  siRNA target sequence for SLC26A11 (NM_173626.1,507-525).
ggctgcttcgtgtatttct

SEQ ID NO: 260047 - DNA, 19 bp, Homo sapiens
  siRNA target sequence for SLC26A11 (NM_173626.1,508-526).
gctgcttcgtgtatttctt

SEQ ID NO: 260048 - DNA, 19 bp, Homo sapiens
  siRNA target sequence for SLC26A11 (NM_173626.1,1227-1245).
gccttcgcatctcagaata

SEQ ID NO: 260049 - DNA, 19 bp, Homo sapiens
  siRNA target sequence for SLC26A11 (NM_173626.1,1228-1246).
ccttcgcatctcagaataa

SEQ ID NO: 260050 - DNA, 19 bp, Homo sapiens
  siRNA target sequence for SLC26A11 (NM_173626.1,1522-1540).
ggacgctctggcgtgttaa

SEQ ID NO: 260051 - DNA, 19 bp, Homo sapiens
  siRNA target sequence for SLC26A11 (NM_173626.1,2033-2051).
cattctggaccaaaaggtt

SEQ ID NO: 260052 - DNA, 19 bp, Homo sapiens
  siRNA target sequence for SLC26A2 (NM_000112.1,105-123).
gatccatctggaacttcaa

SEQ ID NO: 260053 - DNA, 19 bp, Homo sapiens
  siRNA target sequence for SLC26A2 (NM_000112.1,147-165).
gcaatttgagaccaatgat

SEQ ID NO: 260054 - DNA, 19 bp, Homo sapiens
  siRNA target sequence for SLC26A2 (NM_000112.1,175-193).
ccttatcataggatcctta

SEQ ID NO: 260055 - DNA, 19 bp, Homo sapiens
  siRNA target sequence for SLC26A2 (NM_000112.1,199-217).
cgtcaagagaaatcagata

SEQ ID NO: 260056 - DNA, 19 bp, Homo sapiens
  siRNA target sequence for SLC26A2 (NM_000112.1,325-343).
ccaaaatacgacctaaaga

SEQ ID NO: 260057 - DNA, 19 bp, Homo sapiens
  siRNA target sequence for SLC26A2 (NM_000112.1,333-351).
cgacctaaagaaaaacatt

SEQ ID NO: 260058 - DNA, 19 bp, Homo sapiens
  siRNA target sequence for SLC26A2 (NM_000112.1,371-389).
gcttgattgtgggcatatt

SEQ ID NO: 260059 - DNA, 19 bp, Homo sapiens
  siRNA target sequence for SLC26A2 (NM_000112.1,372-390).
cttgattgtgggcatatta

SEQ ID NO: 260060 - DNA, 19 bp, Homo sapiens
  siRNA target sequence for SLC26A2 (NM_000112.1,568-586).
cagaaagctggctatgaca

SEQ ID NO: 260061 - DNA, 19 bp, Homo sapiens
  siRNA target sequence for SLC26A2 (NM_000112.1,596-614).
gtgctccttccttaggaat

SEQ ID NO: 260062 - DNA, 19 bp, Homo sapiens
  siRNA target sequence for SLC26A2 (NM_000112.1,664-682).
gacaaaagttgctatgcaa

SEQ ID NO: 260063 - DNA, 19 bp, Homo sapiens
  siRNA target sequence for SLC26A2 (NM_000112.1,666-684).
caaaagttgctatgcaatt

SEQ ID NO: 260064 - DNA, 19 bp, Homo sapiens
  siRNA target sequence for SLC26A2 (NM_000112.1,691-709).
ggcagcactgtaaccttta

SEQ ID NO: 260065 - DNA, 19 bp, Homo sapiens
  siRNA target sequence for SLC26A2 (NM_000112.1,692-710).
gcagcactgtaacctttat

SEQ ID NO: 260066 - DNA, 19 bp, Homo sapiens
  siRNA target sequence for SLC26A2 (NM_000112.1,693-711).
cagcactgtaacctttata

SEQ ID NO: 260067 - DNA, 19 bp, Homo sapiens
  siRNA target sequence for SLC26A2 (NM_000112.1,696-714).
cactgtaacctttatagct

SEQ ID NO: 260068 - DNA, 19 bp, Homo sapiens
  siRNA target sequence for SLC26A2 (NM_000112.1,705-723).
ctttatagctggagtttat

SEQ ID NO: 260069 - DNA, 19 bp, Homo sapiens
  siRNA target sequence for SLC26A2 (NM_000112.1,726-744).
ggtagcgatgggcttcttt

SEQ ID NO: 260070 - DNA, 19 bp, Homo sapiens
  siRNA target sequence for SLC26A2 (NM_000112.1,731-749).
cgatgggcttctttcaagt

SEQ ID NO: 260071 - DNA, 19 bp, Homo sapiens
  siRNA target sequence for SLC26A2 (NM_000112.1,852-870).
caaccttcctcggactaat

SEQ ID NO: 260072 - DNA, 19 bp, Homo sapiens
  siRNA target sequence for SLC26A2 (NM_000112.1,855-873).
ccttcctcggactaatggt

SEQ ID NO: 260073 - DNA, 19 bp, Homo sapiens
  siRNA target sequence for SLC26A2 (NM_000112.1,885-903).
catcactacctggatacat

SEQ ID NO: 260074 - DNA, 19 bp, Homo sapiens
  siRNA target sequence for SLC26A2 (NM_000112.1,924-942).
gaccaatctctgtgatctt

SEQ ID NO: 260075 - DNA, 19 bp, Homo sapiens
  siRNA target sequence for SLC26A2 (NM_000112.1,975-993).
gccaaccaaagaactcaat

SEQ ID NO: 260076 - DNA, 19 bp, Homo sapiens
  siRNA target sequence for SLC26A2 (NM_000112.1,1012-1030).
cttaaggcaccgattccta

SEQ ID NO: 260077 - DNA, 19 bp, Homo sapiens
  siRNA target sequence for SLC26A2 (NM_000112.1,1017-1035).
ggcaccgattcctattgaa

SEQ ID NO: 260078 - DNA, 19 bp, Homo sapiens
  siRNA target sequence for SLC26A2 (NM_000112.1,1019-1037).
caccgattcctattgaact

SEQ ID NO: 260079 - DNA, 19 bp, Homo sapiens
  siRNA target sequence for SLC26A2 (NM_000112.1,1022-1040).
cgattcctattgaacttgt

SEQ ID NO: 260080 - DNA, 19 bp, Homo sapiens
  siRNA target sequence for SLC26A2 (NM_000112.1,1054-1072).
gccacattagcctctcatt

SEQ ID NO: 260081 - DNA, 19 bp, Homo sapiens
  siRNA target sequence for SLC26A2 (NM_000112.1,1150-1168).
gaatggaacctaattccta

SEQ ID NO: 260082 - DNA, 19 bp, Homo sapiens
  siRNA target sequence for SLC26A2 (NM_000112.1,1169-1187).
gtgtggctgtagatgcaat

SEQ ID NO: 260083 - DNA, 19 bp, Homo sapiens
  siRNA target sequence for SLC26A2 (NM_000112.1,1175-1193).
ctgtagatgcaatagctat

SEQ ID NO: 260084 - DNA, 19 bp, Homo sapiens
  siRNA target sequence for SLC26A2 (NM_000112.1,1177-1195).
gtagatgcaatagctattt

SEQ ID NO: 260085 - DNA, 19 bp, Homo sapiens
  siRNA target sequence for SLC26A2 (NM_000112.1,1190-1208).
ctatttccatcattggttt

SEQ ID NO: 260086 - DNA, 19 bp, Homo sapiens
  siRNA target sequence for SLC26A2 (NM_000112.1,1204-1222).
ggttttgctatcactgtat

SEQ ID NO: 260087 - DNA, 19 bp, Homo sapiens
  siRNA target sequence for SLC26A2 (NM_000112.1,1210-1228).
gctatcactgtatcacttt

SEQ ID NO: 260088 - DNA, 19 bp, Homo sapiens
  siRNA target sequence for SLC26A2 (NM_000112.1,1242-1260).
caagaaacatggttacaca

SEQ ID NO: 260089 - DNA, 19 bp, Homo sapiens
  siRNA target sequence for SLC26A2 (NM_000112.1,1317-1335).
cttccactgttttactact

SEQ ID NO: 260090 - DNA, 19 bp, Homo sapiens
  siRNA target sequence for SLC26A2 (NM_000112.1,1320-1338).
ccactgttttactactagt

SEQ ID NO: 260091 - DNA, 19 bp, Homo sapiens
  siRNA target sequence for SLC26A2 (NM_000112.1,1334-1352).
ctagtgcagctcttgcaaa

SEQ ID NO: 260092 - DNA, 19 bp, Homo sapiens
  siRNA target sequence for SLC26A2 (NM_000112.1,1339-1357).
gcagctcttgcaaagacat

SEQ ID NO: 260093 - DNA, 19 bp, Homo sapiens
  siRNA target sequence for SLC26A2 (NM_000112.1,1370-1388).
caacaggctgccatactca

SEQ ID NO: 260094 - DNA, 19 bp, Homo sapiens
  siRNA target sequence for SLC26A2 (NM_000112.1,1422-1440).
gttggtcctcctagtaata

SEQ ID NO: 260095 - DNA, 19 bp, Homo sapiens
  siRNA target sequence for SLC26A2 (NM_000112.1,1425-1443).
ggtcctcctagtaatagct

SEQ ID NO: 260096 - DNA, 19 bp, Homo sapiens
  siRNA target sequence for SLC26A2 (NM_000112.1,1471-1489).
gtccttggtgtgatcacaa

SEQ ID NO: 260097 - DNA, 19 bp, Homo sapiens
  siRNA target sequence for SLC26A2 (NM_000112.1,1478-1496).
gtgtgatcacaattgtaaa

SEQ ID NO: 260098 - DNA, 19 bp, Homo sapiens
  siRNA target sequence for SLC26A2 (NM_000112.1,1502-1520).
ggggagcccttcgtaaatt

SEQ ID NO: 260099 - DNA, 19 bp, Homo sapiens
  siRNA target sequence for SLC26A2 (NM_000112.1,1503-1521).
gggagcccttcgtaaattt

SEQ ID NO: 260100 - DNA, 19 bp, Homo sapiens
  siRNA target sequence for SLC26A2 (NM_000112.1,1504-1522).
ggagcccttcgtaaattta

SEQ ID NO: 260101 - DNA, 19 bp, Homo sapiens
  siRNA target sequence for SLC26A2 (NM_000112.1,1531-1549).
cccaaaatgtggagtatta

SEQ ID NO: 260102 - DNA, 19 bp, Homo sapiens
  siRNA target sequence for SLC26A2 (NM_000112.1,1550-1568).
gtagaatggatacagttat

SEQ ID NO: 260103 - DNA, 19 bp, Homo sapiens
  siRNA target sequence for SLC26A2 (NM_000112.1,1564-1582).
gttatctggtttgttacta

SEQ ID NO: 260104 - DNA, 19 bp, Homo sapiens
  siRNA target sequence for SLC26A2 (NM_000112.1,1662-1680).
cactcagaagccaaagagt

SEQ ID NO: 260105 - DNA, 19 bp, Homo sapiens
  siRNA target sequence for SLC26A2 (NM_000112.1,1761-1779).
caagattttccgctttgta

SEQ ID NO: 260106 - DNA, 19 bp, Homo sapiens
  siRNA target sequence for SLC26A2 (NM_000112.1,1777-1795).
gtagcccctctctactaca

SEQ ID NO: 260107 - DNA, 19 bp, Homo sapiens
  siRNA target sequence for SLC26A2 (NM_000112.1,1837-1855).
gtcaacccaatcttaataa

SEQ ID NO: 260108 - DNA, 19 bp, Homo sapiens
  siRNA target sequence for SLC26A2 (NM_000112.1,1956-1974).
cttggagctgcatactata

SEQ ID NO: 260109 - DNA, 19 bp, Homo sapiens
  siRNA target sequence for SLC26A2 (NM_000112.1,1960-1978).
gagctgcatactatagtga

SEQ ID NO: 260110 - DNA, 19 bp, Homo sapiens
  siRNA target sequence for SLC26A2 (NM_000112.1,1962-1980).
gctgcatactatagtgatt

SEQ ID NO: 260111 - DNA, 19 bp, Homo sapiens
  siRNA target sequence for SLC26A2 (NM_000112.1,1966-1984).
catactatagtgattgact

SEQ ID NO: 260112 - DNA, 19 bp, Homo sapiens
  siRNA target sequence for SLC26A2 (NM_000112.1,1977-1995).
gattgactgcagtgcaatt

SEQ ID NO: 260113 - DNA, 19 bp, Homo sapiens
  siRNA target sequence for SLC26A2 (NM_000112.1,1981-1999).
gactgcagtgcaattcaat

SEQ ID NO: 260114 - DNA, 19 bp, Homo sapiens
  siRNA target sequence for SLC26A2 (NM_000112.1,2106-2124).
cctaaccaacggagaatat

SEQ ID NO: 260115 - DNA, 19 bp, Homo sapiens
  siRNA target sequence for SLC26A2 (NM_000112.1,2107-2125).
ctaaccaacggagaatatt

SEQ ID NO: 260116 - DNA, 19 bp, Homo sapiens
  siRNA target sequence for SLC26A2 (NM_000112.1,2111-2129).
ccaacggagaatattgcaa

SEQ ID NO: 260117 - DNA, 19 bp, Homo sapiens
  siRNA target sequence for SLC26A2 (NM_000112.1,2112-2130).
caacggagaatattgcaaa

SEQ ID NO: 260118 - DNA, 19 bp, Homo sapiens
  siRNA target sequence for SLC26A4 (NM_000441.1,382-400).
gctgcagttgttcaagaaa

SEQ ID NO: 260119 - DNA, 19 bp, Homo sapiens
  siRNA target sequence for SLC26A4 (NM_000441.1,403-421).
gagcctttggtgtgctaaa

SEQ ID NO: 260120 - DNA, 19 bp, Homo sapiens
  siRNA target sequence for SLC26A4 (NM_000441.1,407-425).
ctttggtgtgctaaagact

SEQ ID NO: 260121 - DNA, 19 bp, Homo sapiens
  siRNA target sequence for SLC26A4 (NM_000441.1,488-506).
catttcgggagttagtact

SEQ ID NO: 260122 - DNA, 19 bp, Homo sapiens
  siRNA target sequence for SLC26A4 (NM_000441.1,591-609).
cctatcctgacatacttta

SEQ ID NO: 260123 - DNA, 19 bp, Homo sapiens
  siRNA target sequence for SLC26A4 (NM_000441.1,632-650).
ctcagttggaccttttcca

SEQ ID NO: 260124 - DNA, 19 bp, Homo sapiens
  siRNA target sequence for SLC26A4 (NM_000441.1,716-734).
cagcagcaatggaactgta

SEQ ID NO: 260125 - DNA, 19 bp, Homo sapiens
  siRNA target sequence for SLC26A4 (NM_000441.1,726-744).
ggaactgtattaaatacta

SEQ ID NO: 260126 - DNA, 19 bp, Homo sapiens
  siRNA target sequence for SLC26A4 (NM_000441.1,753-771).
gacactgcagctagagata

SEQ ID NO: 260127 - DNA, 19 bp, Homo sapiens
  siRNA target sequence for SLC26A4 (NM_000441.1,800-818).
gactctgctggttggaatt

SEQ ID NO: 260128 - DNA, 19 bp, Homo sapiens
  siRNA target sequence for SLC26A4 (NM_000441.1,838-856).
gcttgcagattggattcat

SEQ ID NO: 260129 - DNA, 19 bp, Homo sapiens
  siRNA target sequence for SLC26A4 (NM_000441.1,839-857).
cttgcagattggattcata

SEQ ID NO: 260130 - DNA, 19 bp, Homo sapiens
  siRNA target sequence for SLC26A4 (NM_000441.1,965-983).
caatggagttctctctatt

SEQ ID NO: 260131 - DNA, 19 bp, Homo sapiens
  siRNA target sequence for SLC26A4 (NM_000441.1,969-987).
ggagttctctctattatct

SEQ ID NO: 260132 - DNA, 19 bp, Homo sapiens
  siRNA target sequence for SLC26A4 (NM_000441.1,970-988).
gagttctctctattatcta

SEQ ID NO: 260133 - DNA, 19 bp, Homo sapiens
  siRNA target sequence for SLC26A4 (NM_000441.1,986-1004).
ctatacgctggttgagatt

SEQ ID NO: 260134 - DNA, 19 bp, Homo sapiens
  siRNA target sequence for SLC26A4 (NM_000441.1,1025-1043).
caatcttgctgatttcact

SEQ ID NO: 260135 - DNA, 19 bp, Homo sapiens
  siRNA target sequence for SLC26A4 (NM_000441.1,1069-1087).
gtatggcagttaaggaatt

SEQ ID NO: 260136 - DNA, 19 bp, Homo sapiens
  siRNA target sequence for SLC26A4 (NM_000441.1,1073-1091).
ggcagttaaggaattaaat

SEQ ID NO: 260137 - DNA, 19 bp, Homo sapiens
  siRNA target sequence for SLC26A4 (NM_000441.1,1092-1110).
gatcggtttagacacaaaa

SEQ ID NO: 260138 - DNA, 19 bp, Homo sapiens
  siRNA target sequence for SLC26A4 (NM_000441.1,1112-1130).
cccagtccctattcctata

SEQ ID NO: 260139 - DNA, 19 bp, Homo sapiens
  siRNA target sequence for SLC26A4 (NM_000441.1,1118-1136).
ccctattcctatagaagta

SEQ ID NO: 260140 - DNA, 19 bp, Homo sapiens
  siRNA target sequence for SLC26A4 (NM_000441.1,1119-1137).
cctattcctatagaagtaa

SEQ ID NO: 260141 - DNA, 19 bp, Homo sapiens
  siRNA target sequence for SLC26A4 (NM_000441.1,1268-1286).
gatgctggctgcatcattt

SEQ ID NO: 260142 - DNA, 19 bp, Homo sapiens
  siRNA target sequence for SLC26A4 (NM_000441.1,1298-1316).
ggtggcttatgctattgca

SEQ ID NO: 260143 - DNA, 19 bp, Homo sapiens
  siRNA target sequence for SLC26A4 (NM_000441.1,1338-1356).
gccaccaagtatgattaca

SEQ ID NO: 260144 - DNA, 19 bp, Homo sapiens
  siRNA target sequence for SLC26A4 (NM_000441.1,1485-1503).
caggttgctggcatcatct

SEQ ID NO: 260145 - DNA, 19 bp, Homo sapiens
  siRNA target sequence for SLC26A4 (NM_000441.1,1632-1650).
cgtctgtggagacagaata

SEQ ID NO: 260146 - DNA, 19 bp, Homo sapiens
  siRNA target sequence for SLC26A4 (NM_000441.1,1635-1653).
ctgtggagacagaataaga

SEQ ID NO: 260147 - DNA, 19 bp, Homo sapiens
  siRNA target sequence for SLC26A4 (NM_000441.1,1662-1680).
gttatctgggtgtttacgt

SEQ ID NO: 260148 - DNA, 19 bp, Homo sapiens
  siRNA target sequence for SLC26A4 (NM_000441.1,1667-1685).
ctgggtgtttacgtgtata

SEQ ID NO: 260149 - DNA, 19 bp, Homo sapiens
  siRNA target sequence for SLC26A4 (NM_000441.1,1669-1687).
gggtgtttacgtgtatagt

SEQ ID NO: 260150 - DNA, 19 bp, Homo sapiens
  siRNA target sequence for SLC26A4 (NM_000441.1,1671-1689).
gtgtttacgtgtatagtgt

SEQ ID NO: 260151 - DNA, 19 bp, Homo sapiens
  siRNA target sequence for SLC26A4 (NM_000441.1,1681-1699).
gtatagtgtccatcattct

SEQ ID NO: 260152 - DNA, 19 bp, Homo sapiens
  siRNA target sequence for SLC26A4 (NM_000441.1,1702-1720).
ggctggatctcggtttact

SEQ ID NO: 260153 - DNA, 19 bp, Homo sapiens
  siRNA target sequence for SLC26A4 (NM_000441.1,1703-1721).
gctggatctcggtttacta

SEQ ID NO: 260154 - DNA, 19 bp, Homo sapiens
  siRNA target sequence for SLC26A4 (NM_000441.1,1792-1810).
gcatccctagcacagatat

SEQ ID NO: 260155 - DNA, 19 bp, Homo sapiens
  siRNA target sequence for SLC26A4 (NM_000441.1,1798-1816).
ctagcacagatatctacaa

SEQ ID NO: 260156 - DNA, 19 bp, Homo sapiens
  siRNA target sequence for SLC26A4 (NM_000441.1,1849-1867).
ctcaaggagtgaagattct

SEQ ID NO: 260157 - DNA, 19 bp, Homo sapiens
  siRNA target sequence for SLC26A4 (NM_000441.1,1894-1912).
gcaatgtcgatggttttaa

SEQ ID NO: 260158 - DNA, 19 bp, Homo sapiens
  siRNA target sequence for SLC26A4 (NM_000441.1,1895-1913).
caatgtcgatggttttaaa

SEQ ID NO: 260159 - DNA, 19 bp, Homo sapiens
  siRNA target sequence for SLC26A4 (NM_000441.1,1936-1954).
gatttgatgccattagagt

SEQ ID NO: 260160 - DNA, 19 bp, Homo sapiens
  siRNA target sequence for SLC26A4 (NM_000441.1,1941-1959).
gatgccattagagtatata

SEQ ID NO: 260161 - DNA, 19 bp, Homo sapiens
  siRNA target sequence for SLC26A4 (NM_000441.1,1944-1962).
gccattagagtatataata

SEQ ID NO: 260162 - DNA, 19 bp, Homo sapiens
  siRNA target sequence for SLC26A4 (NM_000441.1,1968-1986).
ctgaaagcgctgaggaaaa

SEQ ID NO: 260163 - DNA, 19 bp, Homo sapiens
  siRNA target sequence for SLC26A4 (NM_000441.1,2010-2028).
caattaagagcaacaaaga

SEQ ID NO: 260164 - DNA, 19 bp, Homo sapiens
  siRNA target sequence for SLC26A4 (NM_000441.1,2036-2054).
cataagtgatgctgtttca

SEQ ID NO: 260165 - DNA, 19 bp, Homo sapiens
  siRNA target sequence for SLC26A4 (NM_000441.1,2049-2067).
gtttcaacaaataatgctt

SEQ ID NO: 260166 - DNA, 19 bp, Homo sapiens
  siRNA target sequence for SLC26A4 (NM_000441.1,2053-2071).
caacaaataatgcttttga

SEQ ID NO: 260167 - DNA, 19 bp, Homo sapiens
  siRNA target sequence for SLC26A4 (NM_000441.1,2112-2130).
ccaaccaaggaaatagaga

SEQ ID NO: 260168 - DNA, 19 bp, Homo sapiens
  siRNA target sequence for SLC26A4 (NM_000441.1,2149-2167).
ctgagcttccagtcaaagt

SEQ ID NO: 260169 - DNA, 19 bp, Homo sapiens
  siRNA target sequence for SLC26A4 (NM_000441.1,2201-2219).
gcttgactgtggagctata

SEQ ID NO: 260170 - DNA, 19 bp, Homo sapiens
  siRNA target sequence for SLC26A4 (NM_000441.1,2202-2220).
cttgactgtggagctatat

SEQ ID NO: 260171 - DNA, 19 bp, Homo sapiens
  siRNA target sequence for SLC26A4 (NM_000441.1,2205-2223).
gactgtggagctatatctt

SEQ ID NO: 260172 - DNA, 19 bp, Homo sapiens
  siRNA target sequence for SLC26A4 (NM_000441.1,2245-2263).
gatcactgcgggtgattgt

SEQ ID NO: 260173 - DNA, 19 bp, Homo sapiens
  siRNA target sequence for SLC26A4 (NM_000441.1,2248-2266).
cactgcgggtgattgtcaa

SEQ ID NO: 260174 - DNA, 19 bp, Homo sapiens
  siRNA target sequence for SLC26A4 (NM_000441.1,2252-2270).
gcgggtgattgtcaaagaa

SEQ ID NO: 260175 - DNA, 19 bp, Homo sapiens
  siRNA target sequence for SLC26A4 (NM_000441.1,2253-2271).
cgggtgattgtcaaagaat

SEQ ID NO: 260176 - DNA, 19 bp, Homo sapiens
  siRNA target sequence for SLC26A4 (NM_000441.1,2254-2272).
gggtgattgtcaaagaatt

SEQ ID NO: 260177 - DNA, 19 bp, Homo sapiens
  siRNA target sequence for SLC26A4 (NM_000441.1,2273-2291).
ccaaagaattgatgtgaat

SEQ ID NO: 260178 - DNA, 19 bp, Homo sapiens
  siRNA target sequence for SLC26A4 (NM_000441.1,2345-2363).
gttctttgacgacaacatt

SEQ ID NO: 260179 - DNA, 19 bp, Homo sapiens
  siRNA target sequence for SLC26A4 (NM_000441.1,2348-2366).
ctttgacgacaacattaga

SEQ ID NO: 260180 - DNA, 19 bp, Homo sapiens
  siRNA target sequence for SLC26A4 (NM_000441.1,2384-2402).
gacggtccatgatgctata

SEQ ID NO: 260181 - DNA, 19 bp, Homo sapiens
  siRNA target sequence for SLC26A4 (NM_000441.1,2386-2404).
cggtccatgatgctatact

SEQ ID NO: 260182 - DNA, 19 bp, Homo sapiens
  siRNA target sequence for SLC26A4 (NM_000441.1,2390-2408).
ccatgatgctatactctat

SEQ ID NO: 260183 - DNA, 19 bp, Homo sapiens
  siRNA target sequence for SLC26A4 (NM_000441.1,2414-2432).
gaaccaagtgaaatctcaa

SEQ ID NO: 260184 - DNA, 19 bp, Homo sapiens
  siRNA target sequence for SLC26A4 (NM_000441.1,2433-2451).
gagggtcaaggttccattt

SEQ ID NO: 260185 - DNA, 19 bp, Homo sapiens
  siRNA target sequence for SLC26A4 (NM_000441.1,2435-2453).
gggtcaaggttccatttta

SEQ ID NO: 260186 - DNA, 19 bp, Homo sapiens
  siRNA target sequence for SLC26A4 (NM_000441.1,2437-2455).
gtcaaggttccattttaga

SEQ ID NO: 260187 - DNA, 19 bp, Homo sapiens
  siRNA target sequence for SLC26A4 (NM_000441.1,2464-2482).
ctctcattcaggattgtaa

SEQ ID NO: 260188 - DNA, 19 bp, Homo sapiens
  siRNA target sequence for SLC26A4 (NM_000441.1,2468-2486).
cattcaggattgtaaagat

SEQ ID NO: 260189 - DNA, 19 bp, Homo sapiens
  siRNA target sequence for SLC26A4 (NM_000441.1,2479-2497).
gtaaagatacccttgaatt

SEQ ID NO: 260190 - DNA, 19 bp, Homo sapiens
  siRNA target sequence for SLC26A4 (NM_000441.1,2489-2507).
ccttgaattaatagaaaca

SEQ ID NO: 260191 - DNA, 19 bp, Homo sapiens
  siRNA target sequence for SLC26A6 (NM_022911.2,455-473).
cccgtgtttggcctctata

SEQ ID NO: 260192 - DNA, 19 bp, Homo sapiens
  siRNA target sequence for SLC26A6 (NM_022911.2,458-476).
gtgtttggcctctatagct

SEQ ID NO: 260193 - DNA, 19 bp, Homo sapiens
  siRNA target sequence for SLC26A6 (NM_022911.2,598-616).
gaacgactccatgatcaat

SEQ ID NO: 260194 - DNA, 19 bp, Homo sapiens
  siRNA target sequence for SLC26A6 (NM_022911.2,740-758).
cttgtccgaggctatacca

SEQ ID NO: 260195 - DNA, 19 bp, Homo sapiens
  siRNA target sequence for SLC26A6 (NM_022911.2,781-799).
cgtctcacagctcaagtat

SEQ ID NO: 260196 - DNA, 19 bp, Homo sapiens
  siRNA target sequence for SLC26A6 (NM_022911.2,934-952).
ggtggtgaagctgttgaat

SEQ ID NO: 260197 - DNA, 19 bp, Homo sapiens
  siRNA target sequence for SLC26A6 (NM_022911.2,1026-1044).
cctatggcatgggtctaaa

SEQ ID NO: 260198 - DNA, 19 bp, Homo sapiens
  siRNA target sequence for SLC26A6 (NM_022911.2,1289-1307).
cccgtgagttgctctatgt

SEQ ID NO: 260199 - DNA, 19 bp, Homo sapiens
  siRNA target sequence for SLC26A6 (NM_022911.2,1291-1309).
cgtgagttgctctatgtct

SEQ ID NO: 260200 - DNA, 19 bp, Homo sapiens
  siRNA target sequence for SLC26A6 (NM_022911.2,1580-1598).
gtggttgcggtcatcttct

SEQ ID NO: 260201 - DNA, 19 bp, Homo sapiens
  siRNA target sequence for SLC26A6 (NM_022911.2,1654-1672).
ggtgccagacacggatatt

SEQ ID NO: 260202 - DNA, 19 bp, Homo sapiens
  siRNA target sequence for SLC26A6 (NM_022911.2,1658-1676).
ccagacacggatatttaca

SEQ ID NO: 260203 - DNA, 19 bp, Homo sapiens
  siRNA target sequence for SLC26A7 (NM_052832.2,294-312).
ccccagtgtgaagacatta

SEQ ID NO: 260204 - DNA, 19 bp, Homo sapiens
  siRNA target sequence for SLC26A7 (NM_052832.2,296-314).
ccagtgtgaagacattata

SEQ ID NO: 260205 - DNA, 19 bp, Homo sapiens
  siRNA target sequence for SLC26A7 (NM_052832.2,325-343).
gaaggcgactgcccatttt

SEQ ID NO: 260206 - DNA, 19 bp, Homo sapiens
  siRNA target sequence for SLC26A7 (NM_052832.2,328-346).
ggcgactgcccattttgga

SEQ ID NO: 260207 - DNA, 19 bp, Homo sapiens
  siRNA target sequence for SLC26A7 (NM_052832.2,329-347).
gcgactgcccattttggat

SEQ ID NO: 260208 - DNA, 19 bp, Homo sapiens
  siRNA target sequence for SLC26A7 (NM_052832.2,330-348).
cgactgcccattttggatt

SEQ ID NO: 260209 - DNA, 19 bp, Homo sapiens
  siRNA target sequence for SLC26A7 (NM_052832.2,345-363).
gattgggcaccacattaca

SEQ ID NO: 260210 - DNA, 19 bp, Homo sapiens
  siRNA target sequence for SLC26A7 (NM_052832.2,352-370).
caccacattacaatctgaa

SEQ ID NO: 260211 - DNA, 19 bp, Homo sapiens
  siRNA target sequence for SLC26A7 (NM_052832.2,401-419).
gataatgttggcagttcaa

SEQ ID NO: 260212 - DNA, 19 bp, Homo sapiens
  siRNA target sequence for SLC26A7 (NM_052832.2,459-477).
gtgcacccagtgtttggtt

SEQ ID NO: 260213 - DNA, 19 bp, Homo sapiens
  siRNA target sequence for SLC26A7 (NM_052832.2,461-479).
gcacccagtgtttggttta

SEQ ID NO: 260214 - DNA, 19 bp, Homo sapiens
  siRNA target sequence for SLC26A7 (NM_052832.2,500-518).
cataatttatgccatattt

SEQ ID NO: 260215 - DNA, 19 bp, Homo sapiens
  siRNA target sequence for SLC26A7 (NM_052832.2,552-570).
gccttgacatccttaatat

SEQ ID NO: 260216 - DNA, 19 bp, Homo sapiens
  siRNA target sequence for SLC26A7 (NM_052832.2,554-572).
cttgacatccttaatatca

SEQ ID NO: 260217 - DNA, 19 bp, Homo sapiens
  siRNA target sequence for SLC26A7 (NM_052832.2,644-662).
gggcttatccgactttgaa

SEQ ID NO: 260218 - DNA, 19 bp, Homo sapiens
  siRNA target sequence for SLC26A7 (NM_052832.2,646-664).
gcttatccgactttgaaat

SEQ ID NO: 260219 - DNA, 19 bp, Homo sapiens
  siRNA target sequence for SLC26A7 (NM_052832.2,710-728).
gattcaggtggccatgttt

SEQ ID NO: 260220 - DNA, 19 bp, Homo sapiens
  siRNA target sequence for SLC26A7 (NM_052832.2,771-789).
gtgatcagcgcaatgacaa

SEQ ID NO: 260221 - DNA, 19 bp, Homo sapiens
  siRNA target sequence for SLC26A7 (NM_052832.2,812-830).
gacttcacaagtcaaatat

SEQ ID NO: 260222 - DNA, 19 bp, Homo sapiens
  siRNA target sequence for SLC26A7 (NM_052832.2,814-832).
cttcacaagtcaaatatct

SEQ ID NO: 260223 - DNA, 19 bp, Homo sapiens
  siRNA target sequence for SLC26A7 (NM_052832.2,817-835).
cacaagtcaaatatctctt

SEQ ID NO: 260224 - DNA, 19 bp, Homo sapiens
  siRNA target sequence for SLC26A7 (NM_052832.2,859-877).
ccggaccacttggattctt

SEQ ID NO: 260225 - DNA, 19 bp, Homo sapiens
  siRNA target sequence for SLC26A7 (NM_052832.2,860-878).
cggaccacttggattcttt

SEQ ID NO: 260226 - DNA, 19 bp, Homo sapiens
  siRNA target sequence for SLC26A7 (NM_052832.2,861-879).
ggaccacttggattctttt

SEQ ID NO: 260227 - DNA, 19 bp, Homo sapiens
  siRNA target sequence for SLC26A7 (NM_052832.2,913-931).
ctgtgcgactggaagcatt

SEQ ID NO: 260228 - DNA, 19 bp, Homo sapiens
  siRNA target sequence for SLC26A7 (NM_052832.2,1014-1032).
cttcctgtagatttagttt

SEQ ID NO: 260229 - DNA, 19 bp, Homo sapiens
  siRNA target sequence for SLC26A7 (NM_052832.2,1034-1052).
gattattgctgcatcattt

SEQ ID NO: 260230 - DNA, 19 bp, Homo sapiens
  siRNA target sequence for SLC26A7 (NM_052832.2,1053-1071).
gcttgttattgcaccaata

SEQ ID NO: 260231 - DNA, 19 bp, Homo sapiens
  siRNA target sequence for SLC26A7 (NM_052832.2,1054-1072).
cttgttattgcaccaatat

SEQ ID NO: 260232 - DNA, 19 bp, Homo sapiens
  siRNA target sequence for SLC26A7 (NM_052832.2,1081-1099).
catatggattagaagtagt

SEQ ID NO: 260233 - DNA, 19 bp, Homo sapiens
  siRNA target sequence for SLC26A7 (NM_052832.2,1283-1301).
cctcagcaatatagtttct

SEQ ID NO: 260234 - DNA, 19 bp, Homo sapiens
  siRNA target sequence for SLC26A7 (NM_052832.2,1288-1306).
gcaatatagtttcttcatt

SEQ ID NO: 260235 - DNA, 19 bp, Homo sapiens
  siRNA target sequence for SLC26A7 (NM_052832.2,1373-1391).
gacacaggtggcttgtcta

SEQ ID NO: 260236 - DNA, 19 bp, Homo sapiens
  siRNA target sequence for SLC26A7 (NM_052832.2,1380-1398).
gtggcttgtctaatatctt

SEQ ID NO: 260237 - DNA, 19 bp, Homo sapiens
  siRNA target sequence for SLC26A7 (NM_052832.2,1399-1417).
gcattttcgtccttatagt

SEQ ID NO: 260238 - DNA, 19 bp, Homo sapiens
  siRNA target sequence for SLC26A7 (NM_052832.2,1457-1475).
gtgtgtccttgcaagcatt

SEQ ID NO: 260239 - DNA, 19 bp, Homo sapiens
  siRNA target sequence for SLC26A7 (NM_052832.2,1484-1502).
gggactgaagggaatgcta

SEQ ID NO: 260240 - DNA, 19 bp, Homo sapiens
  siRNA target sequence for SLC26A7 (NM_052832.2,1506-1524).
cagttccgagatttaaaaa

SEQ ID NO: 260241 - DNA, 19 bp, Homo sapiens
  siRNA target sequence for SLC26A7 (NM_052832.2,1561-1579).
gggtcagtacatatgtatt

SEQ ID NO: 260242 - DNA, 19 bp, Homo sapiens
  siRNA target sequence for SLC26A7 (NM_052832.2,1620-1638).
gttgtttgtaccatagcta

SEQ ID NO: 260243 - DNA, 19 bp, Homo sapiens
  siRNA target sequence for SLC26A7 (NM_052832.2,1627-1645).
gtaccatagctatagtgat

SEQ ID NO: 260244 - DNA, 19 bp, Homo sapiens
  siRNA target sequence for SLC26A7 (NM_052832.2,1662-1680).
gcaatgactgtaagtataa

SEQ ID NO: 260245 - DNA, 19 bp, Homo sapiens
  siRNA target sequence for SLC26A7 (NM_052832.2,1781-1799).
gaatgcaaaaaaattttat

SEQ ID NO: 260246 - DNA, 19 bp, Homo sapiens
  siRNA target sequence for SLC26A7 (NM_052832.2,1835-1853).
ctgtaatcagccacttgat

SEQ ID NO: 260247 - DNA, 19 bp, Homo sapiens
  siRNA target sequence for SLC26A7 (NM_052832.2,2085-2103).
gcaatgacgtattatggaa

SEQ ID NO: 260248 - DNA, 19 bp, Homo sapiens
  siRNA target sequence for SLC26A7 (NM_052832.2,2086-2104).
caatgacgtattatggaaa

SEQ ID NO: 260249 - DNA, 19 bp, Homo sapiens
  siRNA target sequence for SLC26A7 (NM_052832.2,2090-2108).
gacgtattatggaaaccta

SEQ ID NO: 260250 - DNA, 19 bp, Homo sapiens
  siRNA target sequence for SLC26A7 (NM_052832.2,2106-2124).
ctagactcagagaaaccaa

SEQ ID NO: 260251 - DNA, 19 bp, Homo sapiens
  siRNA target sequence for SLC26A7 (NM_052832.2,2138-2156).
ggtatctgctgcaataagt

SEQ ID NO: 260252 - DNA, 19 bp, Homo sapiens
  siRNA target sequence for SLC26A7 (NM_052832.2,2143-2161).
ctgctgcaataagtcatat

SEQ ID NO: 260253 - DNA, 19 bp, Homo sapiens
  siRNA target sequence for SLC26A7 (NM_052832.2,2146-2164).
ctgcaataagtcatatcca

SEQ ID NO: 260254 - DNA, 19 bp, Homo sapiens
  siRNA target sequence for SLC26A7 (NM_134266.1,2179-2197).
gttataaactgttgtttga

SEQ ID NO: 260255 - DNA, 19 bp, Homo sapiens
  siRNA target sequence for SLC26A8 (NM_052961.2,152-170).
gaaactcattcgcatatga

SEQ ID NO: 260256 - DNA, 19 bp, Homo sapiens
  siRNA target sequence for SLC26A8 (NM_052961.2,156-174).
ctcattcgcatatgatgtt

SEQ ID NO: 260257 - DNA, 19 bp, Homo sapiens
  siRNA target sequence for SLC26A8 (NM_052961.2,158-176).
cattcgcatatgatgttaa

SEQ ID NO: 260258 - DNA, 19 bp, Homo sapiens
  siRNA target sequence for SLC26A8 (NM_052961.2,169-187).
gatgttaagcgtgaagtat

SEQ ID NO: 260259 - DNA, 19 bp, Homo sapiens
  siRNA target sequence for SLC26A8 (NM_052961.2,172-190).
gttaagcgtgaagtataca

SEQ ID NO: 260260 - DNA, 19 bp, Homo sapiens
  siRNA target sequence for SLC26A8 (NM_052961.2,189-207).
caatgaggagacctttcaa

SEQ ID NO: 260261 - DNA, 19 bp, Homo sapiens
  siRNA target sequence for SLC26A8 (NM_052961.2,307-325).
ctacgatgcgtgcttacaa

SEQ ID NO: 260262 - DNA, 19 bp, Homo sapiens
  siRNA target sequence for SLC26A8 (NM_052961.2,310-328).
cgatgcgtgcttacaatct

SEQ ID NO: 260263 - DNA, 19 bp, Homo sapiens
  siRNA target sequence for SLC26A8 (NM_052961.2,311-329).
gatgcgtgcttacaatctt

SEQ ID NO: 260264 - DNA, 19 bp, Homo sapiens
  siRNA target sequence for SLC26A8 (NM_052961.2,344-362).
ggatgtgtatgtatcgatt

SEQ ID NO: 260265 - DNA, 19 bp, Homo sapiens
  siRNA target sequence for SLC26A8 (NM_052961.2,345-363).
gatgtgtatgtatcgatta

SEQ ID NO: 260266 - DNA, 19 bp, Homo sapiens
  siRNA target sequence for SLC26A8 (NM_052961.2,350-368).
gtatgtatcgattaaagga

SEQ ID NO: 260267 - DNA, 19 bp, Homo sapiens
  siRNA target sequence for SLC26A8 (NM_052961.2,492-510).
ctgttcttcggtaatctat

SEQ ID NO: 260268 - DNA, 19 bp, Homo sapiens
  siRNA target sequence for SLC26A8 (NM_052961.2,494-512).
gttcttcggtaatctatgt

SEQ ID NO: 260269 - DNA, 19 bp, Homo sapiens
  siRNA target sequence for SLC26A8 (NM_052961.2,497-515).
cttcggtaatctatgtaat

SEQ ID NO: 260270 - DNA, 19 bp, Homo sapiens
  siRNA target sequence for SLC26A8 (NM_052961.2,500-518).
cggtaatctatgtaatttt

SEQ ID NO: 260271 - DNA, 19 bp, Homo sapiens
  siRNA target sequence for SLC26A8 (NM_052961.2,501-519).
ggtaatctatgtaattttt

SEQ ID NO: 260272 - DNA, 19 bp, Homo sapiens
  siRNA target sequence for SLC26A8 (NM_052961.2,529-547).
catcaaatgtccattggtt

SEQ ID NO: 260273 - DNA, 19 bp, Homo sapiens
  siRNA target sequence for SLC26A8 (NM_052961.2,570-588).
gctgatcaacgttctgaaa

SEQ ID NO: 260274 - DNA, 19 bp, Homo sapiens
  siRNA target sequence for SLC26A8 (NM_052961.2,621-639).
gggatctttcgtcaagaat

SEQ ID NO: 260275 - DNA, 19 bp, Homo sapiens
  siRNA target sequence for SLC26A8 (NM_052961.2,623-641).
gatctttcgtcaagaatga

SEQ ID NO: 260276 - DNA, 19 bp, Homo sapiens
  siRNA target sequence for SLC26A8 (NM_052961.2,656-674).
cctaccttatgggctataa

SEQ ID NO: 260277 - DNA, 19 bp, Homo sapiens
  siRNA target sequence for SLC26A8 (NM_052961.2,657-675).
ctaccttatgggctataat

SEQ ID NO: 260278 - DNA, 19 bp, Homo sapiens
  siRNA target sequence for SLC26A8 (NM_052961.2,660-678).
ccttatgggctataataaa

SEQ ID NO: 260279 - DNA, 19 bp, Homo sapiens
  siRNA target sequence for SLC26A8 (NM_052961.2,661-679).
cttatgggctataataaat

SEQ ID NO: 260280 - DNA, 19 bp, Homo sapiens
  siRNA target sequence for SLC26A8 (NM_052961.2,690-708).
ggtggcaaccacaactttt

SEQ ID NO: 260281 - DNA, 19 bp, Homo sapiens
  siRNA target sequence for SLC26A8 (NM_052961.2,802-820).
gctgtggcacttcatatca

SEQ ID NO: 260282 - DNA, 19 bp, Homo sapiens
  siRNA target sequence for SLC26A8 (NM_052961.2,803-821).
ctgtggcacttcatatcat

SEQ ID NO: 260283 - DNA, 19 bp, Homo sapiens
  siRNA target sequence for SLC26A8 (NM_052961.2,843-861).
ctttgggattatgattagt

SEQ ID NO: 260284 - DNA, 19 bp, Homo sapiens
  siRNA target sequence for SLC26A8 (NM_052961.2,927-945).
gaattccaccagcattcta

SEQ ID NO: 260285 - DNA, 19 bp, Homo sapiens
  siRNA target sequence for SLC26A8 (NM_052961.2,932-950).
ccaccagcattctagtatt

SEQ ID NO: 260286 - DNA, 19 bp, Homo sapiens
  siRNA target sequence for SLC26A8 (NM_052961.2,933-951).
caccagcattctagtattt

SEQ ID NO: 260287 - DNA, 19 bp, Homo sapiens
  siRNA target sequence for SLC26A8 (NM_052961.2,967-985).
gctctgcgaatcaacaaat

SEQ ID NO: 260288 - DNA, 19 bp, Homo sapiens
  siRNA target sequence for SLC26A8 (NM_052961.2,970-988).
ctgcgaatcaacaaatgta

SEQ ID NO: 260289 - DNA, 19 bp, Homo sapiens
  siRNA target sequence for SLC26A8 (NM_052961.2,973-991).
cgaatcaacaaatgtatca

SEQ ID NO: 260290 - DNA, 19 bp, Homo sapiens
  siRNA target sequence for SLC26A8 (NM_052961.2,1018-1036).
gagtttcccatggaattat

SEQ ID NO: 260291 - DNA, 19 bp, Homo sapiens
  siRNA target sequence for SLC26A8 (NM_052961.2,1048-1066).
ggcttcactgtgattgcaa

SEQ ID NO: 260292 - DNA, 19 bp, Homo sapiens
  siRNA target sequence for SLC26A8 (NM_052961.2,1091-1109).
ccagccagacgcttattga

SEQ ID NO: 260293 - DNA, 19 bp, Homo sapiens
  siRNA target sequence for SLC26A8 (NM_052961.2,1094-1112).
gccagacgcttattgacat

SEQ ID NO: 260294 - DNA, 19 bp, Homo sapiens
  siRNA target sequence for SLC26A8 (NM_052961.2,1110-1128).
catgattccttatagcttt

SEQ ID NO: 260295 - DNA, 19 bp, Homo sapiens
  siRNA target sequence for SLC26A8 (NM_052961.2,1295-1313).
gcaatgtcgtcagttcatt

SEQ ID NO: 260296 - DNA, 19 bp, Homo sapiens
  siRNA target sequence for SLC26A8 (NM_052961.2,1296-1314).
caatgtcgtcagttcattt

SEQ ID NO: 260297 - DNA, 19 bp, Homo sapiens
  siRNA target sequence for SLC26A8 (NM_052961.2,1303-1321).
gtcagttcatttttcagat

SEQ ID NO: 260298 - DNA, 19 bp, Homo sapiens
  siRNA target sequence for SLC26A8 (NM_052961.2,1329-1347).
gtttactggtgctattgct

SEQ ID NO: 260299 - DNA, 19 bp, Homo sapiens
  siRNA target sequence for SLC26A8 (NM_052961.2,1349-1367).
ggactattatccaggataa

SEQ ID NO: 260300 - DNA, 19 bp, Homo sapiens
  siRNA target sequence for SLC26A8 (NM_052961.2,1465-1483).
gctgtgctggctggtatta

SEQ ID NO: 260301 - DNA, 19 bp, Homo sapiens
  siRNA target sequence for SLC26A8 (NM_052961.2,1501-1519).
ccctaccttgaaaccattt

SEQ ID NO: 260302 - DNA, 19 bp, Homo sapiens
  siRNA target sequence for SLC26A8 (NM_052961.2,1538-1556).
ggaggcaggaccaatatga

SEQ ID NO: 260303 - DNA, 19 bp, Homo sapiens
  siRNA target sequence for SLC26A8 (NM_052961.2,1603-1621).
ctggacattggactaatta

SEQ ID NO: 260304 - DNA, 19 bp, Homo sapiens
  siRNA target sequence for SLC26A8 (NM_052961.2,1606-1624).
gacattggactaattatct

SEQ ID NO: 260305 - DNA, 19 bp, Homo sapiens
  siRNA target sequence for SLC26A8 (NM_052961.2,1608-1626).
cattggactaattatctca

SEQ ID NO: 260306 - DNA, 19 bp, Homo sapiens
  siRNA target sequence for SLC26A8 (NM_052961.2,1658-1676).
gttcacacagagctaagat

SEQ ID NO: 260307 - DNA, 19 bp, Homo sapiens
  siRNA target sequence for SLC26A8 (NM_052961.2,1695-1713).
ccctaacaccaacatttat

SEQ ID NO: 260308 - DNA, 19 bp, Homo sapiens
  siRNA target sequence for SLC26A8 (NM_052961.2,1707-1725).
catttatagaagcatcaat

SEQ ID NO: 260309 - DNA, 19 bp, Homo sapiens
  siRNA target sequence for SLC26A8 (NM_052961.2,1726-1744).
gattatcgggagatcatca

SEQ ID NO: 260310 - DNA, 19 bp, Homo sapiens
  siRNA target sequence for SLC26A8 (NM_052961.2,1776-1794).
cagctcaattacatttgta

SEQ ID NO: 260311 - DNA, 19 bp, Homo sapiens
  siRNA target sequence for SLC26A8 (NM_052961.2,1839-1857).
ggtaaaggtgcctcttaaa

SEQ ID NO: 260312 - DNA, 19 bp, Homo sapiens
  siRNA target sequence for SLC26A8 (NM_052961.2,2000-2018).
ccgaagcatcctccattaa

SEQ ID NO: 260313 - DNA, 19 bp, Homo sapiens
  siRNA target sequence for SLC26A8 (NM_052961.2,2026-2044).
cactgctcacattttgaga

SEQ ID NO: 260314 - DNA, 19 bp, Homo sapiens
  siRNA target sequence for SLC26A8 (NM_052961.2,2096-2114).
cgtccgtgtctcagaaaaa

SEQ ID NO: 260315 - DNA, 19 bp, Homo sapiens
  siRNA target sequence for SLC26A8 (NM_052961.2,2306-2324).
cacgggggttagtcgtatt

SEQ ID NO: 260316 - DNA, 19 bp, Homo sapiens
  siRNA target sequence for SLC26A8 (NM_052961.2,2308-2326).
cgggggttagtcgtattaa

SEQ ID NO: 260317 - DNA, 19 bp, Homo sapiens
  siRNA target sequence for SLC26A8 (NM_052961.2,2310-2328).
ggggttagtcgtattaaga

SEQ ID NO: 260318 - DNA, 19 bp, Homo sapiens
  siRNA target sequence for SLC26A8 (NM_052961.2,2312-2330).
ggttagtcgtattaagaca

SEQ ID NO: 260319 - DNA, 19 bp, Homo sapiens
  siRNA target sequence for SLC26A8 (NM_052961.2,2317-2335).
gtcgtattaagacagatat

SEQ ID NO: 260320 - DNA, 19 bp, Homo sapiens
  siRNA target sequence for SLC26A8 (NM_052961.2,2320-2338).
gtattaagacagatatgca

SEQ ID NO: 260321 - DNA, 19 bp, Homo sapiens
  siRNA target sequence for SLC26A8 (NM_052961.2,2331-2349).
gatatgcaatgcctttcaa

SEQ ID NO: 260322 - DNA, 19 bp, Homo sapiens
  siRNA target sequence for SLC26A8 (NM_052961.2,2347-2365).
caaaacgccaacattttga

SEQ ID NO: 260323 - DNA, 19 bp, Homo sapiens
  siRNA target sequence for SLC26A8 (NM_052961.2,2353-2371).
gccaacattttgatactca

SEQ ID NO: 260324 - DNA, 19 bp, Homo sapiens
  siRNA target sequence for SLC26A8 (NM_052961.2,2499-2517).
cataggctcctctgagtta

SEQ ID NO: 260325 - DNA, 19 bp, Homo sapiens
  siRNA target sequence for SLC26A8 (NM_052961.2,2503-2521).
ggctcctctgagttaagca

SEQ ID NO: 260326 - DNA, 19 bp, Homo sapiens
  siRNA target sequence for SLC26A8 (NM_052961.2,2504-2522).
gctcctctgagttaagcat

SEQ ID NO: 260327 - DNA, 19 bp, Homo sapiens
  siRNA target sequence for SLC26A8 (NM_052961.2,2512-2530).
gagttaagcatcgatgaat

SEQ ID NO: 260328 - DNA, 19 bp, Homo sapiens
  siRNA target sequence for SLC26A8 (NM_052961.2,2537-2555).
cagtgatacgggaaaccta

SEQ ID NO: 260329 - DNA, 19 bp, Homo sapiens
  siRNA target sequence for SLC26A8 (NM_052961.2,2626-2644).
gtaagtccaggcttcatca

SEQ ID NO: 260330 - DNA, 19 bp, Homo sapiens
  siRNA target sequence for SLC26A8 (NM_052961.2,2630-2648).
gtccaggcttcatcaagat

SEQ ID NO: 260331 - DNA, 19 bp, Homo sapiens
  siRNA target sequence for SLC26A8 (NM_052961.2,2665-2683).
gaggagtcggagttggatt

SEQ ID NO: 260332 - DNA, 19 bp, Homo sapiens
  siRNA target sequence for SLC26A8 (NM_052961.2,2849-2867).
ggccaagagctcacacttt

SEQ ID NO: 260333 - DNA, 19 bp, Homo sapiens
  siRNA target sequence for SLC26A8 (NM_052961.2,2877-2895).
gcgttactggcctatgtat

SEQ ID NO: 260334 - DNA, 19 bp, Homo sapiens
  siRNA target sequence for SLC26A8 (NM_052961.2,2879-2897).
gttactggcctatgtatca

SEQ ID NO: 260335 - DNA, 19 bp, Homo sapiens
  siRNA target sequence for SLC26A8 (NM_052961.2,2955-2973).
gagacgccatcctatggat

SEQ ID NO: 260336 - DNA, 19 bp, Homo sapiens
  siRNA target sequence for SLC26A8 (NM_052961.2,2959-2977).
cgccatcctatggattcat

SEQ ID NO: 260337 - DNA, 19 bp, Homo sapiens
  siRNA target sequence for SLC26A8 (NM_052961.2,2960-2978).
gccatcctatggattcata

SEQ ID NO: 260338 - DNA, 19 bp, Homo sapiens
  siRNA target sequence for SLC26A8 (NM_052961.2,2962-2980).
catcctatggattcatact

SEQ ID NO: 260339 - DNA, 19 bp, Homo sapiens
  siRNA target sequence for SLC26A8 (NM_052961.2,2988-3006).
gggcaacagcaatgaagat

SEQ ID NO: 260340 - DNA, 19 bp, Homo sapiens
  siRNA target sequence for SLC26A9 (NM_052934.2,167-185).
ccctcttcgacgatgagtt

SEQ ID NO: 260341 - DNA, 19 bp, Homo sapiens
  siRNA target sequence for SLC26A9 (NM_052934.2,226-244).
cgcaatgccttcagatgtt

SEQ ID NO: 260342 - DNA, 19 bp, Homo sapiens
  siRNA target sequence for SLC26A9 (NM_052934.2,297-315).
gctccccaagtacaagatt

SEQ ID NO: 260343 - DNA, 19 bp, Homo sapiens
  siRNA target sequence for SLC26A9 (NM_052934.2,298-316).
ctccccaagtacaagatta

SEQ ID NO: 260344 - DNA, 19 bp, Homo sapiens
  siRNA target sequence for SLC26A9 (NM_052934.2,480-498).
gatggtgccaggtaccttt

SEQ ID NO: 260345 - DNA, 19 bp, Homo sapiens
  siRNA target sequence for SLC26A9 (NM_052934.2,490-508).
ggtacctttgccgttatca

SEQ ID NO: 260346 - DNA, 19 bp, Homo sapiens
  siRNA target sequence for SLC26A9 (NM_052934.2,509-527).
gcatcctggtgggtaacat

SEQ ID NO: 260347 - DNA, 19 bp, Homo sapiens
  siRNA target sequence for SLC26A9 (NM_052934.2,767-785).
cggtgctcaagtacatctt

SEQ ID NO: 260348 - DNA, 19 bp, Homo sapiens
  siRNA target sequence for SLC26A9 (NM_052934.2,818-836).
ggtccatcgtctttacctt

SEQ ID NO: 260349 - DNA, 19 bp, Homo sapiens
  siRNA target sequence for SLC26A9 (NM_052934.2,833-851).
ccttcattgacatttgcaa

SEQ ID NO: 260350 - DNA, 19 bp, Homo sapiens
  siRNA target sequence for SLC26A9 (NM_052934.2,935-953).
ctcgctacatgcacaagat

SEQ ID NO: 260351 - DNA, 19 bp, Homo sapiens
  siRNA target sequence for SLC26A9 (NM_052934.2,963-981).
catccctacagagatgatt

SEQ ID NO: 260352 - DNA, 19 bp, Homo sapiens
  siRNA target sequence for SLC26A9 (NM_052934.2,1013-1031).
gctgtaagatgcccaaaaa

SEQ ID NO: 260353 - DNA, 19 bp, Homo sapiens
  siRNA target sequence for SLC26A9 (NM_052934.2,1016-1034).
gtaagatgcccaaaaagta

SEQ ID NO: 260354 - DNA, 19 bp, Homo sapiens
  siRNA target sequence for SLC26A9 (NM_052934.2,1193-1211).
gctacgacgtggattcgaa

SEQ ID NO: 260355 - DNA, 19 bp, Homo sapiens
  siRNA target sequence for SLC26A9 (NM_052934.2,1371-1389).
gctggtcctggggatctat

SEQ ID NO: 260356 - DNA, 19 bp, Homo sapiens
  siRNA target sequence for SLC26A9 (NM_052934.2,1377-1395).
cctggggatctatctgtat

SEQ ID NO: 260357 - DNA, 19 bp, Homo sapiens
  siRNA target sequence for SLC26A9 (NM_052934.2,1421-1439).
ccctgatcgctgtcaatct

SEQ ID NO: 260358 - DNA, 19 bp, Homo sapiens
  siRNA target sequence for SLC26A9 (NM_052934.2,1423-1441).
ctgatcgctgtcaatctca

SEQ ID NO: 260359 - DNA, 19 bp, Homo sapiens
  siRNA target sequence for SLC26A9 (NM_052934.2,1429-1447).
gctgtcaatctcaagaact

SEQ ID NO: 260360 - DNA, 19 bp, Homo sapiens
  siRNA target sequence for SLC26A9 (NM_052934.2,1642-1660).
gacactgacatttatgtga

SEQ ID NO: 260361 - DNA, 19 bp, Homo sapiens
  siRNA target sequence for SLC26A9 (NM_052934.2,1659-1677).
gaatcccaagacctataat

SEQ ID NO: 260362 - DNA, 19 bp, Homo sapiens
  siRNA target sequence for SLC26A9 (NM_052934.2,1686-1704).
ggatatccaggggattaaa

SEQ ID NO: 260363 - DNA, 19 bp, Homo sapiens
  siRNA target sequence for SLC26A9 (NM_052934.2,1693-1711).
caggggattaaaatcatca

SEQ ID NO: 260364 - DNA, 19 bp, Homo sapiens
  siRNA target sequence for SLC26A9 (NM_052934.2,1969-1987).
ggcaccagcgtgtcctata

SEQ ID NO: 260365 - DNA, 19 bp, Homo sapiens
  siRNA target sequence for SLC26A9 (NM_052934.2,1970-1988).
gcaccagcgtgtcctatat

SEQ ID NO: 260366 - DNA, 19 bp, Homo sapiens
  siRNA target sequence for SLC26A9 (NM_052934.2,2225-2243).
cccaggtgtacaatgacat

SEQ ID NO: 260367 - DNA, 19 bp, Homo sapiens
  siRNA target sequence for SLC26A9 (NM_052934.2,2227-2245).
caggtgtacaatgacatta

SEQ ID NO: 260368 - DNA, 19 bp, Homo sapiens
  siRNA target sequence for SLC26A9 (NM_052934.2,2289-2307).
cgtctttcccagcatacat

SEQ ID NO: 260369 - DNA, 19 bp, Homo sapiens
  siRNA target sequence for SLC26A9 (NM_052934.2,2319-2337).
ctttgcccaggcaaatgct

SEQ ID NO: 260370 - DNA, 19 bp, Homo sapiens
  siRNA target sequence for SLC26A9 (NM_052934.2,2445-2463).
gatgttcgggagcatgttt

SEQ ID NO: 260371 - DNA, 19 bp, Homo sapiens
  siRNA target sequence for SLC26A9 (NM_134325.1,2640-2658).
ccttgacttccagctttta

SEQ ID NO: 260372 - DNA, 19 bp, Homo sapiens
  siRNA target sequence for SLC26A9 (NM_134325.1,2703-2721).
gctgtacaagcttcaaaaa

SEQ ID NO: 260373 - DNA, 19 bp, Homo sapiens
  siRNA target sequence for SLC22A11 (NM_018484.2,453-471).
ccctgcctcatgatacctt

SEQ ID NO: 260374 - DNA, 19 bp, Homo sapiens
  siRNA target sequence for SLC22A11 (NM_018484.2,547-565).
ctgcggtttccacaaacat

SEQ ID NO: 260375 - DNA, 19 bp, Homo sapiens
  siRNA target sequence for SLC22A11 (NM_018484.2,549-567).
gcggtttccacaaacatga

SEQ ID NO: 260376 - DNA, 19 bp, Homo sapiens
  siRNA target sequence for SLC22A11 (NM_018484.2,834-852).
ctggtgggctcctttatct

SEQ ID NO: 260377 - DNA, 19 bp, Homo sapiens
  siRNA target sequence for SLC22A11 (NM_018484.2,934-952).
ccatcttcgccccaacatt

SEQ ID NO: 260378 - DNA, 19 bp, Homo sapiens
  siRNA target sequence for SLC22A11 (NM_018484.2,943-961).
ccccaacattcgtcatcta

SEQ ID NO: 260379 - DNA, 19 bp, Homo sapiens
  siRNA target sequence for SLC22A11 (NM_018484.2,945-963).
ccaacattcgtcatctact

SEQ ID NO: 260380 - DNA, 19 bp, Homo sapiens
  siRNA target sequence for SLC22A11 (NM_018484.2,1428-1446).
gtgaatttctctctattga

SEQ ID NO: 260381 - DNA, 19 bp, Homo sapiens
  siRNA target sequence for SLC22A11 (NM_018484.2,1724-1742).
ctacaaggctgaactcttt

SEQ ID NO: 260382 - DNA, 19 bp, Homo sapiens
  siRNA target sequence for SLC22A11 (NM_018484.2,1857-1875).
ctcctctatggcgttatct

SEQ ID NO: 260383 - DNA, 19 bp, Homo sapiens
  siRNA target sequence for SLC22A11 (NM_018484.2,1953-1971).
ctggagagccagaaatcaa

SEQ ID NO: 260384 - DNA, 19 bp, Homo sapiens
  siRNA target sequence for SLC22A7 (NM_006672.2,447-465).
gagtacgaccactcagaat

SEQ ID NO: 260385 - DNA, 19 bp, Homo sapiens
  siRNA target sequence for SLC22A7 (NM_006672.2,523-541).
gagctgcgtccactttctt

SEQ ID NO: 260386 - DNA, 19 bp, Homo sapiens
  siRNA target sequence for SLC22A7 (NM_006672.2,567-585).
gtggcctttggatatctgt

SEQ ID NO: 260387 - DNA, 19 bp, Homo sapiens
  siRNA target sequence for SLC22A7 (NM_006672.2,661-679).
cctccgtcagctatgtaat

SEQ ID NO: 260388 - DNA, 19 bp, Homo sapiens
  siRNA target sequence for SLC22A7 (NM_006672.2,664-682).
ccgtcagctatgtaatgtt

SEQ ID NO: 260389 - DNA, 19 bp, Homo sapiens
  siRNA target sequence for SLC22A7 (NM_006672.2,665-683).
cgtcagctatgtaatgttt

SEQ ID NO: 260390 - DNA, 19 bp, Homo sapiens
  siRNA target sequence for SLC22A7 (NM_006672.2,1076-1094).
ccgaagaccttcataccta

SEQ ID NO: 260391 - DNA, 19 bp, Homo sapiens
  siRNA target sequence for SLC22A7 (NM_006672.2,1155-1173).
ggagtgaacttctcctatt

SEQ ID NO: 260392 - DNA, 19 bp, Homo sapiens
  siRNA target sequence for SLC22A7 (NM_006672.2,1156-1174).
gagtgaacttctcctatta

SEQ ID NO: 260393 - DNA, 19 bp, Homo sapiens
  siRNA target sequence for SLC22A7 (NM_006672.2,1664-1682).
ggacgtggagagaaagagt

SEQ ID NO: 260394 - DNA, 19 bp, Homo sapiens
  siRNA target sequence for SLC22A7 (NM_153320.1,486-504).
gagtcccaggtcggtattt

SEQ ID NO: 260395 - DNA, 19 bp, Homo sapiens
  siRNA target sequence for SLC22A7 (NM_153320.1,490-508).
cccaggtcggtatttacat

SEQ ID NO: 260396 - DNA, 19 bp, Homo sapiens
  siRNA target sequence for SLC22A7 (NM_153320.1,491-509).
ccaggtcggtatttacata

SEQ ID NO: 260397 - DNA, 19 bp, Homo sapiens
  siRNA target sequence for SLC22A7 (NM_153320.1,492-510).
caggtcggtatttacataa

SEQ ID NO: 260398 - DNA, 19 bp, Homo sapiens
  siRNA target sequence for SLC22A7 (NM_153320.1,497-515).
cggtatttacataatccat

SEQ ID NO: 260399 - DNA, 19 bp, Homo sapiens
  siRNA target sequence for SLC22A7 (NM_153320.1,604-622).
ggagggacaaagtttccta

SEQ ID NO: 260400 - DNA, 19 bp, Homo sapiens
  siRNA target sequence for SLC22A7 (NM_153320.1,605-623).
gagggacaaagtttcctat

SEQ ID NO: 260401 - DNA, 19 bp, Homo sapiens
  siRNA target sequence for SLC22A7 (NM_153320.1,628-646).
caagctggcgtgaatcgtt

SEQ ID NO: 260402 - DNA, 19 bp, Homo sapiens
  siRNA target sequence for SLCO1B1 (NM_006446.2,257-275).
gacactaggtgcaattatt

SEQ ID NO: 260403 - DNA, 19 bp, Homo sapiens
  siRNA target sequence for SLCO1B1 (NM_006446.2,283-301).
gttccatcattcatataga

SEQ ID NO: 260404 - DNA, 19 bp, Homo sapiens
  siRNA target sequence for SLCO1B1 (NM_006446.2,426-444).
ggaatcggttgtttcatta

SEQ ID NO: 260405 - DNA, 19 bp, Homo sapiens
  siRNA target sequence for SLCO1B1 (NM_006446.2,427-445).
gaatcggttgtttcattat

SEQ ID NO: 260406 - DNA, 19 bp, Homo sapiens
  siRNA target sequence for SLCO1B1 (NM_006446.2,447-465).
ggaattggaggtgttttga

SEQ ID NO: 260407 - DNA, 19 bp, Homo sapiens
  siRNA target sequence for SLCO1B1 (NM_006446.2,544-562).
cgaccttatccacttgttt

SEQ ID NO: 260408 - DNA, 19 bp, Homo sapiens
  siRNA target sequence for SLCO1B1 (NM_006446.2,547-565).
ccttatccacttgtttaat

SEQ ID NO: 260409 - DNA, 19 bp, Homo sapiens
  siRNA target sequence for SLCO1B1 (NM_006446.2,600-618).
gagatagtgggaaaaggtt

SEQ ID NO: 260410 - DNA, 19 bp, Homo sapiens
  siRNA target sequence for SLCO1B1 (NM_006446.2,606-624).
gtgggaaaaggttgtttaa

SEQ ID NO: 260411 - DNA, 19 bp, Homo sapiens
  siRNA target sequence for SLCO1B1 (NM_006446.2,869-887).
caggataactcctactgat

SEQ ID NO: 260412 - DNA, 19 bp, Homo sapiens
  siRNA target sequence for SLCO1B1 (NM_006446.2,974-992).
ccaaactccaaataaacca

SEQ ID NO: 260413 - DNA, 19 bp, Homo sapiens
  siRNA target sequence for SLCO1B1 (NM_006446.2,1232-1250).
gtatggtcagccttcatct

SEQ ID NO: 260414 - DNA, 19 bp, Homo sapiens
  siRNA target sequence for SLCO1B1 (NM_006446.2,1243-1261).
cttcatctaaggctaacat

SEQ ID NO: 260415 - DNA, 19 bp, Homo sapiens
  siRNA target sequence for SLCO1B1 (NM_006446.2,1249-1267).
ctaaggctaacatcttatt

SEQ ID NO: 260416 - DNA, 19 bp, Homo sapiens
  siRNA target sequence for SLCO1B1 (NM_006446.2,1391-1409).
gtccttttacctattatat

SEQ ID NO: 260417 - DNA, 19 bp, Homo sapiens
  siRNA target sequence for SLCO1B1 (NM_006446.2,1478-1496).
gacatctcatagagatgta

SEQ ID NO: 260418 - DNA, 19 bp, Homo sapiens
  siRNA target sequence for SLCO1B1 (NM_006446.2,1739-1757).
cttttttgttgcaatacaa

SEQ ID NO: 260419 - DNA, 19 bp, Homo sapiens
  siRNA target sequence for SLCO1B1 (NM_006446.2,1786-1804).
gaggcacctcacatgtcat

SEQ ID NO: 260420 - DNA, 19 bp, Homo sapiens
  siRNA target sequence for SLCO1B1 (NM_006446.2,1795-1813).
cacatgtcatgctgattgt

SEQ ID NO: 260421 - DNA, 19 bp, Homo sapiens
  siRNA target sequence for SLCO1B1 (NM_006446.2,1797-1815).
catgtcatgctgattgtta

SEQ ID NO: 260422 - DNA, 19 bp, Homo sapiens
  siRNA target sequence for SLCO1B1 (NM_006446.2,1956-1974).
ggcacacgtgggtcatgta

SEQ ID NO: 260423 - DNA, 19 bp, Homo sapiens
  siRNA target sequence for SLCO1B1 (NM_006446.2,1965-1983).
gggtcatgtaggacatata

SEQ ID NO: 260424 - DNA, 19 bp, Homo sapiens
  siRNA target sequence for SLCO1B1 (NM_006446.2,1966-1984).
ggtcatgtaggacatataa

SEQ ID NO: 260425 - DNA, 19 bp, Homo sapiens
  siRNA target sequence for SLCO1B1 (NM_006446.2,1967-1985).
gtcatgtaggacatataat

SEQ ID NO: 260426 - DNA, 19 bp, Homo sapiens
  siRNA target sequence for SLCO1B1 (NM_006446.2,2012-2030).
gggcttgtcttcaatgtta

SEQ ID NO: 260427 - DNA, 19 bp, Homo sapiens
  siRNA target sequence for SLCO1B1 (NM_006446.2,2013-2031).
ggcttgtcttcaatgttaa

SEQ ID NO: 260428 - DNA, 19 bp, Homo sapiens
  siRNA target sequence for SLCO1B1 (NM_006446.2,2186-2204).
ggcagatagtgaaacacat

SEQ ID NO: 260429 - DNA, 19 bp, Homo sapiens
  siRNA target sequence for SLCO1B1 (NM_006446.2,2190-2208).
gatagtgaaacacattgtt

SEQ ID NO: 260430 - DNA, 19 bp, Homo sapiens
  siRNA target sequence for AFM (NM_001133.2,110-128).
cgggatatagagaacttca

SEQ ID NO: 260431 - DNA, 19 bp, Homo sapiens
  siRNA target sequence for AFM (NM_001133.2,111-129).
gggatatagagaacttcaa

SEQ ID NO: 260432 - DNA, 19 bp, Homo sapiens
  siRNA target sequence for AFM (NM_001133.2,112-130).
ggatatagagaacttcaat

SEQ ID NO: 260433 - DNA, 19 bp, Homo sapiens
  siRNA target sequence for AFM (NM_001133.2,121-139).
gaacttcaatagtactcaa

SEQ ID NO: 260434 - DNA, 19 bp, Homo sapiens
  siRNA target sequence for AFM (NM_001133.2,276-294).
cgctcccagagtgttcaaa

SEQ ID NO: 260435 - DNA, 19 bp, Homo sapiens
  siRNA target sequence for AFM (NM_001133.2,280-298).
cccagagtgttcaaaatta

SEQ ID NO: 260436 - DNA, 19 bp, Homo sapiens
  siRNA target sequence for AFM (NM_001133.2,284-302).
gagtgttcaaaattaccta

SEQ ID NO: 260437 - DNA, 19 bp, Homo sapiens
  siRNA target sequence for AFM (NM_001133.2,286-304).
gtgttcaaaattacctaat

SEQ ID NO: 260438 - DNA, 19 bp, Homo sapiens
  siRNA target sequence for AFM (NM_001133.2,288-306).
gttcaaaattacctaataa

SEQ ID NO: 260439 - DNA, 19 bp, Homo sapiens
  siRNA target sequence for AFM (NM_001133.2,393-411).
gaagactctgtttcttcta

SEQ ID NO: 260440 - DNA, 19 bp, Homo sapiens
  siRNA target sequence for AFM (NM_001133.2,478-496).
ggcttatgaaagtaacaga

SEQ ID NO: 260441 - DNA, 19 bp, Homo sapiens
  siRNA target sequence for AFM (NM_001133.2,495-513).
gagaatcccttttaaatca

SEQ ID NO: 260442 - DNA, 19 bp, Homo sapiens
  siRNA target sequence for AFM (NM_001133.2,497-515).
gaatcccttttaaatcact

SEQ ID NO: 260443 - DNA, 19 bp, Homo sapiens
  siRNA target sequence for AFM (NM_001133.2,553-571).
cgcccctacacttctaact

SEQ ID NO: 260444 - DNA, 19 bp, Homo sapiens
  siRNA target sequence for AFM (NM_001133.2,555-573).
cccctacacttctaactgt

SEQ ID NO: 260445 - DNA, 19 bp, Homo sapiens
  siRNA target sequence for AFM (NM_001133.2,556-574).
ccctacacttctaactgtt

SEQ ID NO: 260446 - DNA, 19 bp, Homo sapiens
  siRNA target sequence for AFM (NM_001133.2,566-584).
ctaactgttgctgttcatt

SEQ ID NO: 260447 - DNA, 19 bp, Homo sapiens
  siRNA target sequence for AFM (NM_001133.2,587-605).
gaggaggtggccaaatcat

SEQ ID NO: 260448 - DNA, 19 bp, Homo sapiens
  siRNA target sequence for AFM (NM_001133.2,589-607).
ggaggtggccaaatcatgt

SEQ ID NO: 260449 - DNA, 19 bp, Homo sapiens
  siRNA target sequence for AFM (NM_001133.2,590-608).
gaggtggccaaatcatgtt

SEQ ID NO: 260450 - DNA, 19 bp, Homo sapiens
  siRNA target sequence for AFM (NM_001133.2,592-610).
ggtggccaaatcatgttgt

SEQ ID NO: 260451 - DNA, 19 bp, Homo sapiens
  siRNA target sequence for AFM (NM_001133.2,626-644).
gtcaactgccttcaaacaa

SEQ ID NO: 260452 - DNA, 19 bp, Homo sapiens
  siRNA target sequence for AFM (NM_001133.2,702-720).
gtggggcacttttgaaatt

SEQ ID NO: 260453 - DNA, 19 bp, Homo sapiens
  siRNA target sequence for AFM (NM_001133.2,723-741).
gaaccaaagttgtacactt

SEQ ID NO: 260454 - DNA, 19 bp, Homo sapiens
  siRNA target sequence for AFM (NM_001133.2,726-744).
ccaaagttgtacactttat

SEQ ID NO: 260455 - DNA, 19 bp, Homo sapiens
  siRNA target sequence for AFM (NM_001133.2,774-792).
ccaagattgaatttaagga

SEQ ID NO: 260456 - DNA, 19 bp, Homo sapiens
  siRNA target sequence for AFM (NM_001133.2,803-821).
cttgtagaagatgtttctt

SEQ ID NO: 260457 - DNA, 19 bp, Homo sapiens
  siRNA target sequence for AFM (NM_001133.2,866-884).
cgtgacacgagcaaggtta

SEQ ID NO: 260458 - DNA, 19 bp, Homo sapiens
  siRNA target sequence for AFM (NM_001133.2,867-885).
gtgacacgagcaaggttat

SEQ ID NO: 260459 - DNA, 19 bp, Homo sapiens
  siRNA target sequence for AFM (NM_001133.2,886-904).
gaaccatatttgttcaaaa

SEQ ID NO: 260460 - DNA, 19 bp, Homo sapiens
  siRNA target sequence for AFM (NM_001133.2,912-930).
ctatctccagcaaaatcaa

SEQ ID NO: 260461 - DNA, 19 bp, Homo sapiens
  siRNA target sequence for AFM (NM_001133.2,962-980).
ggccagtgcataattaact

SEQ ID NO: 260462 - DNA, 19 bp, Homo sapiens
  siRNA target sequence for AFM (NM_001133.2,964-982).
ccagtgcataattaactca

SEQ ID NO: 260463 - DNA, 19 bp, Homo sapiens
  siRNA target sequence for AFM (NM_001133.2,965-983).
cagtgcataattaactcaa

SEQ ID NO: 260464 - DNA, 19 bp, Homo sapiens
  siRNA target sequence for AFM (NM_001133.2,979-997).
ctcaaacaaagatgataga

SEQ ID NO: 260465 - DNA, 19 bp, Homo sapiens
  siRNA target sequence for AFM (NM_001133.2,989-1007).
gatgatagaccaaaggatt

SEQ ID NO: 260466 - DNA, 19 bp, Homo sapiens
  siRNA target sequence for AFM (NM_001133.2,992-1010).
gatagaccaaaggatttat

SEQ ID NO: 260467 - DNA, 19 bp, Homo sapiens
  siRNA target sequence for AFM (NM_001133.2,996-1014).
gaccaaaggatttatctct

SEQ ID NO: 260468 - DNA, 19 bp, Homo sapiens
  siRNA target sequence for AFM (NM_001133.2,1075-1093).
caccttctttgcgaagttt

SEQ ID NO: 260469 - DNA, 19 bp, Homo sapiens
  siRNA target sequence for AFM (NM_001133.2,1213-1231).
ccgttacgcggaagacaaa

SEQ ID NO: 260470 - DNA, 19 bp, Homo sapiens
  siRNA target sequence for AFM (NM_001133.2,1215-1233).
gttacgcggaagacaaatt

SEQ ID NO: 260471 - DNA, 19 bp, Homo sapiens
  siRNA target sequence for AFM (NM_001133.2,1219-1237).
cgcggaagacaaattcaat

SEQ ID NO: 260472 - DNA, 19 bp, Homo sapiens
  siRNA target sequence for AFM (NM_001133.2,1221-1239).
cggaagacaaattcaatga

SEQ ID NO: 260473 - DNA, 19 bp, Homo sapiens
  siRNA target sequence for AFM (NM_001133.2,1254-1272).
gcctcaagatggtacaaca

SEQ ID NO: 260474 - DNA, 19 bp, Homo sapiens
  siRNA target sequence for AFM (NM_001133.2,1255-1273).
cctcaagatggtacaacaa

SEQ ID NO: 260475 - DNA, 19 bp, Homo sapiens
  siRNA target sequence for AFM (NM_001133.2,1264-1282).
ggtacaacaagaatgtaaa

SEQ ID NO: 260476 - DNA, 19 bp, Homo sapiens
  siRNA target sequence for AFM (NM_001133.2,1303-1321).
ggatggtttgaaataccat

SEQ ID NO: 260477 - DNA, 19 bp, Homo sapiens
  siRNA target sequence for AFM (NM_001133.2,1327-1345).
catcaggctcacgaagata

SEQ ID NO: 260478 - DNA, 19 bp, Homo sapiens
  siRNA target sequence for AFM (NM_001133.2,1377-1395).
ctcttggcgagaaaatggt

SEQ ID NO: 260479 - DNA, 19 bp, Homo sapiens
  siRNA target sequence for AFM (NM_001133.2,1416-1434).
gtacgctaagtgaagagtt

SEQ ID NO: 260480 - DNA, 19 bp, Homo sapiens
  siRNA target sequence for AFM (NM_001133.2,1430-1448).
gagtttgcctgtgttgata

SEQ ID NO: 260481 - DNA, 19 bp, Homo sapiens
  siRNA target sequence for AFM (NM_001133.2,1514-1532).
gtggaccactgctgtaaaa

SEQ ID NO: 260482 - DNA, 19 bp, Homo sapiens
  siRNA target sequence for AFM (NM_001133.2,1517-1535).
gaccactgctgtaaaacaa

SEQ ID NO: 260483 - DNA, 19 bp, Homo sapiens
  siRNA target sequence for AFM (NM_001133.2,1551-1569).
ggccctgctttgagagttt

SEQ ID NO: 260484 - DNA, 19 bp, Homo sapiens
  siRNA target sequence for AFM (NM_001133.2,1553-1571).
ccctgctttgagagtttga

SEQ ID NO: 260485 - DNA, 19 bp, Homo sapiens
  siRNA target sequence for AFM (NM_001133.2,1671-1689).
cagacaggtttcttgtcaa

SEQ ID NO: 260486 - DNA, 19 bp, Homo sapiens
  siRNA target sequence for AFM (NM_001133.2,1677-1695).
ggtttcttgtcaacttagt

SEQ ID NO: 260487 - DNA, 19 bp, Homo sapiens
  siRNA target sequence for ECM1 (NM_004425.2,125-143).
gccttggtcttgacctatt

SEQ ID NO: 260488 - DNA, 19 bp, Homo sapiens
  siRNA target sequence for ECM1 (NM_004425.2,126-144).
ccttggtcttgacctattt

SEQ ID NO: 260489 - DNA, 19 bp, Homo sapiens
  siRNA target sequence for ECM1 (NM_004425.2,205-223).
gccagagcactttcaagaa

SEQ ID NO: 260490 - DNA, 19 bp, Homo sapiens
  siRNA target sequence for ECM1 (NM_004425.2,615-633).
ggccttctccagacaatct

SEQ ID NO: 260491 - DNA, 19 bp, Homo sapiens
  siRNA target sequence for ECM1 (NM_004425.2,719-737).
cagggtgagaccctcaatt

SEQ ID NO: 260492 - DNA, 19 bp, Homo sapiens
  siRNA target sequence for ECM1 (NM_004425.2,790-808).
cctagagtgtgccaaactt

SEQ ID NO: 260493 - DNA, 19 bp, Homo sapiens
  siRNA target sequence for ECM1 (NM_004425.2,957-975).
ccagccatcagcctgatat

SEQ ID NO: 260494 - DNA, 19 bp, Homo sapiens
  siRNA target sequence for ECM1 (NM_004425.2,958-976).
cagccatcagcctgatatt

SEQ ID NO: 260495 - DNA, 19 bp, Homo sapiens
  siRNA target sequence for ECM1 (NM_004425.2,1010-1028).
gtgcccacattggacaata

SEQ ID NO: 260496 - DNA, 19 bp, Homo sapiens
  siRNA target sequence for ECM1 (NM_004425.2,1013-1031).
cccacattggacaatatca

SEQ ID NO: 260497 - DNA, 19 bp, Homo sapiens
  siRNA target sequence for ECM1 (NM_004425.2,1014-1032).
ccacattggacaatatcaa

SEQ ID NO: 260498 - DNA, 19 bp, Homo sapiens
  siRNA target sequence for ECM1 (NM_004425.2,1082-1100).
gctactgaccccctacaaa

SEQ ID NO: 260499 - DNA, 19 bp, Homo sapiens
  siRNA target sequence for ECM1 (NM_004425.2,1147-1165).
ctgccgccaggggaacaat

SEQ ID NO: 260500 - DNA, 19 bp, Homo sapiens
  siRNA target sequence for ECM1 (NM_004425.2,1149-1167).
gccgccaggggaacaatca

SEQ ID NO: 260501 - DNA, 19 bp, Homo sapiens
  siRNA target sequence for ECM1 (NM_004425.2,1151-1169).
cgccaggggaacaatcaca

SEQ ID NO: 260502 - DNA, 19 bp, Homo sapiens
  siRNA target sequence for ECM1 (NM_004425.2,1189-1207).
ggaggatacccttgacaaa

SEQ ID NO: 260503 - DNA, 19 bp, Homo sapiens
  siRNA target sequence for ECM1 (NM_004425.2,1190-1208).
gaggatacccttgacaaat

SEQ ID NO: 260504 - DNA, 19 bp, Homo sapiens
  siRNA target sequence for ECM1 (NM_004425.2,1300-1318).
ggctccttaccccaactat

SEQ ID NO: 260505 - DNA, 19 bp, Homo sapiens
  siRNA target sequence for ECM1 (NM_004425.2,1397-1415).
ctcaccaagcataaacata

SEQ ID NO: 260506 - DNA, 19 bp, Homo sapiens
  siRNA target sequence for ECM1 (NM_004425.2,1402-1420).
caagcataaacatattcct

SEQ ID NO: 260507 - DNA, 19 bp, Homo sapiens
  siRNA target sequence for ECM1 (NM_004425.2,1421-1439).
gggctgatccacaacatga

SEQ ID NO: 260508 - DNA, 19 bp, Homo sapiens
  siRNA target sequence for ECM1 (NM_004425.2,1521-1539).
gtggtccccgacgtaacat

SEQ ID NO: 260509 - DNA, 19 bp, Homo sapiens
  siRNA target sequence for ECM1 (NM_004425.2,1523-1541).
ggtccccgacgtaacatct

SEQ ID NO: 260510 - DNA, 19 bp, Homo sapiens
  siRNA target sequence for ECM1 (NM_004425.2,1594-1612).
ctgcttcaacatcaattat

SEQ ID NO: 260511 - DNA, 19 bp, Homo sapiens
  siRNA target sequence for ECM1 (NM_004425.2,1596-1614).
gcttcaacatcaattatct

SEQ ID NO: 260512 - DNA, 19 bp, Homo sapiens
  siRNA target sequence for LOC90139 (NM_130783.1,274-292).
gccgtccgtgagaacaagt

SEQ ID NO: 260513 - DNA, 19 bp, Homo sapiens
  siRNA target sequence for LOC90139 (NM_130783.1,382-400).
ctcacccgagaattcttca

SEQ ID NO: 260514 - DNA, 19 bp, Homo sapiens
  siRNA target sequence for LOC90139 (NM_130783.1,465-483).
ctcggtcatgatcacattt

SEQ ID NO: 260515 - DNA, 19 bp, Homo sapiens
  siRNA target sequence for LOC90139 (NM_130783.1,469-487).
gtcatgatcacatttggtt

SEQ ID NO: 260516 - DNA, 19 bp, Homo sapiens
  siRNA target sequence for LOC90139 (NM_130783.1,498-516).
caacgggcctgaagacttt

SEQ ID NO: 260517 - DNA, 19 bp, Homo sapiens
  siRNA target sequence for LOC90139 (NM_130783.1,636-654).
gggaaggagcctattccta

SEQ ID NO: 260518 - DNA, 19 bp, Homo sapiens
  siRNA target sequence for LOC90139 (NM_130783.1,637-655).
ggaaggagcctattcctaa

SEQ ID NO: 260519 - DNA, 19 bp, Homo sapiens
  siRNA target sequence for LOC90139 (NM_130783.1,745-763).
gagcttttcgccatgatct

SEQ ID NO: 260520 - DNA, 19 bp, Homo sapiens
  siRNA target sequence for KCNJ3 (NM_002239.2,198-216).
gtctgcactccgaaggaaa

SEQ ID NO: 260521 - DNA, 19 bp, Homo sapiens
  siRNA target sequence for KCNJ3 (NM_002239.2,212-230).
ggaaatttggggacgatta

SEQ ID NO: 260522 - DNA, 19 bp, Homo sapiens
  siRNA target sequence for KCNJ3 (NM_002239.2,301-319).
cagcttgtgcccaagaaga

SEQ ID NO: 260523 - DNA, 19 bp, Homo sapiens
  siRNA target sequence for KCNJ3 (NM_002239.2,434-452).
ggcgctggaacctcttcat

SEQ ID NO: 260524 - DNA, 19 bp, Homo sapiens
  siRNA target sequence for KCNJ3 (NM_002239.2,538-556).
gcccacgtcggtaactaca

SEQ ID NO: 260525 - DNA, 19 bp, Homo sapiens
  siRNA target sequence for KCNJ3 (NM_002239.2,559-577).
ccttgcgtggccaatgtct

SEQ ID NO: 260526 - DNA, 19 bp, Homo sapiens
  siRNA target sequence for KCNJ3 (NM_002239.2,560-578).
cttgcgtggccaatgtcta

SEQ ID NO: 260527 - DNA, 19 bp, Homo sapiens
  siRNA target sequence for KCNJ3 (NM_002239.2,563-581).
gcgtggccaatgtctataa

SEQ ID NO: 260528 - DNA, 19 bp, Homo sapiens
  siRNA target sequence for KCNJ3 (NM_002239.2,943-961).
gaactggatgtaggtttta

SEQ ID NO: 260529 - DNA, 19 bp, Homo sapiens
  siRNA target sequence for KCNJ3 (NM_002239.2,946-964).
ctggatgtaggttttagta

SEQ ID NO: 260530 - DNA, 19 bp, Homo sapiens
  siRNA target sequence for KCNJ3 (NM_002239.2,948-966).
ggatgtaggttttagtaca

SEQ ID NO: 260531 - DNA, 19 bp, Homo sapiens
  siRNA target sequence for KCNJ3 (NM_002239.2,962-980).
gtacaggggcagatcaact

SEQ ID NO: 260532 - DNA, 19 bp, Homo sapiens
  siRNA target sequence for KCNJ3 (NM_002239.2,988-1006).
gtgtcccccctcacaattt

SEQ ID NO: 260533 - DNA, 19 bp, Homo sapiens
  siRNA target sequence for KCNJ3 (NM_002239.2,1022-1040).
ccaaaagccccttttatga

SEQ ID NO: 260534 - DNA, 19 bp, Homo sapiens
  siRNA target sequence for KCNJ3 (NM_002239.2,1050-1068).
gcgaagcatgcaaactgaa

SEQ ID NO: 260535 - DNA, 19 bp, Homo sapiens
  siRNA target sequence for KCNJ3 (NM_002239.2,1055-1073).
gcatgcaaactgaacagtt

SEQ ID NO: 260536 - DNA, 19 bp, Homo sapiens
  siRNA target sequence for KCNJ3 (NM_002239.2,1064-1082).
ctgaacagttcgagattgt

SEQ ID NO: 260537 - DNA, 19 bp, Homo sapiens
  siRNA target sequence for KCNJ3 (NM_002239.2,1130-1148).
ctcgaacatcatatactga

SEQ ID NO: 260538 - DNA, 19 bp, Homo sapiens
  siRNA target sequence for KCNJ3 (NM_002239.2,1254-1272).
cccaccttacagtgtgaaa

SEQ ID NO: 260539 - DNA, 19 bp, Homo sapiens
  siRNA target sequence for KCNJ3 (NM_002239.2,1291-1309).
ctcatgtcgtcccctttaa

SEQ ID NO: 260540 - DNA, 19 bp, Homo sapiens
  siRNA target sequence for KCNJ3 (NM_002239.2,1293-1311).
catgtcgtcccctttaata

SEQ ID NO: 260541 - DNA, 19 bp, Homo sapiens
  siRNA target sequence for KCNJ3 (NM_002239.2,1296-1314).
gtcgtcccctttaatagca

SEQ ID NO: 260542 - DNA, 19 bp, Homo sapiens
  siRNA target sequence for KCNJ3 (NM_002239.2,1312-1330).
gcaccagccataactaaca

SEQ ID NO: 260543 - DNA, 19 bp, Homo sapiens
  siRNA target sequence for KCNJ3 (NM_002239.2,1359-1377).
cttagatggactagatgat

SEQ ID NO: 260544 - DNA, 19 bp, Homo sapiens
  siRNA target sequence for KCNJ3 (NM_002239.2,1363-1381).
gatggactagatgatatta

SEQ ID NO: 260545 - DNA, 19 bp, Homo sapiens
  siRNA target sequence for KCNJ3 (NM_002239.2,1366-1384).
ggactagatgatattacta

SEQ ID NO: 260546 - DNA, 19 bp, Homo sapiens
  siRNA target sequence for KCNJ3 (NM_002239.2,1441-1459).
ctcttgaggatgagttcta

SEQ ID NO: 260547 - DNA, 19 bp, Homo sapiens
  siRNA target sequence for KCNJ3 (NM_002239.2,1485-1503).
gggagacttgcccatgaaa

SEQ ID NO: 260548 - DNA, 19 bp, Homo sapiens
  siRNA target sequence for KCNJ3 (NM_002239.2,1487-1505).
gagacttgcccatgaaact

SEQ ID NO: 260549 - DNA, 19 bp, Homo sapiens
  siRNA target sequence for KCNJ3 (NM_002239.2,1496-1514).
ccatgaaacttcaacgaat

SEQ ID NO: 260550 - DNA, 19 bp, Homo sapiens
  siRNA target sequence for KCNJ3 (NM_002239.2,1497-1515).
catgaaacttcaacgaata

SEQ ID NO: 260551 - DNA, 19 bp, Homo sapiens
  siRNA target sequence for KCNJ3 (NM_002239.2,1500-1518).
gaaacttcaacgaataagt

SEQ ID NO: 260552 - DNA, 19 bp, Homo sapiens
  siRNA target sequence for KCNJ3 (NM_002239.2,1559-1577).
ccaccaagatgttatctga

SEQ ID NO: 260553 - DNA, 19 bp, Homo sapiens
  siRNA target sequence for KCNJ3 (NM_002239.2,1652-1670).
ggaaccttccagccaaatt

SEQ ID NO: 260554 - DNA, 19 bp, Homo sapiens
  siRNA target sequence for KCNJ3 (NM_002239.2,1656-1674).
ccttccagccaaattaaga

SEQ ID NO: 260555 - DNA, 19 bp, Homo sapiens
  siRNA target sequence for KCNJ3 (NM_002239.2,1657-1675).
cttccagccaaattaagaa

SEQ ID NO: 260556 - DNA, 19 bp, Homo sapiens
  siRNA target sequence for KCNJ6 (NM_002240.2,673-691).
cgagatcggaccaaaagga

SEQ ID NO: 260557 - DNA, 19 bp, Homo sapiens
  siRNA target sequence for KCNJ6 (NM_002240.2,674-692).
gagatcggaccaaaaggaa

SEQ ID NO: 260558 - DNA, 19 bp, Homo sapiens
  siRNA target sequence for KCNJ6 (NM_002240.2,676-694).
gatcggaccaaaaggaaaa

SEQ ID NO: 260559 - DNA, 19 bp, Homo sapiens
  siRNA target sequence for KCNJ6 (NM_002240.2,717-735).
cggaaagtgcaatgttcat

SEQ ID NO: 260560 - DNA, 19 bp, Homo sapiens
  siRNA target sequence for KCNJ6 (NM_002240.2,760-778).
cgctacctgaccgatatct

SEQ ID NO: 260561 - DNA, 19 bp, Homo sapiens
  siRNA target sequence for KCNJ6 (NM_002240.2,761-779).
gctacctgaccgatatctt

SEQ ID NO: 260562 - DNA, 19 bp, Homo sapiens
  siRNA target sequence for KCNJ6 (NM_002240.2,771-789).
cgatatcttcaccacatta

SEQ ID NO: 260563 - DNA, 19 bp, Homo sapiens
  siRNA target sequence for KCNJ6 (NM_002240.2,803-821).
ggagattcaacctattgat

SEQ ID NO: 260564 - DNA, 19 bp, Homo sapiens
  siRNA target sequence for KCNJ6 (NM_002240.2,804-822).
gagattcaacctattgatt

SEQ ID NO: 260565 - DNA, 19 bp, Homo sapiens
  siRNA target sequence for KCNJ6 (NM_002240.2,848-866).
ggctcttttttggaatgat

SEQ ID NO: 260566 - DNA, 19 bp, Homo sapiens
  siRNA target sequence for KCNJ6 (NM_002240.2,869-887).
ggtggttgatcgcatacat

SEQ ID NO: 260567 - DNA, 19 bp, Homo sapiens
  siRNA target sequence for KCNJ6 (NM_002240.2,870-888).
gtggttgatcgcatacata

SEQ ID NO: 260568 - DNA, 19 bp, Homo sapiens
  siRNA target sequence for KCNJ6 (NM_002240.2,923-941).
ggactccttgtgttaccaa

SEQ ID NO: 260569 - DNA, 19 bp, Homo sapiens
  siRNA target sequence for KCNJ6 (NM_002240.2,948-966).
cgggttcgtctctgctttt

SEQ ID NO: 260570 - DNA, 19 bp, Homo sapiens
  siRNA target sequence for KCNJ6 (NM_002240.2,949-967).
gggttcgtctctgcttttt

SEQ ID NO: 260571 - DNA, 19 bp, Homo sapiens
  siRNA target sequence for KCNJ6 (NM_002240.2,950-968).
ggttcgtctctgctttttt

SEQ ID NO: 260572 - DNA, 19 bp, Homo sapiens
  siRNA target sequence for KCNJ6 (NM_002240.2,1009-1027).
cgggtcatcacagataaat

SEQ ID NO: 260573 - DNA, 19 bp, Homo sapiens
  siRNA target sequence for KCNJ6 (NM_002240.2,1035-1053).
gggaattattcttctctta

SEQ ID NO: 260574 - DNA, 19 bp, Homo sapiens
  siRNA target sequence for KCNJ6 (NM_002240.2,1065-1083).
gttggggtccattgtcaat

SEQ ID NO: 260575 - DNA, 19 bp, Homo sapiens
  siRNA target sequence for KCNJ6 (NM_002240.2,1205-1223).
gggtaggggaccttaggaa

SEQ ID NO: 260576 - DNA, 19 bp, Homo sapiens
  siRNA target sequence for KCNJ6 (NM_002240.2,1206-1224).
ggtaggggaccttaggaat

SEQ ID NO: 260577 - DNA, 19 bp, Homo sapiens
  siRNA target sequence for KCNJ6 (NM_002240.2,1248-1266).
cagagccaagttgatcaaa

SEQ ID NO: 260578 - DNA, 19 bp, Homo sapiens
  siRNA target sequence for KCNJ6 (NM_002240.2,1335-1353).
gggggatgaccgtctgttt

SEQ ID NO: 260579 - DNA, 19 bp, Homo sapiens
  siRNA target sequence for KCNJ6 (NM_002240.2,1337-1355).
gggatgaccgtctgtttct

SEQ ID NO: 260580 - DNA, 19 bp, Homo sapiens
  siRNA target sequence for KCNJ6 (NM_002240.2,1356-1374).
ggtgtcaccgctgatcatt

SEQ ID NO: 260581 - DNA, 19 bp, Homo sapiens
  siRNA target sequence for KCNJ6 (NM_002240.2,1357-1375).
gtgtcaccgctgatcatta

SEQ ID NO: 260582 - DNA, 19 bp, Homo sapiens
  siRNA target sequence for KCNJ6 (NM_002240.2,1368-1386).
gatcattagccatgaaatt

SEQ ID NO: 260583 - DNA, 19 bp, Homo sapiens
  siRNA target sequence for KCNJ6 (NM_002240.2,1498-1516).
gctcgaagctcctacatca

SEQ ID NO: 260584 - DNA, 19 bp, Homo sapiens
  siRNA target sequence for KCNJ6 (NM_002240.2,1675-1693).
cccctgagttggtctgtat

SEQ ID NO: 260585 - DNA, 19 bp, Homo sapiens
  siRNA target sequence for KCNJ5 (NM_000890.3,564-582).
ctcaagtggcgcttcaact

SEQ ID NO: 260586 - DNA, 19 bp, Homo sapiens
  siRNA target sequence for KCNJ5 (NM_000890.3,585-603).
ctcgtcttcaccatggttt

SEQ ID NO: 260587 - DNA, 19 bp, Homo sapiens
  siRNA target sequence for KCNJ5 (NM_000890.3,637-655).
ggtggctcattgcttatat

SEQ ID NO: 260588 - DNA, 19 bp, Homo sapiens
  siRNA target sequence for KCNJ5 (NM_000890.3,689-707).
gtggattccttgtgttgaa

SEQ ID NO: 260589 - DNA, 19 bp, Homo sapiens
  siRNA target sequence for KCNJ5 (NM_000890.3,796-814).
gtccagaggggattatact

SEQ ID NO: 260590 - DNA, 19 bp, Homo sapiens
  siRNA target sequence for KCNJ5 (NM_000890.3,903-921).
gcggagaccctcatgtttt

SEQ ID NO: 260591 - DNA, 19 bp, Homo sapiens
  siRNA target sequence for KCNJ5 (NM_000890.3,1045-1063).
ccaaagagggggagttcat

SEQ ID NO: 260592 - DNA, 19 bp, Homo sapiens
  siRNA target sequence for KCNJ5 (NM_000890.3,1193-1211).
gctgcatcaggaagagttt

SEQ ID NO: 260593 - DNA, 19 bp, Homo sapiens
  siRNA target sequence for KCNJ5 (NM_000890.3,1269-1287).
cggagctcctacatggata

SEQ ID NO: 260594 - DNA, 19 bp, Homo sapiens
  siRNA target sequence for KCNJ5 (NM_000890.3,1273-1291).
gctcctacatggatacaga

SEQ ID NO: 260595 - DNA, 19 bp, Homo sapiens
  siRNA target sequence for KCNJ5 (NM_000890.3,1328-1346).
cttggaaaagggcttctat

SEQ ID NO: 260596 - DNA, 19 bp, Homo sapiens
  siRNA target sequence for KCNJ12 (NM_021012.2,518-536).
gcccggtggccgtcttcat

SEQ ID NO: 260597 - DNA, 19 bp, Homo sapiens
  siRNA target sequence for KCNJ12 (NM_021012.2,858-876).
caccatcttgcatgagatt

SEQ ID NO: 260598 - DNA, 19 bp, Homo sapiens
  siRNA target sequence for KCNJ12 (NM_021012.2,1130-1148).
cgaaggatctggtagagaa

SEQ ID NO: 260599 - DNA, 19 bp, Homo sapiens
  siRNA target sequence for KCNJ13 (NM_002242.2,145-163).
gcagtaattgcaaagttat

SEQ ID NO: 260600 - DNA, 19 bp, Homo sapiens
  siRNA target sequence for KCNJ13 (NM_002242.2,165-183).
gctcctctcctaagtcaaa

SEQ ID NO: 260601 - DNA, 19 bp, Homo sapiens
  siRNA target sequence for KCNJ13 (NM_002242.2,169-187).
ctctcctaagtcaaagata

SEQ ID NO: 260602 - DNA, 19 bp, Homo sapiens
  siRNA target sequence for KCNJ13 (NM_002242.2,292-310).
gctggcgttggatgatgtt

SEQ ID NO: 260603 - DNA, 19 bp, Homo sapiens
  siRNA target sequence for KCNJ13 (NM_002242.2,385-403).
gtgatctggaactagatca

SEQ ID NO: 260604 - DNA, 19 bp, Homo sapiens
  siRNA target sequence for KCNJ13 (NM_002242.2,412-430).
cacctgaaaaccacactat

SEQ ID NO: 260605 - DNA, 19 bp, Homo sapiens
  siRNA target sequence for KCNJ13 (NM_002242.2,425-443).
cactatctgtgtcaagtat

SEQ ID NO: 260606 - DNA, 19 bp, Homo sapiens
  siRNA target sequence for KCNJ13 (NM_002242.2,482-500).
gacacaactcacaattggt

SEQ ID NO: 260607 - DNA, 19 bp, Homo sapiens
  siRNA target sequence for KCNJ13 (NM_002242.2,542-560).
cgccttacttgccatacaa

SEQ ID NO: 260608 - DNA, 19 bp, Homo sapiens
  siRNA target sequence for KCNJ13 (NM_002242.2,544-562).
ccttacttgccatacaaat

SEQ ID NO: 260609 - DNA, 19 bp, Homo sapiens
  siRNA target sequence for KCNJ13 (NM_002242.2,573-591).
ctcatgctagaggctttta

SEQ ID NO: 260610 - DNA, 19 bp, Homo sapiens
  siRNA target sequence for KCNJ13 (NM_002242.2,623-641).
gccaaaaaatcgagctttt

SEQ ID NO: 260611 - DNA, 19 bp, Homo sapiens
  siRNA target sequence for KCNJ13 (NM_002242.2,624-642).
ccaaaaaatcgagcttttt

SEQ ID NO: 260612 - DNA, 19 bp, Homo sapiens
  siRNA target sequence for KCNJ13 (NM_002242.2,677-695).
catggatggcaaacctaat

SEQ ID NO: 260613 - DNA, 19 bp, Homo sapiens
  siRNA target sequence for KCNJ13 (NM_002242.2,680-698).
ggatggcaaacctaatctt

SEQ ID NO: 260614 - DNA, 19 bp, Homo sapiens
  siRNA target sequence for KCNJ13 (NM_002242.2,681-699).
gatggcaaacctaatctta

SEQ ID NO: 260615 - DNA, 19 bp, Homo sapiens
  siRNA target sequence for KCNJ13 (NM_002242.2,684-702).
ggcaaacctaatcttatct

SEQ ID NO: 260616 - DNA, 19 bp, Homo sapiens
  siRNA target sequence for KCNJ13 (NM_002242.2,745-763).
gggtctcagctgtactcta

SEQ ID NO: 260617 - DNA, 19 bp, Homo sapiens
  siRNA target sequence for KCNJ13 (NM_002242.2,829-847).
ctgacgaatgtccattctt

SEQ ID NO: 260618 - DNA, 19 bp, Homo sapiens
  siRNA target sequence for KCNJ13 (NM_002242.2,831-849).
gacgaatgtccattcttca

SEQ ID NO: 260619 - DNA, 19 bp, Homo sapiens
  siRNA target sequence for KCNJ13 (NM_002242.2,851-869).
ctttccactaacgtactat

SEQ ID NO: 260620 - DNA, 19 bp, Homo sapiens
  siRNA target sequence for KCNJ13 (NM_002242.2,855-873).
ccactaacgtactatcact

SEQ ID NO: 260621 - DNA, 19 bp, Homo sapiens
  siRNA target sequence for KCNJ13 (NM_002242.2,863-881).
gtactatcactccattaca

SEQ ID NO: 260622 - DNA, 19 bp, Homo sapiens
  siRNA target sequence for KCNJ13 (NM_002242.2,925-943).
ctcactttgaattagttgt

SEQ ID NO: 260623 - DNA, 19 bp, Homo sapiens
  siRNA target sequence for KCNJ13 (NM_002242.2,1097-1115).
gactgtccctgaatttcca

SEQ ID NO: 260624 - DNA, 19 bp, Homo sapiens
  siRNA target sequence for KCNJ13 (NM_002242.2,1113-1131).
ccaactcctctggtttcta

SEQ ID NO: 260625 - DNA, 19 bp, Homo sapiens
  siRNA target sequence for KCNJ13 (NM_002242.2,1170-1188).
ggacaaagcattgacaatt

SEQ ID NO: 260626 - DNA, 19 bp, Homo sapiens
  siRNA target sequence for KCNJ13 (NM_002242.2,1177-1195).
gcattgacaattttcagat

SEQ ID NO: 260627 - DNA, 19 bp, Homo sapiens
  siRNA target sequence for KCNJ14 (NM_013348.2,551-569).
gcggtcgcttcgtcaagaa

SEQ ID NO: 260628 - DNA, 19 bp, Homo sapiens
  siRNA target sequence for KCNJ14 (NM_013348.2,552-570).
cggtcgcttcgtcaagaaa

SEQ ID NO: 260629 - DNA, 19 bp, Homo sapiens
  siRNA target sequence for KCNJ14 (NM_013348.2,554-572).
gtcgcttcgtcaagaaaga

SEQ ID NO: 260630 - DNA, 19 bp, Homo sapiens
  siRNA target sequence for KCNJ14 (NM_013348.2,579-597).
ctgcaacgtgcgtttcgta

SEQ ID NO: 260631 - DNA, 19 bp, Homo sapiens
  siRNA target sequence for KCNJ14 (NM_013348.2,581-599).
gcaacgtgcgtttcgtaaa

SEQ ID NO: 260632 - DNA, 19 bp, Homo sapiens
  siRNA target sequence for KCNJ14 (NM_013348.2,1130-1148).
ccccagagggtgagtacat

SEQ ID NO: 260633 - DNA, 19 bp, Homo sapiens
  siRNA target sequence for KCNJ14 (NM_013348.2,1187-1205).
gaggcaccgatcgtatctt

SEQ ID NO: 260634 - DNA, 19 bp, Homo sapiens
  siRNA target sequence for KCNJ14 (NM_013348.2,1446-1464).
ccacttccatcgcacttat

SEQ ID NO: 260635 - DNA, 19 bp, Homo sapiens
  siRNA target sequence for KCNJ15 (NM_002243.3,404-422).
gcacagcaacgtgagaatt

SEQ ID NO: 260636 - DNA, 19 bp, Homo sapiens
  siRNA target sequence for KCNJ15 (NM_002243.3,409-427).
gcaacgtgagaattgacaa

SEQ ID NO: 260637 - DNA, 19 bp, Homo sapiens
  siRNA target sequence for KCNJ15 (NM_002243.3,459-477).
gacctgtggaccacagtta

SEQ ID NO: 260638 - DNA, 19 bp, Homo sapiens
  siRNA target sequence for KCNJ15 (NM_002243.3,469-487).
ccacagttatcgacatgaa

SEQ ID NO: 260639 - DNA, 19 bp, Homo sapiens
  siRNA target sequence for KCNJ15 (NM_002243.3,506-524).
cctgttcgctgccactttt

SEQ ID NO: 260640 - DNA, 19 bp, Homo sapiens
  siRNA target sequence for KCNJ15 (NM_002243.3,593-611).
cggtgagcccatttcaaat

SEQ ID NO: 260641 - DNA, 19 bp, Homo sapiens
  siRNA target sequence for KCNJ15 (NM_002243.3,616-634).
ccccctgcatcatgaaagt

SEQ ID NO: 260642 - DNA, 19 bp, Homo sapiens
  siRNA target sequence for KCNJ15 (NM_002243.3,752-770).
ggtcatcacgaccttgatt

SEQ ID NO: 260643 - DNA, 19 bp, Homo sapiens
  siRNA target sequence for KCNJ15 (NM_002243.3,760-778).
cgaccttgattgagatctt

SEQ ID NO: 260644 - DNA, 19 bp, Homo sapiens
  siRNA target sequence for KCNJ15 (NM_002243.3,763-781).
ccttgattgagatcttcat

SEQ ID NO: 260645 - DNA, 19 bp, Homo sapiens
  siRNA target sequence for KCNJ15 (NM_002243.3,822-840).
cgggctgagaccatcaagt

SEQ ID NO: 260646 - DNA, 19 bp, Homo sapiens
  siRNA target sequence for KCNJ15 (NM_002243.3,1185-1203).
cagagccgaacatcttata

SEQ ID NO: 260647 - DNA, 19 bp, Homo sapiens
  siRNA target sequence for KCNJ15 (NM_002243.3,1198-1216).
cttatatcccagaggaaat

SEQ ID NO: 260648 - DNA, 19 bp, Homo sapiens
  siRNA target sequence for KCNJ15 (NM_002243.3,1242-1260).
gtggtatctctctccaaaa

SEQ ID NO: 260649 - DNA, 19 bp, Homo sapiens
  siRNA target sequence for KCNJ15 (NM_002243.3,1350-1368).
caactcgaggagaagtaca

SEQ ID NO: 260650 - DNA, 19 bp, Homo sapiens
  siRNA target sequence for KCNJ16 (NM_018658.1,498-516).
cggcagcagctatcatatt

SEQ ID NO: 260651 - DNA, 19 bp, Homo sapiens
  siRNA target sequence for KCNJ16 (NM_018658.1,499-517).
ggcagcagctatcatatta

SEQ ID NO: 260652 - DNA, 19 bp, Homo sapiens
  siRNA target sequence for KCNJ16 (NM_018658.1,500-518).
gcagcagctatcatattat

SEQ ID NO: 260653 - DNA, 19 bp, Homo sapiens
  siRNA target sequence for KCNJ16 (NM_018658.1,503-521).
gcagctatcatattatcaa

SEQ ID NO: 260654 - DNA, 19 bp, Homo sapiens
  siRNA target sequence for KCNJ16 (NM_018658.1,504-522).
cagctatcatattatcaat

SEQ ID NO: 260655 - DNA, 19 bp, Homo sapiens
  siRNA target sequence for KCNJ16 (NM_018658.1,546-564).
cccgccagagcacattata

SEQ ID NO: 260656 - DNA, 19 bp, Homo sapiens
  siRNA target sequence for KCNJ16 (NM_018658.1,549-567).
gccagagcacattatagct

SEQ ID NO: 260657 - DNA, 19 bp, Homo sapiens
  siRNA target sequence for KCNJ16 (NM_018658.1,578-596).
gagcaagaagacgattact

SEQ ID NO: 260658 - DNA, 19 bp, Homo sapiens
  siRNA target sequence for KCNJ16 (NM_018658.1,619-637).
gtctacttcaagcacattt

SEQ ID NO: 260659 - DNA, 19 bp, Homo sapiens
  siRNA target sequence for KCNJ16 (NM_018658.1,650-668).
gaagctatgtggttgacat

SEQ ID NO: 260660 - DNA, 19 bp, Homo sapiens
  siRNA target sequence for KCNJ16 (NM_018658.1,689-707).
ccaagtggcgccatatgtt

SEQ ID NO: 260661 - DNA, 19 bp, Homo sapiens
  siRNA target sequence for KCNJ16 (NM_018658.1,690-708).
caagtggcgccatatgttt

SEQ ID NO: 260662 - DNA, 19 bp, Homo sapiens
  siRNA target sequence for KCNJ16 (NM_018658.1,765-783).
gctcatagcctttcatcat

SEQ ID NO: 260663 - DNA, 19 bp, Homo sapiens
  siRNA target sequence for KCNJ16 (NM_018658.1,778-796).
catcatggcgatctattaa

SEQ ID NO: 260664 - DNA, 19 bp, Homo sapiens
  siRNA target sequence for KCNJ16 (NM_018658.1,820-838).
gttgacaacgtccattctt

SEQ ID NO: 260665 - DNA, 19 bp, Homo sapiens
  siRNA target sequence for KCNJ16 (NM_018658.1,825-843).
caacgtccattctttcaca

SEQ ID NO: 260666 - DNA, 19 bp, Homo sapiens
  siRNA target sequence for KCNJ16 (NM_018658.1,876-894).
caccataggatatggttat

SEQ ID NO: 260667 - DNA, 19 bp, Homo sapiens
  siRNA target sequence for KCNJ16 (NM_018658.1,890-908).
gttatcgctgtgttactga

SEQ ID NO: 260668 - DNA, 19 bp, Homo sapiens
  siRNA target sequence for KCNJ16 (NM_018658.1,939-957).
cctccagtccatcttaagt

SEQ ID NO: 260669 - DNA, 19 bp, Homo sapiens
  siRNA target sequence for KCNJ16 (NM_018658.1,948-966).
catcttaagttgcatcata

SEQ ID NO: 260670 - DNA, 19 bp, Homo sapiens
  siRNA target sequence for KCNJ16 (NM_018658.1,1038-1056).
cagctactttgcacttata

SEQ ID NO: 260671 - DNA, 19 bp, Homo sapiens
  siRNA target sequence for KCNJ16 (NM_018658.1,1086-1104).
gtggcgcattggtgatttt

SEQ ID NO: 260672 - DNA, 19 bp, Homo sapiens
  siRNA target sequence for KCNJ16 (NM_018658.1,1116-1134).
cgtggtagaaggaacagtt

SEQ ID NO: 260673 - DNA, 19 bp, Homo sapiens
  siRNA target sequence for KCNJ16 (NM_018658.1,1140-1158).
ccaacttctccgctataca

SEQ ID NO: 260674 - DNA, 19 bp, Homo sapiens
  siRNA target sequence for KCNJ16 (NM_018658.1,1175-1193).
ggatgacgatggcatttaa

SEQ ID NO: 260675 - DNA, 19 bp, Homo sapiens
  siRNA target sequence for KCNJ16 (NM_018658.1,1186-1204).
gcatttaaagacctcaaat

SEQ ID NO: 260676 - DNA, 19 bp, Homo sapiens
  siRNA target sequence for KCNJ16 (NM_018658.1,1225-1243).
ctggtcaccccggtaacta

SEQ ID NO: 260677 - DNA, 19 bp, Homo sapiens
  siRNA target sequence for KCNJ16 (NM_018658.1,1227-1245).
ggtcaccccggtaactatt

SEQ ID NO: 260678 - DNA, 19 bp, Homo sapiens
  siRNA target sequence for KCNJ16 (NM_018658.1,1260-1278).
ccatgagagccctctgtat

SEQ ID NO: 260679 - DNA, 19 bp, Homo sapiens
  siRNA target sequence for KCNJ16 (NM_018658.1,1294-1312).
gcagtagccaaagataact

SEQ ID NO: 260680 - DNA, 19 bp, Homo sapiens
  siRNA target sequence for KCNJ16 (NM_018658.1,1301-1319).
ccaaagataactttgagat

SEQ ID NO: 260681 - DNA, 19 bp, Homo sapiens
  siRNA target sequence for KCNJ16 (NM_018658.1,1384-1402).
gttccccgagaaattctct

SEQ ID NO: 260682 - DNA, 19 bp, Homo sapiens
  siRNA target sequence for KCNJ16 (NM_018658.1,1399-1417).
ctctggggccataggttta

SEQ ID NO: 260683 - DNA, 19 bp, Homo sapiens
  siRNA target sequence for KCNJ16 (NM_018658.1,1403-1421).
ggggccataggtttaatga

SEQ ID NO: 260684 - DNA, 19 bp, Homo sapiens
  siRNA target sequence for KCNJ16 (NM_018658.1,1404-1422).
gggccataggtttaatgat

SEQ ID NO: 260685 - DNA, 19 bp, Homo sapiens
  siRNA target sequence for KCNJ16 (NM_018658.1,1420-1438).
gatgtcttggaagttaaga

SEQ ID NO: 260686 - DNA, 19 bp, Homo sapiens
  siRNA target sequence for KCNJ16 (NM_018658.1,1486-1504).
gtatatgcccccttttgca

SEQ ID NO: 260687 - DNA, 19 bp, Homo sapiens
  siRNA target sequence for KCNJ16 (NM_018658.1,1502-1520).
gcagtgccaagcaattgga

SEQ ID NO: 260688 - DNA, 19 bp, Homo sapiens
  siRNA target sequence for KCNJ16 (NM_018658.1,1593-1611).
gagacgaaggtcatttagt

SEQ ID NO: 260689 - DNA, 19 bp, Homo sapiens
  siRNA target sequence for KCNJ16 (NM_018658.1,1656-1674).
cacttccgccacacatgaa

SEQ ID NO: 260690 - DNA, 19 bp, Homo sapiens
  siRNA target sequence for KCNJ16 (NM_018658.1,1658-1676).
cttccgccacacatgaata

SEQ ID NO: 260691 - DNA, 19 bp, Homo sapiens
  siRNA target sequence for KCNJ2 (NM_000891.2,511-529).
gcaggagccgctttgtgaa

SEQ ID NO: 260692 - DNA, 19 bp, Homo sapiens
  siRNA target sequence for KCNJ2 (NM_000891.2,514-532).
ggagccgctttgtgaagaa

SEQ ID NO: 260693 - DNA, 19 bp, Homo sapiens
  siRNA target sequence for KCNJ2 (NM_000891.2,625-643).
ggcggtggatgctggttat

SEQ ID NO: 260694 - DNA, 19 bp, Homo sapiens
  siRNA target sequence for KCNJ2 (NM_000891.2,805-823).
caaccataggctatggttt

SEQ ID NO: 260695 - DNA, 19 bp, Homo sapiens
  siRNA target sequence for KCNJ2 (NM_000891.2,836-854).
ggatgaatgcccaattgct

SEQ ID NO: 260696 - DNA, 19 bp, Homo sapiens
  siRNA target sequence for KCNJ2 (NM_000891.2,844-862).
gcccaattgctgttttcat

SEQ ID NO: 260697 - DNA, 19 bp, Homo sapiens
  siRNA target sequence for KCNJ2 (NM_000891.2,886-904).
gctgcatcatcgatgcttt

SEQ ID NO: 260698 - DNA, 19 bp, Homo sapiens
  siRNA target sequence for KCNJ2 (NM_000891.2,889-907).
gcatcatcgatgctttcat

SEQ ID NO: 260699 - DNA, 19 bp, Homo sapiens
  siRNA target sequence for KCNJ2 (NM_000891.2,994-1012).
gagacggcaagctgtgttt

SEQ ID NO: 260700 - DNA, 19 bp, Homo sapiens
  siRNA target sequence for KCNJ2 (NM_000891.2,1016-1034).
gtggcgagtgggcaatctt

SEQ ID NO: 260701 - DNA, 19 bp, Homo sapiens
  siRNA target sequence for KCNJ2 (NM_000891.2,1065-1083).
cgagcacagctcctcaaat

SEQ ID NO: 260702 - DNA, 19 bp, Homo sapiens
  siRNA target sequence for KCNJ2 (NM_000891.2,1076-1094).
cctcaaatccagaattact

SEQ ID NO: 260703 - DNA, 19 bp, Homo sapiens
  siRNA target sequence for KCNJ2 (NM_000891.2,1093-1111).
cttctgaaggggagtatat

SEQ ID NO: 260704 - DNA, 19 bp, Homo sapiens
  siRNA target sequence for KCNJ2 (NM_000891.2,1118-1136).
ggatcaaatagacatcaat

SEQ ID NO: 260705 - DNA, 19 bp, Homo sapiens
  siRNA target sequence for KCNJ2 (NM_000891.2,1148-1166).
cagtggaatcgatcgtata

SEQ ID NO: 260706 - DNA, 19 bp, Homo sapiens
  siRNA target sequence for KCNJ2 (NM_000891.2,1150-1168).
gtggaatcgatcgtatatt

SEQ ID NO: 260707 - DNA, 19 bp, Homo sapiens
  siRNA target sequence for KCNJ2 (NM_000891.2,1153-1171).
gaatcgatcgtatatttct

SEQ ID NO: 260708 - DNA, 19 bp, Homo sapiens
  siRNA target sequence for KCNJ2 (NM_000891.2,1170-1188).
ctggtgtccccaatcacta

SEQ ID NO: 260709 - DNA, 19 bp, Homo sapiens
  siRNA target sequence for KCNJ2 (NM_000891.2,1172-1190).
ggtgtccccaatcactata

SEQ ID NO: 260710 - DNA, 19 bp, Homo sapiens
  siRNA target sequence for KCNJ2 (NM_000891.2,1184-1202).
cactatagtccatgaaata

SEQ ID NO: 260711 - DNA, 19 bp, Homo sapiens
  siRNA target sequence for KCNJ2 (NM_000891.2,1209-1227).
gacagtcctttatatgatt

SEQ ID NO: 260712 - DNA, 19 bp, Homo sapiens
  siRNA target sequence for KCNJ2 (NM_000891.2,1241-1259).
cattgacaacgcagacttt

SEQ ID NO: 260713 - DNA, 19 bp, Homo sapiens
  siRNA target sequence for KCNJ2 (NM_000891.2,1313-1331).
gtgccgtagctcttatcta

SEQ ID NO: 260714 - DNA, 19 bp, Homo sapiens
  siRNA target sequence for KCNJ2 (NM_000891.2,1318-1336).
gtagctcttatctagcaaa

SEQ ID NO: 260715 - DNA, 19 bp, Homo sapiens
  siRNA target sequence for KCNJ2 (NM_000891.2,1324-1342).
cttatctagcaaatgaaat

SEQ ID NO: 260716 - DNA, 19 bp, Homo sapiens
  siRNA target sequence for KCNJ2 (NM_000891.2,1412-1430).
gttccacaaaacttacgaa

SEQ ID NO: 260717 - DNA, 19 bp, Homo sapiens
  siRNA target sequence for KCNJ2 (NM_000891.2,1434-1452).
cccaacactcccctttgta

SEQ ID NO: 260718 - DNA, 19 bp, Homo sapiens
  siRNA target sequence for KCNJ2 (NM_000891.2,1436-1454).
caacactcccctttgtagt

SEQ ID NO: 260719 - DNA, 19 bp, Homo sapiens
  siRNA target sequence for KCNJ2 (NM_000891.2,1485-1503).
ctctcaaatgcaaattcat

SEQ ID NO: 260720 - DNA, 19 bp, Homo sapiens
  siRNA target sequence for KCNJ2 (NM_000891.2,1647-1665).
cggcgagagtcggagatat

SEQ ID NO: 260721 - DNA, 19 bp, Homo sapiens
  siRNA target sequence for KCNJ4 (NM_004981.1,174-192).
gccaatgcaacgtgtactt

SEQ ID NO: 260722 - DNA, 19 bp, Homo sapiens
  siRNA target sequence for KCNJ4 (NM_004981.1,194-212).
gccaacctgagcaacaagt

SEQ ID NO: 260723 - DNA, 19 bp, Homo sapiens
  siRNA target sequence for KCNJ4 (NM_004981.1,219-237).
gctacatggcggacatctt

SEQ ID NO: 260724 - DNA, 19 bp, Homo sapiens
  siRNA target sequence for KCNJ4 (NM_004981.1,261-279).
ggcgctacatgctcatgat

SEQ ID NO: 260725 - DNA, 19 bp, Homo sapiens
  siRNA target sequence for KCNJ4 (NM_004981.1,263-281).
cgctacatgctcatgatct

SEQ ID NO: 260726 - DNA, 19 bp, Homo sapiens
  siRNA target sequence for KCNJ4 (NM_004981.1,264-282).
gctacatgctcatgatctt

SEQ ID NO: 260727 - DNA, 19 bp, Homo sapiens
  siRNA target sequence for KCNJ4 (NM_004981.1,764-782).
ctcatcaagccctacatga

SEQ ID NO: 260728 - DNA, 19 bp, Homo sapiens
  siRNA target sequence for KCNJ4 (NM_004981.1,895-913).
cgaggacagcccgctttat

SEQ ID NO: 260729 - DNA, 19 bp, Homo sapiens
  siRNA target sequence for KCNJ4 (NM_004981.1,1087-1105).
ggtggactactcacgtttt

SEQ ID NO: 260730 - DNA, 19 bp, Homo sapiens
  siRNA target sequence for KCNJ8 (NM_004982.2,466-484).
gcaacctggcgcataagaa

SEQ ID NO: 260731 - DNA, 19 bp, Homo sapiens
  siRNA target sequence for KCNJ8 (NM_004982.2,548-566).
ccacacgctggtcatcttt

SEQ ID NO: 260732 - DNA, 19 bp, Homo sapiens
  siRNA target sequence for KCNJ8 (NM_004982.2,549-567).
cacacgctggtcatcttta

SEQ ID NO: 260733 - DNA, 19 bp, Homo sapiens
  siRNA target sequence for KCNJ8 (NM_004982.2,589-607).
ggctgctcttcgctatcat

SEQ ID NO: 260734 - DNA, 19 bp, Homo sapiens
  siRNA target sequence for KCNJ8 (NM_004982.2,591-609).
ctgctcttcgctatcatgt

SEQ ID NO: 260735 - DNA, 19 bp, Homo sapiens
  siRNA target sequence for KCNJ8 (NM_004982.2,734-752).
cttctccattgaagttcaa

SEQ ID NO: 260736 - DNA, 19 bp, Homo sapiens
  siRNA target sequence for KCNJ8 (NM_004982.2,802-820).
ccatcacggttttgattct

SEQ ID NO: 260737 - DNA, 19 bp, Homo sapiens
  siRNA target sequence for KCNJ8 (NM_004982.2,852-870).
gtcatgttaggctgcattt

SEQ ID NO: 260738 - DNA, 19 bp, Homo sapiens
  siRNA target sequence for KCNJ8 (NM_004982.2,900-918).
gcagaaactttgattttca

SEQ ID NO: 260739 - DNA, 19 bp, Homo sapiens
  siRNA target sequence for KCNJ8 (NM_004982.2,986-1004).
gaaaagcatgatcattagt

SEQ ID NO: 260740 - DNA, 19 bp, Homo sapiens
  siRNA target sequence for KCNJ8 (NM_004982.2,1022-1040).
ggtggtcaagaaaacaact

SEQ ID NO: 260741 - DNA, 19 bp, Homo sapiens
  siRNA target sequence for KCNJ8 (NM_004982.2,1051-1069).
gggaggtggttcctattca

SEQ ID NO: 260742 - DNA, 19 bp, Homo sapiens
  siRNA target sequence for KCNJ8 (NM_004982.2,1203-1221).
gacttggaggtcatagtta

SEQ ID NO: 260743 - DNA, 19 bp, Homo sapiens
  siRNA target sequence for KCNJ8 (NM_004982.2,1227-1245).
gaaggagtggttgaaacta

SEQ ID NO: 260744 - DNA, 19 bp, Homo sapiens
  siRNA target sequence for KCNJ8 (NM_004982.2,1305-1323).
cgctttgtgtccattgtga

SEQ ID NO: 260745 - DNA, 19 bp, Homo sapiens
  siRNA target sequence for KCNJ8 (NM_004982.2,1416-1434).
gagaaaccttccatcctta

SEQ ID NO: 260746 - DNA, 19 bp, Homo sapiens
  siRNA target sequence for KCNJ8 (NM_004982.2,1451-1469).
gagtgaactgtctcatcaa

SEQ ID NO: 260747 - DNA, 19 bp, Homo sapiens
  siRNA target sequence for KCNJ8 (NM_004982.2,1560-1578).
ccaaaggtgcaatttatga

SEQ ID NO: 260748 - DNA, 19 bp, Homo sapiens
  siRNA target sequence for KCNJ8 (NM_004982.2,1593-1611).
caaaacacatcggaatcat

SEQ ID NO: 260749 - DNA, 19 bp, Homo sapiens
  siRNA target sequence for KCNJ9 (NM_004983.2,349-367).
gcaacgtgcgcgagacata

SEQ ID NO: 260750 - DNA, 19 bp, Homo sapiens
  siRNA target sequence for KCNJ9 (NM_004983.2,414-432).
cgcctcagcctgttgttct

SEQ ID NO: 260751 - DNA, 19 bp, Homo sapiens
  siRNA target sequence for KCNJ9 (NM_004983.2,532-550).
ggacgccgtgcgtcaacaa

SEQ ID NO: 260752 - DNA, 19 bp, Homo sapiens
  siRNA target sequence for KCNJ9 (NM_004983.2,886-904).
cgctggagggcgagttcat

SEQ ID NO: 260753 - DNA, 19 bp, Homo sapiens
  siRNA target sequence for KCNJ9 (NM_004983.2,966-984).
gtctcgccgctggttatca

SEQ ID NO: 260754 - DNA, 19 bp, Homo sapiens
  siRNA target sequence for KCNK1 (NM_002245.2,857-875).
cattggcctgggggattat

SEQ ID NO: 260755 - DNA, 19 bp, Homo sapiens
  siRNA target sequence for KCNK1 (NM_002245.2,878-896).
gcctggggaaggctacaat

SEQ ID NO: 260756 - DNA, 19 bp, Homo sapiens
  siRNA target sequence for KCNK1 (NM_002245.2,905-923).
cagagagctctataagatt

SEQ ID NO: 260757 - DNA, 19 bp, Homo sapiens
  siRNA target sequence for KCNK1 (NM_002245.2,990-1008).
ctccatgagctgaaaaaat

SEQ ID NO: 260758 - DNA, 19 bp, Homo sapiens
  siRNA target sequence for KCNK1 (NM_002245.2,1046-1064).
ggatcaggtgcacatcata

SEQ ID NO: 260759 - DNA, 19 bp, Homo sapiens
  siRNA target sequence for KCNK1 (NM_002245.2,1173-1191).
gatggccctgcaaaccatt

SEQ ID NO: 260760 - DNA, 19 bp, Homo sapiens
  siRNA target sequence for KCNK6 (NM_004823.1,429-447).
gtgggctatgggtacacaa

SEQ ID NO: 260761 - DNA, 19 bp, Homo sapiens
  siRNA target sequence for KCNK6 (NM_004823.1,668-686).
ggtgccggctgtgatcttt

SEQ ID NO: 260762 - DNA, 19 bp, Homo sapiens
  siRNA target sequence for KCNK6 (NM_004823.1,931-949).
cgtgccctgccagtttcaa

SEQ ID NO: 260763 - DNA, 19 bp, Homo sapiens
  siRNA target sequence for KCNK6 (NM_004823.1,932-950).
gtgccctgccagtttcaat

SEQ ID NO: 260764 - DNA, 19 bp, Homo sapiens
  siRNA target sequence for KCNQ5 (NM_019842.2,354-372).
gggaagccgctctcttaca

SEQ ID NO: 260765 - DNA, 19 bp, Homo sapiens
  siRNA target sequence for KCNQ5 (NM_019842.2,467-485).
ctaccacgctttcgttttt

SEQ ID NO: 260766 - DNA, 19 bp, Homo sapiens
  siRNA target sequence for KCNQ5 (NM_019842.2,527-545).
catccctgagcacacaaaa

SEQ ID NO: 260767 - DNA, 19 bp, Homo sapiens
  siRNA target sequence for KCNQ5 (NM_019842.2,629-647).
gggttgctgttgtcgatat

SEQ ID NO: 260768 - DNA, 19 bp, Homo sapiens
  siRNA target sequence for KCNQ5 (NM_019842.2,630-648).
ggttgctgttgtcgatata

SEQ ID NO: 260769 - DNA, 19 bp, Homo sapiens
  siRNA target sequence for KCNQ5 (NM_019842.2,683-701).
gcccttctgtgttatagat

SEQ ID NO: 260770 - DNA, 19 bp, Homo sapiens
  siRNA target sequence for KCNQ5 (NM_019842.2,689-707).
ctgtgttatagataccatt

SEQ ID NO: 260771 - DNA, 19 bp, Homo sapiens
  siRNA target sequence for KCNQ5 (NM_019842.2,716-734).
cgcttcaatagcagttgtt

SEQ ID NO: 260772 - DNA, 19 bp, Homo sapiens
  siRNA target sequence for KCNQ5 (NM_019842.2,717-735).
gcttcaatagcagttgttt

SEQ ID NO: 260773 - DNA, 19 bp, Homo sapiens
  siRNA target sequence for KCNQ5 (NM_019842.2,776-794).
cagaagtctccgtttccta

SEQ ID NO: 260774 - DNA, 19 bp, Homo sapiens
  siRNA target sequence for KCNQ5 (NM_019842.2,781-799).
gtctccgtttcctacagat

SEQ ID NO: 260775 - DNA, 19 bp, Homo sapiens
  siRNA target sequence for KCNQ5 (NM_019842.2,827-845).
gggaggcacttggaaatta

SEQ ID NO: 260776 - DNA, 19 bp, Homo sapiens
  siRNA target sequence for KCNQ5 (NM_019842.2,867-885).
cacagcaaggaattaatca

SEQ ID NO: 260777 - DNA, 19 bp, Homo sapiens
  siRNA target sequence for KCNQ5 (NM_019842.2,892-910).
ggtacataggatttttggt

SEQ ID NO: 260778 - DNA, 19 bp, Homo sapiens
  siRNA target sequence for KCNQ5 (NM_019842.2,893-911).
gtacataggatttttggtt

SEQ ID NO: 260779 - DNA, 19 bp, Homo sapiens
  siRNA target sequence for KCNQ5 (NM_019842.2,922-940).
cgtctttccttgtctatct

SEQ ID NO: 260780 - DNA, 19 bp, Homo sapiens
  siRNA target sequence for KCNQ5 (NM_019842.2,1122-1140).
ggctcaggttttgcattaa

SEQ ID NO: 260781 - DNA, 19 bp, Homo sapiens
  siRNA target sequence for KCNQ5 (NM_019842.2,1123-1141).
gctcaggttttgcattaaa

SEQ ID NO: 260782 - DNA, 19 bp, Homo sapiens
  siRNA target sequence for KCNQ5 (NM_019842.2,1222-1240).
gttacgcagctgatgagaa

SEQ ID NO: 260783 - DNA, 19 bp, Homo sapiens
  siRNA target sequence for KCNQ5 (NM_019842.2,1226-1244).
cgcagctgatgagaaatct

SEQ ID NO: 260784 - DNA, 19 bp, Homo sapiens
  siRNA target sequence for KCNQ5 (NM_019842.2,1327-1345).
gcagtcagaagctaagttt

SEQ ID NO: 260785 - DNA, 19 bp, Homo sapiens
  siRNA target sequence for KCNQ5 (NM_019842.2,1372-1390).
ccaggggccagagtattaa

SEQ ID NO: 260786 - DNA, 19 bp, Homo sapiens
  siRNA target sequence for KCNQ5 (NM_019842.2,1511-1529).
gctgcgcctcaaaagttct

SEQ ID NO: 260787 - DNA, 19 bp, Homo sapiens
  siRNA target sequence for KCNQ5 (NM_019842.2,1532-1550).
gccaaaaccagtgatagat

SEQ ID NO: 260788 - DNA, 19 bp, Homo sapiens
  siRNA target sequence for KCNQ5 (NM_019842.2,1561-1579).
cccttggcactgatgatgt

SEQ ID NO: 260789 - DNA, 19 bp, Homo sapiens
  siRNA target sequence for KCNQ5 (NM_019842.2,1563-1581).
cttggcactgatgatgtat

SEQ ID NO: 260790 - DNA, 19 bp, Homo sapiens
  siRNA target sequence for KCNQ5 (NM_019842.2,1568-1586).
cactgatgatgtatatgat

SEQ ID NO: 260791 - DNA, 19 bp, Homo sapiens
  siRNA target sequence for KCNQ5 (NM_019842.2,1644-1662).
gtcattcgagctatcagaa

SEQ ID NO: 260792 - DNA, 19 bp, Homo sapiens
  siRNA target sequence for KCNQ5 (NM_019842.2,1646-1664).
cattcgagctatcagaatt

SEQ ID NO: 260793 - DNA, 19 bp, Homo sapiens
  siRNA target sequence for KCNQ5 (NM_019842.2,1650-1668).
cgagctatcagaattatga

SEQ ID NO: 260794 - DNA, 19 bp, Homo sapiens
  siRNA target sequence for KCNQ5 (NM_019842.2,1651-1669).
gagctatcagaattatgaa

SEQ ID NO: 260795 - DNA, 19 bp, Homo sapiens
  siRNA target sequence for KCNQ5 (NM_019842.2,1677-1695).
gttgcaaaacggaagttta

SEQ ID NO: 260796 - DNA, 19 bp, Homo sapiens
  siRNA target sequence for KCNQ5 (NM_019842.2,1681-1699).
caaaacggaagtttaagga

SEQ ID NO: 260797 - DNA, 19 bp, Homo sapiens
  siRNA target sequence for KCNQ5 (NM_019842.2,1686-1704).
cggaagtttaaggaaacat

SEQ ID NO: 260798 - DNA, 19 bp, Homo sapiens
  siRNA target sequence for KCNQ5 (NM_019842.2,1691-1709).
gtttaaggaaacattacgt

SEQ ID NO: 260799 - DNA, 19 bp, Homo sapiens
  siRNA target sequence for KCNQ5 (NM_019842.2,1702-1720).
cattacgtccatatgatgt

SEQ ID NO: 260800 - DNA, 19 bp, Homo sapiens
  siRNA target sequence for KCNQ5 (NM_019842.2,1752-1770).
catctggacatgttgtgta

SEQ ID NO: 260801 - DNA, 19 bp, Homo sapiens
  siRNA target sequence for KCNQ5 (NM_019842.2,1755-1773).
ctggacatgttgtgtagaa

SEQ ID NO: 260802 - DNA, 19 bp, Homo sapiens
  siRNA target sequence for KCNQ5 (NM_019842.2,1781-1799).
ccttcaaacacgtgttgat

SEQ ID NO: 260803 - DNA, 19 bp, Homo sapiens
  siRNA target sequence for KCNQ5 (NM_019842.2,1789-1807).
cacgtgttgatcaaattct

SEQ ID NO: 260804 - DNA, 19 bp, Homo sapiens
  siRNA target sequence for KCNQ5 (NM_019842.2,1815-1833).
gggcaaatcacatcagata

SEQ ID NO: 260805 - DNA, 19 bp, Homo sapiens
  siRNA target sequence for KCNQ5 (NM_019842.2,1870-1888).
ccacagacgatctcagtat

SEQ ID NO: 260806 - DNA, 19 bp, Homo sapiens
  siRNA target sequence for KCNQ5 (NM_019842.2,1896-1914).
cgggtggtcaaggttgaaa

SEQ ID NO: 260807 - DNA, 19 bp, Homo sapiens
  siRNA target sequence for KCNQ5 (NM_019842.2,1917-1935).
caggtacagtccatagaat

SEQ ID NO: 260808 - DNA, 19 bp, Homo sapiens
  siRNA target sequence for KCNQ5 (NM_019842.2,1948-1966).
gcctactagacatctatca

SEQ ID NO: 260809 - DNA, 19 bp, Homo sapiens
  siRNA target sequence for KCNQ5 (NM_019842.2,1949-1967).
cctactagacatctatcaa

SEQ ID NO: 260810 - DNA, 19 bp, Homo sapiens
  siRNA target sequence for KCNQ5 (NM_019842.2,1996-2014).
ccctcgctttggcttcatt

SEQ ID NO: 260811 - DNA, 19 bp, Homo sapiens
  siRNA target sequence for KCNQ5 (NM_019842.2,2015-2033).
ccagatcccaccttttgaa

SEQ ID NO: 260812 - DNA, 19 bp, Homo sapiens
  siRNA target sequence for KCNQ5 (NM_019842.2,2018-2036).
gatcccaccttttgaatgt

SEQ ID NO: 260813 - DNA, 19 bp, Homo sapiens
  siRNA target sequence for KCNQ5 (NM_019842.2,2064-2082).
gtggatagcaaagatcttt

SEQ ID NO: 260814 - DNA, 19 bp, Homo sapiens
  siRNA target sequence for KCNQ5 (NM_019842.2,2084-2102).
gggttccgcacaaaacagt

SEQ ID NO: 260815 - DNA, 19 bp, Homo sapiens
  siRNA target sequence for KCNQ5 (NM_019842.2,2103-2121).
ggctgcttatccagatcaa

SEQ ID NO: 260816 - DNA, 19 bp, Homo sapiens
  siRNA target sequence for KCNQ5 (NM_019842.2,2105-2123).
ctgcttatccagatcaact

SEQ ID NO: 260817 - DNA, 19 bp, Homo sapiens
  siRNA target sequence for KCNQ5 (NM_019842.2,2108-2126).
cttatccagatcaactagt

SEQ ID NO: 260818 - DNA, 19 bp, Homo sapiens
  siRNA target sequence for KCNQ5 (NM_019842.2,2137-2155).
cgagaggcctgcagttcat

SEQ ID NO: 260819 - DNA, 19 bp, Homo sapiens
  siRNA target sequence for KCNQ5 (NM_019842.2,2220-2238).
gcaacacaggtgccaatta

SEQ ID NO: 260820 - DNA, 19 bp, Homo sapiens
  siRNA target sequence for KCNQ5 (NM_019842.2,2224-2242).
cacaggtgccaattagtca

SEQ ID NO: 260821 - DNA, 19 bp, Homo sapiens
  siRNA target sequence for KCNQ5 (NM_019842.2,2226-2244).
caggtgccaattagtcaaa

SEQ ID NO: 260822 - DNA, 19 bp, Homo sapiens
  siRNA target sequence for KCNQ5 (NM_019842.2,2313-2331).
gccccaacaactttacaga

SEQ ID NO: 260823 - DNA, 19 bp, Homo sapiens
  siRNA target sequence for KCNQ5 (NM_019842.2,2397-2415).
ggcttacaggaaagcattt

SEQ ID NO: 260824 - DNA, 19 bp, Homo sapiens
  siRNA target sequence for KCNQ5 (NM_019842.2,2440-2458).
cctccaaggaaaatgttca

SEQ ID NO: 260825 - DNA, 19 bp, Homo sapiens
  siRNA target sequence for KCNQ5 (NM_019842.2,2552-2570).
gaaggacttgggcaaatct

SEQ ID NO: 260826 - DNA, 19 bp, Homo sapiens
  siRNA target sequence for KCNQ5 (NM_019842.2,2593-2611).
ggtcgaccgaggaactgaa

SEQ ID NO: 260827 - DNA, 19 bp, Homo sapiens
  siRNA target sequence for KCNQ5 (NM_019842.2,2594-2612).
gtcgaccgaggaactgaat

SEQ ID NO: 260828 - DNA, 19 bp, Homo sapiens
  siRNA target sequence for KCNQ5 (NM_019842.2,2596-2614).
cgaccgaggaactgaatat

SEQ ID NO: 260829 - DNA, 19 bp, Homo sapiens
  siRNA target sequence for KCNQ5 (NM_019842.2,2597-2615).
gaccgaggaactgaatata

SEQ ID NO: 260830 - DNA, 19 bp, Homo sapiens
  siRNA target sequence for KCNQ5 (NM_019842.2,2644-2662).
ccagaggcagccaagattt

SEQ ID NO: 260831 - DNA, 19 bp, Homo sapiens
  siRNA target sequence for KCNQ5 (NM_019842.2,2674-2692).
ggagggaatccaaattgtt

SEQ ID NO: 260832 - DNA, 19 bp, Homo sapiens
  siRNA target sequence for KCNQ5 (NM_019842.2,2677-2695).
gggaatccaaattgtttat

SEQ ID NO: 260833 - DNA, 19 bp, Homo sapiens
  siRNA target sequence for KCNQ5 (NM_019842.2,2679-2697).
gaatccaaattgtttataa

SEQ ID NO: 260834 - DNA, 19 bp, Homo sapiens
  siRNA target sequence for KCNQ5 (NM_019842.2,2857-2875).
gcttgcctcatgtcaaact

SEQ ID NO: 260835 - DNA, 19 bp, Homo sapiens
  siRNA target sequence for KCNE1 (NM_000219.1,40-58).
gcggtgacgccctttctga

SEQ ID NO: 260836 - DNA, 19 bp, Homo sapiens
  siRNA target sequence for KCNE1 (NM_000219.1,269-287).
ccgatgcctggcaagagaa

SEQ ID NO: 260837 - DNA, 19 bp, Homo sapiens
  siRNA target sequence for KCNE1 (NM_000219.1,332-350).
cgtgctatgtcgttgaaaa

SEQ ID NO: 260838 - DNA, 19 bp, Homo sapiens
  siRNA target sequence for KCNE1 (NM_000219.1,335-353).
gctatgtcgttgaaaacca

SEQ ID NO: 260839 - DNA, 19 bp, Homo sapiens
  siRNA target sequence for KCNE1 (NM_000219.1,336-354).
ctatgtcgttgaaaaccat

SEQ ID NO: 260840 - DNA, 19 bp, Homo sapiens
  siRNA target sequence for KCNQ1 (NM_000218.2,454-472).
cgtcccaccggctggaaat

SEQ ID NO: 260841 - DNA, 19 bp, Homo sapiens
  siRNA target sequence for KCNQ1 (NM_000218.2,688-706).
gcccggaagcccatttcca

SEQ ID NO: 260842 - DNA, 19 bp, Homo sapiens
  siRNA target sequence for KCNQ1 (NM_000218.2,689-707).
cccggaagcccatttccat

SEQ ID NO: 260843 - DNA, 19 bp, Homo sapiens
  siRNA target sequence for KCNQ1 (NM_000218.2,1350-1368).
gtctgtggtggtaaagaaa

SEQ ID NO: 260844 - DNA, 19 bp, Homo sapiens
  siRNA target sequence for KCNQ1 (NM_000218.2,1485-1503).
cggctatgacagttctgta

SEQ ID NO: 260845 - DNA, 19 bp, Homo sapiens
  siRNA target sequence for KCNQ1 (NM_000218.2,1486-1504).
ggctatgacagttctgtaa

SEQ ID NO: 260846 - DNA, 19 bp, Homo sapiens
  siRNA target sequence for KCNQ1 (NM_000218.2,1528-1546).
gtgagcatgccccatttca

SEQ ID NO: 260847 - DNA, 19 bp, Homo sapiens
  siRNA target sequence for KCNQ1 (NM_000218.2,1633-1651).
caccatcgggccaccatta

SEQ ID NO: 260848 - DNA, 19 bp, Homo sapiens
  siRNA target sequence for KCNQ1 (NM_000218.2,1661-1679).
gacgcatgcagtactttgt

SEQ ID NO: 260849 - DNA, 19 bp, Homo sapiens
  siRNA target sequence for KCNQ1 (NM_000218.2,1880-1898).
gcctgaaccgagtagaaga

SEQ ID NO: 260850 - DNA, 19 bp, Homo sapiens
  siRNA target sequence for KCNQ1 (NM_181797.1,153-171).
cacttcgccgtattcaaga

SEQ ID NO: 260851 - DNA, 19 bp, Homo sapiens
  siRNA target sequence for KCNQ1 (NM_181797.1,155-173).
cttcgccgtattcaagaaa

SEQ ID NO: 260852 - DNA, 19 bp, Homo sapiens
  siRNA target sequence for KCNQ1 (NM_181797.1,158-176).
cgccgtattcaagaaatta

SEQ ID NO: 260853 - DNA, 19 bp, Homo sapiens
  siRNA target sequence for KCNQ1 (NM_181797.1,159-177).
gccgtattcaagaaattaa

SEQ ID NO: 260854 - DNA, 19 bp, Homo sapiens
  siRNA target sequence for KCNQ1 (NM_181797.1,162-180).
gtattcaagaaattaagca

SEQ ID NO: 260855 - DNA, 19 bp, Homo sapiens
  siRNA target sequence for KCNQ1 (NM_181797.1,185-203).
gtcacgagagtgcaaagtt

SEQ ID NO: 260856 - DNA, 19 bp, Homo sapiens
  siRNA target sequence for KCNK2 (NM_014217.1,27-45).
gacttgctggatcctaaat

SEQ ID NO: 260857 - DNA, 19 bp, Homo sapiens
  siRNA target sequence for KCNK2 (NM_014217.1,66-84).
ccgaggctctcgttttcca

SEQ ID NO: 260858 - DNA, 19 bp, Homo sapiens
  siRNA target sequence for KCNK2 (NM_014217.1,114-132).
gagagtgacacgaccatta

SEQ ID NO: 260859 - DNA, 19 bp, Homo sapiens
  siRNA target sequence for KCNK2 (NM_014217.1,116-134).
gagtgacacgaccattaat

SEQ ID NO: 260860 - DNA, 19 bp, Homo sapiens
  siRNA target sequence for KCNK2 (NM_014217.1,118-136).
gtgacacgaccattaatgt

SEQ ID NO: 260861 - DNA, 19 bp, Homo sapiens
  siRNA target sequence for KCNK2 (NM_014217.1,120-138).
gacacgaccattaatgtta

SEQ ID NO: 260862 - DNA, 19 bp, Homo sapiens
  siRNA target sequence for KCNK2 (NM_014217.1,151-169).
cggtctccacgatattcct

SEQ ID NO: 260863 - DNA, 19 bp, Homo sapiens
  siRNA target sequence for KCNK2 (NM_014217.1,194-212).
cggagccaccgtgttcaaa

SEQ ID NO: 260864 - DNA, 19 bp, Homo sapiens
  siRNA target sequence for KCNK2 (NM_014217.1,198-216).
gccaccgtgttcaaagcat

SEQ ID NO: 260865 - DNA, 19 bp, Homo sapiens
  siRNA target sequence for KCNK2 (NM_014217.1,199-217).
ccaccgtgttcaaagcatt

SEQ ID NO: 260866 - DNA, 19 bp, Homo sapiens
  siRNA target sequence for KCNK2 (NM_014217.1,218-236).
ggagcagcctcatgagatt

SEQ ID NO: 260867 - DNA, 19 bp, Homo sapiens
  siRNA target sequence for KCNK2 (NM_014217.1,219-237).
gagcagcctcatgagattt

SEQ ID NO: 260868 - DNA, 19 bp, Homo sapiens
  siRNA target sequence for KCNK2 (NM_014217.1,221-239).
gcagcctcatgagatttca

SEQ ID NO: 260869 - DNA, 19 bp, Homo sapiens
  siRNA target sequence for KCNK2 (NM_014217.1,281-299).
ccaacattcctgtgtcaat

SEQ ID NO: 260870 - DNA, 19 bp, Homo sapiens
  siRNA target sequence for KCNK2 (NM_014217.1,282-300).
caacattcctgtgtcaatt

SEQ ID NO: 260871 - DNA, 19 bp, Homo sapiens
  siRNA target sequence for KCNK2 (NM_014217.1,285-303).
cattcctgtgtcaattcga

SEQ ID NO: 260872 - DNA, 19 bp, Homo sapiens
  siRNA target sequence for KCNK2 (NM_014217.1,351-369).
gggattataccgttaggaa

SEQ ID NO: 260873 - DNA, 19 bp, Homo sapiens
  siRNA target sequence for KCNK2 (NM_014217.1,352-370).
ggattataccgttaggaaa

SEQ ID NO: 260874 - DNA, 19 bp, Homo sapiens
  siRNA target sequence for KCNK2 (NM_014217.1,429-447).
gttattacaaccataggat

SEQ ID NO: 260875 - DNA, 19 bp, Homo sapiens
  siRNA target sequence for KCNK2 (NM_014217.1,469-487).
cagaaggcggcaaaatatt

SEQ ID NO: 260876 - DNA, 19 bp, Homo sapiens
  siRNA target sequence for KCNK2 (NM_014217.1,471-489).
gaaggcggcaaaatattct

SEQ ID NO: 260877 - DNA, 19 bp, Homo sapiens
  siRNA target sequence for KCNK2 (NM_014217.1,474-492).
ggcggcaaaatattctgta

SEQ ID NO: 260878 - DNA, 19 bp, Homo sapiens
  siRNA target sequence for KCNK2 (NM_014217.1,475-493).
gcggcaaaatattctgtat

SEQ ID NO: 260879 - DNA, 19 bp, Homo sapiens
  siRNA target sequence for KCNK2 (NM_014217.1,549-567).
gatcagctaggcaccatat

SEQ ID NO: 260880 - DNA, 19 bp, Homo sapiens
  siRNA target sequence for KCNK2 (NM_014217.1,554-572).
gctaggcaccatatttgga

SEQ ID NO: 260881 - DNA, 19 bp, Homo sapiens
  siRNA target sequence for KCNK2 (NM_014217.1,555-573).
ctaggcaccatatttggaa

SEQ ID NO: 260882 - DNA, 19 bp, Homo sapiens
  siRNA target sequence for KCNK2 (NM_014217.1,591-609).
gaagatacgtttattaagt

SEQ ID NO: 260883 - DNA, 19 bp, Homo sapiens
  siRNA target sequence for KCNK2 (NM_014217.1,643-661).
caacaatcatatttatact

SEQ ID NO: 260884 - DNA, 19 bp, Homo sapiens
  siRNA target sequence for KCNK2 (NM_014217.1,684-702).
gctctgcctgcgatcatat

SEQ ID NO: 260885 - DNA, 19 bp, Homo sapiens
  siRNA target sequence for KCNK2 (NM_014217.1,685-703).
ctctgcctgcgatcatatt

SEQ ID NO: 260886 - DNA, 19 bp, Homo sapiens
  siRNA target sequence for KCNK2 (NM_014217.1,687-705).
ctgcctgcgatcatattca

SEQ ID NO: 260887 - DNA, 19 bp, Homo sapiens
  siRNA target sequence for KCNK2 (NM_014217.1,689-707).
gcctgcgatcatattcaaa

SEQ ID NO: 260888 - DNA, 19 bp, Homo sapiens
  siRNA target sequence for KCNK2 (NM_014217.1,691-709).
ctgcgatcatattcaaaca

SEQ ID NO: 260889 - DNA, 19 bp, Homo sapiens
  siRNA target sequence for KCNK2 (NM_014217.1,694-712).
cgatcatattcaaacacat

SEQ ID NO: 260890 - DNA, 19 bp, Homo sapiens
  siRNA target sequence for KCNK2 (NM_014217.1,724-742).
gtgccctggacgccattta

SEQ ID NO: 260891 - DNA, 19 bp, Homo sapiens
  siRNA target sequence for KCNK2 (NM_014217.1,726-744).
gccctggacgccatttatt

SEQ ID NO: 260892 - DNA, 19 bp, Homo sapiens
  siRNA target sequence for KCNK2 (NM_014217.1,747-765).
gtggttatcactctaacaa

SEQ ID NO: 260893 - DNA, 19 bp, Homo sapiens
  siRNA target sequence for KCNK2 (NM_014217.1,749-767).
ggttatcactctaacaact

SEQ ID NO: 260894 - DNA, 19 bp, Homo sapiens
  siRNA target sequence for KCNK2 (NM_014217.1,750-768).
gttatcactctaacaacta

SEQ ID NO: 260895 - DNA, 19 bp, Homo sapiens
  siRNA target sequence for KCNK2 (NM_014217.1,790-808).
caggtggatccgatattga

SEQ ID NO: 260896 - DNA, 19 bp, Homo sapiens
  siRNA target sequence for KCNK2 (NM_014217.1,792-810).
ggtggatccgatattgaat

SEQ ID NO: 260897 - DNA, 19 bp, Homo sapiens
  siRNA target sequence for KCNK2 (NM_014217.1,894-912).
gattggctccgagtgatat

SEQ ID NO: 260898 - DNA, 19 bp, Homo sapiens
  siRNA target sequence for KCNK2 (NM_014217.1,899-917).
gctccgagtgatatctaaa

SEQ ID NO: 260899 - DNA, 19 bp, Homo sapiens
  siRNA target sequence for KCNK2 (NM_014217.1,900-918).
ctccgagtgatatctaaaa

SEQ ID NO: 260900 - DNA, 19 bp, Homo sapiens
  siRNA target sequence for KCNK2 (NM_014217.1,974-992).
cgtcacagccgaattcaaa

SEQ ID NO: 260901 - DNA, 19 bp, Homo sapiens
  siRNA target sequence for KCNK2 (NM_014217.1,1012-1030).
gtgtggagatttatgacaa

SEQ ID NO: 260902 - DNA, 19 bp, Homo sapiens
  siRNA target sequence for KCNK2 (NM_014217.1,1152-1170).
gtcttgcctcccttactga

SEQ ID NO: 260903 - DNA, 19 bp, Homo sapiens
  siRNA target sequence for KCNK2 (NM_014217.1,1180-1198).
gtatctatctgaatggttt

SEQ ID NO: 260904 - DNA, 19 bp, Homo sapiens
  siRNA target sequence for KCNAB1 (NM_003471.2,269-287).
ctgccaaaatccagtgaat

SEQ ID NO: 260905 - DNA, 19 bp, Homo sapiens
  siRNA target sequence for KCNAB1 (NM_003471.2,279-297).
ccagtgaatcggctctaaa

SEQ ID NO: 260906 - DNA, 19 bp, Homo sapiens
  siRNA target sequence for KCNAB1 (NM_003471.2,284-302).
gaatcggctctaaaatgta

SEQ ID NO: 260907 - DNA, 19 bp, Homo sapiens
  siRNA target sequence for KCNAB1 (NM_003471.2,398-416).
ctacgtgttcatggaattt

SEQ ID NO: 260908 - DNA, 19 bp, Homo sapiens
  siRNA target sequence for KCNAB1 (NM_003471.2,401-419).
cgtgttcatggaatttcgt

SEQ ID NO: 260909 - DNA, 19 bp, Homo sapiens
  siRNA target sequence for KCNAB1 (NM_003471.2,402-420).
gtgttcatggaatttcgtt

SEQ ID NO: 260910 - DNA, 19 bp, Homo sapiens
  siRNA target sequence for KCNAB1 (NM_003471.2,448-466).
catggcatacaggaatctt

SEQ ID NO: 260911 - DNA, 19 bp, Homo sapiens
  siRNA target sequence for KCNAB1 (NM_003471.2,559-577).
gaccatcgcctatgaaagt

SEQ ID NO: 260912 - DNA, 19 bp, Homo sapiens
  siRNA target sequence for KCNAB1 (NM_003471.2,576-594).
gtggtgttaacctctttga

SEQ ID NO: 260913 - DNA, 19 bp, Homo sapiens
  siRNA target sequence for KCNAB1 (NM_003471.2,578-596).
ggtgttaacctctttgata

SEQ ID NO: 260914 - DNA, 19 bp, Homo sapiens
  siRNA target sequence for KCNAB1 (NM_003471.2,670-688).
gtccagtctggtcataaca

SEQ ID NO: 260915 - DNA, 19 bp, Homo sapiens
  siRNA target sequence for KCNAB1 (NM_003471.2,680-698).
gtcataacaaccaaactct

SEQ ID NO: 260916 - DNA, 19 bp, Homo sapiens
  siRNA target sequence for KCNAB1 (NM_003471.2,777-795).
ggctgcagctcgagtatgt

SEQ ID NO: 260917 - DNA, 19 bp, Homo sapiens
  siRNA target sequence for KCNAB1 (NM_003471.2,796-814).
ggatgtggtctttgcaaat

SEQ ID NO: 260918 - DNA, 19 bp, Homo sapiens
  siRNA target sequence for KCNAB1 (NM_003471.2,810-828).
caaatcgaccggacagtaa

SEQ ID NO: 260919 - DNA, 19 bp, Homo sapiens
  siRNA target sequence for KCNAB1 (NM_003471.2,852-870).
gagccatgacacatgtgat

SEQ ID NO: 260920 - DNA, 19 bp, Homo sapiens
  siRNA target sequence for KCNAB1 (NM_003471.2,854-872).
gccatgacacatgtgataa

SEQ ID NO: 260921 - DNA, 19 bp, Homo sapiens
  siRNA target sequence for KCNAB1 (NM_003471.2,855-873).
ccatgacacatgtgataaa

SEQ ID NO: 260922 - DNA, 19 bp, Homo sapiens
  siRNA target sequence for KCNAB1 (NM_003471.2,859-877).
gacacatgtgataaaccaa

SEQ ID NO: 260923 - DNA, 19 bp, Homo sapiens
  siRNA target sequence for KCNAB1 (NM_003471.2,875-893).
caaggcatggcgatgtact

SEQ ID NO: 260924 - DNA, 19 bp, Homo sapiens
  siRNA target sequence for KCNAB1 (NM_003471.2,909-927).
ggagtgctatggagatcat

SEQ ID NO: 260925 - DNA, 19 bp, Homo sapiens
  siRNA target sequence for KCNAB1 (NM_003471.2,925-943).
catggaagcctattctgta

SEQ ID NO: 260926 - DNA, 19 bp, Homo sapiens
  siRNA target sequence for KCNAB1 (NM_003471.2,980-998).
caagctgagtaccatcttt

SEQ ID NO: 260927 - DNA, 19 bp, Homo sapiens
  siRNA target sequence for KCNAB1 (NM_003471.2,1049-1067).
ggtgttggcgcaatgacat

SEQ ID NO: 260928 - DNA, 19 bp, Homo sapiens
  siRNA target sequence for KCNAB1 (NM_003471.2,1076-1094).
cttgcctgtggaatcatct

SEQ ID NO: 260929 - DNA, 19 bp, Homo sapiens
  siRNA target sequence for KCNAB1 (NM_003471.2,1147-1165).
ctaccagtggttgaaagaa

SEQ ID NO: 260930 - DNA, 19 bp, Homo sapiens
  siRNA target sequence for KCNAB1 (NM_003471.2,1314-1332).
ccactcctgaacaactcat

SEQ ID NO: 260931 - DNA, 19 bp, Homo sapiens
  siRNA target sequence for KCNAB1 (NM_003471.2,1379-1397).
gtggtaaatgagattgata

SEQ ID NO: 260932 - DNA, 19 bp, Homo sapiens
  siRNA target sequence for KCNAB1 (NM_172159.1,523-541).
gcctgcacagagcacaatt

SEQ ID NO: 260933 - DNA, 19 bp, Homo sapiens
  siRNA target sequence for KCNAB1 (NM_172159.1,669-687).
gcctcagcatcacatttct

SEQ ID NO: 260934 - DNA, 19 bp, Homo sapiens
  siRNA target sequence for KCNAB1 (NM_172159.1,709-727).
cagactggcatgaaatata

SEQ ID NO: 260935 - DNA, 19 bp, Homo sapiens
  siRNA target sequence for KCNAB1 (NM_172159.1,717-735).
catgaaatataggaatctt

SEQ ID NO: 260936 - DNA, 19 bp, Homo sapiens
  siRNA target sequence for KCNAB1 (NM_172160.1,99-117).
gagaacaccaagttaagga

SEQ ID NO: 260937 - DNA, 19 bp, Homo sapiens
  siRNA target sequence for KCNAB1 (NM_172160.1,133-151).
ctgtagcagggaaagacaa

SEQ ID NO: 260938 - DNA, 19 bp, Homo sapiens
  siRNA target sequence for KCNAB1 (NM_172160.1,166-184).
cctcagaaaacgctaaaga

SEQ ID NO: 260939 - DNA, 19 bp, Homo sapiens
  siRNA target sequence for KCNAB1 (NM_172160.1,243-261).
cgcgaagtggagatgaact

SEQ ID NO: 260940 - DNA, 19 bp, Homo sapiens
  siRNA target sequence for KCNAB1 (NM_172160.1,317-335).
catgccgcacaggaatctt

SEQ ID NO: 260941 - DNA, 19 bp, Homo sapiens
  siRNA target sequence for KCNAB2 (NM_003636.2,262-280).
gtatgggagtcccaaaaga

SEQ ID NO: 260942 - DNA, 19 bp, Homo sapiens
  siRNA target sequence for KCNAB2 (NM_003636.2,363-381).
gccagatcaccgatgagat

SEQ ID NO: 260943 - DNA, 19 bp, Homo sapiens
  siRNA target sequence for KCNAB2 (NM_003636.2,394-412).
catgaccttggcctatgat

SEQ ID NO: 260944 - DNA, 19 bp, Homo sapiens
  siRNA target sequence for KCNAB2 (NM_003636.2,416-434).
ggcatcaacctcttcgata

SEQ ID NO: 260945 - DNA, 19 bp, Homo sapiens
  siRNA target sequence for KCNAB2 (NM_003636.2,467-485).
gtggtactgggaaacatca

SEQ ID NO: 260946 - DNA, 19 bp, Homo sapiens
  siRNA target sequence for KCNAB2 (NM_003636.2,469-487).
ggtactgggaaacatcatt

SEQ ID NO: 260947 - DNA, 19 bp, Homo sapiens
  siRNA target sequence for KCNAB2 (NM_003636.2,583-601).
cataatcgaaggtctgaaa

SEQ ID NO: 260948 - DNA, 19 bp, Homo sapiens
  siRNA target sequence for KCNAB2 (NM_003636.2,713-731).
caggggatggccatgtact

SEQ ID NO: 260949 - DNA, 19 bp, Homo sapiens
  siRNA target sequence for KCNAB2 (NM_003636.2,832-850).
catgttccagcgtgagaaa

SEQ ID NO: 260950 - DNA, 19 bp, Homo sapiens
  siRNA target sequence for KCNAB2 (NM_003636.2,867-885).
cggagctgttccacaagat

SEQ ID NO: 260951 - DNA, 19 bp, Homo sapiens
  siRNA target sequence for KCNAB2 (NM_003636.2,1190-1208).
caggtccttccgaaactgt

SEQ ID NO: 260952 - DNA, 19 bp, Homo sapiens
  siRNA target sequence for KCNAB2 (NM_003636.2,1215-1233).
ccattatccacgagattga

SEQ ID NO: 260953 - DNA, 19 bp, Homo sapiens
  siRNA target sequence for KCNAB2 (NM_003636.2,1216-1234).
cattatccacgagattgat

SEQ ID NO: 260954 - DNA, 19 bp, Homo sapiens
  siRNA target sequence for KCNAB2 (NM_003636.2,1222-1240).
ccacgagattgatagtatt

SEQ ID NO: 260955 - DNA, 19 bp, Homo sapiens
  siRNA target sequence for KCNAB3 (NM_004732.2,220-238).
cgaggcactggcatgaaat

SEQ ID NO: 260956 - DNA, 19 bp, Homo sapiens
  siRNA target sequence for KCNAB3 (NM_004732.2,223-241).
ggcactggcatgaaataca

SEQ ID NO: 260957 - DNA, 19 bp, Homo sapiens
  siRNA target sequence for KCNAB3 (NM_004732.2,361-379).
ggtgtaaacctgtttgaca

SEQ ID NO: 260958 - DNA, 19 bp, Homo sapiens
  siRNA target sequence for KCNAB3 (NM_004732.2,449-467).
ggagatcaagctatgtcat

SEQ ID NO: 260959 - DNA, 19 bp, Homo sapiens
  siRNA target sequence for KCNAB3 (NM_004732.2,499-517).
gaaaccgagcgaggtttaa

SEQ ID NO: 260960 - DNA, 19 bp, Homo sapiens
  siRNA target sequence for KCNAB3 (NM_004732.2,518-536).
gccgaaagcacatcattga

SEQ ID NO: 260961 - DNA, 19 bp, Homo sapiens
  siRNA target sequence for KCNAB3 (NM_004732.2,571-589).
ggatacgtggacattgtct

SEQ ID NO: 260962 - DNA, 19 bp, Homo sapiens
  siRNA target sequence for KCNAB3 (NM_004732.2,572-590).
gatacgtggacattgtctt

SEQ ID NO: 260963 - DNA, 19 bp, Homo sapiens
  siRNA target sequence for KCNAB3 (NM_004732.2,634-652).
cgagccatgacctatgtca

SEQ ID NO: 260964 - DNA, 19 bp, Homo sapiens
  siRNA target sequence for KCNAB3 (NM_004732.2,767-785).
cggagcaccatctgtttca

SEQ ID NO: 260965 - DNA, 19 bp, Homo sapiens
  siRNA target sequence for KCNAB3 (NM_004732.2,862-880).
gcctgtggtctcattacta

SEQ ID NO: 260966 - DNA, 19 bp, Homo sapiens
  siRNA target sequence for KCNAB3 (NM_004732.2,892-910).
gggcgagtcccagatactt

SEQ ID NO: 260967 - DNA, 19 bp, Homo sapiens
  siRNA target sequence for KCNAB3 (NM_004732.2,1028-1046).
ccgtggcccagcttgctat

SEQ ID NO: 260968 - DNA, 19 bp, Homo sapiens
  siRNA target sequence for KCNAB3 (NM_004732.2,1029-1047).
cgtggcccagcttgctatt

SEQ ID NO: 260969 - DNA, 19 bp, Homo sapiens
  siRNA target sequence for KCNAB3 (NM_004732.2,1097-1115).
cgagtgcggagcagttgat

SEQ ID NO: 260970 - DNA, 19 bp, Homo sapiens
  siRNA target sequence for KCNAB3 (NM_004732.2,1098-1116).
gagtgcggagcagttgata

SEQ ID NO: 260971 - DNA, 19 bp, Homo sapiens
  siRNA target sequence for KCNAB3 (NM_004732.2,1100-1118).
gtgcggagcagttgataga

SEQ ID NO: 260972 - DNA, 19 bp, Homo sapiens
  siRNA target sequence for KCNE2 (NM_172201.1,180-198).
gtcttccgaaggattttta

SEQ ID NO: 260973 - DNA, 19 bp, Homo sapiens
  siRNA target sequence for KCNE2 (NM_172201.1,245-263).
ggccctccaagccaaagtt

SEQ ID NO: 260974 - DNA, 19 bp, Homo sapiens
  siRNA target sequence for KCNE2 (NM_172201.1,293-311).
gtacctcatggtgatgatt

SEQ ID NO: 260975 - DNA, 19 bp, Homo sapiens
  siRNA target sequence for KCNE2 (NM_172201.1,345-363).
gtgagcactgtgaaatcca

SEQ ID NO: 260976 - DNA, 19 bp, Homo sapiens
  siRNA target sequence for KCNE2 (NM_172201.1,431-449).
gagccaaatcttgaatcta

SEQ ID NO: 260977 - DNA, 19 bp, Homo sapiens
  siRNA target sequence for KCNE2 (NM_172201.1,483-501).
ggtgcggctgggttcaaaa

SEQ ID NO: 260978 - DNA, 19 bp, Homo sapiens
  siRNA target sequence for KCNE2 (NM_172201.1,486-504).
gcggctgggttcaaaatgt

SEQ ID NO: 260979 - DNA, 19 bp, Homo sapiens
  siRNA target sequence for KCNE3 (NM_005472.2,238-256).
ccgtgctgaaggctctaaa

SEQ ID NO: 260980 - DNA, 19 bp, Homo sapiens
  siRNA target sequence for KCNE3 (NM_005472.2,239-257).
cgtgctgaaggctctaaat

SEQ ID NO: 260981 - DNA, 19 bp, Homo sapiens
  siRNA target sequence for KCNE3 (NM_005472.2,262-280).
ctcttcacagcaatttgct

SEQ ID NO: 260982 - DNA, 19 bp, Homo sapiens
  siRNA target sequence for KCNE3 (NM_005472.2,351-369).
gatgacaactcctacatgt

SEQ ID NO: 260983 - DNA, 19 bp, Homo sapiens
  siRNA target sequence for KCNE3 (NM_005472.2,356-374).
caactcctacatgtacatt

SEQ ID NO: 260984 - DNA, 19 bp, Homo sapiens
  siRNA target sequence for KCNE3 (NM_005472.2,361-379).
cctacatgtacattctctt

SEQ ID NO: 260985 - DNA, 19 bp, Homo sapiens
  siRNA target sequence for KCNE3 (NM_005472.2,452-470).
gcgtagtgacccctatcat

SEQ ID NO: 260986 - DNA, 19 bp, Homo sapiens
  siRNA target sequence for KCNE3 (NM_005472.2,454-472).
gtagtgacccctatcatgt

SEQ ID NO: 260987 - DNA, 19 bp, Homo sapiens
  siRNA target sequence for KCNE3 (NM_005472.2,457-475).
gtgacccctatcatgtgta

SEQ ID NO: 260988 - DNA, 19 bp, Homo sapiens
  siRNA target sequence for KCNE3 (NM_005472.2,459-477).
gacccctatcatgtgtata

SEQ ID NO: 260989 - DNA, 19 bp, Homo sapiens
  siRNA target sequence for KCNE3 (NM_005472.2,462-480).
ccctatcatgtgtatatca

SEQ ID NO: 260990 - DNA, 19 bp, Homo sapiens
  siRNA target sequence for KCNE3 (NM_005472.2,463-481).
cctatcatgtgtatatcaa

SEQ ID NO: 260991 - DNA, 19 bp, Homo sapiens
  siRNA target sequence for KCNE4 (NM_080671.1,188-206).
caacgagtacttctacatt

SEQ ID NO: 260992 - DNA, 19 bp, Homo sapiens
  siRNA target sequence for KCNE4 (NM_080671.1,220-238).
ccttctacggcattttctt

SEQ ID NO: 260993 - DNA, 19 bp, Homo sapiens
  siRNA target sequence for KCNE4 (NM_080671.1,577-595).
cggagaacatccatcagaa

SEQ ID NO: 260994 - DNA, 19 bp, Homo sapiens
  siRNA target sequence for KCNG3 (NM_133329.4,765-783).
gagcgcaacgagtacttct

SEQ ID NO: 260995 - DNA, 19 bp, Homo sapiens
  siRNA target sequence for KCNG3 (NM_133329.4,874-892).
ccttctacaacgagatgat

SEQ ID NO: 260996 - DNA, 19 bp, Homo sapiens
  siRNA target sequence for KCNG3 (NM_133329.4,1249-1267).
gggagccctccgggataat

SEQ ID NO: 260997 - DNA, 19 bp, Homo sapiens
  siRNA target sequence for KCNG3 (NM_133329.4,1250-1268).
ggagccctccgggataatt

SEQ ID NO: 260998 - DNA, 19 bp, Homo sapiens
  siRNA target sequence for KCNG3 (NM_133329.4,1253-1271).
gccctccgggataattgaa

SEQ ID NO: 260999 - DNA, 19 bp, Homo sapiens
  siRNA target sequence for KCNG3 (NM_133329.4,1269-1287).
gaagctatctgcataggtt

SEQ ID NO: 261000 - DNA, 19 bp, Homo sapiens
  siRNA target sequence for KCNG3 (NM_133329.4,1301-1319).
gtgcatcgtgaggttcatt

SEQ ID NO: 261001 - DNA, 19 bp, Homo sapiens
  siRNA target sequence for KCNG3 (NM_133329.4,1303-1321).
gcatcgtgaggttcattgt

SEQ ID NO: 261002 - DNA, 19 bp, Homo sapiens
  siRNA target sequence for KCNG3 (NM_133329.4,1377-1395).
gcaatcacgccgtattaca

SEQ ID NO: 261003 - DNA, 19 bp, Homo sapiens
  siRNA target sequence for KCNG3 (NM_133329.4,1378-1396).
caatcacgccgtattacat

SEQ ID NO: 261004 - DNA, 19 bp, Homo sapiens
  siRNA target sequence for KCNG3 (NM_133329.4,1403-1421).
gttgatgacagtgtttaca

SEQ ID NO: 261005 - DNA, 19 bp, Homo sapiens
  siRNA target sequence for KCNG3 (NM_133329.4,1452-1470).
gtcaccttgagggtactta

SEQ ID NO: 261006 - DNA, 19 bp, Homo sapiens
  siRNA target sequence for KCNG3 (NM_133329.4,1454-1472).
caccttgagggtacttaga

SEQ ID NO: 261007 - DNA, 19 bp, Homo sapiens
  siRNA target sequence for KCNG3 (NM_133329.4,1533-1551).
ggtttgactctcaaacgtt

SEQ ID NO: 261008 - DNA, 19 bp, Homo sapiens
  siRNA target sequence for KCNG3 (NM_133329.4,1552-1570).
gctaccgagagatggttat

SEQ ID NO: 261009 - DNA, 19 bp, Homo sapiens
  siRNA target sequence for KCNG3 (NM_133329.4,1683-1701).
gcctgctggtgggtgatta

SEQ ID NO: 261010 - DNA, 19 bp, Homo sapiens
  siRNA target sequence for KCNG3 (NM_133329.4,1688-1706).
ctggtgggtgattatctct

SEQ ID NO: 261011 - DNA, 19 bp, Homo sapiens
  siRNA target sequence for KCNG3 (NM_133329.4,1690-1708).
ggtgggtgattatctctat

SEQ ID NO: 261012 - DNA, 19 bp, Homo sapiens
  siRNA target sequence for KCNG3 (NM_133329.4,1695-1713).
gtgattatctctatgacta

SEQ ID NO: 261013 - DNA, 19 bp, Homo sapiens
  siRNA target sequence for KCNG3 (NM_133329.4,1779-1797).
gtcagtggaattgttctat

SEQ ID NO: 261014 - DNA, 19 bp, Homo sapiens
  siRNA target sequence for KCNG3 (NM_133329.4,1799-1817).
ggcattacctatcactttt

SEQ ID NO: 261015 - DNA, 19 bp, Homo sapiens
  siRNA target sequence for KCNG3 (NM_133329.4,1813-1831).
cttttatctaccatagctt

SEQ ID NO: 261016 - DNA, 19 bp, Homo sapiens
  siRNA target sequence for KCNG3 (NM_133329.4,1840-1858).
gttatcatgagctcaagtt

SEQ ID NO: 261017 - DNA, 19 bp, Homo sapiens
  siRNA target sequence for KCNG3 (NM_133329.4,1879-1897).
ggagcctctccactgaatt

SEQ ID NO: 261018 - DNA, 19 bp, Homo sapiens
  siRNA target sequence for KCNG3 (NM_133329.4,1882-1900).
gcctctccactgaattcct

SEQ ID NO: 261019 - DNA, 19 bp, Homo sapiens
  siRNA target sequence for KCNG3 (NM_172344.1,1215-1233).
gatgaccggagcaggataa

SEQ ID NO: 261020 - DNA, 19 bp, Homo sapiens
  siRNA target sequence for KCNG3 (NM_172344.1,1220-1238).
ccggagcaggataattgaa

SEQ ID NO: 261021 - DNA, 19 bp, Homo sapiens
  siRNA target sequence for KCNH6 (NM_030779.2,99-117).
cacgtcgctccccaaaaca

SEQ ID NO: 261022 - DNA, 19 bp, Homo sapiens
  siRNA target sequence for KCNH6 (NM_030779.2,101-119).
cgtcgctccccaaaacact

SEQ ID NO: 261023 - DNA, 19 bp, Homo sapiens
  siRNA target sequence for KCNH6 (NM_030779.2,102-120).
gtcgctccccaaaacactt

SEQ ID NO: 261024 - DNA, 19 bp, Homo sapiens
  siRNA target sequence for KCNH6 (NM_030779.2,625-643).
cacagttcacgctcaactt

SEQ ID NO: 261025 - DNA, 19 bp, Homo sapiens
  siRNA target sequence for KCNH6 (NM_030779.2,676-694).
gctccaccacggagattga

SEQ ID NO: 261026 - DNA, 19 bp, Homo sapiens
  siRNA target sequence for KCNH6 (NM_030779.2,679-697).
ccaccacggagattgagat

SEQ ID NO: 261027 - DNA, 19 bp, Homo sapiens
  siRNA target sequence for KCNH6 (NM_030779.2,948-966).
cgtggggcctgcagctata

SEQ ID NO: 261028 - DNA, 19 bp, Homo sapiens
  siRNA target sequence for KCNH6 (NM_030779.2,1046-1064).
ctatgtcaacaccaatgat

SEQ ID NO: 261029 - DNA, 19 bp, Homo sapiens
  siRNA target sequence for KCNH6 (NM_030779.2,1191-1209).
ctgattgggctattgaaga

SEQ ID NO: 261030 - DNA, 19 bp, Homo sapiens
  siRNA target sequence for KCNH6 (NM_030779.2,1250-1268).
ggaccgctactctgagtat

SEQ ID NO: 261031 - DNA, 19 bp, Homo sapiens
  siRNA target sequence for KCNH6 (NM_030779.2,1450-1468).
cctcggtgcaggacaagta

SEQ ID NO: 261032 - DNA, 19 bp, Homo sapiens
  siRNA target sequence for KCNH6 (NM_030779.2,1451-1469).
ctcggtgcaggacaagtat

SEQ ID NO: 261033 - DNA, 19 bp, Homo sapiens
  siRNA target sequence for KCNH6 (NM_030779.2,1470-1488).
gtcacagccctctacttca

SEQ ID NO: 261034 - DNA, 19 bp, Homo sapiens
  siRNA target sequence for KCNH6 (NM_030779.2,1893-1911).
gcgctagccgtcaagttca

SEQ ID NO: 261035 - DNA, 19 bp, Homo sapiens
  siRNA target sequence for KCNH6 (NM_030779.2,1894-1912).
cgctagccgtcaagttcaa

SEQ ID NO: 261036 - DNA, 19 bp, Homo sapiens
  siRNA target sequence for KCNH6 (NM_030779.2,1896-1914).
ctagccgtcaagttcaaga

SEQ ID NO: 261037 - DNA, 19 bp, Homo sapiens
  siRNA target sequence for KCNH6 (NM_030779.2,2272-2290).
gccaagaccaccaaggttt

SEQ ID NO: 261038 - DNA, 19 bp, Homo sapiens
  siRNA target sequence for KCNH6 (NM_030779.2,2844-2862).
gctgtggcaacggacaaaa

SEQ ID NO: 261039 - DNA, 19 bp, Homo sapiens
  siRNA target sequence for KCNQ2 (NM_172106.1,1290-1308).
gtacagttcgcaaactcaa

SEQ ID NO: 261040 - DNA, 19 bp, Homo sapiens
  siRNA target sequence for KCNQ2 (NM_172109.1,1317-1335).
caccaagcaactgtttcat

SEQ ID NO: 261041 - DNA, 19 bp, Homo sapiens
  siRNA target sequence for KCNQ2 (NM_004518.2,676-694).
ccgttctgtgtgattgaca

SEQ ID NO: 261042 - DNA, 19 bp, Homo sapiens
  siRNA target sequence for KCNQ2 (NM_004518.2,914-932).
cctcgttcctggtgtactt

SEQ ID NO: 261043 - DNA, 19 bp, Homo sapiens
  siRNA target sequence for KCNQ2 (NM_004518.2,944-962).
gggagaacgaccactttga

SEQ ID NO: 261044 - DNA, 19 bp, Homo sapiens
  siRNA target sequence for KCNQ2 (NM_004518.2,946-964).
gagaacgaccactttgaca

SEQ ID NO: 261045 - DNA, 19 bp, Homo sapiens
  siRNA target sequence for KCNQ2 (NM_004518.2,1276-1294).
gtcaccgtgcccatgtaca

SEQ ID NO: 261046 - DNA, 19 bp, Homo sapiens
  siRNA target sequence for KCNQ2 (NM_004518.2,1658-1676).
gctgcccctgcgagtttgt

SEQ ID NO: 261047 - DNA, 19 bp, Homo sapiens
  siRNA target sequence for KCNQ2 (NM_004518.2,1822-1840).
gacatgctgtcccgaatta

SEQ ID NO: 261048 - DNA, 19 bp, Homo sapiens
  siRNA target sequence for KCNQ2 (NM_004518.2,2138-2156).
ggcacggctgcattgtcaa

SEQ ID NO: 261049 - DNA, 19 bp, Homo sapiens
  siRNA target sequence for KCNQ2 (NM_004518.2,2177-2195).
ccacgggccagaagaactt

SEQ ID NO: 261050 - DNA, 19 bp, Homo sapiens
  siRNA target sequence for KCNQ2 (NM_004518.2,2577-2595).
caaagtcaggccctacatt

SEQ ID NO: 261051 - DNA, 19 bp, Homo sapiens
  siRNA target sequence for KCNQ3 (NM_004519.2,541-559).
cgcatccaaactttgatct

SEQ ID NO: 261052 - DNA, 19 bp, Homo sapiens
  siRNA target sequence for KCNQ3 (NM_004519.2,542-560).
gcatccaaactttgatcta

SEQ ID NO: 261053 - DNA, 19 bp, Homo sapiens
  siRNA target sequence for KCNQ3 (NM_004519.2,761-779).
gatgttgctgccgatacaa

SEQ ID NO: 261054 - DNA, 19 bp, Homo sapiens
  siRNA target sequence for KCNQ3 (NM_004519.2,861-879).
ggttgctgtgggaaaccaa

SEQ ID NO: 261055 - DNA, 19 bp, Homo sapiens
  siRNA target sequence for KCNQ3 (NM_004519.2,1203-1221).
gtgggaaggccgtctgatt

SEQ ID NO: 261056 - DNA, 19 bp, Homo sapiens
  siRNA target sequence for KCNQ3 (NM_004519.2,1216-1234).
ctgattgccgccacctttt

SEQ ID NO: 261057 - DNA, 19 bp, Homo sapiens
  siRNA target sequence for KCNQ3 (NM_004519.2,1222-1240).
gccgccaccttttccttaa

SEQ ID NO: 261058 - DNA, 19 bp, Homo sapiens
  siRNA target sequence for KCNQ3 (NM_004519.2,1365-1383).
ggctgcctggaggtattat

SEQ ID NO: 261059 - DNA, 19 bp, Homo sapiens
  siRNA target sequence for KCNQ3 (NM_004519.2,1369-1387).
gcctggaggtattatgcta

SEQ ID NO: 261060 - DNA, 19 bp, Homo sapiens
  siRNA target sequence for KCNQ3 (NM_004519.2,1410-1428).
ggtggcgacatggagattt

SEQ ID NO: 261061 - DNA, 19 bp, Homo sapiens
  siRNA target sequence for KCNQ3 (NM_004519.2,1413-1431).
ggcgacatggagattttat

SEQ ID NO: 261062 - DNA, 19 bp, Homo sapiens
  siRNA target sequence for KCNQ3 (NM_004519.2,1415-1433).
cgacatggagattttatga

SEQ ID NO: 261063 - DNA, 19 bp, Homo sapiens
  siRNA target sequence for KCNQ3 (NM_004519.2,1436-1454).
cagtcgtctcttttccttt

SEQ ID NO: 261064 - DNA, 19 bp, Homo sapiens
  siRNA target sequence for KCNQ3 (NM_004519.2,1507-1525).
gatcgggttcgcctttcta

SEQ ID NO: 261065 - DNA, 19 bp, Homo sapiens
  siRNA target sequence for KCNQ3 (NM_004519.2,1512-1530).
ggttcgcctttctaatcct

SEQ ID NO: 261066 - DNA, 19 bp, Homo sapiens
  siRNA target sequence for KCNQ3 (NM_004519.2,1528-1546).
cctcgtggtagcaatacta

SEQ ID NO: 261067 - DNA, 19 bp, Homo sapiens
  siRNA target sequence for KCNQ3 (NM_004519.2,1529-1547).
ctcgtggtagcaatactaa

SEQ ID NO: 261068 - DNA, 19 bp, Homo sapiens
  siRNA target sequence for KCNQ3 (NM_004519.2,1534-1552).
ggtagcaatactaaaggaa

SEQ ID NO: 261069 - DNA, 19 bp, Homo sapiens
  siRNA target sequence for KCNQ3 (NM_004519.2,1535-1553).
gtagcaatactaaaggaaa

SEQ ID NO: 261070 - DNA, 19 bp, Homo sapiens
  siRNA target sequence for KCNQ3 (NM_004519.2,1539-1557).
caatactaaaggaaagcta

SEQ ID NO: 261071 - DNA, 19 bp, Homo sapiens
  siRNA target sequence for KCNQ3 (NM_004519.2,1554-1572).
gctatttacccctctgaat

SEQ ID NO: 261072 - DNA, 19 bp, Homo sapiens
  siRNA target sequence for KCNQ3 (NM_004519.2,1573-1591).
gtagatgccatagaagaaa

SEQ ID NO: 261073 - DNA, 19 bp, Homo sapiens
  siRNA target sequence for KCNQ3 (NM_004519.2,1644-1662).
cacggccttccgcatgaaa

SEQ ID NO: 261074 - DNA, 19 bp, Homo sapiens
  siRNA target sequence for KCNQ3 (NM_004519.2,1778-1796).
ccatccgagccgtcagaat

SEQ ID NO: 261075 - DNA, 19 bp, Homo sapiens
  siRNA target sequence for KCNQ3 (NM_004519.2,1779-1797).
catccgagccgtcagaatt

SEQ ID NO: 261076 - DNA, 19 bp, Homo sapiens
  siRNA target sequence for KCNQ3 (NM_004519.2,1782-1800).
ccgagccgtcagaattcta

SEQ ID NO: 261077 - DNA, 19 bp, Homo sapiens
  siRNA target sequence for KCNQ3 (NM_004519.2,1786-1804).
gccgtcagaattctacaat

SEQ ID NO: 261078 - DNA, 19 bp, Homo sapiens
  siRNA target sequence for KCNQ3 (NM_004519.2,1787-1805).
ccgtcagaattctacaatt

SEQ ID NO: 261079 - DNA, 19 bp, Homo sapiens
  siRNA target sequence for KCNQ3 (NM_004519.2,1833-1851).
gactttgaggccttacgat

SEQ ID NO: 261080 - DNA, 19 bp, Homo sapiens
  siRNA target sequence for KCNQ3 (NM_004519.2,1858-1876).
gatgtgattgagcagtatt

SEQ ID NO: 261081 - DNA, 19 bp, Homo sapiens
  siRNA target sequence for KCNQ3 (NM_004519.2,1882-1900).
gggcatctcgacatgcttt

SEQ ID NO: 261082 - DNA, 19 bp, Homo sapiens
  siRNA target sequence for KCNQ3 (NM_004519.2,1911-1929).
gtaccttcagacgagaata

SEQ ID NO: 261083 - DNA, 19 bp, Homo sapiens
  siRNA target sequence for KCNQ3 (NM_004519.2,1914-1932).
ccttcagacgagaatagat

SEQ ID NO: 261084 - DNA, 19 bp, Homo sapiens
  siRNA target sequence for KCNQ3 (NM_004519.2,1915-1933).
cttcagacgagaatagata

SEQ ID NO: 261085 - DNA, 19 bp, Homo sapiens
  siRNA target sequence for KCNQ3 (NM_004519.2,1952-1970).
ctccctccacgccaaaaca

SEQ ID NO: 261086 - DNA, 19 bp, Homo sapiens
  siRNA target sequence for KCNQ3 (NM_004519.2,2045-2063).
gaccatccacatcagaaat

SEQ ID NO: 261087 - DNA, 19 bp, Homo sapiens
  siRNA target sequence for KCNQ3 (NM_004519.2,2076-2094).
catgatggggaagtttgta

SEQ ID NO: 261088 - DNA, 19 bp, Homo sapiens
  siRNA target sequence for KCNQ3 (NM_004519.2,2179-2197).
gtgcaggtcacggagtatt

SEQ ID NO: 261089 - DNA, 19 bp, Homo sapiens
  siRNA target sequence for KCNQ3 (NM_004519.2,2250-2268).
caggtattccgatttgaaa

SEQ ID NO: 261090 - DNA, 19 bp, Homo sapiens
  siRNA target sequence for KCNQ3 (NM_004519.2,2260-2278).
gatttgaaaaccatcatct

SEQ ID NO: 261091 - DNA, 19 bp, Homo sapiens
  siRNA target sequence for KCNQ3 (NM_004519.2,2325-2343).
ccaggtgaccattgacaaa

SEQ ID NO: 261092 - DNA, 19 bp, Homo sapiens
  siRNA target sequence for KCNQ3 (NM_004519.2,2346-2364).
cagcccctatgggtttttt

SEQ ID NO: 261093 - DNA, 19 bp, Homo sapiens
  siRNA target sequence for KCNQ3 (NM_004519.2,2459-2477).
ccacggtcctgcctatctt

SEQ ID NO: 261094 - DNA, 19 bp, Homo sapiens
  siRNA target sequence for KCNQ3 (NM_004519.2,2654-2672).
cccaggacagagatgatta

SEQ ID NO: 261095 - DNA, 19 bp, Homo sapiens
  siRNA target sequence for KCNQ3 (NM_004519.2,2790-2808).
cacaggggatgggatttct

SEQ ID NO: 261096 - DNA, 19 bp, Homo sapiens
  siRNA target sequence for KCNQ3 (NM_004519.2,2815-2833).
gtatggaccccttccaata

SEQ ID NO: 261097 - DNA, 19 bp, Homo sapiens
  siRNA target sequence for KCNQ4 (NM_004700.2,379-397).
cgtctaccacgtcttcata

SEQ ID NO: 261098 - DNA, 19 bp, Homo sapiens
  siRNA target sequence for KCNQ4 (NM_004700.2,380-398).
gtctaccacgtcttcatat

SEQ ID NO: 261099 - DNA, 19 bp, Homo sapiens
  siRNA target sequence for KCNQ4 (NM_004700.2,382-400).
ctaccacgtcttcatattt

SEQ ID NO: 261100 - DNA, 19 bp, Homo sapiens
  siRNA target sequence for KCNQ4 (NM_004700.2,992-1010).
gccttactgggcatctctt

SEQ ID NO: 261101 - DNA, 19 bp, Homo sapiens
  siRNA target sequence for KCNQ4 (NM_004700.2,1136-1154).
ctgtactccaccgatatga

SEQ ID NO: 261102 - DNA, 19 bp, Homo sapiens
  siRNA target sequence for KCNQ4 (NM_004700.2,1170-1188).
cagccacctggtactacta

SEQ ID NO: 261103 - DNA, 19 bp, Homo sapiens
  siRNA target sequence for KCNQ4 (NM_004700.2,1173-1191).
ccacctggtactactatga

SEQ ID NO: 261104 - DNA, 19 bp, Homo sapiens
  siRNA target sequence for KCNQ4 (NM_004700.2,1179-1197).
ggtactactatgacagtat

SEQ ID NO: 261105 - DNA, 19 bp, Homo sapiens
  siRNA target sequence for KCNQ4 (NM_004700.2,1212-1230).
gagagctggccctcttgtt

SEQ ID NO: 261106 - DNA, 19 bp, Homo sapiens
  siRNA target sequence for KCNQ4 (NM_004700.2,1377-1395).
gccggatgggcatcaaaga

SEQ ID NO: 261107 - DNA, 19 bp, Homo sapiens
  siRNA target sequence for KCNQ4 (NM_004700.2,1685-1703).
cgctccatcaggattctca

SEQ ID NO: 261108 - DNA, 19 bp, Homo sapiens
  siRNA target sequence for KCNQ4 (NM_004700.2,1824-1842).
ctcgggtggaccaaattgt

SEQ ID NO: 261109 - DNA, 19 bp, Homo sapiens
  siRNA target sequence for KCNQ4 (NM_004700.2,1984-2002).
cctgctgttgggcttctat

SEQ ID NO: 261110 - DNA, 19 bp, Homo sapiens
  siRNA target sequence for KCNQ4 (NM_004700.2,1985-2003).
ctgctgttgggcttctatt

SEQ ID NO: 261111 - DNA, 19 bp, Homo sapiens
  siRNA target sequence for KCNV2 (NM_133497.2,356-374).
gagggcaactataactact

SEQ ID NO: 261112 - DNA, 19 bp, Homo sapiens
  siRNA target sequence for KCNV2 (NM_133497.2,647-665).
cagacagacgaatacttct

SEQ ID NO: 261113 - DNA, 19 bp, Homo sapiens
  siRNA target sequence for KCNV2 (NM_133497.2,777-795).
ggggcgtgcggctcaagta

SEQ ID NO: 261114 - DNA, 19 bp, Homo sapiens
  siRNA target sequence for KCNV2 (NM_133497.2,1690-1708).
ctacaacaagttttctgat

SEQ ID NO: 261115 - DNA, 19 bp, Homo sapiens
  siRNA target sequence for KCNV2 (NM_133497.2,1758-1776).
ggggagaggtgaacttcat

SEQ ID NO: 261116 - DNA, 19 bp, Homo sapiens
  siRNA target sequence for KCNMB1 (NM_004137.2,515-533).
ctgcccctctaccagaaaa

SEQ ID NO: 261117 - DNA, 19 bp, Homo sapiens
  siRNA target sequence for KCNMB1 (NM_004137.2,719-737).
ccaggcagcgtggacaatt

SEQ ID NO: 261118 - DNA, 19 bp, Homo sapiens
  siRNA target sequence for KCNMB1 (NM_004137.2,723-741).
gcagcgtggacaattacca

SEQ ID NO: 261119 - DNA, 19 bp, Homo sapiens
  siRNA target sequence for KCNMB1 (NM_004137.2,766-784).
ggtcagagccaaattccaa

SEQ ID NO: 261120 - DNA, 19 bp, Homo sapiens
  siRNA target sequence for KCNMB2 (NM_005832.3,386-404).
cctcctggacaaaaggaaa

SEQ ID NO: 261121 - DNA, 19 bp, Homo sapiens
  siRNA target sequence for KCNMB2 (NM_005832.3,427-445).
gagaggaccgagctattct

SEQ ID NO: 261122 - DNA, 19 bp, Homo sapiens
  siRNA target sequence for KCNMB2 (NM_005832.3,465-483).
gtgtgctccatcatgatgt

SEQ ID NO: 261123 - DNA, 19 bp, Homo sapiens
  siRNA target sequence for KCNMB2 (NM_005832.3,470-488).
ctccatcatgatgtatttt

SEQ ID NO: 261124 - DNA, 19 bp, Homo sapiens
  siRNA target sequence for KCNMB2 (NM_005832.3,502-520).
cactcctgcgctcatacat

SEQ ID NO: 261125 - DNA, 19 bp, Homo sapiens
  siRNA target sequence for KCNMB2 (NM_005832.3,564-582).
gcgtccatcacggaaacat

SEQ ID NO: 261126 - DNA, 19 bp, Homo sapiens
  siRNA target sequence for KCNMB2 (NM_005832.3,565-583).
cgtccatcacggaaacatt

SEQ ID NO: 261127 - DNA, 19 bp, Homo sapiens
  siRNA target sequence for KCNMB2 (NM_005832.3,568-586).
ccatcacggaaacatttaa

SEQ ID NO: 261128 - DNA, 19 bp, Homo sapiens
  siRNA target sequence for KCNMB2 (NM_005832.3,569-587).
catcacggaaacatttaat

SEQ ID NO: 261129 - DNA, 19 bp, Homo sapiens
  siRNA target sequence for KCNMB2 (NM_005832.3,637-655).
gcctccaggtgtacgttaa

SEQ ID NO: 261130 - DNA, 19 bp, Homo sapiens
  siRNA target sequence for KCNMB2 (NM_005832.3,769-787).
ccctggtgaatgttgtcat

SEQ ID NO: 261131 - DNA, 19 bp, Homo sapiens
  siRNA target sequence for KCNMB2 (NM_005832.3,807-825).
caacacttctcctgctatt

SEQ ID NO: 261132 - DNA, 19 bp, Homo sapiens
  siRNA target sequence for KCNMB2 (NM_005832.3,842-860).
ccagaagagtgttatccta

SEQ ID NO: 261133 - DNA, 19 bp, Homo sapiens
  siRNA target sequence for KCNMB2 (NM_005832.3,843-861).
cagaagagtgttatcctaa

SEQ ID NO: 261134 - DNA, 19 bp, Homo sapiens
  siRNA target sequence for KCNMB2 (NM_005832.3,848-866).
gagtgttatcctaacaaaa

SEQ ID NO: 261135 - DNA, 19 bp, Homo sapiens
  siRNA target sequence for KCNMB2 (NM_005832.3,850-868).
gtgttatcctaacaaaact

SEQ ID NO: 261136 - DNA, 19 bp, Homo sapiens
  siRNA target sequence for KCNMB2 (NM_005832.3,852-870).
gttatcctaacaaaactct

SEQ ID NO: 261137 - DNA, 19 bp, Homo sapiens
  siRNA target sequence for KCNMB2 (NM_005832.3,858-876).
ctaacaaaactctacagtt

SEQ ID NO: 261138 - DNA, 19 bp, Homo sapiens
  siRNA target sequence for KCNMB2 (NM_005832.3,939-957).
gttgccatggtgaaactta

SEQ ID NO: 261139 - DNA, 19 bp, Homo sapiens
  siRNA target sequence for KCNMB2 (NM_005832.3,943-961).
ccatggtgaaacttacaca

SEQ ID NO: 261140 - DNA, 19 bp, Homo sapiens
  siRNA target sequence for KCNMB2 (NM_005832.3,960-978).
cagtacctctccctactat

SEQ ID NO: 261141 - DNA, 19 bp, Homo sapiens
  siRNA target sequence for KCNMB2 (NM_005832.3,962-980).
gtacctctccctactatgt

SEQ ID NO: 261142 - DNA, 19 bp, Homo sapiens
  siRNA target sequence for KCNMB2 (NM_005832.3,983-1001).
gaggatccaacggatcaat

SEQ ID NO: 261143 - DNA, 19 bp, Homo sapiens
  siRNA target sequence for KCNMB2 (NM_005832.3,986-1004).
gatccaacggatcaataga

SEQ ID NO: 261144 - DNA, 19 bp, Homo sapiens
  siRNA target sequence for KCNMB3 (NM_014407.3,530-548).
ctctgaactgggatttcat

SEQ ID NO: 261145 - DNA, 19 bp, Homo sapiens
  siRNA target sequence for KCNMB3 (NM_014407.3,711-729).
ggcttctcagtcctaatgt

SEQ ID NO: 261146 - DNA, 19 bp, Homo sapiens
  siRNA target sequence for KCNMB3 (NM_014407.3,712-730).
gcttctcagtcctaatgtt

SEQ ID NO: 261147 - DNA, 19 bp, Homo sapiens
  siRNA target sequence for KCNMB3 (NM_014407.3,734-752).
cttgctcggaacaaccatt

SEQ ID NO: 261148 - DNA, 19 bp, Homo sapiens
  siRNA target sequence for KCNMB3 (NM_014407.3,737-755).
gctcggaacaaccattcta

SEQ ID NO: 261149 - DNA, 19 bp, Homo sapiens
  siRNA target sequence for KCNMB3 (NM_014407.3,738-756).
ctcggaacaaccattctaa

SEQ ID NO: 261150 - DNA, 19 bp, Homo sapiens
  siRNA target sequence for KCNMB3 (NM_014407.3,921-939).
cagaaagctctcctacatt

SEQ ID NO: 261151 - DNA, 19 bp, Homo sapiens
  siRNA target sequence for KCNMB3 (NM_014407.3,923-941).
gaaagctctcctacattat

SEQ ID NO: 261152 - DNA, 19 bp, Homo sapiens
  siRNA target sequence for KCNMB3 (NM_014407.3,1019-1037).
cagtgctctggacataaaa

SEQ ID NO: 261153 - DNA, 19 bp, Homo sapiens
  siRNA target sequence for KCNMB3 (NM_014407.3,1023-1041).
gctctggacataaaagaat

SEQ ID NO: 261154 - DNA, 19 bp, Homo sapiens
  siRNA target sequence for KCNMB3 (NM_014407.3,1084-1102).
gtccagccagccaatctga

SEQ ID NO: 261155 - DNA, 19 bp, Homo sapiens
  siRNA target sequence for KCNMB3 (NM_014407.3,1136-1154).
ggctatcttccactgttta

SEQ ID NO: 261156 - DNA, 19 bp, Homo sapiens
  siRNA target sequence for KCNMB3 (NM_014407.3,1137-1155).
gctatcttccactgtttat

SEQ ID NO: 261157 - DNA, 19 bp, Homo sapiens
  siRNA target sequence for KCNMB3 (NM_014407.3,1138-1156).
ctatcttccactgtttatt

SEQ ID NO: 261158 - DNA, 19 bp, Homo sapiens
  siRNA target sequence for KCNMB3 (NM_014407.3,1194-1212).
gttggcatggtgagattaa

SEQ ID NO: 261159 - DNA, 19 bp, Homo sapiens
  siRNA target sequence for KCNMB3 (NM_014407.3,1198-1216).
gcatggtgagattaacaca

SEQ ID NO: 261160 - DNA, 19 bp, Homo sapiens
  siRNA target sequence for KCNMB3 (NM_014407.3,1199-1217).
catggtgagattaacacaa

SEQ ID NO: 261161 - DNA, 19 bp, Homo sapiens
  siRNA target sequence for KCNMB3 (NM_014407.3,1225-1243).
ccttactgtgtgaaaaata

SEQ ID NO: 261162 - DNA, 19 bp, Homo sapiens
  siRNA target sequence for KCNMB3 (NM_014407.3,1293-1311).
cagcatcagttcaaactgt

SEQ ID NO: 261163 - DNA, 19 bp, Homo sapiens
  siRNA target sequence for KCNMB3 (NM_171828.1,355-373).
catccccgtgcaaatcaca

SEQ ID NO: 261164 - DNA, 19 bp, Homo sapiens
  siRNA target sequence for KCNMB4 (NM_014505.4,504-522).
catccggctcggcttgttt

SEQ ID NO: 261165 - DNA, 19 bp, Homo sapiens
  siRNA target sequence for KCNMB4 (NM_014505.4,509-527).
ggctcggcttgtttctcat

SEQ ID NO: 261166 - DNA, 19 bp, Homo sapiens
  siRNA target sequence for KCNMB4 (NM_014505.4,536-554).
gcgtcgtgtcgctcttcat

SEQ ID NO: 261167 - DNA, 19 bp, Homo sapiens
  siRNA target sequence for KCNMB4 (NM_014505.4,538-556).
gtcgtgtcgctcttcatct

SEQ ID NO: 261168 - DNA, 19 bp, Homo sapiens
  siRNA target sequence for KCNMB4 (NM_014505.4,858-876).
gtactggaaagatgagatt

SEQ ID NO: 261169 - DNA, 19 bp, Homo sapiens
  siRNA target sequence for HCN1 (NM_021072.1,35-53).
ggcggcaagcccaactctt

SEQ ID NO: 261170 - DNA, 19 bp, Homo sapiens
  siRNA target sequence for HCN1 (NM_021072.1,44-62).
cccaactcttcgtctaaca

SEQ ID NO: 261171 - DNA, 19 bp, Homo sapiens
  siRNA target sequence for HCN1 (NM_021072.1,457-475).
ctgggatttaataatgctt

SEQ ID NO: 261172 - DNA, 19 bp, Homo sapiens
  siRNA target sequence for HCN1 (NM_021072.1,513-531).
gaatcacattctttacaga

SEQ ID NO: 261173 - DNA, 19 bp, Homo sapiens
  siRNA target sequence for HCN1 (NM_021072.1,537-555).
caacaacaccatggattat

SEQ ID NO: 261174 - DNA, 19 bp, Homo sapiens
  siRNA target sequence for HCN1 (NM_021072.1,559-577).
caatgtggcatcagataca

SEQ ID NO: 261175 - DNA, 19 bp, Homo sapiens
  siRNA target sequence for HCN1 (NM_021072.1,563-581).
gtggcatcagatacagttt

SEQ ID NO: 261176 - DNA, 19 bp, Homo sapiens
  siRNA target sequence for HCN1 (NM_021072.1,570-588).
cagatacagttttcctatt

SEQ ID NO: 261177 - DNA, 19 bp, Homo sapiens
  siRNA target sequence for HCN1 (NM_021072.1,589-607).
ggacctgatcatgaatttt

SEQ ID NO: 261178 - DNA, 19 bp, Homo sapiens
  siRNA target sequence for HCN1 (NM_021072.1,612-630).
ctgggactgtcaatgaaga

SEQ ID NO: 261179 - DNA, 19 bp, Homo sapiens
  siRNA target sequence for HCN1 (NM_021072.1,622-640).
caatgaagacagttctgaa

SEQ ID NO: 261180 - DNA, 19 bp, Homo sapiens
  siRNA target sequence for HCN1 (NM_021072.1,659-677).
gtgatcaagatgaattatt

SEQ ID NO: 261181 - DNA, 19 bp, Homo sapiens
  siRNA target sequence for HCN1 (NM_021072.1,661-679).
gatcaagatgaattattta

SEQ ID NO: 261182 - DNA, 19 bp, Homo sapiens
  siRNA target sequence for HCN1 (NM_021072.1,692-710).
gtggttgacttcatctcat

SEQ ID NO: 261183 - DNA, 19 bp, Homo sapiens
  siRNA target sequence for HCN1 (NM_021072.1,708-726).
catccatcccagtggatta

SEQ ID NO: 261184 - DNA, 19 bp, Homo sapiens
  siRNA target sequence for HCN1 (NM_021072.1,715-733).
cccagtggattatatcttt

SEQ ID NO: 261185 - DNA, 19 bp, Homo sapiens
  siRNA target sequence for HCN1 (NM_021072.1,788-806).
cgcattgtgaggtttacaa

SEQ ID NO: 261186 - DNA, 19 bp, Homo sapiens
  siRNA target sequence for HCN1 (NM_021072.1,812-830).
ctcagtctcttgcgtttat

SEQ ID NO: 261187 - DNA, 19 bp, Homo sapiens
  siRNA target sequence for HCN1 (NM_021072.1,823-841).
gcgtttattacgactttca

SEQ ID NO: 261188 - DNA, 19 bp, Homo sapiens
  siRNA target sequence for HCN1 (NM_021072.1,824-842).
cgtttattacgactttcaa

SEQ ID NO: 261189 - DNA, 19 bp, Homo sapiens
  siRNA target sequence for HCN1 (NM_021072.1,833-851).
cgactttcaaggttaatta

SEQ ID NO: 261190 - DNA, 19 bp, Homo sapiens
  siRNA target sequence for HCN1 (NM_021072.1,840-858).
caaggttaattagatacat

SEQ ID NO: 261191 - DNA, 19 bp, Homo sapiens
  siRNA target sequence for HCN1 (NM_021072.1,843-861).
ggttaattagatacataca

SEQ ID NO: 261192 - DNA, 19 bp, Homo sapiens
  siRNA target sequence for HCN1 (NM_021072.1,906-924).
cagtggtgagaatttttaa

SEQ ID NO: 261193 - DNA, 19 bp, Homo sapiens
  siRNA target sequence for HCN1 (NM_021072.1,952-970).
ccactgggatggttgtctt

SEQ ID NO: 261194 - DNA, 19 bp, Homo sapiens
  siRNA target sequence for HCN1 (NM_021072.1,1007-1025).
gattgctgggtgtctttaa

SEQ ID NO: 261195 - DNA, 19 bp, Homo sapiens
  siRNA target sequence for HCN1 (NM_021072.1,1134-1152).
ctgacctctggattaccat

SEQ ID NO: 261196 - DNA, 19 bp, Homo sapiens
  siRNA target sequence for HCN1 (NM_021072.1,1230-1248).
cttcgaggcggcagtatca

SEQ ID NO: 261197 - DNA, 19 bp, Homo sapiens
  siRNA target sequence for HCN1 (NM_021072.1,1233-1251).
cgaggcggcagtatcaaga

SEQ ID NO: 261198 - DNA, 19 bp, Homo sapiens
  siRNA target sequence for HCN1 (NM_021072.1,1240-1258).
gcagtatcaagagaagtat

SEQ ID NO: 261199 - DNA, 19 bp, Homo sapiens
  siRNA target sequence for HCN1 (NM_021072.1,1241-1259).
cagtatcaagagaagtata

SEQ ID NO: 261200 - DNA, 19 bp, Homo sapiens
  siRNA target sequence for HCN1 (NM_021072.1,1299-1317).
ctgatatgcgtcagaagat

SEQ ID NO: 261201 - DNA, 19 bp, Homo sapiens
  siRNA target sequence for HCN1 (NM_021072.1,1306-1324).
gcgtcagaagatacatgat

SEQ ID NO: 261202 - DNA, 19 bp, Homo sapiens
  siRNA target sequence for HCN1 (NM_021072.1,1307-1325).
cgtcagaagatacatgatt

SEQ ID NO: 261203 - DNA, 19 bp, Homo sapiens
  siRNA target sequence for HCN1 (NM_021072.1,1312-1330).
gaagatacatgattactat

SEQ ID NO: 261204 - DNA, 19 bp, Homo sapiens
  siRNA target sequence for HCN1 (NM_021072.1,1327-1345).
ctatgaacacagataccaa

SEQ ID NO: 261205 - DNA, 19 bp, Homo sapiens
  siRNA target sequence for HCN1 (NM_021072.1,1433-1451).
gtggctacaatgcctttat

SEQ ID NO: 261206 - DNA, 19 bp, Homo sapiens
  siRNA target sequence for HCN1 (NM_021072.1,1454-1472).
gctaatgcggatcctaatt

SEQ ID NO: 261207 - DNA, 19 bp, Homo sapiens
  siRNA target sequence for HCN1 (NM_021072.1,1455-1473).
ctaatgcggatcctaattt

SEQ ID NO: 261208 - DNA, 19 bp, Homo sapiens
  siRNA target sequence for HCN1 (NM_021072.1,1460-1478).
gcggatcctaattttgtga

SEQ ID NO: 261209 - DNA, 19 bp, Homo sapiens
  siRNA target sequence for HCN1 (NM_021072.1,1481-1499).
gccatgctgagcaagttga

SEQ ID NO: 261210 - DNA, 19 bp, Homo sapiens
  siRNA target sequence for HCN1 (NM_021072.1,1498-1516).
gagatttgaggtgtttcaa

SEQ ID NO: 261211 - DNA, 19 bp, Homo sapiens
  siRNA target sequence for HCN1 (NM_021072.1,1510-1528).
gtttcaacctggagattat

SEQ ID NO: 261212 - DNA, 19 bp, Homo sapiens
  siRNA target sequence for HCN1 (NM_021072.1,1542-1560).
gagccgtgggtaaaaaaat

SEQ ID NO: 261213 - DNA, 19 bp, Homo sapiens
  siRNA target sequence for HCN1 (NM_021072.1,1545-1563).
ccgtgggtaaaaaaatgta

SEQ ID NO: 261214 - DNA, 19 bp, Homo sapiens
  siRNA target sequence for HCN1 (NM_021072.1,1580-1598).
gttgctggtgtcattacaa

SEQ ID NO: 261215 - DNA, 19 bp, Homo sapiens
  siRNA target sequence for HCN1 (NM_021072.1,1583-1601).
gctggtgtcattacaaaat

SEQ ID NO: 261216 - DNA, 19 bp, Homo sapiens
  siRNA target sequence for HCN1 (NM_021072.1,1621-1639).
gacagatggctcttacttt

SEQ ID NO: 261217 - DNA, 19 bp, Homo sapiens
  siRNA target sequence for HCN1 (NM_021072.1,1680-1698).
gtgttcgagctgatacata

SEQ ID NO: 261218 - DNA, 19 bp, Homo sapiens
  siRNA target sequence for HCN1 (NM_021072.1,1682-1700).
gttcgagctgatacatatt

SEQ ID NO: 261219 - DNA, 19 bp, Homo sapiens
  siRNA target sequence for HCN1 (NM_021072.1,1792-1810).
ccgactagatcgaatagga

SEQ ID NO: 261220 - DNA, 19 bp, Homo sapiens
  siRNA target sequence for HCN1 (NM_021072.1,1793-1811).
cgactagatcgaataggaa

SEQ ID NO: 261221 - DNA, 19 bp, Homo sapiens
  siRNA target sequence for HCN1 (NM_021072.1,1794-1812).
gactagatcgaataggaaa

SEQ ID NO: 261222 - DNA, 19 bp, Homo sapiens
  siRNA target sequence for HCN1 (NM_021072.1,1857-1875).
ctggtgttttcaacaatca

SEQ ID NO: 261223 - DNA, 19 bp, Homo sapiens
  siRNA target sequence for HCN1 (NM_021072.1,1928-1946).
gcaatcgctcccatcaatt

SEQ ID NO: 261224 - DNA, 19 bp, Homo sapiens
  siRNA target sequence for HCN1 (NM_021072.1,1929-1947).
caatcgctcccatcaatta

SEQ ID NO: 261225 - DNA, 19 bp, Homo sapiens
  siRNA target sequence for HCN1 (NM_021072.1,1942-1960).
caattatcctcaaatgaca

SEQ ID NO: 261226 - DNA, 19 bp, Homo sapiens
  siRNA target sequence for HCN1 (NM_021072.1,2157-2175).
ctctggccgctcgaacttt

SEQ ID NO: 261227 - DNA, 19 bp, Homo sapiens
  siRNA target sequence for HCN1 (NM_021072.1,2301-2319).
gcagctccacgccgaaaaa

SEQ ID NO: 261228 - DNA, 19 bp, Homo sapiens
  siRNA target sequence for HCN1 (NM_021072.1,2302-2320).
cagctccacgccgaaaaat

SEQ ID NO: 261229 - DNA, 19 bp, Homo sapiens
  siRNA target sequence for HCN1 (NM_021072.1,2304-2322).
gctccacgccgaaaaatga

SEQ ID NO: 261230 - DNA, 19 bp, Homo sapiens
  siRNA target sequence for HCN1 (NM_021072.1,2305-2323).
ctccacgccgaaaaatgaa

SEQ ID NO: 261231 - DNA, 19 bp, Homo sapiens
  siRNA target sequence for HCN1 (NM_021072.1,2307-2325).
ccacgccgaaaaatgaagt

SEQ ID NO: 261232 - DNA, 19 bp, Homo sapiens
  siRNA target sequence for HCN1 (NM_021072.1,2633-2651).
gaatcttcctcagtcttaa

SEQ ID NO: 261233 - DNA, 19 bp, Homo sapiens
  siRNA target sequence for KCNK10 (NM_021161.3,864-882).
ggagtcagtccaataggaa

SEQ ID NO: 261234 - DNA, 19 bp, Homo sapiens
  siRNA target sequence for KCNK10 (NM_021161.3,865-883).
gagtcagtccaataggaaa

SEQ ID NO: 261235 - DNA, 19 bp, Homo sapiens
  siRNA target sequence for KCNK10 (NM_021161.3,869-887).
cagtccaataggaaactct

SEQ ID NO: 261236 - DNA, 19 bp, Homo sapiens
  siRNA target sequence for KCNK10 (NM_021161.3,912-930).
ctcggcagtgcctttttct

SEQ ID NO: 261237 - DNA, 19 bp, Homo sapiens
  siRNA target sequence for KCNK10 (NM_021161.3,914-932).
cggcagtgcctttttcttt

SEQ ID NO: 261238 - DNA, 19 bp, Homo sapiens
  siRNA target sequence for KCNK10 (NM_021161.3,953-971).
catagggtatgggaatatt

SEQ ID NO: 261239 - DNA, 19 bp, Homo sapiens
  siRNA target sequence for KCNK10 (NM_021161.3,982-1000).
ctgaaggaggcaaaatctt

SEQ ID NO: 261240 - DNA, 19 bp, Homo sapiens
  siRNA target sequence for KCNK10 (NM_021161.3,988-1006).
gaggcaaaatcttttgtat

SEQ ID NO: 261241 - DNA, 19 bp, Homo sapiens
  siRNA target sequence for KCNK10 (NM_021161.3,1030-1048).
cactctttggtttcttatt

SEQ ID NO: 261242 - DNA, 19 bp, Homo sapiens
  siRNA target sequence for KCNK10 (NM_021161.3,1043-1061).
cttattggctggaattgga

SEQ ID NO: 261243 - DNA, 19 bp, Homo sapiens
  siRNA target sequence for KCNK10 (NM_021161.3,1103-1121).
ggagaaggtctttcgaaaa

SEQ ID NO: 261244 - DNA, 19 bp, Homo sapiens
  siRNA target sequence for KCNK10 (NM_021161.3,1109-1127).
ggtctttcgaaaaaagcaa

SEQ ID NO: 261245 - DNA, 19 bp, Homo sapiens
  siRNA target sequence for KCNK10 (NM_021161.3,1179-1197).
ggctgcattgtgtttgtga

SEQ ID NO: 261246 - DNA, 19 bp, Homo sapiens
  siRNA target sequence for KCNK10 (NM_021161.3,1206-1224).
gctgtcatctttaagtaca

SEQ ID NO: 261247 - DNA, 19 bp, Homo sapiens
  siRNA target sequence for KCNK10 (NM_021161.3,1237-1255).
cggccttggagtccattta

SEQ ID NO: 261248 - DNA, 19 bp, Homo sapiens
  siRNA target sequence for KCNK10 (NM_021161.3,1239-1257).
gccttggagtccatttact

SEQ ID NO: 261249 - DNA, 19 bp, Homo sapiens
  siRNA target sequence for KCNK10 (NM_021161.3,1240-1258).
ccttggagtccatttactt

SEQ ID NO: 261250 - DNA, 19 bp, Homo sapiens
  siRNA target sequence for KCNK10 (NM_021161.3,1279-1297).
cggtgggctttggtgattt

SEQ ID NO: 261251 - DNA, 19 bp, Homo sapiens
  siRNA target sequence for KCNK10 (NM_021161.3,1345-1363).
ccctagtgtggttttggat

SEQ ID NO: 261252 - DNA, 19 bp, Homo sapiens
  siRNA target sequence for KCNK10 (NM_021161.3,1386-1404).
gcagctgtcctcagtatga

SEQ ID NO: 261253 - DNA, 19 bp, Homo sapiens
  siRNA target sequence for KCNK10 (NM_021161.3,1387-1405).
cagctgtcctcagtatgat

SEQ ID NO: 261254 - DNA, 19 bp, Homo sapiens
  siRNA target sequence for KCNK10 (NM_021161.3,1416-1434).
ctacgggttctgtccaaaa

SEQ ID NO: 261255 - DNA, 19 bp, Homo sapiens
  siRNA target sequence for KCNK10 (NM_021161.3,1419-1437).
cgggttctgtccaaaaaga

SEQ ID NO: 261256 - DNA, 19 bp, Homo sapiens
  siRNA target sequence for KCNK10 (NM_021161.3,1634-1652).
cgagaagcgctctgtcttt

SEQ ID NO: 261257 - DNA, 19 bp, Homo sapiens
  siRNA target sequence for KCNK10 (NM_021161.3,1762-1780).
gtgcgtccgaggacaacat

SEQ ID NO: 261258 - DNA, 19 bp, Homo sapiens
  siRNA target sequence for KCNK10 (NM_021161.3,1764-1782).
gcgtccgaggacaacatca

SEQ ID NO: 261259 - DNA, 19 bp, Homo sapiens
  siRNA target sequence for KCNK10 (NM_021161.3,1847-1865).
gcccgaggacgttcagaaa

SEQ ID NO: 261260 - DNA, 19 bp, Homo sapiens
  siRNA target sequence for KCNK10 (NM_021161.3,1848-1866).
cccgaggacgttcagaaaa

SEQ ID NO: 261261 - DNA, 19 bp, Homo sapiens
  siRNA target sequence for KCNK10 (NM_021161.3,1849-1867).
ccgaggacgttcagaaaat

SEQ ID NO: 261262 - DNA, 19 bp, Homo sapiens
  siRNA target sequence for KCNK10 (NM_021161.3,1851-1869).
gaggacgttcagaaaatct

SEQ ID NO: 261263 - DNA, 19 bp, Homo sapiens
  siRNA target sequence for KCNK10 (NM_021161.3,1854-1872).
gacgttcagaaaatctaca

SEQ ID NO: 261264 - DNA, 19 bp, Homo sapiens
  siRNA target sequence for KCNK10 (NM_021161.3,1991-2009).
gttggagaacggaatgata

SEQ ID NO: 261265 - DNA, 19 bp, Homo sapiens
  siRNA target sequence for KCNK10 (NM_021161.3,2031-2049).
gagccggagaacaactcat

SEQ ID NO: 261266 - DNA, 19 bp, Homo sapiens
  siRNA target sequence for KCNK10 (NM_021161.3,2033-2051).
gccggagaacaactcatta

SEQ ID NO: 261267 - DNA, 19 bp, Homo sapiens
  siRNA target sequence for KCNK10 (NM_138317.1,216-234).
caatcgagacgccaagaaa

SEQ ID NO: 261268 - DNA, 19 bp, Homo sapiens
  siRNA target sequence for KCNK10 (NM_138318.1,153-171).
gaaggctgtcgcagtgatt

SEQ ID NO: 261269 - DNA, 19 bp, Homo sapiens
  siRNA target sequence for KCNK12 (NM_022055.1,372-390).
caccgtggtgtcaaccata

SEQ ID NO: 261270 - DNA, 19 bp, Homo sapiens
  siRNA target sequence for KCNK12 (NM_022055.1,856-874).
ctcggcgtgtgctgcattt

SEQ ID NO: 261271 - DNA, 19 bp, Homo sapiens
  siRNA target sequence for KCNK12 (NM_022055.1,869-887).
gcatttactcgctcttcaa

SEQ ID NO: 261272 - DNA, 19 bp, Homo sapiens
  siRNA target sequence for KCNK12 (NM_022055.1,1244-1262).
cgctgggcatcatgaacaa

SEQ ID NO: 261273 - DNA, 19 bp, Homo sapiens
  siRNA target sequence for KCNK13 (NM_022054.2,1084-1102).
catgtacacccccattgaa

SEQ ID NO: 261274 - DNA, 19 bp, Homo sapiens
  siRNA target sequence for KCNK13 (NM_022054.2,1103-1121).
ggctggagctactttgact

SEQ ID NO: 261275 - DNA, 19 bp, Homo sapiens
  siRNA target sequence for KCNK13 (NM_022054.2,1179-1197).
gccagaacgcccactatga

SEQ ID NO: 261276 - DNA, 19 bp, Homo sapiens
  siRNA target sequence for KCNK13 (NM_022054.2,1181-1199).
cagaacgcccactatgaga

SEQ ID NO: 261277 - DNA, 19 bp, Homo sapiens
  siRNA target sequence for KCNK13 (NM_022054.2,1400-1418).
cggaaccgctgcaacatct

SEQ ID NO: 261278 - DNA, 19 bp, Homo sapiens
  siRNA target sequence for KCNK13 (NM_022054.2,1464-1482).
ggctctcaggggagatgat

SEQ ID NO: 261279 - DNA, 19 bp, Homo sapiens
  siRNA target sequence for KCNK13 (NM_022054.2,1610-1628).
ggggtgggagcctttgcaa

SEQ ID NO: 261280 - DNA, 19 bp, Homo sapiens
  siRNA target sequence for KCNK13 (NM_022054.2,1616-1634).
ggagcctttgcaatcatga

SEQ ID NO: 261281 - DNA, 19 bp, Homo sapiens
  siRNA target sequence for KCNK13 (NM_022054.2,1617-1635).
gagcctttgcaatcatgaa

SEQ ID NO: 261282 - DNA, 19 bp, Homo sapiens
  siRNA target sequence for KCNK15 (NM_022358.2,420-438).
cgctgacgctggtcacttt

SEQ ID NO: 261283 - DNA, 19 bp, Homo sapiens
  siRNA target sequence for KCNK16 (NM_032115.2,76-94).
ctgctcggtgccactatct

SEQ ID NO: 261284 - DNA, 19 bp, Homo sapiens
  siRNA target sequence for KCNK16 (NM_032115.2,597-615).
cagcgagggcttctacttt

SEQ ID NO: 261285 - DNA, 19 bp, Homo sapiens
  siRNA target sequence for KCNK17 (NM_031460.2,343-361).
gtcgtccaagcatacaaaa

SEQ ID NO: 261286 - DNA, 19 bp, Homo sapiens
  siRNA target sequence for KCNK17 (NM_031460.2,775-793).
ggcgactacgtgattggaa

SEQ ID NO: 261287 - DNA, 19 bp, Homo sapiens
  siRNA target sequence for KCNK17 (NM_031460.2,776-794).
gcgactacgtgattggaat

SEQ ID NO: 261288 - DNA, 19 bp, Homo sapiens
  siRNA target sequence for KCNK17 (NM_031460.2,862-880).
gcatggctggccttgatca

SEQ ID NO: 261289 - DNA, 19 bp, Homo sapiens
  siRNA target sequence for KCNK17 (NM_031460.2,867-885).
gctggccttgatcatcaaa

SEQ ID NO: 261290 - DNA, 19 bp, Homo sapiens
  siRNA target sequence for KCNK17 (NM_031460.2,871-889).
gccttgatcatcaaactca

SEQ ID NO: 261291 - DNA, 19 bp, Homo sapiens
  siRNA target sequence for KCNK17 (NM_031460.2,872-890).
ccttgatcatcaaactcat

SEQ ID NO: 261292 - DNA, 19 bp, Homo sapiens
  siRNA target sequence for KCNK17 (NM_031460.2,1032-1050).
gggacccatgggaatcata

SEQ ID NO: 261293 - DNA, 19 bp, Homo sapiens
  siRNA target sequence for KCNK17 (NM_031460.2,1034-1052).
gacccatgggaatcataca

SEQ ID NO: 261294 - DNA, 19 bp, Homo sapiens
  siRNA target sequence for KCNK3 (NM_002246.1,481-499).
cgctcacgctcgtcatgtt

SEQ ID NO: 261295 - DNA, 19 bp, Homo sapiens
  siRNA target sequence for KCNK4 (NM_016611.2,169-187).
ctggcgctggtcttgcttt

SEQ ID NO: 261296 - DNA, 19 bp, Homo sapiens
  siRNA target sequence for KCNK4 (NM_016611.2,172-190).
gcgctggtcttgctttact

SEQ ID NO: 261297 - DNA, 19 bp, Homo sapiens
  siRNA target sequence for KCNK4 (NM_016611.2,173-191).
cgctggtcttgctttactt

SEQ ID NO: 261298 - DNA, 19 bp, Homo sapiens
  siRNA target sequence for KCNK4 (NM_016611.2,356-374).
gtgcggacccagaaaccaa

SEQ ID NO: 261299 - DNA, 19 bp, Homo sapiens
  siRNA target sequence for KCNK4 (NM_016611.2,412-430).
ggcagcgccttctttttct

SEQ ID NO: 261300 - DNA, 19 bp, Homo sapiens
  siRNA target sequence for KCNK4 (NM_016611.2,582-600).
ccatggcatcggtcacatt

SEQ ID NO: 261301 - DNA, 19 bp, Homo sapiens
  siRNA target sequence for KCNK4 (NM_016611.2,595-613).
cacattgaagccatcttct

SEQ ID NO: 261302 - DNA, 19 bp, Homo sapiens
  siRNA target sequence for KCNK4 (NM_016611.2,601-619).
gaagccatcttcttgaagt

SEQ ID NO: 261303 - DNA, 19 bp, Homo sapiens
  siRNA target sequence for KCNK4 (NM_016611.2,625-643).
gtgccaccggagctagtaa

SEQ ID NO: 261304 - DNA, 19 bp, Homo sapiens
  siRNA target sequence for KCNK4 (NM_016611.2,627-645).
gccaccggagctagtaaga

SEQ ID NO: 261305 - DNA, 19 bp, Homo sapiens
  siRNA target sequence for KCNK4 (NM_016611.2,629-647).
caccggagctagtaagagt

SEQ ID NO: 261306 - DNA, 19 bp, Homo sapiens
  siRNA target sequence for KCNK4 (NM_016611.2,646-664).
gtgctgtcggcgatgcttt

SEQ ID NO: 261307 - DNA, 19 bp, Homo sapiens
  siRNA target sequence for KCNK4 (NM_016611.2,704-722).
cgttcgtgttctgctatat

SEQ ID NO: 261308 - DNA, 19 bp, Homo sapiens
  siRNA target sequence for KCNK4 (NM_016611.2,744-762).
ggccatctactttgtcata

SEQ ID NO: 261309 - DNA, 19 bp, Homo sapiens
  siRNA target sequence for KCNK4 (NM_016611.2,746-764).
ccatctactttgtcatagt

SEQ ID NO: 261310 - DNA, 19 bp, Homo sapiens
  siRNA target sequence for KCNK4 (NM_016611.2,1139-1157).
cggcctcggccctggatta

SEQ ID NO: 261311 - DNA, 19 bp, Homo sapiens
  siRNA target sequence for KCNK5 (NM_003740.2,519-537).
cctagaggtggtatctgat

SEQ ID NO: 261312 - DNA, 19 bp, Homo sapiens
  siRNA target sequence for KCNK5 (NM_003740.2,566-584).
ggaaccagaccttcaacaa

SEQ ID NO: 261313 - DNA, 19 bp, Homo sapiens
  siRNA target sequence for KCNK5 (NM_003740.2,597-615).
caatgcaatgatttttgca

SEQ ID NO: 261314 - DNA, 19 bp, Homo sapiens
  siRNA target sequence for KCNK5 (NM_003740.2,613-631).
gcagcgaccgtcattacca

SEQ ID NO: 261315 - DNA, 19 bp, Homo sapiens
  siRNA target sequence for KCNK5 (NM_003740.2,622-640).
gtcattaccaccattggat

SEQ ID NO: 261316 - DNA, 19 bp, Homo sapiens
  siRNA target sequence for KCNK5 (NM_003740.2,670-688).
ggtcgcctcttctgtgttt

SEQ ID NO: 261317 - DNA, 19 bp, Homo sapiens
  siRNA target sequence for KCNK5 (NM_003740.2,821-839).
cgtgcacagtcatcttcat

SEQ ID NO: 261318 - DNA, 19 bp, Homo sapiens
  siRNA target sequence for KCNK5 (NM_003740.2,865-883).
gtgatcccacccttcgtat

SEQ ID NO: 261319 - DNA, 19 bp, Homo sapiens
  siRNA target sequence for KCNK5 (NM_003740.2,1018-1036).
gtggagctctggatctact

SEQ ID NO: 261320 - DNA, 19 bp, Homo sapiens
  siRNA target sequence for KCNK5 (NM_003740.2,1193-1211).
ccaaggacgtcaacatctt

SEQ ID NO: 261321 - DNA, 19 bp, Homo sapiens
  siRNA target sequence for KCNK5 (NM_003740.2,1649-1667).
cctcgctagaggacaactt

SEQ ID NO: 261322 - DNA, 19 bp, Homo sapiens
  siRNA target sequence for KCNK5 (NM_003740.2,1789-1807).
gaacagctgatgaatgagt

SEQ ID NO: 261323 - DNA, 19 bp, Homo sapiens
  siRNA target sequence for KCNK5 (NM_003740.2,1795-1813).
ctgatgaatgagtacaaca

SEQ ID NO: 261324 - DNA, 19 bp, Homo sapiens
  siRNA target sequence for KCNK7 (NM_005714.1,898-916).
gcctgcaccccgtgattta

SEQ ID NO: 261325 - DNA, 19 bp, Homo sapiens
  siRNA target sequence for KCNK7 (NM_005714.1,923-941).
gggccagctcgcacttctt

SEQ ID NO: 261326 - DNA, 19 bp, Homo sapiens
  siRNA target sequence for KCNK9 (NM_016601.2,170-188).
cgcgaggaggagaaactca

SEQ ID NO: 261327 - DNA, 19 bp, Homo sapiens
  siRNA target sequence for KCNK9 (NM_016601.2,171-189).
gcgaggaggagaaactcaa

SEQ ID NO: 261328 - DNA, 19 bp, Homo sapiens
  siRNA target sequence for KCNK9 (NM_016601.2,203-221).
cggatcaaggggaagtaca

SEQ ID NO: 261329 - DNA, 19 bp, Homo sapiens
  siRNA target sequence for KCNK9 (NM_016601.2,479-497).
ctgctgaagcgcattaaga

SEQ ID NO: 261330 - DNA, 19 bp, Homo sapiens
  siRNA target sequence for KCNK9 (NM_016601.2,727-745).
ggcctttagctttatgtat

SEQ ID NO: 261331 - DNA, 19 bp, Homo sapiens
  siRNA target sequence for KCNK9 (NM_016601.2,728-746).
gcctttagctttatgtata

SEQ ID NO: 261332 - DNA, 19 bp, Homo sapiens
  siRNA target sequence for KCNK9 (NM_016601.2,729-747).
cctttagctttatgtatat

SEQ ID NO: 261333 - DNA, 19 bp, Homo sapiens
  siRNA target sequence for KCNK9 (NM_016601.2,1046-1064).
cactccatctcttacaaga

SEQ ID NO: 261334 - DNA, 19 bp, Homo sapiens
  siRNA target sequence for KCNK9 (NM_016601.2,1072-1090).
gatctcaccaagcacatta

SEQ ID NO: 261335 - DNA, 19 bp, Homo sapiens
  siRNA target sequence for KCNK9 (NM_016601.2,1100-1118).
ctcttcccatcgcctatta

SEQ ID NO: 261336 - DNA, 19 bp, Homo sapiens
  siRNA target sequence for CACNA2D1 (NM_000722.1,116-134).
ccttcggccgtcactatca

SEQ ID NO: 261337 - DNA, 19 bp, Homo sapiens
  siRNA target sequence for CACNA2D1 (NM_000722.1,117-135).
cttcggccgtcactatcaa

SEQ ID NO: 261338 - DNA, 19 bp, Homo sapiens
  siRNA target sequence for CACNA2D1 (NM_000722.1,121-139).
ggccgtcactatcaaatca

SEQ ID NO: 261339 - DNA, 19 bp, Homo sapiens
  siRNA target sequence for CACNA2D1 (NM_000722.1,122-140).
gccgtcactatcaaatcat

SEQ ID NO: 261340 - DNA, 19 bp, Homo sapiens
  siRNA target sequence for CACNA2D1 (NM_000722.1,192-210).
gagtcaatcagcttgttga

SEQ ID NO: 261341 - DNA, 19 bp, Homo sapiens
  siRNA target sequence for CACNA2D1 (NM_000722.1,194-212).
gtcaatcagcttgttgata

SEQ ID NO: 261342 - DNA, 19 bp, Homo sapiens
  siRNA target sequence for CACNA2D1 (NM_000722.1,203-221).
cttgttgatatttatgaga

SEQ ID NO: 261343 - DNA, 19 bp, Homo sapiens
  siRNA target sequence for CACNA2D1 (NM_000722.1,258-276).
cacgccagctggtagaaat

SEQ ID NO: 261344 - DNA, 19 bp, Homo sapiens
  siRNA target sequence for CACNA2D1 (NM_000722.1,262-280).
ccagctggtagaaattgca

SEQ ID NO: 261345 - DNA, 19 bp, Homo sapiens
  siRNA target sequence for CACNA2D1 (NM_000722.1,285-303).
gggatattgagaaacttct

SEQ ID NO: 261346 - DNA, 19 bp, Homo sapiens
  siRNA target sequence for CACNA2D1 (NM_000722.1,299-317).
cttctgagcaacagatcta

SEQ ID NO: 261347 - DNA, 19 bp, Homo sapiens
  siRNA target sequence for CACNA2D1 (NM_000722.1,390-408).
gcaatgaagttgtctacta

SEQ ID NO: 261348 - DNA, 19 bp, Homo sapiens
  siRNA target sequence for CACNA2D1 (NM_000722.1,398-416).
gttgtctactacaatgcaa

SEQ ID NO: 261349 - DNA, 19 bp, Homo sapiens
  siRNA target sequence for CACNA2D1 (NM_000722.1,403-421).
ctactacaatgcaaaggat

SEQ ID NO: 261350 - DNA, 19 bp, Homo sapiens
  siRNA target sequence for CACNA2D1 (NM_000722.1,492-510).
ctaattttggacgacaaat

SEQ ID NO: 261351 - DNA, 19 bp, Homo sapiens
  siRNA target sequence for CACNA2D1 (NM_000722.1,501-519).
gacgacaaatatcttatca

SEQ ID NO: 261352 - DNA, 19 bp, Homo sapiens
  siRNA target sequence for CACNA2D1 (NM_000722.1,520-538).
gcacgcagcagtccatatt

SEQ ID NO: 261353 - DNA, 19 bp, Homo sapiens
  siRNA target sequence for CACNA2D1 (NM_000722.1,523-541).
cgcagcagtccatattcct

SEQ ID NO: 261354 - DNA, 19 bp, Homo sapiens
  siRNA target sequence for CACNA2D1 (NM_000722.1,524-542).
gcagcagtccatattccta

SEQ ID NO: 261355 - DNA, 19 bp, Homo sapiens
  siRNA target sequence for CACNA2D1 (NM_000722.1,550-568).
ctatgagggctcaacaatt

SEQ ID NO: 261356 - DNA, 19 bp, Homo sapiens
  siRNA target sequence for CACNA2D1 (NM_000722.1,554-572).
gagggctcaacaattgtgt

SEQ ID NO: 261357 - DNA, 19 bp, Homo sapiens
  siRNA target sequence for CACNA2D1 (NM_000722.1,556-574).
gggctcaacaattgtgtta

SEQ ID NO: 261358 - DNA, 19 bp, Homo sapiens
  siRNA target sequence for CACNA2D1 (NM_000722.1,558-576).
gctcaacaattgtgttaaa

SEQ ID NO: 261359 - DNA, 19 bp, Homo sapiens
  siRNA target sequence for CACNA2D1 (NM_000722.1,559-577).
ctcaacaattgtgttaaat

SEQ ID NO: 261360 - DNA, 19 bp, Homo sapiens
  siRNA target sequence for CACNA2D1 (NM_000722.1,588-606).
ggacaagtgccttagatga

SEQ ID NO: 261361 - DNA, 19 bp, Homo sapiens
  siRNA target sequence for CACNA2D1 (NM_000722.1,625-643).
cgaggaagacccttcatta

SEQ ID NO: 261362 - DNA, 19 bp, Homo sapiens
  siRNA target sequence for CACNA2D1 (NM_000722.1,626-644).
gaggaagacccttcattat

SEQ ID NO: 261363 - DNA, 19 bp, Homo sapiens
  siRNA target sequence for CACNA2D1 (NM_000722.1,629-647).
gaagacccttcattattgt

SEQ ID NO: 261364 - DNA, 19 bp, Homo sapiens
  siRNA target sequence for CACNA2D1 (NM_000722.1,667-685).
cactggcctagctcgatat

SEQ ID NO: 261365 - DNA, 19 bp, Homo sapiens
  siRNA target sequence for CACNA2D1 (NM_000722.1,669-687).
ctggcctagctcgatatta

SEQ ID NO: 261366 - DNA, 19 bp, Homo sapiens
  siRNA target sequence for CACNA2D1 (NM_000722.1,673-691).
cctagctcgatattatcca

SEQ ID NO: 261367 - DNA, 19 bp, Homo sapiens
  siRNA target sequence for CACNA2D1 (NM_000722.1,693-711).
cttcaccatgggttgataa

SEQ ID NO: 261368 - DNA, 19 bp, Homo sapiens
  siRNA target sequence for CACNA2D1 (NM_000722.1,703-721).
ggttgataatagtagaact

SEQ ID NO: 261369 - DNA, 19 bp, Homo sapiens
  siRNA target sequence for CACNA2D1 (NM_000722.1,723-741).
caaataagattgaccttta

SEQ ID NO: 261370 - DNA, 19 bp, Homo sapiens
  siRNA target sequence for CACNA2D1 (NM_000722.1,730-748).
gattgacctttatgatgta

SEQ ID NO: 261371 - DNA, 19 bp, Homo sapiens
  siRNA target sequence for CACNA2D1 (NM_000722.1,783-801).
ctcctaaagacatgcttat

SEQ ID NO: 261372 - DNA, 19 bp, Homo sapiens
  siRNA target sequence for CACNA2D1 (NM_000722.1,786-804).
ctaaagacatgcttattct

SEQ ID NO: 261373 - DNA, 19 bp, Homo sapiens
  siRNA target sequence for CACNA2D1 (NM_000722.1,824-842).
gttagtggattgacactta

SEQ ID NO: 261374 - DNA, 19 bp, Homo sapiens
  siRNA target sequence for CACNA2D1 (NM_000722.1,828-846).
gtggattgacacttaaact

SEQ ID NO: 261375 - DNA, 19 bp, Homo sapiens
  siRNA target sequence for CACNA2D1 (NM_000722.1,830-848).
ggattgacacttaaactga

SEQ ID NO: 261376 - DNA, 19 bp, Homo sapiens
  siRNA target sequence for CACNA2D1 (NM_000722.1,898-916).
cgtgaatgtagcttcattt

SEQ ID NO: 261377 - DNA, 19 bp, Homo sapiens
  siRNA target sequence for CACNA2D1 (NM_000722.1,952-970).
ccttgtccaagcaaatgta

SEQ ID NO: 261378 - DNA, 19 bp, Homo sapiens
  siRNA target sequence for CACNA2D1 (NM_000722.1,953-971).
cttgtccaagcaaatgtaa

SEQ ID NO: 261379 - DNA, 19 bp, Homo sapiens
  siRNA target sequence for CACNA2D1 (NM_000722.1,988-1006).
gaaagacgcggtgaataat

SEQ ID NO: 261380 - DNA, 19 bp, Homo sapiens
  siRNA target sequence for CACNA2D1 (NM_000722.1,992-1010).
gacgcggtgaataatatca

SEQ ID NO: 261381 - DNA, 19 bp, Homo sapiens
  siRNA target sequence for CACNA2D1 (NM_000722.1,994-1012).
cgcggtgaataatatcaca

SEQ ID NO: 261382 - DNA, 19 bp, Homo sapiens
  siRNA target sequence for CACNA2D1 (NM_000722.1,1009-1027).
cacagccaaaggaattaca

SEQ ID NO: 261383 - DNA, 19 bp, Homo sapiens
  siRNA target sequence for CACNA2D1 (NM_000722.1,1086-1104).
gagcaaactgcaataagat

SEQ ID NO: 261384 - DNA, 19 bp, Homo sapiens
  siRNA target sequence for CACNA2D1 (NM_000722.1,1088-1106).
gcaaactgcaataagatta

SEQ ID NO: 261385 - DNA, 19 bp, Homo sapiens
  siRNA target sequence for CACNA2D1 (NM_000722.1,1137-1155).
gagcccaggagatatttaa

SEQ ID NO: 261386 - DNA, 19 bp, Homo sapiens
  siRNA target sequence for CACNA2D1 (NM_000722.1,1197-1215).
cagttggtcaacacaatta

SEQ ID NO: 261387 - DNA, 19 bp, Homo sapiens
  siRNA target sequence for CACNA2D1 (NM_000722.1,1274-1292).
ccttccattggtgcaataa

SEQ ID NO: 261388 - DNA, 19 bp, Homo sapiens
  siRNA target sequence for CACNA2D1 (NM_000722.1,1283-1301).
ggtgcaataagaatcaata

SEQ ID NO: 261389 - DNA, 19 bp, Homo sapiens
  siRNA target sequence for CACNA2D1 (NM_000722.1,1293-1311).
gaatcaatactcaggaata

SEQ ID NO: 261390 - DNA, 19 bp, Homo sapiens
  siRNA target sequence for CACNA2D1 (NM_000722.1,1324-1342).
gggaagaccaatggtttta

SEQ ID NO: 261391 - DNA, 19 bp, Homo sapiens
  siRNA target sequence for CACNA2D1 (NM_000722.1,1360-1378).
gcaagtccaatggacaaat

SEQ ID NO: 261392 - DNA, 19 bp, Homo sapiens
  siRNA target sequence for CACNA2D1 (NM_000722.1,1396-1414).
ggaactgggacttgtcatt

SEQ ID NO: 261393 - DNA, 19 bp, Homo sapiens
  siRNA target sequence for CACNA2D1 (NM_000722.1,1397-1415).
gaactgggacttgtcatta

SEQ ID NO: 261394 - DNA, 19 bp, Homo sapiens
  siRNA target sequence for CACNA2D1 (NM_000722.1,1419-1437).
gaactcttccggtcttcaa

SEQ ID NO: 261395 - DNA, 19 bp, Homo sapiens
  siRNA target sequence for CACNA2D1 (NM_000722.1,1422-1440).
ctcttccggtcttcaacat

SEQ ID NO: 261396 - DNA, 19 bp, Homo sapiens
  siRNA target sequence for CACNA2D1 (NM_000722.1,1424-1442).
cttccggtcttcaacataa

SEQ ID NO: 261397 - DNA, 19 bp, Homo sapiens
  siRNA target sequence for CACNA2D1 (NM_000722.1,1435-1453).
caacataaccggccaattt

SEQ ID NO: 261398 - DNA, 19 bp, Homo sapiens
  siRNA target sequence for CACNA2D1 (NM_000722.1,1438-1456).
cataaccggccaatttgaa

SEQ ID NO: 261399 - DNA, 19 bp, Homo sapiens
  siRNA target sequence for CACNA2D1 (NM_000722.1,1445-1463).
ggccaatttgaaaataaga

SEQ ID NO: 261400 - DNA, 19 bp, Homo sapiens
  siRNA target sequence for CACNA2D1 (NM_000722.1,1447-1465).
ccaatttgaaaataagaca

SEQ ID NO: 261401 - DNA, 19 bp, Homo sapiens
  siRNA target sequence for CACNA2D1 (NM_000722.1,1508-1526).
gtgtctttggaagatatta

SEQ ID NO: 261402 - DNA, 19 bp, Homo sapiens
  siRNA target sequence for CACNA2D1 (NM_000722.1,1555-1573).
ccccaatgggtattacttt

SEQ ID NO: 261403 - DNA, 19 bp, Homo sapiens
  siRNA target sequence for CACNA2D1 (NM_000722.1,1564-1582).
gtattactttgcaatcgat

SEQ ID NO: 261404 - DNA, 19 bp, Homo sapiens
  siRNA target sequence for CACNA2D1 (NM_000722.1,1574-1592).
gcaatcgatcctaatggtt

SEQ ID NO: 261405 - DNA, 19 bp, Homo sapiens
  siRNA target sequence for CACNA2D1 (NM_000722.1,1575-1593).
caatcgatcctaatggtta

SEQ ID NO: 261406 - DNA, 19 bp, Homo sapiens
  siRNA target sequence for CACNA2D1 (NM_000722.1,1579-1597).
cgatcctaatggttatgtt

SEQ ID NO: 261407 - DNA, 19 bp, Homo sapiens
  siRNA target sequence for CACNA2D1 (NM_000722.1,1580-1598).
gatcctaatggttatgttt

SEQ ID NO: 261408 - DNA, 19 bp, Homo sapiens
  siRNA target sequence for CACNA2D1 (NM_000722.1,1618-1636).
gccaaagaaccccaaatct

SEQ ID NO: 261409 - DNA, 19 bp, Homo sapiens
  siRNA target sequence for CACNA2D1 (NM_000722.1,1644-1662).
cagtaacattggatttcct

SEQ ID NO: 261410 - DNA, 19 bp, Homo sapiens
  siRNA target sequence for CACNA2D1 (NM_000722.1,1691-1709).
gtggagattcgaaataaga

SEQ ID NO: 261411 - DNA, 19 bp, Homo sapiens
  siRNA target sequence for CACNA2D1 (NM_000722.1,1841-1859).
gtattaccaacctacagtt

SEQ ID NO: 261412 - DNA, 19 bp, Homo sapiens
  siRNA target sequence for CACNA2D1 (NM_000722.1,1851-1869).
cctacagtttttactatat

SEQ ID NO: 261413 - DNA, 19 bp, Homo sapiens
  siRNA target sequence for CACNA2D1 (NM_000722.1,1896-1914).
ctcaggccagatcaaaaaa

SEQ ID NO: 261414 - DNA, 19 bp, Homo sapiens
  siRNA target sequence for CACNA2D1 (NM_000722.1,1961-1979).
gaatctggctatacattca

SEQ ID NO: 261415 - DNA, 19 bp, Homo sapiens
  siRNA target sequence for CACNA2D1 (NM_000722.1,1996-2014).
ctgcaatgacctgaaaata

SEQ ID NO: 261416 - DNA, 19 bp, Homo sapiens
  siRNA target sequence for CACNA2D1 (NM_000722.1,2050-2068).
cgagtttattgatagaaaa

SEQ ID NO: 261417 - DNA, 19 bp, Homo sapiens
  siRNA target sequence for CACNA2D1 (NM_000722.1,2072-2090).
ccaaacaacccatcatgta

SEQ ID NO: 261418 - DNA, 19 bp, Homo sapiens
  siRNA target sequence for CACNA2D1 (NM_000722.1,2073-2091).
caaacaacccatcatgtaa

SEQ ID NO: 261419 - DNA, 19 bp, Homo sapiens
  siRNA target sequence for CACNA2D1 (NM_000722.1,2085-2103).
catgtaacgcggatttgat

SEQ ID NO: 261420 - DNA, 19 bp, Homo sapiens
  siRNA target sequence for CACNA2D1 (NM_000722.1,2088-2106).
gtaacgcggatttgattaa

SEQ ID NO: 261421 - DNA, 19 bp, Homo sapiens
  siRNA target sequence for CACNA2D1 (NM_000722.1,2092-2110).
cgcggatttgattaataga

SEQ ID NO: 261422 - DNA, 19 bp, Homo sapiens
  siRNA target sequence for CACNA2D1 (NM_000722.1,2094-2112).
cggatttgattaatagagt

SEQ ID NO: 261423 - DNA, 19 bp, Homo sapiens
  siRNA target sequence for CACNA2D1 (NM_000722.1,2116-2134).
gcttgatgcaggctttaca

SEQ ID NO: 261424 - DNA, 19 bp, Homo sapiens
  siRNA target sequence for CACNA2D1 (NM_000722.1,2117-2135).
cttgatgcaggctttacaa

SEQ ID NO: 261425 - DNA, 19 bp, Homo sapiens
  siRNA target sequence for CACNA2D1 (NM_000722.1,2138-2156).
gaacttgtccaaaattact

SEQ ID NO: 261426 - DNA, 19 bp, Homo sapiens
  siRNA target sequence for CACNA2D1 (NM_000722.1,2210-2228).
ggtgggattaccagagttt

SEQ ID NO: 261427 - DNA, 19 bp, Homo sapiens
  siRNA target sequence for CACNA2D1 (NM_000722.1,2211-2229).
gtgggattaccagagttta

SEQ ID NO: 261428 - DNA, 19 bp, Homo sapiens
  siRNA target sequence for CACNA2D1 (NM_000722.1,2327-2345).
gctccctactttaacaaaa

SEQ ID NO: 261429 - DNA, 19 bp, Homo sapiens
  siRNA target sequence for CACNA2D1 (NM_000722.1,2358-2376).
cctatgaatcgggcattat

SEQ ID NO: 261430 - DNA, 19 bp, Homo sapiens
  siRNA target sequence for CACNA2D1 (NM_000722.1,2363-2381).
gaatcgggcattatggtaa

SEQ ID NO: 261431 - DNA, 19 bp, Homo sapiens
  siRNA target sequence for CACNA2D1 (NM_000722.1,2367-2385).
cgggcattatggtaagcaa

SEQ ID NO: 261432 - DNA, 19 bp, Homo sapiens
  siRNA target sequence for CACNA2D1 (NM_000722.1,2368-2386).
gggcattatggtaagcaaa

SEQ ID NO: 261433 - DNA, 19 bp, Homo sapiens
  siRNA target sequence for CACNA2D1 (NM_000722.1,2377-2395).
ggtaagcaaagctgtagaa

SEQ ID NO: 261434 - DNA, 19 bp, Homo sapiens
  siRNA target sequence for CACNA2D1 (NM_000722.1,2378-2396).
gtaagcaaagctgtagaaa

SEQ ID NO: 261435 - DNA, 19 bp, Homo sapiens
  siRNA target sequence for CACNA2D1 (NM_000722.1,2507-2525).
ccagtttgtgactgcaaaa

SEQ ID NO: 261436 - DNA, 19 bp, Homo sapiens
  siRNA target sequence for CACNA2D1 (NM_000722.1,2526-2544).
gaaacagtgacgtaatgga

SEQ ID NO: 261437 - DNA, 19 bp, Homo sapiens
  siRNA target sequence for CACNA2D1 (NM_000722.1,2532-2550).
gtgacgtaatggattgtgt

SEQ ID NO: 261438 - DNA, 19 bp, Homo sapiens
  siRNA target sequence for CACNA2D1 (NM_000722.1,2536-2554).
cgtaatggattgtgtgatt

SEQ ID NO: 261439 - DNA, 19 bp, Homo sapiens
  siRNA target sequence for CACNA2D1 (NM_000722.1,2557-2575).
ggatgatggtgggtttctt

SEQ ID NO: 261440 - DNA, 19 bp, Homo sapiens
  siRNA target sequence for CACNA2D1 (NM_000722.1,2578-2596).
gatggcaaatcatgatgat

SEQ ID NO: 261441 - DNA, 19 bp, Homo sapiens
  siRNA target sequence for CACNA2D1 (NM_000722.1,2581-2599).
ggcaaatcatgatgattat

SEQ ID NO: 261442 - DNA, 19 bp, Homo sapiens
  siRNA target sequence for CACNA2D1 (NM_000722.1,2582-2600).
gcaaatcatgatgattata

SEQ ID NO: 261443 - DNA, 19 bp, Homo sapiens
  siRNA target sequence for CACNA2D1 (NM_000722.1,2647-2665).
gagacacctggttaatata

SEQ ID NO: 261444 - DNA, 19 bp, Homo sapiens
  siRNA target sequence for CACNA2D1 (NM_000722.1,2654-2672).
ctggttaatatatcagttt

SEQ ID NO: 261445 - DNA, 19 bp, Homo sapiens
  siRNA target sequence for CACNA2D1 (NM_000722.1,2713-2731).
gcccggtgctgcaccaaaa

SEQ ID NO: 261446 - DNA, 19 bp, Homo sapiens
  siRNA target sequence for CACNA2D1 (NM_000722.1,2716-2734).
cggtgctgcaccaaaacaa

SEQ ID NO: 261447 - DNA, 19 bp, Homo sapiens
  siRNA target sequence for CACNA2D1 (NM_000722.1,2761-2779).
gccatcagtagcagacata

SEQ ID NO: 261448 - DNA, 19 bp, Homo sapiens
  siRNA target sequence for CACNA2D1 (NM_000722.1,2762-2780).
ccatcagtagcagacatat

SEQ ID NO: 261449 - DNA, 19 bp, Homo sapiens
  siRNA target sequence for CACNA2D1 (NM_000722.1,2766-2784).
cagtagcagacatattaca

SEQ ID NO: 261450 - DNA, 19 bp, Homo sapiens
  siRNA target sequence for CACNA2D1 (NM_000722.1,2768-2786).
gtagcagacatattacaaa

SEQ ID NO: 261451 - DNA, 19 bp, Homo sapiens
  siRNA target sequence for CACNA2D1 (NM_000722.1,2944-2962).
cttcgataacgacagtaaa

SEQ ID NO: 261452 - DNA, 19 bp, Homo sapiens
  siRNA target sequence for CACNA2D1 (NM_000722.1,2947-2965).
cgataacgacagtaaatca

SEQ ID NO: 261453 - DNA, 19 bp, Homo sapiens
  siRNA target sequence for CACNA2D1 (NM_000722.1,2948-2966).
gataacgacagtaaatcat

SEQ ID NO: 261454 - DNA, 19 bp, Homo sapiens
  siRNA target sequence for CACNA2D1 (NM_000722.1,2953-2971).
cgacagtaaatcattcagt

SEQ ID NO: 261455 - DNA, 19 bp, Homo sapiens
  siRNA target sequence for CACNA2D1 (NM_000722.1,3019-3037).
gcttatgaacaccaactta

SEQ ID NO: 261456 - DNA, 19 bp, Homo sapiens
  siRNA target sequence for CACNA2D1 (NM_000722.1,3106-3124).
gacttctgacggtccaaat

SEQ ID NO: 261457 - DNA, 19 bp, Homo sapiens
  siRNA target sequence for CACNA2D1 (NM_000722.1,3126-3144).
cttgtgacatggttaagca

SEQ ID NO: 261458 - DNA, 19 bp, Homo sapiens
  siRNA target sequence for CACNA2D1 (NM_000722.1,3163-3181).
gcctgatgtctgctttgat

SEQ ID NO: 261459 - DNA, 19 bp, Homo sapiens
  siRNA target sequence for CACNA2D1 (NM_000722.1,3234-3252).
cctccctgtggtatatcat

SEQ ID NO: 261460 - DNA, 19 bp, Homo sapiens
  siRNA target sequence for CACNA2D1 (NM_000722.1,3235-3253).
ctccctgtggtatatcatt

SEQ ID NO: 261461 - DNA, 19 bp, Homo sapiens
  siRNA target sequence for CACNG1 (NM_000727.2,224-242).
cggcctctggcggatttgt

SEQ ID NO: 261462 - DNA, 19 bp, Homo sapiens
  siRNA target sequence for CACNG1 (NM_000727.2,225-243).
ggcctctggcggatttgta

SEQ ID NO: 261463 - DNA, 19 bp, Homo sapiens
  siRNA target sequence for CACNG1 (NM_000727.2,337-355).
gcgagagctcggagatctt

SEQ ID NO: 261464 - DNA, 19 bp, Homo sapiens
  siRNA target sequence for CACNG1 (NM_000727.2,343-361).
gctcggagatcttcgaatt

SEQ ID NO: 261465 - DNA, 19 bp, Homo sapiens
  siRNA target sequence for CACNG1 (NM_000727.2,483-501).
cgacccgcgtccatgttct

SEQ ID NO: 261466 - DNA, 19 bp, Homo sapiens
  siRNA target sequence for CACNG1 (NM_000727.2,484-502).
gacccgcgtccatgttcta

SEQ ID NO: 261467 - DNA, 19 bp, Homo sapiens
  siRNA target sequence for CACNG1 (NM_000727.2,551-569).
gtcggtgaagcgcatgatt

SEQ ID NO: 261468 - DNA, 19 bp, Homo sapiens
  siRNA target sequence for CACNG1 (NM_000727.2,553-571).
cggtgaagcgcatgattga

SEQ ID NO: 261469 - DNA, 19 bp, Homo sapiens
  siRNA target sequence for CACNG1 (NM_000727.2,583-601).
ccgtctggatcgagtacta

SEQ ID NO: 261470 - DNA, 19 bp, Homo sapiens
  siRNA target sequence for CACNG1 (NM_000727.2,584-602).
cgtctggatcgagtactat

SEQ ID NO: 261471 - DNA, 19 bp, Homo sapiens
  siRNA target sequence for CACNG1 (NM_000727.2,585-603).
gtctggatcgagtactatt

SEQ ID NO: 261472 - DNA, 19 bp, Homo sapiens
  siRNA target sequence for CACNB1 (NM_000723.3,352-370).
ccatcagactctgatgtat

SEQ ID NO: 261473 - DNA, 19 bp, Homo sapiens
  siRNA target sequence for CACNB1 (NM_000723.3,356-374).
cagactctgatgtatctct

SEQ ID NO: 261474 - DNA, 19 bp, Homo sapiens
  siRNA target sequence for CACNB1 (NM_000723.3,691-709).
cgcctcggctccagcaaat

SEQ ID NO: 261475 - DNA, 19 bp, Homo sapiens
  siRNA target sequence for CACNB1 (NM_000723.3,693-711).
cctcggctccagcaaatca

SEQ ID NO: 261476 - DNA, 19 bp, Homo sapiens
  siRNA target sequence for CACNB1 (NM_000723.3,894-912).
gatgcagaaagctttattt

SEQ ID NO: 261477 - DNA, 19 bp, Homo sapiens
  siRNA target sequence for CACNB1 (NM_000723.3,953-971).
ctcgtgtgacggcagatat

SEQ ID NO: 261478 - DNA, 19 bp, Homo sapiens
  siRNA target sequence for CACNB1 (NM_000723.3,955-973).
cgtgtgacggcagatattt

SEQ ID NO: 261479 - DNA, 19 bp, Homo sapiens
  siRNA target sequence for CACNB1 (NM_000723.3,1064-1082).
gtgaaatcgagcgaatctt

SEQ ID NO: 261480 - DNA, 19 bp, Homo sapiens
  siRNA target sequence for CACNB1 (NM_000723.3,1221-1239).
caagtcccgaggaaagtct

SEQ ID NO: 261481 - DNA, 19 bp, Homo sapiens
  siRNA target sequence for CACNB1 (NM_000723.3,1635-1653).
gtcccgccaagacactttt

SEQ ID NO: 261482 - DNA, 19 bp, Homo sapiens
  siRNA target sequence for CACNB1 (NM_000723.3,1925-1943).
ggggacgaggcgtctacat

SEQ ID NO: 261483 - DNA, 19 bp, Homo sapiens
  siRNA target sequence for CACNB1 (NM_000723.3,1926-1944).
gggacgaggcgtctacatt

SEQ ID NO: 261484 - DNA, 19 bp, Homo sapiens
  siRNA target sequence for CACNB2 (NM_000724.1,535-553).
gtacgggtgtcctatggtt

SEQ ID NO: 261485 - DNA, 19 bp, Homo sapiens
  siRNA target sequence for CACNB2 (NM_000724.1,581-599).
ccgattccgatgtatctct

SEQ ID NO: 261486 - DNA, 19 bp, Homo sapiens
  siRNA target sequence for CACNB2 (NM_000724.1,643-661).
gcccaggcacagttggaaa

SEQ ID NO: 261487 - DNA, 19 bp, Homo sapiens
  siRNA target sequence for CACNB2 (NM_000724.1,645-663).
ccaggcacagttggaaaaa

SEQ ID NO: 261488 - DNA, 19 bp, Homo sapiens
  siRNA target sequence for CACNB2 (NM_000724.1,669-687).
gacaaagcccgttgcattt

SEQ ID NO: 261489 - DNA, 19 bp, Homo sapiens
  siRNA target sequence for CACNB2 (NM_000724.1,688-706).
gcggttcggacaaatgtca

SEQ ID NO: 261490 - DNA, 19 bp, Homo sapiens
  siRNA target sequence for CACNB2 (NM_000724.1,756-774).
ctcattcgaagcaaaagat

SEQ ID NO: 261491 - DNA, 19 bp, Homo sapiens
  siRNA target sequence for CACNB2 (NM_000724.1,781-799).
catgttaaggaaaaattta

SEQ ID NO: 261492 - DNA, 19 bp, Homo sapiens
  siRNA target sequence for CACNB2 (NM_000724.1,810-828).
gtggatagggcgattggta

SEQ ID NO: 261493 - DNA, 19 bp, Homo sapiens
  siRNA target sequence for CACNB2 (NM_000724.1,812-830).
ggatagggcgattggtaaa

SEQ ID NO: 261494 - DNA, 19 bp, Homo sapiens
  siRNA target sequence for CACNB2 (NM_000724.1,813-831).
gatagggcgattggtaaaa

SEQ ID NO: 261495 - DNA, 19 bp, Homo sapiens
  siRNA target sequence for CACNB2 (NM_000724.1,857-875).
caagcccagtcaaactaga

SEQ ID NO: 261496 - DNA, 19 bp, Homo sapiens
  siRNA target sequence for CACNB2 (NM_000724.1,860-878).
gcccagtcaaactagaaaa

SEQ ID NO: 261497 - DNA, 19 bp, Homo sapiens
  siRNA target sequence for CACNB2 (NM_000724.1,862-880).
ccagtcaaactagaaaaca

SEQ ID NO: 261498 - DNA, 19 bp, Homo sapiens
  siRNA target sequence for CACNB2 (NM_000724.1,863-881).
cagtcaaactagaaaacat

SEQ ID NO: 261499 - DNA, 19 bp, Homo sapiens
  siRNA target sequence for CACNB2 (NM_000724.1,904-922).
gccaagcaagggaaattct

SEQ ID NO: 261500 - DNA, 19 bp, Homo sapiens
  siRNA target sequence for CACNB2 (NM_000724.1,995-1013).
ctccatcatctgctataga

SEQ ID NO: 261501 - DNA, 19 bp, Homo sapiens
  siRNA target sequence for CACNB2 (NM_000724.1,998-1016).
catcatctgctatagacat

SEQ ID NO: 261502 - DNA, 19 bp, Homo sapiens
  siRNA target sequence for CACNB2 (NM_000724.1,1001-1019).
catctgctatagacataga

SEQ ID NO: 261503 - DNA, 19 bp, Homo sapiens
  siRNA target sequence for CACNB2 (NM_000724.1,1028-1046).
gcttagatgcagaagaaaa

SEQ ID NO: 261504 - DNA, 19 bp, Homo sapiens
  siRNA target sequence for CACNB2 (NM_000724.1,1146-1164).
gcacactcctccgtatgat

SEQ ID NO: 261505 - DNA, 19 bp, Homo sapiens
  siRNA target sequence for CACNB2 (NM_000724.1,1236-1254).
gcaaaaagcgctgtttgat

SEQ ID NO: 261506 - DNA, 19 bp, Homo sapiens
  siRNA target sequence for CACNB2 (NM_000724.1,1237-1255).
caaaaagcgctgtttgatt

SEQ ID NO: 261507 - DNA, 19 bp, Homo sapiens
  siRNA target sequence for CACNB2 (NM_000724.1,1276-1294).
gggcggatatccatcacaa

SEQ ID NO: 261508 - DNA, 19 bp, Homo sapiens
  siRNA target sequence for CACNB2 (NM_000724.1,1319-1337).
ccaaacgctcggtattaaa

SEQ ID NO: 261509 - DNA, 19 bp, Homo sapiens
  siRNA target sequence for CACNB2 (NM_000724.1,1344-1362).
cagtaagcacgcaataata

SEQ ID NO: 261510 - DNA, 19 bp, Homo sapiens
  siRNA target sequence for CACNB2 (NM_000724.1,1346-1364).
gtaagcacgcaataataga

SEQ ID NO: 261511 - DNA, 19 bp, Homo sapiens
  siRNA target sequence for CACNB2 (NM_000724.1,1350-1368).
gcacgcaataatagaaaga

SEQ ID NO: 261512 - DNA, 19 bp, Homo sapiens
  siRNA target sequence for CACNB2 (NM_000724.1,1351-1369).
cacgcaataatagaaagat

SEQ ID NO: 261513 - DNA, 19 bp, Homo sapiens
  siRNA target sequence for CACNB2 (NM_000724.1,1371-1389).
caacacaaggtcaagctta

SEQ ID NO: 261514 - DNA, 19 bp, Homo sapiens
  siRNA target sequence for CACNB2 (NM_000724.1,1401-1419).
gagtgaaatcgaaaggatt

SEQ ID NO: 261515 - DNA, 19 bp, Homo sapiens
  siRNA target sequence for CACNB2 (NM_000724.1,1410-1428).
cgaaaggatttttgaactt

SEQ ID NO: 261516 - DNA, 19 bp, Homo sapiens
  siRNA target sequence for CACNB2 (NM_000724.1,1450-1468).
gtccttgacgcggatacaa

SEQ ID NO: 261517 - DNA, 19 bp, Homo sapiens
  siRNA target sequence for CACNB2 (NM_000724.1,1458-1476).
cgcggatacaattaatcat

SEQ ID NO: 261518 - DNA, 19 bp, Homo sapiens
  siRNA target sequence for CACNB2 (NM_000724.1,1477-1495).
ccagctcaactcagtaaaa

SEQ ID NO: 261519 - DNA, 19 bp, Homo sapiens
  siRNA target sequence for CACNB2 (NM_000724.1,1480-1498).
gctcaactcagtaaaacct

SEQ ID NO: 261520 - DNA, 19 bp, Homo sapiens
  siRNA target sequence for CACNB2 (NM_000724.1,1503-1521).
ggcccctattatagtatat

SEQ ID NO: 261521 - DNA, 19 bp, Homo sapiens
  siRNA target sequence for CACNB2 (NM_000724.1,1506-1524).
ccctattatagtatatgta

SEQ ID NO: 261522 - DNA, 19 bp, Homo sapiens
  siRNA target sequence for CACNB2 (NM_000724.1,1507-1525).
cctattatagtatatgtaa

SEQ ID NO: 261523 - DNA, 19 bp, Homo sapiens
  siRNA target sequence for CACNB2 (NM_000724.1,1757-1775).
ctctccttagccgtacatt

SEQ ID NO: 261524 - DNA, 19 bp, Homo sapiens
  siRNA target sequence for CACNB2 (NM_000724.1,1768-1786).
cgtacattagccacttcaa

SEQ ID NO: 261525 - DNA, 19 bp, Homo sapiens
  siRNA target sequence for CACNB2 (NM_000724.1,1800-1818).
ccccaccctagcctctaat

SEQ ID NO: 261526 - DNA, 19 bp, Homo sapiens
  siRNA target sequence for CACNB2 (NM_000724.1,1801-1819).
cccaccctagcctctaatt

SEQ ID NO: 261527 - DNA, 19 bp, Homo sapiens
  siRNA target sequence for CACNB2 (NM_000724.1,1803-1821).
caccctagcctctaattca

SEQ ID NO: 261528 - DNA, 19 bp, Homo sapiens
  siRNA target sequence for CACNB2 (NM_000724.1,1983-2001).
ctccaggcaagagacattt

SEQ ID NO: 261529 - DNA, 19 bp, Homo sapiens
  siRNA target sequence for CACNB2 (NM_000724.1,1985-2003).
ccaggcaagagacatttga

SEQ ID NO: 261530 - DNA, 19 bp, Homo sapiens
  siRNA target sequence for CACNB2 (NM_000724.1,2034-2052).
ctacgtagagccaaaggaa

SEQ ID NO: 261531 - DNA, 19 bp, Homo sapiens
  siRNA target sequence for CACNB2 (NM_000724.1,2041-2059).
gagccaaaggaagattatt

SEQ ID NO: 261532 - DNA, 19 bp, Homo sapiens
  siRNA target sequence for CACNB2 (NM_000724.1,2205-2223).
gcagcgcagccgtcataaa

SEQ ID NO: 261533 - DNA, 19 bp, Homo sapiens
  siRNA target sequence for CACNB2 (NM_000724.1,2206-2224).
cagcgcagccgtcataaat

SEQ ID NO: 261534 - DNA, 19 bp, Homo sapiens
  siRNA target sequence for CACNB2 (NM_000724.1,2209-2227).
cgcagccgtcataaatcca

SEQ ID NO: 261535 - DNA, 19 bp, Homo sapiens
  siRNA target sequence for CACNB2 (NM_000724.1,2291-2309).
ggaacagggatgtttacat

SEQ ID NO: 261536 - DNA, 19 bp, Homo sapiens
  siRNA target sequence for CACNB4 (NM_000726.1,153-171).
cggaggagcaggttgaaaa

SEQ ID NO: 261537 - DNA, 19 bp, Homo sapiens
  siRNA target sequence for CACNB4 (NM_000726.1,251-269).
ctccgatgtctctttggaa

SEQ ID NO: 261538 - DNA, 19 bp, Homo sapiens
  siRNA target sequence for CACNB4 (NM_000726.1,272-290).
ggaccgggaagcaattcga

SEQ ID NO: 261539 - DNA, 19 bp, Homo sapiens
  siRNA target sequence for CACNB4 (NM_000726.1,348-366).
gcatttgccgtgaagacaa

SEQ ID NO: 261540 - DNA, 19 bp, Homo sapiens
  siRNA target sequence for CACNB4 (NM_000726.1,432-450).
gctaaagactttctacata

SEQ ID NO: 261541 - DNA, 19 bp, Homo sapiens
  siRNA target sequence for CACNB4 (NM_000726.1,433-451).
ctaaagactttctacatat

SEQ ID NO: 261542 - DNA, 19 bp, Homo sapiens
  siRNA target sequence for CACNB4 (NM_000726.1,529-547).
cactcagattggagaacat

SEQ ID NO: 261543 - DNA, 19 bp, Homo sapiens
  siRNA target sequence for CACNB4 (NM_000726.1,645-663).
cgagcaactcccacatcaa

SEQ ID NO: 261544 - DNA, 19 bp, Homo sapiens
  siRNA target sequence for CACNB4 (NM_000726.1,692-710).
gcacattcctccttacgat

SEQ ID NO: 261545 - DNA, 19 bp, Homo sapiens
  siRNA target sequence for CACNB4 (NM_000726.1,819-837).
gatgggaggatttcaataa

SEQ ID NO: 261546 - DNA, 19 bp, Homo sapiens
  siRNA target sequence for CACNB4 (NM_000726.1,865-883).
ctaagaggtctgtcctaaa

SEQ ID NO: 261547 - DNA, 19 bp, Homo sapiens
  siRNA target sequence for CACNB4 (NM_000726.1,869-887).
gaggtctgtcctaaataat

SEQ ID NO: 261548 - DNA, 19 bp, Homo sapiens
  siRNA target sequence for CACNB4 (NM_000726.1,888-906).
cccagcaagagagcaataa

SEQ ID NO: 261549 - DNA, 19 bp, Homo sapiens
  siRNA target sequence for CACNB4 (NM_000726.1,889-907).
ccagcaagagagcaataat

SEQ ID NO: 261550 - DNA, 19 bp, Homo sapiens
  siRNA target sequence for CACNB4 (NM_000726.1,1016-1034).
caatcacccagcacaactt

SEQ ID NO: 261551 - DNA, 19 bp, Homo sapiens
  siRNA target sequence for CACNB4 (NM_000726.1,1053-1071).
ccaattattgttcatgtaa

SEQ ID NO: 261552 - DNA, 19 bp, Homo sapiens
  siRNA target sequence for CACNB4 (NM_000726.1,1129-1147).
gtaaacacttgaatgttca

SEQ ID NO: 261553 - DNA, 19 bp, Homo sapiens
  siRNA target sequence for CACNB4 (NM_000726.1,1180-1198).
ccccagaaatgtttgatgt

SEQ ID NO: 261554 - DNA, 19 bp, Homo sapiens
  siRNA target sequence for CACNB4 (NM_000726.1,1190-1208).
gtttgatgttatattggat

SEQ ID NO: 261555 - DNA, 19 bp, Homo sapiens
  siRNA target sequence for CACNB4 (NM_000726.1,1328-1346).
cacggcactctcaccatat

SEQ ID NO: 261556 - DNA, 19 bp, Homo sapiens
  siRNA target sequence for CACNB4 (NM_000726.1,1402-1420).
cagagaactctccaattga

SEQ ID NO: 261557 - DNA, 19 bp, Homo sapiens
  siRNA target sequence for CACNB4 (NM_000726.1,1406-1424).
gaactctccaattgaaaga

SEQ ID NO: 261558 - DNA, 19 bp, Homo sapiens
  siRNA target sequence for CACNB4 (NM_000726.1,1419-1437).
gaaagacgaagtctaatga

SEQ ID NO: 261559 - DNA, 19 bp, Homo sapiens
  siRNA target sequence for CACNB4 (NM_000726.1,1461-1479).
gaaagggctcggaagagta

SEQ ID NO: 261560 - DNA, 19 bp, Homo sapiens
  siRNA target sequence for CACNG2 (NM_006078.2,361-379).
gctgtgggaaccgactatt

SEQ ID NO: 261561 - DNA, 19 bp, Homo sapiens
  siRNA target sequence for CACNG2 (NM_006078.2,506-524).
gtctgtgcaagcaaattga

SEQ ID NO: 261562 - DNA, 19 bp, Homo sapiens
  siRNA target sequence for CACNG2 (NM_006078.2,654-672).
cagcgagttctacaaaact

SEQ ID NO: 261563 - DNA, 19 bp, Homo sapiens
  siRNA target sequence for CACNG2 (NM_006078.2,738-756).
catcatagtgtacatatct

SEQ ID NO: 261564 - DNA, 19 bp, Homo sapiens
  siRNA target sequence for CACNG2 (NM_006078.2,776-794).
ccaagagcgactccaaaaa

SEQ ID NO: 261565 - DNA, 19 bp, Homo sapiens
  siRNA target sequence for CACNG2 (NM_006078.2,783-801).
cgactccaaaaagaatagt

SEQ ID NO: 261566 - DNA, 19 bp, Homo sapiens
  siRNA target sequence for CACNG2 (NM_006078.2,867-885).
gctggcggtgcacatgttt

SEQ ID NO: 261567 - DNA, 19 bp, Homo sapiens
  siRNA target sequence for CACNG2 (NM_006078.2,868-886).
ctggcggtgcacatgttta

SEQ ID NO: 261568 - DNA, 19 bp, Homo sapiens
  siRNA target sequence for CACNG2 (NM_006078.2,872-890).
cggtgcacatgtttatcga

SEQ ID NO: 261569 - DNA, 19 bp, Homo sapiens
  siRNA target sequence for CACNG2 (NM_006078.2,1048-1066).
ggcatcaagggcttcaaca

SEQ ID NO: 261570 - DNA, 19 bp, Homo sapiens
  siRNA target sequence for CACNG3 (NM_006539.2,1219-1237).
ggtatccagatgttgatca

SEQ ID NO: 261571 - DNA, 19 bp, Homo sapiens
  siRNA target sequence for CACNG3 (NM_006539.2,1251-1269).
ctttgccgcttttagttta

SEQ ID NO: 261572 - DNA, 19 bp, Homo sapiens
  siRNA target sequence for CACNG3 (NM_006539.2,1285-1303).
ggcacggactactggttat

SEQ ID NO: 261573 - DNA, 19 bp, Homo sapiens
  siRNA target sequence for CACNG3 (NM_006539.2,1286-1304).
gcacggactactggttata

SEQ ID NO: 261574 - DNA, 19 bp, Homo sapiens
  siRNA target sequence for CACNG3 (NM_006539.2,1287-1305).
cacggactactggttatat

SEQ ID NO: 261575 - DNA, 19 bp, Homo sapiens
  siRNA target sequence for CACNG3 (NM_006539.2,1291-1309).
gactactggttatattcca

SEQ ID NO: 261576 - DNA, 19 bp, Homo sapiens
  siRNA target sequence for CACNG3 (NM_006539.2,1312-1330).
ggtgtgtgcaggactaaat

SEQ ID NO: 261577 - DNA, 19 bp, Homo sapiens
  siRNA target sequence for CACNG3 (NM_006539.2,1315-1333).
gtgtgcaggactaaatcta

SEQ ID NO: 261578 - DNA, 19 bp, Homo sapiens
  siRNA target sequence for CACNG3 (NM_006539.2,1317-1335).
gtgcaggactaaatctaca

SEQ ID NO: 261579 - DNA, 19 bp, Homo sapiens
  siRNA target sequence for CACNG3 (NM_006539.2,1320-1338).
caggactaaatctacaagt

SEQ ID NO: 261580 - DNA, 19 bp, Homo sapiens
  siRNA target sequence for CACNG3 (NM_006539.2,1323-1341).
gactaaatctacaagtgat

SEQ ID NO: 261581 - DNA, 19 bp, Homo sapiens
  siRNA target sequence for CACNG3 (NM_006539.2,1325-1343).
ctaaatctacaagtgataa

SEQ ID NO: 261582 - DNA, 19 bp, Homo sapiens
  siRNA target sequence for CACNG3 (NM_006539.2,1419-1437).
ccgaggcgtgtgcaagaaa

SEQ ID NO: 261583 - DNA, 19 bp, Homo sapiens
  siRNA target sequence for CACNG3 (NM_006539.2,1420-1438).
cgaggcgtgtgcaagaaaa

SEQ ID NO: 261584 - DNA, 19 bp, Homo sapiens
  siRNA target sequence for CACNG3 (NM_006539.2,1424-1442).
gcgtgtgcaagaaaatcga

SEQ ID NO: 261585 - DNA, 19 bp, Homo sapiens
  siRNA target sequence for CACNG3 (NM_006539.2,1425-1443).
cgtgtgcaagaaaatcgat

SEQ ID NO: 261586 - DNA, 19 bp, Homo sapiens
  siRNA target sequence for CACNG3 (NM_006539.2,1440-1458).
cgatcacttccctgaagat

SEQ ID NO: 261587 - DNA, 19 bp, Homo sapiens
  siRNA target sequence for CACNG3 (NM_006539.2,1532-1550).
gtgtcacgctgctgttctt

SEQ ID NO: 261588 - DNA, 19 bp, Homo sapiens
  siRNA target sequence for CACNG3 (NM_006539.2,1589-1607).
gcagacacaacgtcattct

SEQ ID NO: 261589 - DNA, 19 bp, Homo sapiens
  siRNA target sequence for CACNG3 (NM_006539.2,1698-1716).
gcgtgactccaaaaaaagt

SEQ ID NO: 261590 - DNA, 19 bp, Homo sapiens
  siRNA target sequence for CACNG3 (NM_006539.2,1699-1717).
cgtgactccaaaaaaagtt

SEQ ID NO: 261591 - DNA, 19 bp, Homo sapiens
  siRNA target sequence for CACNG3 (NM_006539.2,1758-1776).
catcatcgcagaaattgta

SEQ ID NO: 261592 - DNA, 19 bp, Homo sapiens
  siRNA target sequence for CACNG3 (NM_006539.2,1782-1800).
ggttgccgtgcacatctat

SEQ ID NO: 261593 - DNA, 19 bp, Homo sapiens
  siRNA target sequence for CACNG3 (NM_006539.2,1783-1801).
gttgccgtgcacatctata

SEQ ID NO: 261594 - DNA, 19 bp, Homo sapiens
  siRNA target sequence for CACNG3 (NM_006539.2,1873-1891).
ccaccctacaggtatcgat

SEQ ID NO: 261595 - DNA, 19 bp, Homo sapiens
  siRNA target sequence for CACNG3 (NM_006539.2,1874-1892).
caccctacaggtatcgatt

SEQ ID NO: 261596 - DNA, 19 bp, Homo sapiens
  siRNA target sequence for CACNG3 (NM_006539.2,2049-2067).
ccgggaccacgcttttcta

SEQ ID NO: 261597 - DNA, 19 bp, Homo sapiens
  siRNA target sequence for CACNG3 (NM_006539.2,2082-2100).
cacacccaaagagttcaaa

SEQ ID NO: 261598 - DNA, 19 bp, Homo sapiens
  siRNA target sequence for CACNG3 (NM_006539.2,2086-2104).
cccaaagagttcaaagagt

SEQ ID NO: 261599 - DNA, 19 bp, Homo sapiens
  siRNA target sequence for CACNG4 (NM_014405.2,228-246).
catcgaagggatctataaa

SEQ ID NO: 261600 - DNA, 19 bp, Homo sapiens
  siRNA target sequence for CACNG4 (NM_014405.2,249-267).
gcactgcttccggatcaat

SEQ ID NO: 261601 - DNA, 19 bp, Homo sapiens
  siRNA target sequence for CACNG4 (NM_014405.2,254-272).
gcttccggatcaatcactt

SEQ ID NO: 261602 - DNA, 19 bp, Homo sapiens
  siRNA target sequence for CACNG4 (NM_014405.2,477-495).
cggtatcatcgtctacatt

SEQ ID NO: 261603 - DNA, 19 bp, Homo sapiens
  siRNA target sequence for CACNG4 (NM_014405.2,610-628).
ggcgtcctggctgtaaaca

SEQ ID NO: 261604 - DNA, 19 bp, Homo sapiens
  siRNA target sequence for CACNG4 (NM_014405.2,611-629).
gcgtcctggctgtaaacat

SEQ ID NO: 261605 - DNA, 19 bp, Homo sapiens
  siRNA target sequence for CACNG4 (NM_014405.2,663-681).
gaccaaacgggaattcctt

SEQ ID NO: 261606 - DNA, 19 bp, Homo sapiens
  siRNA target sequence for CACNG4 (NM_014405.2,916-934).
ctgcaggtgcatgactttt

SEQ ID NO: 261607 - DNA, 19 bp, Homo sapiens
  siRNA target sequence for CACNG5 (NM_014404.1,210-228).
gcgttgcttcaccatagaa

SEQ ID NO: 261608 - DNA, 19 bp, Homo sapiens
  siRNA target sequence for CACNG5 (NM_014404.1,211-229).
cgttgcttcaccatagaat

SEQ ID NO: 261609 - DNA, 19 bp, Homo sapiens
  siRNA target sequence for CACNG5 (NM_014404.1,215-233).
gcttcaccatagaatatgt

SEQ ID NO: 261610 - DNA, 19 bp, Homo sapiens
  siRNA target sequence for CACNG5 (NM_014404.1,260-278).
ccgagtccacggtcaatgt

SEQ ID NO: 261611 - DNA, 19 bp, Homo sapiens
  siRNA target sequence for CACNG5 (NM_014404.1,261-279).
cgagtccacggtcaatgtt

SEQ ID NO: 261612 - DNA, 19 bp, Homo sapiens
  siRNA target sequence for CACNG5 (NM_014404.1,264-282).
gtccacggtcaatgttcta

SEQ ID NO: 261613 - DNA, 19 bp, Homo sapiens
  siRNA target sequence for CACNG5 (NM_014404.1,266-284).
ccacggtcaatgttctaaa

SEQ ID NO: 261614 - DNA, 19 bp, Homo sapiens
  siRNA target sequence for CACNG5 (NM_014404.1,269-287).
cggtcaatgttctaaagat

SEQ ID NO: 261615 - DNA, 19 bp, Homo sapiens
  siRNA target sequence for CACNG5 (NM_014404.1,271-289).
gtcaatgttctaaagatga

SEQ ID NO: 261616 - DNA, 19 bp, Homo sapiens
  siRNA target sequence for CACNG5 (NM_014404.1,341-359).
ggtttatcctgaacaacat

SEQ ID NO: 261617 - DNA, 19 bp, Homo sapiens
  siRNA target sequence for CACNG5 (NM_014404.1,496-514).
gatgcagagacctacttca

SEQ ID NO: 261618 - DNA, 19 bp, Homo sapiens
  siRNA target sequence for CACNG5 (NM_014404.1,546-564).
cgccatctccttcctttta

SEQ ID NO: 261619 - DNA, 19 bp, Homo sapiens
  siRNA target sequence for CACNG5 (NM_014404.1,579-597).
cgtcaccctaagtatggat

SEQ ID NO: 261620 - DNA, 19 bp, Homo sapiens
  siRNA target sequence for CACNG5 (NM_014404.1,580-598).
gtcaccctaagtatggata

SEQ ID NO: 261621 - DNA, 19 bp, Homo sapiens
  siRNA target sequence for CACNG5 (NM_014404.1,654-672).
ggacattccacaaccattt

SEQ ID NO: 261622 - DNA, 19 bp, Homo sapiens
  siRNA target sequence for CACNG5 (NM_014404.1,680-698).
cggaccacccactctactt

SEQ ID NO: 261623 - DNA, 19 bp, Homo sapiens
  siRNA target sequence for CACNG5 (NM_145811.1,666-684).
caactgctccgattactca

SEQ ID NO: 261624 - DNA, 19 bp, Homo sapiens
  siRNA target sequence for CACNG5 (NM_145811.1,786-804).
caagtgccccgactatgat

SEQ ID NO: 261625 - DNA, 19 bp, Homo sapiens
  siRNA target sequence for CACNG5 (NM_145811.1,791-809).
gccccgactatgatcagat

SEQ ID NO: 261626 - DNA, 19 bp, Homo sapiens
  siRNA target sequence for CACNG6 (NM_145814.1,1053-1071).
gggtgcctctgtatcatca

SEQ ID NO: 261627 - DNA, 19 bp, Homo sapiens
  siRNA target sequence for CACNG7 (NM_031896.3,230-248).
gtgtggcctcagaatattt

SEQ ID NO: 261628 - DNA, 19 bp, Homo sapiens
  siRNA target sequence for CACNG7 (NM_031896.3,250-268).
cttgaaccggagatcaatt

SEQ ID NO: 261629 - DNA, 19 bp, Homo sapiens
  siRNA target sequence for CACNG7 (NM_031896.3,275-293).
cggaaaacacggagaatat

SEQ ID NO: 261630 - DNA, 19 bp, Homo sapiens
  siRNA target sequence for CACNG7 (NM_031896.3,276-294).
ggaaaacacggagaatatt

SEQ ID NO: 261631 - DNA, 19 bp, Homo sapiens
  siRNA target sequence for CACNG7 (NM_031896.3,451-469).
gtggtgggcttggttcttt

SEQ ID NO: 261632 - DNA, 19 bp, Homo sapiens
  siRNA target sequence for CACNG7 (NM_031896.3,457-475).
ggcttggttctttacatct

SEQ ID NO: 261633 - DNA, 19 bp, Homo sapiens
  siRNA target sequence for CACNG7 (NM_031896.3,758-776).
gcgacgtgtccatccaaat

SEQ ID NO: 261634 - DNA, 19 bp, Homo sapiens
  siRNA target sequence for CACNG7 (NM_031896.3,760-778).
gacgtgtccatccaaatga

SEQ ID NO: 261635 - DNA, 19 bp, Homo sapiens
  siRNA target sequence for CACNG8 (NM_031895.4,376-394).
ctgcctggaagggttgaaa

SEQ ID NO: 261636 - DNA, 19 bp, Homo sapiens
  siRNA target sequence for CACNG8 (NM_031895.4,396-414).
gaggcgtctgcgtgaagat

SEQ ID NO: 261637 - DNA, 19 bp, Homo sapiens
  siRNA target sequence for CACNG8 (NM_031895.4,398-416).
ggcgtctgcgtgaagatca

SEQ ID NO: 261638 - DNA, 19 bp, Homo sapiens
  siRNA target sequence for CACNG8 (NM_031895.4,400-418).
cgtctgcgtgaagatcaat

SEQ ID NO: 261639 - DNA, 19 bp, Homo sapiens
  siRNA target sequence for CACNG8 (NM_031895.4,403-421).
ctgcgtgaagatcaatcat

SEQ ID NO: 261640 - DNA, 19 bp, Homo sapiens
  siRNA target sequence for CACNG8 (NM_031895.4,405-423).
gcgtgaagatcaatcattt

SEQ ID NO: 261641 - DNA, 19 bp, Homo sapiens
  siRNA target sequence for CACNG8 (NM_031895.4,448-466).
cgacagcgcggagtatcta

SEQ ID NO: 261642 - DNA, 19 bp, Homo sapiens
  siRNA target sequence for CACNG8 (NM_031895.4,545-563).
gcctcccgcgtctacaagt

SEQ ID NO: 261643 - DNA, 19 bp, Homo sapiens
  siRNA target sequence for TRPC1 (NM_003304.3,264-282).
gagaatacgctgaatgaga

SEQ ID NO: 261644 - DNA, 19 bp, Homo sapiens
  siRNA target sequence for TRPC1 (NM_003304.3,271-289).
cgctgaatgagaagctttt

SEQ ID NO: 261645 - DNA, 19 bp, Homo sapiens
  siRNA target sequence for TRPC1 (NM_003304.3,299-317).
gtgcgacaagggtgactat

SEQ ID NO: 261646 - DNA, 19 bp, Homo sapiens
  siRNA target sequence for TRPC1 (NM_003304.3,309-327).
ggtgactattatatggtta

SEQ ID NO: 261647 - DNA, 19 bp, Homo sapiens
  siRNA target sequence for TRPC1 (NM_003304.3,310-328).
gtgactattatatggttaa

SEQ ID NO: 261648 - DNA, 19 bp, Homo sapiens
  siRNA target sequence for TRPC1 (NM_003304.3,352-370).
caggtgacttgaacataaa

SEQ ID NO: 261649 - DNA, 19 bp, Homo sapiens
  siRNA target sequence for TRPC1 (NM_003304.3,354-372).
ggtgacttgaacataaatt

SEQ ID NO: 261650 - DNA, 19 bp, Homo sapiens
  siRNA target sequence for TRPC1 (NM_003304.3,397-415).
ctgttaccataactattga

SEQ ID NO: 261651 - DNA, 19 bp, Homo sapiens
  siRNA target sequence for TRPC1 (NM_003304.3,399-417).
gttaccataactattgaaa

SEQ ID NO: 261652 - DNA, 19 bp, Homo sapiens
  siRNA target sequence for TRPC1 (NM_003304.3,403-421).
ccataactattgaaaacga

SEQ ID NO: 261653 - DNA, 19 bp, Homo sapiens
  siRNA target sequence for TRPC1 (NM_003304.3,452-470).
ctacggttgtcagaaacta

SEQ ID NO: 261654 - DNA, 19 bp, Homo sapiens
  siRNA target sequence for TRPC1 (NM_003304.3,489-507).
cctgagtattcaacaacta

SEQ ID NO: 261655 - DNA, 19 bp, Homo sapiens
  siRNA target sequence for TRPC1 (NM_003304.3,494-512).
gtattcaacaactatggat

SEQ ID NO: 261656 - DNA, 19 bp, Homo sapiens
  siRNA target sequence for TRPC1 (NM_003304.3,509-527).
ggatgttgcacctgtcatt

SEQ ID NO: 261657 - DNA, 19 bp, Homo sapiens
  siRNA target sequence for TRPC1 (NM_003304.3,510-528).
gatgttgcacctgtcattt

SEQ ID NO: 261658 - DNA, 19 bp, Homo sapiens
  siRNA target sequence for TRPC1 (NM_003304.3,532-550).
ctgctcatcgtaacaacta

SEQ ID NO: 261659 - DNA, 19 bp, Homo sapiens
  siRNA target sequence for TRPC1 (NM_003304.3,535-553).
ctcatcgtaacaactatga

SEQ ID NO: 261660 - DNA, 19 bp, Homo sapiens
  siRNA target sequence for TRPC1 (NM_003304.3,567-585).
ctcttaaaacaggatgtat

SEQ ID NO: 261661 - DNA, 19 bp, Homo sapiens
  siRNA target sequence for TRPC1 (NM_003304.3,569-587).
cttaaaacaggatgtatct

SEQ ID NO: 261662 - DNA, 19 bp, Homo sapiens
  siRNA target sequence for TRPC1 (NM_003304.3,609-627).
ggctgtgaatgcacattgt

SEQ ID NO: 261663 - DNA, 19 bp, Homo sapiens
  siRNA target sequence for TRPC1 (NM_003304.3,667-685).
ggtttcgtcttgatatata

SEQ ID NO: 261664 - DNA, 19 bp, Homo sapiens
  siRNA target sequence for TRPC1 (NM_003304.3,668-686).
gtttcgtcttgatatatat

SEQ ID NO: 261665 - DNA, 19 bp, Homo sapiens
  siRNA target sequence for TRPC1 (NM_003304.3,672-690).
cgtcttgatatatatcgat

SEQ ID NO: 261666 - DNA, 19 bp, Homo sapiens
  siRNA target sequence for TRPC1 (NM_003304.3,702-720).
ccagctctaataatgttaa

SEQ ID NO: 261667 - DNA, 19 bp, Homo sapiens
  siRNA target sequence for TRPC1 (NM_003304.3,721-739).
cagaggaggatccaattct

SEQ ID NO: 261668 - DNA, 19 bp, Homo sapiens
  siRNA target sequence for TRPC1 (NM_003304.3,733-751).
caattctgagagcatttga

SEQ ID NO: 261669 - DNA, 19 bp, Homo sapiens
  siRNA target sequence for TRPC1 (NM_003304.3,750-768).
gaacttagtgctgatttaa

SEQ ID NO: 261670 - DNA, 19 bp, Homo sapiens
  siRNA target sequence for TRPC1 (NM_003304.3,862-880).
cccggaattctcgtgaatt

SEQ ID NO: 261671 - DNA, 19 bp, Homo sapiens
  siRNA target sequence for TRPC1 (NM_003304.3,882-900).
gaagttattctaaaccata

SEQ ID NO: 261672 - DNA, 19 bp, Homo sapiens
  siRNA target sequence for TRPC1 (NM_003304.3,923-941).
caaacggggattattagaa

SEQ ID NO: 261673 - DNA, 19 bp, Homo sapiens
  siRNA target sequence for TRPC1 (NM_003304.3,927-945).
cggggattattagaagaaa

SEQ ID NO: 261674 - DNA, 19 bp, Homo sapiens
  siRNA target sequence for TRPC1 (NM_003304.3,958-976).
gtcgtctaaaacttgctat

SEQ ID NO: 261675 - DNA, 19 bp, Homo sapiens
  siRNA target sequence for TRPC1 (NM_003304.3,961-979).
gtctaaaacttgctatcaa

SEQ ID NO: 261676 - DNA, 19 bp, Homo sapiens
  siRNA target sequence for TRPC1 (NM_003304.3,1070-1088).
gcccacctgtaagaagata

SEQ ID NO: 261677 - DNA, 19 bp, Homo sapiens
  siRNA target sequence for TRPC1 (NM_003304.3,1071-1089).
cccacctgtaagaagataa

SEQ ID NO: 261678 - DNA, 19 bp, Homo sapiens
  siRNA target sequence for TRPC1 (NM_003304.3,1072-1090).
ccacctgtaagaagataat

SEQ ID NO: 261679 - DNA, 19 bp, Homo sapiens
  siRNA target sequence for TRPC1 (NM_003304.3,1127-1145).
gtcactttgttatttgata

SEQ ID NO: 261680 - DNA, 19 bp, Homo sapiens
  siRNA target sequence for TRPC1 (NM_003304.3,1203-1221).
catggagcatcatatttca

SEQ ID NO: 261681 - DNA, 19 bp, Homo sapiens
  siRNA target sequence for TRPC1 (NM_003304.3,1232-1250).
gttgcttaatctatactct

SEQ ID NO: 261682 - DNA, 19 bp, Homo sapiens
  siRNA target sequence for TRPC1 (NM_003304.3,1284-1302).
gggccagcccttgaaagaa

SEQ ID NO: 261683 - DNA, 19 bp, Homo sapiens
  siRNA target sequence for TRPC1 (NM_003304.3,1291-1309).
cccttgaaagaatagacta

SEQ ID NO: 261684 - DNA, 19 bp, Homo sapiens
  siRNA target sequence for TRPC1 (NM_003304.3,1311-1329).
cttcttattctgtggatta

SEQ ID NO: 261685 - DNA, 19 bp, Homo sapiens
  siRNA target sequence for TRPC1 (NM_003304.3,1334-1352).
gatgatttggtcagacatt

SEQ ID NO: 261686 - DNA, 19 bp, Homo sapiens
  siRNA target sequence for TRPC1 (NM_003304.3,1399-1417).
gtaatcaactcagttttgt

SEQ ID NO: 261687 - DNA, 19 bp, Homo sapiens
  siRNA target sequence for TRPC1 (NM_003304.3,1492-1510).
ggaaggattgggatgcatt

SEQ ID NO: 261688 - DNA, 19 bp, Homo sapiens
  siRNA target sequence for TRPC1 (NM_003304.3,1496-1514).
ggattgggatgcattccat

SEQ ID NO: 261689 - DNA, 19 bp, Homo sapiens
  siRNA target sequence for TRPC1 (NM_003304.3,1523-1541).
ggtggcagaagggcttttt

SEQ ID NO: 261690 - DNA, 19 bp, Homo sapiens
  siRNA target sequence for TRPC1 (NM_003304.3,1569-1587).
cgtctcttttttatgtata

SEQ ID NO: 261691 - DNA, 19 bp, Homo sapiens
  siRNA target sequence for TRPC1 (NM_003304.3,1597-1615).
ctatcttgggtccattaca

SEQ ID NO: 261692 - DNA, 19 bp, Homo sapiens
  siRNA target sequence for TRPC1 (NM_003304.3,1601-1619).
cttgggtccattacagatt

SEQ ID NO: 261693 - DNA, 19 bp, Homo sapiens
  siRNA target sequence for TRPC1 (NM_003304.3,1604-1622).
gggtccattacagatttca

SEQ ID NO: 261694 - DNA, 19 bp, Homo sapiens
  siRNA target sequence for TRPC1 (NM_003304.3,1605-1623).
ggtccattacagatttcaa

SEQ ID NO: 261695 - DNA, 19 bp, Homo sapiens
  siRNA target sequence for TRPC1 (NM_003304.3,1606-1624).
gtccattacagatttcaat

SEQ ID NO: 261696 - DNA, 19 bp, Homo sapiens
  siRNA target sequence for TRPC1 (NM_003304.3,1698-1716).
ctgacacaactgtatgata

SEQ ID NO: 261697 - DNA, 19 bp, Homo sapiens
  siRNA target sequence for TRPC1 (NM_003304.3,1704-1722).
caactgtatgataaaggat

SEQ ID NO: 261698 - DNA, 19 bp, Homo sapiens
  siRNA target sequence for TRPC1 (NM_003304.3,1840-1858).
cgcatgtggcaatctttgt

SEQ ID NO: 261699 - DNA, 19 bp, Homo sapiens
  siRNA target sequence for TRPC1 (NM_003304.3,1848-1866).
gcaatctttgtcacaagat

SEQ ID NO: 261700 - DNA, 19 bp, Homo sapiens
  siRNA target sequence for TRPC1 (NM_003304.3,1849-1867).
caatctttgtcacaagatt

SEQ ID NO: 261701 - DNA, 19 bp, Homo sapiens
  siRNA target sequence for TRPC1 (NM_003304.3,1907-1925).
cattgttggtacatacaat

SEQ ID NO: 261702 - DNA, 19 bp, Homo sapiens
  siRNA target sequence for TRPC1 (NM_003304.3,1922-1940).
caatgtcgtggttgtgatt

SEQ ID NO: 261703 - DNA, 19 bp, Homo sapiens
  siRNA target sequence for TRPC1 (NM_003304.3,1962-1980).
gcaatgcttcataaaagct

SEQ ID NO: 261704 - DNA, 19 bp, Homo sapiens
  siRNA target sequence for TRPC1 (NM_003304.3,1963-1981).
caatgcttcataaaagctt

SEQ ID NO: 261705 - DNA, 19 bp, Homo sapiens
  siRNA target sequence for TRPC1 (NM_003304.3,1978-1996).
gctttcagttgatagcaaa

SEQ ID NO: 261706 - DNA, 19 bp, Homo sapiens
  siRNA target sequence for TRPC1 (NM_003304.3,1985-2003).
gttgatagcaaatcatgaa

SEQ ID NO: 261707 - DNA, 19 bp, Homo sapiens
  siRNA target sequence for TRPC1 (NM_003304.3,2018-2036).
gtttgctcgagcaaaatta

SEQ ID NO: 261708 - DNA, 19 bp, Homo sapiens
  siRNA target sequence for TRPC1 (NM_003304.3,2038-2056).
ggcttagctactttgatga

SEQ ID NO: 261709 - DNA, 19 bp, Homo sapiens
  siRNA target sequence for TRPC1 (NM_003304.3,2087-2105).
cattccctcaccaaagact

SEQ ID NO: 261710 - DNA, 19 bp, Homo sapiens
  siRNA target sequence for TRPC1 (NM_003304.3,2091-2109).
ccctcaccaaagactatct

SEQ ID NO: 261711 - DNA, 19 bp, Homo sapiens
  siRNA target sequence for TRPC1 (NM_003304.3,2097-2115).
ccaaagactatctgctata

SEQ ID NO: 261712 - DNA, 19 bp, Homo sapiens
  siRNA target sequence for TRPC1 (NM_003304.3,2127-2145).
ctcagtaagtggatttgct

SEQ ID NO: 261713 - DNA, 19 bp, Homo sapiens
  siRNA target sequence for TRPC1 (NM_003304.3,2135-2153).
gtggatttgctctcataca

SEQ ID NO: 261714 - DNA, 19 bp, Homo sapiens
  siRNA target sequence for TRPC1 (NM_003304.3,2166-2184).
gtcaaacggcaaaacagtt

SEQ ID NO: 261715 - DNA, 19 bp, Homo sapiens
  siRNA target sequence for TRPC1 (NM_003304.3,2168-2186).
caaacggcaaaacagttta

SEQ ID NO: 261716 - DNA, 19 bp, Homo sapiens
  siRNA target sequence for TRPC1 (NM_003304.3,2173-2191).
ggcaaaacagtttaaagga

SEQ ID NO: 261717 - DNA, 19 bp, Homo sapiens
  siRNA target sequence for TRPC1 (NM_003304.3,2242-2260).
gctgcctagtgcatcgtta

SEQ ID NO: 261718 - DNA, 19 bp, Homo sapiens
  siRNA target sequence for TRPC1 (NM_003304.3,2245-2263).
gcctagtgcatcgttactt

SEQ ID NO: 261719 - DNA, 19 bp, Homo sapiens
  siRNA target sequence for TRPC1 (NM_003304.3,2247-2265).
ctagtgcatcgttacttga

SEQ ID NO: 261720 - DNA, 19 bp, Homo sapiens
  siRNA target sequence for TRPC1 (NM_003304.3,2327-2345).
gcgccaagatctgtcaaaa

SEQ ID NO: 261721 - DNA, 19 bp, Homo sapiens
  siRNA target sequence for TRPC1 (NM_003304.3,2328-2346).
cgccaagatctgtcaaaat

SEQ ID NO: 261722 - DNA, 19 bp, Homo sapiens
  siRNA target sequence for TRPC1 (NM_003304.3,2329-2347).
gccaagatctgtcaaaatt

SEQ ID NO: 261723 - DNA, 19 bp, Homo sapiens
  siRNA target sequence for TRPC1 (NM_003304.3,2370-2388).
cttggctttcggacttcta

SEQ ID NO: 261724 - DNA, 19 bp, Homo sapiens
  siRNA target sequence for TRPC1 (NM_003304.3,2379-2397).
cggacttctaaatatgcta

SEQ ID NO: 261725 - DNA, 19 bp, Homo sapiens
  siRNA target sequence for TRPC1 (NM_003304.3,2380-2398).
ggacttctaaatatgctat

SEQ ID NO: 261726 - DNA, 19 bp, Homo sapiens
  siRNA target sequence for TRPC3 (NM_003305.1,927-945).
cgcactgccagaaatacga

SEQ ID NO: 261727 - DNA, 19 bp, Homo sapiens
  siRNA target sequence for TRPC3 (NM_003305.1,1054-1072).
ctcacgctcgaggatcaat

SEQ ID NO: 261728 - DNA, 19 bp, Homo sapiens
  siRNA target sequence for TRPC3 (NM_003305.1,1270-1288).
ggtagaagccattctgaat

SEQ ID NO: 261729 - DNA, 19 bp, Homo sapiens
  siRNA target sequence for TRPC3 (NM_003305.1,1327-1345).
gcacaaagcttcattaagt

SEQ ID NO: 261730 - DNA, 19 bp, Homo sapiens
  siRNA target sequence for TRPC3 (NM_003305.1,1338-1356).
cattaagtcgtgtcaaact

SEQ ID NO: 261731 - DNA, 19 bp, Homo sapiens
  siRNA target sequence for TRPC3 (NM_003305.1,1539-1557).
gcagcaggctggggaaaat

SEQ ID NO: 261732 - DNA, 19 bp, Homo sapiens
  siRNA target sequence for TRPC3 (NM_003305.1,1540-1558).
cagcaggctggggaaaatt

SEQ ID NO: 261733 - DNA, 19 bp, Homo sapiens
  siRNA target sequence for TRPC3 (NM_003305.1,1542-1560).
gcaggctggggaaaattct

SEQ ID NO: 261734 - DNA, 19 bp, Homo sapiens
  siRNA target sequence for TRPC3 (NM_003305.1,1586-1604).
gcacatgcagcttctttca

SEQ ID NO: 261735 - DNA, 19 bp, Homo sapiens
  siRNA target sequence for TRPC3 (NM_003305.1,1592-1610).
gcagcttctttcatcatct

SEQ ID NO: 261736 - DNA, 19 bp, Homo sapiens
  siRNA target sequence for TRPC3 (NM_003305.1,1664-1682).
ctgcccaatatcacagtta

SEQ ID NO: 261737 - DNA, 19 bp, Homo sapiens
  siRNA target sequence for TRPC3 (NM_003305.1,1666-1684).
gcccaatatcacagttact

SEQ ID NO: 261738 - DNA, 19 bp, Homo sapiens
  siRNA target sequence for TRPC3 (NM_003305.1,1721-1739).
cagtttacatggactgaaa

SEQ ID NO: 261739 - DNA, 19 bp, Homo sapiens
  siRNA target sequence for TRPC3 (NM_003305.1,1802-1820).
ggacctagggaatacattt

SEQ ID NO: 261740 - DNA, 19 bp, Homo sapiens
  siRNA target sequence for TRPC3 (NM_003305.1,1828-1846).
gtggaatgtgcttgacttt

SEQ ID NO: 261741 - DNA, 19 bp, Homo sapiens
  siRNA target sequence for TRPC3 (NM_003305.1,1905-1923).
caacgaaggcacaacagta

SEQ ID NO: 261742 - DNA, 19 bp, Homo sapiens
  siRNA target sequence for TRPC3 (NM_003305.1,1908-1926).
cgaaggcacaacagtatgt

SEQ ID NO: 261743 - DNA, 19 bp, Homo sapiens
  siRNA target sequence for TRPC3 (NM_003305.1,1973-1991).
ccagagatacagtatttca

SEQ ID NO: 261744 - DNA, 19 bp, Homo sapiens
  siRNA target sequence for TRPC3 (NM_003305.1,1978-1996).
gatacagtatttcacttat

SEQ ID NO: 261745 - DNA, 19 bp, Homo sapiens
  siRNA target sequence for TRPC3 (NM_003305.1,1982-2000).
cagtatttcacttatgcta

SEQ ID NO: 261746 - DNA, 19 bp, Homo sapiens
  siRNA target sequence for TRPC3 (NM_003305.1,2086-2104).
gtacatcctccctgcaaat

SEQ ID NO: 261747 - DNA, 19 bp, Homo sapiens
  siRNA target sequence for TRPC3 (NM_003305.1,2139-2157).
ggactgtaaaggacatatt

SEQ ID NO: 261748 - DNA, 19 bp, Homo sapiens
  siRNA target sequence for TRPC3 (NM_003305.1,2142-2160).
ctgtaaaggacatattcaa

SEQ ID NO: 261749 - DNA, 19 bp, Homo sapiens
  siRNA target sequence for TRPC3 (NM_003305.1,2144-2162).
gtaaaggacatattcaagt

SEQ ID NO: 261750 - DNA, 19 bp, Homo sapiens
  siRNA target sequence for TRPC3 (NM_003305.1,2204-2222).
ggcatgttcatactttatt

SEQ ID NO: 261751 - DNA, 19 bp, Homo sapiens
  siRNA target sequence for TRPC3 (NM_003305.1,2230-2248).
ccttggggctaaagttaat

SEQ ID NO: 261752 - DNA, 19 bp, Homo sapiens
  siRNA target sequence for TRPC3 (NM_003305.1,2378-2396).
ggaatatacaatgtaacta

SEQ ID NO: 261753 - DNA, 19 bp, Homo sapiens
  siRNA target sequence for TRPC3 (NM_003305.1,2379-2397).
gaatatacaatgtaactat

SEQ ID NO: 261754 - DNA, 19 bp, Homo sapiens
  siRNA target sequence for TRPC3 (NM_003305.1,2394-2412).
ctatggtggtcgttttact

SEQ ID NO: 261755 - DNA, 19 bp, Homo sapiens
  siRNA target sequence for TRPC3 (NM_003305.1,2431-2449).
gattaatagctcatatcaa

SEQ ID NO: 261756 - DNA, 19 bp, Homo sapiens
  siRNA target sequence for TRPC3 (NM_003305.1,2482-2500).
gtttgctcgttcaaaactt

SEQ ID NO: 261757 - DNA, 19 bp, Homo sapiens
  siRNA target sequence for TRPC3 (NM_003305.1,2489-2507).
cgttcaaaactttggttat

SEQ ID NO: 261758 - DNA, 19 bp, Homo sapiens
  siRNA target sequence for TRPC3 (NM_003305.1,2493-2511).
caaaactttggttatccta

SEQ ID NO: 261759 - DNA, 19 bp, Homo sapiens
  siRNA target sequence for TRPC3 (NM_003305.1,2502-2520).
ggttatcctattttgatga

SEQ ID NO: 261760 - DNA, 19 bp, Homo sapiens
  siRNA target sequence for TRPC3 (NM_003305.1,2552-2570).
gttcctagtccaaaatcat

SEQ ID NO: 261761 - DNA, 19 bp, Homo sapiens
  siRNA target sequence for TRPC3 (NM_003305.1,2584-2602).
catgcgaattgttaacttt

SEQ ID NO: 261762 - DNA, 19 bp, Homo sapiens
  siRNA target sequence for TRPC3 (NM_003305.1,2688-2706).
ctaactcaagagtttttga

SEQ ID NO: 261763 - DNA, 19 bp, Homo sapiens
  siRNA target sequence for TRPC3 (NM_003305.1,2731-2749).
caatcagccaacacgttat

SEQ ID NO: 261764 - DNA, 19 bp, Homo sapiens
  siRNA target sequence for TRPC3 (NM_003305.1,2742-2760).
cacgttatcagcagataat

SEQ ID NO: 261765 - DNA, 19 bp, Homo sapiens
  siRNA target sequence for TRPC3 (NM_003305.1,2745-2763).
gttatcagcagataatgaa

SEQ ID NO: 261766 - DNA, 19 bp, Homo sapiens
  siRNA target sequence for TRPC3 (NM_003305.1,2768-2786).
cttataaagcggtatgttt

SEQ ID NO: 261767 - DNA, 19 bp, Homo sapiens
  siRNA target sequence for TRPC3 (NM_003305.1,2860-2878).
cagccttcgttatgaactt

SEQ ID NO: 261768 - DNA, 19 bp, Homo sapiens
  siRNA target sequence for TRPC3 (NM_003305.1,2862-2880).
gccttcgttatgaactttt

SEQ ID NO: 261769 - DNA, 19 bp, Homo sapiens
  siRNA target sequence for TRPC3 (NM_003305.1,2905-2923).
ggaattagccattctaatt

SEQ ID NO: 261770 - DNA, 19 bp, Homo sapiens
  siRNA target sequence for TRPC5 (NM_012471.1,922-940).
gcccaactgtactacaaaa

SEQ ID NO: 261771 - DNA, 19 bp, Homo sapiens
  siRNA target sequence for TRPC5 (NM_012471.1,966-984).
ccgcatccccctgcaaatt

SEQ ID NO: 261772 - DNA, 19 bp, Homo sapiens
  siRNA target sequence for TRPC5 (NM_012471.1,1077-1095).
ggaggctgagatctactat

SEQ ID NO: 261773 - DNA, 19 bp, Homo sapiens
  siRNA target sequence for TRPC5 (NM_012471.1,1078-1096).
gaggctgagatctactata

SEQ ID NO: 261774 - DNA, 19 bp, Homo sapiens
  siRNA target sequence for TRPC5 (NM_012471.1,1084-1102).
gagatctactataatgtta

SEQ ID NO: 261775 - DNA, 19 bp, Homo sapiens
  siRNA target sequence for TRPC5 (NM_012471.1,1373-1391).
ccaacaactacgaaatcat

SEQ ID NO: 261776 - DNA, 19 bp, Homo sapiens
  siRNA target sequence for TRPC5 (NM_012471.1,1496-1514).
ctcgctcccgactgaacat

SEQ ID NO: 261777 - DNA, 19 bp, Homo sapiens
  siRNA target sequence for TRPC5 (NM_012471.1,1502-1520).
cccgactgaacatctataa

SEQ ID NO: 261778 - DNA, 19 bp, Homo sapiens
  siRNA target sequence for TRPC5 (NM_012471.1,1527-1545).
ggcaagcccctcactcatt

SEQ ID NO: 261779 - DNA, 19 bp, Homo sapiens
  siRNA target sequence for TRPC5 (NM_012471.1,1889-1907).
ggaaacactgggtagtcaa

SEQ ID NO: 261780 - DNA, 19 bp, Homo sapiens
  siRNA target sequence for TRPC5 (NM_012471.1,1979-1997).
gcaaccttgggctgttcat

SEQ ID NO: 261781 - DNA, 19 bp, Homo sapiens
  siRNA target sequence for TRPC5 (NM_012471.1,2043-2061).
gaccttcctctttatgctt

SEQ ID NO: 261782 - DNA, 19 bp, Homo sapiens
  siRNA target sequence for TRPC5 (NM_012471.1,2117-2135).
caactgtcgtggaatggat

SEQ ID NO: 261783 - DNA, 19 bp, Homo sapiens
  siRNA target sequence for TRPC5 (NM_012471.1,2144-2162).
cttgggttctaggtttcat

SEQ ID NO: 261784 - DNA, 19 bp, Homo sapiens
  siRNA target sequence for TRPC5 (NM_012471.1,2184-2202).
gtgggatggtggatttact

SEQ ID NO: 261785 - DNA, 19 bp, Homo sapiens
  siRNA target sequence for TRPC5 (NM_012471.1,2186-2204).
gggatggtggatttactga

SEQ ID NO: 261786 - DNA, 19 bp, Homo sapiens
  siRNA target sequence for TRPC5 (NM_012471.1,2191-2209).
ggtggatttactgaataca

SEQ ID NO: 261787 - DNA, 19 bp, Homo sapiens
  siRNA target sequence for TRPC5 (NM_012471.1,2220-2238).
gtggaacctgatggatttt

SEQ ID NO: 261788 - DNA, 19 bp, Homo sapiens
  siRNA target sequence for TRPC5 (NM_012471.1,2251-2269).
ctctacctggcaactattt

SEQ ID NO: 261789 - DNA, 19 bp, Homo sapiens
  siRNA target sequence for TRPC5 (NM_012471.1,2281-2299).
gtggcctatgtcaagtata

SEQ ID NO: 261790 - DNA, 19 bp, Homo sapiens
  siRNA target sequence for TRPC5 (NM_012471.1,2283-2301).
ggcctatgtcaagtataat

SEQ ID NO: 261791 - DNA, 19 bp, Homo sapiens
  siRNA target sequence for TRPC5 (NM_012471.1,2331-2349).
gtggcacccgactctgatt

SEQ ID NO: 261792 - DNA, 19 bp, Homo sapiens
  siRNA target sequence for TRPC5 (NM_012471.1,2353-2371).
gaagcactcttcgcaatat

SEQ ID NO: 261793 - DNA, 19 bp, Homo sapiens
  siRNA target sequence for TRPC5 (NM_012471.1,2361-2379).
cttcgcaatatccaacatt

SEQ ID NO: 261794 - DNA, 19 bp, Homo sapiens
  siRNA target sequence for TRPC5 (NM_012471.1,2450-2468).
gacgcatgctgcttgatat

SEQ ID NO: 261795 - DNA, 19 bp, Homo sapiens
  siRNA target sequence for TRPC5 (NM_012471.1,2470-2488).
ctcaaattcctctttatct

SEQ ID NO: 261796 - DNA, 19 bp, Homo sapiens
  siRNA target sequence for TRPC5 (NM_012471.1,2487-2505).
ctactgcctggtactacta

SEQ ID NO: 261797 - DNA, 19 bp, Homo sapiens
  siRNA target sequence for TRPC5 (NM_012471.1,2492-2510).
gcctggtactactagcttt

SEQ ID NO: 261798 - DNA, 19 bp, Homo sapiens
  siRNA target sequence for TRPC5 (NM_012471.1,2493-2511).
cctggtactactagctttt

SEQ ID NO: 261799 - DNA, 19 bp, Homo sapiens
  siRNA target sequence for TRPC5 (NM_012471.1,2518-2536).
ggactgaaccagctttact

SEQ ID NO: 261800 - DNA, 19 bp, Homo sapiens
  siRNA target sequence for TRPC5 (NM_012471.1,2580-2598).
ggggatccgatgtgagaaa

SEQ ID NO: 261801 - DNA, 19 bp, Homo sapiens
  siRNA target sequence for TRPC5 (NM_012471.1,2582-2600).
ggatccgatgtgagaaaca

SEQ ID NO: 261802 - DNA, 19 bp, Homo sapiens
  siRNA target sequence for TRPC5 (NM_012471.1,2700-2718).
cgaattcaccgagtttgta

SEQ ID NO: 261803 - DNA, 19 bp, Homo sapiens
  siRNA target sequence for TRPC5 (NM_012471.1,2793-2811).
caactcctatcagcttatt

SEQ ID NO: 261804 - DNA, 19 bp, Homo sapiens
  siRNA target sequence for TRPC5 (NM_012471.1,2813-2831).
ccgatcatgctgatatcga

SEQ ID NO: 261805 - DNA, 19 bp, Homo sapiens
  siRNA target sequence for TRPC5 (NM_012471.1,2918-2936).
ccaagtcatttctatacct

SEQ ID NO: 261806 - DNA, 19 bp, Homo sapiens
  siRNA target sequence for TRPC5 (NM_012471.1,2919-2937).
caagtcatttctatacctt

SEQ ID NO: 261807 - DNA, 19 bp, Homo sapiens
  siRNA target sequence for TRPC5 (NM_012471.1,2924-2942).
catttctataccttggtaa

SEQ ID NO: 261808 - DNA, 19 bp, Homo sapiens
  siRNA target sequence for TRPC5 (NM_012471.1,2935-2953).
cttggtaactggttcaaca

SEQ ID NO: 261809 - DNA, 19 bp, Homo sapiens
  siRNA target sequence for TRPC5 (NM_012471.1,2989-3007).
cggagaaggcgcaacttga

SEQ ID NO: 261810 - DNA, 19 bp, Homo sapiens
  siRNA target sequence for TRPC5 (NM_012471.1,2996-3014).
ggcgcaacttgagaagttt

SEQ ID NO: 261811 - DNA, 19 bp, Homo sapiens
  siRNA target sequence for TRPC5 (NM_012471.1,3028-3046).
gctgacagcctgatacaaa

SEQ ID NO: 261812 - DNA, 19 bp, Homo sapiens
  siRNA target sequence for TRPC5 (NM_012471.1,3033-3051).
cagcctgatacaaaatcaa

SEQ ID NO: 261813 - DNA, 19 bp, Homo sapiens
  siRNA target sequence for TRPC5 (NM_012471.1,3071-3089).
ggaatttagtcaaaagata

SEQ ID NO: 261814 - DNA, 19 bp, Homo sapiens
  siRNA target sequence for TRPC5 (NM_012471.1,3093-3111).
ggctgctatgataagaaat

SEQ ID NO: 261815 - DNA, 19 bp, Homo sapiens
  siRNA target sequence for TRPC5 (NM_012471.1,3094-3112).
gctgctatgataagaaatt

SEQ ID NO: 261816 - DNA, 19 bp, Homo sapiens
  siRNA target sequence for TRPC5 (NM_012471.1,3170-3188).
ccagctttcggtatgaagt

SEQ ID NO: 261817 - DNA, 19 bp, Homo sapiens
  siRNA target sequence for TRPC5 (NM_012471.1,3249-3267).
gtctcagagagacgataat

SEQ ID NO: 261818 - DNA, 19 bp, Homo sapiens
  siRNA target sequence for TRPC5 (NM_012471.1,3251-3269).
ctcagagagacgataataa

SEQ ID NO: 261819 - DNA, 19 bp, Homo sapiens
  siRNA target sequence for TRPC5 (NM_012471.1,3284-3302).
gggctcgggccaaatccaa

SEQ ID NO: 261820 - DNA, 19 bp, Homo sapiens
  siRNA target sequence for TRPC5 (NM_012471.1,3303-3321).
gagtgtctcttttaattta

SEQ ID NO: 261821 - DNA, 19 bp, Homo sapiens
  siRNA target sequence for TRPC5 (NM_012471.1,3383-3401).
gtgcccaaggaaagtcaaa

SEQ ID NO: 261822 - DNA, 19 bp, Homo sapiens
  siRNA target sequence for TRPC5 (NM_012471.1,3387-3405).
ccaaggaaagtcaaaagct

SEQ ID NO: 261823 - DNA, 19 bp, Homo sapiens
  siRNA target sequence for TRPC5 (NM_012471.1,3454-3472).
ggtctcctattctccaaat

SEQ ID NO: 261824 - DNA, 19 bp, Homo sapiens
  siRNA target sequence for TRPC5 (NM_012471.1,3515-3533).
caatttctgatggaattgt

SEQ ID NO: 261825 - DNA, 19 bp, Homo sapiens
  siRNA target sequence for TRPC5 (NM_012471.1,3532-3550).
gttcagcagcactgtatgt

SEQ ID NO: 261826 - DNA, 19 bp, Homo sapiens
  siRNA target sequence for TRPC5 (NM_012471.1,3549-3567).
gtggcaggacatcagatat

SEQ ID NO: 261827 - DNA, 19 bp, Homo sapiens
  siRNA target sequence for TRPC5 (NM_012471.1,3719-3737).
cctcaaattctaaactttt

SEQ ID NO: 261828 - DNA, 19 bp, Homo sapiens
  siRNA target sequence for TRPC5 (NM_012471.1,3739-3757).
gactcctcagaggatgtat

SEQ ID NO: 261829 - DNA, 19 bp, Homo sapiens
  siRNA target sequence for TRPC5 (NM_012471.1,3808-3826).
ggacaggaagaacaagtta

SEQ ID NO: 261830 - DNA, 19 bp, Homo sapiens
  siRNA target sequence for TRPC6 (NM_004621.3,655-673).
gagaaggttagctaatcga

SEQ ID NO: 261831 - DNA, 19 bp, Homo sapiens
  siRNA target sequence for TRPC6 (NM_004621.3,672-690).
gaggaccagcatacatgtt

SEQ ID NO: 261832 - DNA, 19 bp, Homo sapiens
  siRNA target sequence for TRPC6 (NM_004621.3,674-692).
ggaccagcatacatgttta

SEQ ID NO: 261833 - DNA, 19 bp, Homo sapiens
  siRNA target sequence for TRPC6 (NM_004621.3,678-696).
cagcatacatgtttagtga

SEQ ID NO: 261834 - DNA, 19 bp, Homo sapiens
  siRNA target sequence for TRPC6 (NM_004621.3,698-716).
cgctccacaagcctatcta

SEQ ID NO: 261835 - DNA, 19 bp, Homo sapiens
  siRNA target sequence for TRPC6 (NM_004621.3,699-717).
gctccacaagcctatctat

SEQ ID NO: 261836 - DNA, 19 bp, Homo sapiens
  siRNA target sequence for TRPC6 (NM_004621.3,700-718).
ctccacaagcctatctata

SEQ ID NO: 261837 - DNA, 19 bp, Homo sapiens
  siRNA target sequence for TRPC6 (NM_004621.3,721-739).
ggaggaacgctttttggat

SEQ ID NO: 261838 - DNA, 19 bp, Homo sapiens
  siRNA target sequence for TRPC6 (NM_004621.3,736-754).
ggatgcagctgaatatggt

SEQ ID NO: 261839 - DNA, 19 bp, Homo sapiens
  siRNA target sequence for TRPC6 (NM_004621.3,770-788).
cggaagatgttagaagaat

SEQ ID NO: 261840 - DNA, 19 bp, Homo sapiens
  siRNA target sequence for TRPC6 (NM_004621.3,789-807).
gccactcactcaacgttaa

SEQ ID NO: 261841 - DNA, 19 bp, Homo sapiens
  siRNA target sequence for TRPC6 (NM_004621.3,903-921).
ctcgagttggggatgcttt

SEQ ID NO: 261842 - DNA, 19 bp, Homo sapiens
  siRNA target sequence for TRPC6 (NM_004621.3,926-944).
ctagctattagtaaaggtt

SEQ ID NO: 261843 - DNA, 19 bp, Homo sapiens
  siRNA target sequence for TRPC6 (NM_004621.3,930-948).
ctattagtaaaggttatgt

SEQ ID NO: 261844 - DNA, 19 bp, Homo sapiens
  siRNA target sequence for TRPC6 (NM_004621.3,970-988).
cagtcatccggcttttgct

SEQ ID NO: 261845 - DNA, 19 bp, Homo sapiens
  siRNA target sequence for TRPC6 (NM_004621.3,1025-1043).
gaactccagcaagatgatt

SEQ ID NO: 261846 - DNA, 19 bp, Homo sapiens
  siRNA target sequence for TRPC6 (NM_004621.3,1113-1131).
gccaggaatatgaaattgt

SEQ ID NO: 261847 - DNA, 19 bp, Homo sapiens
  siRNA target sequence for TRPC6 (NM_004621.3,1144-1162).
gcggaagggtgctaggatt

SEQ ID NO: 261848 - DNA, 19 bp, Homo sapiens
  siRNA target sequence for TRPC6 (NM_004621.3,1147-1165).
gaagggtgctaggattgaa

SEQ ID NO: 261849 - DNA, 19 bp, Homo sapiens
  siRNA target sequence for TRPC6 (NM_004621.3,1159-1177).
gattgaacggcctcatgat

SEQ ID NO: 261850 - DNA, 19 bp, Homo sapiens
  siRNA target sequence for TRPC6 (NM_004621.3,1196-1214).
gactgcaaccagaaacaga

SEQ ID NO: 261851 - DNA, 19 bp, Homo sapiens
  siRNA target sequence for TRPC6 (NM_004621.3,1231-1249).
ccactccagatctaggatt

SEQ ID NO: 261852 - DNA, 19 bp, Homo sapiens
  siRNA target sequence for TRPC6 (NM_004621.3,1232-1250).
cactccagatctaggatta

SEQ ID NO: 261853 - DNA, 19 bp, Homo sapiens
  siRNA target sequence for TRPC6 (NM_004621.3,1242-1260).
ctaggattaatgcctataa

SEQ ID NO: 261854 - DNA, 19 bp, Homo sapiens
  siRNA target sequence for TRPC6 (NM_004621.3,1309-1327).
catgacggctttagaactt

SEQ ID NO: 261855 - DNA, 19 bp, Homo sapiens
  siRNA target sequence for TRPC6 (NM_004621.3,1314-1332).
cggctttagaacttagcaa

SEQ ID NO: 261856 - DNA, 19 bp, Homo sapiens
  siRNA target sequence for TRPC6 (NM_004621.3,1499-1517).
cacggtcgcccaaatctca

SEQ ID NO: 261857 - DNA, 19 bp, Homo sapiens
  siRNA target sequence for TRPC6 (NM_004621.3,1591-1609).
ctccatttggtatgagaat

SEQ ID NO: 261858 - DNA, 19 bp, Homo sapiens
  siRNA target sequence for TRPC6 (NM_004621.3,1617-1635).
gtttacgacagcagacaat

SEQ ID NO: 261859 - DNA, 19 bp, Homo sapiens
  siRNA target sequence for TRPC6 (NM_004621.3,1736-1754).
cgtggaccattcatgaagt

SEQ ID NO: 261860 - DNA, 19 bp, Homo sapiens
  siRNA target sequence for TRPC6 (NM_004621.3,1737-1755).
gtggaccattcatgaagtt

SEQ ID NO: 261861 - DNA, 19 bp, Homo sapiens
  siRNA target sequence for TRPC6 (NM_004621.3,1789-1807).
gggactgctagtcatgaat

SEQ ID NO: 261862 - DNA, 19 bp, Homo sapiens
  siRNA target sequence for TRPC6 (NM_004621.3,1906-1924).
gatggagatgctcattata

SEQ ID NO: 261863 - DNA, 19 bp, Homo sapiens
  siRNA target sequence for TRPC6 (NM_004621.3,1910-1928).
gagatgctcattatatcct

SEQ ID NO: 261864 - DNA, 19 bp, Homo sapiens
  siRNA target sequence for TRPC6 (NM_004621.3,1927-1945).
ctgggtaataggcatgata

SEQ ID NO: 261865 - DNA, 19 bp, Homo sapiens
  siRNA target sequence for TRPC6 (NM_004621.3,2098-2116).
cattgacgcaaatgatact

SEQ ID NO: 261866 - DNA, 19 bp, Homo sapiens
  siRNA target sequence for TRPC6 (NM_004621.3,2122-2140).
ggacttgacgaaagtaaca

SEQ ID NO: 261867 - DNA, 19 bp, Homo sapiens
  siRNA target sequence for TRPC6 (NM_004621.3,2188-2206).
cccctctgatcctcaaata

SEQ ID NO: 261868 - DNA, 19 bp, Homo sapiens
  siRNA target sequence for TRPC6 (NM_004621.3,2190-2208).
cctctgatcctcaaataat

SEQ ID NO: 261869 - DNA, 19 bp, Homo sapiens
  siRNA target sequence for TRPC6 (NM_004621.3,2191-2209).
ctctgatcctcaaataata

SEQ ID NO: 261870 - DNA, 19 bp, Homo sapiens
  siRNA target sequence for TRPC6 (NM_004621.3,2244-2262).
gtttctctaggatagctta

SEQ ID NO: 261871 - DNA, 19 bp, Homo sapiens
  siRNA target sequence for TRPC6 (NM_004621.3,2248-2266).
ctctaggatagcttatatt

SEQ ID NO: 261872 - DNA, 19 bp, Homo sapiens
  siRNA target sequence for TRPC6 (NM_004621.3,2254-2272).
gatagcttatattttacca

SEQ ID NO: 261873 - DNA, 19 bp, Homo sapiens
  siRNA target sequence for TRPC6 (NM_004621.3,2299-2317).
gatatcacttggaagaaca

SEQ ID NO: 261874 - DNA, 19 bp, Homo sapiens
  siRNA target sequence for TRPC6 (NM_004621.3,2313-2331).
gaacagtcaaagacatctt

SEQ ID NO: 261875 - DNA, 19 bp, Homo sapiens
  siRNA target sequence for TRPC6 (NM_004621.3,2401-2419).
ctacattggtgcaaaacaa

SEQ ID NO: 261876 - DNA, 19 bp, Homo sapiens
  siRNA target sequence for TRPC6 (NM_004621.3,2469-2487).
ctatatttggactttctga

SEQ ID NO: 261877 - DNA, 19 bp, Homo sapiens
  siRNA target sequence for TRPC6 (NM_004621.3,2496-2514).
cagtggtcatcaactataa

SEQ ID NO: 261878 - DNA, 19 bp, Homo sapiens
  siRNA target sequence for TRPC6 (NM_004621.3,2553-2571).
gagtctataatgttacgat

SEQ ID NO: 261879 - DNA, 19 bp, Homo sapiens
  siRNA target sequence for TRPC6 (NM_004621.3,2573-2591).
gtcattgttttgctaaata

SEQ ID NO: 261880 - DNA, 19 bp, Homo sapiens
  siRNA target sequence for TRPC6 (NM_004621.3,2759-2777).
ctgaagcttaaaaaatgga

SEQ ID NO: 261881 - DNA, 19 bp, Homo sapiens
  siRNA target sequence for TRPC6 (NM_004621.3,2786-2804).
ctgttccagggccataaaa

SEQ ID NO: 261882 - DNA, 19 bp, Homo sapiens
  siRNA target sequence for TRPC6 (NM_004621.3,2791-2809).
ccagggccataaaaaaggt

SEQ ID NO: 261883 - DNA, 19 bp, Homo sapiens
  siRNA target sequence for TRPC6 (NM_004621.3,2920-2938).
caataaacaaccaagtata

SEQ ID NO: 261884 - DNA, 19 bp, Homo sapiens
  siRNA target sequence for TRPC6 (NM_004621.3,2951-2969).
gatttccatctaaatagtt

SEQ ID NO: 261885 - DNA, 19 bp, Homo sapiens
  siRNA target sequence for TRPC6 (NM_004621.3,2957-2975).
catctaaatagtttcaata

SEQ ID NO: 261886 - DNA, 19 bp, Homo sapiens
  siRNA target sequence for TRPC6 (NM_004621.3,2979-2997).
ctccaagacaatatcagaa

SEQ ID NO: 261887 - DNA, 19 bp, Homo sapiens
  siRNA target sequence for TRPC6 (NM_004621.3,3010-3028).
gctcattaaaagatatgta

SEQ ID NO: 261888 - DNA, 19 bp, Homo sapiens
  siRNA target sequence for TRPC6 (NM_004621.3,3100-3118).
ctcaagtctccgctatgaa

SEQ ID NO: 261889 - DNA, 19 bp, Homo sapiens
  siRNA target sequence for TRPC6 (NM_004621.3,3102-3120).
caagtctccgctatgaact

SEQ ID NO: 261890 - DNA, 19 bp, Homo sapiens
  siRNA target sequence for TRPC6 (NM_004621.3,3151-3169).
cctagcagaacttattaga

SEQ ID NO: 261891 - DNA, 19 bp, Homo sapiens
  siRNA target sequence for TRPC6 (NM_004621.3,3168-3186).
gagaacttggagagaaatt

SEQ ID NO: 261892 - DNA, 19 bp, Homo sapiens
  siRNA target sequence for TRPM1 (NM_002420.3,341-359).
gtatatccgtgtatcctat

SEQ ID NO: 261893 - DNA, 19 bp, Homo sapiens
  siRNA target sequence for TRPM1 (NM_002420.3,411-429).
gaactccccaagctcttaa

SEQ ID NO: 261894 - DNA, 19 bp, Homo sapiens
  siRNA target sequence for TRPM1 (NM_002420.3,416-434).
ccccaagctcttaatatct

SEQ ID NO: 261895 - DNA, 19 bp, Homo sapiens
  siRNA target sequence for TRPM1 (NM_002420.3,418-436).
ccaagctcttaatatctgt

SEQ ID NO: 261896 - DNA, 19 bp, Homo sapiens
  siRNA target sequence for TRPM1 (NM_002420.3,544-562).
gtgtcagcacaggtgttat

SEQ ID NO: 261897 - DNA, 19 bp, Homo sapiens
  siRNA target sequence for TRPM1 (NM_002420.3,546-564).
gtcagcacaggtgttatca

SEQ ID NO: 261898 - DNA, 19 bp, Homo sapiens
  siRNA target sequence for TRPM1 (NM_002420.3,612-630).
cgggtttgtgctataggaa

SEQ ID NO: 261899 - DNA, 19 bp, Homo sapiens
  siRNA target sequence for TRPM1 (NM_002420.3,666-684).
ctggttggaaaggatgtaa

SEQ ID NO: 261900 - DNA, 19 bp, Homo sapiens
  siRNA target sequence for TRPM1 (NM_002420.3,668-686).
ggttggaaaggatgtaaca

SEQ ID NO: 261901 - DNA, 19 bp, Homo sapiens
  siRNA target sequence for TRPM1 (NM_002420.3,701-719).
catgtccaaccctctaagt

SEQ ID NO: 261902 - DNA, 19 bp, Homo sapiens
  siRNA target sequence for TRPM1 (NM_002420.3,909-927).
gtgtccatcgtcttggaat

SEQ ID NO: 261903 - DNA, 19 bp, Homo sapiens
  siRNA target sequence for TRPM1 (NM_002420.3,913-931).
ccatcgtcttggaatacct

SEQ ID NO: 261904 - DNA, 19 bp, Homo sapiens
  siRNA target sequence for TRPM1 (NM_002420.3,945-963).
cccatccctgtggtgattt

SEQ ID NO: 261905 - DNA, 19 bp, Homo sapiens
  siRNA target sequence for TRPM1 (NM_002420.3,1023-1041).
ggcggaataataaatgagt

SEQ ID NO: 261906 - DNA, 19 bp, Homo sapiens
  siRNA target sequence for TRPM1 (NM_002420.3,1059-1077).
ctagttaccattcagaaaa

SEQ ID NO: 261907 - DNA, 19 bp, Homo sapiens
  siRNA target sequence for TRPM1 (NM_002420.3,1104-1122).
catcagctgtttgcaatta

SEQ ID NO: 261908 - DNA, 19 bp, Homo sapiens
  siRNA target sequence for TRPM1 (NM_002420.3,1188-1206).
gacatcgagatggcaattt

SEQ ID NO: 261909 - DNA, 19 bp, Homo sapiens
  siRNA target sequence for TRPM1 (NM_002420.3,1190-1208).
catcgagatggcaatttta

SEQ ID NO: 261910 - DNA, 19 bp, Homo sapiens
  siRNA target sequence for TRPM1 (NM_002420.3,1213-1231).
ccctgctgaaaggaacaaa

SEQ ID NO: 261911 - DNA, 19 bp, Homo sapiens
  siRNA target sequence for TRPM1 (NM_002420.3,1218-1236).
ctgaaaggaacaaacgtat

SEQ ID NO: 261912 - DNA, 19 bp, Homo sapiens
  siRNA target sequence for TRPM1 (NM_002420.3,1288-1306).
cacgaagccagatctttgt

SEQ ID NO: 261913 - DNA, 19 bp, Homo sapiens
  siRNA target sequence for TRPM1 (NM_002420.3,1290-1308).
cgaagccagatctttgtct

SEQ ID NO: 261914 - DNA, 19 bp, Homo sapiens
  siRNA target sequence for TRPM1 (NM_002420.3,1542-1560).
gatcgtgtcgactttgtga

SEQ ID NO: 261915 - DNA, 19 bp, Homo sapiens
  siRNA target sequence for TRPM1 (NM_002420.3,1609-1627).
cgaggctggaggagcttta

SEQ ID NO: 261916 - DNA, 19 bp, Homo sapiens
  siRNA target sequence for TRPM1 (NM_002420.3,1616-1634).
ggaggagctttataacaca

SEQ ID NO: 261917 - DNA, 19 bp, Homo sapiens
  siRNA target sequence for TRPM1 (NM_002420.3,1645-1663).
caccaaacacacttcatct

SEQ ID NO: 261918 - DNA, 19 bp, Homo sapiens
  siRNA target sequence for TRPM1 (NM_002420.3,1687-1705).
gcaaccttccgcctgatta

SEQ ID NO: 261919 - DNA, 19 bp, Homo sapiens
  siRNA target sequence for TRPM1 (NM_002420.3,1768-1786).
gcaactacactcggaaaaa

SEQ ID NO: 261920 - DNA, 19 bp, Homo sapiens
  siRNA target sequence for TRPM1 (NM_002420.3,1791-1809).
cggaccctttacaacaact

SEQ ID NO: 261921 - DNA, 19 bp, Homo sapiens
  siRNA target sequence for TRPM1 (NM_002420.3,1795-1813).
ccctttacaacaacttgtt

SEQ ID NO: 261922 - DNA, 19 bp, Homo sapiens
  siRNA target sequence for TRPM1 (NM_002420.3,1823-1841).
gaggcctaaagctcttaaa

SEQ ID NO: 261923 - DNA, 19 bp, Homo sapiens
  siRNA target sequence for TRPM1 (NM_002420.3,1825-1843).
ggcctaaagctcttaaact

SEQ ID NO: 261924 - DNA, 19 bp, Homo sapiens
  siRNA target sequence for TRPM1 (NM_002420.3,2125-2143).
cccaggacttggataacaa

SEQ ID NO: 261925 - DNA, 19 bp, Homo sapiens
  siRNA target sequence for TRPM1 (NM_002420.3,2127-2145).
caggacttggataacaatt

SEQ ID NO: 261926 - DNA, 19 bp, Homo sapiens
  siRNA target sequence for TRPM1 (NM_002420.3,2378-2396).
ggttatcatggggattctt

SEQ ID NO: 261927 - DNA, 19 bp, Homo sapiens
  siRNA target sequence for TRPM1 (NM_002420.3,2427-2445).
cgcacatatgatgatttct

SEQ ID NO: 261928 - DNA, 19 bp, Homo sapiens
  siRNA target sequence for TRPM1 (NM_002420.3,2436-2454).
gatgatttctcgtatcaaa

SEQ ID NO: 261929 - DNA, 19 bp, Homo sapiens
  siRNA target sequence for TRPM1 (NM_002420.3,2571-2589).
cccatcggaacaaagatct

SEQ ID NO: 261930 - DNA, 19 bp, Homo sapiens
  siRNA target sequence for TRPM1 (NM_002420.3,2621-2639).
ctggttttacacaatatca

SEQ ID NO: 261931 - DNA, 19 bp, Homo sapiens
  siRNA target sequence for TRPM1 (NM_002420.3,2841-2859).
gtggccatttccacattca

SEQ ID NO: 261932 - DNA, 19 bp, Homo sapiens
  siRNA target sequence for TRPM1 (NM_002420.3,2869-2887).
caattcttcgcctacagaa

SEQ ID NO: 261933 - DNA, 19 bp, Homo sapiens
  siRNA target sequence for TRPM1 (NM_002420.3,2963-2981).
ctttggtgtcaacaagtat

SEQ ID NO: 261934 - DNA, 19 bp, Homo sapiens
  siRNA target sequence for TRPM1 (NM_002420.3,2985-3003).
gggccatacgtgatgatga

SEQ ID NO: 261935 - DNA, 19 bp, Homo sapiens
  siRNA target sequence for TRPM1 (NM_002420.3,2986-3004).
ggccatacgtgatgatgat

SEQ ID NO: 261936 - DNA, 19 bp, Homo sapiens
  siRNA target sequence for TRPM1 (NM_002420.3,3048-3066).
ctggtcgtgctcatgagtt

SEQ ID NO: 261937 - DNA, 19 bp, Homo sapiens
  siRNA target sequence for TRPM1 (NM_002420.3,3115-3133).
ggaaactggcccgaaacat

SEQ ID NO: 261938 - DNA, 19 bp, Homo sapiens
  siRNA target sequence for TRPM1 (NM_002420.3,3120-3138).
ctggcccgaaacatcttct

SEQ ID NO: 261939 - DNA, 19 bp, Homo sapiens
  siRNA target sequence for TRPM1 (NM_002420.3,3124-3142).
cccgaaacatcttctacat

SEQ ID NO: 261940 - DNA, 19 bp, Homo sapiens
  siRNA target sequence for TRPM1 (NM_002420.3,3213-3231).
ccttgtggtgagaacctat

SEQ ID NO: 261941 - DNA, 19 bp, Homo sapiens
  siRNA target sequence for TRPM1 (NM_002420.3,3214-3232).
cttgtggtgagaacctata

SEQ ID NO: 261942 - DNA, 19 bp, Homo sapiens
  siRNA target sequence for TRPM1 (NM_002420.3,3217-3235).
gtggtgagaacctatatga

SEQ ID NO: 261943 - DNA, 19 bp, Homo sapiens
  siRNA target sequence for TRPM1 (NM_002420.3,3405-3423).
cagcgatatcagctgatta

SEQ ID NO: 261944 - DNA, 19 bp, Homo sapiens
  siRNA target sequence for TRPM1 (NM_002420.3,3408-3426).
cgatatcagctgattatga

SEQ ID NO: 261945 - DNA, 19 bp, Homo sapiens
  siRNA target sequence for TRPM1 (NM_002420.3,3449-3467).
gcccccaccgatgatcatt

SEQ ID NO: 261946 - DNA, 19 bp, Homo sapiens
  siRNA target sequence for TRPM1 (NM_002420.3,3450-3468).
cccccaccgatgatcattt

SEQ ID NO: 261947 - DNA, 19 bp, Homo sapiens
  siRNA target sequence for TRPM1 (NM_002420.3,3451-3469).
ccccaccgatgatcatttt

SEQ ID NO: 261948 - DNA, 19 bp, Homo sapiens
  siRNA target sequence for TRPM1 (NM_002420.3,3452-3470).
cccaccgatgatcatttta

SEQ ID NO: 261949 - DNA, 19 bp, Homo sapiens
  siRNA target sequence for TRPM1 (NM_002420.3,3453-3471).
ccaccgatgatcattttaa

SEQ ID NO: 261950 - DNA, 19 bp, Homo sapiens
  siRNA target sequence for TRPM1 (NM_002420.3,3674-3692).
ccgggtcacttctgaaaga

SEQ ID NO: 261951 - DNA, 19 bp, Homo sapiens
  siRNA target sequence for TRPM1 (NM_002420.3,3677-3695).
ggtcacttctgaaagagtt

SEQ ID NO: 261952 - DNA, 19 bp, Homo sapiens
  siRNA target sequence for TRPM1 (NM_002420.3,3775-3793).
gacttgctcagctagaaga

SEQ ID NO: 261953 - DNA, 19 bp, Homo sapiens
  siRNA target sequence for TRPM1 (NM_002420.3,3777-3795).
cttgctcagctagaagaat

SEQ ID NO: 261954 - DNA, 19 bp, Homo sapiens
  siRNA target sequence for TRPM1 (NM_002420.3,3886-3904).
gtgaggcaacgtatcttct

SEQ ID NO: 261955 - DNA, 19 bp, Homo sapiens
  siRNA target sequence for TRPM1 (NM_002420.3,3933-3951).
ggctacagcttgtatcgat

SEQ ID NO: 261956 - DNA, 19 bp, Homo sapiens
  siRNA target sequence for TRPM1 (NM_002420.3,3934-3952).
gctacagcttgtatcgata

SEQ ID NO: 261957 - DNA, 19 bp, Homo sapiens
  siRNA target sequence for TRPM1 (NM_002420.3,3935-3953).
ctacagcttgtatcgatat

SEQ ID NO: 261958 - DNA, 19 bp, Homo sapiens
  siRNA target sequence for TRPM1 (NM_002420.3,3938-3956).
cagcttgtatcgatatcat

SEQ ID NO: 261959 - DNA, 19 bp, Homo sapiens
  siRNA target sequence for TRPM1 (NM_002420.3,3962-3980).
cggagaagagttattattt

SEQ ID NO: 261960 - DNA, 19 bp, Homo sapiens
  siRNA target sequence for TRPM1 (NM_002420.3,4030-4048).
cctgttccttccgtataaa

SEQ ID NO: 261961 - DNA, 19 bp, Homo sapiens
  siRNA target sequence for TRPM1 (NM_002420.3,4033-4051).
gttccttccgtataaagga

SEQ ID NO: 261962 - DNA, 19 bp, Homo sapiens
  siRNA target sequence for TRPM1 (NM_002420.3,4144-4162).
gtcaccttgcagtagatga

SEQ ID NO: 261963 - DNA, 19 bp, Homo sapiens
  siRNA target sequence for TRPM1 (NM_002420.3,4152-4170).
gcagtagatgacttaaaga

SEQ ID NO: 261964 - DNA, 19 bp, Homo sapiens
  siRNA target sequence for TRPM1 (NM_002420.3,4169-4187).
gaacgctgaagagtcaaaa

SEQ ID NO: 261965 - DNA, 19 bp, Homo sapiens
  siRNA target sequence for TRPM1 (NM_002420.3,4381-4399).
ccaaaattacacgctattt

SEQ ID NO: 261966 - DNA, 19 bp, Homo sapiens
  siRNA target sequence for TRPM1 (NM_002420.3,4392-4410).
cgctatttccccgatgaaa

SEQ ID NO: 261967 - DNA, 19 bp, Homo sapiens
  siRNA target sequence for TRPM1 (NM_002420.3,4400-4418).
ccccgatgaaacgatcaat

SEQ ID NO: 261968 - DNA, 19 bp, Homo sapiens
  siRNA target sequence for TRPM1 (NM_002420.3,4404-4422).
gatgaaacgatcaatgctt

SEQ ID NO: 261969 - DNA, 19 bp, Homo sapiens
  siRNA target sequence for TRPM1 (NM_002420.3,4412-4430).
gatcaatgcttgtaaaaca

SEQ ID NO: 261970 - DNA, 19 bp, Homo sapiens
  siRNA target sequence for TRPM1 (NM_002420.3,4480-4498).
gggttaaccaggatgtaga

SEQ ID NO: 261971 - DNA, 19 bp, Homo sapiens
  siRNA target sequence for TRPM1 (NM_002420.3,4491-4509).
gatgtagagtacagttcaa

SEQ ID NO: 261972 - DNA, 19 bp, Homo sapiens
  siRNA target sequence for TRPM1 (NM_002420.3,4507-4525).
caatcacggaccagcaatt

SEQ ID NO: 261973 - DNA, 19 bp, Homo sapiens
  siRNA target sequence for TRPM1 (NM_002420.3,4565-4583).
ctctcatagcacagatatt

SEQ ID NO: 261974 - DNA, 19 bp, Homo sapiens
  siRNA target sequence for TRPM1 (NM_002420.3,4569-4587).
catagcacagatattcctt

SEQ ID NO: 261975 - DNA, 19 bp, Homo sapiens
  siRNA target sequence for TRPM1 (NM_002420.3,4578-4596).
gatattccttacattgtgt

SEQ ID NO: 261976 - DNA, 19 bp, Homo sapiens
  siRNA target sequence for TRPM1 (NM_002420.3,4628-4646).
gcagtttgcagatatgcaa

SEQ ID NO: 261977 - DNA, 19 bp, Homo sapiens
  siRNA target sequence for TRPM1 (NM_002420.3,4655-4673).
ccatgtcgctgaagcaatt

SEQ ID NO: 261978 - DNA, 19 bp, Homo sapiens
  siRNA target sequence for TRPM1 (NM_002420.3,4684-4702).
ctcgcttgtccctaaccat

SEQ ID NO: 261979 - DNA, 19 bp, Homo sapiens
  siRNA target sequence for TRPM1 (NM_002420.3,4686-4704).
cgcttgtccctaaccatta

SEQ ID NO: 261980 - DNA, 19 bp, Homo sapiens
  siRNA target sequence for TRPM1 (NM_002420.3,4688-4706).
cttgtccctaaccattact

SEQ ID NO: 261981 - DNA, 19 bp, Homo sapiens
  siRNA target sequence for TRPM1 (NM_002420.3,4716-4734).
gggatggaaaacttactgt

SEQ ID NO: 261982 - DNA, 19 bp, Homo sapiens
  siRNA target sequence for TRPM1 (NM_002420.3,4733-4751).
gtctgtgaagccagatcaa

SEQ ID NO: 261983 - DNA, 19 bp, Homo sapiens
  siRNA target sequence for TRPM1 (NM_002420.3,4791-4809).
ggacatcctaggaatgtga

SEQ ID NO: 261984 - DNA, 19 bp, Homo sapiens
  siRNA target sequence for TRPM1 (NM_002420.3,4839-4857).
ggacatgccagtagtgtaa

SEQ ID NO: 261985 - DNA, 19 bp, Homo sapiens
  siRNA target sequence for TRPM1 (NM_002420.3,4913-4931).
gaaagcttccacagaaact

SEQ ID NO: 261986 - DNA, 19 bp, Homo sapiens
  siRNA target sequence for TRPM3 (NM_020952.1,7-25).
gtgcgagtatcttttgata

SEQ ID NO: 261987 - DNA, 19 bp, Homo sapiens
  siRNA target sequence for TRPM3 (NM_020952.1,9-27).
gcgagtatcttttgataca

SEQ ID NO: 261988 - DNA, 19 bp, Homo sapiens
  siRNA target sequence for TRPM3 (NM_020952.1,10-28).
cgagtatcttttgatacaa

SEQ ID NO: 261989 - DNA, 19 bp, Homo sapiens
  siRNA target sequence for TRPM3 (NM_020952.1,46-64).
cacctgatgaccaaggaat

SEQ ID NO: 261990 - DNA, 19 bp, Homo sapiens
  siRNA target sequence for TRPM3 (NM_020952.1,249-267).
ggatcatgcctctaagtct

SEQ ID NO: 261991 - DNA, 19 bp, Homo sapiens
  siRNA target sequence for TRPM3 (NM_020952.1,276-294).
gatatgcaccataggtatt

SEQ ID NO: 261992 - DNA, 19 bp, Homo sapiens
  siRNA target sequence for TRPM3 (NM_020952.1,380-398).
gcaagctcactgttctcaa

SEQ ID NO: 261993 - DNA, 19 bp, Homo sapiens
  siRNA target sequence for TRPM3 (NM_020952.1,391-409).
gttctcaacagcatgcatt

SEQ ID NO: 261994 - DNA, 19 bp, Homo sapiens
  siRNA target sequence for TRPM3 (NM_020952.1,402-420).
catgcattcccacttcatt

SEQ ID NO: 261995 - DNA, 19 bp, Homo sapiens
  siRNA target sequence for TRPM3 (NM_020952.1,429-447).
caacgggaccactggaaaa

SEQ ID NO: 261996 - DNA, 19 bp, Homo sapiens
  siRNA target sequence for TRPM3 (NM_020952.1,564-582).
caatgtgatctcgattgtt

SEQ ID NO: 261997 - DNA, 19 bp, Homo sapiens
  siRNA target sequence for TRPM3 (NM_020952.1,685-703).
ggcggactgataaatgaat

SEQ ID NO: 261998 - DNA, 19 bp, Homo sapiens
  siRNA target sequence for TRPM3 (NM_020952.1,718-736).
ctgttggtgactatacaga

SEQ ID NO: 261999 - DNA, 19 bp, Homo sapiens
  siRNA target sequence for TRPM3 (NM_020952.1,724-742).
gtgactatacagaagactt

SEQ ID NO: 262000 - DNA, 19 bp, Homo sapiens
  siRNA target sequence for TRPM3 (NM_020952.1,763-781).
gctcagcatctgttcatca

SEQ ID NO: 262001 - DNA, 19 bp, Homo sapiens
  siRNA target sequence for TRPM3 (NM_020952.1,764-782).
ctcagcatctgttcatcat

SEQ ID NO: 262002 - DNA, 19 bp, Homo sapiens
  siRNA target sequence for TRPM3 (NM_020952.1,861-879).
ggctatcctgacagcttta

SEQ ID NO: 262003 - DNA, 19 bp, Homo sapiens
  siRNA target sequence for TRPM3 (NM_020952.1,863-881).
ctatcctgacagctttact

SEQ ID NO: 262004 - DNA, 19 bp, Homo sapiens
  siRNA target sequence for TRPM3 (NM_020952.1,867-885).
cctgacagctttactcaaa

SEQ ID NO: 262005 - DNA, 19 bp, Homo sapiens
  siRNA target sequence for TRPM3 (NM_020952.1,907-925).
gaccaactgagcttagctt

SEQ ID NO: 262006 - DNA, 19 bp, Homo sapiens
  siRNA target sequence for TRPM3 (NM_020952.1,909-927).
ccaactgagcttagcttta

SEQ ID NO: 262007 - DNA, 19 bp, Homo sapiens
  siRNA target sequence for TRPM3 (NM_020952.1,948-966).
cgctcgcagccagatcttt

SEQ ID NO: 262008 - DNA, 19 bp, Homo sapiens
  siRNA target sequence for TRPM3 (NM_020952.1,950-968).
ctcgcagccagatctttat

SEQ ID NO: 262009 - DNA, 19 bp, Homo sapiens
  siRNA target sequence for TRPM3 (NM_020952.1,1045-1063).
gtgaaattactcatagaga

SEQ ID NO: 262010 - DNA, 19 bp, Homo sapiens
  siRNA target sequence for TRPM3 (NM_020952.1,1097-1115).
ccagactagaggaattgta

SEQ ID NO: 262011 - DNA, 19 bp, Homo sapiens
  siRNA target sequence for TRPM3 (NM_020952.1,1100-1118).
gactagaggaattgtacaa

SEQ ID NO: 262012 - DNA, 19 bp, Homo sapiens
  siRNA target sequence for TRPM3 (NM_020952.1,1102-1120).
ctagaggaattgtacaata

SEQ ID NO: 262013 - DNA, 19 bp, Homo sapiens
  siRNA target sequence for TRPM3 (NM_020952.1,1105-1123).
gaggaattgtacaatacga

SEQ ID NO: 262014 - DNA, 19 bp, Homo sapiens
  siRNA target sequence for TRPM3 (NM_020952.1,1122-1140).
gagacatgggccctcaaat

SEQ ID NO: 262015 - DNA, 19 bp, Homo sapiens
  siRNA target sequence for TRPM3 (NM_020952.1,1126-1144).
catgggccctcaaatacat

SEQ ID NO: 262016 - DNA, 19 bp, Homo sapiens
  siRNA target sequence for TRPM3 (NM_020952.1,1129-1147).
gggccctcaaatacattgt

SEQ ID NO: 262017 - DNA, 19 bp, Homo sapiens
  siRNA target sequence for TRPM3 (NM_020952.1,1130-1148).
ggccctcaaatacattgta

SEQ ID NO: 262018 - DNA, 19 bp, Homo sapiens
  siRNA target sequence for TRPM3 (NM_020952.1,1183-1201).
cccccagactacagaatca

SEQ ID NO: 262019 - DNA, 19 bp, Homo sapiens
  siRNA target sequence for TRPM3 (NM_020952.1,1196-1214).
gaatcagcctgattgacat

SEQ ID NO: 262020 - DNA, 19 bp, Homo sapiens
  siRNA target sequence for TRPM3 (NM_020952.1,1393-1411).
gaagaggtggacattgact

SEQ ID NO: 262021 - DNA, 19 bp, Homo sapiens
  siRNA target sequence for TRPM3 (NM_020952.1,1591-1609).
gacatggttgacgacattt

SEQ ID NO: 262022 - DNA, 19 bp, Homo sapiens
  siRNA target sequence for TRPM3 (NM_020952.1,1834-1852).
ctccgcatgcgcaagaact

SEQ ID NO: 262023 - DNA, 19 bp, Homo sapiens
  siRNA target sequence for TRPM3 (NM_020952.1,1851-1869).
ctcaggcctcaaggtaatt

SEQ ID NO: 262024 - DNA, 19 bp, Homo sapiens
  siRNA target sequence for TRPM3 (NM_020952.1,1853-1871).
caggcctcaaggtaattct

SEQ ID NO: 262025 - DNA, 19 bp, Homo sapiens
  siRNA target sequence for TRPM3 (NM_020952.1,1897-1915).
ctcagcttggagttcaaga

SEQ ID NO: 262026 - DNA, 19 bp, Homo sapiens
  siRNA target sequence for TRPM3 (NM_020952.1,1921-1939).
gacgacatgccctatatgt

SEQ ID NO: 262027 - DNA, 19 bp, Homo sapiens
  siRNA target sequence for TRPM3 (NM_020952.1,1923-1941).
cgacatgccctatatgtct

SEQ ID NO: 262028 - DNA, 19 bp, Homo sapiens
  siRNA target sequence for TRPM3 (NM_020952.1,2033-2051).
caatgttgggacgaaacaa

SEQ ID NO: 262029 - DNA, 19 bp, Homo sapiens
  siRNA target sequence for TRPM3 (NM_020952.1,2110-2128).
cccctcggcagaaaaatct

SEQ ID NO: 262030 - DNA, 19 bp, Homo sapiens
  siRNA target sequence for TRPM3 (NM_020952.1,2111-2129).
ccctcggcagaaaaatcta

SEQ ID NO: 262031 - DNA, 19 bp, Homo sapiens
  siRNA target sequence for TRPM3 (NM_020952.1,2112-2130).
cctcggcagaaaaatctat

SEQ ID NO: 262032 - DNA, 19 bp, Homo sapiens
  siRNA target sequence for TRPM3 (NM_020952.1,2143-2161).
gcacccatcgtgaagttct

SEQ ID NO: 262033 - DNA, 19 bp, Homo sapiens
  siRNA target sequence for TRPM3 (NM_020952.1,2190-2208).
cctgatgctcttcaactat

SEQ ID NO: 262034 - DNA, 19 bp, Homo sapiens
  siRNA target sequence for TRPM3 (NM_020952.1,2191-2209).
ctgatgctcttcaactata

SEQ ID NO: 262035 - DNA, 19 bp, Homo sapiens
  siRNA target sequence for TRPM3 (NM_020952.1,2243-2261).
cccaggaatggatcgtaat

SEQ ID NO: 262036 - DNA, 19 bp, Homo sapiens
  siRNA target sequence for TRPM3 (NM_020952.1,2253-2271).
gatcgtaatctcctatatt

SEQ ID NO: 262037 - DNA, 19 bp, Homo sapiens
  siRNA target sequence for TRPM3 (NM_020952.1,2382-2400).
cgccatccttctgttttct

SEQ ID NO: 262038 - DNA, 19 bp, Homo sapiens
  siRNA target sequence for TRPM3 (NM_020952.1,2441-2459).
gtgacgggagggtcatcta

SEQ ID NO: 262039 - DNA, 19 bp, Homo sapiens
  siRNA target sequence for TRPM3 (NM_020952.1,2443-2461).
gacgggagggtcatctact

SEQ ID NO: 262040 - DNA, 19 bp, Homo sapiens
  siRNA target sequence for TRPM3 (NM_020952.1,2457-2475).
ctactgcgtgaacatcatt

SEQ ID NO: 262041 - DNA, 19 bp, Homo sapiens
  siRNA target sequence for TRPM3 (NM_020952.1,2502-2520).
cttcggcgtgaacaagtat

SEQ ID NO: 262042 - DNA, 19 bp, Homo sapiens
  siRNA target sequence for TRPM3 (NM_020952.1,2565-2583).
gatgtactttgtcatcatt

SEQ ID NO: 262043 - DNA, 19 bp, Homo sapiens
  siRNA target sequence for TRPM3 (NM_020952.1,2727-2745).
ccctccctgtggacagaat

SEQ ID NO: 262044 - DNA, 19 bp, Homo sapiens
  siRNA target sequence for TRPM3 (NM_020952.1,2729-2747).
ctccctgtggacagaatga

SEQ ID NO: 262045 - DNA, 19 bp, Homo sapiens
  siRNA target sequence for TRPM3 (NM_020952.1,2750-2768).
cccgagaggatggtaaaat

SEQ ID NO: 262046 - DNA, 19 bp, Homo sapiens
  siRNA target sequence for TRPM3 (NM_020952.1,2751-2769).
ccgagaggatggtaaaata

SEQ ID NO: 262047 - DNA, 19 bp, Homo sapiens
  siRNA target sequence for TRPM3 (NM_020952.1,2752-2770).
cgagaggatggtaaaataa

SEQ ID NO: 262048 - DNA, 19 bp, Homo sapiens
  siRNA target sequence for TRPM3 (NM_020952.1,2753-2771).
gagaggatggtaaaataat

SEQ ID NO: 262049 - DNA, 19 bp, Homo sapiens
  siRNA target sequence for TRPM3 (NM_020952.1,2870-2888).
ctgtctttaacaatacatt

SEQ ID NO: 262050 - DNA, 19 bp, Homo sapiens
  siRNA target sequence for TRPM3 (NM_020952.1,2996-3014).
gccacatgaccatgatatt

SEQ ID NO: 262051 - DNA, 19 bp, Homo sapiens
  siRNA target sequence for TRPM3 (NM_020952.1,3065-3083).
gggactacggcctgaaact

SEQ ID NO: 262052 - DNA, 19 bp, Homo sapiens
  siRNA target sequence for TRPM3 (NM_020952.1,3072-3090).
cggcctgaaactcttcata

SEQ ID NO: 262053 - DNA, 19 bp, Homo sapiens
  siRNA target sequence for TRPM3 (NM_020952.1,3073-3091).
ggcctgaaactcttcataa

SEQ ID NO: 262054 - DNA, 19 bp, Homo sapiens
  siRNA target sequence for TRPM3 (NM_020952.1,3092-3110).
ccgatgatgagctcaagaa

SEQ ID NO: 262055 - DNA, 19 bp, Homo sapiens
  siRNA target sequence for TRPM3 (NM_020952.1,3105-3123).
caagaaagtacatgacttt

SEQ ID NO: 262056 - DNA, 19 bp, Homo sapiens
  siRNA target sequence for TRPM3 (NM_020952.1,3160-3178).
gatgatcggttcaactcat

SEQ ID NO: 262057 - DNA, 19 bp, Homo sapiens
  siRNA target sequence for TRPM3 (NM_020952.1,3163-3181).
gatcggttcaactcatcta

SEQ ID NO: 262058 - DNA, 19 bp, Homo sapiens
  siRNA target sequence for TRPM3 (NM_020952.1,3192-3210).
gatacgggtgacttcagaa

SEQ ID NO: 262059 - DNA, 19 bp, Homo sapiens
  siRNA target sequence for TRPM3 (NM_020952.1,3212-3230).
gggtggagaacatgtctat

SEQ ID NO: 262060 - DNA, 19 bp, Homo sapiens
  siRNA target sequence for TRPM3 (NM_020952.1,3430-3448).
cgtcagagcagcttcaaca

SEQ ID NO: 262061 - DNA, 19 bp, Homo sapiens
  siRNA target sequence for TRPM3 (NM_020952.1,3468-3486).
caagctccaagagagtata

SEQ ID NO: 262062 - DNA, 19 bp, Homo sapiens
  siRNA target sequence for TRPM3 (NM_020952.1,3504-3522).
gaccatgtccccaacttct

SEQ ID NO: 262063 - DNA, 19 bp, Homo sapiens
  siRNA target sequence for TRPM3 (NM_020952.1,3538-3556).
cgtatgcgaagccattctt

SEQ ID NO: 262064 - DNA, 19 bp, Homo sapiens
  siRNA target sequence for TRPM3 (NM_020952.1,3543-3561).
gcgaagccattctttctat

SEQ ID NO: 262065 - DNA, 19 bp, Homo sapiens
  siRNA target sequence for TRPM3 (NM_020952.1,3544-3562).
cgaagccattctttctatt

SEQ ID NO: 262066 - DNA, 19 bp, Homo sapiens
  siRNA target sequence for TRPM3 (NM_020952.1,3630-3648).
cctacaccgggctactagt

SEQ ID NO: 262067 - DNA, 19 bp, Homo sapiens
  siRNA target sequence for TRPM3 (NM_020952.1,3631-3649).
ctacaccgggctactagtt

SEQ ID NO: 262068 - DNA, 19 bp, Homo sapiens
  siRNA target sequence for TRPM3 (NM_020952.1,3647-3665).
gttcccactctgtagcaaa

SEQ ID NO: 262069 - DNA, 19 bp, Homo sapiens
  siRNA target sequence for TRPM3 (NM_020952.1,3650-3668).
cccactctgtagcaaaaga

SEQ ID NO: 262070 - DNA, 19 bp, Homo sapiens
  siRNA target sequence for TRPM3 (NM_020952.1,3725-3743).
gaccatcatcgtgtataga

SEQ ID NO: 262071 - DNA, 19 bp, Homo sapiens
  siRNA target sequence for TRPM3 (NM_020952.1,3731-3749).
catcgtgtatagacatcta

SEQ ID NO: 262072 - DNA, 19 bp, Homo sapiens
  siRNA target sequence for TRPM3 (NM_020952.1,3734-3752).
cgtgtatagacatctatgt

SEQ ID NO: 262073 - DNA, 19 bp, Homo sapiens
  siRNA target sequence for TRPM3 (NM_020952.1,3747-3765).
ctatgtctctgctatggat

SEQ ID NO: 262074 - DNA, 19 bp, Homo sapiens
  siRNA target sequence for TRPM3 (NM_020952.1,3763-3781).
gatgagctccactgtgata

SEQ ID NO: 262075 - DNA, 19 bp, Homo sapiens
  siRNA target sequence for TRPM3 (NM_020952.1,3820-3838).
ggcgagccaagcttttcaa

SEQ ID NO: 262076 - DNA, 19 bp, Homo sapiens
  siRNA target sequence for TRPM3 (NM_020952.1,3904-3922).
ccaagccggagcattgatt

SEQ ID NO: 262077 - DNA, 19 bp, Homo sapiens
  siRNA target sequence for TRPM3 (NM_020952.1,3905-3923).
caagccggagcattgattt

SEQ ID NO: 262078 - DNA, 19 bp, Homo sapiens
  siRNA target sequence for TRPM3 (NM_020952.1,3936-3954).
ctccatggacactagatct

SEQ ID NO: 262079 - DNA, 19 bp, Homo sapiens
  siRNA target sequence for TRPM3 (NM_020952.1,3938-3956).
ccatggacactagatcttt

SEQ ID NO: 262080 - DNA, 19 bp, Homo sapiens
  siRNA target sequence for TRPM3 (NM_020952.1,3939-3957).
catggacactagatctttt

SEQ ID NO: 262081 - DNA, 19 bp, Homo sapiens
  siRNA target sequence for TRPM3 (NM_020952.1,4023-4041).
caccattgagcgttccaaa

SEQ ID NO: 262082 - DNA, 19 bp, Homo sapiens
  siRNA target sequence for TRPM3 (NM_020952.1,4026-4044).
cattgagcgttccaaaagt

SEQ ID NO: 262083 - DNA, 19 bp, Homo sapiens
  siRNA target sequence for TRPM3 (NM_020952.1,4061-4079).
ccacaccctttcttctaga

SEQ ID NO: 262084 - DNA, 19 bp, Homo sapiens
  siRNA target sequence for TRPM3 (NM_020952.1,4062-4080).
cacaccctttcttctagaa

SEQ ID NO: 262085 - DNA, 19 bp, Homo sapiens
  siRNA target sequence for TRPM3 (NM_020952.1,4081-4099).
gaggctcccattgtgaaat

SEQ ID NO: 262086 - DNA, 19 bp, Homo sapiens
  siRNA target sequence for TRPM3 (NM_020952.1,4178-4196).
gtattacagactgtattga

SEQ ID NO: 262087 - DNA, 19 bp, Homo sapiens
  siRNA target sequence for TRPM3 (NM_020952.1,4261-4279).
gacaaagtggaggacttaa

SEQ ID NO: 262088 - DNA, 19 bp, Homo sapiens
  siRNA target sequence for TRPM3 (NM_020952.1,4355-4373).
gcagagccaccattgcaat

SEQ ID NO: 262089 - DNA, 19 bp, Homo sapiens
  siRNA target sequence for TRPM3 (NM_020952.1,4356-4374).
cagagccaccattgcaata

SEQ ID NO: 262090 - DNA, 19 bp, Homo sapiens
  siRNA target sequence for TRPM3 (NM_020952.1,4360-4378).
gccaccattgcaatatcct

SEQ ID NO: 262091 - DNA, 19 bp, Homo sapiens
  siRNA target sequence for TRPM3 (NM_020952.1,4376-4394).
cctcccaggagggtgataa

SEQ ID NO: 262092 - DNA, 19 bp, Homo sapiens
  siRNA target sequence for TRPM3 (NM_020952.1,4403-4421).
gaaccctgtccaacaacat

SEQ ID NO: 262093 - DNA, 19 bp, Homo sapiens
  siRNA target sequence for TRPM3 (NM_020952.1,4467-4485).
gccaagtgcgccatatgca

SEQ ID NO: 262094 - DNA, 19 bp, Homo sapiens
  siRNA target sequence for TRPM3 (NM_024971.2,182-200).
cgagtcgtggaaaaggtta

SEQ ID NO: 262095 - DNA, 19 bp, Homo sapiens
  siRNA target sequence for TRPM3 (NM_024971.2,183-201).
gagtcgtggaaaaggttaa

SEQ ID NO: 262096 - DNA, 19 bp, Homo sapiens
  siRNA target sequence for TRPM3 (NM_024971.2,185-203).
gtcgtggaaaaggttaagt

SEQ ID NO: 262097 - DNA, 19 bp, Homo sapiens
  siRNA target sequence for TRPM3 (NM_024971.2,382-400).
gtatctccgtgcttcagaa

SEQ ID NO: 262098 - DNA, 19 bp, Homo sapiens
  siRNA target sequence for TRPM3 (NM_024971.2,388-406).
ccgtgcttcagaatgagaa

SEQ ID NO: 262099 - DNA, 19 bp, Homo sapiens
  siRNA target sequence for TRPM3 (NM_024971.2,389-407).
cgtgcttcagaatgagaaa

SEQ ID NO: 262100 - DNA, 19 bp, Homo sapiens
  siRNA target sequence for TRPM3 (NM_024971.2,415-433).
gtcgcctctcccgaaatga

SEQ ID NO: 262101 - DNA, 19 bp, Homo sapiens
  siRNA target sequence for TRPM3 (NM_024971.2,417-435).
cgcctctcccgaaatgaca

SEQ ID NO: 262102 - DNA, 19 bp, Homo sapiens
  siRNA target sequence for TRPM3 (NM_024971.2,418-436).
gcctctcccgaaatgacat

SEQ ID NO: 262103 - DNA, 19 bp, Homo sapiens
  siRNA target sequence for TRPM3 (NM_024971.2,476-494).
cagccctacggatgctttt

SEQ ID NO: 262104 - DNA, 19 bp, Homo sapiens
  siRNA target sequence for TRPM3 (NM_024971.2,490-508).
cttttgggaccattgagtt

SEQ ID NO: 262105 - DNA, 19 bp, Homo sapiens
  siRNA target sequence for SCN11A (NM_014139.1,210-228).
gatgctacccagtaatctt

SEQ ID NO: 262106 - DNA, 19 bp, Homo sapiens
  siRNA target sequence for SCN11A (NM_014139.1,407-425).
cctcgtgagctcataggaa

SEQ ID NO: 262107 - DNA, 19 bp, Homo sapiens
  siRNA target sequence for SCN11A (NM_014139.1,408-426).
ctcgtgagctcataggaaa

SEQ ID NO: 262108 - DNA, 19 bp, Homo sapiens
  siRNA target sequence for SCN11A (NM_014139.1,446-464).
ccattctaccgaaatcata

SEQ ID NO: 262109 - DNA, 19 bp, Homo sapiens
  siRNA target sequence for SCN11A (NM_014139.1,447-465).
cattctaccgaaatcataa

SEQ ID NO: 262110 - DNA, 19 bp, Homo sapiens
  siRNA target sequence for SCN11A (NM_014139.1,451-469).
ctaccgaaatcataagaca

SEQ ID NO: 262111 - DNA, 19 bp, Homo sapiens
  siRNA target sequence for SCN11A (NM_014139.1,455-473).
cgaaatcataagacattta

SEQ ID NO: 262112 - DNA, 19 bp, Homo sapiens
  siRNA target sequence for SCN11A (NM_014139.1,538-556).
gcctttcaattcaatcaga

SEQ ID NO: 262113 - DNA, 19 bp, Homo sapiens
  siRNA target sequence for SCN11A (NM_014139.1,570-588).
gagtctcagtccattcatt

SEQ ID NO: 262114 - DNA, 19 bp, Homo sapiens
  siRNA target sequence for SCN11A (NM_014139.1,572-590).
gtctcagtccattcattgt

SEQ ID NO: 262115 - DNA, 19 bp, Homo sapiens
  siRNA target sequence for SCN11A (NM_014139.1,658-676).
cagcaacagtaacaatact

SEQ ID NO: 262116 - DNA, 19 bp, Homo sapiens
  siRNA target sequence for SCN11A (NM_014139.1,660-678).
gcaacagtaacaatactga

SEQ ID NO: 262117 - DNA, 19 bp, Homo sapiens
  siRNA target sequence for SCN11A (NM_014139.1,690-708).
gtgtcttcactgggattta

SEQ ID NO: 262118 - DNA, 19 bp, Homo sapiens
  siRNA target sequence for SCN11A (NM_014139.1,692-710).
gtcttcactgggatttata

SEQ ID NO: 262119 - DNA, 19 bp, Homo sapiens
  siRNA target sequence for SCN11A (NM_014139.1,694-712).
cttcactgggatttatatt

SEQ ID NO: 262120 - DNA, 19 bp, Homo sapiens
  siRNA target sequence for SCN11A (NM_014139.1,748-766).
cattctggatgagttttct

SEQ ID NO: 262121 - DNA, 19 bp, Homo sapiens
  siRNA target sequence for SCN11A (NM_014139.1,810-828).
gaatagcgattgtgtcata

SEQ ID NO: 262122 - DNA, 19 bp, Homo sapiens
  siRNA target sequence for SCN11A (NM_014139.1,836-854).
ggaatcaccatcaaactat

SEQ ID NO: 262123 - DNA, 19 bp, Homo sapiens
  siRNA target sequence for SCN11A (NM_014139.1,837-855).
gaatcaccatcaaactatt

SEQ ID NO: 262124 - DNA, 19 bp, Homo sapiens
  siRNA target sequence for SCN11A (NM_014139.1,1072-1090).
cagtaacccggaagcttat

SEQ ID NO: 262125 - DNA, 19 bp, Homo sapiens
  siRNA target sequence for SCN11A (NM_014139.1,1074-1092).
gtaacccggaagcttatga

SEQ ID NO: 262126 - DNA, 19 bp, Homo sapiens
  siRNA target sequence for SCN11A (NM_014139.1,1158-1176).
gtgcctgttccatacaata

SEQ ID NO: 262127 - DNA, 19 bp, Homo sapiens
  siRNA target sequence for SCN11A (NM_014139.1,1161-1179).
cctgttccatacaatatga

SEQ ID NO: 262128 - DNA, 19 bp, Homo sapiens
  siRNA target sequence for SCN11A (NM_014139.1,1182-1200).
gtaagcacaccaaaattaa

SEQ ID NO: 262129 - DNA, 19 bp, Homo sapiens
  siRNA target sequence for SCN11A (NM_014139.1,1186-1204).
gcacaccaaaattaatcct

SEQ ID NO: 262130 - DNA, 19 bp, Homo sapiens
  siRNA target sequence for SCN11A (NM_014139.1,1192-1210).
caaaattaatcctgactat

SEQ ID NO: 262131 - DNA, 19 bp, Homo sapiens
  siRNA target sequence for SCN11A (NM_014139.1,1202-1220).
cctgactataattatacga

SEQ ID NO: 262132 - DNA, 19 bp, Homo sapiens
  siRNA target sequence for SCN11A (NM_014139.1,1205-1223).
gactataattatacgaatt

SEQ ID NO: 262133 - DNA, 19 bp, Homo sapiens
  siRNA target sequence for SCN11A (NM_014139.1,1207-1225).
ctataattatacgaatttt

SEQ ID NO: 262134 - DNA, 19 bp, Homo sapiens
  siRNA target sequence for SCN11A (NM_014139.1,1358-1376).
ggctccttctacctgatta

SEQ ID NO: 262135 - DNA, 19 bp, Homo sapiens
  siRNA target sequence for SCN11A (NM_014139.1,1359-1377).
gctccttctacctgattaa

SEQ ID NO: 262136 - DNA, 19 bp, Homo sapiens
  siRNA target sequence for SCN11A (NM_014139.1,1363-1381).
cttctacctgattaactta

SEQ ID NO: 262137 - DNA, 19 bp, Homo sapiens
  siRNA target sequence for SCN11A (NM_014139.1,1444-1462).
ggccaaggaaaagatgttt

SEQ ID NO: 262138 - DNA, 19 bp, Homo sapiens
  siRNA target sequence for SCN11A (NM_014139.1,1466-1484).
gaagcccagcagctgttaa

SEQ ID NO: 262139 - DNA, 19 bp, Homo sapiens
  siRNA target sequence for SCN11A (NM_014139.1,1505-1523).
gttgccatgggaattgaca

SEQ ID NO: 262140 - DNA, 19 bp, Homo sapiens
  siRNA target sequence for SCN11A (NM_014139.1,1532-1550).
cttacttcccttgaaacat

SEQ ID NO: 262141 - DNA, 19 bp, Homo sapiens
  siRNA target sequence for SCN11A (NM_014139.1,1541-1559).
cttgaaacatcatatttta

SEQ ID NO: 262142 - DNA, 19 bp, Homo sapiens
  siRNA target sequence for SCN11A (NM_014139.1,1697-1715).
cgactgtcccagaatctat

SEQ ID NO: 262143 - DNA, 19 bp, Homo sapiens
  siRNA target sequence for SCN11A (NM_014139.1,1716-1734).
cactggaccactttgatga

SEQ ID NO: 262144 - DNA, 19 bp, Homo sapiens
  siRNA target sequence for SCN11A (NM_014139.1,1918-1936).
gatgactgacccgtttact

SEQ ID NO: 262145 - DNA, 19 bp, Homo sapiens
  siRNA target sequence for SCN11A (NM_014139.1,2092-2110).
cgatccctaccactacttt

SEQ ID NO: 262146 - DNA, 19 bp, Homo sapiens
  siRNA target sequence for SCN11A (NM_014139.1,2111-2129).
cgccgaggctggaacattt

SEQ ID NO: 262147 - DNA, 19 bp, Homo sapiens
  siRNA target sequence for SCN11A (NM_014139.1,2113-2131).
ccgaggctggaacattttt

SEQ ID NO: 262148 - DNA, 19 bp, Homo sapiens
  siRNA target sequence for SCN11A (NM_014139.1,2252-2270).
ccaactttgaacacactaa

SEQ ID NO: 262149 - DNA, 19 bp, Homo sapiens
  siRNA target sequence for SCN11A (NM_014139.1,2260-2278).
gaacacactaattaagata

SEQ ID NO: 262150 - DNA, 19 bp, Homo sapiens
  siRNA target sequence for SCN11A (NM_014139.1,2321-2339).
ctggtcattgtgatcttta

SEQ ID NO: 262151 - DNA, 19 bp, Homo sapiens
  siRNA target sequence for SCN11A (NM_014139.1,2323-2341).
ggtcattgtgatctttatt

SEQ ID NO: 262152 - DNA, 19 bp, Homo sapiens
  siRNA target sequence for SCN11A (NM_014139.1,2385-2403).
cccaaaagagtccaaaact

SEQ ID NO: 262153 - DNA, 19 bp, Homo sapiens
  siRNA target sequence for SCN11A (NM_014139.1,2387-2405).
caaaagagtccaaaactct

SEQ ID NO: 262154 - DNA, 19 bp, Homo sapiens
  siRNA target sequence for SCN11A (NM_014139.1,2418-2436).
gcccgacagtctcatgttt

SEQ ID NO: 262155 - DNA, 19 bp, Homo sapiens
  siRNA target sequence for SCN11A (NM_014139.1,2419-2437).
cccgacagtctcatgttta

SEQ ID NO: 262156 - DNA, 19 bp, Homo sapiens
  siRNA target sequence for SCN11A (NM_014139.1,2499-2517).
gggaatggatcgaaaatat

SEQ ID NO: 262157 - DNA, 19 bp, Homo sapiens
  siRNA target sequence for SCN11A (NM_014139.1,2501-2519).
gaatggatcgaaaatatgt

SEQ ID NO: 262158 - DNA, 19 bp, Homo sapiens
  siRNA target sequence for SCN11A (NM_014139.1,2578-2596).
gatcacggtgataggaaaa

SEQ ID NO: 262159 - DNA, 19 bp, Homo sapiens
  siRNA target sequence for SCN11A (NM_014139.1,2878-2896).
ccaggaggagcttggtata

SEQ ID NO: 262160 - DNA, 19 bp, Homo sapiens
  siRNA target sequence for SCN11A (NM_014139.1,2881-2899).
ggaggagcttggtatacta

SEQ ID NO: 262161 - DNA, 19 bp, Homo sapiens
  siRNA target sequence for SCN11A (NM_014139.1,2882-2900).
gaggagcttggtatactaa

SEQ ID NO: 262162 - DNA, 19 bp, Homo sapiens
  siRNA target sequence for SCN11A (NM_014139.1,2978-2996).
gaattttctggtgaagata

SEQ ID NO: 262163 - DNA, 19 bp, Homo sapiens
  siRNA target sequence for SCN11A (NM_014139.1,3067-3085).
cacgagccagagagttcaa

SEQ ID NO: 262164 - DNA, 19 bp, Homo sapiens
  siRNA target sequence for SCN11A (NM_014139.1,3089-3107).
gtggaaattgacatgttct

SEQ ID NO: 262165 - DNA, 19 bp, Homo sapiens
  siRNA target sequence for SCN11A (NM_014139.1,3134-3152).
caggatccccgaaagaagt

SEQ ID NO: 262166 - DNA, 19 bp, Homo sapiens
  siRNA target sequence for SCN11A (NM_014139.1,3142-3160).
ccgaaagaagtctgatgtt

SEQ ID NO: 262167 - DNA, 19 bp, Homo sapiens
  siRNA target sequence for SCN11A (NM_014139.1,3143-3161).
cgaaagaagtctgatgtta

SEQ ID NO: 262168 - DNA, 19 bp, Homo sapiens
  siRNA target sequence for SCN11A (NM_014139.1,3163-3181).
cagtatactatcagaatgt

SEQ ID NO: 262169 - DNA, 19 bp, Homo sapiens
  siRNA target sequence for SCN11A (NM_014139.1,3180-3198).
gtagcaccattgatcttca

SEQ ID NO: 262170 - DNA, 19 bp, Homo sapiens
  siRNA target sequence for SCN11A (NM_014139.1,3199-3217).
ggatggctttggatggtta

SEQ ID NO: 262171 - DNA, 19 bp, Homo sapiens
  siRNA target sequence for SCN11A (NM_014139.1,3288-3306).
gtagcgtggacaagagaaa

SEQ ID NO: 262172 - DNA, 19 bp, Homo sapiens
  siRNA target sequence for SCN11A (NM_014139.1,3342-3360).
cctgctaccaaatagtgaa

SEQ ID NO: 262173 - DNA, 19 bp, Homo sapiens
  siRNA target sequence for SCN11A (NM_014139.1,3345-3363).
gctaccaaatagtgaaaca

SEQ ID NO: 262174 - DNA, 19 bp, Homo sapiens
  siRNA target sequence for SCN11A (NM_014139.1,3405-3423).
gcagtggggcactgatatt

SEQ ID NO: 262175 - DNA, 19 bp, Homo sapiens
  siRNA target sequence for SCN11A (NM_014139.1,3408-3426).
gtggggcactgatatttga

SEQ ID NO: 262176 - DNA, 19 bp, Homo sapiens
  siRNA target sequence for SCN11A (NM_014139.1,3450-3468).
ccaaaatccaagaattact

SEQ ID NO: 262177 - DNA, 19 bp, Homo sapiens
  siRNA target sequence for SCN11A (NM_014139.1,3457-3475).
ccaagaattactaaattgt

SEQ ID NO: 262178 - DNA, 19 bp, Homo sapiens
  siRNA target sequence for SCN11A (NM_014139.1,3458-3476).
caagaattactaaattgta

SEQ ID NO: 262179 - DNA, 19 bp, Homo sapiens
  siRNA target sequence for SCN11A (NM_014139.1,3477-3495).
ctgacattatttttacaca

SEQ ID NO: 262180 - DNA, 19 bp, Homo sapiens
  siRNA target sequence for SCN11A (NM_014139.1,3526-3544).
ggtagccttcggatttgga

SEQ ID NO: 262181 - DNA, 19 bp, Homo sapiens
  siRNA target sequence for SCN11A (NM_014139.1,3527-3545).
gtagccttcggatttggaa

SEQ ID NO: 262182 - DNA, 19 bp, Homo sapiens
  siRNA target sequence for SCN11A (NM_014139.1,3564-3582).
ggtgctgccttgatttcat

SEQ ID NO: 262183 - DNA, 19 bp, Homo sapiens
  siRNA target sequence for SCN11A (NM_014139.1,3599-3617).
gtgaccaccctcattaact

SEQ ID NO: 262184 - DNA, 19 bp, Homo sapiens
  siRNA target sequence for SCN11A (NM_014139.1,3608-3626).
ctcattaacttaatggaat

SEQ ID NO: 262185 - DNA, 19 bp, Homo sapiens
  siRNA target sequence for SCN11A (NM_014139.1,3666-3684).
gtgcgctgtcccagtttga

SEQ ID NO: 262186 - DNA, 19 bp, Homo sapiens
  siRNA target sequence for SCN11A (NM_014139.1,3827-3845).
ggaacagactcagttataa

SEQ ID NO: 262187 - DNA, 19 bp, Homo sapiens
  siRNA target sequence for SCN11A (NM_014139.1,3828-3846).
gaacagactcagttataaa

SEQ ID NO: 262188 - DNA, 19 bp, Homo sapiens
  siRNA target sequence for SCN11A (NM_014139.1,4038-4056).
gcaattcactcggttacat

SEQ ID NO: 262189 - DNA, 19 bp, Homo sapiens
  siRNA target sequence for SCN11A (NM_014139.1,4039-4057).
caattcactcggttacatt

SEQ ID NO: 262190 - DNA, 19 bp, Homo sapiens
  siRNA target sequence for SCN11A (NM_014139.1,4044-4062).
cactcggttacatttactt

SEQ ID NO: 262191 - DNA, 19 bp, Homo sapiens
  siRNA target sequence for SCN11A (NM_014139.1,4054-4072).
catttacttcgtagtcttt

SEQ ID NO: 262192 - DNA, 19 bp, Homo sapiens
  siRNA target sequence for SCN11A (NM_014139.1,4150-4168).
gttaggtggccaagacatt

SEQ ID NO: 262193 - DNA, 19 bp, Homo sapiens
  siRNA target sequence for SCN11A (NM_014139.1,4249-4267).
gcctctgaacaaatgtcaa

SEQ ID NO: 262194 - DNA, 19 bp, Homo sapiens
  siRNA target sequence for SCN11A (NM_014139.1,4269-4287).
gtctcgtgttcgacatagt

SEQ ID NO: 262195 - DNA, 19 bp, Homo sapiens
  siRNA target sequence for SCN11A (NM_014139.1,4271-4289).
ctcgtgttcgacatagtca

SEQ ID NO: 262196 - DNA, 19 bp, Homo sapiens
  siRNA target sequence for SCN11A (NM_014139.1,4309-4327).
catcatcataagtctcatt

SEQ ID NO: 262197 - DNA, 19 bp, Homo sapiens
  siRNA target sequence for SCN11A (NM_014139.1,4320-4338).
gtctcattatcctaaacat

SEQ ID NO: 262198 - DNA, 19 bp, Homo sapiens
  siRNA target sequence for SCN11A (NM_014139.1,4367-4385).
caacccaaagccatgaaat

SEQ ID NO: 262199 - DNA, 19 bp, Homo sapiens
  siRNA target sequence for SCN11A (NM_014139.1,4417-4435).
ggtcatctttacgttagaa

SEQ ID NO: 262200 - DNA, 19 bp, Homo sapiens
  siRNA target sequence for SCN11A (NM_014139.1,4418-4436).
gtcatctttacgttagaat

SEQ ID NO: 262201 - DNA, 19 bp, Homo sapiens
  siRNA target sequence for SCN11A (NM_014139.1,4420-4438).
catctttacgttagaatgt

SEQ ID NO: 262202 - DNA, 19 bp, Homo sapiens
  siRNA target sequence for SCN11A (NM_014139.1,4428-4446).
cgttagaatgtctcatcaa

SEQ ID NO: 262203 - DNA, 19 bp, Homo sapiens
  siRNA target sequence for SCN11A (NM_014139.1,4514-4532).
ctttccattgttagtacaa

SEQ ID NO: 262204 - DNA, 19 bp, Homo sapiens
  siRNA target sequence for SCN11A (NM_014139.1,4519-4537).
cattgttagtacaatgatt

SEQ ID NO: 262205 - DNA, 19 bp, Homo sapiens
  siRNA target sequence for SCN11A (NM_014139.1,4523-4541).
gttagtacaatgatttcta

SEQ ID NO: 262206 - DNA, 19 bp, Homo sapiens
  siRNA target sequence for SCN11A (NM_014139.1,4571-4589).
cctccgacgctcttcagaa

SEQ ID NO: 262207 - DNA, 19 bp, Homo sapiens
  siRNA target sequence for SCN11A (NM_014139.1,4572-4590).
ctccgacgctcttcagaat

SEQ ID NO: 262208 - DNA, 19 bp, Homo sapiens
  siRNA target sequence for SCN11A (NM_014139.1,4575-4593).
cgacgctcttcagaattgt

SEQ ID NO: 262209 - DNA, 19 bp, Homo sapiens
  siRNA target sequence for SCN11A (NM_014139.1,4677-4695).
cgcttccttctctgttcaa

SEQ ID NO: 262210 - DNA, 19 bp, Homo sapiens
  siRNA target sequence for SCN11A (NM_014139.1,4690-4708).
gttcaacattggtcttcta

SEQ ID NO: 262211 - DNA, 19 bp, Homo sapiens
  siRNA target sequence for SCN11A (NM_014139.1,4696-4714).
cattggtcttctactcttt

SEQ ID NO: 262212 - DNA, 19 bp, Homo sapiens
  siRNA target sequence for SCN11A (NM_014139.1,4700-4718).
ggtcttctactctttctga

SEQ ID NO: 262213 - DNA, 19 bp, Homo sapiens
  siRNA target sequence for SCN11A (NM_014139.1,4733-4751).
gccattctgggtatgaact

SEQ ID NO: 262214 - DNA, 19 bp, Homo sapiens
  siRNA target sequence for SCN11A (NM_014139.1,4774-4792).
gtctggaatcgatgacata

SEQ ID NO: 262215 - DNA, 19 bp, Homo sapiens
  siRNA target sequence for SCN11A (NM_014139.1,4873-4891).
ccccatgctgcgatcaaaa

SEQ ID NO: 262216 - DNA, 19 bp, Homo sapiens
  siRNA target sequence for SCN11A (NM_014139.1,4875-4893).
ccatgctgcgatcaaaaga

SEQ ID NO: 262217 - DNA, 19 bp, Homo sapiens
  siRNA target sequence for SCN11A (NM_014139.1,4883-4901).
cgatcaaaagaatcatgta

SEQ ID NO: 262218 - DNA, 19 bp, Homo sapiens
  siRNA target sequence for SCN11A (NM_014139.1,4941-4959).
catcctactttgtcagtta

SEQ ID NO: 262219 - DNA, 19 bp, Homo sapiens
  siRNA target sequence for SCN11A (NM_014139.1,5108-5126).
gcaacacaatttatcaaat

SEQ ID NO: 262220 - DNA, 19 bp, Homo sapiens
  siRNA target sequence for SCN11A (NM_014139.1,5171-5189).
cgtgtcgcaaagccaaata

SEQ ID NO: 262221 - DNA, 19 bp, Homo sapiens
  siRNA target sequence for SCN11A (NM_014139.1,5234-5252).
cgcctccactgcatggata

SEQ ID NO: 262222 - DNA, 19 bp, Homo sapiens
  siRNA target sequence for SCN11A (NM_014139.1,5285-5303).
ggctctgatggcctagata

SEQ ID NO: 262223 - DNA, 19 bp, Homo sapiens
  siRNA target sequence for SCN11A (NM_014139.1,5287-5305).
ctctgatggcctagatagt

SEQ ID NO: 262224 - DNA, 19 bp, Homo sapiens
  siRNA target sequence for SCN11A (NM_014139.1,5289-5307).
ctgatggcctagatagtat

SEQ ID NO: 262225 - DNA, 19 bp, Homo sapiens
  siRNA target sequence for SCN11A (NM_014139.1,5291-5309).
gatggcctagatagtatga

SEQ ID NO: 262226 - DNA, 19 bp, Homo sapiens
  siRNA target sequence for SCN11A (NM_014139.1,5297-5315).
ctagatagtatgaaagcaa

SEQ ID NO: 262227 - DNA, 19 bp, Homo sapiens
  siRNA target sequence for SCN11A (NM_014139.1,5398-5416).
ggaaagaggtgctgctatt

SEQ ID NO: 262228 - DNA, 19 bp, Homo sapiens
  siRNA target sequence for SCN11A (NM_014139.1,5403-5421).
gaggtgctgctattattca

SEQ ID NO: 262229 - DNA, 19 bp, Homo sapiens
  siRNA target sequence for SCN1B (NM_001037.2,331-349).
gatctgtctatcttcatca

SEQ ID NO: 262230 - DNA, 19 bp, Homo sapiens
  siRNA target sequence for SCN1B (NM_001037.2,397-415).
cgcctgctcttcttcgaaa

SEQ ID NO: 262231 - DNA, 19 bp, Homo sapiens
  siRNA target sequence for SCN1B (NM_001037.2,400-418).
ctgctcttcttcgaaaact

SEQ ID NO: 262232 - DNA, 19 bp, Homo sapiens
  siRNA target sequence for SCN1B (NM_001037.2,431-449).
ccagcgtcgtcaagaagat

SEQ ID NO: 262233 - DNA, 19 bp, Homo sapiens
  siRNA target sequence for SCN1B (NM_001037.2,500-518).
ctgagatcatgatgtatgt

SEQ ID NO: 262234 - DNA, 19 bp, Homo sapiens
  siRNA target sequence for SCN1B (NM_001037.2,542-560).
ggctcgtggcagagatgat

SEQ ID NO: 262235 - DNA, 19 bp, Homo sapiens
  siRNA target sequence for SCN1B (NM_001037.2,543-561).
gctcgtggcagagatgatt

SEQ ID NO: 262236 - DNA, 19 bp, Homo sapiens
  siRNA target sequence for SCN1B (NM_001037.2,544-562).
ctcgtggcagagatgattt

SEQ ID NO: 262237 - DNA, 19 bp, Homo sapiens
  siRNA target sequence for SCN1B (NM_001037.2,625-643).
ctggccatcacctctgaaa

SEQ ID NO: 262238 - DNA, 19 bp, Homo sapiens
  siRNA target sequence for SCN1B (NM_199037.1,771-789).
gataataatccgatgtgtt

SEQ ID NO: 262239 - DNA, 19 bp, Homo sapiens
  siRNA target sequence for SCN2B (NM_004588.2,157-175).
cggggctcagtctcttttt

SEQ ID NO: 262240 - DNA, 19 bp, Homo sapiens
  siRNA target sequence for SCN2B (NM_004588.2,283-301).
cagtgaaccacaaacagtt

SEQ ID NO: 262241 - DNA, 19 bp, Homo sapiens
  siRNA target sequence for SCN2B (NM_004588.2,364-382).
gcatgaagatcattaacct

SEQ ID NO: 262242 - DNA, 19 bp, Homo sapiens
  siRNA target sequence for SCN2B (NM_004588.2,469-487).
cggaggatgaggggattta

SEQ ID NO: 262243 - DNA, 19 bp, Homo sapiens
  siRNA target sequence for SCN2B (NM_004588.2,474-492).
gatgaggggatttacaact

SEQ ID NO: 262244 - DNA, 19 bp, Homo sapiens
  siRNA target sequence for SCN3B (NM_018400.2,978-996).
gtggtggaatggttctaca

SEQ ID NO: 262245 - DNA, 19 bp, Homo sapiens
  siRNA target sequence for SCN3B (NM_018400.2,997-1015).
ggcccgagggcggtaaaga

SEQ ID NO: 262246 - DNA, 19 bp, Homo sapiens
  siRNA target sequence for SCN3B (NM_018400.2,998-1016).
gcccgagggcggtaaagat

SEQ ID NO: 262247 - DNA, 19 bp, Homo sapiens
  siRNA target sequence for SCN3B (NM_018400.2,999-1017).
cccgagggcggtaaagatt

SEQ ID NO: 262248 - DNA, 19 bp, Homo sapiens
  siRNA target sequence for SCN3B (NM_018400.2,1000-1018).
ccgagggcggtaaagattt

SEQ ID NO: 262249 - DNA, 19 bp, Homo sapiens
  siRNA target sequence for SCN3B (NM_018400.2,1006-1024).
gcggtaaagatttccttat

SEQ ID NO: 262250 - DNA, 19 bp, Homo sapiens
  siRNA target sequence for SCN3B (NM_018400.2,1191-1209).
gcgcatcggccctttgtga

SEQ ID NO: 262251 - DNA, 19 bp, Homo sapiens
  siRNA target sequence for SCN3B (NM_018400.2,1192-1210).
cgcatcggccctttgtgaa

SEQ ID NO: 262252 - DNA, 19 bp, Homo sapiens
  siRNA target sequence for SCN3B (NM_018400.2,1319-1337).
gctgctcatcgagatgata

SEQ ID NO: 262253 - DNA, 19 bp, Homo sapiens
  siRNA target sequence for SCN3B (NM_018400.2,1322-1340).
gctcatcgagatgatatat

SEQ ID NO: 262254 - DNA, 19 bp, Homo sapiens
  siRNA target sequence for SCN3B (NM_018400.2,1342-1360).
gctacagaaaggtctcaaa

SEQ ID NO: 262255 - DNA, 19 bp, Homo sapiens
  siRNA target sequence for SCN3B (NM_018400.2,1402-1420).
ccatcccatctgagaacaa

SEQ ID NO: 262256 - DNA, 19 bp, Homo sapiens
  siRNA target sequence for SCN5A (NM_000335.3,452-470).
ctatagcacccaaaagact

SEQ ID NO: 262257 - DNA, 19 bp, Homo sapiens
  siRNA target sequence for SCN5A (NM_000335.3,457-475).
gcacccaaaagactttcat

SEQ ID NO: 262258 - DNA, 19 bp, Homo sapiens
  siRNA target sequence for SCN5A (NM_000335.3,514-532).
ccaccaacgccttgtatgt

SEQ ID NO: 262259 - DNA, 19 bp, Homo sapiens
  siRNA target sequence for SCN5A (NM_000335.3,579-597).
gttcactcgctcttcaaca

SEQ ID NO: 262260 - DNA, 19 bp, Homo sapiens
  siRNA target sequence for SCN5A (NM_000335.3,739-757).
gcctgcacgcgttcacttt

SEQ ID NO: 262261 - DNA, 19 bp, Homo sapiens
  siRNA target sequence for SCN5A (NM_000335.3,743-761).
gcacgcgttcactttcctt

SEQ ID NO: 262262 - DNA, 19 bp, Homo sapiens
  siRNA target sequence for SCN5A (NM_000335.3,780-798).
ctggactttagtgtgatta

SEQ ID NO: 262263 - DNA, 19 bp, Homo sapiens
  siRNA target sequence for SCN5A (NM_000335.3,1120-1138).
gtgatccagaaaattacct

SEQ ID NO: 262264 - DNA, 19 bp, Homo sapiens
  siRNA target sequence for SCN5A (NM_000335.3,1148-1166).
cggcacctctgatgtgtta

SEQ ID NO: 262265 - DNA, 19 bp, Homo sapiens
  siRNA target sequence for SCN5A (NM_000335.3,1150-1168).
gcacctctgatgtgttact

SEQ ID NO: 262266 - DNA, 19 bp, Homo sapiens
  siRNA target sequence for SCN5A (NM_000335.3,1312-1330).
gctgggagcgcctctatca

SEQ ID NO: 262267 - DNA, 19 bp, Homo sapiens
  siRNA target sequence for SCN5A (NM_000335.3,1345-1363).
ccgcagggaagatctacat

SEQ ID NO: 262268 - DNA, 19 bp, Homo sapiens
  siRNA target sequence for SCN5A (NM_000335.3,1735-1753).
gcctcagcaggacttctat

SEQ ID NO: 262269 - DNA, 19 bp, Homo sapiens
  siRNA target sequence for SCN5A (NM_000335.3,2203-2221).
ccagcgcactggaagagtt

SEQ ID NO: 262270 - DNA, 19 bp, Homo sapiens
  siRNA target sequence for SCN5A (NM_000335.3,2204-2222).
cagcgcactggaagagtta

SEQ ID NO: 262271 - DNA, 19 bp, Homo sapiens
  siRNA target sequence for SCN5A (NM_000335.3,2352-2370).
gacctcaccatcactatgt

SEQ ID NO: 262272 - DNA, 19 bp, Homo sapiens
  siRNA target sequence for SCN5A (NM_000335.3,2365-2383).
ctatgtgcatcgtactcaa

SEQ ID NO: 262273 - DNA, 19 bp, Homo sapiens
  siRNA target sequence for SCN5A (NM_000335.3,2481-2499).
gagatgaccttcaagatca

SEQ ID NO: 262274 - DNA, 19 bp, Homo sapiens
  siRNA target sequence for SCN5A (NM_000335.3,2502-2520).
gccctcgacccctactact

SEQ ID NO: 262275 - DNA, 19 bp, Homo sapiens
  siRNA target sequence for SCN5A (NM_000335.3,2503-2521).
ccctcgacccctactacta

SEQ ID NO: 262276 - DNA, 19 bp, Homo sapiens
  siRNA target sequence for SCN5A (NM_000335.3,2526-2544).
caacagggctggaacatct

SEQ ID NO: 262277 - DNA, 19 bp, Homo sapiens
  siRNA target sequence for SCN5A (NM_000335.3,2918-2936).
ggtgtcggggcagtcatta

SEQ ID NO: 262278 - DNA, 19 bp, Homo sapiens
  siRNA target sequence for SCN5A (NM_000335.3,2919-2937).
gtgtcggggcagtcattat

SEQ ID NO: 262279 - DNA, 19 bp, Homo sapiens
  siRNA target sequence for SCN5A (NM_000335.3,3252-3270).
cctcccacccgcaaggaaa

SEQ ID NO: 262280 - DNA, 19 bp, Homo sapiens
  siRNA target sequence for SCN5A (NM_000335.3,3896-3914).
caaggttctgcttgagtat

SEQ ID NO: 262281 - DNA, 19 bp, Homo sapiens
  siRNA target sequence for SCN5A (NM_000335.3,3916-3934).
ccgacaagatgttcacata

SEQ ID NO: 262282 - DNA, 19 bp, Homo sapiens
  siRNA target sequence for SCN5A (NM_000335.3,3917-3935).
cgacaagatgttcacatat

SEQ ID NO: 262283 - DNA, 19 bp, Homo sapiens
  siRNA target sequence for SCN5A (NM_000335.3,4124-4142).
gagagctctgtcacgattt

SEQ ID NO: 262284 - DNA, 19 bp, Homo sapiens
  siRNA target sequence for SCN5A (NM_000335.3,4296-4314).
ggagacttgcctttgaact

SEQ ID NO: 262285 - DNA, 19 bp, Homo sapiens
  siRNA target sequence for SCN5A (NM_000335.3,4297-4315).
gagacttgcctttgaacta

SEQ ID NO: 262286 - DNA, 19 bp, Homo sapiens
  siRNA target sequence for SCN5A (NM_000335.3,4478-4496).
ggactccagggggtatgaa

SEQ ID NO: 262287 - DNA, 19 bp, Homo sapiens
  siRNA target sequence for SCN5A (NM_000335.3,4500-4518).
cagcctcagtgggaataca

SEQ ID NO: 262288 - DNA, 19 bp, Homo sapiens
  siRNA target sequence for SCN5A (NM_000335.3,4510-4528).
gggaatacaacctctacat

SEQ ID NO: 262289 - DNA, 19 bp, Homo sapiens
  siRNA target sequence for SCN5A (NM_000335.3,4736-4754).
caagtaccagggcttcata

SEQ ID NO: 262290 - DNA, 19 bp, Homo sapiens
  siRNA target sequence for SCN5A (NM_000335.3,4785-4803).
gtcaccatcatgtttctga

SEQ ID NO: 262291 - DNA, 19 bp, Homo sapiens
  siRNA target sequence for SCN5A (NM_000335.3,4796-4814).
gtttctgatctgcttgaat

SEQ ID NO: 262292 - DNA, 19 bp, Homo sapiens
  siRNA target sequence for SCN5A (NM_000335.3,4845-4863).
caaagtcctgagaaaatca

SEQ ID NO: 262293 - DNA, 19 bp, Homo sapiens
  siRNA target sequence for SCN5A (NM_000335.3,4901-4919).
cttcacaggcgagtgtatt

SEQ ID NO: 262294 - DNA, 19 bp, Homo sapiens
  siRNA target sequence for SCN5A (NM_000335.3,4906-4924).
caggcgagtgtattgtcaa

SEQ ID NO: 262295 - DNA, 19 bp, Homo sapiens
  siRNA target sequence for SCN5A (NM_000335.3,5008-5026).
ctgtgctctcggacatcat

SEQ ID NO: 262296 - DNA, 19 bp, Homo sapiens
  siRNA target sequence for SCN5A (NM_000335.3,5221-5239).
ccaacttcgcttatgtcaa

SEQ ID NO: 262297 - DNA, 19 bp, Homo sapiens
  siRNA target sequence for SCN5A (NM_000335.3,5606-5624).
cactcagtttattgagtat

SEQ ID NO: 262298 - DNA, 19 bp, Homo sapiens
  siRNA target sequence for SCN5A (NM_000335.3,5685-5703).
cagataagcctcatcaaca

SEQ ID NO: 262299 - DNA, 19 bp, Homo sapiens
  siRNA target sequence for SCN5A (NM_000335.3,5937-5955).
ctgctgcaacgctctttga

SEQ ID NO: 262300 - DNA, 19 bp, Homo sapiens
  siRNA target sequence for SCN5A (NM_000335.3,6136-6154).
gagccaccagcgataacct

SEQ ID NO: 262301 - DNA, 19 bp, Homo sapiens
  siRNA target sequence for SCN7A (NM_002976.1,180-198).
ctaaagagtcttttgaact

SEQ ID NO: 262302 - DNA, 19 bp, Homo sapiens
  siRNA target sequence for SCN7A (NM_002976.1,347-365).
gacccatattactacaaga

SEQ ID NO: 262303 - DNA, 19 bp, Homo sapiens
  siRNA target sequence for SCN7A (NM_002976.1,423-441).
cttccatcttgtgtacatt

SEQ ID NO: 262304 - DNA, 19 bp, Homo sapiens
  siRNA target sequence for SCN7A (NM_002976.1,427-445).
catcttgtgtacattgtct

SEQ ID NO: 262305 - DNA, 19 bp, Homo sapiens
  siRNA target sequence for SCN7A (NM_002976.1,499-517).
ccaactgtttattctaatt

SEQ ID NO: 262306 - DNA, 19 bp, Homo sapiens
  siRNA target sequence for SCN7A (NM_002976.1,524-542).
ctgattgattgcgtattca

SEQ ID NO: 262307 - DNA, 19 bp, Homo sapiens
  siRNA target sequence for SCN7A (NM_002976.1,639-657).
gtgtctgggcaggatcatt

SEQ ID NO: 262308 - DNA, 19 bp, Homo sapiens
  siRNA target sequence for SCN7A (NM_002976.1,641-659).
gtctgggcaggatcatttt

SEQ ID NO: 262309 - DNA, 19 bp, Homo sapiens
  siRNA target sequence for SCN7A (NM_002976.1,704-722).
gtgtttgaggttattataa

SEQ ID NO: 262310 - DNA, 19 bp, Homo sapiens
  siRNA target sequence for SCN7A (NM_002976.1,712-730).
ggttattataagatactca

SEQ ID NO: 262311 - DNA, 19 bp, Homo sapiens
  siRNA target sequence for SCN7A (NM_002976.1,727-745).
ctcacctctggacttcatt

SEQ ID NO: 262312 - DNA, 19 bp, Homo sapiens
  siRNA target sequence for SCN7A (NM_002976.1,742-760).
cattccaacgcttcaaact

SEQ ID NO: 262313 - DNA, 19 bp, Homo sapiens
  siRNA target sequence for SCN7A (NM_002976.1,835-853).
ctgcttgaagcagcttatt

SEQ ID NO: 262314 - DNA, 19 bp, Homo sapiens
  siRNA target sequence for SCN7A (NM_002976.1,948-966).
ggccccaagagaatgaaaa

SEQ ID NO: 262315 - DNA, 19 bp, Homo sapiens
  siRNA target sequence for SCN7A (NM_002976.1,984-1002).
gaactggaaacccatatta

SEQ ID NO: 262316 - DNA, 19 bp, Homo sapiens
  siRNA target sequence for SCN7A (NM_002976.1,1124-1142).
cctgatcaaggcttcacaa

SEQ ID NO: 262317 - DNA, 19 bp, Homo sapiens
  siRNA target sequence for SCN7A (NM_002976.1,1162-1180).
ggccttatttgccctattt

SEQ ID NO: 262318 - DNA, 19 bp, Homo sapiens
  siRNA target sequence for SCN7A (NM_002976.1,1182-1200).
ggttaatggctcaggatta

SEQ ID NO: 262319 - DNA, 19 bp, Homo sapiens
  siRNA target sequence for SCN7A (NM_002976.1,1195-1213).
ggattaccctgaagtactt

SEQ ID NO: 262320 - DNA, 19 bp, Homo sapiens
  siRNA target sequence for SCN7A (NM_002976.1,1240-1258).
gaaggtctacatgatattt

SEQ ID NO: 262321 - DNA, 19 bp, Homo sapiens
  siRNA target sequence for SCN7A (NM_002976.1,1342-1360).
gcagagagttggtgaaata

SEQ ID NO: 262322 - DNA, 19 bp, Homo sapiens
  siRNA target sequence for SCN7A (NM_002976.1,1343-1361).
cagagagttggtgaaatat

SEQ ID NO: 262323 - DNA, 19 bp, Homo sapiens
  siRNA target sequence for SCN7A (NM_002976.1,1347-1365).
gagttggtgaaatatctaa

SEQ ID NO: 262324 - DNA, 19 bp, Homo sapiens
  siRNA target sequence for SCN7A (NM_002976.1,1349-1367).
gttggtgaaatatctaaga

SEQ ID NO: 262325 - DNA, 19 bp, Homo sapiens
  siRNA target sequence for SCN7A (NM_002976.1,1429-1447).
ggccaagaccatacaaata

SEQ ID NO: 262326 - DNA, 19 bp, Homo sapiens
  siRNA target sequence for SCN7A (NM_002976.1,1432-1450).
caagaccatacaaatagaa

SEQ ID NO: 262327 - DNA, 19 bp, Homo sapiens
  siRNA target sequence for SCN7A (NM_002976.1,1502-1520).
gatgctactctcagacata

SEQ ID NO: 262328 - DNA, 19 bp, Homo sapiens
  siRNA target sequence for SCN7A (NM_002976.1,1506-1524).
ctactctcagacataagga

SEQ ID NO: 262329 - DNA, 19 bp, Homo sapiens
  siRNA target sequence for SCN7A (NM_002976.1,1553-1571).
ccattatactggtataagt

SEQ ID NO: 262330 - DNA, 19 bp, Homo sapiens
  siRNA target sequence for SCN7A (NM_002976.1,1554-1572).
cattatactggtataagtt

SEQ ID NO: 262331 - DNA, 19 bp, Homo sapiens
  siRNA target sequence for SCN7A (NM_002976.1,1564-1582).
gtataagtttgctaaaact

SEQ ID NO: 262332 - DNA, 19 bp, Homo sapiens
  siRNA target sequence for SCN7A (NM_002976.1,1625-1643).
gagtttgtccataggatta

SEQ ID NO: 262333 - DNA, 19 bp, Homo sapiens
  siRNA target sequence for SCN7A (NM_002976.1,1627-1645).
gtttgtccataggattata

SEQ ID NO: 262334 - DNA, 19 bp, Homo sapiens
  siRNA target sequence for SCN7A (NM_002976.1,1661-1679).
gatcttttccttatcatat

SEQ ID NO: 262335 - DNA, 19 bp, Homo sapiens
  siRNA target sequence for SCN7A (NM_002976.1,1664-1682).
cttttccttatcatatgca

SEQ ID NO: 262336 - DNA, 19 bp, Homo sapiens
  siRNA target sequence for SCN7A (NM_002976.1,1711-1729).
ggagcattatccaatgagt

SEQ ID NO: 262337 - DNA, 19 bp, Homo sapiens
  siRNA target sequence for SCN7A (NM_002976.1,1712-1730).
gagcattatccaatgagta

SEQ ID NO: 262338 - DNA, 19 bp, Homo sapiens
  siRNA target sequence for SCN7A (NM_002976.1,1721-1739).
ccaatgagtaaacaaacta

SEQ ID NO: 262339 - DNA, 19 bp, Homo sapiens
  siRNA target sequence for SCN7A (NM_002976.1,1726-1744).
gagtaaacaaactaacact

SEQ ID NO: 262340 - DNA, 19 bp, Homo sapiens
  siRNA target sequence for SCN7A (NM_002976.1,1737-1755).
ctaacactcttctcaacat

SEQ ID NO: 262341 - DNA, 19 bp, Homo sapiens
  siRNA target sequence for SCN7A (NM_002976.1,1743-1761).
ctcttctcaacattggaaa

SEQ ID NO: 262342 - DNA, 19 bp, Homo sapiens
  siRNA target sequence for SCN7A (NM_002976.1,1873-1891).
ccatggtttaatagaactt

SEQ ID NO: 262343 - DNA, 19 bp, Homo sapiens
  siRNA target sequence for SCN7A (NM_002976.1,1874-1892).
catggtttaatagaacttt

SEQ ID NO: 262344 - DNA, 19 bp, Homo sapiens
  siRNA target sequence for SCN7A (NM_002976.1,1916-1934).
gctcttcttcgattattca

SEQ ID NO: 262345 - DNA, 19 bp, Homo sapiens
  siRNA target sequence for SCN7A (NM_002976.1,1990-2008).
gtggtctcttagtaactca

SEQ ID NO: 262346 - DNA, 19 bp, Homo sapiens
  siRNA target sequence for SCN7A (NM_002976.1,2007-2025).
catgggtggccctgaaaga

SEQ ID NO: 262347 - DNA, 19 bp, Homo sapiens
  siRNA target sequence for SCN7A (NM_002976.1,2010-2028).
gggtggccctgaaagactt

SEQ ID NO: 262348 - DNA, 19 bp, Homo sapiens
  siRNA target sequence for SCN7A (NM_002976.1,2083-2101).
gtttggtaagaattatgaa

SEQ ID NO: 262349 - DNA, 19 bp, Homo sapiens
  siRNA target sequence for SCN7A (NM_002976.1,2242-2260).
ccaatcctggtgtattcct

SEQ ID NO: 262350 - DNA, 19 bp, Homo sapiens
  siRNA target sequence for SCN7A (NM_002976.1,2243-2261).
caatcctggtgtattcctt

SEQ ID NO: 262351 - DNA, 19 bp, Homo sapiens
  siRNA target sequence for SCN7A (NM_002976.1,2266-2284).
cctgatggtcattttaatt

SEQ ID NO: 262352 - DNA, 19 bp, Homo sapiens
  siRNA target sequence for SCN7A (NM_002976.1,2285-2303).
ggaaatttactggtacttt

SEQ ID NO: 262353 - DNA, 19 bp, Homo sapiens
  siRNA target sequence for SCN7A (NM_002976.1,2314-2332).
ggcattggtgagctcattt

SEQ ID NO: 262354 - DNA, 19 bp, Homo sapiens
  siRNA target sequence for SCN7A (NM_002976.1,2467-2485).
cacaatggaccatgtaaat

SEQ ID NO: 262355 - DNA, 19 bp, Homo sapiens
  siRNA target sequence for SCN7A (NM_002976.1,2476-2494).
ccatgtaaatgaggtatat

SEQ ID NO: 262356 - DNA, 19 bp, Homo sapiens
  siRNA target sequence for SCN7A (NM_002976.1,2480-2498).
gtaaatgaggtatatgtta

SEQ ID NO: 262357 - DNA, 19 bp, Homo sapiens
  siRNA target sequence for SCN7A (NM_002976.1,2535-2553).
gcaacacccaagattttct

SEQ ID NO: 262358 - DNA, 19 bp, Homo sapiens
  siRNA target sequence for SCN7A (NM_002976.1,2582-2600).
gagaaaaacgctactgaaa

SEQ ID NO: 262359 - DNA, 19 bp, Homo sapiens
  siRNA target sequence for SCN7A (NM_002976.1,2628-2646).
ctagtgtctcagaaactgt

SEQ ID NO: 262360 - DNA, 19 bp, Homo sapiens
  siRNA target sequence for SCN7A (NM_002976.1,2639-2657).
gaaactgtaccaattgctt

SEQ ID NO: 262361 - DNA, 19 bp, Homo sapiens
  siRNA target sequence for SCN7A (NM_002976.1,2740-2758).
gcaatctagctcatctgaa

SEQ ID NO: 262362 - DNA, 19 bp, Homo sapiens
  siRNA target sequence for SCN7A (NM_002976.1,2756-2774).
gaatgcagtactgttgata

SEQ ID NO: 262363 - DNA, 19 bp, Homo sapiens
  siRNA target sequence for SCN7A (NM_002976.1,2817-2835).
gatcaaagcatctgaaaaa

SEQ ID NO: 262364 - DNA, 19 bp, Homo sapiens
  siRNA target sequence for SCN7A (NM_002976.1,2842-2860).
cagacgcggatcttcactt

SEQ ID NO: 262365 - DNA, 19 bp, Homo sapiens
  siRNA target sequence for SCN7A (NM_002976.1,2850-2868).
gatcttcacttggtcaaat

SEQ ID NO: 262366 - DNA, 19 bp, Homo sapiens
  siRNA target sequence for SCN7A (NM_002976.1,2877-2895).
catccaagaaaggaaaaat

SEQ ID NO: 262367 - DNA, 19 bp, Homo sapiens
  siRNA target sequence for SCN7A (NM_002976.1,2922-2940).
gcaagattgtagagaacaa

SEQ ID NO: 262368 - DNA, 19 bp, Homo sapiens
  siRNA target sequence for SCN7A (NM_002976.1,3053-3071).
gacatgatctttacttata

SEQ ID NO: 262369 - DNA, 19 bp, Homo sapiens
  siRNA target sequence for SCN7A (NM_002976.1,3203-3221).
gaactaaaacctcttattt

SEQ ID NO: 262370 - DNA, 19 bp, Homo sapiens
  siRNA target sequence for SCN7A (NM_002976.1,3213-3231).
ctcttatttccatgaaatt

SEQ ID NO: 262371 - DNA, 19 bp, Homo sapiens
  siRNA target sequence for SCN7A (NM_002976.1,3242-3260).
ctcagagttctatctcaat

SEQ ID NO: 262372 - DNA, 19 bp, Homo sapiens
  siRNA target sequence for SCN7A (NM_002976.1,3246-3264).
gagttctatctcaatttga

SEQ ID NO: 262373 - DNA, 19 bp, Homo sapiens
  siRNA target sequence for SCN7A (NM_002976.1,3278-3296).
gttgtgagagctttgatca

SEQ ID NO: 262374 - DNA, 19 bp, Homo sapiens
  siRNA target sequence for SCN7A (NM_002976.1,3283-3301).
gagagctttgatcaaaaca

SEQ ID NO: 262375 - DNA, 19 bp, Homo sapiens
  siRNA target sequence for SCN7A (NM_002976.1,3335-3353).
ctgatgatctggctgattt

SEQ ID NO: 262376 - DNA, 19 bp, Homo sapiens
  siRNA target sequence for SCN7A (NM_002976.1,3340-3358).
gatctggctgatttttagt

SEQ ID NO: 262377 - DNA, 19 bp, Homo sapiens
  siRNA target sequence for SCN7A (NM_002976.1,3357-3375).
gtatcatgggagtagactt

SEQ ID NO: 262378 - DNA, 19 bp, Homo sapiens
  siRNA target sequence for SCN7A (NM_002976.1,3364-3382).
gggagtagacttatttgct

SEQ ID NO: 262379 - DNA, 19 bp, Homo sapiens
  siRNA target sequence for SCN7A (NM_002976.1,3380-3398).
gctggcagattctatgaat

SEQ ID NO: 262380 - DNA, 19 bp, Homo sapiens
  siRNA target sequence for SCN7A (NM_002976.1,3484-3502).
catgctatgggaaaatgca

SEQ ID NO: 262381 - DNA, 19 bp, Homo sapiens
  siRNA target sequence for SCN7A (NM_002976.1,3566-3584).
ggatggatcactattatga

SEQ ID NO: 262382 - DNA, 19 bp, Homo sapiens
  siRNA target sequence for SCN7A (NM_002976.1,3567-3585).
gatggatcactattatgaa

SEQ ID NO: 262383 - DNA, 19 bp, Homo sapiens
  siRNA target sequence for SCN7A (NM_002976.1,3571-3589).
gatcactattatgaattca

SEQ ID NO: 262384 - DNA, 19 bp, Homo sapiens
  siRNA target sequence for SCN7A (NM_002976.1,3600-3618).
ctgttgctgttaatataca

SEQ ID NO: 262385 - DNA, 19 bp, Homo sapiens
  siRNA target sequence for SCN7A (NM_002976.1,3629-3647).
gaagtcaacatctacatgt

SEQ ID NO: 262386 - DNA, 19 bp, Homo sapiens
  siRNA target sequence for SCN7A (NM_002976.1,3694-3712).
gagtatgctgattactgtt

SEQ ID NO: 262387 - DNA, 19 bp, Homo sapiens
  siRNA target sequence for SCN7A (NM_002976.1,3746-3764).
ctgggaggctcaaatatct

SEQ ID NO: 262388 - DNA, 19 bp, Homo sapiens
  siRNA target sequence for SCN7A (NM_002976.1,3798-3816).
ggctgaagaagctaatgta

SEQ ID NO: 262389 - DNA, 19 bp, Homo sapiens
  siRNA target sequence for SCN7A (NM_002976.1,3833-3851).
ccagtacctcgcccattaa

SEQ ID NO: 262390 - DNA, 19 bp, Homo sapiens
  siRNA target sequence for SCN7A (NM_002976.1,3834-3852).
cagtacctcgcccattaaa

SEQ ID NO: 262391 - DNA, 19 bp, Homo sapiens
  siRNA target sequence for SCN7A (NM_002976.1,3836-3854).
gtacctcgcccattaaaca

SEQ ID NO: 262392 - DNA, 19 bp, Homo sapiens
  siRNA target sequence for SCN7A (NM_002976.1,3880-3898).
ggtaacaagccaagctttt

SEQ ID NO: 262393 - DNA, 19 bp, Homo sapiens
  siRNA target sequence for SCN7A (NM_002976.1,3881-3899).
gtaacaagccaagctttta

SEQ ID NO: 262394 - DNA, 19 bp, Homo sapiens
  siRNA target sequence for SCN7A (NM_002976.1,3913-3931).
ggttcttatatgtttccaa

SEQ ID NO: 262395 - DNA, 19 bp, Homo sapiens
  siRNA target sequence for SCN7A (NM_002976.1,3933-3951).
caatagccatgatgataga

SEQ ID NO: 262396 - DNA, 19 bp, Homo sapiens
  siRNA target sequence for SCN7A (NM_002976.1,3956-3974).
gatgttcagagtctacaaa

SEQ ID NO: 262397 - DNA, 19 bp, Homo sapiens
  siRNA target sequence for SCN7A (NM_002976.1,3986-4004).
ctctactggattaactcaa

SEQ ID NO: 262398 - DNA, 19 bp, Homo sapiens
  siRNA target sequence for SCN7A (NM_002976.1,4002-4020).
caatttttgttatgctata

SEQ ID NO: 262399 - DNA, 19 bp, Homo sapiens
  siRNA target sequence for SCN7A (NM_002976.1,4016-4034).
ctatatactatggaatgta

SEQ ID NO: 262400 - DNA, 19 bp, Homo sapiens
  siRNA target sequence for SCN7A (NM_002976.1,4045-4063).
catcgctttccgttgtttt

SEQ ID NO: 262401 - DNA, 19 bp, Homo sapiens
  siRNA target sequence for SCN7A (NM_002976.1,4048-4066).
cgctttccgttgtttttat

SEQ ID NO: 262402 - DNA, 19 bp, Homo sapiens
  siRNA target sequence for SCN7A (NM_002976.1,4071-4089).
ccattgcgtggaacatttt

SEQ ID NO: 262403 - DNA, 19 bp, Homo sapiens
  siRNA target sequence for SCN7A (NM_002976.1,4072-4090).
cattgcgtggaacattttt

SEQ ID NO: 262404 - DNA, 19 bp, Homo sapiens
  siRNA target sequence for SCN7A (NM_002976.1,4113-4131).
ccatcacaggactatgtct

SEQ ID NO: 262405 - DNA, 19 bp, Homo sapiens
  siRNA target sequence for SCN7A (NM_002976.1,4167-4185).
cacttgtgcaactgatact

SEQ ID NO: 262406 - DNA, 19 bp, Homo sapiens
  siRNA target sequence for SCN7A (NM_002976.1,4187-4205).
ctctcacggatcattcaca

SEQ ID NO: 262407 - DNA, 19 bp, Homo sapiens
  siRNA target sequence for SCN7A (NM_002976.1,4207-4225).
gctgcgtcttggaaaagga

SEQ ID NO: 262408 - DNA, 19 bp, Homo sapiens
  siRNA target sequence for SCN7A (NM_002976.1,4223-4241).
ggaccaaaggtgtttcata

SEQ ID NO: 262409 - DNA, 19 bp, Homo sapiens
  siRNA target sequence for SCN7A (NM_002976.1,4224-4242).
gaccaaaggtgtttcataa

SEQ ID NO: 262410 - DNA, 19 bp, Homo sapiens
  siRNA target sequence for SCN7A (NM_002976.1,4261-4279).
gctgtccctcccagcatta

SEQ ID NO: 262411 - DNA, 19 bp, Homo sapiens
  siRNA target sequence for SCN7A (NM_002976.1,4262-4280).
ctgtccctcccagcattat

SEQ ID NO: 262412 - DNA, 19 bp, Homo sapiens
  siRNA target sequence for SCN7A (NM_002976.1,4266-4284).
ccctcccagcattattgaa

SEQ ID NO: 262413 - DNA, 19 bp, Homo sapiens
  siRNA target sequence for SCN7A (NM_002976.1,4312-4330).
gttcatctatgccgtattt

SEQ ID NO: 262414 - DNA, 19 bp, Homo sapiens
  siRNA target sequence for SCN7A (NM_002976.1,4323-4341).
ccgtatttggaatgtataa

SEQ ID NO: 262415 - DNA, 19 bp, Homo sapiens
  siRNA target sequence for SCN7A (NM_002976.1,4324-4342).
cgtatttggaatgtataat

SEQ ID NO: 262416 - DNA, 19 bp, Homo sapiens
  siRNA target sequence for SCN7A (NM_002976.1,4368-4386).
gaattaatgatgtgtctaa

SEQ ID NO: 262417 - DNA, 19 bp, Homo sapiens
  siRNA target sequence for SCN7A (NM_002976.1,4416-4434).
gtctttttcaagttgcaat

SEQ ID NO: 262418 - DNA, 19 bp, Homo sapiens
  siRNA target sequence for SCN7A (NM_002976.1,4451-4469).
gggatgcttgatgcaattt

SEQ ID NO: 262419 - DNA, 19 bp, Homo sapiens
  siRNA target sequence for SCN7A (NM_002976.1,4570-4588).
cagttatatcctcatatca

SEQ ID NO: 262420 - DNA, 19 bp, Homo sapiens
  siRNA target sequence for SCN7A (NM_002976.1,4619-4637).
gttgtcatggagtttttaa

SEQ ID NO: 262421 - DNA, 19 bp, Homo sapiens
  siRNA target sequence for SCN7A (NM_002976.1,4663-4681).
gaccttgagtgaagatgat

SEQ ID NO: 262422 - DNA, 19 bp, Homo sapiens
  siRNA target sequence for SCN7A (NM_002976.1,4888-4906).
gagagttatgggtcaagat

SEQ ID NO: 262423 - DNA, 19 bp, Homo sapiens
  siRNA target sequence for SCN7A (NM_002976.1,4909-4927).
gaggatggagaaagttgtt

SEQ ID NO: 262424 - DNA, 19 bp, Homo sapiens
  siRNA target sequence for SCN7A (NM_002976.1,4912-4930).
gatggagaaagttgtttca

SEQ ID NO: 262425 - DNA, 19 bp, Homo sapiens
  siRNA target sequence for SCN7A (NM_002976.1,4955-4973).
gccaacccttttaagatca

SEQ ID NO: 262426 - DNA, 19 bp, Homo sapiens
  siRNA target sequence for SCN7A (NM_002976.1,4979-4997).
gagccaattacgactactt

SEQ ID NO: 262427 - DNA, 19 bp, Homo sapiens
  siRNA target sequence for SCN7A (NM_002976.1,4982-5000).
ccaattacgactactttga

SEQ ID NO: 262428 - DNA, 19 bp, Homo sapiens
  siRNA target sequence for SCN7A (NM_002976.1,5029-5047).
catcattcaacgtgcttat

SEQ ID NO: 262429 - DNA, 19 bp, Homo sapiens
  siRNA target sequence for SCN7A (NM_002976.1,5057-5075).
cgcttgaggcgaaatgaca

SEQ ID NO: 262430 - DNA, 19 bp, Homo sapiens
  siRNA target sequence for SCN7A (NM_002976.1,5059-5077).
cttgaggcgaaatgacaaa

SEQ ID NO: 262431 - DNA, 19 bp, Homo sapiens
  siRNA target sequence for SCN7A (NM_002976.1,5065-5083).
gcgaaatgacaaaaataca

SEQ ID NO: 262432 - DNA, 19 bp, Homo sapiens
  siRNA target sequence for SCN7A (NM_002976.1,5138-5156).
gcctattttgacaaagcta

SEQ ID NO: 262433 - DNA, 19 bp, Homo sapiens
  siRNA target sequence for SCN7A (NM_002976.1,5158-5176).
ggaaaagtcacctattcaa

SEQ ID NO: 262434 - DNA, 19 bp, Homo sapiens
  siRNA target sequence for SCN7A (NM_002976.1,5159-5177).
gaaaagtcacctattcaaa

SEQ ID NO: 262435 - DNA, 19 bp, Homo sapiens
  siRNA target sequence for ACCN1 (NM_001094.4,458-476).
gagagggtgtcctactact

SEQ ID NO: 262436 - DNA, 19 bp, Homo sapiens
  siRNA target sequence for ACCN1 (NM_001094.4,480-498).
cctaccagcatgtcactaa

SEQ ID NO: 262437 - DNA, 19 bp, Homo sapiens
  siRNA target sequence for ACCN1 (NM_001094.4,696-714).
ccaacttcaagcactacaa

SEQ ID NO: 262438 - DNA, 19 bp, Homo sapiens
  siRNA target sequence for ACCN1 (NM_001094.4,697-715).
caacttcaagcactacaaa

SEQ ID NO: 262439 - DNA, 19 bp, Homo sapiens
  siRNA target sequence for ACCN1 (NM_183377.1,1313-1331).
ccaagggggacctctacta

SEQ ID NO: 262440 - DNA, 19 bp, Homo sapiens
  siRNA target sequence for ACCN1 (NM_183377.1,1575-1593).
ctcctccgtgtttacaaaa

SEQ ID NO: 262441 - DNA, 19 bp, Homo sapiens
  siRNA target sequence for ACCN2 (NM_001095.2,414-432).
cggagcgtgtgcagtacta

SEQ ID NO: 262442 - DNA, 19 bp, Homo sapiens
  siRNA target sequence for ACCN2 (NM_001095.2,416-434).
gagcgtgtgcagtactact

SEQ ID NO: 262443 - DNA, 19 bp, Homo sapiens
  siRNA target sequence for ACCN2 (NM_001095.2,581-599).
ctcaacaacaggtatgaga

SEQ ID NO: 262444 - DNA, 19 bp, Homo sapiens
  siRNA target sequence for ACCN2 (NM_001095.2,765-783).
gcagcgctgaagacttcaa

SEQ ID NO: 262445 - DNA, 19 bp, Homo sapiens
  siRNA target sequence for ACCN2 (NM_001095.2,1110-1128).
ccatggactcggatttgga

SEQ ID NO: 262446 - DNA, 19 bp, Homo sapiens
  siRNA target sequence for ACCN2 (NM_001095.2,1111-1129).
catggactcggatttggat

SEQ ID NO: 262447 - DNA, 19 bp, Homo sapiens
  siRNA target sequence for ACCN2 (NM_001095.2,1599-1617).
cctacgaggtcattaagca

SEQ ID NO: 262448 - DNA, 19 bp, Homo sapiens
  siRNA target sequence for ACCN2 (NM_001095.2,1643-1661).
cagaaggaggccaaaagga

SEQ ID NO: 262449 - DNA, 19 bp, Homo sapiens
  siRNA target sequence for ACCN2 (NM_001095.2,1690-1708).
cctggacgacgtcaaaaga

SEQ ID NO: 262450 - DNA, 19 bp, Homo sapiens
  siRNA target sequence for ACCN2 (NM_001095.2,1790-1808).
ggcacgttcgaggacttta

SEQ ID NO: 262451 - DNA, 19 bp, Homo sapiens
  siRNA target sequence for ACCN3 (NM_004769.1,211-229).
gagagggtgcgctactaca

SEQ ID NO: 262452 - DNA, 19 bp, Homo sapiens
  siRNA target sequence for ACCN3 (NM_004769.1,446-464).
ccagtcccacctttgacat

SEQ ID NO: 262453 - DNA, 19 bp, Homo sapiens
  siRNA target sequence for ACCN3 (NM_004769.1,672-690).
cgtgcagcaggaggaatat

SEQ ID NO: 262454 - DNA, 19 bp, Homo sapiens
  siRNA target sequence for ACCN3 (NM_004769.1,884-902).
ctctgaaccccaactatga

SEQ ID NO: 262455 - DNA, 19 bp, Homo sapiens
  siRNA target sequence for ACCN3 (NM_004769.1,1013-1031).
gctgccgaatggtgtacat

SEQ ID NO: 262456 - DNA, 19 bp, Homo sapiens
  siRNA target sequence for ACCN3 (NM_020322.1,1613-1631).
ctagcctgcacgtagcttt

SEQ ID NO: 262457 - DNA, 19 bp, Homo sapiens
  siRNA target sequence for APXL (NM_001649.2,240-258).
gctggtcatcaccaagatt

SEQ ID NO: 262458 - DNA, 19 bp, Homo sapiens
  siRNA target sequence for APXL (NM_001649.2,255-273).
gattgaagagggcagtaaa

SEQ ID NO: 262459 - DNA, 19 bp, Homo sapiens
  siRNA target sequence for APXL (NM_001649.2,312-330).
cgtcggcatcaatgacatt

SEQ ID NO: 262460 - DNA, 19 bp, Homo sapiens
  siRNA target sequence for APXL (NM_001649.2,332-350).
gtctctcagggtttagaca

SEQ ID NO: 262461 - DNA, 19 bp, Homo sapiens
  siRNA target sequence for APXL (NM_001649.2,367-385).
gtgaaggggtcccataaga

SEQ ID NO: 262462 - DNA, 19 bp, Homo sapiens
  siRNA target sequence for APXL (NM_001649.2,388-406).
ctgaagctggtcgtcaaaa

SEQ ID NO: 262463 - DNA, 19 bp, Homo sapiens
  siRNA target sequence for APXL (NM_001649.2,526-544).
cgacaccacgcgagttctt

SEQ ID NO: 262464 - DNA, 19 bp, Homo sapiens
  siRNA target sequence for APXL (NM_001649.2,582-600).
cctacagcgcaccttagat

SEQ ID NO: 262465 - DNA, 19 bp, Homo sapiens
  siRNA target sequence for APXL (NM_001649.2,776-794).
cgtcctccgcagagaacat

SEQ ID NO: 262466 - DNA, 19 bp, Homo sapiens
  siRNA target sequence for APXL (NM_001649.2,965-983).
cccctgggaggtccaattt

SEQ ID NO: 262467 - DNA, 19 bp, Homo sapiens
  siRNA target sequence for APXL (NM_001649.2,995-1013).
ggtatgttcccgataagaa

SEQ ID NO: 262468 - DNA, 19 bp, Homo sapiens
  siRNA target sequence for APXL (NM_001649.2,1120-1138).
gctgcggcacagcacttta

SEQ ID NO: 262469 - DNA, 19 bp, Homo sapiens
  siRNA target sequence for APXL (NM_001649.2,1369-1387).
cgacaccctcccctataca

SEQ ID NO: 262470 - DNA, 19 bp, Homo sapiens
  siRNA target sequence for APXL (NM_001649.2,1973-1991).
ccaccctgcggaatgagat

SEQ ID NO: 262471 - DNA, 19 bp, Homo sapiens
  siRNA target sequence for APXL (NM_001649.2,2114-2132).
ccctcgctggcacctataa

SEQ ID NO: 262472 - DNA, 19 bp, Homo sapiens
  siRNA target sequence for APXL (NM_001649.2,2115-2133).
cctcgctggcacctataaa

SEQ ID NO: 262473 - DNA, 19 bp, Homo sapiens
  siRNA target sequence for APXL (NM_001649.2,2201-2219).
ccaacccaggagacctata

SEQ ID NO: 262474 - DNA, 19 bp, Homo sapiens
  siRNA target sequence for APXL (NM_001649.2,2444-2462).
ggacatctgaggatactgt

SEQ ID NO: 262475 - DNA, 19 bp, Homo sapiens
  siRNA target sequence for APXL (NM_001649.2,2700-2718).
cggcacctttgcagagtat

SEQ ID NO: 262476 - DNA, 19 bp, Homo sapiens
  siRNA target sequence for APXL (NM_001649.2,2774-2792).
gccactcagcggatgacat

SEQ ID NO: 262477 - DNA, 19 bp, Homo sapiens
  siRNA target sequence for APXL (NM_001649.2,3049-3067).
ccgaacccacccacattct

SEQ ID NO: 262478 - DNA, 19 bp, Homo sapiens
  siRNA target sequence for APXL (NM_001649.2,3051-3069).
gaacccacccacattctct

SEQ ID NO: 262479 - DNA, 19 bp, Homo sapiens
  siRNA target sequence for APXL (NM_001649.2,3136-3154).
cctcgagattatagatact

SEQ ID NO: 262480 - DNA, 19 bp, Homo sapiens
  siRNA target sequence for APXL (NM_001649.2,3298-3316).
cgcgagcccaggagataca

SEQ ID NO: 262481 - DNA, 19 bp, Homo sapiens
  siRNA target sequence for APXL (NM_001649.2,3685-3703).
cgggtgatggacaacaaca

SEQ ID NO: 262482 - DNA, 19 bp, Homo sapiens
  siRNA target sequence for APXL (NM_001649.2,4054-4072).
gagatcgtggggaaggata

SEQ ID NO: 262483 - DNA, 19 bp, Homo sapiens
  siRNA target sequence for APXL (NM_001649.2,4093-4111).
gatcccagtgtgaagatca

SEQ ID NO: 262484 - DNA, 19 bp, Homo sapiens
  siRNA target sequence for APXL (NM_001649.2,4258-4276).
gtgtccctggccaccaatt

SEQ ID NO: 262485 - DNA, 19 bp, Homo sapiens
  siRNA target sequence for APXL (NM_001649.2,4624-4642).
gtggagaatgccctcaata

SEQ ID NO: 262486 - DNA, 19 bp, Homo sapiens
  siRNA target sequence for APXL (NM_001649.2,4664-4682).
ccggtgatcggcaatcact

SEQ ID NO: 262487 - DNA, 19 bp, Homo sapiens
  siRNA target sequence for APXL (NM_001649.2,4760-4778).
gcatcgtctttgacatttt

SEQ ID NO: 262488 - DNA, 19 bp, Homo sapiens
  siRNA target sequence for APXL (NM_001649.2,4857-4875).
gcgggagctggaagataaa

SEQ ID NO: 262489 - DNA, 19 bp, Homo sapiens
  siRNA target sequence for SCNN1B (NM_000336.1,374-392).
ctctccgtaggcttcaaga

SEQ ID NO: 262490 - DNA, 19 bp, Homo sapiens
  siRNA target sequence for SCNN1B (NM_000336.1,425-443).
gctagccccttcaagtatt

SEQ ID NO: 262491 - DNA, 19 bp, Homo sapiens
  siRNA target sequence for SCNN1B (NM_000336.1,429-447).
gccccttcaagtattccaa

SEQ ID NO: 262492 - DNA, 19 bp, Homo sapiens
  siRNA target sequence for SCNN1B (NM_000336.1,568-586).
cacacccctggtccttatt

SEQ ID NO: 262493 - DNA, 19 bp, Homo sapiens
  siRNA target sequence for SCNN1B (NM_000336.1,570-588).
cacccctggtccttattga

SEQ ID NO: 262494 - DNA, 19 bp, Homo sapiens
  siRNA target sequence for SCNN1B (NM_000336.1,609-627).
ccatggtccttgatctctt

SEQ ID NO: 262495 - DNA, 19 bp, Homo sapiens
  siRNA target sequence for SCNN1B (NM_000336.1,936-954).
gcaactgttacatcttcaa

SEQ ID NO: 262496 - DNA, 19 bp, Homo sapiens
  siRNA target sequence for SCNN1B (NM_000336.1,987-1005).
ccaaccctggaactgaatt

SEQ ID NO: 262497 - DNA, 19 bp, Homo sapiens
  siRNA target sequence for SCNN1B (NM_000336.1,999-1017).
ctgaattcggcctgaagtt

SEQ ID NO: 262498 - DNA, 19 bp, Homo sapiens
  siRNA target sequence for SCNN1B (NM_000336.1,1001-1019).
gaattcggcctgaagttga

SEQ ID NO: 262499 - DNA, 19 bp, Homo sapiens
  siRNA target sequence for SCNN1B (NM_000336.1,1205-1223).
ccgtgcaccgtgaatggtt

SEQ ID NO: 262500 - DNA, 19 bp, Homo sapiens
  siRNA target sequence for SCNN1B (NM_000336.1,1224-1242).
ctgaggtccccgtccaaaa

SEQ ID NO: 262501 - DNA, 19 bp, Homo sapiens
  siRNA target sequence for SCNN1B (NM_000336.1,1226-1244).
gaggtccccgtccaaaact

SEQ ID NO: 262502 - DNA, 19 bp, Homo sapiens
  siRNA target sequence for SCNN1B (NM_000336.1,1229-1247).
gtccccgtccaaaacttct

SEQ ID NO: 262503 - DNA, 19 bp, Homo sapiens
  siRNA target sequence for SCNN1B (NM_000336.1,1399-1417).
ccattgctactcagatcta

SEQ ID NO: 262504 - DNA, 19 bp, Homo sapiens
  siRNA target sequence for SCNN1B (NM_000336.1,1470-1488).
gcaatgacacccagtacaa

SEQ ID NO: 262505 - DNA, 19 bp, Homo sapiens
  siRNA target sequence for SCNN1B (NM_000336.1,1562-1580).
cgggaccaaagcaccaata

SEQ ID NO: 262506 - DNA, 19 bp, Homo sapiens
  siRNA target sequence for SCNN1B (NM_000336.1,1565-1583).
gaccaaagcaccaatatca

SEQ ID NO: 262507 - DNA, 19 bp, Homo sapiens
  siRNA target sequence for SCNN1B (NM_000336.1,1590-1608).
gcaggaagggaattgtcaa

SEQ ID NO: 262508 - DNA, 19 bp, Homo sapiens
  siRNA target sequence for SCNN1B (NM_000336.1,1604-1622).
gtcaagctcaacatctact

SEQ ID NO: 262509 - DNA, 19 bp, Homo sapiens
  siRNA target sequence for SCNN1B (NM_000336.1,1621-1639).
cttccaagaatttaactat

SEQ ID NO: 262510 - DNA, 19 bp, Homo sapiens
  siRNA target sequence for SCNN1D (NM_002978.2,626-644).
gtttgccagggagaacatt

SEQ ID NO: 262511 - DNA, 19 bp, Homo sapiens
  siRNA target sequence for SCNN1D (NM_002978.2,862-880).
ggtaccacttccactatgt

SEQ ID NO: 262512 - DNA, 19 bp, Homo sapiens
  siRNA target sequence for SCNN1D (NM_002978.2,947-965).
cctctcctgcagttacgat

SEQ ID NO: 262513 - DNA, 19 bp, Homo sapiens
  siRNA target sequence for SCNN1D (NM_002978.2,1531-1549).
gcagggagtctgcattcaa

SEQ ID NO: 262514 - DNA, 19 bp, Homo sapiens
  siRNA target sequence for SCNN1G (NM_001039.1,470-488).
ggattccgctgctgatctt

SEQ ID NO: 262515 - DNA, 19 bp, Homo sapiens
  siRNA target sequence for SCNN1G (NM_001039.1,471-489).
gattccgctgctgatcttt

SEQ ID NO: 262516 - DNA, 19 bp, Homo sapiens
  siRNA target sequence for SCNN1G (NM_001039.1,547-565).
ggcggtagcatcattcaca

SEQ ID NO: 262517 - DNA, 19 bp, Homo sapiens
  siRNA target sequence for SCNN1G (NM_001039.1,548-566).
gcggtagcatcattcacaa

SEQ ID NO: 262518 - DNA, 19 bp, Homo sapiens
  siRNA target sequence for SCNN1G (NM_001039.1,562-580).
cacaaggcttcaaatgtca

SEQ ID NO: 262519 - DNA, 19 bp, Homo sapiens
  siRNA target sequence for SCNN1G (NM_001039.1,613-631).
caactgtgctcaaatgaca

SEQ ID NO: 262520 - DNA, 19 bp, Homo sapiens
  siRNA target sequence for SCNN1G (NM_001039.1,653-671).
ccttcagctcgggaatcaa

SEQ ID NO: 262521 - DNA, 19 bp, Homo sapiens
  siRNA target sequence for SCNN1G (NM_001039.1,654-672).
cttcagctcgggaatcaat

SEQ ID NO: 262522 - DNA, 19 bp, Homo sapiens
  siRNA target sequence for SCNN1G (NM_001039.1,673-691).
gccattcaggagtggtata

SEQ ID NO: 262523 - DNA, 19 bp, Homo sapiens
  siRNA target sequence for SCNN1G (NM_001039.1,674-692).
ccattcaggagtggtataa

SEQ ID NO: 262524 - DNA, 19 bp, Homo sapiens
  siRNA target sequence for SCNN1G (NM_001039.1,686-704).
ggtataagctacactacat

SEQ ID NO: 262525 - DNA, 19 bp, Homo sapiens
  siRNA target sequence for SCNN1G (NM_001039.1,809-827).
ggaatttcacgcttttcca

SEQ ID NO: 262526 - DNA, 19 bp, Homo sapiens
  siRNA target sequence for SCNN1G (NM_001039.1,833-851).
cgatgcatgggaattgcta

SEQ ID NO: 262527 - DNA, 19 bp, Homo sapiens
  siRNA target sequence for SCNN1G (NM_001039.1,834-852).
gatgcatgggaattgctat

SEQ ID NO: 262528 - DNA, 19 bp, Homo sapiens
  siRNA target sequence for SCNN1G (NM_001039.1,914-932).
ggctgcaagtcattttgta

SEQ ID NO: 262529 - DNA, 19 bp, Homo sapiens
  siRNA target sequence for SCNN1G (NM_001039.1,993-1011).
ccatcggcaggatgagtat

SEQ ID NO: 262530 - DNA, 19 bp, Homo sapiens
  siRNA target sequence for SCNN1G (NM_001039.1,1281-1299).
gcaccccaactggatgtat

SEQ ID NO: 262531 - DNA, 19 bp, Homo sapiens
  siRNA target sequence for SCNN1G (NM_001039.1,1284-1302).
ccccaactggatgtattgt

SEQ ID NO: 262532 - DNA, 19 bp, Homo sapiens
  siRNA target sequence for SCNN1G (NM_001039.1,1285-1303).
cccaactggatgtattgtt

SEQ ID NO: 262533 - DNA, 19 bp, Homo sapiens
  siRNA target sequence for SCNN1G (NM_001039.1,1286-1304).
ccaactggatgtattgtta

SEQ ID NO: 262534 - DNA, 19 bp, Homo sapiens
  siRNA target sequence for SCNN1G (NM_001039.1,1554-1572).
gagcccagccaacagtatt

SEQ ID NO: 262535 - DNA, 19 bp, Homo sapiens
  siRNA target sequence for SCNN1G (NM_001039.1,1798-1816).
gatgacctacccactttca

SEQ ID NO: 262536 - DNA, 19 bp, Homo sapiens
  siRNA target sequence for ACCN4 (NM_018674.3,912-930).
ctcgccgacatgcttaaga

SEQ ID NO: 262537 - DNA, 19 bp, Homo sapiens
  siRNA target sequence for ACCN4 (NM_018674.3,968-986).
cttctctgtggtctatact

SEQ ID NO: 262538 - DNA, 19 bp, Homo sapiens
  siRNA target sequence for ACCN4 (NM_018674.3,985-1003).
ctcgctatgggaagtgtta

SEQ ID NO: 262539 - DNA, 19 bp, Homo sapiens
  siRNA target sequence for ACCN4 (NM_018674.3,1057-1075).
gcagtggcctggagatcat

SEQ ID NO: 262540 - DNA, 19 bp, Homo sapiens
  siRNA target sequence for ACCN4 (NM_018674.3,1106-1124).
catctggagggagacaaat

SEQ ID NO: 262541 - DNA, 19 bp, Homo sapiens
  siRNA target sequence for ACCN4 (NM_018674.3,1130-1148).
gtcgtttgaggcaggtatt

SEQ ID NO: 262542 - DNA, 19 bp, Homo sapiens
  siRNA target sequence for ACCN4 (NM_018674.3,1348-1366).
gccggctgcgctgtgaaaa

SEQ ID NO: 262543 - DNA, 19 bp, Homo sapiens
  siRNA target sequence for ACCN4 (NM_018674.3,1351-1369).
ggctgcgctgtgaaaagga

SEQ ID NO: 262544 - DNA, 19 bp, Homo sapiens
  siRNA target sequence for ACCN4 (NM_018674.3,1421-1439).
gaccatctgcccaccaaat

SEQ ID NO: 262545 - DNA, 19 bp, Homo sapiens
  siRNA target sequence for ACCN4 (NM_018674.3,1528-1546).
cacgctatgggaaagagat

SEQ ID NO: 262546 - DNA, 19 bp, Homo sapiens
  siRNA target sequence for ACCN4 (NM_018674.3,1604-1622).
ccgcaacgagacctacata

SEQ ID NO: 262547 - DNA, 19 bp, Homo sapiens
  siRNA target sequence for ACCN4 (NM_018674.3,1775-1793).
gatcctcgactacatctat

SEQ ID NO: 262548 - DNA, 19 bp, Homo sapiens
  siRNA target sequence for ACCN5 (NM_017419.1,79-97).
ctgagaacggactcttaga

SEQ ID NO: 262549 - DNA, 19 bp, Homo sapiens
  siRNA target sequence for ACCN5 (NM_017419.1,86-104).
cggactcttagaaaagata

SEQ ID NO: 262550 - DNA, 19 bp, Homo sapiens
  siRNA target sequence for ACCN5 (NM_017419.1,139-157).
ccactgagcgaaagaagtt

SEQ ID NO: 262551 - DNA, 19 bp, Homo sapiens
  siRNA target sequence for ACCN5 (NM_017419.1,152-170).
gaagtttgaccatgacttt

SEQ ID NO: 262552 - DNA, 19 bp, Homo sapiens
  siRNA target sequence for ACCN5 (NM_017419.1,184-202).
cctttcatgggatacacaa

SEQ ID NO: 262553 - DNA, 19 bp, Homo sapiens
  siRNA target sequence for ACCN5 (NM_017419.1,185-203).
ctttcatgggatacacaat

SEQ ID NO: 262554 - DNA, 19 bp, Homo sapiens
  siRNA target sequence for ACCN5 (NM_017419.1,273-291).
gtgacatggcagatctaca

SEQ ID NO: 262555 - DNA, 19 bp, Homo sapiens
  siRNA target sequence for ACCN5 (NM_017419.1,275-293).
gacatggcagatctacatt

SEQ ID NO: 262556 - DNA, 19 bp, Homo sapiens
  siRNA target sequence for ACCN5 (NM_017419.1,294-312).
cgcttgctcaactacttca

SEQ ID NO: 262557 - DNA, 19 bp, Homo sapiens
  siRNA target sequence for ACCN5 (NM_017419.1,328-346).
cgtccattgaggttcaata

SEQ ID NO: 262558 - DNA, 19 bp, Homo sapiens
  siRNA target sequence for ACCN5 (NM_017419.1,329-347).
gtccattgaggttcaatat

SEQ ID NO: 262559 - DNA, 19 bp, Homo sapiens
  siRNA target sequence for ACCN5 (NM_017419.1,331-349).
ccattgaggttcaatatgt

SEQ ID NO: 262560 - DNA, 19 bp, Homo sapiens
  siRNA target sequence for ACCN5 (NM_017419.1,339-357).
gttcaatatgtggaaaaga

SEQ ID NO: 262561 - DNA, 19 bp, Homo sapiens
  siRNA target sequence for ACCN5 (NM_017419.1,497-515).
ctctagagaggctactgat

SEQ ID NO: 262562 - DNA, 19 bp, Homo sapiens
  siRNA target sequence for ACCN5 (NM_017419.1,645-663).
gtcttcactgaatatggaa

SEQ ID NO: 262563 - DNA, 19 bp, Homo sapiens
  siRNA target sequence for ACCN5 (NM_017419.1,846-864).
gatgggttaggcttgttgt

SEQ ID NO: 262564 - DNA, 19 bp, Homo sapiens
  siRNA target sequence for ACCN5 (NM_017419.1,899-917).
ccaagtgaagacagttcat

SEQ ID NO: 262565 - DNA, 19 bp, Homo sapiens
  siRNA target sequence for ACCN5 (NM_017419.1,988-1006).
gttgcttgaaggaatgcaa

SEQ ID NO: 262566 - DNA, 19 bp, Homo sapiens
  siRNA target sequence for ACCN5 (NM_017419.1,1003-1021).
gcaaagcccagcacataaa

SEQ ID NO: 262567 - DNA, 19 bp, Homo sapiens
  siRNA target sequence for ACCN5 (NM_017419.1,1068-1086).
gaatgtgacctacaaaagt

SEQ ID NO: 262568 - DNA, 19 bp, Homo sapiens
  siRNA target sequence for ACCN5 (NM_017419.1,1072-1090).
gtgacctacaaaagtactt

SEQ ID NO: 262569 - DNA, 19 bp, Homo sapiens
  siRNA target sequence for ACCN5 (NM_017419.1,1107-1125).
gtacttgaccacattgaat

SEQ ID NO: 262570 - DNA, 19 bp, Homo sapiens
  siRNA target sequence for ACCN5 (NM_017419.1,1110-1128).
cttgaccacattgaattta

SEQ ID NO: 262571 - DNA, 19 bp, Homo sapiens
  siRNA target sequence for ACCN5 (NM_017419.1,1115-1133).
ccacattgaatttaaggat

SEQ ID NO: 262572 - DNA, 19 bp, Homo sapiens
  siRNA target sequence for ACCN5 (NM_017419.1,1138-1156).
gtacagtaggaacacataa

SEQ ID NO: 262573 - DNA, 19 bp, Homo sapiens
  siRNA target sequence for ACCN5 (NM_017419.1,1143-1161).
gtaggaacacataactcta

SEQ ID NO: 262574 - DNA, 19 bp, Homo sapiens
  siRNA target sequence for ACCN5 (NM_017419.1,1163-1181).
ctgccccgtttcttgtgaa

SEQ ID NO: 262575 - DNA, 19 bp, Homo sapiens
  siRNA target sequence for ACCN5 (NM_017419.1,1166-1184).
ccccgtttcttgtgaagaa

SEQ ID NO: 262576 - DNA, 19 bp, Homo sapiens
  siRNA target sequence for ACCN5 (NM_017419.1,1167-1185).
cccgtttcttgtgaagaaa

SEQ ID NO: 262577 - DNA, 19 bp, Homo sapiens
  siRNA target sequence for ACCN5 (NM_017419.1,1315-1333).
gtgacctaaactataagat

SEQ ID NO: 262578 - DNA, 19 bp, Homo sapiens
  siRNA target sequence for ACCN5 (NM_017419.1,1352-1370).
ggtgagtgtgtctgagtta

SEQ ID NO: 262579 - DNA, 19 bp, Homo sapiens
  siRNA target sequence for ACCN5 (NM_017419.1,1355-1373).
gagtgtgtctgagttactt

SEQ ID NO: 262580 - DNA, 19 bp, Homo sapiens
  siRNA target sequence for ACCN5 (NM_017419.1,1384-1402).
gtggtcagctgggtctatt

SEQ ID NO: 262581 - DNA, 19 bp, Homo sapiens
  siRNA target sequence for ACCN5 (NM_017419.1,1386-1404).
ggtcagctgggtctatttt

SEQ ID NO: 262582 - DNA, 19 bp, Homo sapiens
  siRNA target sequence for ACCN5 (NM_017419.1,1414-1432).
gtctgatcacgatcataga

SEQ ID NO: 262583 - DNA, 19 bp, Homo sapiens
  siRNA target sequence for ACCN5 (NM_017419.1,1418-1436).
gatcacgatcatagaaatt

SEQ ID NO: 262584 - DNA, 19 bp, Homo sapiens
  siRNA target sequence for ACCN5 (NM_017419.1,1421-1439).
cacgatcatagaaattatt

SEQ ID NO: 262585 - DNA, 19 bp, Homo sapiens
  siRNA target sequence for ACCN5 (NM_017419.1,1423-1441).
cgatcatagaaattattga

SEQ ID NO: 262586 - DNA, 19 bp, Homo sapiens
  siRNA target sequence for ACCN5 (NM_017419.1,1427-1445).
catagaaattattgaatat

SEQ ID NO: 262587 - DNA, 19 bp, Homo sapiens
  siRNA target sequence for CATSPER1 (NM_053054.2,181-199).
ccaataacgcagataggtt

SEQ ID NO: 262588 - DNA, 19 bp, Homo sapiens
  siRNA target sequence for CATSPER1 (NM_053054.2,247-265).
gagctctccaccattacga

SEQ ID NO: 262589 - DNA, 19 bp, Homo sapiens
  siRNA target sequence for CATSPER1 (NM_053054.2,313-331).
ctccggagttccaagactt

SEQ ID NO: 262590 - DNA, 19 bp, Homo sapiens
  siRNA target sequence for CATSPER1 (NM_053054.2,548-566).
gagtgactcccattaccat

SEQ ID NO: 262591 - DNA, 19 bp, Homo sapiens
  siRNA target sequence for CATSPER1 (NM_053054.2,591-609).
caatatctcggtgagaatt

SEQ ID NO: 262592 - DNA, 19 bp, Homo sapiens
  siRNA target sequence for CATSPER1 (NM_053054.2,814-832).
gcaggtcccgtcatcatga

SEQ ID NO: 262593 - DNA, 19 bp, Homo sapiens
  siRNA target sequence for CATSPER1 (NM_053054.2,815-833).
caggtcccgtcatcatgaa

SEQ ID NO: 262594 - DNA, 19 bp, Homo sapiens
  siRNA target sequence for CATSPER1 (NM_053054.2,836-854).
ccaccagcatggaaagtct

SEQ ID NO: 262595 - DNA, 19 bp, Homo sapiens
  siRNA target sequence for CATSPER1 (NM_053054.2,905-923).
gcgtgggatatctgactat

SEQ ID NO: 262596 - DNA, 19 bp, Homo sapiens
  siRNA target sequence for CATSPER1 (NM_053054.2,907-925).
gtgggatatctgactatca

SEQ ID NO: 262597 - DNA, 19 bp, Homo sapiens
  siRNA target sequence for CATSPER1 (NM_053054.2,909-927).
gggatatctgactatcaca

SEQ ID NO: 262598 - DNA, 19 bp, Homo sapiens
  siRNA target sequence for CATSPER1 (NM_053054.2,1123-1141).
catcccggagcctgattca

SEQ ID NO: 262599 - DNA, 19 bp, Homo sapiens
  siRNA target sequence for CATSPER1 (NM_053054.2,1275-1293).
gtccatacccaggatatct

SEQ ID NO: 262600 - DNA, 19 bp, Homo sapiens
  siRNA target sequence for CATSPER1 (NM_053054.2,1292-1310).
ctccaccaaacattcagaa

SEQ ID NO: 262601 - DNA, 19 bp, Homo sapiens
  siRNA target sequence for CATSPER1 (NM_053054.2,1376-1394).
gaagggacactctaccaat

SEQ ID NO: 262602 - DNA, 19 bp, Homo sapiens
  siRNA target sequence for CATSPER1 (NM_053054.2,1381-1399).
gacactctaccaatctctt

SEQ ID NO: 262603 - DNA, 19 bp, Homo sapiens
  siRNA target sequence for CATSPER1 (NM_053054.2,1456-1474).
ggaacctgacccaatcctt

SEQ ID NO: 262604 - DNA, 19 bp, Homo sapiens
  siRNA target sequence for CATSPER1 (NM_053054.2,1466-1484).
ccaatccttggcctttgaa

SEQ ID NO: 262605 - DNA, 19 bp, Homo sapiens
  siRNA target sequence for CATSPER1 (NM_053054.2,1642-1660).
gcctctcgtacttctttga

SEQ ID NO: 262606 - DNA, 19 bp, Homo sapiens
  siRNA target sequence for CATSPER1 (NM_053054.2,1644-1662).
ctctcgtacttctttgact

SEQ ID NO: 262607 - DNA, 19 bp, Homo sapiens
  siRNA target sequence for CATSPER1 (NM_053054.2,1893-1911).
ctcatcctcatgtttacct

SEQ ID NO: 262608 - DNA, 19 bp, Homo sapiens
  siRNA target sequence for CATSPER1 (NM_053054.2,2025-2043).
gactggtccctcatctaca

SEQ ID NO: 262609 - DNA, 19 bp, Homo sapiens
  siRNA target sequence for CATSPER1 (NM_053054.2,2120-2138).
cctcaacctggtgattact

SEQ ID NO: 262610 - DNA, 19 bp, Homo sapiens
  siRNA target sequence for CATSPER1 (NM_053054.2,2137-2155).
ctgtcctggtggatagctt

SEQ ID NO: 262611 - DNA, 19 bp, Homo sapiens
  siRNA target sequence for CATSPER1 (NM_053054.2,2300-2318).
gctcatcgagaaaaagttt

SEQ ID NO: 262612 - DNA, 19 bp, Homo sapiens
  siRNA target sequence for CATSPER1 (NM_053054.2,2413-2431).
cagccgtcatcgatgagat

SEQ ID NO: 262613 - DNA, 19 bp, Homo sapiens
  siRNA target sequence for CATSPER1 (NM_053054.2,2429-2447).
gattgtggacaccacattt

SEQ ID NO: 262614 - DNA, 19 bp, Homo sapiens
  siRNA target sequence for CATSPER2 (NM_054020.2,341-359).
cactatcagggagttactt

SEQ ID NO: 262615 - DNA, 19 bp, Homo sapiens
  siRNA target sequence for CATSPER2 (NM_054020.2,343-361).
ctatcagggagttacttga

SEQ ID NO: 262616 - DNA, 19 bp, Homo sapiens
  siRNA target sequence for CATSPER2 (NM_054020.2,367-385).
cccgccagaagaaacttgt

SEQ ID NO: 262617 - DNA, 19 bp, Homo sapiens
  siRNA target sequence for CATSPER2 (NM_054020.2,401-419).
ccagctagtgcgtttctct

SEQ ID NO: 262618 - DNA, 19 bp, Homo sapiens
  siRNA target sequence for CATSPER2 (NM_054020.2,402-420).
cagctagtgcgtttctcta

SEQ ID NO: 262619 - DNA, 19 bp, Homo sapiens
  siRNA target sequence for CATSPER2 (NM_054020.2,404-422).
gctagtgcgtttctctata

SEQ ID NO: 262620 - DNA, 19 bp, Homo sapiens
  siRNA target sequence for CATSPER2 (NM_054020.2,405-423).
ctagtgcgtttctctataa

SEQ ID NO: 262621 - DNA, 19 bp, Homo sapiens
  siRNA target sequence for CATSPER2 (NM_054020.2,564-582).
ctggtctttttgaatacga

SEQ ID NO: 262622 - DNA, 19 bp, Homo sapiens
  siRNA target sequence for CATSPER2 (NM_054020.2,569-587).
ctttttgaatacgatcata

SEQ ID NO: 262623 - DNA, 19 bp, Homo sapiens
  siRNA target sequence for CATSPER2 (NM_054020.2,1038-1056).
gagtaccatgtgttcttct

SEQ ID NO: 262624 - DNA, 19 bp, Homo sapiens
  siRNA target sequence for CATSPER2 (NM_054020.2,1229-1247).
catgatggttactaacttt

SEQ ID NO: 262625 - DNA, 19 bp, Homo sapiens
  siRNA target sequence for CATSPER2 (NM_054020.2,1235-1253).
ggttactaactttcagaat

SEQ ID NO: 262626 - DNA, 19 bp, Homo sapiens
  siRNA target sequence for CATSPER2 (NM_054020.2,1236-1254).
gttactaactttcagaata

SEQ ID NO: 262627 - DNA, 19 bp, Homo sapiens
  siRNA target sequence for CATSPER2 (NM_054020.2,1364-1382).
gacgtcaagccatagcaaa

SEQ ID NO: 262628 - DNA, 19 bp, Homo sapiens
  siRNA target sequence for CATSPER2 (NM_054020.2,1366-1384).
cgtcaagccatagcaaaat

SEQ ID NO: 262629 - DNA, 19 bp, Homo sapiens
  siRNA target sequence for CATSPER2 (NM_054020.2,1367-1385).
gtcaagccatagcaaaata

SEQ ID NO: 262630 - DNA, 19 bp, Homo sapiens
  siRNA target sequence for CATSPER2 (NM_054020.2,1369-1387).
caagccatagcaaaataga

SEQ ID NO: 262631 - DNA, 19 bp, Homo sapiens
  siRNA target sequence for CATSPER2 (NM_054020.2,1388-1406).
ggacagaggagctagtcaa

SEQ ID NO: 262632 - DNA, 19 bp, Homo sapiens
  siRNA target sequence for CATSPER2 (NM_054020.2,1462-1480).
ccactgaagaggatttaat

SEQ ID NO: 262633 - DNA, 19 bp, Homo sapiens
  siRNA target sequence for CATSPER2 (NM_054020.2,1463-1481).
cactgaagaggatttaata

SEQ ID NO: 262634 - DNA, 19 bp, Homo sapiens
  siRNA target sequence for CATSPER3 (NM_178019.1,89-107).
gcgccactcgagagtcatt

SEQ ID NO: 262635 - DNA, 19 bp, Homo sapiens
  siRNA target sequence for CATSPER3 (NM_178019.1,90-108).
cgccactcgagagtcattt

SEQ ID NO: 262636 - DNA, 19 bp, Homo sapiens
  siRNA target sequence for CATSPER3 (NM_178019.1,98-116).
gagagtcatttctagttca

SEQ ID NO: 262637 - DNA, 19 bp, Homo sapiens
  siRNA target sequence for CATSPER3 (NM_178019.1,146-164).
cccaacattcaagaaattt

SEQ ID NO: 262638 - DNA, 19 bp, Homo sapiens
  siRNA target sequence for CATSPER3 (NM_178019.1,180-198).
gaatgtcgggcatttgtga

SEQ ID NO: 262639 - DNA, 19 bp, Homo sapiens
  siRNA target sequence for CATSPER3 (NM_178019.1,206-224).
cataatgagccgtttcttt

SEQ ID NO: 262640 - DNA, 19 bp, Homo sapiens
  siRNA target sequence for CATSPER3 (NM_178019.1,212-230).
gagccgtttctttaagata

SEQ ID NO: 262641 - DNA, 19 bp, Homo sapiens
  siRNA target sequence for CATSPER3 (NM_178019.1,214-232).
gccgtttctttaagataat

SEQ ID NO: 262642 - DNA, 19 bp, Homo sapiens
  siRNA target sequence for CATSPER3 (NM_178019.1,216-234).
cgtttctttaagataatta

SEQ ID NO: 262643 - DNA, 19 bp, Homo sapiens
  siRNA target sequence for CATSPER3 (NM_178019.1,248-266).
cacatcgaatgcgtttttt

SEQ ID NO: 262644 - DNA, 19 bp, Homo sapiens
  siRNA target sequence for CATSPER3 (NM_178019.1,250-268).
catcgaatgcgttttttat

SEQ ID NO: 262645 - DNA, 19 bp, Homo sapiens
  siRNA target sequence for CATSPER3 (NM_178019.1,269-287).
ggccttgtggaccagttat

SEQ ID NO: 262646 - DNA, 19 bp, Homo sapiens
  siRNA target sequence for CATSPER3 (NM_178019.1,280-298).
ccagttatgacataaggta

SEQ ID NO: 262647 - DNA, 19 bp, Homo sapiens
  siRNA target sequence for CATSPER3 (NM_178019.1,299-317).
ccgcttgttcagacttctt

SEQ ID NO: 262648 - DNA, 19 bp, Homo sapiens
  siRNA target sequence for CATSPER3 (NM_178019.1,320-338).
gttctcggagatcttcttt

SEQ ID NO: 262649 - DNA, 19 bp, Homo sapiens
  siRNA target sequence for CATSPER3 (NM_178019.1,413-431).
cctgctggatgtgatcatt

SEQ ID NO: 262650 - DNA, 19 bp, Homo sapiens
  siRNA target sequence for CATSPER3 (NM_178019.1,465-483).
cagctcatgggcaaacagt

SEQ ID NO: 262651 - DNA, 19 bp, Homo sapiens
  siRNA target sequence for CATSPER3 (NM_178019.1,773-791).
gttggacaatcgggaattt

SEQ ID NO: 262652 - DNA, 19 bp, Homo sapiens
  siRNA target sequence for CATSPER3 (NM_178019.1,776-794).
ggacaatcgggaatttgct

SEQ ID NO: 262653 - DNA, 19 bp, Homo sapiens
  siRNA target sequence for CATSPER3 (NM_178019.1,777-795).
gacaatcgggaatttgctt

SEQ ID NO: 262654 - DNA, 19 bp, Homo sapiens
  siRNA target sequence for CATSPER3 (NM_178019.1,880-898).
cagaggactccatcagaaa

SEQ ID NO: 262655 - DNA, 19 bp, Homo sapiens
  siRNA target sequence for CATSPER3 (NM_178019.1,1074-1092).
ccaatggtcttggatgatt

SEQ ID NO: 262656 - DNA, 19 bp, Homo sapiens
  siRNA target sequence for CATSPER3 (NM_178019.1,1102-1120).
gcttacccttcatcgatat

SEQ ID NO: 262657 - DNA, 19 bp, Homo sapiens
  siRNA target sequence for CATSPER3 (NM_178019.1,1153-1171).
ctgtccacaagcttcaaga

SEQ ID NO: 262658 - DNA, 19 bp, Homo sapiens
  siRNA target sequence for CATSPER3 (NM_178019.1,1163-1181).
gcttcaagagctgtactat

SEQ ID NO: 262659 - DNA, 19 bp, Homo sapiens
  siRNA target sequence for MCOLN3 (NM_018298.9,139-157).
gaggaaaatcgctgcaatt

SEQ ID NO: 262660 - DNA, 19 bp, Homo sapiens
  siRNA target sequence for MCOLN3 (NM_018298.9,142-160).
gaaaatcgctgcaatttta

SEQ ID NO: 262661 - DNA, 19 bp, Homo sapiens
  siRNA target sequence for MCOLN3 (NM_018298.9,179-197).
ctgaggagcttctattaga

SEQ ID NO: 262662 - DNA, 19 bp, Homo sapiens
  siRNA target sequence for MCOLN3 (NM_018298.9,210-228).
gcgaaaactcaaatttttt

SEQ ID NO: 262663 - DNA, 19 bp, Homo sapiens
  siRNA target sequence for MCOLN3 (NM_018298.9,252-270).
ctgggctcgaggtagaaaa

SEQ ID NO: 262664 - DNA, 19 bp, Homo sapiens
  siRNA target sequence for MCOLN3 (NM_018298.9,255-273).
ggctcgaggtagaaaacca

SEQ ID NO: 262665 - DNA, 19 bp, Homo sapiens
  siRNA target sequence for MCOLN3 (NM_018298.9,314-332).
ctatccagctggtcttatt

SEQ ID NO: 262666 - DNA, 19 bp, Homo sapiens
  siRNA target sequence for MCOLN3 (NM_018298.9,325-343).
gtcttatttgggctaagta

SEQ ID NO: 262667 - DNA, 19 bp, Homo sapiens
  siRNA target sequence for MCOLN3 (NM_018298.9,372-390).
gaatactatagcattcaaa

SEQ ID NO: 262668 - DNA, 19 bp, Homo sapiens
  siRNA target sequence for MCOLN3 (NM_018298.9,394-412).
cttttcctaaaaggatata

SEQ ID NO: 262669 - DNA, 19 bp, Homo sapiens
  siRNA target sequence for MCOLN3 (NM_018298.9,417-435).
ccgaatggatgacacatat

SEQ ID NO: 262670 - DNA, 19 bp, Homo sapiens
  siRNA target sequence for MCOLN3 (NM_018298.9,446-464).
cacaaagtgacgtgtatga

SEQ ID NO: 262671 - DNA, 19 bp, Homo sapiens
  siRNA target sequence for MCOLN3 (NM_018298.9,452-470).
gtgacgtgtatgatcagtt

SEQ ID NO: 262672 - DNA, 19 bp, Homo sapiens
  siRNA target sequence for MCOLN3 (NM_018298.9,454-472).
gacgtgtatgatcagttaa

SEQ ID NO: 262673 - DNA, 19 bp, Homo sapiens
  siRNA target sequence for MCOLN3 (NM_018298.9,457-475).
gtgtatgatcagttaatct

SEQ ID NO: 262674 - DNA, 19 bp, Homo sapiens
  siRNA target sequence for MCOLN3 (NM_018298.9,487-505).
cagtacttgcagctataca

SEQ ID NO: 262675 - DNA, 19 bp, Homo sapiens
  siRNA target sequence for MCOLN3 (NM_018298.9,489-507).
gtacttgcagctatacaat

SEQ ID NO: 262676 - DNA, 19 bp, Homo sapiens
  siRNA target sequence for MCOLN3 (NM_018298.9,513-531).
cgttgggaatcatgcttat

SEQ ID NO: 262677 - DNA, 19 bp, Homo sapiens
  siRNA target sequence for MCOLN3 (NM_018298.9,604-622).
ggaaatgatacctttgaca

SEQ ID NO: 262678 - DNA, 19 bp, Homo sapiens
  siRNA target sequence for MCOLN3 (NM_018298.9,621-639).
catcgatccagaaattgaa

SEQ ID NO: 262679 - DNA, 19 bp, Homo sapiens
  siRNA target sequence for MCOLN3 (NM_018298.9,777-795).
gacagttcgtcatcaagaa

SEQ ID NO: 262680 - DNA, 19 bp, Homo sapiens
  siRNA target sequence for MCOLN3 (NM_018298.9,779-797).
cagttcgtcatcaagaact

SEQ ID NO: 262681 - DNA, 19 bp, Homo sapiens
  siRNA target sequence for MCOLN3 (NM_018298.9,798-816).
ccctgactgttatgacttt

SEQ ID NO: 262682 - DNA, 19 bp, Homo sapiens
  siRNA target sequence for MCOLN3 (NM_018298.9,799-817).
cctgactgttatgacttta

SEQ ID NO: 262683 - DNA, 19 bp, Homo sapiens
  siRNA target sequence for MCOLN3 (NM_018298.9,811-829).
gactttactctgactataa

SEQ ID NO: 262684 - DNA, 19 bp, Homo sapiens
  siRNA target sequence for MCOLN3 (NM_018298.9,820-838).
ctgactataacatttgaca

SEQ ID NO: 262685 - DNA, 19 bp, Homo sapiens
  siRNA target sequence for MCOLN3 (NM_018298.9,908-926).
ggcatgtatctggatcaat

SEQ ID NO: 262686 - DNA, 19 bp, Homo sapiens
  siRNA target sequence for MCOLN3 (NM_018298.9,909-927).
gcatgtatctggatcaatt

SEQ ID NO: 262687 - DNA, 19 bp, Homo sapiens
  siRNA target sequence for MCOLN3 (NM_018298.9,913-931).
gtatctggatcaattcaga

SEQ ID NO: 262688 - DNA, 19 bp, Homo sapiens
  siRNA target sequence for MCOLN3 (NM_018298.9,928-946).
cagaagaacactcattaca

SEQ ID NO: 262689 - DNA, 19 bp, Homo sapiens
  siRNA target sequence for MCOLN3 (NM_018298.9,1090-1108).
gatcaaatggaatttgtca

SEQ ID NO: 262690 - DNA, 19 bp, Homo sapiens
  siRNA target sequence for MCOLN3 (NM_018298.9,1111-1129).
ggatggtacattatgatta

SEQ ID NO: 262691 - DNA, 19 bp, Homo sapiens
  siRNA target sequence for MCOLN3 (NM_018298.9,1112-1130).
gatggtacattatgattat

SEQ ID NO: 262692 - DNA, 19 bp, Homo sapiens
  siRNA target sequence for MCOLN3 (NM_018298.9,1125-1143).
gattattattagtgacata

SEQ ID NO: 262693 - DNA, 19 bp, Homo sapiens
  siRNA target sequence for MCOLN3 (NM_018298.9,1136-1154).
gtgacatattgacaatcat

SEQ ID NO: 262694 - DNA, 19 bp, Homo sapiens
  siRNA target sequence for MCOLN3 (NM_018298.9,1146-1164).
gacaatcattggatcaatt

SEQ ID NO: 262695 - DNA, 19 bp, Homo sapiens
  siRNA target sequence for MCOLN3 (NM_018298.9,1148-1166).
caatcattggatcaattct

SEQ ID NO: 262696 - DNA, 19 bp, Homo sapiens
  siRNA target sequence for MCOLN3 (NM_018298.9,1179-1197).
ccaagctaagagtctaact

SEQ ID NO: 262697 - DNA, 19 bp, Homo sapiens
  siRNA target sequence for MCOLN3 (NM_018298.9,1180-1198).
caagctaagagtctaacta

SEQ ID NO: 262698 - DNA, 19 bp, Homo sapiens
  siRNA target sequence for MCOLN3 (NM_018298.9,1183-1201).
gctaagagtctaactagtt

SEQ ID NO: 262699 - DNA, 19 bp, Homo sapiens
  siRNA target sequence for MCOLN3 (NM_018298.9,1184-1202).
ctaagagtctaactagtta

SEQ ID NO: 262700 - DNA, 19 bp, Homo sapiens
  siRNA target sequence for MCOLN3 (NM_018298.9,1188-1206).
gagtctaactagttatgat

SEQ ID NO: 262701 - DNA, 19 bp, Homo sapiens
  siRNA target sequence for MCOLN3 (NM_018298.9,1190-1208).
gtctaactagttatgatgt

SEQ ID NO: 262702 - DNA, 19 bp, Homo sapiens
  siRNA target sequence for MCOLN3 (NM_018298.9,1260-1278).
ccgatacctcggtttcttt

SEQ ID NO: 262703 - DNA, 19 bp, Homo sapiens
  siRNA target sequence for MCOLN3 (NM_018298.9,1270-1288).
ggtttctttgcaaagtaca

SEQ ID NO: 262704 - DNA, 19 bp, Homo sapiens
  siRNA target sequence for MCOLN3 (NM_018298.9,1271-1289).
gtttctttgcaaagtacaa

SEQ ID NO: 262705 - DNA, 19 bp, Homo sapiens
  siRNA target sequence for MCOLN3 (NM_018298.9,1312-1330).
gcagcgctgcccaatgtca

SEQ ID NO: 262706 - DNA, 19 bp, Homo sapiens
  siRNA target sequence for MCOLN3 (NM_018298.9,1313-1331).
cagcgctgcccaatgtcat

SEQ ID NO: 262707 - DNA, 19 bp, Homo sapiens
  siRNA target sequence for MCOLN3 (NM_018298.9,1343-1361).
gctgtgcagctatgattta

SEQ ID NO: 262708 - DNA, 19 bp, Homo sapiens
  siRNA target sequence for MCOLN3 (NM_018298.9,1352-1370).
ctatgatttacttaggtta

SEQ ID NO: 262709 - DNA, 19 bp, Homo sapiens
  siRNA target sequence for MCOLN3 (NM_018298.9,1509-1527).
cttagtctggctgtttagt

SEQ ID NO: 262710 - DNA, 19 bp, Homo sapiens
  siRNA target sequence for MCOLN3 (NM_018298.9,1517-1535).
ggctgtttagtagaattta

SEQ ID NO: 262711 - DNA, 19 bp, Homo sapiens
  siRNA target sequence for MCOLN3 (NM_018298.9,1588-1606).
gcactgatcactgatacat

SEQ ID NO: 262712 - DNA, 19 bp, Homo sapiens
  siRNA target sequence for MCOLN3 (NM_018298.9,1593-1611).
gatcactgatacatacgaa

SEQ ID NO: 262713 - DNA, 19 bp, Homo sapiens
  siRNA target sequence for MCOLN3 (NM_018298.9,1598-1616).
ctgatacatacgaaacaat

SEQ ID NO: 262714 - DNA, 19 bp, Homo sapiens
  siRNA target sequence for MCOLN3 (NM_018298.9,1604-1622).
catacgaaacaattaagca

SEQ ID NO: 262715 - DNA, 19 bp, Homo sapiens
  siRNA target sequence for MCOLN3 (NM_018298.9,1647-1665).
gactgaacttcgtacattt

SEQ ID NO: 262716 - DNA, 19 bp, Homo sapiens
  siRNA target sequence for MCOLN3 (NM_018298.9,1657-1675).
cgtacatttatatcagaat

SEQ ID NO: 262717 - DNA, 19 bp, Homo sapiens
  siRNA target sequence for MCOLN3 (NM_018298.9,1714-1732).
gatgaccctccagtatctt

SEQ ID NO: 262718 - DNA, 19 bp, Homo sapiens
  siRNA target sequence for MGC15619 (NM_032369.1,857-875).
ggaacatcaactacaagaa

SEQ ID NO: 262719 - DNA, 19 bp, Homo sapiens
  siRNA target sequence for MGC15619 (NM_032369.1,1015-1033).
cagcccgacaagaataact

SEQ ID NO: 262720 - DNA, 19 bp, Homo sapiens
  siRNA target sequence for MGC15619 (NM_032369.1,1017-1035).
gcccgacaagaataactat

SEQ ID NO: 262721 - DNA, 19 bp, Homo sapiens
  siRNA target sequence for MGC15619 (NM_032369.1,1125-1143).
gttctttcaccacaagttt

SEQ ID NO: 262722 - DNA, 19 bp, Homo sapiens
  siRNA target sequence for MGC15619 (NM_032369.1,1175-1193).
cattcatcctcgacattgt

SEQ ID NO: 262723 - DNA, 19 bp, Homo sapiens
  siRNA target sequence for MGC15619 (NM_032369.1,1265-1283).
ggatcatcaatgggattat

SEQ ID NO: 262724 - DNA, 19 bp, Homo sapiens
  siRNA target sequence for MGC15619 (NM_032369.1,1276-1294).
gggattatcatctcagtta

SEQ ID NO: 262725 - DNA, 19 bp, Homo sapiens
  siRNA target sequence for MGC15619 (NM_032369.1,1277-1295).
ggattatcatctcagttaa

SEQ ID NO: 262726 - DNA, 19 bp, Homo sapiens
  siRNA target sequence for MGC15619 (NM_032369.1,1301-1319).
gttcagaacggcaactctt

SEQ ID NO: 262727 - DNA, 19 bp, Homo sapiens
  siRNA target sequence for MGC15619 (NM_032369.1,1306-1324).
gaacggcaactcttaaggt

SEQ ID NO: 262728 - DNA, 19 bp, Homo sapiens
  siRNA target sequence for MGC15619 (NM_032369.1,1309-1327).
cggcaactcttaaggttaa

SEQ ID NO: 262729 - DNA, 19 bp, Homo sapiens
  siRNA target sequence for MGC15619 (NM_032369.1,1322-1340).
ggttaaaacagatgaatgt

SEQ ID NO: 262730 - DNA, 19 bp, Homo sapiens
  siRNA target sequence for MGC15619 (NM_032369.1,1323-1341).
gttaaaacagatgaatgta

SEQ ID NO: 262731 - DNA, 19 bp, Homo sapiens
  siRNA target sequence for MGC15619 (NM_032369.1,1402-1420).
gaaagacttaacaaactat

SEQ ID NO: 262732 - DNA, 19 bp, Homo sapiens
  siRNA target sequence for MGC15619 (NM_032369.1,1433-1451).
gacttcttggtgaagtgaa

SEQ ID NO: 262733 - DNA, 19 bp, Homo sapiens
  siRNA target sequence for NOLA1 (NM_018983.2,505-523).
ctccagaacgtgtagtctt

SEQ ID NO: 262734 - DNA, 19 bp, Homo sapiens
  siRNA target sequence for NOLA1 (NM_018983.2,507-525).
ccagaacgtgtagtcttat

SEQ ID NO: 262735 - DNA, 19 bp, Homo sapiens
  siRNA target sequence for NOLA1 (NM_018983.2,552-570).
gatgacatagtttgtaaat

SEQ ID NO: 262736 - DNA, 19 bp, Homo sapiens
  siRNA target sequence for NOLA1 (NM_018983.2,764-782).
gccactgcagaggttttta

SEQ ID NO: 262737 - DNA, 19 bp, Homo sapiens
  siRNA target sequence for TPCN1 (NM_017901.3,381-399).
gaagagctacctagcaaaa

SEQ ID NO: 262738 - DNA, 19 bp, Homo sapiens
  siRNA target sequence for TPCN1 (NM_017901.3,529-547).
gcgagaacaacgacaagtt

SEQ ID NO: 262739 - DNA, 19 bp, Homo sapiens
  siRNA target sequence for TPCN1 (NM_017901.3,891-909).
cgagcactgcgctgcattt

SEQ ID NO: 262740 - DNA, 19 bp, Homo sapiens
  siRNA target sequence for TPCN1 (NM_017901.3,1059-1077).
ccttcagacccctacttca

SEQ ID NO: 262741 - DNA, 19 bp, Homo sapiens
  siRNA target sequence for TPCN1 (NM_017901.3,1201-1219).
ccatcgagctgtatttcat

SEQ ID NO: 262742 - DNA, 19 bp, Homo sapiens
  siRNA target sequence for TPCN1 (NM_017901.3,1241-1259).
ggtgttcgacaccttcaat

SEQ ID NO: 262743 - DNA, 19 bp, Homo sapiens
  siRNA target sequence for TPCN1 (NM_017901.3,1247-1265).
cgacaccttcaatgacatt

SEQ ID NO: 262744 - DNA, 19 bp, Homo sapiens
  siRNA target sequence for TPCN1 (NM_017901.3,1274-1292).
caagttcaagtctttgcta

SEQ ID NO: 262745 - DNA, 19 bp, Homo sapiens
  siRNA target sequence for TPCN1 (NM_017901.3,1413-1431).
gccagggagcgctatctta

SEQ ID NO: 262746 - DNA, 19 bp, Homo sapiens
  siRNA target sequence for TPCN1 (NM_017901.3,1467-1485).
ctcagcctaaaggactttt

SEQ ID NO: 262747 - DNA, 19 bp, Homo sapiens
  siRNA target sequence for TPCN1 (NM_017901.3,1471-1489).
gcctaaaggacttttacga

SEQ ID NO: 262748 - DNA, 19 bp, Homo sapiens
  siRNA target sequence for TPCN1 (NM_017901.3,1472-1490).
cctaaaggacttttacgat

SEQ ID NO: 262749 - DNA, 19 bp, Homo sapiens
  siRNA target sequence for TPCN1 (NM_017901.3,1473-1491).
ctaaaggacttttacgata

SEQ ID NO: 262750 - DNA, 19 bp, Homo sapiens
  siRNA target sequence for TPCN1 (NM_017901.3,1658-1676).
gatcctcgtggagacattt

SEQ ID NO: 262751 - DNA, 19 bp, Homo sapiens
  siRNA target sequence for TPCN1 (NM_017901.3,1717-1735).
ggagttacctcgtctttct

SEQ ID NO: 262752 - DNA, 19 bp, Homo sapiens
  siRNA target sequence for TPCN1 (NM_017901.3,1718-1736).
gagttacctcgtctttcta

SEQ ID NO: 262753 - DNA, 19 bp, Homo sapiens
  siRNA target sequence for TPCN1 (NM_017901.3,1725-1743).
ctcgtctttctaactatct

SEQ ID NO: 262754 - DNA, 19 bp, Homo sapiens
  siRNA target sequence for TPCN1 (NM_017901.3,1727-1745).
cgtctttctaactatctat

SEQ ID NO: 262755 - DNA, 19 bp, Homo sapiens
  siRNA target sequence for TPCN1 (NM_017901.3,1798-1816).
cttccggatggaacttgtt

SEQ ID NO: 262756 - DNA, 19 bp, Homo sapiens
  siRNA target sequence for TPCN1 (NM_017901.3,1801-1819).
ccggatggaacttgtttga

SEQ ID NO: 262757 - DNA, 19 bp, Homo sapiens
  siRNA target sequence for TPCN1 (NM_017901.3,1804-1822).
gatggaacttgtttgactt

SEQ ID NO: 262758 - DNA, 19 bp, Homo sapiens
  siRNA target sequence for TPCN1 (NM_017901.3,1911-1929).
cagctgctgaggttgttta

SEQ ID NO: 262759 - DNA, 19 bp, Homo sapiens
  siRNA target sequence for TPCN1 (NM_017901.3,2145-2163).
gtggaggaaggctactatt

SEQ ID NO: 262760 - DNA, 19 bp, Homo sapiens
  siRNA target sequence for TPCN1 (NM_017901.3,2154-2172).
ggctactattatctcaata

SEQ ID NO: 262761 - DNA, 19 bp, Homo sapiens
  siRNA target sequence for TPCN1 (NM_017901.3,2194-2212).
gctttgtgaccctgtttga

SEQ ID NO: 262762 - DNA, 19 bp, Homo sapiens
  siRNA target sequence for TPCN1 (NM_017901.3,2326-2344).
cgatcattgtcgcctttat

SEQ ID NO: 262763 - DNA, 19 bp, Homo sapiens
  siRNA target sequence for TPCN1 (NM_017901.3,2353-2371).
ccttcgtcttccgaatgaa

SEQ ID NO: 262764 - DNA, 19 bp, Homo sapiens
  siRNA target sequence for TPCN1 (NM_017901.3,2529-2547).
gagagataccagcaacatt

SEQ ID NO: 262765 - DNA, 19 bp, Homo sapiens
  siRNA target sequence for TPCN1 (NM_017901.3,2533-2551).
gataccagcaacattccat

SEQ ID NO: 262766 - DNA, 19 bp, Homo sapiens
  siRNA target sequence for TPCN2 (NM_139075.1,226-244).
gggacctctgcattgatca

SEQ ID NO: 262767 - DNA, 19 bp, Homo sapiens
  siRNA target sequence for TPCN2 (NM_139075.1,254-272).
cttcatcgaagatgctatt

SEQ ID NO: 262768 - DNA, 19 bp, Homo sapiens
  siRNA target sequence for TPCN2 (NM_139075.1,316-334).
ggctttaccgacggtatta

SEQ ID NO: 262769 - DNA, 19 bp, Homo sapiens
  siRNA target sequence for TPCN2 (NM_139075.1,318-336).
ctttaccgacggtattact

SEQ ID NO: 262770 - DNA, 19 bp, Homo sapiens
  siRNA target sequence for TPCN2 (NM_139075.1,327-345).
cggtattactcgaacgtat

SEQ ID NO: 262771 - DNA, 19 bp, Homo sapiens
  siRNA target sequence for TPCN2 (NM_139075.1,342-360).
gtatgccaacggactttga

SEQ ID NO: 262772 - DNA, 19 bp, Homo sapiens
  siRNA target sequence for TPCN2 (NM_139075.1,1051-1069).
gctacctgatgaaatctct

SEQ ID NO: 262773 - DNA, 19 bp, Homo sapiens
  siRNA target sequence for TPCN2 (NM_139075.1,1383-1401).
ctcttcggccactactact

SEQ ID NO: 262774 - DNA, 19 bp, Homo sapiens
  siRNA target sequence for TPCN2 (NM_139075.1,1522-1540).
gcgtcttcattgtgtacta

SEQ ID NO: 262775 - DNA, 19 bp, Homo sapiens
  siRNA target sequence for TPCN2 (NM_139075.1,1860-1878).
gtggtggtctactacgtat

SEQ ID NO: 262776 - DNA, 19 bp, Homo sapiens
  siRNA target sequence for TPCN2 (NM_139075.1,1862-1880).
ggtggtctactacgtattt

SEQ ID NO: 262777 - DNA, 19 bp, Homo sapiens
  siRNA target sequence for TPCN2 (NM_139075.1,1871-1889).
ctacgtatttgccatcatt

SEQ ID NO: 262778 - DNA, 19 bp, Homo sapiens
  siRNA target sequence for TPCN2 (NM_139075.1,1882-1900).
ccatcattgggatcaactt

SEQ ID NO: 262779 - DNA, 19 bp, Homo sapiens
  siRNA target sequence for TPCN2 (NM_139075.1,1999-2017).
ccaacaacttcgatgactt

SEQ ID NO: 262780 - DNA, 19 bp, Homo sapiens
  siRNA target sequence for TPCN2 (NM_139075.1,2031-2049).
gtcactctgtggaacttga

SEQ ID NO: 262781 - DNA, 19 bp, Homo sapiens
  siRNA target sequence for TPCN2 (NM_139075.1,2100-2118).
ggcccgtggtccaagatct

SEQ ID NO: 262782 - DNA, 19 bp, Homo sapiens
  siRNA target sequence for TPCN2 (NM_139075.1,2101-2119).
gcccgtggtccaagatcta

SEQ ID NO: 262783 - DNA, 19 bp, Homo sapiens
  siRNA target sequence for TPCN2 (NM_139075.1,2102-2120).
cccgtggtccaagatctat

SEQ ID NO: 262784 - DNA, 19 bp, Homo sapiens
  siRNA target sequence for TPCN2 (NM_139075.1,2103-2121).
ccgtggtccaagatctatt

SEQ ID NO: 262785 - DNA, 19 bp, Homo sapiens
  siRNA target sequence for TPCN2 (NM_139075.1,2104-2122).
cgtggtccaagatctattt

SEQ ID NO: 262786 - DNA, 19 bp, Homo sapiens
  siRNA target sequence for TPCN2 (NM_139075.1,2107-2125).
ggtccaagatctattttgt

SEQ ID NO: 262787 - DNA, 19 bp, Homo sapiens
  siRNA target sequence for TPCN2 (NM_139075.1,2108-2126).
gtccaagatctattttgta

SEQ ID NO: 262788 - DNA, 19 bp, Homo sapiens
  siRNA target sequence for TPCN2 (NM_139075.1,2270-2288).
gctcctgttcagggatatt

SEQ ID NO: 262789 - DNA, 19 bp, Homo sapiens
  siRNA target sequence for TRPM4 (NM_017636.2,98-116).
gctggatccccaagatctt

SEQ ID NO: 262790 - DNA, 19 bp, Homo sapiens
  siRNA target sequence for TRPM4 (NM_017636.2,126-144).
gacctgcacgacgttcata

SEQ ID NO: 262791 - DNA, 19 bp, Homo sapiens
  siRNA target sequence for TRPM4 (NM_017636.2,128-146).
cctgcacgacgttcatagt

SEQ ID NO: 262792 - DNA, 19 bp, Homo sapiens
  siRNA target sequence for TRPM4 (NM_017636.2,129-147).
ctgcacgacgttcatagtt

SEQ ID NO: 262793 - DNA, 19 bp, Homo sapiens
  siRNA target sequence for TRPM4 (NM_017636.2,131-149).
gcacgacgttcatagttga

SEQ ID NO: 262794 - DNA, 19 bp, Homo sapiens
  siRNA target sequence for TRPM4 (NM_017636.2,363-381).
ggatccagctgcagtttat

SEQ ID NO: 262795 - DNA, 19 bp, Homo sapiens
  siRNA target sequence for TRPM4 (NM_017636.2,364-382).
gatccagctgcagtttata

SEQ ID NO: 262796 - DNA, 19 bp, Homo sapiens
  siRNA target sequence for TRPM4 (NM_017636.2,368-386).
cagctgcagtttatagtct

SEQ ID NO: 262797 - DNA, 19 bp, Homo sapiens
  siRNA target sequence for TRPM4 (NM_017636.2,645-663).
gggtgtggtccggaataga

SEQ ID NO: 262798 - DNA, 19 bp, Homo sapiens
  siRNA target sequence for TRPM4 (NM_017636.2,866-884).
gagggactggaattgacat

SEQ ID NO: 262799 - DNA, 19 bp, Homo sapiens
  siRNA target sequence for TRPM4 (NM_017636.2,1058-1076).
gcgaagcccgagatcgaat

SEQ ID NO: 262800 - DNA, 19 bp, Homo sapiens
  siRNA target sequence for TRPM4 (NM_017636.2,1186-1204).
gaattcgagaccatagttt

SEQ ID NO: 262801 - DNA, 19 bp, Homo sapiens
  siRNA target sequence for TRPM4 (NM_017636.2,1668-1686).
cttcggggagagcatgtat

SEQ ID NO: 262802 - DNA, 19 bp, Homo sapiens
  siRNA target sequence for TRPM4 (NM_017636.2,1806-1824).
ctgggagatgggttccaat

SEQ ID NO: 262803 - DNA, 19 bp, Homo sapiens
  siRNA target sequence for TRPM4 (NM_017636.2,2149-2167).
ctggttctcgccttctttt

SEQ ID NO: 262804 - DNA, 19 bp, Homo sapiens
  siRNA target sequence for TRPM4 (NM_017636.2,2247-2265).
catggatagtgtcattaat

SEQ ID NO: 262805 - DNA, 19 bp, Homo sapiens
  siRNA target sequence for TRPM4 (NM_017636.2,2759-2777).
gcatcgacttcatggtttt

SEQ ID NO: 262806 - DNA, 19 bp, Homo sapiens
  siRNA target sequence for TRPM4 (NM_017636.2,2796-2814).
catcttcacggtcaacaaa

SEQ ID NO: 262807 - DNA, 19 bp, Homo sapiens
  siRNA target sequence for TRPM4 (NM_017636.2,2833-2851).
gtcatcgtgagcaagatga

SEQ ID NO: 262808 - DNA, 19 bp, Homo sapiens
  siRNA target sequence for TRPM4 (NM_017636.2,3393-3411).
gcatttccgggtttacctt

SEQ ID NO: 262809 - DNA, 19 bp, Homo sapiens
  siRNA target sequence for TRPM4 (NM_017636.2,3394-3412).
catttccgggtttaccttt

SEQ ID NO: 262810 - DNA, 19 bp, Homo sapiens
  siRNA target sequence for TRPM4 (NM_017636.2,3440-3458).
cgtgggaatcggtgcataa

SEQ ID NO: 262811 - DNA, 19 bp, Homo sapiens
  siRNA target sequence for TRPM4 (NM_017636.2,3443-3461).
gggaatcggtgcataagga

SEQ ID NO: 262812 - DNA, 19 bp, Homo sapiens
  siRNA target sequence for TRPM4 (NM_017636.2,3449-3467).
cggtgcataaggagaactt

SEQ ID NO: 262813 - DNA, 19 bp, Homo sapiens
  siRNA target sequence for TRPM4 (NM_017636.2,3697-3715).
ctgcctgggtccaaagact

SEQ ID NO: 262814 - DNA, 19 bp, Homo sapiens
  siRNA target sequence for TRPM5 (NM_014555.2,943-961).
ctgctcaccgtgtatgact

SEQ ID NO: 262815 - DNA, 19 bp, Homo sapiens
  siRNA target sequence for TRPM5 (NM_014555.2,1718-1736).
ccacgcgcgaggcgaaata

SEQ ID NO: 262816 - DNA, 19 bp, Homo sapiens
  siRNA target sequence for TRPM5 (NM_014555.2,1721-1739).
cgcgcgaggcgaaatacga

SEQ ID NO: 262817 - DNA, 19 bp, Homo sapiens
  siRNA target sequence for TRPM5 (NM_014555.2,2218-2236).
gggaacgtggtcatgtact

SEQ ID NO: 262818 - DNA, 19 bp, Homo sapiens
  siRNA target sequence for TRPM5 (NM_014555.2,2309-2327).
ccgaggtcaccctctactt

SEQ ID NO: 262819 - DNA, 19 bp, Homo sapiens
  siRNA target sequence for TRPM5 (NM_014555.2,2546-2564).
cgctgcggctgatccatat

SEQ ID NO: 262820 - DNA, 19 bp, Homo sapiens
  siRNA target sequence for TRPM5 (NM_014555.2,2548-2566).
ctgcggctgatccatatct

SEQ ID NO: 262821 - DNA, 19 bp, Homo sapiens
  siRNA target sequence for TRPM5 (NM_014555.2,2550-2568).
gcggctgatccatatcttt

SEQ ID NO: 262822 - DNA, 19 bp, Homo sapiens
  siRNA target sequence for TRPM5 (NM_014555.2,2560-2578).
catatctttgccatacaca

SEQ ID NO: 262823 - DNA, 19 bp, Homo sapiens
  siRNA target sequence for TRPM5 (NM_014555.2,2602-2620).
gtggtagagcgcatgatga

SEQ ID NO: 262824 - DNA, 19 bp, Homo sapiens
  siRNA target sequence for TRPM5 (NM_014555.2,2772-2790).
cccactggacgagattgat

SEQ ID NO: 262825 - DNA, 19 bp, Homo sapiens
  siRNA target sequence for TRPM5 (NM_014555.2,3322-3340).
ctggagtcacagatcaact

SEQ ID NO: 262826 - DNA, 19 bp, Homo sapiens
  siRNA target sequence for VGCNL1 (NM_052867.1,149-167).
gtctctgtcggataatgct

SEQ ID NO: 262827 - DNA, 19 bp, Homo sapiens
  siRNA target sequence for VGCNL1 (NM_052867.1,165-183).
gctgacatcctctggatta

SEQ ID NO: 262828 - DNA, 19 bp, Homo sapiens
  siRNA target sequence for VGCNL1 (NM_052867.1,166-184).
ctgacatcctctggattaa

SEQ ID NO: 262829 - DNA, 19 bp, Homo sapiens
  siRNA target sequence for VGCNL1 (NM_052867.1,168-186).
gacatcctctggattaaca

SEQ ID NO: 262830 - DNA, 19 bp, Homo sapiens
  siRNA target sequence for VGCNL1 (NM_052867.1,170-188).
catcctctggattaacaaa

SEQ ID NO: 262831 - DNA, 19 bp, Homo sapiens
  siRNA target sequence for VGCNL1 (NM_052867.1,174-192).
ctctggattaacaaaccat

SEQ ID NO: 262832 - DNA, 19 bp, Homo sapiens
  siRNA target sequence for VGCNL1 (NM_052867.1,291-309).
gtgaccttcactttggata

SEQ ID NO: 262833 - DNA, 19 bp, Homo sapiens
  siRNA target sequence for VGCNL1 (NM_052867.1,296-314).
cttcactttggatacatta

SEQ ID NO: 262834 - DNA, 19 bp, Homo sapiens
  siRNA target sequence for VGCNL1 (NM_052867.1,331-349).
cggcagagatgatagcaaa

SEQ ID NO: 262835 - DNA, 19 bp, Homo sapiens
  siRNA target sequence for VGCNL1 (NM_052867.1,371-389).
caagggggatagttcctat

SEQ ID NO: 262836 - DNA, 19 bp, Homo sapiens
  siRNA target sequence for VGCNL1 (NM_052867.1,376-394).
gggatagttcctatgtgaa

SEQ ID NO: 262837 - DNA, 19 bp, Homo sapiens
  siRNA target sequence for VGCNL1 (NM_052867.1,512-530).
gattccacggccactgatt

SEQ ID NO: 262838 - DNA, 19 bp, Homo sapiens
  siRNA target sequence for VGCNL1 (NM_052867.1,516-534).
ccacggccactgattatga

SEQ ID NO: 262839 - DNA, 19 bp, Homo sapiens
  siRNA target sequence for VGCNL1 (NM_052867.1,517-535).
cacggccactgattatgat

SEQ ID NO: 262840 - DNA, 19 bp, Homo sapiens
  siRNA target sequence for VGCNL1 (NM_052867.1,536-554).
ccgagcattccggatttat

SEQ ID NO: 262841 - DNA, 19 bp, Homo sapiens
  siRNA target sequence for VGCNL1 (NM_052867.1,537-555).
cgagcattccggatttatt

SEQ ID NO: 262842 - DNA, 19 bp, Homo sapiens
  siRNA target sequence for VGCNL1 (NM_052867.1,538-556).
gagcattccggatttattt

SEQ ID NO: 262843 - DNA, 19 bp, Homo sapiens
  siRNA target sequence for VGCNL1 (NM_052867.1,547-565).
ggatttatttccgatttga

SEQ ID NO: 262844 - DNA, 19 bp, Homo sapiens
  siRNA target sequence for VGCNL1 (NM_052867.1,599-617).
gcgatcgggagaacaaata

SEQ ID NO: 262845 - DNA, 19 bp, Homo sapiens
  siRNA target sequence for VGCNL1 (NM_052867.1,677-695).
gatgtttggaacatttact

SEQ ID NO: 262846 - DNA, 19 bp, Homo sapiens
  siRNA target sequence for VGCNL1 (NM_052867.1,684-702).
ggaacatttacttatcact

SEQ ID NO: 262847 - DNA, 19 bp, Homo sapiens
  siRNA target sequence for VGCNL1 (NM_052867.1,703-721).
gtgttgtaaatgacacaaa

SEQ ID NO: 262848 - DNA, 19 bp, Homo sapiens
  siRNA target sequence for VGCNL1 (NM_052867.1,728-746).
gaatgtaacctggaatagt

SEQ ID NO: 262849 - DNA, 19 bp, Homo sapiens
  siRNA target sequence for VGCNL1 (NM_052867.1,769-787).
gctcaccagagctagaaga

SEQ ID NO: 262850 - DNA, 19 bp, Homo sapiens
  siRNA target sequence for VGCNL1 (NM_052867.1,770-788).
ctcaccagagctagaagaa

SEQ ID NO: 262851 - DNA, 19 bp, Homo sapiens
  siRNA target sequence for VGCNL1 (NM_052867.1,817-835).
gcatggaccttgaagatct

SEQ ID NO: 262852 - DNA, 19 bp, Homo sapiens
  siRNA target sequence for VGCNL1 (NM_052867.1,859-877).
gctacagtggctttaatga

SEQ ID NO: 262853 - DNA, 19 bp, Homo sapiens
  siRNA target sequence for VGCNL1 (NM_052867.1,867-885).
ggctttaatgagataggaa

SEQ ID NO: 262854 - DNA, 19 bp, Homo sapiens
  siRNA target sequence for VGCNL1 (NM_052867.1,876-894).
gagataggaactagtatat

SEQ ID NO: 262855 - DNA, 19 bp, Homo sapiens
  siRNA target sequence for VGCNL1 (NM_052867.1,889-907).
gtatattcaccgtctatga

SEQ ID NO: 262856 - DNA, 19 bp, Homo sapiens
  siRNA target sequence for VGCNL1 (NM_052867.1,935-953).
cctcatgtacagagcaatt

SEQ ID NO: 262857 - DNA, 19 bp, Homo sapiens
  siRNA target sequence for VGCNL1 (NM_052867.1,966-984).
cgttggcgttcctacttct

SEQ ID NO: 262858 - DNA, 19 bp, Homo sapiens
  siRNA target sequence for VGCNL1 (NM_052867.1,970-988).
ggcgttcctacttctattt

SEQ ID NO: 262859 - DNA, 19 bp, Homo sapiens
  siRNA target sequence for VGCNL1 (NM_052867.1,973-991).
gttcctacttctatttcat

SEQ ID NO: 262860 - DNA, 19 bp, Homo sapiens
  siRNA target sequence for VGCNL1 (NM_052867.1,1017-1035).
cttgtgaagaacgtgttta

SEQ ID NO: 262861 - DNA, 19 bp, Homo sapiens
  siRNA target sequence for VGCNL1 (NM_052867.1,1022-1040).
gaagaacgtgtttattgct

SEQ ID NO: 262862 - DNA, 19 bp, Homo sapiens
  siRNA target sequence for VGCNL1 (NM_052867.1,1029-1047).
gtgtttattgctgttatca

SEQ ID NO: 262863 - DNA, 19 bp, Homo sapiens
  siRNA target sequence for VGCNL1 (NM_052867.1,1038-1056).
gctgttatcattgaaacat

SEQ ID NO: 262864 - DNA, 19 bp, Homo sapiens
  siRNA target sequence for VGCNL1 (NM_052867.1,1204-1222).
cagcctgcctccagaaaat

SEQ ID NO: 262865 - DNA, 19 bp, Homo sapiens
  siRNA target sequence for VGCNL1 (NM_052867.1,1234-1252).
ccgttttccacatgttcat

SEQ ID NO: 262866 - DNA, 19 bp, Homo sapiens
  siRNA target sequence for VGCNL1 (NM_052867.1,1281-1299).
gtggcggctagcaactact

SEQ ID NO: 262867 - DNA, 19 bp, Homo sapiens
  siRNA target sequence for VGCNL1 (NM_052867.1,1284-1302).
gcggctagcaactactaca

SEQ ID NO: 262868 - DNA, 19 bp, Homo sapiens
  siRNA target sequence for VGCNL1 (NM_052867.1,1285-1303).
cggctagcaactactacaa

SEQ ID NO: 262869 - DNA, 19 bp, Homo sapiens
  siRNA target sequence for VGCNL1 (NM_052867.1,1286-1304).
ggctagcaactactacaaa

SEQ ID NO: 262870 - DNA, 19 bp, Homo sapiens
  siRNA target sequence for VGCNL1 (NM_052867.1,1321-1339).
ggcagtacgacgagttcta

SEQ ID NO: 262871 - DNA, 19 bp, Homo sapiens
  siRNA target sequence for VGCNL1 (NM_052867.1,1341-1359).
ctggcggaggtggctttta

SEQ ID NO: 262872 - DNA, 19 bp, Homo sapiens
  siRNA target sequence for VGCNL1 (NM_052867.1,1343-1361).
ggcggaggtggcttttaca

SEQ ID NO: 262873 - DNA, 19 bp, Homo sapiens
  siRNA target sequence for VGCNL1 (NM_052867.1,1345-1363).
cggaggtggcttttacagt

SEQ ID NO: 262874 - DNA, 19 bp, Homo sapiens
  siRNA target sequence for VGCNL1 (NM_052867.1,1349-1367).
ggtggcttttacagtactt

SEQ ID NO: 262875 - DNA, 19 bp, Homo sapiens
  siRNA target sequence for VGCNL1 (NM_052867.1,1403-1421).
gggatttactggatatatt

SEQ ID NO: 262876 - DNA, 19 bp, Homo sapiens
  siRNA target sequence for VGCNL1 (NM_052867.1,1404-1422).
ggatttactggatatatta

SEQ ID NO: 262877 - DNA, 19 bp, Homo sapiens
  siRNA target sequence for VGCNL1 (NM_052867.1,1433-1451).
ccacaaattcgaactacta

SEQ ID NO: 262878 - DNA, 19 bp, Homo sapiens
  siRNA target sequence for VGCNL1 (NM_052867.1,1442-1460).
cgaactactactcgtaatt

SEQ ID NO: 262879 - DNA, 19 bp, Homo sapiens
  siRNA target sequence for VGCNL1 (NM_052867.1,1446-1464).
ctactactcgtaattggaa

SEQ ID NO: 262880 - DNA, 19 bp, Homo sapiens
  siRNA target sequence for VGCNL1 (NM_052867.1,1454-1472).
cgtaattggaactactctt

SEQ ID NO: 262881 - DNA, 19 bp, Homo sapiens
  siRNA target sequence for VGCNL1 (NM_052867.1,1473-1491).
catgtatacccagatcttt

SEQ ID NO: 262882 - DNA, 19 bp, Homo sapiens
  siRNA target sequence for VGCNL1 (NM_052867.1,1488-1506).
ctttatcattcacaattca

SEQ ID NO: 262883 - DNA, 19 bp, Homo sapiens
  siRNA target sequence for VGCNL1 (NM_052867.1,1524-1542).
cgagtagttcggctgatta

SEQ ID NO: 262884 - DNA, 19 bp, Homo sapiens
  siRNA target sequence for VGCNL1 (NM_052867.1,1525-1543).
gagtagttcggctgattaa

SEQ ID NO: 262885 - DNA, 19 bp, Homo sapiens
  siRNA target sequence for VGCNL1 (NM_052867.1,1527-1545).
gtagttcggctgattaaga

SEQ ID NO: 262886 - DNA, 19 bp, Homo sapiens
  siRNA target sequence for VGCNL1 (NM_052867.1,1530-1548).
gttcggctgattaagattt

SEQ ID NO: 262887 - DNA, 19 bp, Homo sapiens
  siRNA target sequence for VGCNL1 (NM_052867.1,1549-1567).
cacctgcattagaagactt

SEQ ID NO: 262888 - DNA, 19 bp, Homo sapiens
  siRNA target sequence for VGCNL1 (NM_052867.1,1554-1572).
gcattagaagactttgtgt

SEQ ID NO: 262889 - DNA, 19 bp, Homo sapiens
  siRNA target sequence for VGCNL1 (NM_052867.1,1555-1573).
cattagaagactttgtgta

SEQ ID NO: 262890 - DNA, 19 bp, Homo sapiens
  siRNA target sequence for VGCNL1 (NM_052867.1,1563-1581).
gactttgtgtacaagatat

SEQ ID NO: 262891 - DNA, 19 bp, Homo sapiens
  siRNA target sequence for VGCNL1 (NM_052867.1,1604-1622).
gagtttggttgtatttact

SEQ ID NO: 262892 - DNA, 19 bp, Homo sapiens
  siRNA target sequence for VGCNL1 (NM_052867.1,1628-1646).
cctcttgattgttatgtca

SEQ ID NO: 262893 - DNA, 19 bp, Homo sapiens
  siRNA target sequence for VGCNL1 (NM_052867.1,1634-1652).
gattgttatgtcagcaatt

SEQ ID NO: 262894 - DNA, 19 bp, Homo sapiens
  siRNA target sequence for VGCNL1 (NM_052867.1,1638-1656).
gttatgtcagcaattagtt

SEQ ID NO: 262895 - DNA, 19 bp, Homo sapiens
  siRNA target sequence for VGCNL1 (NM_052867.1,1648-1666).
caattagtttgcagatgtt

SEQ ID NO: 262896 - DNA, 19 bp, Homo sapiens
  siRNA target sequence for VGCNL1 (NM_052867.1,1685-1703).
ggacagatttactacgttt

SEQ ID NO: 262897 - DNA, 19 bp, Homo sapiens
  siRNA target sequence for VGCNL1 (NM_052867.1,1699-1717).
cgtttccgagggcatttat

SEQ ID NO: 262898 - DNA, 19 bp, Homo sapiens
  siRNA target sequence for VGCNL1 (NM_052867.1,1757-1775).
cgtaatggaccaaactcta

SEQ ID NO: 262899 - DNA, 19 bp, Homo sapiens
  siRNA target sequence for VGCNL1 (NM_052867.1,1758-1776).
gtaatggaccaaactctaa

SEQ ID NO: 262900 - DNA, 19 bp, Homo sapiens
  siRNA target sequence for VGCNL1 (NM_052867.1,1800-1818).
cccgtggttgccatctatt

SEQ ID NO: 262901 - DNA, 19 bp, Homo sapiens
  siRNA target sequence for VGCNL1 (NM_052867.1,1801-1819).
ccgtggttgccatctattt

SEQ ID NO: 262902 - DNA, 19 bp, Homo sapiens
  siRNA target sequence for VGCNL1 (NM_052867.1,1870-1888).
ctgttattttggacaactt

SEQ ID NO: 262903 - DNA, 19 bp, Homo sapiens
  siRNA target sequence for VGCNL1 (NM_052867.1,1880-1898).
ggacaacttagaacttgat

SEQ ID NO: 262904 - DNA, 19 bp, Homo sapiens
  siRNA target sequence for VGCNL1 (NM_052867.1,1904-1922).
cctaaagaagcttaaacaa

SEQ ID NO: 262905 - DNA, 19 bp, Homo sapiens
  siRNA target sequence for VGCNL1 (NM_052867.1,1913-1931).
gcttaaacaattaaagcaa

SEQ ID NO: 262906 - DNA, 19 bp, Homo sapiens
  siRNA target sequence for VGCNL1 (NM_052867.1,1945-1963).
cggacaccaaagaaaagct

SEQ ID NO: 262907 - DNA, 19 bp, Homo sapiens
  siRNA target sequence for VGCNL1 (NM_052867.1,1966-1984).
ctttacgcctgcgaatctt

SEQ ID NO: 262908 - DNA, 19 bp, Homo sapiens
  siRNA target sequence for VGCNL1 (NM_052867.1,1971-1989).
cgcctgcgaatctttgaaa

SEQ ID NO: 262909 - DNA, 19 bp, Homo sapiens
  siRNA target sequence for VGCNL1 (NM_052867.1,1972-1990).
gcctgcgaatctttgaaaa

SEQ ID NO: 262910 - DNA, 19 bp, Homo sapiens
  siRNA target sequence for VGCNL1 (NM_052867.1,1973-1991).
cctgcgaatctttgaaaaa

SEQ ID NO: 262911 - DNA, 19 bp, Homo sapiens
  siRNA target sequence for VGCNL1 (NM_052867.1,2007-2025).
caaatggtgaaaatctcaa

SEQ ID NO: 262912 - DNA, 19 bp, Homo sapiens
  siRNA target sequence for VGCNL1 (NM_052867.1,2050-2068).
ctaaaatcagggagagttt

SEQ ID NO: 262913 - DNA, 19 bp, Homo sapiens
  siRNA target sequence for VGCNL1 (NM_052867.1,2156-2174).
ctccaaacgctcagcaatt

SEQ ID NO: 262914 - DNA, 19 bp, Homo sapiens
  siRNA target sequence for VGCNL1 (NM_052867.1,2158-2176).
ccaaacgctcagcaattga

SEQ ID NO: 262915 - DNA, 19 bp, Homo sapiens
  siRNA target sequence for VGCNL1 (NM_052867.1,2167-2185).
cagcaattgaggacaacaa

SEQ ID NO: 262916 - DNA, 19 bp, Homo sapiens
  siRNA target sequence for VGCNL1 (NM_052867.1,2254-2272).
ccgcagtcactaaaatctt

SEQ ID NO: 262917 - DNA, 19 bp, Homo sapiens
  siRNA target sequence for VGCNL1 (NM_052867.1,2255-2273).
cgcagtcactaaaatctta

SEQ ID NO: 262918 - DNA, 19 bp, Homo sapiens
  siRNA target sequence for VGCNL1 (NM_052867.1,2293-2311).
gcatgctgagcggatcatt

SEQ ID NO: 262919 - DNA, 19 bp, Homo sapiens
  siRNA target sequence for VGCNL1 (NM_052867.1,2294-2312).
catgctgagcggatcattt

SEQ ID NO: 262920 - DNA, 19 bp, Homo sapiens
  siRNA target sequence for VGCNL1 (NM_052867.1,2343-2361).
ctcagcgtgcagcatcata

SEQ ID NO: 262921 - DNA, 19 bp, Homo sapiens
  siRNA target sequence for VGCNL1 (NM_052867.1,2367-2385).
caagagcgcaggtcactaa

SEQ ID NO: 262922 - DNA, 19 bp, Homo sapiens
  siRNA target sequence for VGCNL1 (NM_052867.1,2372-2390).
gcgcaggtcactaagacat

SEQ ID NO: 262923 - DNA, 19 bp, Homo sapiens
  siRNA target sequence for VGCNL1 (NM_052867.1,2380-2398).
cactaagacatggatcaaa

SEQ ID NO: 262924 - DNA, 19 bp, Homo sapiens
  siRNA target sequence for VGCNL1 (NM_052867.1,2382-2400).
ctaagacatggatcaaaca

SEQ ID NO: 262925 - DNA, 19 bp, Homo sapiens
  siRNA target sequence for VGCNL1 (NM_052867.1,2438-2456).
gactcaagatcattccaat

SEQ ID NO: 262926 - DNA, 19 bp, Homo sapiens
  siRNA target sequence for VGCNL1 (NM_052867.1,2491-2509).
gtgaaataaagatgattca

SEQ ID NO: 262927 - DNA, 19 bp, Homo sapiens
  siRNA target sequence for VGCNL1 (NM_052867.1,2563-2581).
gagagaaccacccatactt

SEQ ID NO: 262928 - DNA, 19 bp, Homo sapiens
  siRNA target sequence for VGCNL1 (NM_052867.1,2582-2600).
cgataagccactgttcatt

SEQ ID NO: 262929 - DNA, 19 bp, Homo sapiens
  siRNA target sequence for VGCNL1 (NM_052867.1,2650-2668).
cacgcttcaacgcatctaa

SEQ ID NO: 262930 - DNA, 19 bp, Homo sapiens
  siRNA target sequence for VGCNL1 (NM_052867.1,2652-2670).
cgcttcaacgcatctaaaa

SEQ ID NO: 262931 - DNA, 19 bp, Homo sapiens
  siRNA target sequence for VGCNL1 (NM_052867.1,2654-2672).
cttcaacgcatctaaaaca

SEQ ID NO: 262932 - DNA, 19 bp, Homo sapiens
  siRNA target sequence for VGCNL1 (NM_052867.1,2745-2763).
ctggactgggtcatgatca

SEQ ID NO: 262933 - DNA, 19 bp, Homo sapiens
  siRNA target sequence for VGCNL1 (NM_052867.1,2872-2890).
gcattgagcttaatctgaa

SEQ ID NO: 262934 - DNA, 19 bp, Homo sapiens
  siRNA target sequence for VGCNL1 (NM_052867.1,2935-2953).
gggacttcggtggagtaat

SEQ ID NO: 262935 - DNA, 19 bp, Homo sapiens
  siRNA target sequence for VGCNL1 (NM_052867.1,2943-2961).
ggtggagtaatggacatat

SEQ ID NO: 262936 - DNA, 19 bp, Homo sapiens
  siRNA target sequence for VGCNL1 (NM_052867.1,2944-2962).
gtggagtaatggacatatt

SEQ ID NO: 262937 - DNA, 19 bp, Homo sapiens
  siRNA target sequence for VGCNL1 (NM_052867.1,2946-2964).
ggagtaatggacatattta

SEQ ID NO: 262938 - DNA, 19 bp, Homo sapiens
  siRNA target sequence for VGCNL1 (NM_052867.1,2947-2965).
gagtaatggacatatttat

SEQ ID NO: 262939 - DNA, 19 bp, Homo sapiens
  siRNA target sequence for VGCNL1 (NM_052867.1,3022-3040).
cgggagctcagcttctaat

SEQ ID NO: 262940 - DNA, 19 bp, Homo sapiens
  siRNA target sequence for VGCNL1 (NM_052867.1,3058-3076).
gacctctgcgcatattcaa

SEQ ID NO: 262941 - DNA, 19 bp, Homo sapiens
  siRNA target sequence for VGCNL1 (NM_052867.1,3061-3079).
ctctgcgcatattcaaact

SEQ ID NO: 262942 - DNA, 19 bp, Homo sapiens
  siRNA target sequence for VGCNL1 (NM_052867.1,3083-3101).
gccccagatgaggaaagtt

SEQ ID NO: 262943 - DNA, 19 bp, Homo sapiens
  siRNA target sequence for VGCNL1 (NM_052867.1,3099-3117).
gttgttcgagaacttttca

SEQ ID NO: 262944 - DNA, 19 bp, Homo sapiens
  siRNA target sequence for VGCNL1 (NM_052867.1,3116-3134).
cagcggcttcaaggaaatt

SEQ ID NO: 262945 - DNA, 19 bp, Homo sapiens
  siRNA target sequence for VGCNL1 (NM_052867.1,3118-3136).
gcggcttcaaggaaatttt

SEQ ID NO: 262946 - DNA, 19 bp, Homo sapiens
  siRNA target sequence for VGCNL1 (NM_052867.1,3146-3164).
cattcttttgctgacatta

SEQ ID NO: 262947 - DNA, 19 bp, Homo sapiens
  siRNA target sequence for VGCNL1 (NM_052867.1,3218-3236).
gtgcaatgatcccaacatt

SEQ ID NO: 262948 - DNA, 19 bp, Homo sapiens
  siRNA target sequence for VGCNL1 (NM_052867.1,3220-3238).
gcaatgatcccaacattat

SEQ ID NO: 262949 - DNA, 19 bp, Homo sapiens
  siRNA target sequence for VGCNL1 (NM_052867.1,3276-3294).
gtcagtgtgtcaaagaact

SEQ ID NO: 262950 - DNA, 19 bp, Homo sapiens
  siRNA target sequence for VGCNL1 (NM_052867.1,3278-3296).
cagtgtgtcaaagaactta

SEQ ID NO: 262951 - DNA, 19 bp, Homo sapiens
  siRNA target sequence for VGCNL1 (NM_052867.1,3354-3372).
gcgaatcctcggaacttta

SEQ ID NO: 262952 - DNA, 19 bp, Homo sapiens
  siRNA target sequence for VGCNL1 (NM_052867.1,3355-3373).
cgaatcctcggaactttaa

SEQ ID NO: 262953 - DNA, 19 bp, Homo sapiens
  siRNA target sequence for VGCNL1 (NM_052867.1,3361-3379).
ctcggaactttaatttcga

SEQ ID NO: 262954 - DNA, 19 bp, Homo sapiens
  siRNA target sequence for VGCNL1 (NM_052867.1,3392-3410).
cgctatgctggcgttgttt

SEQ ID NO: 262955 - DNA, 19 bp, Homo sapiens
  siRNA target sequence for VGCNL1 (NM_052867.1,3394-3412).
ctatgctggcgttgtttga

SEQ ID NO: 262956 - DNA, 19 bp, Homo sapiens
  siRNA target sequence for VGCNL1 (NM_052867.1,3470-3488).
gccgatccatggaatctat

SEQ ID NO: 262957 - DNA, 19 bp, Homo sapiens
  siRNA target sequence for VGCNL1 (NM_052867.1,3471-3489).
ccgatccatggaatctata

SEQ ID NO: 262958 - DNA, 19 bp, Homo sapiens
  siRNA target sequence for VGCNL1 (NM_052867.1,3472-3490).
cgatccatggaatctatat

SEQ ID NO: 262959 - DNA, 19 bp, Homo sapiens
  siRNA target sequence for VGCNL1 (NM_052867.1,3473-3491).
gatccatggaatctatatt

SEQ ID NO: 262960 - DNA, 19 bp, Homo sapiens
  siRNA target sequence for VGCNL1 (NM_052867.1,3518-3536).
gattggactgacccttttt

SEQ ID NO: 262961 - DNA, 19 bp, Homo sapiens
  siRNA target sequence for VGCNL1 (NM_052867.1,3537-3555).
gttggagtagttattgcta

SEQ ID NO: 262962 - DNA, 19 bp, Homo sapiens
  siRNA target sequence for VGCNL1 (NM_052867.1,3540-3558).
ggagtagttattgctaatt

SEQ ID NO: 262963 - DNA, 19 bp, Homo sapiens
  siRNA target sequence for VGCNL1 (NM_052867.1,3541-3559).
gagtagttattgctaattt

SEQ ID NO: 262964 - DNA, 19 bp, Homo sapiens
  siRNA target sequence for VGCNL1 (NM_052867.1,3632-3650).
gatcgcacagcctcttcat

SEQ ID NO: 262965 - DNA, 19 bp, Homo sapiens
  siRNA target sequence for VGCNL1 (NM_052867.1,3675-3693).
ggttttagagctaaaatgt

SEQ ID NO: 262966 - DNA, 19 bp, Homo sapiens
  siRNA target sequence for VGCNL1 (NM_052867.1,3698-3716).
cataacccagcatccattt

SEQ ID NO: 262967 - DNA, 19 bp, Homo sapiens
  siRNA target sequence for VGCNL1 (NM_052867.1,3896-3914).
cagaagaaaccgatacgat

SEQ ID NO: 262968 - DNA, 19 bp, Homo sapiens
  siRNA target sequence for VGCNL1 (NM_052867.1,3986-4004).
gatgggcgcttgtgtgatt

SEQ ID NO: 262969 - DNA, 19 bp, Homo sapiens
  siRNA target sequence for VGCNL1 (NM_052867.1,3989-4007).
gggcgcttgtgtgattgta

SEQ ID NO: 262970 - DNA, 19 bp, Homo sapiens
  siRNA target sequence for VGCNL1 (NM_052867.1,3990-4008).
ggcgcttgtgtgattgtat

SEQ ID NO: 262971 - DNA, 19 bp, Homo sapiens
  siRNA target sequence for VGCNL1 (NM_052867.1,3991-4009).
gcgcttgtgtgattgtatt

SEQ ID NO: 262972 - DNA, 19 bp, Homo sapiens
  siRNA target sequence for VGCNL1 (NM_052867.1,3992-4010).
cgcttgtgtgattgtattt

SEQ ID NO: 262973 - DNA, 19 bp, Homo sapiens
  siRNA target sequence for VGCNL1 (NM_052867.1,4076-4094).
catgtacaagagcttcttt

SEQ ID NO: 262974 - DNA, 19 bp, Homo sapiens
  siRNA target sequence for VGCNL1 (NM_052867.1,4082-4100).
caagagcttctttatcata

SEQ ID NO: 262975 - DNA, 19 bp, Homo sapiens
  siRNA target sequence for VGCNL1 (NM_052867.1,4085-4103).
gagcttctttatcatagta

SEQ ID NO: 262976 - DNA, 19 bp, Homo sapiens
  siRNA target sequence for VGCNL1 (NM_052867.1,4121-4139).
gctgtgttacgcttttgct

SEQ ID NO: 262977 - DNA, 19 bp, Homo sapiens
  siRNA target sequence for VGCNL1 (NM_052867.1,4224-4242).
gtactgttccgaattgtca

SEQ ID NO: 262978 - DNA, 19 bp, Homo sapiens
  siRNA target sequence for VGCNL1 (NM_052867.1,4344-4362).
gctggggcacttatgtatt

SEQ ID NO: 262979 - DNA, 19 bp, Homo sapiens
  siRNA target sequence for VGCNL1 (NM_052867.1,4345-4363).
ctggggcacttatgtattt

SEQ ID NO: 262980 - DNA, 19 bp, Homo sapiens
  siRNA target sequence for VGCNL1 (NM_052867.1,4347-4365).
ggggcacttatgtatttct

SEQ ID NO: 262981 - DNA, 19 bp, Homo sapiens
  siRNA target sequence for VGCNL1 (NM_052867.1,4387-4405).
cctacatcatgctaaatct

SEQ ID NO: 262982 - DNA, 19 bp, Homo sapiens
  siRNA target sequence for VGCNL1 (NM_052867.1,4454-4472).
ggaggaccagcttttaagt

SEQ ID NO: 262983 - DNA, 19 bp, Homo sapiens
  siRNA target sequence for VGCNL1 (NM_052867.1,4463-4481).
gcttttaagttacaatgat

SEQ ID NO: 262984 - DNA, 19 bp, Homo sapiens
  siRNA target sequence for VGCNL1 (NM_052867.1,4479-4497).
gatcttcgccactttcaaa

SEQ ID NO: 262985 - DNA, 19 bp, Homo sapiens
  siRNA target sequence for VGCNL1 (NM_052867.1,4482-4500).
cttcgccactttcaaataa

SEQ ID NO: 262986 - DNA, 19 bp, Homo sapiens
  siRNA target sequence for VGCNL1 (NM_052867.1,4540-4558).
ccacgttccgcgtcaagtt

SEQ ID NO: 262987 - DNA, 19 bp, Homo sapiens
  siRNA target sequence for VGCNL1 (NM_052867.1,4680-4698).
gtcctgagcatgctttcat

SEQ ID NO: 262988 - DNA, 19 bp, Homo sapiens
  siRNA target sequence for VGCNL1 (NM_052867.1,4845-4863).
cagcagtcgtgcagtatca

SEQ ID NO: 262989 - DNA, 19 bp, Homo sapiens
  siRNA target sequence for VGCNL1 (NM_052867.1,4893-4911).
gagctgagccggtttctga

SEQ ID NO: 262990 - DNA, 19 bp, Homo sapiens
  siRNA target sequence for VGCNL1 (NM_052867.1,5101-5119).
cctcagccccaaaaccaat

SEQ ID NO: 262991 - DNA, 19 bp, Homo sapiens
  siRNA target sequence for VGCNL1 (NM_052867.1,5176-5194).
ctgtcgtgtgcaaaatgaa

SEQ ID NO: 262992 - DNA, 19 bp, Homo sapiens
  siRNA target sequence for VGCNL1 (NM_052867.1,5215-5233).
cctgcggttctgaagttaa

SEQ ID NO: 262993 - DNA, 19 bp, Homo sapiens
  siRNA target sequence for VGCNL1 (NM_052867.1,5218-5236).
gcggttctgaagttaagaa

SEQ ID NO: 262994 - DNA, 19 bp, Homo sapiens
  siRNA target sequence for VGCNL1 (NM_052867.1,5278-5296).
gggatgaccttctggatat

SEQ ID NO: 262995 - DNA, 19 bp, Homo sapiens
  siRNA target sequence for CLCA1 (NM_001285.1,419-437).
cactcattcagctgaacaa

SEQ ID NO: 262996 - DNA, 19 bp, Homo sapiens
  siRNA target sequence for CLCA1 (NM_001285.1,557-575).
gaaagcgattttatttcaa

SEQ ID NO: 262997 - DNA, 19 bp, Homo sapiens
  siRNA target sequence for CLCA1 (NM_001285.1,606-624).
gaagacaaaggctgactat

SEQ ID NO: 262998 - DNA, 19 bp, Homo sapiens
  siRNA target sequence for CLCA1 (NM_001285.1,677-695).
ctactcctccaggtaatga

SEQ ID NO: 262999 - DNA, 19 bp, Homo sapiens
  siRNA target sequence for CLCA1 (NM_001285.1,870-888).
gaaattctacttatccaat

SEQ ID NO: 263000 - DNA, 19 bp, Homo sapiens
  siRNA target sequence for CLCA1 (NM_001285.1,917-935).
caggtattactggtacaaa

SEQ ID NO: 263001 - DNA, 19 bp, Homo sapiens
  siRNA target sequence for CLCA1 (NM_001285.1,926-944).
ctggtacaaatgtagtaaa

SEQ ID NO: 263002 - DNA, 19 bp, Homo sapiens
  siRNA target sequence for CLCA1 (NM_001285.1,928-946).
ggtacaaatgtagtaaaga

SEQ ID NO: 263003 - DNA, 19 bp, Homo sapiens
  siRNA target sequence for CLCA1 (NM_001285.1,958-976).
ggcagctgttacaccaaaa

SEQ ID NO: 263004 - DNA, 19 bp, Homo sapiens
  siRNA target sequence for CLCA1 (NM_001285.1,971-989).
ccaaaagatgcacattcaa

SEQ ID NO: 263005 - DNA, 19 bp, Homo sapiens
  siRNA target sequence for CLCA1 (NM_001285.1,977-995).
gatgcacattcaataaagt

SEQ ID NO: 263006 - DNA, 19 bp, Homo sapiens
  siRNA target sequence for CLCA1 (NM_001285.1,1044-1062).
gacggagaaggcttctata

SEQ ID NO: 263007 - DNA, 19 bp, Homo sapiens
  siRNA target sequence for CLCA1 (NM_001285.1,1046-1064).
cggagaaggcttctataat

SEQ ID NO: 263008 - DNA, 19 bp, Homo sapiens
  siRNA target sequence for CLCA1 (NM_001285.1,1065-1083).
gtttgcacaacatgttgat

SEQ ID NO: 263009 - DNA, 19 bp, Homo sapiens
  siRNA target sequence for CLCA1 (NM_001285.1,1123-1141).
gaagctccaaacaagcaaa

SEQ ID NO: 263010 - DNA, 19 bp, Homo sapiens
  siRNA target sequence for CLCA1 (NM_001285.1,1170-1188).
ggaagtgatccgtgattct

SEQ ID NO: 263011 - DNA, 19 bp, Homo sapiens
  siRNA target sequence for CLCA1 (NM_001285.1,1180-1198).
cgtgattctgaggacttta

SEQ ID NO: 263012 - DNA, 19 bp, Homo sapiens
  siRNA target sequence for CLCA1 (NM_001285.1,1455-1473).
ggacacactcgccaaaaga

SEQ ID NO: 263013 - DNA, 19 bp, Homo sapiens
  siRNA target sequence for CLCA1 (NM_001285.1,1456-1474).
gacacactcgccaaaagat

SEQ ID NO: 263014 - DNA, 19 bp, Homo sapiens
  siRNA target sequence for CLCA1 (NM_001285.1,1458-1476).
cacactcgccaaaagatta

SEQ ID NO: 263015 - DNA, 19 bp, Homo sapiens
  siRNA target sequence for CLCA1 (NM_001285.1,1513-1531).
gggcttcgatcggcattta

SEQ ID NO: 263016 - DNA, 19 bp, Homo sapiens
  siRNA target sequence for CLCA1 (NM_001285.1,1515-1533).
gcttcgatcggcatttact

SEQ ID NO: 263017 - DNA, 19 bp, Homo sapiens
  siRNA target sequence for CLCA1 (NM_001285.1,1536-1554).
gattaggaagaaatatcca

SEQ ID NO: 263018 - DNA, 19 bp, Homo sapiens
  siRNA target sequence for CLCA1 (NM_001285.1,1552-1570).
ccaactgatggatctgaaa

SEQ ID NO: 263019 - DNA, 19 bp, Homo sapiens
  siRNA target sequence for CLCA1 (NM_001285.1,1588-1606).
ggggaagacaacactataa

SEQ ID NO: 263020 - DNA, 19 bp, Homo sapiens
  siRNA target sequence for CLCA1 (NM_001285.1,1601-1619).
ctataagtgggtgctttaa

SEQ ID NO: 263021 - DNA, 19 bp, Homo sapiens
  siRNA target sequence for CLCA1 (NM_001285.1,1689-1707).
ggagctgtccaaaatgaca

SEQ ID NO: 263022 - DNA, 19 bp, Homo sapiens
  siRNA target sequence for CLCA1 (NM_001285.1,1706-1724).
caggaggtttacagacata

SEQ ID NO: 263023 - DNA, 19 bp, Homo sapiens
  siRNA target sequence for CLCA1 (NM_001285.1,1719-1737).
gacatatgcttcagatcaa

SEQ ID NO: 263024 - DNA, 19 bp, Homo sapiens
  siRNA target sequence for CLCA1 (NM_001285.1,1842-1860).
gaacagccagtggatgaat

SEQ ID NO: 263025 - DNA, 19 bp, Homo sapiens
  siRNA target sequence for CLCA1 (NM_001285.1,2107-2125).
gctaccctgcctccaatta

SEQ ID NO: 263026 - DNA, 19 bp, Homo sapiens
  siRNA target sequence for CLCA1 (NM_001285.1,2165-2183).
ccagccctctggtagttta

SEQ ID NO: 263027 - DNA, 19 bp, Homo sapiens
  siRNA target sequence for CLCA1 (NM_001285.1,2200-2218).
ggagcctccccaattctca

SEQ ID NO: 263028 - DNA, 19 bp, Homo sapiens
  siRNA target sequence for CLCA1 (NM_001285.1,2227-2245).
gtcacagccctgattgaat

SEQ ID NO: 263029 - DNA, 19 bp, Homo sapiens
  siRNA target sequence for CLCA1 (NM_001285.1,2235-2253).
cctgattgaatcagtgaat

SEQ ID NO: 263030 - DNA, 19 bp, Homo sapiens
  siRNA target sequence for CLCA1 (NM_001285.1,2261-2279).
cagttaccttggaactact

SEQ ID NO: 263031 - DNA, 19 bp, Homo sapiens
  siRNA target sequence for CLCA1 (NM_001285.1,2271-2289).
ggaactactggataatgga

SEQ ID NO: 263032 - DNA, 19 bp, Homo sapiens
  siRNA target sequence for CLCA1 (NM_001285.1,2311-2329).
gatgacggtgtctactcaa

SEQ ID NO: 263033 - DNA, 19 bp, Homo sapiens
  siRNA target sequence for CLCA1 (NM_001285.1,2316-2334).
cggtgtctactcaaggtat

SEQ ID NO: 263034 - DNA, 19 bp, Homo sapiens
  siRNA target sequence for CLCA1 (NM_001285.1,2347-2365).
gacacgaatggtagataca

SEQ ID NO: 263035 - DNA, 19 bp, Homo sapiens
  siRNA target sequence for CLCA1 (NM_001285.1,2447-2465).
ctggctggattgagaatga

SEQ ID NO: 263036 - DNA, 19 bp, Homo sapiens
  siRNA target sequence for CLCA1 (NM_001285.1,2451-2469).
ctggattgagaatgatgaa

SEQ ID NO: 263037 - DNA, 19 bp, Homo sapiens
  siRNA target sequence for CLCA1 (NM_001285.1,2546-2564).
cctcgggaggctcatttgt

SEQ ID NO: 263038 - DNA, 19 bp, Homo sapiens
  siRNA target sequence for CLCA1 (NM_001285.1,2707-2725).
cacaagtatatcattcgaa

SEQ ID NO: 263039 - DNA, 19 bp, Homo sapiens
  siRNA target sequence for CLCA1 (NM_001285.1,2709-2727).
caagtatatcattcgaata

SEQ ID NO: 263040 - DNA, 19 bp, Homo sapiens
  siRNA target sequence for CLCA1 (NM_001285.1,2854-2872).
gaaaatggcacagatcttt

SEQ ID NO: 263041 - DNA, 19 bp, Homo sapiens
  siRNA target sequence for CLCA1 (NM_001285.1,2893-2911).
gataaggtcgatctgaaat

SEQ ID NO: 263042 - DNA, 19 bp, Homo sapiens
  siRNA target sequence for CLCA1 (NM_001285.1,2899-2917).
gtcgatctgaaatcagaaa

SEQ ID NO: 263043 - DNA, 19 bp, Homo sapiens
  siRNA target sequence for CLCA1 (NM_001285.1,2901-2919).
cgatctgaaatcagaaata

SEQ ID NO: 263044 - DNA, 19 bp, Homo sapiens
  siRNA target sequence for CLCA1 (NM_001285.1,2998-3016).
ccttgtcctaatattcata

SEQ ID NO: 263045 - DNA, 19 bp, Homo sapiens
  siRNA target sequence for CLCA1 (NM_001285.1,2999-3017).
cttgtcctaatattcatat

SEQ ID NO: 263046 - DNA, 19 bp, Homo sapiens
  siRNA target sequence for CLCA1 (NM_001285.1,3002-3020).
gtcctaatattcatatcaa

SEQ ID NO: 263047 - DNA, 19 bp, Homo sapiens
  siRNA target sequence for CLCA1 (NM_001285.1,3027-3045).
cattcctggcattcacatt

SEQ ID NO: 263048 - DNA, 19 bp, Homo sapiens
  siRNA target sequence for CLCA2 (NM_006536.3,120-138).
gagcattgcaggtcctatt

SEQ ID NO: 263049 - DNA, 19 bp, Homo sapiens
  siRNA target sequence for CLCA2 (NM_006536.3,232-250).
ggattgctcattgcaatta

SEQ ID NO: 263050 - DNA, 19 bp, Homo sapiens
  siRNA target sequence for CLCA2 (NM_006536.3,233-251).
gattgctcattgcaattaa

SEQ ID NO: 263051 - DNA, 19 bp, Homo sapiens
  siRNA target sequence for CLCA2 (NM_006536.3,237-255).
gctcattgcaattaatcct

SEQ ID NO: 263052 - DNA, 19 bp, Homo sapiens
  siRNA target sequence for CLCA2 (NM_006536.3,307-325).
gaagcttcattttacctat

SEQ ID NO: 263053 - DNA, 19 bp, Homo sapiens
  siRNA target sequence for CLCA2 (NM_006536.3,331-349).
gctaccaagagaagagtat

SEQ ID NO: 263054 - DNA, 19 bp, Homo sapiens
  siRNA target sequence for CLCA2 (NM_006536.3,379-397).
gccacatggaaagctaata

SEQ ID NO: 263055 - DNA, 19 bp, Homo sapiens
  siRNA target sequence for CLCA2 (NM_006536.3,380-398).
ccacatggaaagctaataa

SEQ ID NO: 263056 - DNA, 19 bp, Homo sapiens
  siRNA target sequence for CLCA2 (NM_006536.3,383-401).
catggaaagctaataataa

SEQ ID NO: 263057 - DNA, 19 bp, Homo sapiens
  siRNA target sequence for CLCA2 (NM_006536.3,578-596).
cacgaggccgagtgtttgt

SEQ ID NO: 263058 - DNA, 19 bp, Homo sapiens
  siRNA target sequence for CLCA2 (NM_006536.3,586-604).
cgagtgtttgtccatgaat

SEQ ID NO: 263059 - DNA, 19 bp, Homo sapiens
  siRNA target sequence for CLCA2 (NM_006536.3,621-639).
gggtgtgttcgatgagtat

SEQ ID NO: 263060 - DNA, 19 bp, Homo sapiens
  siRNA target sequence for CLCA2 (NM_006536.3,622-640).
ggtgtgttcgatgagtata

SEQ ID NO: 263061 - DNA, 19 bp, Homo sapiens
  siRNA target sequence for CLCA2 (NM_006536.3,623-641).
gtgtgttcgatgagtataa

SEQ ID NO: 263062 - DNA, 19 bp, Homo sapiens
  siRNA target sequence for CLCA2 (NM_006536.3,625-643).
gtgttcgatgagtataaca

SEQ ID NO: 263063 - DNA, 19 bp, Homo sapiens
  siRNA target sequence for CLCA2 (NM_006536.3,627-645).
gttcgatgagtataacaat

SEQ ID NO: 263064 - DNA, 19 bp, Homo sapiens
  siRNA target sequence for CLCA2 (NM_006536.3,646-664).
gacaaacctttctacataa

SEQ ID NO: 263065 - DNA, 19 bp, Homo sapiens
  siRNA target sequence for CLCA2 (NM_006536.3,701-719).
ctgacatcacaggcatttt

SEQ ID NO: 263066 - DNA, 19 bp, Homo sapiens
  siRNA target sequence for CLCA2 (NM_006536.3,740-758).
gcccccaagaaaactgtat

SEQ ID NO: 263067 - DNA, 19 bp, Homo sapiens
  siRNA target sequence for CLCA2 (NM_006536.3,744-762).
ccaagaaaactgtattatt

SEQ ID NO: 263068 - DNA, 19 bp, Homo sapiens
  siRNA target sequence for CLCA2 (NM_006536.3,753-771).
ctgtattattagtaagctt

SEQ ID NO: 263069 - DNA, 19 bp, Homo sapiens
  siRNA target sequence for CLCA2 (NM_006536.3,778-796).
gaaggatgcacctttatct

SEQ ID NO: 263070 - DNA, 19 bp, Homo sapiens
  siRNA target sequence for CLCA2 (NM_006536.3,795-813).
ctacaatagcacccaaaat

SEQ ID NO: 263071 - DNA, 19 bp, Homo sapiens
  siRNA target sequence for CLCA2 (NM_006536.3,798-816).
caatagcacccaaaatgca

SEQ ID NO: 263072 - DNA, 19 bp, Homo sapiens
  siRNA target sequence for CLCA2 (NM_006536.3,814-832).
gcaactgcatcaataatgt

SEQ ID NO: 263073 - DNA, 19 bp, Homo sapiens
  siRNA target sequence for CLCA2 (NM_006536.3,818-836).
ctgcatcaataatgttcat

SEQ ID NO: 263074 - DNA, 19 bp, Homo sapiens
  siRNA target sequence for CLCA2 (NM_006536.3,834-852).
catgcaaagtttatcttct

SEQ ID NO: 263075 - DNA, 19 bp, Homo sapiens
  siRNA target sequence for CLCA2 (NM_006536.3,1007-1025).
ccacattctcgcttgtaca

SEQ ID NO: 263076 - DNA, 19 bp, Homo sapiens
  siRNA target sequence for CLCA2 (NM_006536.3,1082-1100).
ctgacagactccttcaact

SEQ ID NO: 263077 - DNA, 19 bp, Homo sapiens
  siRNA target sequence for CLCA2 (NM_006536.3,1109-1127).
ccgcagaattttatttgat

SEQ ID NO: 263078 - DNA, 19 bp, Homo sapiens
  siRNA target sequence for CLCA2 (NM_006536.3,1192-1210).
gcccagctacaccaaatta

SEQ ID NO: 263079 - DNA, 19 bp, Homo sapiens
  siRNA target sequence for CLCA2 (NM_006536.3,1214-1232).
gcaatgatgatcgaaagtt

SEQ ID NO: 263080 - DNA, 19 bp, Homo sapiens
  siRNA target sequence for CLCA2 (NM_006536.3,1225-1243).
cgaaagttgctggtttcat

SEQ ID NO: 263081 - DNA, 19 bp, Homo sapiens
  siRNA target sequence for CLCA2 (NM_006536.3,1251-1269).
caccactgtatcagctaaa

SEQ ID NO: 263082 - DNA, 19 bp, Homo sapiens
  siRNA target sequence for CLCA2 (NM_006536.3,1256-1274).
ctgtatcagctaaaacaga

SEQ ID NO: 263083 - DNA, 19 bp, Homo sapiens
  siRNA target sequence for CLCA2 (NM_006536.3,1360-1378).
gtgaccagcggagatgata

SEQ ID NO: 263084 - DNA, 19 bp, Homo sapiens
  siRNA target sequence for CLCA2 (NM_006536.3,1364-1382).
ccagcggagatgataagct

SEQ ID NO: 263085 - DNA, 19 bp, Homo sapiens
  siRNA target sequence for CLCA2 (NM_006536.3,1408-1426).
ctcagcagtggttcaacaa

SEQ ID NO: 263086 - DNA, 19 bp, Homo sapiens
  siRNA target sequence for CLCA2 (NM_006536.3,1457-1475).
ccccaaatctggaggaatt

SEQ ID NO: 263087 - DNA, 19 bp, Homo sapiens
  siRNA target sequence for CLCA2 (NM_006536.3,1458-1476).
cccaaatctggaggaatta

SEQ ID NO: 263088 - DNA, 19 bp, Homo sapiens
  siRNA target sequence for CLCA2 (NM_006536.3,1470-1488).
ggaattatcacgtcttaca

SEQ ID NO: 263089 - DNA, 19 bp, Homo sapiens
  siRNA target sequence for CLCA2 (NM_006536.3,1487-1505).
caggaggtttaaagttctt

SEQ ID NO: 263090 - DNA, 19 bp, Homo sapiens
  siRNA target sequence for CLCA2 (NM_006536.3,1524-1542).
ctccaatagcatgattgat

SEQ ID NO: 263091 - DNA, 19 bp, Homo sapiens
  siRNA target sequence for CLCA2 (NM_006536.3,1533-1551).
catgattgatgctttcagt

SEQ ID NO: 263092 - DNA, 19 bp, Homo sapiens
  siRNA target sequence for CLCA2 (NM_006536.3,1588-1606).
catattcagcttgaaagta

SEQ ID NO: 263093 - DNA, 19 bp, Homo sapiens
  siRNA target sequence for CLCA2 (NM_006536.3,1625-1643).
ctcaccatcaattgaaaaa

SEQ ID NO: 263094 - DNA, 19 bp, Homo sapiens
  siRNA target sequence for CLCA2 (NM_006536.3,1629-1647).
ccatcaattgaaaaacaca

SEQ ID NO: 263095 - DNA, 19 bp, Homo sapiens
  siRNA target sequence for CLCA2 (NM_006536.3,1666-1684).
gtgggcaacgacactatgt

SEQ ID NO: 263096 - DNA, 19 bp, Homo sapiens
  siRNA target sequence for CLCA2 (NM_006536.3,1668-1686).
gggcaacgacactatgttt

SEQ ID NO: 263097 - DNA, 19 bp, Homo sapiens
  siRNA target sequence for CLCA2 (NM_006536.3,1670-1688).
gcaacgacactatgtttct

SEQ ID NO: 263098 - DNA, 19 bp, Homo sapiens
  siRNA target sequence for CLCA2 (NM_006536.3,1671-1689).
caacgacactatgtttcta

SEQ ID NO: 263099 - DNA, 19 bp, Homo sapiens
  siRNA target sequence for CLCA2 (NM_006536.3,1674-1692).
cgacactatgtttctagtt

SEQ ID NO: 263100 - DNA, 19 bp, Homo sapiens
  siRNA target sequence for CLCA2 (NM_006536.3,1675-1693).
gacactatgtttctagtta

SEQ ID NO: 263101 - DNA, 19 bp, Homo sapiens
  siRNA target sequence for CLCA2 (NM_006536.3,1732-1750).
gatcctgatggacgaaaat

SEQ ID NO: 263102 - DNA, 19 bp, Homo sapiens
  siRNA target sequence for CLCA2 (NM_006536.3,1735-1753).
cctgatggacgaaaatact

SEQ ID NO: 263103 - DNA, 19 bp, Homo sapiens
  siRNA target sequence for CLCA2 (NM_006536.3,1736-1754).
ctgatggacgaaaatacta

SEQ ID NO: 263104 - DNA, 19 bp, Homo sapiens
  siRNA target sequence for CLCA2 (NM_006536.3,1738-1756).
gatggacgaaaatactaca

SEQ ID NO: 263105 - DNA, 19 bp, Homo sapiens
  siRNA target sequence for CLCA2 (NM_006536.3,1741-1759).
ggacgaaaatactacacaa

SEQ ID NO: 263106 - DNA, 19 bp, Homo sapiens
  siRNA target sequence for CLCA2 (NM_006536.3,1742-1760).
gacgaaaatactacacaaa

SEQ ID NO: 263107 - DNA, 19 bp, Homo sapiens
  siRNA target sequence for CLCA2 (NM_006536.3,1787-1805).
ggacagctagtctttggat

SEQ ID NO: 263108 - DNA, 19 bp, Homo sapiens
  siRNA target sequence for CLCA2 (NM_006536.3,1788-1806).
gacagctagtctttggatt

SEQ ID NO: 263109 - DNA, 19 bp, Homo sapiens
  siRNA target sequence for CLCA2 (NM_006536.3,1832-1850).
ggacttacaccctgaacaa

SEQ ID NO: 263110 - DNA, 19 bp, Homo sapiens
  siRNA target sequence for CLCA2 (NM_006536.3,1833-1851).
gacttacaccctgaacaat

SEQ ID NO: 263111 - DNA, 19 bp, Homo sapiens
  siRNA target sequence for CLCA2 (NM_006536.3,1862-1880).
ctctgcaagccctgaaagt

SEQ ID NO: 263112 - DNA, 19 bp, Homo sapiens
  siRNA target sequence for CLCA2 (NM_006536.3,1998-2016).
gggattttatcccattctt

SEQ ID NO: 263113 - DNA, 19 bp, Homo sapiens
  siRNA target sequence for CLCA2 (NM_006536.3,2066-2084).
cgctgagactccttgatga

SEQ ID NO: 263114 - DNA, 19 bp, Homo sapiens
  siRNA target sequence for CLCA2 (NM_006536.3,2067-2085).
gctgagactccttgatgat

SEQ ID NO: 263115 - DNA, 19 bp, Homo sapiens
  siRNA target sequence for CLCA2 (NM_006536.3,2166-2184).
cttgaaagtgcatgtcaat

SEQ ID NO: 263116 - DNA, 19 bp, Homo sapiens
  siRNA target sequence for CLCA2 (NM_006536.3,2226-2244).
gagtcatgctatgtatgta

SEQ ID NO: 263117 - DNA, 19 bp, Homo sapiens
  siRNA target sequence for CLCA2 (NM_006536.3,2238-2256).
gtatgtaccaggttacaca

SEQ ID NO: 263118 - DNA, 19 bp, Homo sapiens
  siRNA target sequence for CLCA2 (NM_006536.3,2277-2295).
gaatgctccaaggaaatca

SEQ ID NO: 263119 - DNA, 19 bp, Homo sapiens
  siRNA target sequence for CLCA2 (NM_006536.3,2395-2413).
gtgtttccaccatgcaaaa

SEQ ID NO: 263120 - DNA, 19 bp, Homo sapiens
  siRNA target sequence for CLCA2 (NM_006536.3,2397-2415).
gtttccaccatgcaaaatt

SEQ ID NO: 263121 - DNA, 19 bp, Homo sapiens
  siRNA target sequence for CLCA2 (NM_006536.3,2402-2420).
caccatgcaaaattattga

SEQ ID NO: 263122 - DNA, 19 bp, Homo sapiens
  siRNA target sequence for CLCA2 (NM_006536.3,2443-2461).
gaggaattgaccctatctt

SEQ ID NO: 263123 - DNA, 19 bp, Homo sapiens
  siRNA target sequence for CLCA2 (NM_006536.3,2490-2508).
gggccaggctacaagctat

SEQ ID NO: 263124 - DNA, 19 bp, Homo sapiens
  siRNA target sequence for CLCA2 (NM_006536.3,2493-2511).
ccaggctacaagctatgaa

SEQ ID NO: 263125 - DNA, 19 bp, Homo sapiens
  siRNA target sequence for CLCA2 (NM_006536.3,2494-2512).
caggctacaagctatgaaa

SEQ ID NO: 263126 - DNA, 19 bp, Homo sapiens
  siRNA target sequence for CLCA2 (NM_006536.3,2496-2514).
ggctacaagctatgaaata

SEQ ID NO: 263127 - DNA, 19 bp, Homo sapiens
  siRNA target sequence for CLCA2 (NM_006536.3,2545-2563).
gatgactttaacaatgcta

SEQ ID NO: 263128 - DNA, 19 bp, Homo sapiens
  siRNA target sequence for CLCA2 (NM_006536.3,2640-2658).
cacgaatggacctgaacat

SEQ ID NO: 263129 - DNA, 19 bp, Homo sapiens
  siRNA target sequence for CLCA2 (NM_006536.3,2642-2660).
cgaatggacctgaacatca

SEQ ID NO: 263130 - DNA, 19 bp, Homo sapiens
  siRNA target sequence for CLCA2 (NM_006536.3,2701-2719).
gcaatacgagcaatggata

SEQ ID NO: 263131 - DNA, 19 bp, Homo sapiens
  siRNA target sequence for CLCA2 (NM_006536.3,2754-2772).
ccaggcgcctctgtttatt

SEQ ID NO: 263132 - DNA, 19 bp, Homo sapiens
  siRNA target sequence for CLCA2 (NM_006536.3,2788-2806).
cctgtacctgccagagatt

SEQ ID NO: 263133 - DNA, 19 bp, Homo sapiens
  siRNA target sequence for CLCA2 (NM_006536.3,2801-2819).
gagattatcttatattgaa

SEQ ID NO: 263134 - DNA, 19 bp, Homo sapiens
  siRNA target sequence for CLCA2 (NM_006536.3,2833-2851).
gcaatgggtttgataggaa

SEQ ID NO: 263135 - DNA, 19 bp, Homo sapiens
  siRNA target sequence for CLCA2 (NM_006536.3,2834-2852).
caatgggtttgataggaat

SEQ ID NO: 263136 - DNA, 19 bp, Homo sapiens
  siRNA target sequence for CLCA2 (NM_006536.3,2848-2866).
ggaatcatttgccttatta

SEQ ID NO: 263137 - DNA, 19 bp, Homo sapiens
  siRNA target sequence for CLCA2 (NM_006536.3,2853-2871).
catttgccttattatagtt

SEQ ID NO: 263138 - DNA, 19 bp, Homo sapiens
  siRNA target sequence for CLCA2 (NM_006536.3,2872-2890).
gtgacacatcatactttaa

SEQ ID NO: 263139 - DNA, 19 bp, Homo sapiens
  siRNA target sequence for CLCA2 (NM_006536.3,2881-2899).
catactttaagcaggaaaa

SEQ ID NO: 263140 - DNA, 19 bp, Homo sapiens
  siRNA target sequence for CLCA2 (NM_006536.3,2917-2935).
gagaatggaacaaaattat

SEQ ID NO: 263141 - DNA, 19 bp, Homo sapiens
  siRNA target sequence for CLCA4 (NM_012128.2,47-65).
ggttattcagaggttttgt

SEQ ID NO: 263142 - DNA, 19 bp, Homo sapiens
  siRNA target sequence for CLCA4 (NM_012128.2,83-101).
gcctgctgcaccagtcaaa

SEQ ID NO: 263143 - DNA, 19 bp, Homo sapiens
  siRNA target sequence for CLCA4 (NM_012128.2,84-102).
cctgctgcaccagtcaaat

SEQ ID NO: 263144 - DNA, 19 bp, Homo sapiens
  siRNA target sequence for CLCA4 (NM_012128.2,96-114).
gtcaaatacttccttcatt

SEQ ID NO: 263145 - DNA, 19 bp, Homo sapiens
  siRNA target sequence for CLCA4 (NM_012128.2,218-236).
cttctacgtacctgtttga

SEQ ID NO: 263146 - DNA, 19 bp, Homo sapiens
  siRNA target sequence for CLCA4 (NM_012128.2,288-306).
gaattggaaggaaaatcct

SEQ ID NO: 263147 - DNA, 19 bp, Homo sapiens
  siRNA target sequence for CLCA4 (NM_012128.2,309-327).
gtacaaaaggccaaaacat

SEQ ID NO: 263148 - DNA, 19 bp, Homo sapiens
  siRNA target sequence for CLCA4 (NM_012128.2,482-500).
gaccaccaggcaaactgtt

SEQ ID NO: 263149 - DNA, 19 bp, Homo sapiens
  siRNA target sequence for CLCA4 (NM_012128.2,485-503).
caccaggcaaactgtttgt

SEQ ID NO: 263150 - DNA, 19 bp, Homo sapiens
  siRNA target sequence for CLCA4 (NM_012128.2,564-582).
ctaccgtgctaagtcaaaa

SEQ ID NO: 263151 - DNA, 19 bp, Homo sapiens
  siRNA target sequence for CLCA4 (NM_012128.2,572-590).
ctaagtcaaaaaaaatcga

SEQ ID NO: 263152 - DNA, 19 bp, Homo sapiens
  siRNA target sequence for CLCA4 (NM_012128.2,608-626).
caggtatctctggtagaaa

SEQ ID NO: 263153 - DNA, 19 bp, Homo sapiens
  siRNA target sequence for CLCA4 (NM_012128.2,643-661).
caaggaggcagctgtctta

SEQ ID NO: 263154 - DNA, 19 bp, Homo sapiens
  siRNA target sequence for CLCA4 (NM_012128.2,767-785).
gtattgattctgttgttga

SEQ ID NO: 263155 - DNA, 19 bp, Homo sapiens
  siRNA target sequence for CLCA4 (NM_012128.2,861-879).
ggaggtgattagcaattct

SEQ ID NO: 263156 - DNA, 19 bp, Homo sapiens
  siRNA target sequence for CLCA4 (NM_012128.2,966-984).
cttagttcttgataagtct

SEQ ID NO: 263157 - DNA, 19 bp, Homo sapiens
  siRNA target sequence for CLCA4 (NM_012128.2,996-1014).
gggtaaggaccgcctaaat

SEQ ID NO: 263158 - DNA, 19 bp, Homo sapiens
  siRNA target sequence for CLCA4 (NM_012128.2,1077-1095).
gatggttcactttgatagt

SEQ ID NO: 263159 - DNA, 19 bp, Homo sapiens
  siRNA target sequence for CLCA4 (NM_012128.2,1080-1098).
ggttcactttgatagtact

SEQ ID NO: 263160 - DNA, 19 bp, Homo sapiens
  siRNA target sequence for CLCA4 (NM_012128.2,1101-1119).
cactattgtaaataagcta

SEQ ID NO: 263161 - DNA, 19 bp, Homo sapiens
  siRNA target sequence for CLCA4 (NM_012128.2,1153-1171).
ctcatggcaggattaccta

SEQ ID NO: 263162 - DNA, 19 bp, Homo sapiens
  siRNA target sequence for CLCA4 (NM_012128.2,1158-1176).
ggcaggattacctacatat

SEQ ID NO: 263163 - DNA, 19 bp, Homo sapiens
  siRNA target sequence for CLCA4 (NM_012128.2,1225-1243).
gtgattggagagctacatt

SEQ ID NO: 263164 - DNA, 19 bp, Homo sapiens
  siRNA target sequence for CLCA4 (NM_012128.2,1287-1305).
ggataacactgcaagttct

SEQ ID NO: 263165 - DNA, 19 bp, Homo sapiens
  siRNA target sequence for CLCA4 (NM_012128.2,1293-1311).
cactgcaagttcttgtatt

SEQ ID NO: 263166 - DNA, 19 bp, Homo sapiens
  siRNA target sequence for CLCA4 (NM_012128.2,1298-1316).
caagttcttgtattgatga

SEQ ID NO: 263167 - DNA, 19 bp, Homo sapiens
  siRNA target sequence for CLCA4 (NM_012128.2,1502-1520).
cccttcagctcgaaagtaa

SEQ ID NO: 263168 - DNA, 19 bp, Homo sapiens
  siRNA target sequence for CLCA4 (NM_012128.2,1551-1569).
gaacgacactgtcataatt

SEQ ID NO: 263169 - DNA, 19 bp, Homo sapiens
  siRNA target sequence for CLCA4 (NM_012128.2,1554-1572).
cgacactgtcataattgat

SEQ ID NO: 263170 - DNA, 19 bp, Homo sapiens
  siRNA target sequence for CLCA4 (NM_012128.2,1555-1573).
gacactgtcataattgata

SEQ ID NO: 263171 - DNA, 19 bp, Homo sapiens
  siRNA target sequence for CLCA4 (NM_012128.2,1557-1575).
cactgtcataattgatagt

SEQ ID NO: 263172 - DNA, 19 bp, Homo sapiens
  siRNA target sequence for CLCA4 (NM_012128.2,1614-1632).
cagtctgcctcccagtatt

SEQ ID NO: 263173 - DNA, 19 bp, Homo sapiens
  siRNA target sequence for CLCA4 (NM_012128.2,1641-1659).
ggatcccagtggaacaata

SEQ ID NO: 263174 - DNA, 19 bp, Homo sapiens
  siRNA target sequence for CLCA4 (NM_012128.2,1642-1660).
gatcccagtggaacaataa

SEQ ID NO: 263175 - DNA, 19 bp, Homo sapiens
  siRNA target sequence for CLCA4 (NM_012128.2,1730-1748).
gcacttgggcatacaatct

SEQ ID NO: 263176 - DNA, 19 bp, Homo sapiens
  siRNA target sequence for CLCA4 (NM_012128.2,1731-1749).
cacttgggcatacaatctt

SEQ ID NO: 263177 - DNA, 19 bp, Homo sapiens
  siRNA target sequence for CLCA4 (NM_012128.2,1759-1777).
gcgaacccagaaacattaa

SEQ ID NO: 263178 - DNA, 19 bp, Homo sapiens
  siRNA target sequence for CLCA4 (NM_012128.2,1761-1779).
gaacccagaaacattaact

SEQ ID NO: 263179 - DNA, 19 bp, Homo sapiens
  siRNA target sequence for CLCA4 (NM_012128.2,1819-1837).
ccaatcacagtgaatgcta

SEQ ID NO: 263180 - DNA, 19 bp, Homo sapiens
  siRNA target sequence for CLCA4 (NM_012128.2,1859-1877).
gtttccccagcccaatgat

SEQ ID NO: 263181 - DNA, 19 bp, Homo sapiens
  siRNA target sequence for CLCA4 (NM_012128.2,1875-1893).
gattgtttacgcagaaatt

SEQ ID NO: 263182 - DNA, 19 bp, Homo sapiens
  siRNA target sequence for CLCA4 (NM_012128.2,2028-2046).
caggtattttacagcatat

SEQ ID NO: 263183 - DNA, 19 bp, Homo sapiens
  siRNA target sequence for CLCA4 (NM_012128.2,2127-2145).
gaatagagccgcgtacata

SEQ ID NO: 263184 - DNA, 19 bp, Homo sapiens
  siRNA target sequence for CLCA4 (NM_012128.2,2243-2261).
catccggaggtgcatttgt

SEQ ID NO: 263185 - DNA, 19 bp, Homo sapiens
  siRNA target sequence for CLCA4 (NM_012128.2,2301-2319).
cccaccaagtcaaatcaca

SEQ ID NO: 263186 - DNA, 19 bp, Homo sapiens
  siRNA target sequence for CLCA4 (NM_012128.2,2322-2340).
ccttgatgccacagttcat

SEQ ID NO: 263187 - DNA, 19 bp, Homo sapiens
  siRNA target sequence for CLCA4 (NM_012128.2,2330-2348).
ccacagttcatgaggataa

SEQ ID NO: 263188 - DNA, 19 bp, Homo sapiens
  siRNA target sequence for CLCA4 (NM_012128.2,2335-2353).
gttcatgaggataagatta

SEQ ID NO: 263189 - DNA, 19 bp, Homo sapiens
  siRNA target sequence for CLCA4 (NM_012128.2,2344-2362).
gataagattattcttacat

SEQ ID NO: 263190 - DNA, 19 bp, Homo sapiens
  siRNA target sequence for CLCA4 (NM_012128.2,2392-2410).
ggaaaagttcaacgttata

SEQ ID NO: 263191 - DNA, 19 bp, Homo sapiens
  siRNA target sequence for CLCA4 (NM_012128.2,2398-2416).
gttcaacgttatatcataa

SEQ ID NO: 263192 - DNA, 19 bp, Homo sapiens
  siRNA target sequence for CLCA4 (NM_012128.2,2455-2473).
gatgatgctcttcaagtaa

SEQ ID NO: 263193 - DNA, 19 bp, Homo sapiens
  siRNA target sequence for CLCA4 (NM_012128.2,2458-2476).
gatgctcttcaagtaaata

SEQ ID NO: 263194 - DNA, 19 bp, Homo sapiens
  siRNA target sequence for CLCA4 (NM_012128.2,2501-2519).
ccaactccaaggaaagctt

SEQ ID NO: 263195 - DNA, 19 bp, Homo sapiens
  siRNA target sequence for CLCA4 (NM_012128.2,2594-2612).
gcaatttgacatcaaaagt

SEQ ID NO: 263196 - DNA, 19 bp, Homo sapiens
  siRNA target sequence for CLCA4 (NM_012128.2,2637-2655).
gtttatccctcaagcaaat

SEQ ID NO: 263197 - DNA, 19 bp, Homo sapiens
  siRNA target sequence for CLCA4 (NM_012128.2,2684-2702).
ctactcctactcctgataa

SEQ ID NO: 263198 - DNA, 19 bp, Homo sapiens
  siRNA target sequence for CLCA4 (NM_012128.2,2693-2711).
ctcctgataaaagtcataa

SEQ ID NO: 263199 - DNA, 19 bp, Homo sapiens
  siRNA target sequence for CLCA4 (NM_012128.2,2748-2766).
gattgggtctgttgtaatt

SEQ ID NO: 263200 - DNA, 19 bp, Homo sapiens
  siRNA target sequence for CLCA4 (NM_012128.2,2752-2770).
gggtctgttgtaattgtta

SEQ ID NO: 263201 - DNA, 19 bp, Homo sapiens
  siRNA target sequence for CLCN1 (NM_000083.1,142-160).
gacccccagtaccagtata

SEQ ID NO: 263202 - DNA, 19 bp, Homo sapiens
  siRNA target sequence for CLCN1 (NM_000083.1,186-204).
cggactgccctctgagaat

SEQ ID NO: 263203 - DNA, 19 bp, Homo sapiens
  siRNA target sequence for CLCN1 (NM_000083.1,252-270).
cgtccaccccacacagatt

SEQ ID NO: 263204 - DNA, 19 bp, Homo sapiens
  siRNA target sequence for CLCN1 (NM_000083.1,361-379).
gatgaggatcactattcta

SEQ ID NO: 263205 - DNA, 19 bp, Homo sapiens
  siRNA target sequence for CLCN1 (NM_000083.1,366-384).
ggatcactattctaaatgt

SEQ ID NO: 263206 - DNA, 19 bp, Homo sapiens
  siRNA target sequence for CLCN1 (NM_000083.1,377-395).
ctaaatgtcaagattgtat

SEQ ID NO: 263207 - DNA, 19 bp, Homo sapiens
  siRNA target sequence for CLCN1 (NM_000083.1,406-424).
ggacaggtggtgagaagaa

SEQ ID NO: 263208 - DNA, 19 bp, Homo sapiens
  siRNA target sequence for CLCN1 (NM_000083.1,660-678).
ccccgaaatgaagacaata

SEQ ID NO: 263209 - DNA, 19 bp, Homo sapiens
  siRNA target sequence for CLCN1 (NM_000083.1,663-681).
cgaaatgaagacaatactt

SEQ ID NO: 263210 - DNA, 19 bp, Homo sapiens
  siRNA target sequence for CLCN1 (NM_000083.1,685-703).
ggggttgtcctgaaggaat

SEQ ID NO: 263211 - DNA, 19 bp, Homo sapiens
  siRNA target sequence for CLCN1 (NM_000083.1,817-835).
gctgtcctcagcaaattca

SEQ ID NO: 263212 - DNA, 19 bp, Homo sapiens
  siRNA target sequence for CLCN1 (NM_000083.1,820-838).
gtcctcagcaaattcatgt

SEQ ID NO: 263213 - DNA, 19 bp, Homo sapiens
  siRNA target sequence for CLCN1 (NM_000083.1,866-884).
catactactactctgatat

SEQ ID NO: 263214 - DNA, 19 bp, Homo sapiens
  siRNA target sequence for CLCN1 (NM_000083.1,904-922).
gtgggagtcggctgttgtt

SEQ ID NO: 263215 - DNA, 19 bp, Homo sapiens
  siRNA target sequence for CLCN1 (NM_000083.1,906-924).
gggagtcggctgttgtttt

SEQ ID NO: 263216 - DNA, 19 bp, Homo sapiens
  siRNA target sequence for CLCN1 (NM_000083.1,934-952).
cttggaggagtgctattta

SEQ ID NO: 263217 - DNA, 19 bp, Homo sapiens
  siRNA target sequence for CLCN1 (NM_000083.1,938-956).
gaggagtgctatttagcat

SEQ ID NO: 263218 - DNA, 19 bp, Homo sapiens
  siRNA target sequence for CLCN1 (NM_000083.1,1017-1035).
gttcagcgcctttgtgttt

SEQ ID NO: 263219 - DNA, 19 bp, Homo sapiens
  siRNA target sequence for CLCN1 (NM_000083.1,1078-1096).
gctctgttcagaaccaatt

SEQ ID NO: 263220 - DNA, 19 bp, Homo sapiens
  siRNA target sequence for CLCN1 (NM_000083.1,1091-1109).
ccaatttccgaatggattt

SEQ ID NO: 263221 - DNA, 19 bp, Homo sapiens
  siRNA target sequence for CLCN1 (NM_000083.1,1125-1143).
ggaactaccagcttttgct

SEQ ID NO: 263222 - DNA, 19 bp, Homo sapiens
  siRNA target sequence for CLCN1 (NM_000083.1,1141-1159).
gctgccatcgggatttgct

SEQ ID NO: 263223 - DNA, 19 bp, Homo sapiens
  siRNA target sequence for CLCN1 (NM_000083.1,1163-1181).
ggctcctgggagctgtatt

SEQ ID NO: 263224 - DNA, 19 bp, Homo sapiens
  siRNA target sequence for CLCN1 (NM_000083.1,1170-1188).
gggagctgtatttgtgtat

SEQ ID NO: 263225 - DNA, 19 bp, Homo sapiens
  siRNA target sequence for CLCN1 (NM_000083.1,1307-1325).
caccaggaatgggtcaatt

SEQ ID NO: 263226 - DNA, 19 bp, Homo sapiens
  siRNA target sequence for CLCN1 (NM_000083.1,1309-1327).
ccaggaatgggtcaattca

SEQ ID NO: 263227 - DNA, 19 bp, Homo sapiens
  siRNA target sequence for CLCN1 (NM_000083.1,1348-1366).
cgcgaagccatcagtactt

SEQ ID NO: 263228 - DNA, 19 bp, Homo sapiens
  siRNA target sequence for CLCN1 (NM_000083.1,1351-1369).
gaagccatcagtactttgt

SEQ ID NO: 263229 - DNA, 19 bp, Homo sapiens
  siRNA target sequence for CLCN1 (NM_000083.1,1445-1463).
gggtcaacgttgtcatcat

SEQ ID NO: 263230 - DNA, 19 bp, Homo sapiens
  siRNA target sequence for CLCN1 (NM_000083.1,1714-1732).
gctgtgatttgcttcgaat

SEQ ID NO: 263231 - DNA, 19 bp, Homo sapiens
  siRNA target sequence for CLCN1 (NM_000083.1,1728-1746).
cgaattaacgggtcagatt

SEQ ID NO: 263232 - DNA, 19 bp, Homo sapiens
  siRNA target sequence for CLCN1 (NM_000083.1,1883-1901).
gcaaatataccatctttgt

SEQ ID NO: 263233 - DNA, 19 bp, Homo sapiens
  siRNA target sequence for CLCN1 (NM_000083.1,1914-1932).
ggtacgtgatgtgaagttt

SEQ ID NO: 263234 - DNA, 19 bp, Homo sapiens
  siRNA target sequence for CLCN1 (NM_000083.1,2420-2438).
gagctcgccccacaaagaa

SEQ ID NO: 263235 - DNA, 19 bp, Homo sapiens
  siRNA target sequence for CLCN1 (NM_000083.1,2520-2538).
ccagcctgtctgttttgat

SEQ ID NO: 263236 - DNA, 19 bp, Homo sapiens
  siRNA target sequence for CLCN1 (NM_000083.1,2595-2613).
gactcataccctgttttca

SEQ ID NO: 263237 - DNA, 19 bp, Homo sapiens
  siRNA target sequence for CLCN1 (NM_000083.1,2748-2766).
ccggaacacgacttcaact

SEQ ID NO: 263238 - DNA, 19 bp, Homo sapiens
  siRNA target sequence for CLCN1 (NM_000083.1,2757-2775).
gacttcaactcgaaagagt

SEQ ID NO: 263239 - DNA, 19 bp, Homo sapiens
  siRNA target sequence for CLCN1 (NM_000083.1,2837-2855).
ctggaacaggggatgtgat

SEQ ID NO: 263240 - DNA, 19 bp, Homo sapiens
  siRNA target sequence for CLCN1 (NM_000083.1,3034-3052).
gaggatgaactgatccttt

SEQ ID NO: 263241 - DNA, 19 bp, Homo sapiens
  siRNA target sequence for CLCN2 (NM_004366.2,51-69).
cgagcagaccctgatgtat

SEQ ID NO: 263242 - DNA, 19 bp, Homo sapiens
  siRNA target sequence for CLCN2 (NM_004366.2,227-245).
ctgtccgctgccacaagtt

SEQ ID NO: 263243 - DNA, 19 bp, Homo sapiens
  siRNA target sequence for CLCN2 (NM_004366.2,257-275).
gggttggtgaagattggat

SEQ ID NO: 263244 - DNA, 19 bp, Homo sapiens
  siRNA target sequence for CLCN2 (NM_004366.2,517-535).
ggagtggtgctgaaagaat

SEQ ID NO: 263245 - DNA, 19 bp, Homo sapiens
  siRNA target sequence for CLCN2 (NM_004366.2,518-536).
gagtggtgctgaaagaata

SEQ ID NO: 263246 - DNA, 19 bp, Homo sapiens
  siRNA target sequence for CLCN2 (NM_004366.2,544-562).
ctcaagacctttatagcta

SEQ ID NO: 263247 - DNA, 19 bp, Homo sapiens
  siRNA target sequence for CLCN2 (NM_004366.2,672-690).
cctctttgggggtatctat

SEQ ID NO: 263248 - DNA, 19 bp, Homo sapiens
  siRNA target sequence for CLCN2 (NM_004366.2,680-698).
ggggtatctatgagaatga

SEQ ID NO: 263249 - DNA, 19 bp, Homo sapiens
  siRNA target sequence for CLCN2 (NM_004366.2,682-700).
ggtatctatgagaatgaat

SEQ ID NO: 263250 - DNA, 19 bp, Homo sapiens
  siRNA target sequence for CLCN2 (NM_004366.2,753-771).
cttcgcggcacctattgga

SEQ ID NO: 263251 - DNA, 19 bp, Homo sapiens
  siRNA target sequence for CLCN2 (NM_004366.2,888-906).
ccgggatgaagagactatt

SEQ ID NO: 263252 - DNA, 19 bp, Homo sapiens
  siRNA target sequence for CLCN2 (NM_004366.2,889-907).
cgggatgaagagactatta

SEQ ID NO: 263253 - DNA, 19 bp, Homo sapiens
  siRNA target sequence for CLCN2 (NM_004366.2,902-920).
ctattacagccctcttcaa

SEQ ID NO: 263254 - DNA, 19 bp, Homo sapiens
  siRNA target sequence for CLCN2 (NM_004366.2,973-991).
gctgtcattggtattgcta

SEQ ID NO: 263255 - DNA, 19 bp, Homo sapiens
  siRNA target sequence for CLCN2 (NM_004366.2,1436-1454).
cctggttcccagatggaat

SEQ ID NO: 263256 - DNA, 19 bp, Homo sapiens
  siRNA target sequence for CLCN2 (NM_004366.2,1664-1682).
gcatcatccgaatcaagaa

SEQ ID NO: 263257 - DNA, 19 bp, Homo sapiens
  siRNA target sequence for CLCN2 (NM_004366.2,2209-2227).
gcttcggagaagttggaat

SEQ ID NO: 263258 - DNA, 19 bp, Homo sapiens
  siRNA target sequence for CLCN2 (NM_004366.2,2439-2457).
gggagtggaccatgcttat

SEQ ID NO: 263259 - DNA, 19 bp, Homo sapiens
  siRNA target sequence for CLCN2 (NM_004366.2,2441-2459).
gagtggaccatgcttatgt

SEQ ID NO: 263260 - DNA, 19 bp, Homo sapiens
  siRNA target sequence for CLCN2 (NM_004366.2,2443-2461).
gtggaccatgcttatgtca

SEQ ID NO: 263261 - DNA, 19 bp, Homo sapiens
  siRNA target sequence for CLCN2 (NM_004366.2,2478-2496).
cattggaatcgttactcta

SEQ ID NO: 263262 - DNA, 19 bp, Homo sapiens
  siRNA target sequence for CLCN2 (NM_004366.2,2483-2501).
gaatcgttactctaaagga

SEQ ID NO: 263263 - DNA, 19 bp, Homo sapiens
  siRNA target sequence for CLCN3 (NM_001829.1,509-527).
ccatagaggctactataga

SEQ ID NO: 263264 - DNA, 19 bp, Homo sapiens
  siRNA target sequence for CLCN3 (NM_001829.1,510-528).
catagaggctactatagaa

SEQ ID NO: 263265 - DNA, 19 bp, Homo sapiens
  siRNA target sequence for CLCN3 (NM_001829.1,556-574).
gtagtgatgaggaactttt

SEQ ID NO: 263266 - DNA, 19 bp, Homo sapiens
  siRNA target sequence for CLCN3 (NM_001829.1,588-606).
gttattatggactttcaaa

SEQ ID NO: 263267 - DNA, 19 bp, Homo sapiens
  siRNA target sequence for CLCN3 (NM_001829.1,596-614).
ggactttcaaacatctgaa

SEQ ID NO: 263268 - DNA, 19 bp, Homo sapiens
  siRNA target sequence for CLCN3 (NM_001829.1,638-656).
cactgcagttggaactcat

SEQ ID NO: 263269 - DNA, 19 bp, Homo sapiens
  siRNA target sequence for CLCN3 (NM_001829.1,642-660).
gcagttggaactcattata

SEQ ID NO: 263270 - DNA, 19 bp, Homo sapiens
  siRNA target sequence for CLCN3 (NM_001829.1,865-883).
ggtcaggatggctagtagt

SEQ ID NO: 263271 - DNA, 19 bp, Homo sapiens
  siRNA target sequence for CLCN3 (NM_001829.1,871-889).
gatggctagtagtaacact

SEQ ID NO: 263272 - DNA, 19 bp, Homo sapiens
  siRNA target sequence for CLCN3 (NM_001829.1,875-893).
gctagtagtaacactaaca

SEQ ID NO: 263273 - DNA, 19 bp, Homo sapiens
  siRNA target sequence for CLCN3 (NM_001829.1,908-926).
ggcactggccggattaata

SEQ ID NO: 263274 - DNA, 19 bp, Homo sapiens
  siRNA target sequence for CLCN3 (NM_001829.1,910-928).
cactggccggattaataga

SEQ ID NO: 263275 - DNA, 19 bp, Homo sapiens
  siRNA target sequence for CLCN3 (NM_001829.1,912-930).
ctggccggattaatagaca

SEQ ID NO: 263276 - DNA, 19 bp, Homo sapiens
  siRNA target sequence for CLCN3 (NM_001829.1,914-932).
ggccggattaatagacatt

SEQ ID NO: 263277 - DNA, 19 bp, Homo sapiens
  siRNA target sequence for CLCN3 (NM_001829.1,1001-1019).
gtgctgttggggatctaat

SEQ ID NO: 263278 - DNA, 19 bp, Homo sapiens
  siRNA target sequence for CLCN3 (NM_001829.1,1010-1028).
gggatctaatgaaacaaca

SEQ ID NO: 263279 - DNA, 19 bp, Homo sapiens
  siRNA target sequence for CLCN3 (NM_001829.1,1063-1081).
catgggcagaattaatcat

SEQ ID NO: 263280 - DNA, 19 bp, Homo sapiens
  siRNA target sequence for CLCN3 (NM_001829.1,1099-1117).
ctggttcttatatcatgaa

SEQ ID NO: 263281 - DNA, 19 bp, Homo sapiens
  siRNA target sequence for CLCN3 (NM_001829.1,1102-1120).
gttcttatatcatgaacta

SEQ ID NO: 263282 - DNA, 19 bp, Homo sapiens
  siRNA target sequence for CLCN3 (NM_001829.1,1164-1182).
gtttccctggtaaaggtat

SEQ ID NO: 263283 - DNA, 19 bp, Homo sapiens
  siRNA target sequence for CLCN3 (NM_001829.1,1212-1230).
ccagagattaaaactattt

SEQ ID NO: 263284 - DNA, 19 bp, Homo sapiens
  siRNA target sequence for CLCN3 (NM_001829.1,1307-1325).
ggcatcaggtttgagttta

SEQ ID NO: 263285 - DNA, 19 bp, Homo sapiens
  siRNA target sequence for CLCN3 (NM_001829.1,1353-1371).
gcctgttgctgcggaaata

SEQ ID NO: 263286 - DNA, 19 bp, Homo sapiens
  siRNA target sequence for CLCN3 (NM_001829.1,1354-1372).
cctgttgctgcggaaatat

SEQ ID NO: 263287 - DNA, 19 bp, Homo sapiens
  siRNA target sequence for CLCN3 (NM_001829.1,1357-1375).
gttgctgcggaaatatctt

SEQ ID NO: 263288 - DNA, 19 bp, Homo sapiens
  siRNA target sequence for CLCN3 (NM_001829.1,1363-1381).
gcggaaatatcttttccta

SEQ ID NO: 263289 - DNA, 19 bp, Homo sapiens
  siRNA target sequence for CLCN3 (NM_001829.1,1378-1396).
cctacctctttccaaagta

SEQ ID NO: 263290 - DNA, 19 bp, Homo sapiens
  siRNA target sequence for CLCN3 (NM_001829.1,1399-1417).
gcacaaacgaagctaaaaa

SEQ ID NO: 263291 - DNA, 19 bp, Homo sapiens
  siRNA target sequence for CLCN3 (NM_001829.1,1499-1517).
ggaagaggttagctattat

SEQ ID NO: 263292 - DNA, 19 bp, Homo sapiens
  siRNA target sequence for CLCN3 (NM_001829.1,1639-1657).
catggtacctttttgaact

SEQ ID NO: 263293 - DNA, 19 bp, Homo sapiens
  siRNA target sequence for CLCN3 (NM_001829.1,1737-1755).
cgacgcaagtccacgaaat

SEQ ID NO: 263294 - DNA, 19 bp, Homo sapiens
  siRNA target sequence for CLCN3 (NM_001829.1,1738-1756).
gacgcaagtccacgaaatt

SEQ ID NO: 263295 - DNA, 19 bp, Homo sapiens
  siRNA target sequence for CLCN3 (NM_001829.1,1747-1765).
ccacgaaatttggaaagta

SEQ ID NO: 263296 - DNA, 19 bp, Homo sapiens
  siRNA target sequence for CLCN3 (NM_001829.1,1767-1785).
cccgttctggaagtcatta

SEQ ID NO: 263297 - DNA, 19 bp, Homo sapiens
  siRNA target sequence for CLCN3 (NM_001829.1,1768-1786).
ccgttctggaagtcattat

SEQ ID NO: 263298 - DNA, 19 bp, Homo sapiens
  siRNA target sequence for CLCN3 (NM_001829.1,1824-1842).
ccatacactaggctaaaca

SEQ ID NO: 263299 - DNA, 19 bp, Homo sapiens
  siRNA target sequence for CLCN3 (NM_001829.1,1930-1948).
gtaaaattgtcgatgacat

SEQ ID NO: 263300 - DNA, 19 bp, Homo sapiens
  siRNA target sequence for CLCN3 (NM_001829.1,1994-2012).
gttatgcctggcactcata

SEQ ID NO: 263301 - DNA, 19 bp, Homo sapiens
  siRNA target sequence for CLCN3 (NM_001829.1,2021-2039).
cataatgacagtattcact

SEQ ID NO: 263302 - DNA, 19 bp, Homo sapiens
  siRNA target sequence for CLCN3 (NM_001829.1,2142-2160).
caccacgactggtttatct

SEQ ID NO: 263303 - DNA, 19 bp, Homo sapiens
  siRNA target sequence for CLCN3 (NM_001829.1,2145-2163).
cacgactggtttatcttta

SEQ ID NO: 263304 - DNA, 19 bp, Homo sapiens
  siRNA target sequence for CLCN3 (NM_001829.1,2177-2195).
ggtcggggctgattgcatt

SEQ ID NO: 263305 - DNA, 19 bp, Homo sapiens
  siRNA target sequence for CLCN3 (NM_001829.1,2178-2196).
gtcggggctgattgcatta

SEQ ID NO: 263306 - DNA, 19 bp, Homo sapiens
  siRNA target sequence for CLCN3 (NM_001829.1,2180-2198).
cggggctgattgcattaca

SEQ ID NO: 263307 - DNA, 19 bp, Homo sapiens
  siRNA target sequence for CLCN3 (NM_001829.1,2192-2210).
cattacacctggcctttat

SEQ ID NO: 263308 - DNA, 19 bp, Homo sapiens
  siRNA target sequence for CLCN3 (NM_001829.1,2261-2279).
ctccctggtggttattgtt

SEQ ID NO: 263309 - DNA, 19 bp, Homo sapiens
  siRNA target sequence for CLCN3 (NM_001829.1,2379-2397).
gaagcacacatccgattaa

SEQ ID NO: 263310 - DNA, 19 bp, Homo sapiens
  siRNA target sequence for CLCN3 (NM_001829.1,2385-2403).
cacatccgattaaatggat

SEQ ID NO: 263311 - DNA, 19 bp, Homo sapiens
  siRNA target sequence for CLCN3 (NM_001829.1,2449-2467).
ccctggctgctgacgttat

SEQ ID NO: 263312 - DNA, 19 bp, Homo sapiens
  siRNA target sequence for CLCN3 (NM_001829.1,2451-2469).
ctggctgctgacgttatga

SEQ ID NO: 263313 - DNA, 19 bp, Homo sapiens
  siRNA target sequence for CLCN3 (NM_001829.1,2550-2568).
gaaaccagctacaatggat

SEQ ID NO: 263314 - DNA, 19 bp, Homo sapiens
  siRNA target sequence for CLCN3 (NM_001829.1,2584-2602).
caaaagaatctcagagatt

SEQ ID NO: 263315 - DNA, 19 bp, Homo sapiens
  siRNA target sequence for CLCN3 (NM_001829.1,2618-2636).
cagaagagacctgacaatt

SEQ ID NO: 263316 - DNA, 19 bp, Homo sapiens
  siRNA target sequence for CLCN3 (NM_001829.1,2623-2641).
gagacctgacaattgcaat

SEQ ID NO: 263317 - DNA, 19 bp, Homo sapiens
  siRNA target sequence for CLCN3 (NM_001829.1,2627-2645).
cctgacaattgcaatagaa

SEQ ID NO: 263318 - DNA, 19 bp, Homo sapiens
  siRNA target sequence for CLCN3 (NM_001829.1,2628-2646).
ctgacaattgcaatagaaa

SEQ ID NO: 263319 - DNA, 19 bp, Homo sapiens
  siRNA target sequence for CLCN3 (NM_001829.1,2862-2880).
cgcctccttggcattataa

SEQ ID NO: 263320 - DNA, 19 bp, Homo sapiens
  siRNA target sequence for CLCN3 (NM_001829.1,2864-2882).
cctccttggcattataaca

SEQ ID NO: 263321 - DNA, 19 bp, Homo sapiens
  siRNA target sequence for CLCN3 (NM_001829.1,2865-2883).
ctccttggcattataacaa

SEQ ID NO: 263322 - DNA, 19 bp, Homo sapiens
  siRNA target sequence for CLCN3 (NM_001829.1,2921-2939).
ccaagaccccgcttcaata

SEQ ID NO: 263323 - DNA, 19 bp, Homo sapiens
  siRNA target sequence for CLCN3 (NM_001829.1,2922-2940).
caagaccccgcttcaataa

SEQ ID NO: 263324 - DNA, 19 bp, Homo sapiens
  siRNA target sequence for CLCN3 (NM_001829.1,2925-2943).
gaccccgcttcaataatgt

SEQ ID NO: 263325 - DNA, 19 bp, Homo sapiens
  siRNA target sequence for CLCN3 (NM_001829.1,2928-2946).
cccgcttcaataatgttca

SEQ ID NO: 263326 - DNA, 19 bp, Homo sapiens
  siRNA target sequence for CLCN3 (NM_001829.1,2929-2947).
ccgcttcaataatgttcaa

SEQ ID NO: 263327 - DNA, 19 bp, Homo sapiens
  siRNA target sequence for CLCN4 (NM_001830.2,415-433).
gaaacctgatggatttcct

SEQ ID NO: 263328 - DNA, 19 bp, Homo sapiens
  siRNA target sequence for CLCN4 (NM_001830.2,693-711).
ctgtctgccttctggtata

SEQ ID NO: 263329 - DNA, 19 bp, Homo sapiens
  siRNA target sequence for CLCN4 (NM_001830.2,720-738).
cagtgttgctggacttcta

SEQ ID NO: 263330 - DNA, 19 bp, Homo sapiens
  siRNA target sequence for CLCN4 (NM_001830.2,736-754).
ctaacgagaccacttttga

SEQ ID NO: 263331 - DNA, 19 bp, Homo sapiens
  siRNA target sequence for CLCN4 (NM_001830.2,819-837).
gccagtgcttacattctga

SEQ ID NO: 263332 - DNA, 19 bp, Homo sapiens
  siRNA target sequence for CLCN4 (NM_001830.2,821-839).
cagtgcttacattctgaat

SEQ ID NO: 263333 - DNA, 19 bp, Homo sapiens
  siRNA target sequence for CLCN4 (NM_001830.2,896-914).
gcgtgtatttgcaccatat

SEQ ID NO: 263334 - DNA, 19 bp, Homo sapiens
  siRNA target sequence for CLCN4 (NM_001830.2,923-941).
ctctggcataccagagata

SEQ ID NO: 263335 - DNA, 19 bp, Homo sapiens
  siRNA target sequence for CLCN4 (NM_001830.2,925-943).
ctggcataccagagataaa

SEQ ID NO: 263336 - DNA, 19 bp, Homo sapiens
  siRNA target sequence for CLCN4 (NM_001830.2,1205-1223).
cgtgcttttcagtctagaa

SEQ ID NO: 263337 - DNA, 19 bp, Homo sapiens
  siRNA target sequence for CLCN4 (NM_001830.2,1324-1342).
gccgtctcgttctctttta

SEQ ID NO: 263338 - DNA, 19 bp, Homo sapiens
  siRNA target sequence for CLCN4 (NM_001830.2,1325-1343).
ccgtctcgttctcttttat

SEQ ID NO: 263339 - DNA, 19 bp, Homo sapiens
  siRNA target sequence for CLCN4 (NM_001830.2,1327-1345).
gtctcgttctcttttatgt

SEQ ID NO: 263340 - DNA, 19 bp, Homo sapiens
  siRNA target sequence for CLCN4 (NM_001830.2,1363-1381).
ggtacatggctgaactctt

SEQ ID NO: 263341 - DNA, 19 bp, Homo sapiens
  siRNA target sequence for CLCN4 (NM_001830.2,1651-1669).
ctcggcctgtggatgacat

SEQ ID NO: 263342 - DNA, 19 bp, Homo sapiens
  siRNA target sequence for CLCN4 (NM_001830.2,1681-1699).
cggctggtgtcggtgttta

SEQ ID NO: 263343 - DNA, 19 bp, Homo sapiens
  siRNA target sequence for CLCN4 (NM_001830.2,1683-1701).
gctggtgtcggtgtttaca

SEQ ID NO: 263344 - DNA, 19 bp, Homo sapiens
  siRNA target sequence for CLCN4 (NM_001830.2,1726-1744).
cactgatcttcaaaatcgt

SEQ ID NO: 263345 - DNA, 19 bp, Homo sapiens
  siRNA target sequence for CLCN4 (NM_001830.2,1745-1763).
cgttaccatatttaccttt

SEQ ID NO: 263346 - DNA, 19 bp, Homo sapiens
  siRNA target sequence for CLCN4 (NM_001830.2,1989-2007).
gtggtcatcatgtttgaat

SEQ ID NO: 263347 - DNA, 19 bp, Homo sapiens
  siRNA target sequence for CLCN4 (NM_001830.2,1991-2009).
ggtcatcatgtttgaatta

SEQ ID NO: 263348 - DNA, 19 bp, Homo sapiens
  siRNA target sequence for CLCN4 (NM_001830.2,2102-2120).
ggcccacatccacttaaat

SEQ ID NO: 263349 - DNA, 19 bp, Homo sapiens
  siRNA target sequence for CLCN4 (NM_001830.2,2138-2156).
cgtgaaggacgagtttact

SEQ ID NO: 263350 - DNA, 19 bp, Homo sapiens
  siRNA target sequence for CLCN4 (NM_001830.2,2309-2327).
cgagcgcctcattggattt

SEQ ID NO: 263351 - DNA, 19 bp, Homo sapiens
  siRNA target sequence for CLCN4 (NM_001830.2,2382-2400).
ggcattgtgagcaattcca

SEQ ID NO: 263352 - DNA, 19 bp, Homo sapiens
  siRNA target sequence for CLCN4 (NM_001830.2,2474-2492).
gaacctcagcccgtttaca

SEQ ID NO: 263353 - DNA, 19 bp, Homo sapiens
  siRNA target sequence for CLCN4 (NM_001830.2,2514-2532).
gaaacggtggtggatatct

SEQ ID NO: 263354 - DNA, 19 bp, Homo sapiens
  siRNA target sequence for CLCN4 (NM_001830.2,2642-2660).
ccccgaatccatcatgttt

SEQ ID NO: 263355 - DNA, 19 bp, Homo sapiens
  siRNA target sequence for CLCN4 (NM_001830.2,2643-2661).
cccgaatccatcatgttta

SEQ ID NO: 263356 - DNA, 19 bp, Homo sapiens
  siRNA target sequence for CLCN4 (NM_001830.2,2644-2662).
ccgaatccatcatgtttaa

SEQ ID NO: 263357 - DNA, 19 bp, Homo sapiens
  siRNA target sequence for CLCN5 (NM_000084.1,322-340).
gtagggacctatgatgatt

SEQ ID NO: 263358 - DNA, 19 bp, Homo sapiens
  siRNA target sequence for CLCN5 (NM_000084.1,325-343).
gggacctatgatgatttca

SEQ ID NO: 263359 - DNA, 19 bp, Homo sapiens
  siRNA target sequence for CLCN5 (NM_000084.1,326-344).
ggacctatgatgatttcaa

SEQ ID NO: 263360 - DNA, 19 bp, Homo sapiens
  siRNA target sequence for CLCN5 (NM_000084.1,327-345).
gacctatgatgatttcaat

SEQ ID NO: 263361 - DNA, 19 bp, Homo sapiens
  siRNA target sequence for CLCN5 (NM_000084.1,382-400).
gataggcaccgagagatta

SEQ ID NO: 263362 - DNA, 19 bp, Homo sapiens
  siRNA target sequence for CLCN5 (NM_000084.1,387-405).
gcaccgagagattaccaat

SEQ ID NO: 263363 - DNA, 19 bp, Homo sapiens
  siRNA target sequence for CLCN5 (NM_000084.1,388-406).
caccgagagattaccaata

SEQ ID NO: 263364 - DNA, 19 bp, Homo sapiens
  siRNA target sequence for CLCN5 (NM_000084.1,391-409).
cgagagattaccaataaaa

SEQ ID NO: 263365 - DNA, 19 bp, Homo sapiens
  siRNA target sequence for CLCN5 (NM_000084.1,419-437).
caacatgggccttaattca

SEQ ID NO: 263366 - DNA, 19 bp, Homo sapiens
  siRNA target sequence for CLCN5 (NM_000084.1,464-482).
ggttgttgatgctccttat

SEQ ID NO: 263367 - DNA, 19 bp, Homo sapiens
  siRNA target sequence for CLCN5 (NM_000084.1,465-483).
gttgttgatgctccttatt

SEQ ID NO: 263368 - DNA, 19 bp, Homo sapiens
  siRNA target sequence for CLCN5 (NM_000084.1,486-504).
gcttttatcaggttcgtta

SEQ ID NO: 263369 - DNA, 19 bp, Homo sapiens
  siRNA target sequence for CLCN5 (NM_000084.1,497-515).
gttcgttagctggtttgat

SEQ ID NO: 263370 - DNA, 19 bp, Homo sapiens
  siRNA target sequence for CLCN5 (NM_000084.1,500-518).
cgttagctggtttgataga

SEQ ID NO: 263371 - DNA, 19 bp, Homo sapiens
  siRNA target sequence for CLCN5 (NM_000084.1,539-557).
cagacttaaaagaaggtat

SEQ ID NO: 263372 - DNA, 19 bp, Homo sapiens
  siRNA target sequence for CLCN5 (NM_000084.1,541-559).
gacttaaaagaaggtatat

SEQ ID NO: 263373 - DNA, 19 bp, Homo sapiens
  siRNA target sequence for CLCN5 (NM_000084.1,567-585).
gggattctggtttaaccat

SEQ ID NO: 263374 - DNA, 19 bp, Homo sapiens
  siRNA target sequence for CLCN5 (NM_000084.1,576-594).
gtttaaccatgaacattgt

SEQ ID NO: 263375 - DNA, 19 bp, Homo sapiens
  siRNA target sequence for CLCN5 (NM_000084.1,653-671).
gttggtcccagcttatcat

SEQ ID NO: 263376 - DNA, 19 bp, Homo sapiens
  siRNA target sequence for CLCN5 (NM_000084.1,851-869).
gtaagtggactctggttat

SEQ ID NO: 263377 - DNA, 19 bp, Homo sapiens
  siRNA target sequence for CLCN5 (NM_000084.1,855-873).
gtggactctggttatcaaa

SEQ ID NO: 263378 - DNA, 19 bp, Homo sapiens
  siRNA target sequence for CLCN5 (NM_000084.1,860-878).
ctctggttatcaaaaccat

SEQ ID NO: 263379 - DNA, 19 bp, Homo sapiens
  siRNA target sequence for CLCN5 (NM_000084.1,968-986).
gccactgcttcaacaaata

SEQ ID NO: 263380 - DNA, 19 bp, Homo sapiens
  siRNA target sequence for CLCN5 (NM_000084.1,1053-1071).
ctttggagcacctataggt

SEQ ID NO: 263381 - DNA, 19 bp, Homo sapiens
  siRNA target sequence for CLCN5 (NM_000084.1,1063-1081).
cctataggtggagtattat

SEQ ID NO: 263382 - DNA, 19 bp, Homo sapiens
  siRNA target sequence for CLCN5 (NM_000084.1,1064-1082).
ctataggtggagtattatt

SEQ ID NO: 263383 - DNA, 19 bp, Homo sapiens
  siRNA target sequence for CLCN5 (NM_000084.1,1121-1139).
cattgtggcgttcattctt

SEQ ID NO: 263384 - DNA, 19 bp, Homo sapiens
  siRNA target sequence for CLCN5 (NM_000084.1,1161-1179).
cactctacgctccatcaat

SEQ ID NO: 263385 - DNA, 19 bp, Homo sapiens
  siRNA target sequence for CLCN5 (NM_000084.1,1191-1209).
cagccgcctggtactattt

SEQ ID NO: 263386 - DNA, 19 bp, Homo sapiens
  siRNA target sequence for CLCN5 (NM_000084.1,1193-1211).
gccgcctggtactatttta

SEQ ID NO: 263387 - DNA, 19 bp, Homo sapiens
  siRNA target sequence for CLCN5 (NM_000084.1,1194-1212).
ccgcctggtactattttat

SEQ ID NO: 263388 - DNA, 19 bp, Homo sapiens
  siRNA target sequence for CLCN5 (NM_000084.1,1196-1214).
gcctggtactattttatgt

SEQ ID NO: 263389 - DNA, 19 bp, Homo sapiens
  siRNA target sequence for CLCN5 (NM_000084.1,1226-1244).
ccccatggcatctctttga

SEQ ID NO: 263390 - DNA, 19 bp, Homo sapiens
  siRNA target sequence for CLCN5 (NM_000084.1,1347-1365).
gggcaagtatcctgttata

SEQ ID NO: 263391 - DNA, 19 bp, Homo sapiens
  siRNA target sequence for CLCN5 (NM_000084.1,1501-1519).
gagaaccgtttcaacacaa

SEQ ID NO: 263392 - DNA, 19 bp, Homo sapiens
  siRNA target sequence for CLCN5 (NM_000084.1,1577-1595).
ggcagctggctttaacact

SEQ ID NO: 263393 - DNA, 19 bp, Homo sapiens
  siRNA target sequence for CLCN5 (NM_000084.1,1581-1599).
gctggctttaacactcata

SEQ ID NO: 263394 - DNA, 19 bp, Homo sapiens
  siRNA target sequence for CLCN5 (NM_000084.1,1594-1612).
ctcatactgaaaattgtca

SEQ ID NO: 263395 - DNA, 19 bp, Homo sapiens
  siRNA target sequence for CLCN5 (NM_000084.1,1668-1686).
ggctgttggtgctatagca

SEQ ID NO: 263396 - DNA, 19 bp, Homo sapiens
  siRNA target sequence for CLCN5 (NM_000084.1,1734-1752).
ggaatggaccgtcttcaat

SEQ ID NO: 263397 - DNA, 19 bp, Homo sapiens
  siRNA target sequence for CLCN5 (NM_000084.1,1831-1849).
gtgactcggatgactgttt

SEQ ID NO: 263398 - DNA, 19 bp, Homo sapiens
  siRNA target sequence for CLCN5 (NM_000084.1,1833-1851).
gactcggatgactgtttct

SEQ ID NO: 263399 - DNA, 19 bp, Homo sapiens
  siRNA target sequence for CLCN5 (NM_000084.1,1835-1853).
ctcggatgactgtttctct

SEQ ID NO: 263400 - DNA, 19 bp, Homo sapiens
  siRNA target sequence for CLCN5 (NM_000084.1,1844-1862).
ctgtttctcttgttgtcat

SEQ ID NO: 263401 - DNA, 19 bp, Homo sapiens
  siRNA target sequence for CLCN5 (NM_000084.1,1850-1868).
ctcttgttgtcataatgtt

SEQ ID NO: 263402 - DNA, 19 bp, Homo sapiens
  siRNA target sequence for CLCN5 (NM_000084.1,1877-1895).
ctggtggcttagaatacat

SEQ ID NO: 263403 - DNA, 19 bp, Homo sapiens
  siRNA target sequence for CLCN5 (NM_000084.1,1972-1990).
cacatccgtctcaatggat

SEQ ID NO: 263404 - DNA, 19 bp, Homo sapiens
  siRNA target sequence for CLCN5 (NM_000084.1,1983-2001).
caatggatacccctttctt

SEQ ID NO: 263405 - DNA, 19 bp, Homo sapiens
  siRNA target sequence for CLCN5 (NM_000084.1,2054-2072).
cccggagaaatgatccttt

SEQ ID NO: 263406 - DNA, 19 bp, Homo sapiens
  siRNA target sequence for CLCN5 (NM_000084.1,2083-2101).
cttactcaggacagtatga

SEQ ID NO: 263407 - DNA, 19 bp, Homo sapiens
  siRNA target sequence for CLCN5 (NM_000084.1,2096-2114).
gtatgactgtggaagatgt

SEQ ID NO: 263408 - DNA, 19 bp, Homo sapiens
  siRNA target sequence for CLCN5 (NM_000084.1,2190-2208).
ctttgtcctccgaagagat

SEQ ID NO: 263409 - DNA, 19 bp, Homo sapiens
  siRNA target sequence for CLCN5 (NM_000084.1,2254-2272).
gttagcacttccatcattt

SEQ ID NO: 263410 - DNA, 19 bp, Homo sapiens
  siRNA target sequence for CLCN5 (NM_000084.1,2462-2480).
ccaaaaaggatgtgttaaa

SEQ ID NO: 263411 - DNA, 19 bp, Homo sapiens
  siRNA target sequence for CLCN5 (NM_000084.1,2502-2520).
ccaagatcctgattccatt

SEQ ID NO: 263412 - DNA, 19 bp, Homo sapiens
  siRNA target sequence for CLCN6 (NM_001286.1,160-178).
ggaaagactatgagagttt

SEQ ID NO: 263413 - DNA, 19 bp, Homo sapiens
  siRNA target sequence for CLCN6 (NM_001286.1,167-185).
ctatgagagtttggattat

SEQ ID NO: 263414 - DNA, 19 bp, Homo sapiens
  siRNA target sequence for CLCN6 (NM_001286.1,180-198).
gattatgatcgctgtatca

SEQ ID NO: 263415 - DNA, 19 bp, Homo sapiens
  siRNA target sequence for CLCN6 (NM_001286.1,201-219).
gacccttacctggaagttt

SEQ ID NO: 263416 - DNA, 19 bp, Homo sapiens
  siRNA target sequence for CLCN6 (NM_001286.1,301-319).
gcctggtgggtctctttgt

SEQ ID NO: 263417 - DNA, 19 bp, Homo sapiens
  siRNA target sequence for CLCN6 (NM_001286.1,693-711).
cggaagatccagtttaact

SEQ ID NO: 263418 - DNA, 19 bp, Homo sapiens
  siRNA target sequence for CLCN6 (NM_001286.1,694-712).
ggaagatccagtttaactt

SEQ ID NO: 263419 - DNA, 19 bp, Homo sapiens
  siRNA target sequence for CLCN6 (NM_001286.1,735-753).
gacaagagagactttgtat

SEQ ID NO: 263420 - DNA, 19 bp, Homo sapiens
  siRNA target sequence for CLCN6 (NM_001286.1,857-875).
gtggaaagtgctcttttgt

SEQ ID NO: 263421 - DNA, 19 bp, Homo sapiens
  siRNA target sequence for CLCN6 (NM_001286.1,950-968).
ccctggattgctgaacttt

SEQ ID NO: 263422 - DNA, 19 bp, Homo sapiens
  siRNA target sequence for CLCN6 (NM_001286.1,960-978).
ctgaactttggcgagttta

SEQ ID NO: 263423 - DNA, 19 bp, Homo sapiens
  siRNA target sequence for CLCN6 (NM_001286.1,1065-1083).
ctgggagccacattcaact

SEQ ID NO: 263424 - DNA, 19 bp, Homo sapiens
  siRNA target sequence for CLCN6 (NM_001286.1,1140-1158).
ctcgtcagagtcttagaga

SEQ ID NO: 263425 - DNA, 19 bp, Homo sapiens
  siRNA target sequence for CLCN6 (NM_001286.1,1240-1258).
cgagtcaaatcggtaatga

SEQ ID NO: 263426 - DNA, 19 bp, Homo sapiens
  siRNA target sequence for CLCN6 (NM_001286.1,1275-1293).
gtcacagaagatgtgaatt

SEQ ID NO: 263427 - DNA, 19 bp, Homo sapiens
  siRNA target sequence for CLCN6 (NM_001286.1,1284-1302).
gatgtgaattcaagtatca

SEQ ID NO: 263428 - DNA, 19 bp, Homo sapiens
  siRNA target sequence for CLCN6 (NM_001286.1,1318-1336).
ccaatgatacctacaatga

SEQ ID NO: 263429 - DNA, 19 bp, Homo sapiens
  siRNA target sequence for CLCN6 (NM_001286.1,1516-1534).
ctgcttttggacgtttagt

SEQ ID NO: 263430 - DNA, 19 bp, Homo sapiens
  siRNA target sequence for CLCN6 (NM_001286.1,1537-1555).
ccaatgtcctaaaaagcta

SEQ ID NO: 263431 - DNA, 19 bp, Homo sapiens
  siRNA target sequence for CLCN6 (NM_001286.1,1545-1563).
ctaaaaagctacattggat

SEQ ID NO: 263432 - DNA, 19 bp, Homo sapiens
  siRNA target sequence for CLCN6 (NM_001286.1,1707-1725).
ctgatggtggccaaatgga

SEQ ID NO: 263433 - DNA, 19 bp, Homo sapiens
  siRNA target sequence for CLCN6 (NM_001286.1,1724-1742).
gacaggggactttttcaat

SEQ ID NO: 263434 - DNA, 19 bp, Homo sapiens
  siRNA target sequence for CLCN6 (NM_001286.1,1726-1744).
caggggactttttcaataa

SEQ ID NO: 263435 - DNA, 19 bp, Homo sapiens
  siRNA target sequence for CLCN6 (NM_001286.1,1739-1757).
caataagggcatttatgat

SEQ ID NO: 263436 - DNA, 19 bp, Homo sapiens
  siRNA target sequence for CLCN6 (NM_001286.1,1948-1966).
gtaacgagaaggagttcat

SEQ ID NO: 263437 - DNA, 19 bp, Homo sapiens
  siRNA target sequence for CLCN6 (NM_001286.1,2286-2304).
cttgtccgaggagtttgtt

SEQ ID NO: 263438 - DNA, 19 bp, Homo sapiens
  siRNA target sequence for CLCN6 (NM_001286.1,2289-2307).
gtccgaggagtttgttact

SEQ ID NO: 263439 - DNA, 19 bp, Homo sapiens
  siRNA target sequence for CLCN6 (NM_001286.1,2291-2309).
ccgaggagtttgttactct

SEQ ID NO: 263440 - DNA, 19 bp, Homo sapiens
  siRNA target sequence for CLCN6 (NM_001286.1,2430-2448).
gatgtcaccccatacatga

SEQ ID NO: 263441 - DNA, 19 bp, Homo sapiens
  siRNA target sequence for CLCN6 (NM_001286.1,2479-2497).
cccacgtctcccaagtctt

SEQ ID NO: 263442 - DNA, 19 bp, Homo sapiens
  siRNA target sequence for CLCN6 (NM_021735.1,724-742).
gaagcgacaggtatggaaa

SEQ ID NO: 263443 - DNA, 19 bp, Homo sapiens
  siRNA target sequence for CLCN6 (NM_021735.1,728-746).
cgacaggtatggaaagaga

SEQ ID NO: 263444 - DNA, 19 bp, Homo sapiens
  siRNA target sequence for CLCN6 (NM_021736.1,969-987).
ggcgagtttaagagtctta

SEQ ID NO: 263445 - DNA, 19 bp, Homo sapiens
  siRNA target sequence for CLCN6 (NM_021736.1,971-989).
cgagtttaagagtcttaga

SEQ ID NO: 263446 - DNA, 19 bp, Homo sapiens
  siRNA target sequence for CLCN7 (NM_001287.3,320-338).
gagagcttggactatgaca

SEQ ID NO: 263447 - DNA, 19 bp, Homo sapiens
  siRNA target sequence for CLCN7 (NM_001287.3,598-616).
gctcgtgggctctgtgatt

SEQ ID NO: 263448 - DNA, 19 bp, Homo sapiens
  siRNA target sequence for CLCN7 (NM_001287.3,648-666).
gcggaatcccccagatcaa

SEQ ID NO: 263449 - DNA, 19 bp, Homo sapiens
  siRNA target sequence for CLCN7 (NM_001287.3,650-668).
ggaatcccccagatcaagt

SEQ ID NO: 263450 - DNA, 19 bp, Homo sapiens
  siRNA target sequence for CLCN7 (NM_001287.3,837-855).
cgtcactgaaacgagattt

SEQ ID NO: 263451 - DNA, 19 bp, Homo sapiens
  siRNA target sequence for CLCN7 (NM_001287.3,840-858).
cactgaaacgagatttcaa

SEQ ID NO: 263452 - DNA, 19 bp, Homo sapiens
  siRNA target sequence for CLCN7 (NM_001287.3,1004-1022).
ctgacctggaggatcttct

SEQ ID NO: 263453 - DNA, 19 bp, Homo sapiens
  siRNA target sequence for CLCN7 (NM_001287.3,1038-1056).
ccacgttcaccctgaattt

SEQ ID NO: 263454 - DNA, 19 bp, Homo sapiens
  siRNA target sequence for CLCN7 (NM_001287.3,1039-1057).
cacgttcaccctgaatttt

SEQ ID NO: 263455 - DNA, 19 bp, Homo sapiens
  siRNA target sequence for CLCN7 (NM_001287.3,1041-1059).
cgttcaccctgaattttgt

SEQ ID NO: 263456 - DNA, 19 bp, Homo sapiens
  siRNA target sequence for CLCN7 (NM_001287.3,1098-1116).
gcccaggcctcatcaactt

SEQ ID NO: 263457 - DNA, 19 bp, Homo sapiens
  siRNA target sequence for CLCN7 (NM_001287.3,1108-1126).
catcaacttcggaaggttt

SEQ ID NO: 263458 - DNA, 19 bp, Homo sapiens
  siRNA target sequence for CLCN7 (NM_001287.3,1122-1140).
ggtttgactcggagaaaat

SEQ ID NO: 263459 - DNA, 19 bp, Homo sapiens
  siRNA target sequence for CLCN7 (NM_001287.3,1198-1216).
gcttggagcagtgttcaat

SEQ ID NO: 263460 - DNA, 19 bp, Homo sapiens
  siRNA target sequence for CLCN7 (NM_001287.3,1230-1248).
ggctgaccatgtttcgaat

SEQ ID NO: 263461 - DNA, 19 bp, Homo sapiens
  siRNA target sequence for CLCN7 (NM_001287.3,1424-1442).
gctgcggccttcttcaaca

SEQ ID NO: 263462 - DNA, 19 bp, Homo sapiens
  siRNA target sequence for CLCN7 (NM_001287.3,1731-1749).
gcctgaccgtcatcatgat

SEQ ID NO: 263463 - DNA, 19 bp, Homo sapiens
  siRNA target sequence for CLCN7 (NM_001287.3,1994-2012).
gacacggcgtccaatcaca

SEQ ID NO: 263464 - DNA, 19 bp, Homo sapiens
  siRNA target sequence for CLCN7 (NM_001287.3,2295-2313).
cgctcccacgggtgttcaa

SEQ ID NO: 263465 - DNA, 19 bp, Homo sapiens
  siRNA target sequence for CLCNKA (NM_004070.2,1364-1382).
gactggaggggttaccaat

SEQ ID NO: 263466 - DNA, 19 bp, Homo sapiens
  siRNA target sequence for CLCNKA (NM_004070.2,1898-1916).
gaccctgacgctattctca

SEQ ID NO: 263467 - DNA, 19 bp, Homo sapiens
  siRNA target sequence for CLCNKA (NM_004070.2,1924-1942).
ccttgcaccaggcacaaaa

SEQ ID NO: 263468 - DNA, 19 bp, Homo sapiens
  siRNA target sequence for CLCNKA (NM_004070.2,1932-1950).
caggcacaaaacctcttta

SEQ ID NO: 263469 - DNA, 19 bp, Homo sapiens
  siRNA target sequence for CLCNKB (NM_000085.1,1312-1330).
catgcccatctttgtctat

SEQ ID NO: 263470 - DNA, 19 bp, Homo sapiens
  siRNA target sequence for CLCNKB (NM_000085.1,1355-1373).
ggggagactctctctttta

SEQ ID NO: 263471 - DNA, 19 bp, Homo sapiens
  siRNA target sequence for CLCNKB (NM_000085.1,1358-1376).
gagactctctcttttatct

SEQ ID NO: 263472 - DNA, 19 bp, Homo sapiens
  siRNA target sequence for CLIC1 (NM_001288.3,249-267).
caaccgcaggtcgaattgt

SEQ ID NO: 263473 - DNA, 19 bp, Homo sapiens
  siRNA target sequence for CLIC1 (NM_001288.3,344-362).
caagggagtcaccttcaat

SEQ ID NO: 263474 - DNA, 19 bp, Homo sapiens
  siRNA target sequence for CLIC1 (NM_001288.3,347-365).
gggagtcaccttcaatgtt

SEQ ID NO: 263475 - DNA, 19 bp, Homo sapiens
  siRNA target sequence for CLIC1 (NM_001288.3,583-601).
cctacatcaagaattcaaa

SEQ ID NO: 263476 - DNA, 19 bp, Homo sapiens
  siRNA target sequence for CLIC1 (NM_001288.3,598-616).
caaacccagcactcaatga

SEQ ID NO: 263477 - DNA, 19 bp, Homo sapiens
  siRNA target sequence for CLIC1 (NM_001288.3,602-620).
cccagcactcaatgacaat

SEQ ID NO: 263478 - DNA, 19 bp, Homo sapiens
  siRNA target sequence for CLIC1 (NM_001288.3,642-660).
gccctgaaggttttagaca

SEQ ID NO: 263479 - DNA, 19 bp, Homo sapiens
  siRNA target sequence for CLIC1 (NM_001288.3,645-663).
ctgaaggttttagacaatt

SEQ ID NO: 263480 - DNA, 19 bp, Homo sapiens
  siRNA target sequence for CLIC1 (NM_001288.3,774-792).
ctgttgccaaagttacaca

SEQ ID NO: 263481 - DNA, 19 bp, Homo sapiens
  siRNA target sequence for CLIC1 (NM_001288.3,779-797).
gccaaagttacacatagta

SEQ ID NO: 263482 - DNA, 19 bp, Homo sapiens
  siRNA target sequence for CLIC1 (NM_001288.3,849-867).
ggagtgcatcggtacttga

SEQ ID NO: 263483 - DNA, 19 bp, Homo sapiens
  siRNA target sequence for CLIC1 (NM_001288.3,898-916).
ccacctgtccagatgatga

SEQ ID NO: 263484 - DNA, 19 bp, Homo sapiens
  siRNA target sequence for CLIC2 (NM_001289.3,256-274).
ctgagattgagctttttgt

SEQ ID NO: 263485 - DNA, 19 bp, Homo sapiens
  siRNA target sequence for CLIC2 (NM_001289.3,319-337).
gccaacgccttttcatgat

SEQ ID NO: 263486 - DNA, 19 bp, Homo sapiens
  siRNA target sequence for CLIC2 (NM_001289.3,410-428).
cttagccccaggtaccaat

SEQ ID NO: 263487 - DNA, 19 bp, Homo sapiens
  siRNA target sequence for CLIC2 (NM_001289.3,429-447).
cctccgttcctggtgtata

SEQ ID NO: 263488 - DNA, 19 bp, Homo sapiens
  siRNA target sequence for CLIC2 (NM_001289.3,430-448).
ctccgttcctggtgtataa

SEQ ID NO: 263489 - DNA, 19 bp, Homo sapiens
  siRNA target sequence for CLIC2 (NM_001289.3,432-450).
ccgttcctggtgtataaca

SEQ ID NO: 263490 - DNA, 19 bp, Homo sapiens
  siRNA target sequence for CLIC2 (NM_001289.3,443-461).
gtataacaaggagttgaaa

SEQ ID NO: 263491 - DNA, 19 bp, Homo sapiens
  siRNA target sequence for CLIC2 (NM_001289.3,532-550).
ccaagtacaaggagtcttt

SEQ ID NO: 263492 - DNA, 19 bp, Homo sapiens
  siRNA target sequence for CLIC2 (NM_001289.3,719-737).
cccagtttccagaagacta

SEQ ID NO: 263493 - DNA, 19 bp, Homo sapiens
  siRNA target sequence for CLIC2 (NM_001289.3,720-738).
ccagtttccagaagactat

SEQ ID NO: 263494 - DNA, 19 bp, Homo sapiens
  siRNA target sequence for CLIC2 (NM_001289.3,755-773).
gctaacactggctgattgt

SEQ ID NO: 263495 - DNA, 19 bp, Homo sapiens
  siRNA target sequence for CLIC2 (NM_001289.3,756-774).
ctaacactggctgattgta

SEQ ID NO: 263496 - DNA, 19 bp, Homo sapiens
  siRNA target sequence for CLIC2 (NM_001289.3,764-782).
ggctgattgtagcttgtta

SEQ ID NO: 263497 - DNA, 19 bp, Homo sapiens
  siRNA target sequence for CLIC2 (NM_001289.3,812-830).
caagaaatatcgtgacttt

SEQ ID NO: 263498 - DNA, 19 bp, Homo sapiens
  siRNA target sequence for CLIC2 (NM_001289.3,850-868).
caggagtctggcgttatct

SEQ ID NO: 263499 - DNA, 19 bp, Homo sapiens
  siRNA target sequence for CLIC3 (NM_004669.2,100-118).
cctgccagcggctcttcat

SEQ ID NO: 263500 - DNA, 19 bp, Homo sapiens
  siRNA target sequence for CLIC3 (NM_004669.2,655-673).
cgatgcaggagaaagagtt

SEQ ID NO: 263501 - DNA, 19 bp, Homo sapiens
  siRNA target sequence for CLIC4 (NM_013943.1,310-328).
cccagaggctcttcatgat

SEQ ID NO: 263502 - DNA, 19 bp, Homo sapiens
  siRNA target sequence for CLIC4 (NM_013943.1,311-329).
ccagaggctcttcatgatt

SEQ ID NO: 263503 - DNA, 19 bp, Homo sapiens
  siRNA target sequence for CLIC4 (NM_013943.1,334-352).
ggctcaaaggagttgtatt

SEQ ID NO: 263504 - DNA, 19 bp, Homo sapiens
  siRNA target sequence for CLIC4 (NM_013943.1,410-428).
cgggacccacccaccattt

SEQ ID NO: 263505 - DNA, 19 bp, Homo sapiens
  siRNA target sequence for CLIC4 (NM_013943.1,421-439).
caccatttataactttcaa

SEQ ID NO: 263506 - DNA, 19 bp, Homo sapiens
  siRNA target sequence for CLIC4 (NM_013943.1,774-792).
cccaaactgcatattgtca

SEQ ID NO: 263507 - DNA, 19 bp, Homo sapiens
  siRNA target sequence for CLIC4 (NM_013943.1,794-812).
ggtggtggccaaaaaatat

SEQ ID NO: 263508 - DNA, 19 bp, Homo sapiens
  siRNA target sequence for CLIC4 (NM_013943.1,851-869).
gagatacctaactaatgca

SEQ ID NO: 263509 - DNA, 19 bp, Homo sapiens
  siRNA target sequence for CLIC4 (NM_013943.1,853-871).
gatacctaactaatgcata

SEQ ID NO: 263510 - DNA, 19 bp, Homo sapiens
  siRNA target sequence for CLIC4 (NM_013943.1,857-875).
cctaactaatgcatacagt

SEQ ID NO: 263511 - DNA, 19 bp, Homo sapiens
  siRNA target sequence for CLIC4 (NM_013943.1,858-876).
ctaactaatgcatacagta

SEQ ID NO: 263512 - DNA, 19 bp, Homo sapiens
  siRNA target sequence for CLIC4 (NM_013943.1,895-913).
cctgtcccagtgataagga

SEQ ID NO: 263513 - DNA, 19 bp, Homo sapiens
  siRNA target sequence for CLIC4 (NM_013943.1,912-930).
gaggttgaaatagcatata

SEQ ID NO: 263514 - DNA, 19 bp, Homo sapiens
  siRNA target sequence for CLIC5 (NM_016929.1,338-356).
ccgagatcgagctctttgt

SEQ ID NO: 263515 - DNA, 19 bp, Homo sapiens
  siRNA target sequence for CLIC5 (NM_016929.1,384-402).
cggcaactgtcctttctct

SEQ ID NO: 263516 - DNA, 19 bp, Homo sapiens
  siRNA target sequence for CLIC5 (NM_016929.1,429-447).
gaaaggagtcgtgttcaat

SEQ ID NO: 263517 - DNA, 19 bp, Homo sapiens
  siRNA target sequence for CLIC5 (NM_016929.1,433-451).
ggagtcgtgttcaatgtca

SEQ ID NO: 263518 - DNA, 19 bp, Homo sapiens
  siRNA target sequence for CLIC5 (NM_016929.1,538-556).
gtgaagacagacgtcaata

SEQ ID NO: 263519 - DNA, 19 bp, Homo sapiens
  siRNA target sequence for CLIC5 (NM_016929.1,600-618).
ccccaaactggctgcaaaa

SEQ ID NO: 263520 - DNA, 19 bp, Homo sapiens
  siRNA target sequence for CLIC5 (NM_016929.1,614-632).
caaaacaccgggaatccaa

SEQ ID NO: 263521 - DNA, 19 bp, Homo sapiens
  siRNA target sequence for CLIC5 (NM_016929.1,635-653).
cagcgggcatcgacatctt

SEQ ID NO: 263522 - DNA, 19 bp, Homo sapiens
  siRNA target sequence for CLIC5 (NM_016929.1,637-655).
gcgggcatcgacatctttt

SEQ ID NO: 263523 - DNA, 19 bp, Homo sapiens
  siRNA target sequence for CLIC5 (NM_016929.1,641-659).
gcatcgacatcttttccaa

SEQ ID NO: 263524 - DNA, 19 bp, Homo sapiens
  siRNA target sequence for CLIC5 (NM_016929.1,696-714).
caatgctgctcttgaaaga

SEQ ID NO: 263525 - DNA, 19 bp, Homo sapiens
  siRNA target sequence for CLIC5 (NM_016929.1,716-734).
gcctaaccaaggctctaaa

SEQ ID NO: 263526 - DNA, 19 bp, Homo sapiens
  siRNA target sequence for CLIC5 (NM_016929.1,772-790).
gagattgacgccaacactt

SEQ ID NO: 263527 - DNA, 19 bp, Homo sapiens
  siRNA target sequence for CLIC5 (NM_016929.1,897-915).
gaaataccgcaactatgat

SEQ ID NO: 263528 - DNA, 19 bp, Homo sapiens
  siRNA target sequence for CLIC6 (NM_053277.1,1368-1386).
cgtcaaggctggttatgat

SEQ ID NO: 263529 - DNA, 19 bp, Homo sapiens
  siRNA target sequence for CLIC6 (NM_053277.1,1379-1397).
gttatgatggtgagagtat

SEQ ID NO: 263530 - DNA, 19 bp, Homo sapiens
  siRNA target sequence for CLIC6 (NM_053277.1,1387-1405).
ggtgagagtatcggaaatt

SEQ ID NO: 263531 - DNA, 19 bp, Homo sapiens
  siRNA target sequence for CLIC6 (NM_053277.1,1398-1416).
cggaaattgcccgttttct

SEQ ID NO: 263532 - DNA, 19 bp, Homo sapiens
  siRNA target sequence for CLIC6 (NM_053277.1,1437-1455).
ctggctgaaaggcgttata

SEQ ID NO: 263533 - DNA, 19 bp, Homo sapiens
  siRNA target sequence for CLIC6 (NM_053277.1,1439-1457).
ggctgaaaggcgttatatt

SEQ ID NO: 263534 - DNA, 19 bp, Homo sapiens
  siRNA target sequence for CLIC6 (NM_053277.1,1440-1458).
gctgaaaggcgttatattt

SEQ ID NO: 263535 - DNA, 19 bp, Homo sapiens
  siRNA target sequence for CLIC6 (NM_053277.1,1441-1459).
ctgaaaggcgttatattta

SEQ ID NO: 263536 - DNA, 19 bp, Homo sapiens
  siRNA target sequence for CLIC6 (NM_053277.1,1443-1461).
gaaaggcgttatatttaat

SEQ ID NO: 263537 - DNA, 19 bp, Homo sapiens
  siRNA target sequence for CLIC6 (NM_053277.1,1584-1602).
cttagaggagaaattagct

SEQ ID NO: 263538 - DNA, 19 bp, Homo sapiens
  siRNA target sequence for CLIC6 (NM_053277.1,1628-1646).
cccaacatcccgaatctaa

SEQ ID NO: 263539 - DNA, 19 bp, Homo sapiens
  siRNA target sequence for CLIC6 (NM_053277.1,1629-1647).
ccaacatcccgaatctaat

SEQ ID NO: 263540 - DNA, 19 bp, Homo sapiens
  siRNA target sequence for CLIC6 (NM_053277.1,1630-1648).
caacatcccgaatctaatt

SEQ ID NO: 263541 - DNA, 19 bp, Homo sapiens
  siRNA target sequence for CLIC6 (NM_053277.1,1643-1661).
ctaattccgcaggaaatga

SEQ ID NO: 263542 - DNA, 19 bp, Homo sapiens
  siRNA target sequence for CLIC6 (NM_053277.1,1772-1790).
gccctctgcctgatgaaat

SEQ ID NO: 263543 - DNA, 19 bp, Homo sapiens
  siRNA target sequence for CLIC6 (NM_053277.1,1875-1893).
cttacccaagctccatatt

SEQ ID NO: 263544 - DNA, 19 bp, Homo sapiens
  siRNA target sequence for CLIC6 (NM_053277.1,1879-1897).
cccaagctccatattatta

SEQ ID NO: 263545 - DNA, 19 bp, Homo sapiens
  siRNA target sequence for CLIC6 (NM_053277.1,1949-1967).
gcatctggagatacttgaa

SEQ ID NO: 263546 - DNA, 19 bp, Homo sapiens
  siRNA target sequence for CLIC6 (NM_053277.1,1950-1968).
catctggagatacttgaat

SEQ ID NO: 263547 - DNA, 19 bp, Homo sapiens
  siRNA target sequence for CLIC6 (NM_053277.1,1962-1980).
cttgaataatgcttatgct

SEQ ID NO: 263548 - DNA, 19 bp, Homo sapiens
  siRNA target sequence for CLIC6 (NM_053277.1,1984-2002).
gatgagttcacaaatacgt

SEQ ID NO: 263549 - DNA, 19 bp, Homo sapiens
  siRNA target sequence for CLIC6 (NM_053277.1,2017-2035).
gagattgaacacgcatatt

SEQ ID NO: 263550 - DNA, 19 bp, Homo sapiens
  siRNA target sequence for CLIC6 (NM_053277.1,2019-2037).
gattgaacacgcatattca

SEQ ID NO: 263551 - DNA, 19 bp, Homo sapiens
  siRNA target sequence for LGICZ (NM_180990.2,259-277).
ggacatcctgcgatacaca

SEQ ID NO: 263552 - DNA, 19 bp, Homo sapiens
  siRNA target sequence for LGICZ (NM_180990.2,260-278).
gacatcctgcgatacacaa

SEQ ID NO: 263553 - DNA, 19 bp, Homo sapiens
  siRNA target sequence for LGICZ (NM_180990.2,320-338).
cgcctggcctggaacacta

SEQ ID NO: 263554 - DNA, 19 bp, Homo sapiens
  siRNA target sequence for LGICZ (NM_180990.2,496-514).
ggagaccaactgcaacttt

SEQ ID NO: 263555 - DNA, 19 bp, Homo sapiens
  siRNA target sequence for LGICZ (NM_180990.2,579-597).
cggcgatggagttagagtt

SEQ ID NO: 263556 - DNA, 19 bp, Homo sapiens
  siRNA target sequence for LGICZ (NM_180990.2,608-626).
gtggtgaacgagattgtga

SEQ ID NO: 263557 - DNA, 19 bp, Homo sapiens
  siRNA target sequence for LGICZ (NM_180990.2,627-645).
gtgtcaagagggaatacgt

SEQ ID NO: 263558 - DNA, 19 bp, Homo sapiens
  siRNA target sequence for LGICZ (NM_180990.2,634-652).
gagggaatacgtagtttat

SEQ ID NO: 263559 - DNA, 19 bp, Homo sapiens
  siRNA target sequence for LGICZ (NM_180990.2,636-654).
gggaatacgtagtttatga

SEQ ID NO: 263560 - DNA, 19 bp, Homo sapiens
  siRNA target sequence for LGICZ (NM_180990.2,637-655).
ggaatacgtagtttatgat

SEQ ID NO: 263561 - DNA, 19 bp, Homo sapiens
  siRNA target sequence for LGICZ (NM_180990.2,903-921).
gcaacccactgctcattta

SEQ ID NO: 263562 - DNA, 19 bp, Homo sapiens
  siRNA target sequence for LGICZ (NM_180990.2,911-929).
ctgctcatttactacttca

SEQ ID NO: 263563 - DNA, 19 bp, Homo sapiens
  siRNA target sequence for LGICZ (NM_180990.2,1131-1149).
ctgctgaccgcatcttctt

SEQ ID NO: 263564 - DNA, 19 bp, Homo sapiens
  siRNA target sequence for FXYD1 (NM_005031.3,110-128).
cgtctcttggccacatctt

SEQ ID NO: 263565 - DNA, 19 bp, Homo sapiens
  siRNA target sequence for FXYD1 (NM_005031.3,178-196).
gaacacgacccgttcactt

SEQ ID NO: 263566 - DNA, 19 bp, Homo sapiens
  siRNA target sequence for FXYD1 (NM_005031.3,281-299).
gatgccggtgcaagttcaa

SEQ ID NO: 263567 - DNA, 19 bp, Homo sapiens
  siRNA target sequence for FXYD3 (NM_005971.2,337-355).
catcgtcatgagtgcaaaa

SEQ ID NO: 263568 - DNA, 19 bp, Homo sapiens
  siRNA target sequence for FLJ12770 (NM_032174.3,306-324).
gctgcaccgtctatgcaaa

SEQ ID NO: 263569 - DNA, 19 bp, Homo sapiens
  siRNA target sequence for FLJ12770 (NM_032174.3,309-327).
gcaccgtctatgcaaagat

SEQ ID NO: 263570 - DNA, 19 bp, Homo sapiens
  siRNA target sequence for FLJ12770 (NM_032174.3,312-330).
ccgtctatgcaaagatgta

SEQ ID NO: 263571 - DNA, 19 bp, Homo sapiens
  siRNA target sequence for FLJ12770 (NM_032174.3,313-331).
cgtctatgcaaagatgtat

SEQ ID NO: 263572 - DNA, 19 bp, Homo sapiens
  siRNA target sequence for FLJ12770 (NM_032174.3,390-408).
ccaggtggcgcacactata

SEQ ID NO: 263573 - DNA, 19 bp, Homo sapiens
  siRNA target sequence for FLJ12770 (NM_032174.3,394-412).
gtggcgcacactatacaca

SEQ ID NO: 263574 - DNA, 19 bp, Homo sapiens
  siRNA target sequence for FLJ12770 (NM_032174.3,497-515).
ctgtggtaggggatatgga

SEQ ID NO: 263575 - DNA, 19 bp, Homo sapiens
  siRNA target sequence for FLJ12770 (NM_032174.3,653-671).
ccactctgaccctaggaaa

SEQ ID NO: 263576 - DNA, 19 bp, Homo sapiens
  siRNA target sequence for FLJ12770 (NM_032174.3,654-672).
cactctgaccctaggaaat

SEQ ID NO: 263577 - DNA, 19 bp, Homo sapiens
  siRNA target sequence for FLJ12770 (NM_032174.3,742-760).
ctgggaggagagctagttt

SEQ ID NO: 263578 - DNA, 19 bp, Homo sapiens
  siRNA target sequence for FLJ12770 (NM_032174.3,823-841).
cactgggtagctacattga

SEQ ID NO: 263579 - DNA, 19 bp, Homo sapiens
  siRNA target sequence for FLJ12770 (NM_032174.3,827-845).
gggtagctacattgaatgt

SEQ ID NO: 263580 - DNA, 19 bp, Homo sapiens
  siRNA target sequence for FLJ12770 (NM_032174.3,941-959).
caacattctcctttggtta

SEQ ID NO: 263581 - DNA, 19 bp, Homo sapiens
  siRNA target sequence for FLJ12770 (NM_032174.3,973-991).
ccccaggccaacatggtat

SEQ ID NO: 263582 - DNA, 19 bp, Homo sapiens
  siRNA target sequence for FLJ12770 (NM_032174.3,975-993).
ccaggccaacatggtattt

SEQ ID NO: 263583 - DNA, 19 bp, Homo sapiens
  siRNA target sequence for FLJ12770 (NM_032174.3,976-994).
caggccaacatggtattta

SEQ ID NO: 263584 - DNA, 19 bp, Homo sapiens
  siRNA target sequence for FLJ12770 (NM_032174.3,995-1013).
gaggcttggtggatagtaa

SEQ ID NO: 263585 - DNA, 19 bp, Homo sapiens
  siRNA target sequence for FLJ12770 (NM_032174.3,997-1015).
ggcttggtggatagtaact

SEQ ID NO: 263586 - DNA, 19 bp, Homo sapiens
  siRNA target sequence for FLJ12770 (NM_032174.3,1075-1093).
ggagccttcctcaatcact

SEQ ID NO: 263587 - DNA, 19 bp, Homo sapiens
  siRNA target sequence for FLJ12770 (NM_032174.3,1092-1110).
ctggcgcaacagattccat

SEQ ID NO: 263588 - DNA, 19 bp, Homo sapiens
  siRNA target sequence for VDAC1 (NM_003374.1,295-313).
gagtacggcctgacgttta

SEQ ID NO: 263589 - DNA, 19 bp, Homo sapiens
  siRNA target sequence for VDAC1 (NM_003374.1,297-315).
gtacggcctgacgtttaca

SEQ ID NO: 263590 - DNA, 19 bp, Homo sapiens
  siRNA target sequence for VDAC1 (NM_003374.1,476-494).
gctgcgacatggatttcga

SEQ ID NO: 263591 - DNA, 19 bp, Homo sapiens
  siRNA target sequence for VDAC3 (NM_005662.3,232-250).
ggtcatgcttacactgata

SEQ ID NO: 263592 - DNA, 19 bp, Homo sapiens
  siRNA target sequence for VDAC3 (NM_005662.3,259-277).
gcatcaggcaacctagaaa

SEQ ID NO: 263593 - DNA, 19 bp, Homo sapiens
  siRNA target sequence for VDAC3 (NM_005662.3,266-284).
gcaacctagaaaccaaata

SEQ ID NO: 263594 - DNA, 19 bp, Homo sapiens
  siRNA target sequence for VDAC3 (NM_005662.3,267-285).
caacctagaaaccaaatat

SEQ ID NO: 263595 - DNA, 19 bp, Homo sapiens
  siRNA target sequence for VDAC3 (NM_005662.3,373-391).
gctgaagggttgaaactga

SEQ ID NO: 263596 - DNA, 19 bp, Homo sapiens
  siRNA target sequence for VDAC3 (NM_005662.3,390-408).
gactcttgataccatattt

SEQ ID NO: 263597 - DNA, 19 bp, Homo sapiens
  siRNA target sequence for VDAC3 (NM_005662.3,449-467).
cctataaacgggattgttt

SEQ ID NO: 263598 - DNA, 19 bp, Homo sapiens
  siRNA target sequence for VDAC3 (NM_005662.3,470-488).
gtgttggcagtaatgttga

SEQ ID NO: 263599 - DNA, 19 bp, Homo sapiens
  siRNA target sequence for VDAC3 (NM_005662.3,476-494).
gcagtaatgttgatataga

SEQ ID NO: 263600 - DNA, 19 bp, Homo sapiens
  siRNA target sequence for VDAC3 (NM_005662.3,477-495).
cagtaatgttgatatagat

SEQ ID NO: 263601 - DNA, 19 bp, Homo sapiens
  siRNA target sequence for VDAC3 (NM_005662.3,654-672).
cgatggcactgaatttgga

SEQ ID NO: 263602 - DNA, 19 bp, Homo sapiens
  siRNA target sequence for VDAC3 (NM_005662.3,664-682).
gaatttggaggttctatct

SEQ ID NO: 263603 - DNA, 19 bp, Homo sapiens
  siRNA target sequence for VDAC3 (NM_005662.3,758-776).
gcattgctgctaagtacat

SEQ ID NO: 263604 - DNA, 19 bp, Homo sapiens
  siRNA target sequence for VDAC3 (NM_005662.3,796-814).
ctctctgctaaagtaaata

SEQ ID NO: 263605 - DNA, 19 bp, Homo sapiens
  siRNA target sequence for VDAC3 (NM_005662.3,823-841).
ctgattggactgggttata

SEQ ID NO: 263606 - DNA, 19 bp, Homo sapiens
  siRNA target sequence for VDAC3 (NM_005662.3,825-843).
gattggactgggttatact

SEQ ID NO: 263607 - DNA, 19 bp, Homo sapiens
  siRNA target sequence for VDAC3 (NM_005662.3,849-867).
ccttcgaccaggagtcaaa

SEQ ID NO: 263608 - DNA, 19 bp, Homo sapiens
  siRNA target sequence for VDAC3 (NM_005662.3,850-868).
cttcgaccaggagtcaaat

SEQ ID NO: 263609 - DNA, 19 bp, Homo sapiens
  siRNA target sequence for VDAC3 (NM_005662.3,853-871).
cgaccaggagtcaaattga

SEQ ID NO: 263610 - DNA, 19 bp, Homo sapiens
  siRNA target sequence for VDAC3 (NM_005662.3,872-890).
ctttatcagctttaatcga

SEQ ID NO: 263611 - DNA, 19 bp, Homo sapiens
  siRNA target sequence for AQP7 (NM_001170.1,455-473).
gcagctgtgacctttgcta

SEQ ID NO: 263612 - DNA, 19 bp, Homo sapiens
  siRNA target sequence for FXYD6 (NM_022003.1,215-233).
cggttgggatcctccttat

SEQ ID NO: 263613 - DNA, 19 bp, Homo sapiens
  siRNA target sequence for FXYD6 (NM_022003.1,220-238).
gggatcctccttatcctaa

SEQ ID NO: 263614 - DNA, 19 bp, Homo sapiens
  siRNA target sequence for FXYD7 (NM_022006.1,124-142).
gaacctgacccattttact

SEQ ID NO: 263615 - DNA, 19 bp, Homo sapiens
  siRNA target sequence for FXYD7 (NM_022006.1,134-152).
cattttactatgactacaa

SEQ ID NO: 263616 - DNA, 19 bp, Homo sapiens
  siRNA target sequence for FXYD7 (NM_022006.1,259-277).
gagagcccaacctgcaaat

SEQ ID NO: 263617 - DNA, 19 bp, Homo sapiens
  siRNA target sequence for FXYD7 (NM_022006.1,270-288).
ctgcaaatcctgtaagtct

SEQ ID NO: 263618 - DNA, 19 bp, Homo sapiens
  siRNA target sequence for MLC1 (NM_015166.2,419-437).
ccggctgagatggattact

SEQ ID NO: 263619 - DNA, 19 bp, Homo sapiens
  siRNA target sequence for MLC1 (NM_015166.2,420-438).
cggctgagatggattactt

SEQ ID NO: 263620 - DNA, 19 bp, Homo sapiens
  siRNA target sequence for MLC1 (NM_015166.2,459-477).
gcatcccctcggcaattgt

SEQ ID NO: 263621 - DNA, 19 bp, Homo sapiens
  siRNA target sequence for MLC1 (NM_015166.2,511-529).
gattcccaactttcagata

SEQ ID NO: 263622 - DNA, 19 bp, Homo sapiens
  siRNA target sequence for MLC1 (NM_015166.2,551-569).
gtgaccactacgtgtttaa

SEQ ID NO: 263623 - DNA, 19 bp, Homo sapiens
  siRNA target sequence for MLC1 (NM_015166.2,573-591).
ggtttggatgcaaactagt

SEQ ID NO: 263624 - DNA, 19 bp, Homo sapiens
  siRNA target sequence for MLC1 (NM_015166.2,592-610).
cctgaacccatcagcaata

SEQ ID NO: 263625 - DNA, 19 bp, Homo sapiens
  siRNA target sequence for MLC1 (NM_015166.2,593-611).
ctgaacccatcagcaataa

SEQ ID NO: 263626 - DNA, 19 bp, Homo sapiens
  siRNA target sequence for MLC1 (NM_015166.2,724-742).
gtctgacagcgccaacatt

SEQ ID NO: 263627 - DNA, 19 bp, Homo sapiens
  siRNA target sequence for MLC1 (NM_015166.2,745-763).
ggacgaagtgccatttcct

SEQ ID NO: 263628 - DNA, 19 bp, Homo sapiens
  siRNA target sequence for MLC1 (NM_015166.2,761-779).
cctgctcgggtcctgaaat

SEQ ID NO: 263629 - DNA, 19 bp, Homo sapiens
  siRNA target sequence for MLC1 (NM_015166.2,765-783).
ctcgggtcctgaaatctta

SEQ ID NO: 263630 - DNA, 19 bp, Homo sapiens
  siRNA target sequence for MLC1 (NM_015166.2,844-862).
cgtggatgactcagtttca

SEQ ID NO: 263631 - DNA, 19 bp, Homo sapiens
  siRNA target sequence for MLC1 (NM_015166.2,896-914).
ctagtggcctgctttccaa

SEQ ID NO: 263632 - DNA, 19 bp, Homo sapiens
  siRNA target sequence for MLC1 (NM_015166.2,1014-1032).
cctctggatatctgtcatt

SEQ ID NO: 263633 - DNA, 19 bp, Homo sapiens
  siRNA target sequence for MLC1 (NM_015166.2,1029-1047).
cattcagcatcatgagaat

SEQ ID NO: 263634 - DNA, 19 bp, Homo sapiens
  siRNA target sequence for MLC1 (NM_015166.2,1069-1087).
cccgccagccataaaacca

SEQ ID NO: 263635 - DNA, 19 bp, Homo sapiens
  siRNA target sequence for MLC1 (NM_015166.2,1070-1088).
ccgccagccataaaaccat

SEQ ID NO: 263636 - DNA, 19 bp, Homo sapiens
  siRNA target sequence for MLC1 (NM_015166.2,1296-1314).
gagccgtcgtggtgcaaat

SEQ ID NO: 263637 - DNA, 19 bp, Homo sapiens
  siRNA target sequence for TM4SF11 (NM_015993.1,134-152).
cgagttcccgtcgaaagtt

SEQ ID NO: 263638 - DNA, 19 bp, Homo sapiens
  siRNA target sequence for TM4SF11 (NM_015993.1,135-153).
gagttcccgtcgaaagtta

SEQ ID NO: 263639 - DNA, 19 bp, Homo sapiens
  siRNA target sequence for TM4SF11 (NM_015993.1,457-475).
gcgccaccgttctctacat

SEQ ID NO: 263640 - DNA, 19 bp, Homo sapiens
  siRNA target sequence for CX36 (NM_020660.1,256-274).
gtgtgtacccccagtcttt

SEQ ID NO: 263641 - DNA, 19 bp, Homo sapiens
  siRNA target sequence for CX36 (NM_020660.1,313-331).
cgagaacgccgctactcta

SEQ ID NO: 263642 - DNA, 19 bp, Homo sapiens
  siRNA target sequence for CX36 (NM_020660.1,409-427).
gggggcaaacgagaagata

SEQ ID NO: 263643 - DNA, 19 bp, Homo sapiens
  siRNA target sequence for CX36 (NM_020660.1,410-428).
ggggcaaacgagaagataa

SEQ ID NO: 263644 - DNA, 19 bp, Homo sapiens
  siRNA target sequence for CX36 (NM_020660.1,491-509).
cagagccagattgtttaga

SEQ ID NO: 263645 - DNA, 19 bp, Homo sapiens
  siRNA target sequence for CX36 (NM_020660.1,497-515).
cagattgtttagaggttaa

SEQ ID NO: 263646 - DNA, 19 bp, Homo sapiens
  siRNA target sequence for CX36 (NM_020660.1,539-557).
gtctacgcactgcatcaaa

SEQ ID NO: 263647 - DNA, 19 bp, Homo sapiens
  siRNA target sequence for CX36 (NM_020660.1,580-598).
ggcatctcccgcttctaca

SEQ ID NO: 263648 - DNA, 19 bp, Homo sapiens
  siRNA target sequence for CX36 (NM_020660.1,581-599).
gcatctcccgcttctacat

SEQ ID NO: 263649 - DNA, 19 bp, Homo sapiens
  siRNA target sequence for CX36 (NM_020660.1,582-600).
catctcccgcttctacatt

SEQ ID NO: 263650 - DNA, 19 bp, Homo sapiens
  siRNA target sequence for CX36 (NM_020660.1,587-605).
cccgcttctacattatcca

SEQ ID NO: 263651 - DNA, 19 bp, Homo sapiens
  siRNA target sequence for CX36 (NM_020660.1,588-606).
ccgcttctacattatccaa

SEQ ID NO: 263652 - DNA, 19 bp, Homo sapiens
  siRNA target sequence for CX36 (NM_020660.1,615-633).
ccgaaatgccctggaaatt

SEQ ID NO: 263653 - DNA, 19 bp, Homo sapiens
  siRNA target sequence for CX36 (NM_020660.1,636-654).
gttcctggttggccaatat

SEQ ID NO: 263654 - DNA, 19 bp, Homo sapiens
  siRNA target sequence for CX36 (NM_020660.1,671-689).
gtgtcccagggttgtatga

SEQ ID NO: 263655 - DNA, 19 bp, Homo sapiens
  siRNA target sequence for CX36 (NM_020660.1,673-691).
gtcccagggttgtatgagt

SEQ ID NO: 263656 - DNA, 19 bp, Homo sapiens
  siRNA target sequence for CX36 (NM_020660.1,754-772).
gtctttctagtgttcatgt

SEQ ID NO: 263657 - DNA, 19 bp, Homo sapiens
  siRNA target sequence for CX36 (NM_020660.1,823-841).
ctgggatggcgcaagatca

SEQ ID NO: 263658 - DNA, 19 bp, Homo sapiens
  siRNA target sequence for CX36 (NM_020660.1,865-883).
gccaagagaaagtcaatct

SEQ ID NO: 263659 - DNA, 19 bp, Homo sapiens
  siRNA target sequence for CX36 (NM_020660.1,878-896).
caatctatgagattcgtaa

SEQ ID NO: 263660 - DNA, 19 bp, Homo sapiens
  siRNA target sequence for CX36 (NM_020660.1,912-930).
ggtcagtgttcccaatttt

SEQ ID NO: 263661 - DNA, 19 bp, Homo sapiens
  siRNA target sequence for CX40.1 (NM_153368.1,180-198).
gggtttctcatcatcacat

SEQ ID NO: 263662 - DNA, 19 bp, Homo sapiens
  siRNA target sequence for CX40.1 (NM_153368.1,332-350).
gccgggatgcgccaatgtt

SEQ ID NO: 263663 - DNA, 19 bp, Homo sapiens
  siRNA target sequence for CX40.1 (NM_153368.1,333-351).
ccgggatgcgccaatgttt

SEQ ID NO: 263664 - DNA, 19 bp, Homo sapiens
  siRNA target sequence for CX40.1 (NM_153368.1,337-355).
gatgcgccaatgtttgcta

SEQ ID NO: 263665 - DNA, 19 bp, Homo sapiens
  siRNA target sequence for CX40.1 (NM_153368.1,558-576).
ctccaggtgcccgactttt

SEQ ID NO: 263666 - DNA, 19 bp, Homo sapiens
  siRNA target sequence for CX40.1 (NM_153368.1,633-651).
gccttgcactactttctct

SEQ ID NO: 263667 - DNA, 19 bp, Homo sapiens
  siRNA target sequence for CX40.1 (NM_153368.1,634-652).
ccttgcactactttctctt

SEQ ID NO: 263668 - DNA, 19 bp, Homo sapiens
  siRNA target sequence for CX40.1 (NM_153368.1,635-653).
cttgcactactttctcttt

SEQ ID NO: 263669 - DNA, 19 bp, Homo sapiens
  siRNA target sequence for CX40.1 (NM_153368.1,1057-1075).
cctccgccagcgaaaagct

SEQ ID NO: 263670 - DNA, 19 bp, Homo sapiens
  siRNA target sequence for CX62 (NM_032602.1,26-44).
gcatcctagaggaagttca

SEQ ID NO: 263671 - DNA, 19 bp, Homo sapiens
  siRNA target sequence for CX62 (NM_032602.1,202-220).
gatgcattccctatctctt

SEQ ID NO: 263672 - DNA, 19 bp, Homo sapiens
  siRNA target sequence for CX62 (NM_032602.1,227-245).
ggttctgggttttacagat

SEQ ID NO: 263673 - DNA, 19 bp, Homo sapiens
  siRNA target sequence for CX62 (NM_032602.1,351-369).
gatggagaatccagatctt

SEQ ID NO: 263674 - DNA, 19 bp, Homo sapiens
  siRNA target sequence for CX62 (NM_032602.1,379-397).
gagcagcaaagaatagata

SEQ ID NO: 263675 - DNA, 19 bp, Homo sapiens
  siRNA target sequence for CX62 (NM_032602.1,418-436).
gagcagaagaggatccata

SEQ ID NO: 263676 - DNA, 19 bp, Homo sapiens
  siRNA target sequence for CX62 (NM_032602.1,420-438).
gcagaagaggatccataaa

SEQ ID NO: 263677 - DNA, 19 bp, Homo sapiens
  siRNA target sequence for CX62 (NM_032602.1,432-450).
ccataaagtccctctgaaa

SEQ ID NO: 263678 - DNA, 19 bp, Homo sapiens
  siRNA target sequence for CX62 (NM_032602.1,452-470).
gatgtctgctgcgtactta

SEQ ID NO: 263679 - DNA, 19 bp, Homo sapiens
  siRNA target sequence for CX62 (NM_032602.1,455-473).
gtctgctgcgtacttatgt

SEQ ID NO: 263680 - DNA, 19 bp, Homo sapiens
  siRNA target sequence for CX62 (NM_032602.1,463-481).
cgtacttatgtcttacaca

SEQ ID NO: 263681 - DNA, 19 bp, Homo sapiens
  siRNA target sequence for CX62 (NM_032602.1,464-482).
gtacttatgtcttacacat

SEQ ID NO: 263682 - DNA, 19 bp, Homo sapiens
  siRNA target sequence for CX62 (NM_032602.1,501-519).
ggaagtaggattcatgata

SEQ ID NO: 263683 - DNA, 19 bp, Homo sapiens
  siRNA target sequence for CX62 (NM_032602.1,550-568).
caccccctttacaaatgca

SEQ ID NO: 263684 - DNA, 19 bp, Homo sapiens
  siRNA target sequence for CX62 (NM_032602.1,585-603).
caatgcggtggattgcttt

SEQ ID NO: 263685 - DNA, 19 bp, Homo sapiens
  siRNA target sequence for CX62 (NM_032602.1,589-607).
gcggtggattgctttgtat

SEQ ID NO: 263686 - DNA, 19 bp, Homo sapiens
  siRNA target sequence for CX62 (NM_032602.1,673-691).
ctcaatatactggaaatat

SEQ ID NO: 263687 - DNA, 19 bp, Homo sapiens
  siRNA target sequence for CX62 (NM_032602.1,767-785).
gccctccattccatttgaa

SEQ ID NO: 263688 - DNA, 19 bp, Homo sapiens
  siRNA target sequence for CX62 (NM_032602.1,802-820).
cagcagtgtatgatttgct

SEQ ID NO: 263689 - DNA, 19 bp, Homo sapiens
  siRNA target sequence for CX62 (NM_032602.1,821-839).
cttcattgcctgaaagaat

SEQ ID NO: 263690 - DNA, 19 bp, Homo sapiens
  siRNA target sequence for CX62 (NM_032602.1,842-860).
ctccacttcaagctaacaa

SEQ ID NO: 263691 - DNA, 19 bp, Homo sapiens
  siRNA target sequence for CX62 (NM_032602.1,867-885).
gcaagtcattcgagttaat

SEQ ID NO: 263692 - DNA, 19 bp, Homo sapiens
  siRNA target sequence for CX62 (NM_032602.1,880-898).
gttaatgtgccaaagtcta

SEQ ID NO: 263693 - DNA, 19 bp, Homo sapiens
  siRNA target sequence for CX62 (NM_032602.1,1077-1095).
cctgcagaatacaatgtct

SEQ ID NO: 263694 - DNA, 19 bp, Homo sapiens
  siRNA target sequence for CX62 (NM_032602.1,1191-1209).
gcctctcacagatcttcat

SEQ ID NO: 263695 - DNA, 19 bp, Homo sapiens
  siRNA target sequence for CX62 (NM_032602.1,1282-1300).
cgcaaggccagctttctgt

SEQ ID NO: 263696 - DNA, 19 bp, Homo sapiens
  siRNA target sequence for CX62 (NM_032602.1,1417-1435).
gtcactgggcacagaacat

SEQ ID NO: 263697 - DNA, 19 bp, Homo sapiens
  siRNA target sequence for CX62 (NM_032602.1,1421-1439).
ctgggcacagaacatcaat

SEQ ID NO: 263698 - DNA, 19 bp, Homo sapiens
  siRNA target sequence for CX62 (NM_032602.1,1425-1443).
gcacagaacatcaatggta

SEQ ID NO: 263699 - DNA, 19 bp, Homo sapiens
  siRNA target sequence for CX62 (NM_032602.1,1426-1444).
cacagaacatcaatggtaa

SEQ ID NO: 263700 - DNA, 19 bp, Homo sapiens
  siRNA target sequence for CX62 (NM_032602.1,1430-1448).
gaacatcaatggtaagaca

SEQ ID NO: 263701 - DNA, 19 bp, Homo sapiens
  siRNA target sequence for CX62 (NM_032602.1,1456-1474).
ctaccgatcatggaactat

SEQ ID NO: 263702 - DNA, 19 bp, Homo sapiens
  siRNA target sequence for CX62 (NM_032602.1,1567-1585).
gggggagattatttatgga

SEQ ID NO: 263703 - DNA, 19 bp, Homo sapiens
  siRNA target sequence for CX62 (NM_032602.1,1600-1618).
cattcgatacattcagtta

SEQ ID NO: 263704 - DNA, 19 bp, Homo sapiens
  siRNA target sequence for CX62 (NM_032602.1,1604-1622).
cgatacattcagttaaatt

SEQ ID NO: 263705 - DNA, 19 bp, Homo sapiens
  siRNA target sequence for GJA1 (NM_000165.2,349-367).
gagcagtctgcctttcgtt

SEQ ID NO: 263706 - DNA, 19 bp, Homo sapiens
  siRNA target sequence for GJA1 (NM_000165.2,391-409).
gaaaatgtctgctatgaca

SEQ ID NO: 263707 - DNA, 19 bp, Homo sapiens
  siRNA target sequence for GJA1 (NM_000165.2,441-459).
ggtcctgcagatcatattt

SEQ ID NO: 263708 - DNA, 19 bp, Homo sapiens
  siRNA target sequence for GJA1 (NM_000165.2,464-482).
ctgtacccacactcttgta

SEQ ID NO: 263709 - DNA, 19 bp, Homo sapiens
  siRNA target sequence for GJA1 (NM_000165.2,488-506).
ctcatgtgttctatgtgat

SEQ ID NO: 263710 - DNA, 19 bp, Homo sapiens
  siRNA target sequence for GJA1 (NM_000165.2,498-516).
ctatgtgatgcgaaaggaa

SEQ ID NO: 263711 - DNA, 19 bp, Homo sapiens
  siRNA target sequence for GJA1 (NM_000165.2,546-564).
caaggttgcccaaactgat

SEQ ID NO: 263712 - DNA, 19 bp, Homo sapiens
  siRNA target sequence for GJA1 (NM_000165.2,583-601).
cacttgaagcagattgaga

SEQ ID NO: 263713 - DNA, 19 bp, Homo sapiens
  siRNA target sequence for GJA1 (NM_000165.2,585-603).
cttgaagcagattgagata

SEQ ID NO: 263714 - DNA, 19 bp, Homo sapiens
  siRNA target sequence for GJA1 (NM_000165.2,609-627).
gttcaagtacggtattgaa

SEQ ID NO: 263715 - DNA, 19 bp, Homo sapiens
  siRNA target sequence for GJA1 (NM_000165.2,661-679).
ctgcgaacctacatcatca

SEQ ID NO: 263716 - DNA, 19 bp, Homo sapiens
  siRNA target sequence for GJA1 (NM_000165.2,680-698).
gtatcctcttcaagtctat

SEQ ID NO: 263717 - DNA, 19 bp, Homo sapiens
  siRNA target sequence for GJA1 (NM_000165.2,718-736).
ctgatccagtggtacatct

SEQ ID NO: 263718 - DNA, 19 bp, Homo sapiens
  siRNA target sequence for GJA1 (NM_000165.2,724-742).
cagtggtacatctatggat

SEQ ID NO: 263719 - DNA, 19 bp, Homo sapiens
  siRNA target sequence for GJA1 (NM_000165.2,861-879).
ggtgtccctggccttgaat

SEQ ID NO: 263720 - DNA, 19 bp, Homo sapiens
  siRNA target sequence for GJA1 (NM_000165.2,882-900).
cattgaactcttctatgtt

SEQ ID NO: 263721 - DNA, 19 bp, Homo sapiens
  siRNA target sequence for GJA1 (NM_000165.2,903-921).
cttcaagggcgttaaggat

SEQ ID NO: 263722 - DNA, 19 bp, Homo sapiens
  siRNA target sequence for GJA1 (NM_000165.2,982-1000).
gactgtgggtctcaaaaat

SEQ ID NO: 263723 - DNA, 19 bp, Homo sapiens
  siRNA target sequence for GJA1 (NM_000165.2,989-1007).
ggtctcaaaaatatgctta

SEQ ID NO: 263724 - DNA, 19 bp, Homo sapiens
  siRNA target sequence for GJA1 (NM_000165.2,1072-1090).
gttactggcgacagaaaca

SEQ ID NO: 263725 - DNA, 19 bp, Homo sapiens
  siRNA target sequence for GJA1 (NM_000165.2,1078-1096).
ggcgacagaaacaattctt

SEQ ID NO: 263726 - DNA, 19 bp, Homo sapiens
  siRNA target sequence for GJA1 (NM_000165.2,1080-1098).
cgacagaaacaattcttct

SEQ ID NO: 263727 - DNA, 19 bp, Homo sapiens
  siRNA target sequence for GJA1 (NM_000165.2,1094-1112).
cttcttgccgcaattacaa

SEQ ID NO: 263728 - DNA, 19 bp, Homo sapiens
  siRNA target sequence for GJA1 (NM_000165.2,1097-1115).
cttgccgcaattacaacaa

SEQ ID NO: 263729 - DNA, 19 bp, Homo sapiens
  siRNA target sequence for GJA1 (NM_000165.2,1129-1147).
caaaactgggctaattaca

SEQ ID NO: 263730 - DNA, 19 bp, Homo sapiens
  siRNA target sequence for GJA1 (NM_000165.2,1148-1166).
gtgcagaacaaaatcgaat

SEQ ID NO: 263731 - DNA, 19 bp, Homo sapiens
  siRNA target sequence for GJA1 (NM_000165.2,1174-1192).
gcgggaagcaccatctcta

SEQ ID NO: 263732 - DNA, 19 bp, Homo sapiens
  siRNA target sequence for GJA1 (NM_000165.2,1177-1195).
ggaagcaccatctctaact

SEQ ID NO: 263733 - DNA, 19 bp, Homo sapiens
  siRNA target sequence for GJA1 (NM_000165.2,1196-1214).
cccatgcacagccttttga

SEQ ID NO: 263734 - DNA, 19 bp, Homo sapiens
  siRNA target sequence for GJA1 (NM_000165.2,1219-1237).
cccgatgataaccagaatt

SEQ ID NO: 263735 - DNA, 19 bp, Homo sapiens
  siRNA target sequence for GJA12 (NM_020435.1,167-185).
gagcaggccaagttcactt

SEQ ID NO: 263736 - DNA, 19 bp, Homo sapiens
  siRNA target sequence for GJA4 (NM_002060.1,117-135).
cgaccgtggtgggtaagat

SEQ ID NO: 263737 - DNA, 19 bp, Homo sapiens
  siRNA target sequence for GJA5 (NM_005266.4,268-286).
gctgatttccggtgtgata

SEQ ID NO: 263738 - DNA, 19 bp, Homo sapiens
  siRNA target sequence for GJA5 (NM_005266.4,380-398).
cgccctctctggtgtacat

SEQ ID NO: 263739 - DNA, 19 bp, Homo sapiens
  siRNA target sequence for GJA5 (NM_005266.4,606-624).
catggaggtgggcttcatt

SEQ ID NO: 263740 - DNA, 19 bp, Homo sapiens
  siRNA target sequence for GJA5 (NM_005266.4,691-709).
ccccacccggtcaactgtt

SEQ ID NO: 263741 - DNA, 19 bp, Homo sapiens
  siRNA target sequence for GJA5 (NM_005266.4,692-710).
cccacccggtcaactgtta

SEQ ID NO: 263742 - DNA, 19 bp, Homo sapiens
  siRNA target sequence for GJA5 (NM_005266.4,696-714).
cccggtcaactgttacgta

SEQ ID NO: 263743 - DNA, 19 bp, Homo sapiens
  siRNA target sequence for GJA5 (NM_005266.4,697-715).
ccggtcaactgttacgtat

SEQ ID NO: 263744 - DNA, 19 bp, Homo sapiens
  siRNA target sequence for GJA5 (NM_005266.4,960-978).
caatcccttcagcaataat

SEQ ID NO: 263745 - DNA, 19 bp, Homo sapiens
  siRNA target sequence for GJA5 (NM_005266.4,981-999).
ggcctcccaacaaaacaca

SEQ ID NO: 263746 - DNA, 19 bp, Homo sapiens
  siRNA target sequence for GJA5 (NM_005266.4,1052-1070).
gtttcatccaggttcgtta

SEQ ID NO: 263747 - DNA, 19 bp, Homo sapiens
  siRNA target sequence for GJA5 (NM_005266.4,1116-1134).
ccttccccatggctatcat

SEQ ID NO: 263748 - DNA, 19 bp, Homo sapiens
  siRNA target sequence for GJA5 (NM_005266.4,1117-1135).
cttccccatggctatcata

SEQ ID NO: 263749 - DNA, 19 bp, Homo sapiens
  siRNA target sequence for GJA5 (NM_005266.4,1121-1139).
cccatggctatcatagtga

SEQ ID NO: 263750 - DNA, 19 bp, Homo sapiens
  siRNA target sequence for GJA5 (NM_005266.4,1138-1156).
gacaagcgacgtcttagta

SEQ ID NO: 263751 - DNA, 19 bp, Homo sapiens
  siRNA target sequence for GJA5 (NM_005266.4,1175-1193).
ggtcagatgacctatcagt

SEQ ID NO: 263752 - DNA, 19 bp, Homo sapiens
  siRNA target sequence for GJA7 (NM_005497.1,71-89).
ggctcactgttctgattgt

SEQ ID NO: 263753 - DNA, 19 bp, Homo sapiens
  siRNA target sequence for GJA7 (NM_005497.1,135-153).
cgatgagcaaagcaaattt

SEQ ID NO: 263754 - DNA, 19 bp, Homo sapiens
  siRNA target sequence for GJA7 (NM_005497.1,139-157).
gagcaaagcaaatttgtgt

SEQ ID NO: 263755 - DNA, 19 bp, Homo sapiens
  siRNA target sequence for GJA7 (NM_005497.1,254-272).
caactccctctgtgatgta

SEQ ID NO: 263756 - DNA, 19 bp, Homo sapiens
  siRNA target sequence for GJA7 (NM_005497.1,278-296).
gctatgctatccacaagat

SEQ ID NO: 263757 - DNA, 19 bp, Homo sapiens
  siRNA target sequence for GJA7 (NM_005497.1,279-297).
ctatgctatccacaagatt

SEQ ID NO: 263758 - DNA, 19 bp, Homo sapiens
  siRNA target sequence for GJA7 (NM_005497.1,603-621).
ccaagtccacccgttttat

SEQ ID NO: 263759 - DNA, 19 bp, Homo sapiens
  siRNA target sequence for GJA7 (NM_005497.1,646-664).
cataagatagactgcttta

SEQ ID NO: 263760 - DNA, 19 bp, Homo sapiens
  siRNA target sequence for GJA7 (NM_005497.1,699-717).
gataatgtatggtgttaca

SEQ ID NO: 263761 - DNA, 19 bp, Homo sapiens
  siRNA target sequence for GJA7 (NM_005497.1,718-736).
ggcctttgcctcttgctta

SEQ ID NO: 263762 - DNA, 19 bp, Homo sapiens
  siRNA target sequence for GJA7 (NM_005497.1,719-737).
gcctttgcctcttgcttaa

SEQ ID NO: 263763 - DNA, 19 bp, Homo sapiens
  siRNA target sequence for GJA7 (NM_005497.1,721-739).
ctttgcctcttgcttaaca

SEQ ID NO: 263764 - DNA, 19 bp, Homo sapiens
  siRNA target sequence for GJA7 (NM_005497.1,770-788).
ccattcgagactcactaaa

SEQ ID NO: 263765 - DNA, 19 bp, Homo sapiens
  siRNA target sequence for GJA7 (NM_005497.1,808-826).
gaggatccgggtgcttata

SEQ ID NO: 263766 - DNA, 19 bp, Homo sapiens
  siRNA target sequence for GJA7 (NM_005497.1,810-828).
ggatccgggtgcttataat

SEQ ID NO: 263767 - DNA, 19 bp, Homo sapiens
  siRNA target sequence for GJA7 (NM_005497.1,811-829).
gatccgggtgcttataatt

SEQ ID NO: 263768 - DNA, 19 bp, Homo sapiens
  siRNA target sequence for GJA7 (NM_005497.1,817-835).
ggtgcttataattatcctt

SEQ ID NO: 263769 - DNA, 19 bp, Homo sapiens
  siRNA target sequence for GJA7 (NM_005497.1,856-874).
gctccccctggctataaca

SEQ ID NO: 263770 - DNA, 19 bp, Homo sapiens
  siRNA target sequence for GJA7 (NM_005497.1,877-895).
gctgtcaaaccagatcaaa

SEQ ID NO: 263771 - DNA, 19 bp, Homo sapiens
  siRNA target sequence for GJA7 (NM_005497.1,878-896).
ctgtcaaaccagatcaaat

SEQ ID NO: 263772 - DNA, 19 bp, Homo sapiens
  siRNA target sequence for GJA7 (NM_005497.1,905-923).
ccgaactgtccaatgctaa

SEQ ID NO: 263773 - DNA, 19 bp, Homo sapiens
  siRNA target sequence for GJA7 (NM_005497.1,1143-1161).
cactgccagtagcaaatca

SEQ ID NO: 263774 - DNA, 19 bp, Homo sapiens
  siRNA target sequence for GJB1 (NM_000166.2,160-178).
ggcgtgaaccggcattcta

SEQ ID NO: 263775 - DNA, 19 bp, Homo sapiens
  siRNA target sequence for GJB1 (NM_000166.2,162-180).
cgtgaaccggcattctact

SEQ ID NO: 263776 - DNA, 19 bp, Homo sapiens
  siRNA target sequence for GJB1 (NM_000166.2,197-215).
ggctctcggtcatcttcat

SEQ ID NO: 263777 - DNA, 19 bp, Homo sapiens
  siRNA target sequence for GJB1 (NM_000166.2,199-217).
ctctcggtcatcttcatct

SEQ ID NO: 263778 - DNA, 19 bp, Homo sapiens
  siRNA target sequence for GJB1 (NM_000166.2,251-269).
gtgtgtggggtgatgagaa

SEQ ID NO: 263779 - DNA, 19 bp, Homo sapiens
  siRNA target sequence for GJB1 (NM_000166.2,265-283).
gagaaatcttccttcatct

SEQ ID NO: 263780 - DNA, 19 bp, Homo sapiens
  siRNA target sequence for GJB1 (NM_000166.2,303-321).
ctgcaacagcgtttgctat

SEQ ID NO: 263781 - DNA, 19 bp, Homo sapiens
  siRNA target sequence for GJB1 (NM_000166.2,311-329).
gcgtttgctatgaccaatt

SEQ ID NO: 263782 - DNA, 19 bp, Homo sapiens
  siRNA target sequence for GJB1 (NM_000166.2,313-331).
gtttgctatgaccaattct

SEQ ID NO: 263783 - DNA, 19 bp, Homo sapiens
  siRNA target sequence for GJB1 (NM_000166.2,361-379).
ctgcagctcatcctagttt

SEQ ID NO: 263784 - DNA, 19 bp, Homo sapiens
  siRNA target sequence for GJB1 (NM_000166.2,517-535).
ctgtggtggacctatgtca

SEQ ID NO: 263785 - DNA, 19 bp, Homo sapiens
  siRNA target sequence for GJB1 (NM_000166.2,567-585).
cgtcttcatgtatgtcttt

SEQ ID NO: 263786 - DNA, 19 bp, Homo sapiens
  siRNA target sequence for GJB1 (NM_000166.2,839-857).
gcctctcacctgaatacaa

SEQ ID NO: 263787 - DNA, 19 bp, Homo sapiens
  siRNA target sequence for GJB1 (NM_000166.2,896-914).
gctccctgaaagacatact

SEQ ID NO: 263788 - DNA, 19 bp, Homo sapiens
  siRNA target sequence for GJB2 (NM_004004.2,337-355).
gagcaggccgactttgtct

SEQ ID NO: 263789 - DNA, 19 bp, Homo sapiens
  siRNA target sequence for GJB2 (NM_004004.2,519-537).
caagggggagataaagagt

SEQ ID NO: 263790 - DNA, 19 bp, Homo sapiens
  siRNA target sequence for GJB2 (NM_004004.2,524-542).
gggagataaagagtgaatt

SEQ ID NO: 263791 - DNA, 19 bp, Homo sapiens
  siRNA target sequence for GJB2 (NM_004004.2,817-835).
gtcactgaattgtgttatt

SEQ ID NO: 263792 - DNA, 19 bp, Homo sapiens
  siRNA target sequence for GJB2 (NM_004004.2,830-848).
gttatttgctaattagata

SEQ ID NO: 263793 - DNA, 19 bp, Homo sapiens
  siRNA target sequence for GJB2 (NM_004004.2,851-869).
gttctgggaagtcaaaaaa

SEQ ID NO: 263794 - DNA, 19 bp, Homo sapiens
  siRNA target sequence for GJB4 (NM_153212.1,386-404).
gcaagcaccacctgaaaca

SEQ ID NO: 263795 - DNA, 19 bp, Homo sapiens
  siRNA target sequence for GJB4 (NM_153212.1,502-520).
gatgctggcttcctctata

SEQ ID NO: 263796 - DNA, 19 bp, Homo sapiens
  siRNA target sequence for GJB4 (NM_153212.1,505-523).
gctggcttcctctatatct

SEQ ID NO: 263797 - DNA, 19 bp, Homo sapiens
  siRNA target sequence for GJB4 (NM_153212.1,530-548).
gcctctacaaggattatga

SEQ ID NO: 263798 - DNA, 19 bp, Homo sapiens
  siRNA target sequence for GJB4 (NM_153212.1,532-550).
ctctacaaggattatgaca

SEQ ID NO: 263799 - DNA, 19 bp, Homo sapiens
  siRNA target sequence for GJB4 (NM_153212.1,589-607).
cacactgtggactgttaca

SEQ ID NO: 263800 - DNA, 19 bp, Homo sapiens
  siRNA target sequence for GJB4 (NM_153212.1,771-789).
cgatacgtgcccaccatat

SEQ ID NO: 263801 - DNA, 19 bp, Homo sapiens
  siRNA target sequence for GJB4 (NM_153212.1,820-838).
gggaactctgtcctaatga

SEQ ID NO: 263802 - DNA, 19 bp, Homo sapiens
  siRNA target sequence for GJB4 (NM_153212.1,821-839).
ggaactctgtcctaatgaa

SEQ ID NO: 263803 - DNA, 19 bp, Homo sapiens
  siRNA target sequence for GJB4 (NM_153212.1,859-877).
gatgcaggtgggtatccat

SEQ ID NO: 263804 - DNA, 19 bp, Homo sapiens
  siRNA target sequence for GJB5 (NM_005268.2,247-265).
ggacttcgactgcaatact

SEQ ID NO: 263805 - DNA, 19 bp, Homo sapiens
  siRNA target sequence for GJB5 (NM_005268.2,280-298).
ctccaacgtctgctttgat

SEQ ID NO: 263806 - DNA, 19 bp, Homo sapiens
  siRNA target sequence for GJB5 (NM_005268.2,477-495).
ggctctggtggacatatgt

SEQ ID NO: 263807 - DNA, 19 bp, Homo sapiens
  siRNA target sequence for GJB5 (NM_005268.2,550-568).
ctcattctaccccaaatat

SEQ ID NO: 263808 - DNA, 19 bp, Homo sapiens
  siRNA target sequence for GJB5 (NM_005268.2,597-615).
cagatccatgtcccaatat

SEQ ID NO: 263809 - DNA, 19 bp, Homo sapiens
  siRNA target sequence for GJB5 (NM_005268.2,745-763).
gtgcctggcagcaaggaaa

SEQ ID NO: 263810 - DNA, 19 bp, Homo sapiens
  siRNA target sequence for GJB5 (NM_005268.2,891-909).
cccgagaccatgtgaagaa

SEQ ID NO: 263811 - DNA, 19 bp, Homo sapiens
  siRNA target sequence for GJE1 (NM_181538.1,256-274).
gtacccagcgccctctata

SEQ ID NO: 263812 - DNA, 19 bp, Homo sapiens
  siRNA target sequence for GJE1 (NM_181538.1,517-535).
ccttgccttggtagtataa

SEQ ID NO: 263813 - DNA, 19 bp, Homo sapiens
  siRNA target sequence for GJE1 (NM_181538.1,596-614).
gcggtttctgtctcttgtt

SEQ ID NO: 263814 - DNA, 19 bp, Homo sapiens
  siRNA target sequence for GJE1 (NM_181538.1,597-615).
cggtttctgtctcttgttt

SEQ ID NO: 263815 - DNA, 19 bp, Homo sapiens
  siRNA target sequence for AQP2 (NM_000486.3,254-272).
caggctctgggccacataa

SEQ ID NO: 263816 - DNA, 19 bp, Homo sapiens
  siRNA target sequence for AQP2 (NM_000486.3,664-682).
cgtcactggcaaatttgat

SEQ ID NO: 263817 - DNA, 19 bp, Homo sapiens
  siRNA target sequence for AQP4 (NM_001650.3,158-176).
cagtcacagcggaatttct

SEQ ID NO: 263818 - DNA, 19 bp, Homo sapiens
  siRNA target sequence for AQP4 (NM_001650.3,248-266).
cggtcgacatggttctcat

SEQ ID NO: 263819 - DNA, 19 bp, Homo sapiens
  siRNA target sequence for AQP4 (NM_001650.3,304-322).
cagtgctttggccatatca

SEQ ID NO: 263820 - DNA, 19 bp, Homo sapiens
  siRNA target sequence for AQP4 (NM_001650.3,434-452).
gagcaggaatcctctatct

SEQ ID NO: 263821 - DNA, 19 bp, Homo sapiens
  siRNA target sequence for AQP4 (NM_001650.3,529-547).
ctggttgagttgataatca

SEQ ID NO: 263822 - DNA, 19 bp, Homo sapiens
  siRNA target sequence for AQP4 (NM_001650.3,531-549).
ggttgagttgataatcaca

SEQ ID NO: 263823 - DNA, 19 bp, Homo sapiens
  siRNA target sequence for AQP4 (NM_001650.3,532-550).
gttgagttgataatcacat

SEQ ID NO: 263824 - DNA, 19 bp, Homo sapiens
  siRNA target sequence for AQP4 (NM_001650.3,601-619).
gtcactggctcaatagctt

SEQ ID NO: 263825 - DNA, 19 bp, Homo sapiens
  siRNA target sequence for AQP4 (NM_001650.3,603-621).
cactggctcaatagcttta

SEQ ID NO: 263826 - DNA, 19 bp, Homo sapiens
  siRNA target sequence for AQP4 (NM_001650.3,607-625).
ggctcaatagctttagcaa

SEQ ID NO: 263827 - DNA, 19 bp, Homo sapiens
  siRNA target sequence for AQP4 (NM_001650.3,637-655).
gttgcaattggacatttat

SEQ ID NO: 263828 - DNA, 19 bp, Homo sapiens
  siRNA target sequence for AQP4 (NM_001650.3,728-746).
gggaaaaccattggatata

SEQ ID NO: 263829 - DNA, 19 bp, Homo sapiens
  siRNA target sequence for AQP4 (NM_001650.3,729-747).
ggaaaaccattggatatat

SEQ ID NO: 263830 - DNA, 19 bp, Homo sapiens
  siRNA target sequence for AQP4 (NM_001650.3,778-796).
gctggtggcctttatgagt

SEQ ID NO: 263831 - DNA, 19 bp, Homo sapiens
  siRNA target sequence for AQP4 (NM_001650.3,779-797).
ctggtggcctttatgagta

SEQ ID NO: 263832 - DNA, 19 bp, Homo sapiens
  siRNA target sequence for AQP4 (NM_001650.3,782-800).
gtggcctttatgagtatgt

SEQ ID NO: 263833 - DNA, 19 bp, Homo sapiens
  siRNA target sequence for AQP4 (NM_001650.3,784-802).
ggcctttatgagtatgtct

SEQ ID NO: 263834 - DNA, 19 bp, Homo sapiens
  siRNA target sequence for AQP4 (NM_001650.3,785-803).
gcctttatgagtatgtctt

SEQ ID NO: 263835 - DNA, 19 bp, Homo sapiens
  siRNA target sequence for AQP4 (NM_001650.3,806-824).
gtccagatgttgaattcaa

SEQ ID NO: 263836 - DNA, 19 bp, Homo sapiens
  siRNA target sequence for AQP4 (NM_001650.3,822-840).
caaacgtcgttttaaagaa

SEQ ID NO: 263837 - DNA, 19 bp, Homo sapiens
  siRNA target sequence for AQP4 (NM_001650.3,912-930).
gacggatgacctgattcta

SEQ ID NO: 263838 - DNA, 19 bp, Homo sapiens
  siRNA target sequence for AQP4 (NM_001650.3,914-932).
cggatgacctgattctaaa

SEQ ID NO: 263839 - DNA, 19 bp, Homo sapiens
  siRNA target sequence for AQP4 (NM_001650.3,935-953).
ctggagtggtgcatgtgat

SEQ ID NO: 263840 - DNA, 19 bp, Homo sapiens
  siRNA target sequence for AQP4 (NM_001650.3,938-956).
gagtggtgcatgtgattga

SEQ ID NO: 263841 - DNA, 19 bp, Homo sapiens
  siRNA target sequence for AQP4 (NM_001650.3,991-1009).
caatctggagaggtattgt

SEQ ID NO: 263842 - DNA, 19 bp, Homo sapiens
  siRNA target sequence for AQP5 (NM_001651.1,1033-1051).
gccaccttgtcggaatcta

SEQ ID NO: 263843 - DNA, 19 bp, Homo sapiens
  siRNA target sequence for AQP5 (NM_001651.1,1035-1053).
caccttgtcggaatctact

SEQ ID NO: 263844 - DNA, 19 bp, Homo sapiens
  siRNA target sequence for AQP5 (NM_001651.1,1038-1056).
cttgtcggaatctacttca

SEQ ID NO: 263845 - DNA, 19 bp, Homo sapiens
  siRNA target sequence for AQP5 (NM_001651.1,1220-1238).
gcgtgtggccatcatcaaa

SEQ ID NO: 263846 - DNA, 19 bp, Homo sapiens
  siRNA target sequence for AQP6 (NM_001652.2,383-401).
ggcgtgcaggctttggaaa

SEQ ID NO: 263847 - DNA, 19 bp, Homo sapiens
  siRNA target sequence for AQP6 (NM_001652.2,436-454).
ccacggggctgtatgtgtt

SEQ ID NO: 263848 - DNA, 19 bp, Homo sapiens
  siRNA target sequence for AQP6 (NM_001652.2,677-695).
gggggctgctctgctttat

SEQ ID NO: 263849 - DNA, 19 bp, Homo sapiens
  siRNA target sequence for AQP6 (NM_001652.2,1014-1032).
ctggcctcactgatctaca

SEQ ID NO: 263850 - DNA, 19 bp, Homo sapiens
  siRNA target sequence for AQP6 (NM_001652.2,1017-1035).
gcctcactgatctacaact

SEQ ID NO: 263851 - DNA, 19 bp, Homo sapiens
  siRNA target sequence for AQP6 (NM_053286.1,2439-2457).
ccgactgttcccaagttct

SEQ ID NO: 263852 - DNA, 19 bp, Homo sapiens
  siRNA target sequence for AQP8 (NM_001169.1,113-131).
ctgaatttggcaatgacaa

SEQ ID NO: 263853 - DNA, 19 bp, Homo sapiens
  siRNA target sequence for AQP8 (NM_001169.1,215-233).
gctctgctctcttcatctt

SEQ ID NO: 263854 - DNA, 19 bp, Homo sapiens
  siRNA target sequence for AQP8 (NM_001169.1,239-257).
ggtgcctgtcggtcattga

SEQ ID NO: 263855 - DNA, 19 bp, Homo sapiens
  siRNA target sequence for AQP8 (NM_001169.1,242-260).
gcctgtcggtcattgagaa

SEQ ID NO: 263856 - DNA, 19 bp, Homo sapiens
  siRNA target sequence for AQP8 (NM_001169.1,487-505).
gagaggttctggaatgcat

SEQ ID NO: 263857 - DNA, 19 bp, Homo sapiens
  siRNA target sequence for AQP8 (NM_001169.1,696-714).
gtctggaggctgcatgaat

SEQ ID NO: 263858 - DNA, 19 bp, Homo sapiens
  siRNA target sequence for AQP8 (NM_001169.1,802-820).
cttgttggactgctcatta

SEQ ID NO: 263859 - DNA, 19 bp, Homo sapiens
  siRNA target sequence for AQP8 (NM_001169.1,805-823).
gttggactgctcattaggt

SEQ ID NO: 263860 - DNA, 19 bp, Homo sapiens
  siRNA target sequence for AQP8 (NM_001169.1,813-831).
gctcattaggtgcttcatt

SEQ ID NO: 263861 - DNA, 19 bp, Homo sapiens
  siRNA target sequence for AQP9 (NM_020980.2,343-361).
gagcagcttagcgaaagaa

SEQ ID NO: 263862 - DNA, 19 bp, Homo sapiens
  siRNA target sequence for AQP9 (NM_020980.2,379-397).
gggcacgttcatcttgatt

SEQ ID NO: 263863 - DNA, 19 bp, Homo sapiens
  siRNA target sequence for AQP9 (NM_020980.2,381-399).
gcacgttcatcttgattgt

SEQ ID NO: 263864 - DNA, 19 bp, Homo sapiens
  siRNA target sequence for AQP9 (NM_020980.2,450-468).
gaggggtcatcactatcaa

SEQ ID NO: 263865 - DNA, 19 bp, Homo sapiens
  siRNA target sequence for AQP9 (NM_020980.2,453-471).
gggtcatcactatcaatgt

SEQ ID NO: 263866 - DNA, 19 bp, Homo sapiens
  siRNA target sequence for AQP9 (NM_020980.2,454-472).
ggtcatcactatcaatgtt

SEQ ID NO: 263867 - DNA, 19 bp, Homo sapiens
  siRNA target sequence for AQP9 (NM_020980.2,563-581).
ctctttggacggatgaaat

SEQ ID NO: 263868 - DNA, 19 bp, Homo sapiens
  siRNA target sequence for AQP9 (NM_020980.2,639-657).
caaccgtctttggcattta

SEQ ID NO: 263869 - DNA, 19 bp, Homo sapiens
  siRNA target sequence for AQP9 (NM_020980.2,642-660).
ccgtctttggcatttacta

SEQ ID NO: 263870 - DNA, 19 bp, Homo sapiens
  siRNA target sequence for AQP9 (NM_020980.2,694-712).
gctgatcgtgggagaaaat

SEQ ID NO: 263871 - DNA, 19 bp, Homo sapiens
  siRNA target sequence for AQP9 (NM_020980.2,697-715).
gatcgtgggagaaaatgca

SEQ ID NO: 263872 - DNA, 19 bp, Homo sapiens
  siRNA target sequence for AQP9 (NM_020980.2,792-810).
ccatgatactcctcataat

SEQ ID NO: 263873 - DNA, 19 bp, Homo sapiens
  siRNA target sequence for AQP9 (NM_020980.2,869-887).
gccatcggcctcctgatta

SEQ ID NO: 263874 - DNA, 19 bp, Homo sapiens
  siRNA target sequence for AQP9 (NM_020980.2,871-889).
catcggcctcctgattatt

SEQ ID NO: 263875 - DNA, 19 bp, Homo sapiens
  siRNA target sequence for AQP9 (NM_020980.2,876-894).
gcctcctgattattgtcat

SEQ ID NO: 263876 - DNA, 19 bp, Homo sapiens
  siRNA target sequence for AQP9 (NM_020980.2,944-962).
gacctgagtcccagacttt

SEQ ID NO: 263877 - DNA, 19 bp, Homo sapiens
  siRNA target sequence for AQP9 (NM_020980.2,1054-1072).
cattggaggcctcatctat

SEQ ID NO: 263878 - DNA, 19 bp, Homo sapiens
  siRNA target sequence for AQP9 (NM_020980.2,1066-1084).
catctatgttcttgtcatt

SEQ ID NO: 263879 - DNA, 19 bp, Homo sapiens
  siRNA target sequence for SLC14A1 (NM_015865.1,209-227).
ctatggttaggggtgaaaa

SEQ ID NO: 263880 - DNA, 19 bp, Homo sapiens
  siRNA target sequence for SLC14A1 (NM_015865.1,228-246).
ccaggtttcgccatgtcaa

SEQ ID NO: 263881 - DNA, 19 bp, Homo sapiens
  siRNA target sequence for SLC14A1 (NM_015865.1,284-302).
ccggtgacatgaaagaact

SEQ ID NO: 263882 - DNA, 19 bp, Homo sapiens
  siRNA target sequence for SLC14A1 (NM_015865.1,304-322).
gccaaccagcttaaagaca

SEQ ID NO: 263883 - DNA, 19 bp, Homo sapiens
  siRNA target sequence for SLC14A1 (NM_015865.1,578-596).
cggacaagggagactattt

SEQ ID NO: 263884 - DNA, 19 bp, Homo sapiens
  siRNA target sequence for SLC14A1 (NM_015865.1,603-621).
gctgttactccctgtatgt

SEQ ID NO: 263885 - DNA, 19 bp, Homo sapiens
  siRNA target sequence for SLC14A1 (NM_015865.1,715-733).
gcgttgtcaatgtaccttt

SEQ ID NO: 263886 - DNA, 19 bp, Homo sapiens
  siRNA target sequence for SLC14A1 (NM_015865.1,772-790).
ctggtcatacctataacta

SEQ ID NO: 263887 - DNA, 19 bp, Homo sapiens
  siRNA target sequence for SLC14A1 (NM_015865.1,774-792).
ggtcatacctataactaca

SEQ ID NO: 263888 - DNA, 19 bp, Homo sapiens
  siRNA target sequence for SLC14A1 (NM_015865.1,821-839).
gtgccctggagttgttgaa

SEQ ID NO: 263889 - DNA, 19 bp, Homo sapiens
  siRNA target sequence for SLC14A1 (NM_015865.1,823-841).
gccctggagttgttgaaat

SEQ ID NO: 263890 - DNA, 19 bp, Homo sapiens
  siRNA target sequence for SLC14A1 (NM_015865.1,828-846).
ggagttgttgaaatctata

SEQ ID NO: 263891 - DNA, 19 bp, Homo sapiens
  siRNA target sequence for SLC14A1 (NM_015865.1,831-849).
gttgttgaaatctatacca

SEQ ID NO: 263892 - DNA, 19 bp, Homo sapiens
  siRNA target sequence for SLC14A1 (NM_015865.1,852-870).
gggagttggtcagatctat

SEQ ID NO: 263893 - DNA, 19 bp, Homo sapiens
  siRNA target sequence for SLC14A1 (NM_015865.1,867-885).
ctatggctgtgataatcca

SEQ ID NO: 263894 - DNA, 19 bp, Homo sapiens
  siRNA target sequence for SLC14A1 (NM_015865.1,986-1004).
gtctttcagccccatttga

SEQ ID NO: 263895 - DNA, 19 bp, Homo sapiens
  siRNA target sequence for SLC14A1 (NM_015865.1,1040-1058).
ctctggcctgcattgcaat

SEQ ID NO: 263896 - DNA, 19 bp, Homo sapiens
  siRNA target sequence for SLC14A1 (NM_015865.1,1055-1073).
caatgggaggaatgttcat

SEQ ID NO: 263897 - DNA, 19 bp, Homo sapiens
  siRNA target sequence for SLC14A1 (NM_015865.1,1116-1134).
cctgttcacggcctatctt

SEQ ID NO: 263898 - DNA, 19 bp, Homo sapiens
  siRNA target sequence for SLC14A1 (NM_015865.1,1136-1154).
gagtcggcatggcaaactt

SEQ ID NO: 263899 - DNA, 19 bp, Homo sapiens
  siRNA target sequence for SLC14A1 (NM_015865.1,1138-1156).
gtcggcatggcaaacttta

SEQ ID NO: 263900 - DNA, 19 bp, Homo sapiens
  siRNA target sequence for SLC14A1 (NM_015865.1,1205-1223).
cgctattgttcctcatcat

SEQ ID NO: 263901 - DNA, 19 bp, Homo sapiens
  siRNA target sequence for SLC14A1 (NM_015865.1,1207-1225).
ctattgttcctcatcatga

SEQ ID NO: 263902 - DNA, 19 bp, Homo sapiens
  siRNA target sequence for SLC14A1 (NM_015865.1,1279-1297).
gaagaaaaccgcatcttct

SEQ ID NO: 263903 - DNA, 19 bp, Homo sapiens
  siRNA target sequence for AQP1 (NM_000385.3,334-352).
cgtgccctcatgtacatca

SEQ ID NO: 263904 - DNA, 19 bp, Homo sapiens
  siRNA target sequence for AQP1 (NM_000385.3,335-353).
gtgccctcatgtacatcat

SEQ ID NO: 263905 - DNA, 19 bp, Homo sapiens
  siRNA target sequence for AQP1 (NM_000385.3,470-488).
gcctgggcatcgagatcat

SEQ ID NO: 263906 - DNA, 19 bp, Homo sapiens
  siRNA target sequence for AQP1 (NM_000385.3,656-674).
cggtgatcacacacaactt

SEQ ID NO: 263907 - DNA, 19 bp, Homo sapiens
  siRNA target sequence for AQP1 (NM_000385.3,719-737).
ccctggctgtactcatcta

SEQ ID NO: 263908 - DNA, 19 bp, Homo sapiens
  siRNA target sequence for AQP1 (NM_000385.3,823-841).
gatgccgacgacatcaact

SEQ ID NO: 263909 - DNA, 19 bp, Homo sapiens
  siRNA target sequence for AQP10 (NM_080429.2,225-243).
gctctctggccgttacgat

SEQ ID NO: 263910 - DNA, 19 bp, Homo sapiens
  siRNA target sequence for AQP10 (NM_080429.2,226-244).
ctctctggccgttacgata

SEQ ID NO: 263911 - DNA, 19 bp, Homo sapiens
  siRNA target sequence for AQP10 (NM_080429.2,330-348).
gggtcaagctccccattta

SEQ ID NO: 263912 - DNA, 19 bp, Homo sapiens
  siRNA target sequence for AQP10 (NM_080429.2,332-350).
gtcaagctccccatttaca

SEQ ID NO: 263913 - DNA, 19 bp, Homo sapiens
  siRNA target sequence for AQP10 (NM_080429.2,384-402).
cgggagccacctatgttct

SEQ ID NO: 263914 - DNA, 19 bp, Homo sapiens
  siRNA target sequence for AQP10 (NM_080429.2,387-405).
gagccacctatgttctcta

SEQ ID NO: 263915 - DNA, 19 bp, Homo sapiens
  siRNA target sequence for AQP10 (NM_080429.2,635-653).
ctggccctcgggttatcca

SEQ ID NO: 263916 - DNA, 19 bp, Homo sapiens
  siRNA target sequence for AQP10 (NM_080429.2,921-939).
ctcagatgctggagtgtaa

SEQ ID NO: 263917 - DNA, 19 bp, Homo sapiens
  siRNA target sequence for AQP10 (NM_080429.2,925-943).
gatgctggagtgtaagcta

SEQ ID NO: 263918 - DNA, 19 bp, Homo sapiens
  siRNA target sequence for FLJ20130 (NM_017681.1,265-283).
gaaccaaaaccaactgtta

SEQ ID NO: 263919 - DNA, 19 bp, Homo sapiens
  siRNA target sequence for FLJ20130 (NM_017681.1,301-319).
ccttgtaccttatacttca

SEQ ID NO: 263920 - DNA, 19 bp, Homo sapiens
  siRNA target sequence for FLJ20130 (NM_017681.1,302-320).
cttgtaccttatacttcaa

SEQ ID NO: 263921 - DNA, 19 bp, Homo sapiens
  siRNA target sequence for FLJ20130 (NM_017681.1,308-326).
ccttatacttcaactgtta

SEQ ID NO: 263922 - DNA, 19 bp, Homo sapiens
  siRNA target sequence for FLJ20130 (NM_017681.1,335-353).
gcaactcctgtgatgacat

SEQ ID NO: 263923 - DNA, 19 bp, Homo sapiens
  siRNA target sequence for FLJ20130 (NM_017681.1,336-354).
caactcctgtgatgacata

SEQ ID NO: 263924 - DNA, 19 bp, Homo sapiens
  siRNA target sequence for FLJ20130 (NM_017681.1,357-375).
gtcatctggagggtcttat

SEQ ID NO: 263925 - DNA, 19 bp, Homo sapiens
  siRNA target sequence for FLJ20130 (NM_017681.1,359-377).
catctggagggtcttataa

SEQ ID NO: 263926 - DNA, 19 bp, Homo sapiens
  siRNA target sequence for FLJ20130 (NM_017681.1,388-406).
ccttgagctggaagatcaa

SEQ ID NO: 263927 - DNA, 19 bp, Homo sapiens
  siRNA target sequence for FLJ20130 (NM_017681.1,428-446).
gccactcaggtcaatgctt

SEQ ID NO: 263928 - DNA, 19 bp, Homo sapiens
  siRNA target sequence for FLJ20130 (NM_017681.1,443-461).
gcttgggaccatacattga

SEQ ID NO: 263929 - DNA, 19 bp, Homo sapiens
  siRNA target sequence for FLJ20130 (NM_017681.1,444-462).
cttgggaccatacattgat

SEQ ID NO: 263930 - DNA, 19 bp, Homo sapiens
  siRNA target sequence for FLJ20130 (NM_017681.1,447-465).
gggaccatacattgattga

SEQ ID NO: 263931 - DNA, 19 bp, Homo sapiens
  siRNA target sequence for FLJ20130 (NM_017681.1,451-469).
ccatacattgattgagaat

SEQ ID NO: 263932 - DNA, 19 bp, Homo sapiens
  siRNA target sequence for FLJ20130 (NM_017681.1,572-590).
ctagaatttctgttgactt

SEQ ID NO: 263933 - DNA, 19 bp, Homo sapiens
  siRNA target sequence for FLJ20130 (NM_017681.1,666-684).
ccaccagatctgcagaatt

SEQ ID NO: 263934 - DNA, 19 bp, Homo sapiens
  siRNA target sequence for LOC129401 (NM_138285.2,257-275).
gcccttcagtaggagtaat

SEQ ID NO: 263935 - DNA, 19 bp, Homo sapiens
  siRNA target sequence for LOC129401 (NM_138285.2,349-367).
ggcgctccaccagttagaa

SEQ ID NO: 263936 - DNA, 19 bp, Homo sapiens
  siRNA target sequence for LOC129401 (NM_138285.2,353-371).
ctccaccagttagaagtat

SEQ ID NO: 263937 - DNA, 19 bp, Homo sapiens
  siRNA target sequence for LOC129401 (NM_138285.2,355-373).
ccaccagttagaagtatat

SEQ ID NO: 263938 - DNA, 19 bp, Homo sapiens
  siRNA target sequence for LOC129401 (NM_138285.2,356-374).
caccagttagaagtatata

SEQ ID NO: 263939 - DNA, 19 bp, Homo sapiens
  siRNA target sequence for LOC129401 (NM_138285.2,400-418).
ggatcaacacctttaactt

SEQ ID NO: 263940 - DNA, 19 bp, Homo sapiens
  siRNA target sequence for LOC129401 (NM_138285.2,425-443).
gacagccaaacatttcagt

SEQ ID NO: 263941 - DNA, 19 bp, Homo sapiens
  siRNA target sequence for LOC129401 (NM_138285.2,457-475).
cttgttggagttacatcta

SEQ ID NO: 263942 - DNA, 19 bp, Homo sapiens
  siRNA target sequence for LOC129401 (NM_138285.2,481-499).
ggaacagggcaaagtatgt

SEQ ID NO: 263943 - DNA, 19 bp, Homo sapiens
  siRNA target sequence for LOC129401 (NM_138285.2,482-500).
gaacagggcaaagtatgtt

SEQ ID NO: 263944 - DNA, 19 bp, Homo sapiens
  siRNA target sequence for LOC129401 (NM_138285.2,522-540).
gccacgaaagacgacatta

SEQ ID NO: 263945 - DNA, 19 bp, Homo sapiens
  siRNA target sequence for LOC129401 (NM_138285.2,523-541).
ccacgaaagacgacattat

SEQ ID NO: 263946 - DNA, 19 bp, Homo sapiens
  siRNA target sequence for LOC129401 (NM_138285.2,607-625).
gactcttgggtgactgtat

SEQ ID NO: 263947 - DNA, 19 bp, Homo sapiens
  siRNA target sequence for LOC129401 (NM_138285.2,641-659).
catctgcttcctacatatt

SEQ ID NO: 263948 - DNA, 19 bp, Homo sapiens
  siRNA target sequence for LOC129401 (NM_138285.2,644-662).
ctgcttcctacatattact

SEQ ID NO: 263949 - DNA, 19 bp, Homo sapiens
  siRNA target sequence for LOC129401 (NM_138285.2,650-668).
cctacatattactacaatt

SEQ ID NO: 263950 - DNA, 19 bp, Homo sapiens
  siRNA target sequence for LOC129401 (NM_138285.2,651-669).
ctacatattactacaattt

SEQ ID NO: 263951 - DNA, 19 bp, Homo sapiens
  siRNA target sequence for LOC129401 (NM_138285.2,654-672).
catattactacaatttgca

SEQ ID NO: 263952 - DNA, 19 bp, Homo sapiens
  siRNA target sequence for LOC129401 (NM_138285.2,671-689).
cacagtatgggaatatctt

SEQ ID NO: 263953 - DNA, 19 bp, Homo sapiens
  siRNA target sequence for LOC129401 (NM_138285.2,673-691).
cagtatgggaatatcttaa

SEQ ID NO: 263954 - DNA, 19 bp, Homo sapiens
  siRNA target sequence for LOC129401 (NM_138285.2,675-693).
gtatgggaatatcttaaaa

SEQ ID NO: 263955 - DNA, 19 bp, Homo sapiens
  siRNA target sequence for LOC129401 (NM_138285.2,704-722).
ctaatacaggaaattggat

SEQ ID NO: 263956 - DNA, 19 bp, Homo sapiens
  siRNA target sequence for LOC129401 (NM_138285.2,719-737).
ggatgcatattcgttatca

SEQ ID NO: 263957 - DNA, 19 bp, Homo sapiens
  siRNA target sequence for LOC129401 (NM_138285.2,720-738).
gatgcatattcgttatcaa

SEQ ID NO: 263958 - DNA, 19 bp, Homo sapiens
  siRNA target sequence for LOC129401 (NM_138285.2,723-741).
gcatattcgttatcaatct

SEQ ID NO: 263959 - DNA, 19 bp, Homo sapiens
  siRNA target sequence for LOC129401 (NM_138285.2,724-742).
catattcgttatcaatcta

SEQ ID NO: 263960 - DNA, 19 bp, Homo sapiens
  siRNA target sequence for LOC129401 (NM_138285.2,808-826).
gtaaaaccatgtattgaca

SEQ ID NO: 263961 - DNA, 19 bp, Homo sapiens
  siRNA target sequence for LOC129401 (NM_138285.2,847-865).
gacagatgtgctttatcat

SEQ ID NO: 263962 - DNA, 19 bp, Homo sapiens
  siRNA target sequence for LOC129401 (NM_138285.2,878-896).
cctttacaccaccaatcaa

SEQ ID NO: 263963 - DNA, 19 bp, Homo sapiens
  siRNA target sequence for LOC129401 (NM_138285.2,879-897).
ctttacaccaccaatcaaa

SEQ ID NO: 263964 - DNA, 19 bp, Homo sapiens
  siRNA target sequence for LOC129401 (NM_138285.2,922-940).
ggaagtactcctaggattt

SEQ ID NO: 263965 - DNA, 19 bp, Homo sapiens
  siRNA target sequence for LOC129401 (NM_138285.2,953-971).
ctcttgctacagcatacaa

SEQ ID NO: 263966 - DNA, 19 bp, Homo sapiens
  siRNA target sequence for LOC129401 (NM_138285.2,964-982).
gcatacaaagcctctacta

SEQ ID NO: 263967 - DNA, 19 bp, Homo sapiens
  siRNA target sequence for LOC129401 (NM_138285.2,969-987).
caaagcctctactagtgat

SEQ ID NO: 263968 - DNA, 19 bp, Homo sapiens
  siRNA target sequence for LOC129401 (NM_138285.2,974-992).
cctctactagtgattatca

SEQ ID NO: 263969 - DNA, 19 bp, Homo sapiens
  siRNA target sequence for LOC129401 (NM_138285.2,980-998).
ctagtgattatcaggttat

SEQ ID NO: 263970 - DNA, 19 bp, Homo sapiens
  siRNA target sequence for NUP214 (NM_005085.2,163-181).
cagtttagagcgctaaaga

SEQ ID NO: 263971 - DNA, 19 bp, Homo sapiens
  siRNA target sequence for NUP214 (NM_005085.2,277-295).
gccagtggcttgcagattt

SEQ ID NO: 263972 - DNA, 19 bp, Homo sapiens
  siRNA target sequence for NUP214 (NM_005085.2,283-301).
ggcttgcagatttttccta

SEQ ID NO: 263973 - DNA, 19 bp, Homo sapiens
  siRNA target sequence for NUP214 (NM_005085.2,288-306).
gcagatttttcctactaaa

SEQ ID NO: 263974 - DNA, 19 bp, Homo sapiens
  siRNA target sequence for NUP214 (NM_005085.2,298-316).
cctactaaaaatcttctta

SEQ ID NO: 263975 - DNA, 19 bp, Homo sapiens
  siRNA target sequence for NUP214 (NM_005085.2,331-349).
ggagatgatcccaacaaaa

SEQ ID NO: 263976 - DNA, 19 bp, Homo sapiens
  siRNA target sequence for NUP214 (NM_005085.2,332-350).
gagatgatcccaacaaaat

SEQ ID NO: 263977 - DNA, 19 bp, Homo sapiens
  siRNA target sequence for NUP214 (NM_005085.2,341-359).
ccaacaaaatagttgataa

SEQ ID NO: 263978 - DNA, 19 bp, Homo sapiens
  siRNA target sequence for NUP214 (NM_005085.2,369-387).
cttgctagttcctatgaaa

SEQ ID NO: 263979 - DNA, 19 bp, Homo sapiens
  siRNA target sequence for NUP214 (NM_005085.2,407-425).
ccttgagctgtgataacct

SEQ ID NO: 263980 - DNA, 19 bp, Homo sapiens
  siRNA target sequence for NUP214 (NM_005085.2,440-458).
gcatgatgtccagtgaata

SEQ ID NO: 263981 - DNA, 19 bp, Homo sapiens
  siRNA target sequence for NUP214 (NM_005085.2,441-459).
catgatgtccagtgaatat

SEQ ID NO: 263982 - DNA, 19 bp, Homo sapiens
  siRNA target sequence for NUP214 (NM_005085.2,444-462).
gatgtccagtgaatatggt

SEQ ID NO: 263983 - DNA, 19 bp, Homo sapiens
  siRNA target sequence for NUP214 (NM_005085.2,452-470).
gtgaatatggttccattat

SEQ ID NO: 263984 - DNA, 19 bp, Homo sapiens
  siRNA target sequence for NUP214 (NM_005085.2,481-499).
gatgttcgcacattctcaa

SEQ ID NO: 263985 - DNA, 19 bp, Homo sapiens
  siRNA target sequence for NUP214 (NM_005085.2,614-632).
gtctggctgatggtagtat

SEQ ID NO: 263986 - DNA, 19 bp, Homo sapiens
  siRNA target sequence for NUP214 (NM_005085.2,618-636).
ggctgatggtagtattgct

SEQ ID NO: 263987 - DNA, 19 bp, Homo sapiens
  siRNA target sequence for NUP214 (NM_005085.2,660-678).
gaaagtatgtgcaactctt

SEQ ID NO: 263988 - DNA, 19 bp, Homo sapiens
  siRNA target sequence for NUP214 (NM_005085.2,800-818).
cttgtcctccgttttatga

SEQ ID NO: 263989 - DNA, 19 bp, Homo sapiens
  siRNA target sequence for NUP214 (NM_005085.2,810-828).
gttttatgagtcagatcat

SEQ ID NO: 263990 - DNA, 19 bp, Homo sapiens
  siRNA target sequence for NUP214 (NM_005085.2,867-885).
cgtcttcgccatagtgtat

SEQ ID NO: 263991 - DNA, 19 bp, Homo sapiens
  siRNA target sequence for NUP214 (NM_005085.2,930-948).
ggctctactaccgaaaaaa

SEQ ID NO: 263992 - DNA, 19 bp, Homo sapiens
  siRNA target sequence for NUP214 (NM_005085.2,932-950).
ctctactaccgaaaaaaga

SEQ ID NO: 263993 - DNA, 19 bp, Homo sapiens
  siRNA target sequence for NUP214 (NM_005085.2,958-976).
cacccagagatatttgtga

SEQ ID NO: 263994 - DNA, 19 bp, Homo sapiens
  siRNA target sequence for NUP214 (NM_005085.2,978-996).
ctttatggagccctgttat

SEQ ID NO: 263995 - DNA, 19 bp, Homo sapiens
  siRNA target sequence for NUP214 (NM_005085.2,1007-1025).
cggagagacagcatcatta

SEQ ID NO: 263996 - DNA, 19 bp, Homo sapiens
  siRNA target sequence for NUP214 (NM_005085.2,1009-1027).
gagagacagcatcattact

SEQ ID NO: 263997 - DNA, 19 bp, Homo sapiens
  siRNA target sequence for NUP214 (NM_005085.2,1072-1090).
gcggcttcaacagaagtta

SEQ ID NO: 263998 - DNA, 19 bp, Homo sapiens
  siRNA target sequence for NUP214 (NM_005085.2,1095-1113).
ccttgctcgacaaagtgat

SEQ ID NO: 263999 - DNA, 19 bp, Homo sapiens
  siRNA target sequence for NUP214 (NM_005085.2,1100-1118).
ctcgacaaagtgatcagat

SEQ ID NO: 264000 - DNA, 19 bp, Homo sapiens
  siRNA target sequence for NUP214 (NM_005085.2,1102-1120).
cgacaaagtgatcagatta

SEQ ID NO: 264001 - DNA, 19 bp, Homo sapiens
  siRNA target sequence for NUP214 (NM_005085.2,1134-1152).
gctactggaggattctagt

SEQ ID NO: 264002 - DNA, 19 bp, Homo sapiens
  siRNA target sequence for NUP214 (NM_005085.2,1200-1218).
gggagttgtcgtagactat

SEQ ID NO: 264003 - DNA, 19 bp, Homo sapiens
  siRNA target sequence for NUP214 (NM_005085.2,1201-1219).
ggagttgtcgtagactata

SEQ ID NO: 264004 - DNA, 19 bp, Homo sapiens
  siRNA target sequence for NUP214 (NM_005085.2,1204-1222).
gttgtcgtagactatacaa

SEQ ID NO: 264005 - DNA, 19 bp, Homo sapiens
  siRNA target sequence for NUP214 (NM_005085.2,1270-1288).
ccagttctcatgttacttt

SEQ ID NO: 264006 - DNA, 19 bp, Homo sapiens
  siRNA target sequence for NUP214 (NM_005085.2,1337-1355).
gggttaagtctctcatcaa

SEQ ID NO: 264007 - DNA, 19 bp, Homo sapiens
  siRNA target sequence for NUP214 (NM_005085.2,1358-1376).
caccagagcgactttcatt

SEQ ID NO: 264008 - DNA, 19 bp, Homo sapiens
  siRNA target sequence for NUP214 (NM_005085.2,1361-1379).
cagagcgactttcattaga

SEQ ID NO: 264009 - DNA, 19 bp, Homo sapiens
  siRNA target sequence for NUP214 (NM_005085.2,1598-1616).
ctggggagcccccttcata

SEQ ID NO: 264010 - DNA, 19 bp, Homo sapiens
  siRNA target sequence for NUP214 (NM_005085.2,1600-1618).
ggggagcccccttcatatt

SEQ ID NO: 264011 - DNA, 19 bp, Homo sapiens
  siRNA target sequence for NUP214 (NM_005085.2,1603-1621).
gagcccccttcatattcca

SEQ ID NO: 264012 - DNA, 19 bp, Homo sapiens
  siRNA target sequence for NUP214 (NM_005085.2,1811-1829).
ctccaaatatagcaatgaa

SEQ ID NO: 264013 - DNA, 19 bp, Homo sapiens
  siRNA target sequence for NUP214 (NM_005085.2,1845-1863).
ctcaacctctgctgtcaaa

SEQ ID NO: 264014 - DNA, 19 bp, Homo sapiens
  siRNA target sequence for NUP214 (NM_005085.2,1860-1878).
caaagtcaaccttagtgaa

SEQ ID NO: 264015 - DNA, 19 bp, Homo sapiens
  siRNA target sequence for NUP214 (NM_005085.2,1864-1882).
gtcaaccttagtgaaaagt

SEQ ID NO: 264016 - DNA, 19 bp, Homo sapiens
  siRNA target sequence for NUP214 (NM_005085.2,2012-2030).
ctagttccgtgccattgaa

SEQ ID NO: 264017 - DNA, 19 bp, Homo sapiens
  siRNA target sequence for NUP214 (NM_005085.2,2089-2107).
ccctcaatggtacagaaat

SEQ ID NO: 264018 - DNA, 19 bp, Homo sapiens
  siRNA target sequence for NUP214 (NM_005085.2,2325-2343).
gatgctgcgaacagaatca

SEQ ID NO: 264019 - DNA, 19 bp, Homo sapiens
  siRNA target sequence for NUP214 (NM_005085.2,2338-2356).
gaatcagatgacttgcata

SEQ ID NO: 264020 - DNA, 19 bp, Homo sapiens
  siRNA target sequence for NUP214 (NM_005085.2,2342-2360).
cagatgacttgcatacctt

SEQ ID NO: 264021 - DNA, 19 bp, Homo sapiens
  siRNA target sequence for NUP214 (NM_005085.2,2388-2406).
gtcgcttcatggagatata

SEQ ID NO: 264022 - DNA, 19 bp, Homo sapiens
  siRNA target sequence for NUP214 (NM_005085.2,2489-2507).
gttatctgcatttgcttta

SEQ ID NO: 264023 - DNA, 19 bp, Homo sapiens
  siRNA target sequence for NUP214 (NM_005085.2,2557-2575).
cgccttcatcagtatgtga

SEQ ID NO: 264024 - DNA, 19 bp, Homo sapiens
  siRNA target sequence for NUP214 (NM_005085.2,2668-2686).
gagcgagagacactgttta

SEQ ID NO: 264025 - DNA, 19 bp, Homo sapiens
  siRNA target sequence for NUP214 (NM_005085.2,2671-2689).
cgagagacactgtttaaca

SEQ ID NO: 264026 - DNA, 19 bp, Homo sapiens
  siRNA target sequence for NUP214 (NM_005085.2,2695-2713).
gccaacaatcgggaaatca

SEQ ID NO: 264027 - DNA, 19 bp, Homo sapiens
  siRNA target sequence for NUP214 (NM_005085.2,2696-2714).
ccaacaatcgggaaatcat

SEQ ID NO: 264028 - DNA, 19 bp, Homo sapiens
  siRNA target sequence for NUP214 (NM_005085.2,2760-2778).
gcagctccgcctttacaaa

SEQ ID NO: 264029 - DNA, 19 bp, Homo sapiens
  siRNA target sequence for NUP214 (NM_005085.2,2764-2782).
ctccgcctttacaaacaga

SEQ ID NO: 264030 - DNA, 19 bp, Homo sapiens
  siRNA target sequence for NUP214 (NM_005085.2,2859-2877).
gtgcaatgctttgttgaaa

SEQ ID NO: 264031 - DNA, 19 bp, Homo sapiens
  siRNA target sequence for NUP214 (NM_005085.2,2871-2889).
gttgaaaaccaccatagaa

SEQ ID NO: 264032 - DNA, 19 bp, Homo sapiens
  siRNA target sequence for NUP214 (NM_005085.2,3087-3105).
gtctctggagagtgaagat

SEQ ID NO: 264033 - DNA, 19 bp, Homo sapiens
  siRNA target sequence for NUP214 (NM_005085.2,3110-3128).
ggacgtcctgtaaagatga

SEQ ID NO: 264034 - DNA, 19 bp, Homo sapiens
  siRNA target sequence for NUP214 (NM_005085.2,3423-3441).
ggcaccagctgtaaacact

SEQ ID NO: 264035 - DNA, 19 bp, Homo sapiens
  siRNA target sequence for NUP214 (NM_005085.2,3424-3442).
gcaccagctgtaaacactt

SEQ ID NO: 264036 - DNA, 19 bp, Homo sapiens
  siRNA target sequence for NUP214 (NM_005085.2,3427-3445).
ccagctgtaaacactttga

SEQ ID NO: 264037 - DNA, 19 bp, Homo sapiens
  siRNA target sequence for NUP214 (NM_005085.2,3446-3464).
ctgaatcaacgttgaagaa

SEQ ID NO: 264038 - DNA, 19 bp, Homo sapiens
  siRNA target sequence for NUP214 (NM_005085.2,3478-3496).
gtaaatgtgcaggaattga

SEQ ID NO: 264039 - DNA, 19 bp, Homo sapiens
  siRNA target sequence for NUP214 (NM_005085.2,3599-3617).
ccaagcaggggtctctaat

SEQ ID NO: 264040 - DNA, 19 bp, Homo sapiens
  siRNA target sequence for NUP214 (NM_005085.2,3600-3618).
caagcaggggtctctaata

SEQ ID NO: 264041 - DNA, 19 bp, Homo sapiens
  siRNA target sequence for NUP214 (NM_005085.2,3603-3621).
gcaggggtctctaataaat

SEQ ID NO: 264042 - DNA, 19 bp, Homo sapiens
  siRNA target sequence for NUP214 (NM_005085.2,3604-3622).
caggggtctctaataaatt

SEQ ID NO: 264043 - DNA, 19 bp, Homo sapiens
  siRNA target sequence for NUP214 (NM_005085.2,3646-3664).
ccagcatccggtcagttat

SEQ ID NO: 264044 - DNA, 19 bp, Homo sapiens
  siRNA target sequence for NUP214 (NM_005085.2,3649-3667).
gcatccggtcagttatcat

SEQ ID NO: 264045 - DNA, 19 bp, Homo sapiens
  siRNA target sequence for NUP214 (NM_005085.2,3861-3879).
ccagccggacgcattctca

SEQ ID NO: 264046 - DNA, 19 bp, Homo sapiens
  siRNA target sequence for NUP214 (NM_005085.2,3862-3880).
cagccggacgcattctcat

SEQ ID NO: 264047 - DNA, 19 bp, Homo sapiens
  siRNA target sequence for NUP214 (NM_005085.2,3887-3905).
ggggaagcaaaccttctta

SEQ ID NO: 264048 - DNA, 19 bp, Homo sapiens
  siRNA target sequence for NUP214 (NM_005085.2,3888-3906).
gggaagcaaaccttcttat

SEQ ID NO: 264049 - DNA, 19 bp, Homo sapiens
  siRNA target sequence for NUP214 (NM_005085.2,3890-3908).
gaagcaaaccttcttatga

SEQ ID NO: 264050 - DNA, 19 bp, Homo sapiens
  siRNA target sequence for NUP214 (NM_005085.2,4695-4713).
ggctcctccgcaaacttct

SEQ ID NO: 264051 - DNA, 19 bp, Homo sapiens
  siRNA target sequence for NUP214 (NM_005085.2,4765-4783).
ggcactgcagcatctagta

SEQ ID NO: 264052 - DNA, 19 bp, Homo sapiens
  siRNA target sequence for NUP214 (NM_005085.2,4927-4945).
cctgtggccgtcgaaacat

SEQ ID NO: 264053 - DNA, 19 bp, Homo sapiens
  siRNA target sequence for NUP214 (NM_005085.2,4930-4948).
gtggccgtcgaaacatcaa

SEQ ID NO: 264054 - DNA, 19 bp, Homo sapiens
  siRNA target sequence for NUP214 (NM_005085.2,4932-4950).
ggccgtcgaaacatcaagt

SEQ ID NO: 264055 - DNA, 19 bp, Homo sapiens
  siRNA target sequence for NUP214 (NM_005085.2,4933-4951).
gccgtcgaaacatcaagta

SEQ ID NO: 264056 - DNA, 19 bp, Homo sapiens
  siRNA target sequence for NUP214 (NM_005085.2,4965-4983).
cagcaccacgtccattgtt

SEQ ID NO: 264057 - DNA, 19 bp, Homo sapiens
  siRNA target sequence for NUP214 (NM_005085.2,5232-5250).
gtttagcagcccagctttt

SEQ ID NO: 264058 - DNA, 19 bp, Homo sapiens
  siRNA target sequence for NUP214 (NM_005085.2,5289-5307).
cgggcaggcctcagtcttt

SEQ ID NO: 264059 - DNA, 19 bp, Homo sapiens
  siRNA target sequence for NUP214 (NM_005085.2,5409-5427).
caccagtggaagtgtcttt

SEQ ID NO: 264060 - DNA, 19 bp, Homo sapiens
  siRNA target sequence for NUP214 (NM_005085.2,5498-5516).
ggctgtttggccaaagcaa

SEQ ID NO: 264061 - DNA, 19 bp, Homo sapiens
  siRNA target sequence for NUP214 (NM_005085.2,5630-5648).
caggttttgggtctagtaa

SEQ ID NO: 264062 - DNA, 19 bp, Homo sapiens
  siRNA target sequence for NUP214 (NM_005085.2,5678-5696).
gtactggtggaatagtctt

SEQ ID NO: 264063 - DNA, 19 bp, Homo sapiens
  siRNA target sequence for NUP214 (NM_005085.2,5856-5874).
ctcaaatacctctaaccta

SEQ ID NO: 264064 - DNA, 19 bp, Homo sapiens
  siRNA target sequence for NUP214 (NM_005085.2,5864-5882).
cctctaacctatttggaaa

SEQ ID NO: 264065 - DNA, 19 bp, Homo sapiens
  siRNA target sequence for NUP214 (NM_005085.2,5883-5901).
cagtggggccaagacattt

SEQ ID NO: 264066 - DNA, 19 bp, Homo sapiens
  siRNA target sequence for NUP214 (NM_005085.2,6021-6039).
cggtgctgctccagtgttt

SEQ ID NO: 264067 - DNA, 19 bp, Homo sapiens
  siRNA target sequence for NUP214 (NM_005085.2,6219-6237).
cacgctcgcgagtcagaat

SEQ ID NO: 264068 - DNA, 19 bp, Homo sapiens
  siRNA target sequence for NUP214 (NM_005085.2,6294-6312).
cggattctctggttttgga

SEQ ID NO: 264069 - DNA, 19 bp, Homo sapiens
  siRNA target sequence for NUP50 (NM_007172.2,524-542).
ctgaagaggtgggaacatt

SEQ ID NO: 264070 - DNA, 19 bp, Homo sapiens
  siRNA target sequence for NUP50 (NM_007172.2,551-569).
ccagtgaggaagtcttgaa

SEQ ID NO: 264071 - DNA, 19 bp, Homo sapiens
  siRNA target sequence for NUP50 (NM_007172.2,558-576).
ggaagtcttgaagaataga

SEQ ID NO: 264072 - DNA, 19 bp, Homo sapiens
  siRNA target sequence for NUP50 (NM_007172.2,585-603).
gaaagcaaagcgcagaaat

SEQ ID NO: 264073 - DNA, 19 bp, Homo sapiens
  siRNA target sequence for NUP50 (NM_007172.2,594-612).
gcgcagaaatgttggattt

SEQ ID NO: 264074 - DNA, 19 bp, Homo sapiens
  siRNA target sequence for NUP50 (NM_007172.2,676-694).
cgcttttctggatttggta

SEQ ID NO: 264075 - DNA, 19 bp, Homo sapiens
  siRNA target sequence for NUP50 (NM_007172.2,718-736).
gaaggactgtcgaatggaa

SEQ ID NO: 264076 - DNA, 19 bp, Homo sapiens
  siRNA target sequence for NUP50 (NM_007172.2,724-742).
ctgtcgaatggaaacaaca

SEQ ID NO: 264077 - DNA, 19 bp, Homo sapiens
  siRNA target sequence for NUP50 (NM_007172.2,792-810).
ggtagcctttggttctctt

SEQ ID NO: 264078 - DNA, 19 bp, Homo sapiens
  siRNA target sequence for NUP50 (NM_007172.2,831-849).
cttggttgataaagtttca

SEQ ID NO: 264079 - DNA, 19 bp, Homo sapiens
  siRNA target sequence for NUP50 (NM_007172.2,834-852).
ggttgataaagtttcaaat

SEQ ID NO: 264080 - DNA, 19 bp, Homo sapiens
  siRNA target sequence for NUP50 (NM_007172.2,844-862).
gtttcaaatcccaaaacta

SEQ ID NO: 264081 - DNA, 19 bp, Homo sapiens
  siRNA target sequence for NUP50 (NM_007172.2,895-913).
cttgcttccagtaaagctt

SEQ ID NO: 264082 - DNA, 19 bp, Homo sapiens
  siRNA target sequence for NUP50 (NM_007172.2,916-934).
gtcggaaatgcctatcaca

SEQ ID NO: 264083 - DNA, 19 bp, Homo sapiens
  siRNA target sequence for NUP50 (NM_007172.2,957-975).
ctccgtgcgggattggata

SEQ ID NO: 264084 - DNA, 19 bp, Homo sapiens
  siRNA target sequence for NUP50 (NM_007172.2,961-979).
gtgcgggattggatagtga

SEQ ID NO: 264085 - DNA, 19 bp, Homo sapiens
  siRNA target sequence for NUP50 (NM_007172.2,1006-1024).
gatctgacacctatcttta

SEQ ID NO: 264086 - DNA, 19 bp, Homo sapiens
  siRNA target sequence for NUP50 (NM_007172.2,1071-1089).
cagtggcaggaattctgaa

SEQ ID NO: 264087 - DNA, 19 bp, Homo sapiens
  siRNA target sequence for NUP50 (NM_007172.2,1130-1148).
ccctttttggctcaacaaa

SEQ ID NO: 264088 - DNA, 19 bp, Homo sapiens
  siRNA target sequence for NUP50 (NM_007172.2,1161-1179).
gtcaacgtttttgtttcat

SEQ ID NO: 264089 - DNA, 19 bp, Homo sapiens
  siRNA target sequence for NUP50 (NM_007172.2,1173-1191).
gtttcatggcaacaaaact

SEQ ID NO: 264090 - DNA, 19 bp, Homo sapiens
  siRNA target sequence for NUP50 (NM_007172.2,1258-1276).
gcgacaagtgcctcattta

SEQ ID NO: 264091 - DNA, 19 bp, Homo sapiens
  siRNA target sequence for NUP50 (NM_007172.2,1259-1277).
cgacaagtgcctcatttaa

SEQ ID NO: 264092 - DNA, 19 bp, Homo sapiens
  siRNA target sequence for NUP50 (NM_007172.2,1262-1280).
caagtgcctcatttaattt

SEQ ID NO: 264093 - DNA, 19 bp, Homo sapiens
  siRNA target sequence for NUP50 (NM_007172.2,1303-1321).
gttttgggctcattaagct

SEQ ID NO: 264094 - DNA, 19 bp, Homo sapiens
  siRNA target sequence for NUP50 (NM_007172.2,1327-1345).
cccctgactggattttctt

SEQ ID NO: 264095 - DNA, 19 bp, Homo sapiens
  siRNA target sequence for NUP54 (NM_017426.2,291-309).
ggtactcagaacaaaggtt

SEQ ID NO: 264096 - DNA, 19 bp, Homo sapiens
  siRNA target sequence for NUP54 (NM_017426.2,332-350).
cacaacaacgggaactagt

SEQ ID NO: 264097 - DNA, 19 bp, Homo sapiens
  siRNA target sequence for NUP54 (NM_017426.2,341-359).
gggaactagtactggttta

SEQ ID NO: 264098 - DNA, 19 bp, Homo sapiens
  siRNA target sequence for NUP54 (NM_017426.2,467-485).
gtccaaccagctgataaat

SEQ ID NO: 264099 - DNA, 19 bp, Homo sapiens
  siRNA target sequence for NUP54 (NM_017426.2,470-488).
caaccagctgataaatact

SEQ ID NO: 264100 - DNA, 19 bp, Homo sapiens
  siRNA target sequence for NUP54 (NM_017426.2,586-604).
ggtatttcaacaataatat

SEQ ID NO: 264101 - DNA, 19 bp, Homo sapiens
  siRNA target sequence for NUP54 (NM_017426.2,664-682).
gttgcatgcccagtaataa

SEQ ID NO: 264102 - DNA, 19 bp, Homo sapiens
  siRNA target sequence for NUP54 (NM_017426.2,696-714).
ctagtggttttagttttca

SEQ ID NO: 264103 - DNA, 19 bp, Homo sapiens
  siRNA target sequence for NUP54 (NM_017426.2,736-754).
gaagccaacaacaacagtt

SEQ ID NO: 264104 - DNA, 19 bp, Homo sapiens
  siRNA target sequence for NUP54 (NM_017426.2,744-762).
caacaacagttggtagaat

SEQ ID NO: 264105 - DNA, 19 bp, Homo sapiens
  siRNA target sequence for NUP54 (NM_017426.2,752-770).
gttggtagaatcattgcat

SEQ ID NO: 264106 - DNA, 19 bp, Homo sapiens
  siRNA target sequence for NUP54 (NM_017426.2,755-773).
ggtagaatcattgcataaa

SEQ ID NO: 264107 - DNA, 19 bp, Homo sapiens
  siRNA target sequence for NUP54 (NM_017426.2,784-802).
gaaaccagacccttactgt

SEQ ID NO: 264108 - DNA, 19 bp, Homo sapiens
  siRNA target sequence for NUP54 (NM_017426.2,788-806).
ccagacccttactgtaaat

SEQ ID NO: 264109 - DNA, 19 bp, Homo sapiens
  siRNA target sequence for NUP54 (NM_017426.2,807-825).
gtagagggcactaaaacat

SEQ ID NO: 264110 - DNA, 19 bp, Homo sapiens
  siRNA target sequence for NUP54 (NM_017426.2,839-857).
gacagaagttgttatttat

SEQ ID NO: 264111 - DNA, 19 bp, Homo sapiens
  siRNA target sequence for NUP54 (NM_017426.2,864-882).
gagcgttcgccaaatggta

SEQ ID NO: 264112 - DNA, 19 bp, Homo sapiens
  siRNA target sequence for NUP54 (NM_017426.2,873-891).
ccaaatggtacttcaagaa

SEQ ID NO: 264113 - DNA, 19 bp, Homo sapiens
  siRNA target sequence for NUP54 (NM_017426.2,907-925).
cgctatatgcccattttga

SEQ ID NO: 264114 - DNA, 19 bp, Homo sapiens
  siRNA target sequence for NUP54 (NM_017426.2,957-975).
cttggtgtaaccctttcta

SEQ ID NO: 264115 - DNA, 19 bp, Homo sapiens
  siRNA target sequence for NUP54 (NM_017426.2,960-978).
ggtgtaaccctttctatga

SEQ ID NO: 264116 - DNA, 19 bp, Homo sapiens
  siRNA target sequence for NUP54 (NM_017426.2,963-981).
gtaaccctttctatgacta

SEQ ID NO: 264117 - DNA, 19 bp, Homo sapiens
  siRNA target sequence for NUP54 (NM_017426.2,1030-1048).
ctgctggtgttgatcctat

SEQ ID NO: 264118 - DNA, 19 bp, Homo sapiens
  siRNA target sequence for NUP54 (NM_017426.2,1032-1050).
gctggtgttgatcctatta

SEQ ID NO: 264119 - DNA, 19 bp, Homo sapiens
  siRNA target sequence for NUP54 (NM_017426.2,1067-1085).
ggtagataaccctgattct

SEQ ID NO: 264120 - DNA, 19 bp, Homo sapiens
  siRNA target sequence for NUP54 (NM_017426.2,1071-1089).
gataaccctgattctgaaa

SEQ ID NO: 264121 - DNA, 19 bp, Homo sapiens
  siRNA target sequence for NUP54 (NM_017426.2,1135-1153).
gactgaaggttcaagatca

SEQ ID NO: 264122 - DNA, 19 bp, Homo sapiens
  siRNA target sequence for NUP54 (NM_017426.2,1163-1181).
gcagcatcaaaccagatta

SEQ ID NO: 264123 - DNA, 19 bp, Homo sapiens
  siRNA target sequence for NUP54 (NM_017426.2,1166-1184).
gcatcaaaccagattagat

SEQ ID NO: 264124 - DNA, 19 bp, Homo sapiens
  siRNA target sequence for NUP54 (NM_017426.2,1167-1185).
catcaaaccagattagata

SEQ ID NO: 264125 - DNA, 19 bp, Homo sapiens
  siRNA target sequence for NUP54 (NM_017426.2,1177-1195).
gattagatatcatatctga

SEQ ID NO: 264126 - DNA, 19 bp, Homo sapiens
  siRNA target sequence for NUP54 (NM_017426.2,1182-1200).
gatatcatatctgaagata

SEQ ID NO: 264127 - DNA, 19 bp, Homo sapiens
  siRNA target sequence for NUP54 (NM_017426.2,1197-1215).
gatattagtgagctacaaa

SEQ ID NO: 264128 - DNA, 19 bp, Homo sapiens
  siRNA target sequence for NUP54 (NM_017426.2,1269-1287).
gatctttcccatagaactt

SEQ ID NO: 264129 - DNA, 19 bp, Homo sapiens
  siRNA target sequence for NUP54 (NM_017426.2,1282-1300).
gaactttacaggtcctaat

SEQ ID NO: 264130 - DNA, 19 bp, Homo sapiens
  siRNA target sequence for NUP54 (NM_017426.2,1285-1303).
ctttacaggtcctaatcaa

SEQ ID NO: 264131 - DNA, 19 bp, Homo sapiens
  siRNA target sequence for NUP54 (NM_017426.2,1375-1393).
cgattcagggtgaactaaa

SEQ ID NO: 264132 - DNA, 19 bp, Homo sapiens
  siRNA target sequence for NUP54 (NM_017426.2,1376-1394).
gattcagggtgaactaaat

SEQ ID NO: 264133 - DNA, 19 bp, Homo sapiens
  siRNA target sequence for NUP54 (NM_017426.2,1406-1424).
gttcaagggccgactaaat

SEQ ID NO: 264134 - DNA, 19 bp, Homo sapiens
  siRNA target sequence for NUP54 (NM_017426.2,1413-1431).
ggccgactaaatgaattga

SEQ ID NO: 264135 - DNA, 19 bp, Homo sapiens
  siRNA target sequence for NUP54 (NM_017426.2,1414-1432).
gccgactaaatgaattgat

SEQ ID NO: 264136 - DNA, 19 bp, Homo sapiens
  siRNA target sequence for NUP54 (NM_017426.2,1471-1489).
gatctgaagaaaggtatta

SEQ ID NO: 264137 - DNA, 19 bp, Homo sapiens
  siRNA target sequence for NUP54 (NM_017426.2,1490-1508).
catagatgcagatctgtta

SEQ ID NO: 264138 - DNA, 19 bp, Homo sapiens
  siRNA target sequence for NUP54 (NM_017426.2,1498-1516).
cagatctgttacgagaaat

SEQ ID NO: 264139 - DNA, 19 bp, Homo sapiens
  siRNA target sequence for NUP54 (NM_017426.2,1517-1535).
caagcagcatttgaaacaa

SEQ ID NO: 264140 - DNA, 19 bp, Homo sapiens
  siRNA target sequence for NUP54 (NM_017426.2,1542-1560).
gaaggccttagccatttga

SEQ ID NO: 264141 - DNA, 19 bp, Homo sapiens
  siRNA target sequence for NUP54 (NM_017426.2,1545-1563).
ggccttagccatttgatta

SEQ ID NO: 264142 - DNA, 19 bp, Homo sapiens
  siRNA target sequence for NUP54 (NM_017426.2,1548-1566).
cttagccatttgattagca

SEQ ID NO: 264143 - DNA, 19 bp, Homo sapiens
  siRNA target sequence for NUP54 (NM_017426.2,1568-1586).
cattaaagacgatctagaa

SEQ ID NO: 264144 - DNA, 19 bp, Homo sapiens
  siRNA target sequence for NUP54 (NM_017426.2,1575-1593).
gacgatctagaagatataa

SEQ ID NO: 264145 - DNA, 19 bp, Homo sapiens
  siRNA target sequence for NUP54 (NM_017426.2,1598-1616).
ggtcgaacatggattgaat

SEQ ID NO: 264146 - DNA, 19 bp, Homo sapiens
  siRNA target sequence for NUP54 (NM_017426.2,1601-1619).
cgaacatggattgaatgaa

SEQ ID NO: 264147 - DNA, 19 bp, Homo sapiens
  siRNA target sequence for NUP54 (NM_017426.2,1631-1649).
cagaggtggtgtctttagt

SEQ ID NO: 264148 - DNA, 19 bp, Homo sapiens
  siRNA target sequence for PCNT1 (NM_024844.2,88-106).
gcgagccaacagtcacttt

SEQ ID NO: 264149 - DNA, 19 bp, Homo sapiens
  siRNA target sequence for PCNT1 (NM_024844.2,161-179).
ggagatgctggtatgtgaa

SEQ ID NO: 264150 - DNA, 19 bp, Homo sapiens
  siRNA target sequence for PCNT1 (NM_024844.2,162-180).
gagatgctggtatgtgaaa

SEQ ID NO: 264151 - DNA, 19 bp, Homo sapiens
  siRNA target sequence for PCNT1 (NM_024844.2,220-238).
gttgcccctttatctatat

SEQ ID NO: 264152 - DNA, 19 bp, Homo sapiens
  siRNA target sequence for PCNT1 (NM_024844.2,233-251).
ctatatcatccgtaaggat

SEQ ID NO: 264153 - DNA, 19 bp, Homo sapiens
  siRNA target sequence for PCNT1 (NM_024844.2,239-257).
catccgtaaggatgtagat

SEQ ID NO: 264154 - DNA, 19 bp, Homo sapiens
  siRNA target sequence for PCNT1 (NM_024844.2,243-261).
cgtaaggatgtagatgttt

SEQ ID NO: 264155 - DNA, 19 bp, Homo sapiens
  siRNA target sequence for PCNT1 (NM_024844.2,252-270).
gtagatgtttactctcaaa

SEQ ID NO: 264156 - DNA, 19 bp, Homo sapiens
  siRNA target sequence for PCNT1 (NM_024844.2,255-273).
gatgtttactctcaaatct

SEQ ID NO: 264157 - DNA, 19 bp, Homo sapiens
  siRNA target sequence for PCNT1 (NM_024844.2,329-347).
cgaagagttgactggaaaa

SEQ ID NO: 264158 - DNA, 19 bp, Homo sapiens
  siRNA target sequence for PCNT1 (NM_024844.2,366-384).
gttcgagtgagtaaaaact

SEQ ID NO: 264159 - DNA, 19 bp, Homo sapiens
  siRNA target sequence for PCNT1 (NM_024844.2,391-409).
cagtcatcagagcatgtat

SEQ ID NO: 264160 - DNA, 19 bp, Homo sapiens
  siRNA target sequence for PCNT1 (NM_024844.2,400-418).
gagcatgtatggaggaaat

SEQ ID NO: 264161 - DNA, 19 bp, Homo sapiens
  siRNA target sequence for PCNT1 (NM_024844.2,419-437).
gcaccaggttgcaattgct

SEQ ID NO: 264162 - DNA, 19 bp, Homo sapiens
  siRNA target sequence for PCNT1 (NM_024844.2,517-535).
gtgagattctttttattga

SEQ ID NO: 264163 - DNA, 19 bp, Homo sapiens
  siRNA target sequence for PCNT1 (NM_024844.2,605-623).
cagtttgtcggcagatgtt

SEQ ID NO: 264164 - DNA, 19 bp, Homo sapiens
  siRNA target sequence for PCNT1 (NM_024844.2,607-625).
gtttgtcggcagatgttct

SEQ ID NO: 264165 - DNA, 19 bp, Homo sapiens
  siRNA target sequence for PCNT1 (NM_024844.2,624-642).
ctgggcagtgagaatccaa

SEQ ID NO: 264166 - DNA, 19 bp, Homo sapiens
  siRNA target sequence for PCNT1 (NM_024844.2,751-769).
caggcatatgccgaatcat

SEQ ID NO: 264167 - DNA, 19 bp, Homo sapiens
  siRNA target sequence for PCNT1 (NM_024844.2,785-803).
gacaatgcccattcttagt

SEQ ID NO: 264168 - DNA, 19 bp, Homo sapiens
  siRNA target sequence for PCNT1 (NM_024844.2,909-927).
ctggagtctctcttgaaga

SEQ ID NO: 264169 - DNA, 19 bp, Homo sapiens
  siRNA target sequence for PCNT1 (NM_024844.2,911-929).
ggagtctctcttgaagatt

SEQ ID NO: 264170 - DNA, 19 bp, Homo sapiens
  siRNA target sequence for PCNT1 (NM_024844.2,962-980).
gaaggaacttctgagtaat

SEQ ID NO: 264171 - DNA, 19 bp, Homo sapiens
  siRNA target sequence for PCNT1 (NM_024844.2,976-994).
gtaattggtatcatttcct

SEQ ID NO: 264172 - DNA, 19 bp, Homo sapiens
  siRNA target sequence for PCNT1 (NM_024844.2,996-1014).
gtgactcggctcttgtact

SEQ ID NO: 264173 - DNA, 19 bp, Homo sapiens
  siRNA target sequence for PCNT1 (NM_024844.2,1033-1051).
ccattgatctgcactacta

SEQ ID NO: 264174 - DNA, 19 bp, Homo sapiens
  siRNA target sequence for PCNT1 (NM_024844.2,1034-1052).
cattgatctgcactactat

SEQ ID NO: 264175 - DNA, 19 bp, Homo sapiens
  siRNA target sequence for PCNT1 (NM_024844.2,1118-1136).
gttggcagcctttgagttt

SEQ ID NO: 264176 - DNA, 19 bp, Homo sapiens
  siRNA target sequence for PCNT1 (NM_024844.2,1286-1304).
gtacgcctcgggactgttt

SEQ ID NO: 264177 - DNA, 19 bp, Homo sapiens
  siRNA target sequence for PCNT1 (NM_024844.2,1321-1339).
ggcagctgggggtcgatta

SEQ ID NO: 264178 - DNA, 19 bp, Homo sapiens
  siRNA target sequence for PCNT1 (NM_024844.2,1323-1341).
cagctgggggtcgattact

SEQ ID NO: 264179 - DNA, 19 bp, Homo sapiens
  siRNA target sequence for PCNT1 (NM_024844.2,1325-1343).
gctgggggtcgattacttt

SEQ ID NO: 264180 - DNA, 19 bp, Homo sapiens
  siRNA target sequence for PCNT1 (NM_024844.2,1328-1346).
gggggtcgattactttgat

SEQ ID NO: 264181 - DNA, 19 bp, Homo sapiens
  siRNA target sequence for PCNT1 (NM_024844.2,1329-1347).
ggggtcgattactttgatt

SEQ ID NO: 264182 - DNA, 19 bp, Homo sapiens
  siRNA target sequence for PCNT1 (NM_024844.2,1330-1348).
gggtcgattactttgatta

SEQ ID NO: 264183 - DNA, 19 bp, Homo sapiens
  siRNA target sequence for PCNT1 (NM_024844.2,1332-1350).
gtcgattactttgattact

SEQ ID NO: 264184 - DNA, 19 bp, Homo sapiens
  siRNA target sequence for PCNT1 (NM_024844.2,1464-1482).
caagttcgcagcatttgta

SEQ ID NO: 264185 - DNA, 19 bp, Homo sapiens
  siRNA target sequence for PCNT1 (NM_024844.2,1467-1485).
gttcgcagcatttgtaaga

SEQ ID NO: 264186 - DNA, 19 bp, Homo sapiens
  siRNA target sequence for PCNT1 (NM_024844.2,1470-1488).
cgcagcatttgtaagatct

SEQ ID NO: 264187 - DNA, 19 bp, Homo sapiens
  siRNA target sequence for PCNT1 (NM_024844.2,1471-1489).
gcagcatttgtaagatctt

SEQ ID NO: 264188 - DNA, 19 bp, Homo sapiens
  siRNA target sequence for PCNT1 (NM_024844.2,1472-1490).
cagcatttgtaagatctta

SEQ ID NO: 264189 - DNA, 19 bp, Homo sapiens
  siRNA target sequence for PCNT1 (NM_024844.2,1496-1514).
gaaagccgtccgcaacaat

SEQ ID NO: 264190 - DNA, 19 bp, Homo sapiens
  siRNA target sequence for PCNT1 (NM_024844.2,1538-1556).
gagcatccgtgctaaggat

SEQ ID NO: 264191 - DNA, 19 bp, Homo sapiens
  siRNA target sequence for PCNT1 (NM_024844.2,1696-1714).
gcgagttccaccgtatgta

SEQ ID NO: 264192 - DNA, 19 bp, Homo sapiens
  siRNA target sequence for PCNT1 (NM_024844.2,1819-1837).
cccttttggaacagaaaca

SEQ ID NO: 264193 - DNA, 19 bp, Homo sapiens
  siRNA target sequence for PCNT1 (NM_024844.2,1852-1870).
cagaacagacttatgagtt

SEQ ID NO: 264194 - DNA, 19 bp, Homo sapiens
  siRNA target sequence for PCNT1 (NM_024844.2,1884-1902).
gaggacttgacgtcaagaa

SEQ ID NO: 264195 - DNA, 19 bp, Homo sapiens
  siRNA target sequence for PCNT1 (NM_024844.2,1886-1904).
ggacttgacgtcaagaaga

SEQ ID NO: 264196 - DNA, 19 bp, Homo sapiens
  siRNA target sequence for PCNT1 (NM_024844.2,1998-2016).
cttgctcgggcaattataa

SEQ ID NO: 264197 - DNA, 19 bp, Homo sapiens
  siRNA target sequence for ROPN1 (NM_017578.2,920-938).
ccctgatggtataatcaca

SEQ ID NO: 264198 - DNA, 19 bp, Homo sapiens
  siRNA target sequence for SYNPR (NM_144642.3,181-199).
gtgtggactgcgtcaacaa

SEQ ID NO: 264199 - DNA, 19 bp, Homo sapiens
  siRNA target sequence for SYNPR (NM_144642.3,183-201).
gtggactgcgtcaacaaga

SEQ ID NO: 264200 - DNA, 19 bp, Homo sapiens
  siRNA target sequence for SYNPR (NM_144642.3,381-399).
gctgccactgtcgtttaca

SEQ ID NO: 264201 - DNA, 19 bp, Homo sapiens
  siRNA target sequence for SYNPR (NM_144642.3,382-400).
ctgccactgtcgtttacat

SEQ ID NO: 264202 - DNA, 19 bp, Homo sapiens
  siRNA target sequence for SYNPR (NM_144642.3,439-457).
cactcattgacttcattgt

SEQ ID NO: 264203 - DNA, 19 bp, Homo sapiens
  siRNA target sequence for SYNPR (NM_144642.3,456-474).
gtcactgtagtcttttcgt

SEQ ID NO: 264204 - DNA, 19 bp, Homo sapiens
  siRNA target sequence for SYNPR (NM_144642.3,462-480).
gtagtcttttcgttcttgt

SEQ ID NO: 264205 - DNA, 19 bp, Homo sapiens
  siRNA target sequence for SYNPR (NM_144642.3,511-529).
gactgtctgacgtcaaagt

SEQ ID NO: 264206 - DNA, 19 bp, Homo sapiens
  siRNA target sequence for SYNPR (NM_144642.3,535-553).
cggatcccaaggaagtatt

SEQ ID NO: 264207 - DNA, 19 bp, Homo sapiens
  siRNA target sequence for SYNPR (NM_144642.3,598-616).
ctatccacagccctgttat

SEQ ID NO: 264208 - DNA, 19 bp, Homo sapiens
  siRNA target sequence for SYNPR (NM_144642.3,646-664).
gattcttgaactttattct

SEQ ID NO: 264209 - DNA, 19 bp, Homo sapiens
  siRNA target sequence for SYNPR (NM_144642.3,663-681).
ctctgggctggaaacatat

SEQ ID NO: 264210 - DNA, 19 bp, Homo sapiens
  siRNA target sequence for SYNPR (NM_144642.3,667-685).
gggctggaaacatatggtt

SEQ ID NO: 264211 - DNA, 19 bp, Homo sapiens
  siRNA target sequence for SYNPR (NM_144642.3,696-714).
gagaccggctggcattctt

SEQ ID NO: 264212 - DNA, 19 bp, Homo sapiens
  siRNA target sequence for SYNPR (NM_144642.3,712-730).
cttcgggacagagatatct

SEQ ID NO: 264213 - DNA, 19 bp, Homo sapiens
  siRNA target sequence for SYNPR (NM_144642.3,716-734).
gggacagagatatctttca

SEQ ID NO: 264214 - DNA, 19 bp, Homo sapiens
  siRNA target sequence for SYNPR (NM_144642.3,718-736).
gacagagatatctttcaga

SEQ ID NO: 264215 - DNA, 19 bp, Homo sapiens
  siRNA target sequence for SYNPR (NM_144642.3,749-767).
gcactccagcagctataat

SEQ ID NO: 264216 - DNA, 19 bp, Homo sapiens
  siRNA target sequence for SYNPR (NM_144642.3,869-887).
ccccacttcctttaccaat

SEQ ID NO: 264217 - DNA, 19 bp, Homo sapiens
  siRNA target sequence for MAL (NM_002371.2,134-152).
gctcttcatctttgagttt

SEQ ID NO: 264218 - DNA, 19 bp, Homo sapiens
  siRNA target sequence for MAL (NM_002371.2,262-280).
ccttgatcatcctgtacat

SEQ ID NO: 264219 - DNA, 19 bp, Homo sapiens
  siRNA target sequence for MAL (NM_002371.2,263-281).
cttgatcatcctgtacata

SEQ ID NO: 264220 - DNA, 19 bp, Homo sapiens
  siRNA target sequence for MAL (NM_002371.2,418-436).
ggcactaccatgaaaacat

SEQ ID NO: 264221 - DNA, 19 bp, Homo sapiens
  siRNA target sequence for MAL (NM_002371.2,483-501).
catgcggtgttctctttaa

SEQ ID NO: 264222 - DNA, 19 bp, Homo sapiens
  siRNA target sequence for MAL (NM_002371.2,486-504).
gcggtgttctctttaatca

SEQ ID NO: 264223 - DNA, 19 bp, Homo sapiens
  siRNA target sequence for STEAP (NM_012449.2,270-288).
gaagacgattatttgcata

SEQ ID NO: 264224 - DNA, 19 bp, Homo sapiens
  siRNA target sequence for STEAP (NM_012449.2,962-980).
gagcaagctaggaattgtt

SEQ ID NO: 264225 - DNA, 19 bp, Homo sapiens
  siRNA target sequence for STEAP (NM_012449.2,973-991).
gaattgtttcccttctact

SEQ ID NO: 264226 - DNA, 19 bp, Homo sapiens
  siRNA target sequence for STEAP (NM_012449.2,994-1012).
gcacaatacacgcattgat

SEQ ID NO: 264227 - DNA, 19 bp, Homo sapiens
  siRNA target sequence for STEAP (NM_012449.2,997-1015).
caatacacgcattgatttt

SEQ ID NO: 264228 - DNA, 19 bp, Homo sapiens
  siRNA target sequence for STEAP (NM_012449.2,1021-1039).
ggaataagtggatagatat

SEQ ID NO: 264229 - DNA, 19 bp, Homo sapiens
  siRNA target sequence for STEAP (NM_012449.2,1022-1040).
gaataagtggatagatata

SEQ ID NO: 264230 - DNA, 19 bp, Homo sapiens
  siRNA target sequence for STEAP (NM_012449.2,1054-1072).
ggtatacacctccaacttt

SEQ ID NO: 264231 - DNA, 19 bp, Homo sapiens
  siRNA target sequence for STEAP (NM_012449.2,1055-1073).
gtatacacctccaactttt

SEQ ID NO: 264232 - DNA, 19 bp, Homo sapiens
  siRNA target sequence for STEAP (NM_012449.2,1092-1110).
ccaattgttgtcctgatat

SEQ ID NO: 264233 - DNA, 19 bp, Homo sapiens
  siRNA target sequence for STEAP (NM_012449.2,1176-1194).
gacgtcaccaaaattaaca

SEQ ID NO: 264234 - DNA, 19 bp, Homo sapiens
  siRNA target sequence for ATP6V0A2 (NM_012463.1,120-138).
gacctcaaccagaacgtaa

SEQ ID NO: 264235 - DNA, 19 bp, Homo sapiens
  siRNA target sequence for ATP6V0A2 (NM_012463.1,123-141).
ctcaaccagaacgtaagtt

SEQ ID NO: 264236 - DNA, 19 bp, Homo sapiens
  siRNA target sequence for ATP6V0A2 (NM_012463.1,125-143).
caaccagaacgtaagttct

SEQ ID NO: 264237 - DNA, 19 bp, Homo sapiens
  siRNA target sequence for ATP6V0A2 (NM_012463.1,189-207).
gagcgaatattggtgtatt

SEQ ID NO: 264238 - DNA, 19 bp, Homo sapiens
  siRNA target sequence for ATP6V0A2 (NM_012463.1,193-211).
gaatattggtgtatttggt

SEQ ID NO: 264239 - DNA, 19 bp, Homo sapiens
  siRNA target sequence for ATP6V0A2 (NM_012463.1,265-283).
ctgcgccacccctgaaaca

SEQ ID NO: 264240 - DNA, 19 bp, Homo sapiens
  siRNA target sequence for ATP6V0A2 (NM_012463.1,331-349).
gagaagtcactaagaacaa

SEQ ID NO: 264241 - DNA, 19 bp, Homo sapiens
  siRNA target sequence for ATP6V0A2 (NM_012463.1,405-423).
gtgacaaagacctttgtga

SEQ ID NO: 264242 - DNA, 19 bp, Homo sapiens
  siRNA target sequence for ATP6V0A2 (NM_012463.1,441-459).
gaacccacttatgaagaat

SEQ ID NO: 264243 - DNA, 19 bp, Homo sapiens
  siRNA target sequence for ATP6V0A2 (NM_012463.1,516-534).
gcaaaactgggatttgtgt

SEQ ID NO: 264244 - DNA, 19 bp, Homo sapiens
  siRNA target sequence for ATP6V0A2 (NM_012463.1,646-664).
ctgaaacaggggaagtcat

SEQ ID NO: 264245 - DNA, 19 bp, Homo sapiens
  siRNA target sequence for ATP6V0A2 (NM_012463.1,747-765).
cacgtgtacccctatccaa

SEQ ID NO: 264246 - DNA, 19 bp, Homo sapiens
  siRNA target sequence for ATP6V0A2 (NM_012463.1,837-855).
cacaaaaccgaggactatt

SEQ ID NO: 264247 - DNA, 19 bp, Homo sapiens
  siRNA target sequence for ATP6V0A2 (NM_012463.1,1056-1074).
gctacaatcccctcattca

SEQ ID NO: 264248 - DNA, 19 bp, Homo sapiens
  siRNA target sequence for ATP6V0A2 (NM_012463.1,1057-1075).
ctacaatcccctcattcat

SEQ ID NO: 264249 - DNA, 19 bp, Homo sapiens
  siRNA target sequence for ATP6V0A2 (NM_012463.1,1064-1082).
cccctcattcatgaatata

SEQ ID NO: 264250 - DNA, 19 bp, Homo sapiens
  siRNA target sequence for ATP6V0A2 (NM_012463.1,1110-1128).
cggatccgcaccaacaaat

SEQ ID NO: 264251 - DNA, 19 bp, Homo sapiens
  siRNA target sequence for ATP6V0A2 (NM_012463.1,1111-1129).
ggatccgcaccaacaaatt

SEQ ID NO: 264252 - DNA, 19 bp, Homo sapiens
  siRNA target sequence for ATP6V0A2 (NM_012463.1,1132-1150).
ccgagggatttcagaacat

SEQ ID NO: 264253 - DNA, 19 bp, Homo sapiens
  siRNA target sequence for ATP6V0A2 (NM_012463.1,1185-1203).
gtcaatccagctctcttta

SEQ ID NO: 264254 - DNA, 19 bp, Homo sapiens
  siRNA target sequence for ATP6V0A2 (NM_012463.1,1194-1212).
gctctctttaccatcatca

SEQ ID NO: 264255 - DNA, 19 bp, Homo sapiens
  siRNA target sequence for ATP6V0A2 (NM_012463.1,1208-1226).
catcaccttcccgttttta

SEQ ID NO: 264256 - DNA, 19 bp, Homo sapiens
  siRNA target sequence for ATP6V0A2 (NM_012463.1,1305-1323).
catcccagactaaatcagt

SEQ ID NO: 264257 - DNA, 19 bp, Homo sapiens
  siRNA target sequence for ATP6V0A2 (NM_012463.1,1320-1338).
cagtcacaagagatcatga

SEQ ID NO: 264258 - DNA, 19 bp, Homo sapiens
  siRNA target sequence for ATP6V0A2 (NM_012463.1,1489-1507).
ccgcagagcataagaagat

SEQ ID NO: 264259 - DNA, 19 bp, Homo sapiens
  siRNA target sequence for ATP6V0A2 (NM_012463.1,1624-1642).
ccacaaatcgcctcacttt

SEQ ID NO: 264260 - DNA, 19 bp, Homo sapiens
  siRNA target sequence for ATP6V0A2 (NM_012463.1,1625-1643).
cacaaatcgcctcactttt

SEQ ID NO: 264261 - DNA, 19 bp, Homo sapiens
  siRNA target sequence for ATP6V0A2 (NM_012463.1,1627-1645).
caaatcgcctcacttttct

SEQ ID NO: 264262 - DNA, 19 bp, Homo sapiens
  siRNA target sequence for ATP6V0A2 (NM_012463.1,1635-1653).
ctcacttttctaaactctt

SEQ ID NO: 264263 - DNA, 19 bp, Homo sapiens
  siRNA target sequence for ATP6V0A2 (NM_012463.1,1661-1679).
gaaaatgtccgtgatttta

SEQ ID NO: 264264 - DNA, 19 bp, Homo sapiens
  siRNA target sequence for ATP6V0A2 (NM_012463.1,1669-1687).
ccgtgattttaggaatcat

SEQ ID NO: 264265 - DNA, 19 bp, Homo sapiens
  siRNA target sequence for ATP6V0A2 (NM_012463.1,1670-1688).
cgtgattttaggaatcatt

SEQ ID NO: 264266 - DNA, 19 bp, Homo sapiens
  siRNA target sequence for ATP6V0A2 (NM_012463.1,1673-1691).
gattttaggaatcattcat

SEQ ID NO: 264267 - DNA, 19 bp, Homo sapiens
  siRNA target sequence for ATP6V0A2 (NM_012463.1,1685-1703).
cattcatatgacttttgga

SEQ ID NO: 264268 - DNA, 19 bp, Homo sapiens
  siRNA target sequence for ATP6V0A2 (NM_012463.1,1790-1808).
ctgtatctttggatacctt

SEQ ID NO: 264269 - DNA, 19 bp, Homo sapiens
  siRNA target sequence for ATP6V0A2 (NM_012463.1,1792-1810).
gtatctttggataccttat

SEQ ID NO: 264270 - DNA, 19 bp, Homo sapiens
  siRNA target sequence for ATP6V0A2 (NM_012463.1,1800-1818).
ggataccttatatttatga

SEQ ID NO: 264271 - DNA, 19 bp, Homo sapiens
  siRNA target sequence for ATP6V0A2 (NM_012463.1,1823-1841).
ctacaagtggctggttttt

SEQ ID NO: 264272 - DNA, 19 bp, Homo sapiens
  siRNA target sequence for ATP6V0A2 (NM_012463.1,1870-1888).
gcattctgattgaatttat

SEQ ID NO: 264273 - DNA, 19 bp, Homo sapiens
  siRNA target sequence for ATP6V0A2 (NM_012463.1,1964-1982).
ggttgtcacagcattgtct

SEQ ID NO: 264274 - DNA, 19 bp, Homo sapiens
  siRNA target sequence for ATP6V0A2 (NM_012463.1,2058-2076).
cggagtggctacacactta

SEQ ID NO: 264275 - DNA, 19 bp, Homo sapiens
  siRNA target sequence for ATP6V0A2 (NM_012463.1,2065-2083).
gctacacacttataaggaa

SEQ ID NO: 264276 - DNA, 19 bp, Homo sapiens
  siRNA target sequence for ATP6V0A2 (NM_012463.1,2069-2087).
cacacttataaggaaagat

SEQ ID NO: 264277 - DNA, 19 bp, Homo sapiens
  siRNA target sequence for ATP6V0A2 (NM_012463.1,2108-2126).
gctgggaagccaagatata

SEQ ID NO: 264278 - DNA, 19 bp, Homo sapiens
  siRNA target sequence for ATP6V0A2 (NM_012463.1,2111-2129).
gggaagccaagatatagaa

SEQ ID NO: 264279 - DNA, 19 bp, Homo sapiens
  siRNA target sequence for ATP6V0A2 (NM_012463.1,2168-2186).
ggcgtgtgaagagtttaat

SEQ ID NO: 264280 - DNA, 19 bp, Homo sapiens
  siRNA target sequence for ATP6V0A2 (NM_012463.1,2206-2224).
cccaagtaatccattccat

SEQ ID NO: 264281 - DNA, 19 bp, Homo sapiens
  siRNA target sequence for ATP6V0A2 (NM_012463.1,2388-2406).
gcgctctttgcagttttga

SEQ ID NO: 264282 - DNA, 19 bp, Homo sapiens
  siRNA target sequence for ATP6V0A2 (NM_012463.1,2460-2478).
cgcctccactgggtagaat

SEQ ID NO: 264283 - DNA, 19 bp, Homo sapiens
  siRNA target sequence for ATP6V0A2 (NM_012463.1,2461-2479).
gcctccactgggtagaatt

SEQ ID NO: 264284 - DNA, 19 bp, Homo sapiens
  siRNA target sequence for ATP6V0A2 (NM_012463.1,2462-2480).
cctccactgggtagaattt

SEQ ID NO: 264285 - DNA, 19 bp, Homo sapiens
  siRNA target sequence for ATP6V0A2 (NM_012463.1,2535-2553).
ctactttcatcaaagttca

SEQ ID NO: 264286 - DNA, 19 bp, Homo sapiens
  siRNA target sequence for C10orf26 (NM_017787.2,185-203).
gtgtgggtaccaacaatca

SEQ ID NO: 264287 - DNA, 19 bp, Homo sapiens
  siRNA target sequence for C10orf26 (NM_017787.2,244-262).
cagtgctgcaactactact

SEQ ID NO: 264288 - DNA, 19 bp, Homo sapiens
  siRNA target sequence for C10orf26 (NM_017787.2,359-377).
cccagcagcggcaacatga

SEQ ID NO: 264289 - DNA, 19 bp, Homo sapiens
  siRNA target sequence for C10orf26 (NM_017787.2,397-415).
cgagaagcccacaattact

SEQ ID NO: 264290 - DNA, 19 bp, Homo sapiens
  siRNA target sequence for C10orf26 (NM_017787.2,839-857).
cacccgacagcaaagagaa

SEQ ID NO: 264291 - DNA, 19 bp, Homo sapiens
  siRNA target sequence for C10orf26 (NM_017787.2,887-905).
gtgactcgggcattgaagt

SEQ ID NO: 264292 - DNA, 19 bp, Homo sapiens
  siRNA target sequence for C14orf4 (NM_024496.2,920-938).
ctcgtcccggagacaatct

SEQ ID NO: 264293 - DNA, 19 bp, Homo sapiens
  siRNA target sequence for C14orf4 (NM_024496.2,1026-1044).
ggcgctgatcgcatcgaat

SEQ ID NO: 264294 - DNA, 19 bp, Homo sapiens
  siRNA target sequence for C14orf4 (NM_024496.2,1027-1045).
gcgctgatcgcatcgaatt

SEQ ID NO: 264295 - DNA, 19 bp, Homo sapiens
  siRNA target sequence for C14orf4 (NM_024496.2,1030-1048).
ctgatcgcatcgaattcgt

SEQ ID NO: 264296 - DNA, 19 bp, Homo sapiens
  siRNA target sequence for C14orf4 (NM_024496.2,1142-1160).
ggccctgtcggctaaggaa

SEQ ID NO: 264297 - DNA, 19 bp, Homo sapiens
  siRNA target sequence for C14orf4 (NM_024496.2,1541-1559).
gagccccaattcttcttca

SEQ ID NO: 264298 - DNA, 19 bp, Homo sapiens
  siRNA target sequence for C14orf4 (NM_024496.2,2133-2151).
ggcatggactacgaattga

SEQ ID NO: 264299 - DNA, 19 bp, Homo sapiens
  siRNA target sequence for C14orf4 (NM_024496.2,2134-2152).
gcatggactacgaattgaa

SEQ ID NO: 264300 - DNA, 19 bp, Homo sapiens
  siRNA target sequence for C14orf4 (NM_024496.2,2254-2272).
gcctatcctcgggtttcaa

SEQ ID NO: 264301 - DNA, 19 bp, Homo sapiens
  siRNA target sequence for C14orf4 (NM_024496.2,2256-2274).
ctatcctcgggtttcaagt

SEQ ID NO: 264302 - DNA, 19 bp, Homo sapiens
  siRNA target sequence for C14orf4 (NM_024496.2,2780-2798).
catgtcggtggcagatact

SEQ ID NO: 264303 - DNA, 19 bp, Homo sapiens
  siRNA target sequence for C14orf4 (NM_024496.2,2922-2940).
cgtaacggggacctgaatt

SEQ ID NO: 264304 - DNA, 19 bp, Homo sapiens
  siRNA target sequence for C14orf4 (NM_024496.2,2923-2941).
gtaacggggacctgaattt

SEQ ID NO: 264305 - DNA, 19 bp, Homo sapiens
  siRNA target sequence for C14orf4 (NM_024496.2,3065-3083).
ggaggatacgcatttcgtt

SEQ ID NO: 264306 - DNA, 19 bp, Homo sapiens
  siRNA target sequence for C14orf4 (NM_024496.2,3121-3139).
cttgctctagagagagtat

SEQ ID NO: 264307 - DNA, 19 bp, Homo sapiens
  siRNA target sequence for C14orf4 (NM_024496.2,3153-3171).
gccaccggcgaggtgtatt

SEQ ID NO: 264308 - DNA, 19 bp, Homo sapiens
  siRNA target sequence for C14orf4 (NM_024496.2,3194-3212).
cctagtcgggtcgaatgta

SEQ ID NO: 264309 - DNA, 19 bp, Homo sapiens
  siRNA target sequence for C14orf4 (NM_024496.2,3231-3249).
ggcgaaatcgcgactatct

SEQ ID NO: 264310 - DNA, 19 bp, Homo sapiens
  siRNA target sequence for C14orf4 (NM_024496.2,3232-3250).
gcgaaatcgcgactatctt

SEQ ID NO: 264311 - DNA, 19 bp, Homo sapiens
  siRNA target sequence for C14orf4 (NM_024496.2,3233-3251).
cgaaatcgcgactatctta

SEQ ID NO: 264312 - DNA, 19 bp, Homo sapiens
  siRNA target sequence for C14orf52 (NM_145165.1,115-133).
cccaaccggggtaatacct

SEQ ID NO: 264313 - DNA, 19 bp, Homo sapiens
  siRNA target sequence for C14orf52 (NM_145165.1,138-156).
ggagaatggatctttctta

SEQ ID NO: 264314 - DNA, 19 bp, Homo sapiens
  siRNA target sequence for C14orf52 (NM_145165.1,182-200).
gcagtaagcgggattttat

SEQ ID NO: 264315 - DNA, 19 bp, Homo sapiens
  siRNA target sequence for C14orf52 (NM_145165.1,185-203).
gtaagcgggattttatgct

SEQ ID NO: 264316 - DNA, 19 bp, Homo sapiens
  siRNA target sequence for C14orf52 (NM_145165.1,193-211).
gattttatgctgatcacaa

SEQ ID NO: 264317 - DNA, 19 bp, Homo sapiens
  siRNA target sequence for C14orf52 (NM_145165.1,266-284).
gtaagaattgtcatcatgt

SEQ ID NO: 264318 - DNA, 19 bp, Homo sapiens
  siRNA target sequence for C14orf52 (NM_145165.1,289-307).
gccagacatgagtatacat

SEQ ID NO: 264319 - DNA, 19 bp, Homo sapiens
  siRNA target sequence for C14orf52 (NM_145165.1,290-308).
ccagacatgagtatacatt

SEQ ID NO: 264320 - DNA, 19 bp, Homo sapiens
  siRNA target sequence for C14orf52 (NM_145165.1,298-316).
gagtatacattcagtatca

SEQ ID NO: 264321 - DNA, 19 bp, Homo sapiens
  siRNA target sequence for C14orf52 (NM_145165.1,357-375).
cggcaaagccgaagatact

SEQ ID NO: 264322 - DNA, 19 bp, Homo sapiens
  siRNA target sequence for C14orf52 (NM_145165.1,358-376).
ggcaaagccgaagatacta

SEQ ID NO: 264323 - DNA, 19 bp, Homo sapiens
  siRNA target sequence for C14orf52 (NM_145165.1,359-377).
gcaaagccgaagatactat

SEQ ID NO: 264324 - DNA, 19 bp, Homo sapiens
  siRNA target sequence for C14orf52 (NM_145165.1,364-382).
gccgaagatactatcagta

SEQ ID NO: 264325 - DNA, 19 bp, Homo sapiens
  siRNA target sequence for C14orf52 (NM_145165.1,365-383).
ccgaagatactatcagtat

SEQ ID NO: 264326 - DNA, 19 bp, Homo sapiens
  siRNA target sequence for C14orf52 (NM_145165.1,366-384).
cgaagatactatcagtatt

SEQ ID NO: 264327 - DNA, 19 bp, Homo sapiens
  siRNA target sequence for C14orf52 (NM_145165.1,389-407).
ctgatgacccccgacaaat

SEQ ID NO: 264328 - DNA, 19 bp, Homo sapiens
  siRNA target sequence for C14orf52 (NM_145165.1,391-409).
gatgacccccgacaaatga

SEQ ID NO: 264329 - DNA, 19 bp, Homo sapiens
  siRNA target sequence for C5orf12 (NM_178276.2,244-262).
gtacgccctctacttcatt

SEQ ID NO: 264330 - DNA, 19 bp, Homo sapiens
  siRNA target sequence for C5orf12 (NM_178276.2,346-364).
gtgtaaaggcattaaagct

SEQ ID NO: 264331 - DNA, 19 bp, Homo sapiens
  siRNA target sequence for C5orf12 (NM_178276.2,399-417).
ccgtgtatagagtctgttt

SEQ ID NO: 264332 - DNA, 19 bp, Homo sapiens
  siRNA target sequence for C5orf12 (NM_178276.2,400-418).
cgtgtatagagtctgtttt

SEQ ID NO: 264333 - DNA, 19 bp, Homo sapiens
  siRNA target sequence for C5orf12 (NM_178276.2,403-421).
gtatagagtctgttttgga

SEQ ID NO: 264334 - DNA, 19 bp, Homo sapiens
  siRNA target sequence for C5orf12 (NM_178276.2,445-463).
ctgtctactgaccttgaaa

SEQ ID NO: 264335 - DNA, 19 bp, Homo sapiens
  siRNA target sequence for C5orf12 (NM_178276.2,447-465).
gtctactgaccttgaaaat

SEQ ID NO: 264336 - DNA, 19 bp, Homo sapiens
  siRNA target sequence for C5orf12 (NM_178276.2,687-705).
caggcacagccagtaacaa

SEQ ID NO: 264337 - DNA, 19 bp, Homo sapiens
  siRNA target sequence for C5orf12 (NM_178276.2,728-746).
ctggtgacgctcatcatgt

SEQ ID NO: 264338 - DNA, 19 bp, Homo sapiens
  siRNA target sequence for C5orf12 (NM_178276.2,730-748).
ggtgacgctcatcatgtat

SEQ ID NO: 264339 - DNA, 19 bp, Homo sapiens
  siRNA target sequence for C5orf12 (NM_178276.2,731-749).
gtgacgctcatcatgtatt

SEQ ID NO: 264340 - DNA, 19 bp, Homo sapiens
  siRNA target sequence for C5orf12 (NM_178276.2,736-754).
gctcatcatgtattccatt

SEQ ID NO: 264341 - DNA, 19 bp, Homo sapiens
  siRNA target sequence for C5orf12 (NM_178276.2,755-773).
gccactggaggcttggttt

SEQ ID NO: 264342 - DNA, 19 bp, Homo sapiens
  siRNA target sequence for C5orf12 (NM_178276.2,850-868).
cctgcttatatcattggta

SEQ ID NO: 264343 - DNA, 19 bp, Homo sapiens
  siRNA target sequence for C5orf12 (NM_178276.2,900-918).
cacactcggggctcttaca

SEQ ID NO: 264344 - DNA, 19 bp, Homo sapiens
  siRNA target sequence for C5orf12 (NM_178276.2,902-920).
cactcggggctcttacaat

SEQ ID NO: 264345 - DNA, 19 bp, Homo sapiens
  siRNA target sequence for C5orf12 (NM_178276.2,904-922).
ctcggggctcttacaatca

SEQ ID NO: 264346 - DNA, 19 bp, Homo sapiens
  siRNA target sequence for C5orf12 (NM_178276.2,926-944).
gtcataagctgctatgtca

SEQ ID NO: 264347 - DNA, 19 bp, Homo sapiens
  siRNA target sequence for C5orf12 (NM_178276.2,1086-1104).
gcctcttaatcggatgtat

SEQ ID NO: 264348 - DNA, 19 bp, Homo sapiens
  siRNA target sequence for C5orf12 (NM_178276.2,1088-1106).
ctcttaatcggatgtatct

SEQ ID NO: 264349 - DNA, 19 bp, Homo sapiens
  siRNA target sequence for C5orf12 (NM_178276.2,1161-1179).
gatacgcagctcctgaatt

SEQ ID NO: 264350 - DNA, 19 bp, Homo sapiens
  siRNA target sequence for C5orf12 (NM_178276.2,1252-1270).
gggaccacgggtcatttat

SEQ ID NO: 264351 - DNA, 19 bp, Homo sapiens
  siRNA target sequence for C5orf12 (NM_178276.2,1254-1272).
gaccacgggtcatttatga

SEQ ID NO: 264352 - DNA, 19 bp, Homo sapiens
  siRNA target sequence for C5orf12 (NM_178276.2,1283-1301).
ggcaccgtctacatctact

SEQ ID NO: 264353 - DNA, 19 bp, Homo sapiens
  siRNA target sequence for C5orf12 (NM_178276.2,1325-1343).
ctagcttccctgtatgtga

SEQ ID NO: 264354 - DNA, 19 bp, Homo sapiens
  siRNA target sequence for C5orf12 (NM_178276.2,1329-1347).
cttccctgtatgtgatgat

SEQ ID NO: 264355 - DNA, 19 bp, Homo sapiens
  siRNA target sequence for CGI-07 (NM_015938.2,180-198).
gtgtggtgttccgataagt

SEQ ID NO: 264356 - DNA, 19 bp, Homo sapiens
  siRNA target sequence for CGI-07 (NM_015938.2,222-240).
ggcctgtttgcgaagtaaa

SEQ ID NO: 264357 - DNA, 19 bp, Homo sapiens
  siRNA target sequence for CGI-07 (NM_015938.2,224-242).
cctgtttgcgaagtaaagt

SEQ ID NO: 264358 - DNA, 19 bp, Homo sapiens
  siRNA target sequence for CGI-07 (NM_015938.2,243-261).
ggacatcagccaaggtatt

SEQ ID NO: 264359 - DNA, 19 bp, Homo sapiens
  siRNA target sequence for CGI-07 (NM_015938.2,252-270).
ccaaggtattccgaaacaa

SEQ ID NO: 264360 - DNA, 19 bp, Homo sapiens
  siRNA target sequence for CGI-07 (NM_015938.2,262-280).
ccgaaacaagtctcgattt

SEQ ID NO: 264361 - DNA, 19 bp, Homo sapiens
  siRNA target sequence for CGI-07 (NM_015938.2,276-294).
gatttcgttctgcaaacaa

SEQ ID NO: 264362 - DNA, 19 bp, Homo sapiens
  siRNA target sequence for CGI-07 (NM_015938.2,326-344).
ggatacagtgtgctttaga

SEQ ID NO: 264363 - DNA, 19 bp, Homo sapiens
  siRNA target sequence for CGI-07 (NM_015938.2,327-345).
gatacagtgtgctttagaa

SEQ ID NO: 264364 - DNA, 19 bp, Homo sapiens
  siRNA target sequence for CGI-07 (NM_015938.2,395-413).
gtaaggtacggcttgtaga

SEQ ID NO: 264365 - DNA, 19 bp, Homo sapiens
  siRNA target sequence for CGI-07 (NM_015938.2,428-446).
ggactgagcctcattctaa

SEQ ID NO: 264366 - DNA, 19 bp, Homo sapiens
  siRNA target sequence for CGI-07 (NM_015938.2,436-454).
cctcattctaagagactta

SEQ ID NO: 264367 - DNA, 19 bp, Homo sapiens
  siRNA target sequence for CGI-07 (NM_015938.2,562-580).
gtagaagctaaggatttct

SEQ ID NO: 264368 - DNA, 19 bp, Homo sapiens
  siRNA target sequence for CGI-07 (NM_015938.2,581-599).
ggaaggctgtgattcaagt

SEQ ID NO: 264369 - DNA, 19 bp, Homo sapiens
  siRNA target sequence for CGI-07 (NM_015938.2,630-648).
ctactatctggaacagtta

SEQ ID NO: 264370 - DNA, 19 bp, Homo sapiens
  siRNA target sequence for CGI-07 (NM_015938.2,662-680).
gaatgcatcagaatacact

SEQ ID NO: 264371 - DNA, 19 bp, Homo sapiens
  siRNA target sequence for CGI-07 (NM_015938.2,672-690).
gaatacacttcgtatcaaa

SEQ ID NO: 264372 - DNA, 19 bp, Homo sapiens
  siRNA target sequence for CGI-07 (NM_015938.2,677-695).
cacttcgtatcaaagagat

SEQ ID NO: 264373 - DNA, 19 bp, Homo sapiens
  siRNA target sequence for CGI-07 (NM_015938.2,737-755).
ctcagaagatggtcgaatt

SEQ ID NO: 264374 - DNA, 19 bp, Homo sapiens
  siRNA target sequence for CGI-07 (NM_015938.2,764-782).
gtacagttccctgtagata

SEQ ID NO: 264375 - DNA, 19 bp, Homo sapiens
  siRNA target sequence for CGI-07 (NM_015938.2,767-785).
cagttccctgtagatacaa

SEQ ID NO: 264376 - DNA, 19 bp, Homo sapiens
  siRNA target sequence for CGI-07 (NM_015938.2,797-815).
gactgatctctcaagatat

SEQ ID NO: 264377 - DNA, 19 bp, Homo sapiens
  siRNA target sequence for CGI-07 (NM_015938.2,801-819).
gatctctcaagatatccat

SEQ ID NO: 264378 - DNA, 19 bp, Homo sapiens
  siRNA target sequence for CGI-07 (NM_015938.2,806-824).
ctcaagatatccatagtaa

SEQ ID NO: 264379 - DNA, 19 bp, Homo sapiens
  siRNA target sequence for CGI-07 (NM_015938.2,808-826).
caagatatccatagtaaca

SEQ ID NO: 264380 - DNA, 19 bp, Homo sapiens
  siRNA target sequence for CGI-07 (NM_015938.2,811-829).
gatatccatagtaacacat

SEQ ID NO: 264381 - DNA, 19 bp, Homo sapiens
  siRNA target sequence for CGI-07 (NM_015938.2,853-871).
gtggaaattgttccaatat

SEQ ID NO: 264382 - DNA, 19 bp, Homo sapiens
  siRNA target sequence for CGI-07 (NM_015938.2,862-880).
gttccaatatgcaaggata

SEQ ID NO: 264383 - DNA, 19 bp, Homo sapiens
  siRNA target sequence for CGI-07 (NM_015938.2,866-884).
caatatgcaaggataatgt

SEQ ID NO: 264384 - DNA, 19 bp, Homo sapiens
  siRNA target sequence for CGI-07 (NM_015938.2,1023-1041).
gagtcaccctttcaatagt

SEQ ID NO: 264385 - DNA, 19 bp, Homo sapiens
  siRNA target sequence for CGI-07 (NM_015938.2,1025-1043).
gtcaccctttcaatagttt

SEQ ID NO: 264386 - DNA, 19 bp, Homo sapiens
  siRNA target sequence for CGI-07 (NM_015938.2,1031-1049).
ctttcaatagtttatgtca

SEQ ID NO: 264387 - DNA, 19 bp, Homo sapiens
  siRNA target sequence for CGI-07 (NM_015938.2,1197-1215).
gtatttttgtcgtactcat

SEQ ID NO: 264388 - DNA, 19 bp, Homo sapiens
  siRNA target sequence for CGI-07 (NM_015938.2,1242-1260).
cctggtgttagggtttgat

SEQ ID NO: 264389 - DNA, 19 bp, Homo sapiens
  siRNA target sequence for CGI-07 (NM_015938.2,1258-1276).
gatttggccaactgtaact

SEQ ID NO: 264390 - DNA, 19 bp, Homo sapiens
  siRNA target sequence for CGI-07 (NM_015938.2,1265-1283).
ccaactgtaacttaaatga

SEQ ID NO: 264391 - DNA, 19 bp, Homo sapiens
  siRNA target sequence for CGI-07 (NM_015938.2,1266-1284).
caactgtaacttaaatgat

SEQ ID NO: 264392 - DNA, 19 bp, Homo sapiens
  siRNA target sequence for CGI-07 (NM_015938.2,1282-1300).
gatgagcatgtcaacaaaa

SEQ ID NO: 264393 - DNA, 19 bp, Homo sapiens
  siRNA target sequence for CGI-07 (NM_015938.2,1315-1333).
gttccagatgtggtattaa

SEQ ID NO: 264394 - DNA, 19 bp, Homo sapiens
  siRNA target sequence for CGI-07 (NM_015938.2,1360-1378).
cgtcagcgtcgtagaaact

SEQ ID NO: 264395 - DNA, 19 bp, Homo sapiens
  siRNA target sequence for CGI-07 (NM_015938.2,1429-1447).
gaaaggcaataccaagatt

SEQ ID NO: 264396 - DNA, 19 bp, Homo sapiens
  siRNA target sequence for CGI-07 (NM_015938.2,1540-1558).
gaaggagcacctcgaatta

SEQ ID NO: 264397 - DNA, 19 bp, Homo sapiens
  siRNA target sequence for CGI-07 (NM_015938.2,1544-1562).
gagcacctcgaattagtct

SEQ ID NO: 264398 - DNA, 19 bp, Homo sapiens
  siRNA target sequence for CYC1 (NM_001916.2,165-183).
cccgaggccggaaagtgat

SEQ ID NO: 264399 - DNA, 19 bp, Homo sapiens
  siRNA target sequence for CYC1 (NM_001916.2,336-354).
ggaggggtttccaggtata

SEQ ID NO: 264400 - DNA, 19 bp, Homo sapiens
  siRNA target sequence for CYC1 (NM_001916.2,337-355).
gaggggtttccaggtatat

SEQ ID NO: 264401 - DNA, 19 bp, Homo sapiens
  siRNA target sequence for CYC1 (NM_001916.2,342-360).
gtttccaggtatataagca

SEQ ID NO: 264402 - DNA, 19 bp, Homo sapiens
  siRNA target sequence for CYC1 (NM_001916.2,510-528).
ggaagctgttcgactattt

SEQ ID NO: 264403 - DNA, 19 bp, Homo sapiens
  siRNA target sequence for CYC1 (NM_001916.2,520-538).
cgactatttcccaaaacca

SEQ ID NO: 264404 - DNA, 19 bp, Homo sapiens
  siRNA target sequence for CYC1 (NM_001916.2,521-539).
gactatttcccaaaaccat

SEQ ID NO: 264405 - DNA, 19 bp, Homo sapiens
  siRNA target sequence for CYC1 (NM_001916.2,745-763).
catctacacagatgtctta

SEQ ID NO: 264406 - DNA, 19 bp, Homo sapiens
  siRNA target sequence for CYC1 (NM_001916.2,751-769).
cacagatgtcttagagttt

SEQ ID NO: 264407 - DNA, 19 bp, Homo sapiens
  siRNA target sequence for CYC1 (NM_001916.2,864-882).
gcatggggctcaagatgtt

SEQ ID NO: 264408 - DNA, 19 bp, Homo sapiens
  siRNA target sequence for DEGS (NM_003676.2,122-140).
gcgtctcgcgggaagactt

SEQ ID NO: 264409 - DNA, 19 bp, Homo sapiens
  siRNA target sequence for DEGS (NM_003676.2,192-210).
ggcaaagtatccagagata

SEQ ID NO: 264410 - DNA, 19 bp, Homo sapiens
  siRNA target sequence for DEGS (NM_003676.2,226-244).
cctgatcccaatttgatat

SEQ ID NO: 264411 - DNA, 19 bp, Homo sapiens
  siRNA target sequence for DEGS (NM_003676.2,229-247).
gatcccaatttgatatgga

SEQ ID NO: 264412 - DNA, 19 bp, Homo sapiens
  siRNA target sequence for DEGS (NM_003676.2,232-250).
cccaatttgatatggatta

SEQ ID NO: 264413 - DNA, 19 bp, Homo sapiens
  siRNA target sequence for DEGS (NM_003676.2,267-285).
cacccagttgggtgcattt

SEQ ID NO: 264414 - DNA, 19 bp, Homo sapiens
  siRNA target sequence for DEGS (NM_003676.2,276-294).
gggtgcattttacatagta

SEQ ID NO: 264415 - DNA, 19 bp, Homo sapiens
  siRNA target sequence for DEGS (NM_003676.2,277-295).
ggtgcattttacatagtaa

SEQ ID NO: 264416 - DNA, 19 bp, Homo sapiens
  siRNA target sequence for DEGS (NM_003676.2,304-322).
gactggaaatgggtcatat

SEQ ID NO: 264417 - DNA, 19 bp, Homo sapiens
  siRNA target sequence for DEGS (NM_003676.2,348-366).
cattaaccactcaatgact

SEQ ID NO: 264418 - DNA, 19 bp, Homo sapiens
  siRNA target sequence for DEGS (NM_003676.2,422-440).
ggaatcgctggtttggaat

SEQ ID NO: 264419 - DNA, 19 bp, Homo sapiens
  siRNA target sequence for DEGS (NM_003676.2,432-450).
gtttggaatgtttgctaat

SEQ ID NO: 264420 - DNA, 19 bp, Homo sapiens
  siRNA target sequence for DEGS (NM_003676.2,451-469).
cttcctattgggattccat

SEQ ID NO: 264421 - DNA, 19 bp, Homo sapiens
  siRNA target sequence for DEGS (NM_003676.2,454-472).
cctattgggattccatatt

SEQ ID NO: 264422 - DNA, 19 bp, Homo sapiens
  siRNA target sequence for DEGS (NM_003676.2,466-484).
ccatattcaatttccttta

SEQ ID NO: 264423 - DNA, 19 bp, Homo sapiens
  siRNA target sequence for DEGS (NM_003676.2,489-507).
gtatcacatggatcatcat

SEQ ID NO: 264424 - DNA, 19 bp, Homo sapiens
  siRNA target sequence for DEGS (NM_003676.2,521-539).
ctgatggcgtcgatgtaga

SEQ ID NO: 264425 - DNA, 19 bp, Homo sapiens
  siRNA target sequence for DEGS (NM_003676.2,523-541).
gatggcgtcgatgtagata

SEQ ID NO: 264426 - DNA, 19 bp, Homo sapiens
  siRNA target sequence for DEGS (NM_003676.2,528-546).
cgtcgatgtagatattcct

SEQ ID NO: 264427 - DNA, 19 bp, Homo sapiens
  siRNA target sequence for DEGS (NM_003676.2,529-547).
gtcgatgtagatattccta

SEQ ID NO: 264428 - DNA, 19 bp, Homo sapiens
  siRNA target sequence for DEGS (NM_003676.2,567-585).
cttctgtaccgctttcaga

SEQ ID NO: 264429 - DNA, 19 bp, Homo sapiens
  siRNA target sequence for DEGS (NM_003676.2,572-590).
gtaccgctttcagaaagtt

SEQ ID NO: 264430 - DNA, 19 bp, Homo sapiens
  siRNA target sequence for DEGS (NM_003676.2,623-641).
cctttcgacctctgttcat

SEQ ID NO: 264431 - DNA, 19 bp, Homo sapiens
  siRNA target sequence for DEGS (NM_003676.2,681-699).
cgtggcacaggtcactttt

SEQ ID NO: 264432 - DNA, 19 bp, Homo sapiens
  siRNA target sequence for DEGS (NM_003676.2,688-706).
caggtcacttttgacattt

SEQ ID NO: 264433 - DNA, 19 bp, Homo sapiens
  siRNA target sequence for DEGS (NM_003676.2,724-742).
ggaattaaatccttagtct

SEQ ID NO: 264434 - DNA, 19 bp, Homo sapiens
  siRNA target sequence for DEGS (NM_003676.2,725-743).
gaattaaatccttagtcta

SEQ ID NO: 264435 - DNA, 19 bp, Homo sapiens
  siRNA target sequence for DEGS (NM_003676.2,771-789).
gggtttgcacccaatttct

SEQ ID NO: 264436 - DNA, 19 bp, Homo sapiens
  siRNA target sequence for DEGS (NM_003676.2,802-820).
gctgagcattacatgttct

SEQ ID NO: 264437 - DNA, 19 bp, Homo sapiens
  siRNA target sequence for DEGS (NM_003676.2,805-823).
gagcattacatgttcttaa

SEQ ID NO: 264438 - DNA, 19 bp, Homo sapiens
  siRNA target sequence for DEGS (NM_003676.2,819-837).
cttaaagggtcatgaaact

SEQ ID NO: 264439 - DNA, 19 bp, Homo sapiens
  siRNA target sequence for DEGS (NM_003676.2,826-844).
ggtcatgaaacttactcat

SEQ ID NO: 264440 - DNA, 19 bp, Homo sapiens
  siRNA target sequence for DEGS (NM_003676.2,827-845).
gtcatgaaacttactcata

SEQ ID NO: 264441 - DNA, 19 bp, Homo sapiens
  siRNA target sequence for DEGS (NM_003676.2,850-868).
gggcctctgaatttactta

SEQ ID NO: 264442 - DNA, 19 bp, Homo sapiens
  siRNA target sequence for DEGS (NM_003676.2,854-872).
ctctgaatttacttacctt

SEQ ID NO: 264443 - DNA, 19 bp, Homo sapiens
  siRNA target sequence for DEGS (NM_003676.2,858-876).
gaatttacttaccttcaat

SEQ ID NO: 264444 - DNA, 19 bp, Homo sapiens
  siRNA target sequence for DEGS (NM_003676.2,870-888).
cttcaatgtgggttatcat

SEQ ID NO: 264445 - DNA, 19 bp, Homo sapiens
  siRNA target sequence for DEGS (NM_003676.2,873-891).
caatgtgggttatcataat

SEQ ID NO: 264446 - DNA, 19 bp, Homo sapiens
  siRNA target sequence for DEGS (NM_003676.2,949-967).
gcagctgaatactatgaca

SEQ ID NO: 264447 - DNA, 19 bp, Homo sapiens
  siRNA target sequence for DEGS (NM_003676.2,978-996).
ctacaattcctggataaaa

SEQ ID NO: 264448 - DNA, 19 bp, Homo sapiens
  siRNA target sequence for DEGS (NM_003676.2,986-1004).
cctggataaaagtactgta

SEQ ID NO: 264449 - DNA, 19 bp, Homo sapiens
  siRNA target sequence for DEGS (NM_003676.2,990-1008).
gataaaagtactgtatgat

SEQ ID NO: 264450 - DNA, 19 bp, Homo sapiens
  siRNA target sequence for DISP1 (NM_032890.2,319-337).
cttaatggcacggtcaaat

SEQ ID NO: 264451 - DNA, 19 bp, Homo sapiens
  siRNA target sequence for DISP1 (NM_032890.2,393-411).
ccatccttgcccataccat

SEQ ID NO: 264452 - DNA, 19 bp, Homo sapiens
  siRNA target sequence for DISP1 (NM_032890.2,501-519).
gccacactccgagtattct

SEQ ID NO: 264453 - DNA, 19 bp, Homo sapiens
  siRNA target sequence for DISP1 (NM_032890.2,513-531).
gtattctgcatctctttgt

SEQ ID NO: 264454 - DNA, 19 bp, Homo sapiens
  siRNA target sequence for DISP1 (NM_032890.2,538-556).
cattcacctgtgtatcaga

SEQ ID NO: 264455 - DNA, 19 bp, Homo sapiens
  siRNA target sequence for DISP1 (NM_032890.2,602-620).
cgtggcctgaccattttca

SEQ ID NO: 264456 - DNA, 19 bp, Homo sapiens
  siRNA target sequence for DISP1 (NM_032890.2,656-674).
gaccatccagacctttcaa

SEQ ID NO: 264457 - DNA, 19 bp, Homo sapiens
  siRNA target sequence for DISP1 (NM_032890.2,758-776).
ccttggttggagtattagt

SEQ ID NO: 264458 - DNA, 19 bp, Homo sapiens
  siRNA target sequence for DISP1 (NM_032890.2,830-848).
cagcaataggccagagatt

SEQ ID NO: 264459 - DNA, 19 bp, Homo sapiens
  siRNA target sequence for DISP1 (NM_032890.2,843-861).
gagattggtcacatggaat

SEQ ID NO: 264460 - DNA, 19 bp, Homo sapiens
  siRNA target sequence for DISP1 (NM_032890.2,898-916).
gcaaattatccctttaaat

SEQ ID NO: 264461 - DNA, 19 bp, Homo sapiens
  siRNA target sequence for DISP1 (NM_032890.2,899-917).
caaattatccctttaaata

SEQ ID NO: 264462 - DNA, 19 bp, Homo sapiens
  siRNA target sequence for DISP1 (NM_032890.2,956-974).
ggtcagatgatcattatga

SEQ ID NO: 264463 - DNA, 19 bp, Homo sapiens
  siRNA target sequence for DISP1 (NM_032890.2,957-975).
gtcagatgatcattatgaa

SEQ ID NO: 264464 - DNA, 19 bp, Homo sapiens
  siRNA target sequence for DISP1 (NM_032890.2,1043-1061).
gatattccagagtggtatt

SEQ ID NO: 264465 - DNA, 19 bp, Homo sapiens
  siRNA target sequence for DISP1 (NM_032890.2,1067-1085).
catctggaggggagacatt

SEQ ID NO: 264466 - DNA, 19 bp, Homo sapiens
  siRNA target sequence for DISP1 (NM_032890.2,1072-1090).
ggaggggagacattatgga

SEQ ID NO: 264467 - DNA, 19 bp, Homo sapiens
  siRNA target sequence for DISP1 (NM_032890.2,1073-1091).
gaggggagacattatggaa

SEQ ID NO: 264468 - DNA, 19 bp, Homo sapiens
  siRNA target sequence for DISP1 (NM_032890.2,1080-1098).
gacattatggaatttacct

SEQ ID NO: 264469 - DNA, 19 bp, Homo sapiens
  siRNA target sequence for DISP1 (NM_032890.2,1096-1114).
cctgcaattaaatcaatgt

SEQ ID NO: 264470 - DNA, 19 bp, Homo sapiens
  siRNA target sequence for DISP1 (NM_032890.2,1109-1127).
caatgtgcaatgtagataa

SEQ ID NO: 264471 - DNA, 19 bp, Homo sapiens
  siRNA target sequence for DISP1 (NM_032890.2,1123-1141).
gataattccaggatcagat

SEQ ID NO: 264472 - DNA, 19 bp, Homo sapiens
  siRNA target sequence for DISP1 (NM_032890.2,1221-1239).
cgccattctgaacaataga

SEQ ID NO: 264473 - DNA, 19 bp, Homo sapiens
  siRNA target sequence for DISP1 (NM_032890.2,1222-1240).
gccattctgaacaatagat

SEQ ID NO: 264474 - DNA, 19 bp, Homo sapiens
  siRNA target sequence for DISP1 (NM_032890.2,1265-1283).
gagacgtttctcatacctt

SEQ ID NO: 264475 - DNA, 19 bp, Homo sapiens
  siRNA target sequence for DISP1 (NM_032890.2,1294-1312).
cggacttgtgccaaacact

SEQ ID NO: 264476 - DNA, 19 bp, Homo sapiens
  siRNA target sequence for DISP1 (NM_032890.2,1295-1313).
ggacttgtgccaaacacta

SEQ ID NO: 264477 - DNA, 19 bp, Homo sapiens
  siRNA target sequence for DISP1 (NM_032890.2,1393-1411).
cgcaaatgtaccaagtaca

SEQ ID NO: 264478 - DNA, 19 bp, Homo sapiens
  siRNA target sequence for DISP1 (NM_032890.2,1461-1479).
cccaaagacggctgactat

SEQ ID NO: 264479 - DNA, 19 bp, Homo sapiens
  siRNA target sequence for DISP1 (NM_032890.2,1476-1494).
ctatgccacgccagcttta

SEQ ID NO: 264480 - DNA, 19 bp, Homo sapiens
  siRNA target sequence for DISP1 (NM_032890.2,1595-1613).
ccatcaccgggattgagtt

SEQ ID NO: 264481 - DNA, 19 bp, Homo sapiens
  siRNA target sequence for DISP1 (NM_032890.2,1596-1614).
catcaccgggattgagttt

SEQ ID NO: 264482 - DNA, 19 bp, Homo sapiens
  siRNA target sequence for DISP1 (NM_032890.2,1666-1684).
cctgccatagccattgtga

SEQ ID NO: 264483 - DNA, 19 bp, Homo sapiens
  siRNA target sequence for DISP1 (NM_032890.2,1732-1750).
ctgatgacaatgtttgcaa

SEQ ID NO: 264484 - DNA, 19 bp, Homo sapiens
  siRNA target sequence for DISP1 (NM_032890.2,1757-1775).
gttctttgattgtttccta

SEQ ID NO: 264485 - DNA, 19 bp, Homo sapiens
  siRNA target sequence for DISP1 (NM_032890.2,1789-1807).
gtagtatttcacttcgaat

SEQ ID NO: 264486 - DNA, 19 bp, Homo sapiens
  siRNA target sequence for DISP1 (NM_032890.2,1997-2015).
ctgccttttatgctaacta

SEQ ID NO: 264487 - DNA, 19 bp, Homo sapiens
  siRNA target sequence for DISP1 (NM_032890.2,2037-2055).
ccgatgctttggggtttat

SEQ ID NO: 264488 - DNA, 19 bp, Homo sapiens
  siRNA target sequence for DISP1 (NM_032890.2,2057-2075).
cggggacagctatattggt

SEQ ID NO: 264489 - DNA, 19 bp, Homo sapiens
  siRNA target sequence for DISP1 (NM_032890.2,2063-2081).
cagctatattggtgaatta

SEQ ID NO: 264490 - DNA, 19 bp, Homo sapiens
  siRNA target sequence for DISP1 (NM_032890.2,2118-2136).
gctgcatgagcggtatctt

SEQ ID NO: 264491 - DNA, 19 bp, Homo sapiens
  siRNA target sequence for DISP1 (NM_032890.2,2121-2139).
gcatgagcggtatcttctt

SEQ ID NO: 264492 - DNA, 19 bp, Homo sapiens
  siRNA target sequence for DISP1 (NM_032890.2,2127-2145).
gcggtatcttcttaatata

SEQ ID NO: 264493 - DNA, 19 bp, Homo sapiens
  siRNA target sequence for DISP1 (NM_032890.2,2128-2146).
cggtatcttcttaatatat

SEQ ID NO: 264494 - DNA, 19 bp, Homo sapiens
  siRNA target sequence for DISP1 (NM_032890.2,2163-2181).
gccccagcagcaaatatat

SEQ ID NO: 264495 - DNA, 19 bp, Homo sapiens
  siRNA target sequence for DISP1 (NM_032890.2,2165-2183).
cccagcagcaaatatatga

SEQ ID NO: 264496 - DNA, 19 bp, Homo sapiens
  siRNA target sequence for DISP1 (NM_032890.2,2217-2235).
gtgccacaaagtactcttt

SEQ ID NO: 264497 - DNA, 19 bp, Homo sapiens
  siRNA target sequence for DISP1 (NM_032890.2,2245-2263).
gaagcatctcgaatttttt

SEQ ID NO: 264498 - DNA, 19 bp, Homo sapiens
  siRNA target sequence for DISP1 (NM_032890.2,2249-2267).
catctcgaatttttttcga

SEQ ID NO: 264499 - DNA, 19 bp, Homo sapiens
  siRNA target sequence for DISP1 (NM_032890.2,2252-2270).
ctcgaatttttttcgaaaa

SEQ ID NO: 264500 - DNA, 19 bp, Homo sapiens
  siRNA target sequence for DISP1 (NM_032890.2,2299-2317).
cgctacctttggctgtttt

SEQ ID NO: 264501 - DNA, 19 bp, Homo sapiens
  siRNA target sequence for DISP1 (NM_032890.2,2318-2336).
ggttccttgccttaactgt

SEQ ID NO: 264502 - DNA, 19 bp, Homo sapiens
  siRNA target sequence for DISP1 (NM_032890.2,2319-2337).
gttccttgccttaactgta

SEQ ID NO: 264503 - DNA, 19 bp, Homo sapiens
  siRNA target sequence for DISP1 (NM_032890.2,2338-2356).
ggtggggcctacattgtat

SEQ ID NO: 264504 - DNA, 19 bp, Homo sapiens
  siRNA target sequence for DISP1 (NM_032890.2,2341-2359).
ggggcctacattgtatgta

SEQ ID NO: 264505 - DNA, 19 bp, Homo sapiens
  siRNA target sequence for DISP1 (NM_032890.2,2343-2361).
ggcctacattgtatgtata

SEQ ID NO: 264506 - DNA, 19 bp, Homo sapiens
  siRNA target sequence for DISP1 (NM_032890.2,2357-2375).
gtataaatccaaagatgaa

SEQ ID NO: 264507 - DNA, 19 bp, Homo sapiens
  siRNA target sequence for DISP1 (NM_032890.2,2434-2452).
cgttatgatgctgaataca

SEQ ID NO: 264508 - DNA, 19 bp, Homo sapiens
  siRNA target sequence for DISP1 (NM_032890.2,2522-2540).
gcgtgtccccagaagacaa

SEQ ID NO: 264509 - DNA, 19 bp, Homo sapiens
  siRNA target sequence for DISP1 (NM_032890.2,2564-2582).
gtaaagggaagttgacatt

SEQ ID NO: 264510 - DNA, 19 bp, Homo sapiens
  siRNA target sequence for DISP1 (NM_032890.2,2569-2587).
gggaagttgacattagata

SEQ ID NO: 264511 - DNA, 19 bp, Homo sapiens
  siRNA target sequence for DISP1 (NM_032890.2,2696-2714).
gctgcttcattgagacatt

SEQ ID NO: 264512 - DNA, 19 bp, Homo sapiens
  siRNA target sequence for DISP1 (NM_032890.2,2813-2831).
gcatcaagagagctatcat

SEQ ID NO: 264513 - DNA, 19 bp, Homo sapiens
  siRNA target sequence for DISP1 (NM_032890.2,2843-2861).
ggagtacagggtaccattt

SEQ ID NO: 264514 - DNA, 19 bp, Homo sapiens
  siRNA target sequence for DISP1 (NM_032890.2,2852-2870).
ggtaccatttggatagcaa

SEQ ID NO: 264515 - DNA, 19 bp, Homo sapiens
  siRNA target sequence for DISP1 (NM_032890.2,2874-2892).
cccagggccgaggtttgat

SEQ ID NO: 264516 - DNA, 19 bp, Homo sapiens
  siRNA target sequence for DISP1 (NM_032890.2,2875-2893).
ccagggccgaggtttgata

SEQ ID NO: 264517 - DNA, 19 bp, Homo sapiens
  siRNA target sequence for DISP1 (NM_032890.2,2876-2894).
cagggccgaggtttgatat

SEQ ID NO: 264518 - DNA, 19 bp, Homo sapiens
  siRNA target sequence for DISP1 (NM_032890.2,2878-2896).
gggccgaggtttgatatca

SEQ ID NO: 264519 - DNA, 19 bp, Homo sapiens
  siRNA target sequence for DISP1 (NM_032890.2,2879-2897).
ggccgaggtttgatatcaa

SEQ ID NO: 264520 - DNA, 19 bp, Homo sapiens
  siRNA target sequence for DISP1 (NM_032890.2,2880-2898).
gccgaggtttgatatcaat

SEQ ID NO: 264521 - DNA, 19 bp, Homo sapiens
  siRNA target sequence for DISP1 (NM_032890.2,2882-2900).
cgaggtttgatatcaatga

SEQ ID NO: 264522 - DNA, 19 bp, Homo sapiens
  siRNA target sequence for DISP1 (NM_032890.2,2883-2901).
gaggtttgatatcaatgat

SEQ ID NO: 264523 - DNA, 19 bp, Homo sapiens
  siRNA target sequence for DISP1 (NM_032890.2,2909-2927).
gggcagtggtgttagagtt

SEQ ID NO: 264524 - DNA, 19 bp, Homo sapiens
  siRNA target sequence for DISP1 (NM_032890.2,2983-3001).
gaggtggactcgtggatat

SEQ ID NO: 264525 - DNA, 19 bp, Homo sapiens
  siRNA target sequence for DISP1 (NM_032890.2,3051-3069).
cagcaatctggagttctat

SEQ ID NO: 264526 - DNA, 19 bp, Homo sapiens
  siRNA target sequence for DISP1 (NM_032890.2,3053-3071).
gcaatctggagttctatga

SEQ ID NO: 264527 - DNA, 19 bp, Homo sapiens
  siRNA target sequence for DISP1 (NM_032890.2,3139-3157).
gtgatgctgctgacaactt

SEQ ID NO: 264528 - DNA, 19 bp, Homo sapiens
  siRNA target sequence for DISP1 (NM_032890.2,3162-3180).
catcatcataagcctttat

SEQ ID NO: 264529 - DNA, 19 bp, Homo sapiens
  siRNA target sequence for DISP1 (NM_032890.2,3191-3209).
caattgctggaacgatatt

SEQ ID NO: 264530 - DNA, 19 bp, Homo sapiens
  siRNA target sequence for DISP1 (NM_032890.2,3196-3214).
gctggaacgatatttgtca

SEQ ID NO: 264531 - DNA, 19 bp, Homo sapiens
  siRNA target sequence for DISP1 (NM_032890.2,3238-3256).
ggctgggagctcaatgtgt

SEQ ID NO: 264532 - DNA, 19 bp, Homo sapiens
  siRNA target sequence for DISP1 (NM_032890.2,3239-3257).
gctgggagctcaatgtgtt

SEQ ID NO: 264533 - DNA, 19 bp, Homo sapiens
  siRNA target sequence for DISP1 (NM_032890.2,3244-3262).
gagctcaatgtgttggaat

SEQ ID NO: 264534 - DNA, 19 bp, Homo sapiens
  siRNA target sequence for DISP1 (NM_032890.2,3438-3456).
gatgccctccacagttcta

SEQ ID NO: 264535 - DNA, 19 bp, Homo sapiens
  siRNA target sequence for DISP1 (NM_032890.2,3487-3505).
ctcatcatgtgtatcagtt

SEQ ID NO: 264536 - DNA, 19 bp, Homo sapiens
  siRNA target sequence for DISP1 (NM_032890.2,3508-3526).
gctttcgccaccttctttt

SEQ ID NO: 264537 - DNA, 19 bp, Homo sapiens
  siRNA target sequence for DISP1 (NM_032890.2,3558-3576).
gggtacctgtggtcagatt

SEQ ID NO: 264538 - DNA, 19 bp, Homo sapiens
  siRNA target sequence for DISP1 (NM_032890.2,3564-3582).
ctgtggtcagattccttta

SEQ ID NO: 264539 - DNA, 19 bp, Homo sapiens
  siRNA target sequence for DISP1 (NM_032890.2,3568-3586).
ggtcagattcctttaccta

SEQ ID NO: 264540 - DNA, 19 bp, Homo sapiens
  siRNA target sequence for DISP1 (NM_032890.2,3569-3587).
gtcagattcctttacctaa

SEQ ID NO: 264541 - DNA, 19 bp, Homo sapiens
  siRNA target sequence for DISP1 (NM_032890.2,3612-3630).
ccatgccttgtctacaagt

SEQ ID NO: 264542 - DNA, 19 bp, Homo sapiens
  siRNA target sequence for DISP1 (NM_032890.2,3759-3777).
ccctgagaagaccacttat

SEQ ID NO: 264543 - DNA, 19 bp, Homo sapiens
  siRNA target sequence for DISP1 (NM_032890.2,3836-3854).
ctgtgcatgcagcttacaa

SEQ ID NO: 264544 - DNA, 19 bp, Homo sapiens
  siRNA target sequence for DISP1 (NM_032890.2,3838-3856).
gtgcatgcagcttacaaca

SEQ ID NO: 264545 - DNA, 19 bp, Homo sapiens
  siRNA target sequence for DISP1 (NM_032890.2,3885-3903).
cgctggctctgccttgtta

SEQ ID NO: 264546 - DNA, 19 bp, Homo sapiens
  siRNA target sequence for DISP1 (NM_032890.2,3973-3991).
gcctacaaacacttgaact

SEQ ID NO: 264547 - DNA, 19 bp, Homo sapiens
  siRNA target sequence for DISP1 (NM_032890.2,4196-4214).
ctctgcctaggaatttttt

SEQ ID NO: 264548 - DNA, 19 bp, Homo sapiens
  siRNA target sequence for DISP1 (NM_032890.2,4313-4331).
cagagccatcgtcatttgt

SEQ ID NO: 264549 - DNA, 19 bp, Homo sapiens
  siRNA target sequence for DISP1 (NM_032890.2,4315-4333).
gagccatcgtcatttgtct

SEQ ID NO: 264550 - DNA, 19 bp, Homo sapiens
  siRNA target sequence for DISP1 (NM_032890.2,4340-4358).
gcactggatcgttactcaa

SEQ ID NO: 264551 - DNA, 19 bp, Homo sapiens
  siRNA target sequence for DISP1 (NM_032890.2,4341-4359).
cactggatcgttactcaaa

SEQ ID NO: 264552 - DNA, 19 bp, Homo sapiens
  siRNA target sequence for DISP1 (NM_032890.2,4345-4363).
ggatcgttactcaaaacgt

SEQ ID NO: 264553 - DNA, 19 bp, Homo sapiens
  siRNA target sequence for DISP1 (NM_032890.2,4364-4382).
gttgcgaccccgagaataa

SEQ ID NO: 264554 - DNA, 19 bp, Homo sapiens
  siRNA target sequence for DISP1 (NM_032890.2,4367-4385).
gcgaccccgagaataaaca

SEQ ID NO: 264555 - DNA, 19 bp, Homo sapiens
  siRNA target sequence for DISP1 (NM_032890.2,4368-4386).
cgaccccgagaataaacaa

SEQ ID NO: 264556 - DNA, 19 bp, Homo sapiens
  siRNA target sequence for DISP1 (NM_032890.2,4493-4511).
gtgtgaactcagaacattt

SEQ ID NO: 264557 - DNA, 19 bp, Homo sapiens
  siRNA target sequence for DISP1 (NM_032890.2,4522-4540).
gaaccaaaagtcctattta

SEQ ID NO: 264558 - DNA, 19 bp, Homo sapiens
  siRNA target sequence for DISP1 (NM_032890.2,4526-4544).
caaaagtcctatttaatca

SEQ ID NO: 264559 - DNA, 19 bp, Homo sapiens
  siRNA target sequence for DISP1 (NM_032890.2,4569-4587).
gtcttgcccaaataattca

SEQ ID NO: 264560 - DNA, 19 bp, Homo sapiens
  siRNA target sequence for DISP1 (NM_032890.2,4691-4709).
ctggtgaaagtttgttaat

SEQ ID NO: 264561 - DNA, 19 bp, Homo sapiens
  siRNA target sequence for DKFZp434F054 (NM_032259.1,891-909).
gcaggccgtagcatcttca

SEQ ID NO: 264562 - DNA, 19 bp, Homo sapiens
  siRNA target sequence for DKFZp434F054 (NM_032259.1,892-910).
caggccgtagcatcttcaa

SEQ ID NO: 264563 - DNA, 19 bp, Homo sapiens
  siRNA target sequence for DKFZp434F054 (NM_032259.1,894-912).
ggccgtagcatcttcaaga

SEQ ID NO: 264564 - DNA, 19 bp, Homo sapiens
  siRNA target sequence for DKFZp434F054 (NM_032259.1,895-913).
gccgtagcatcttcaagat

SEQ ID NO: 264565 - DNA, 19 bp, Homo sapiens
  siRNA target sequence for DKFZp434F054 (NM_032259.1,967-985).
gcaagccttcgcttaacct

SEQ ID NO: 264566 - DNA, 19 bp, Homo sapiens
  siRNA target sequence for DKFZp434F054 (NM_032259.1,1116-1134).
cacaagcgcacggtaaaca

SEQ ID NO: 264567 - DNA, 19 bp, Homo sapiens
  siRNA target sequence for DKFZp434F054 (NM_032259.1,1118-1136).
caagcgcacggtaaacaaa

SEQ ID NO: 264568 - DNA, 19 bp, Homo sapiens
  siRNA target sequence for DKFZp434F054 (NM_032259.1,1122-1140).
cgcacggtaaacaaagtct

SEQ ID NO: 264569 - DNA, 19 bp, Homo sapiens
  siRNA target sequence for DKFZp434F054 (NM_032259.1,1260-1278).
cgggacgtgcagttcagta

SEQ ID NO: 264570 - DNA, 19 bp, Homo sapiens
  siRNA target sequence for DKFZp434F054 (NM_032259.1,1353-1371).
cggtgcgagaggatgttca

SEQ ID NO: 264571 - DNA, 19 bp, Homo sapiens
  siRNA target sequence for DKFZp434F054 (NM_032259.1,1580-1598).
ggtggaccacaacatctat

SEQ ID NO: 264572 - DNA, 19 bp, Homo sapiens
  siRNA target sequence for DKFZp434F054 (NM_032259.1,1881-1899).
cgccaccccatcttcttta

SEQ ID NO: 264573 - DNA, 19 bp, Homo sapiens
  siRNA target sequence for DKFZp434F054 (NM_032259.1,2110-2128).
ccatgctgcggatcatcta

SEQ ID NO: 264574 - DNA, 19 bp, Homo sapiens
  siRNA target sequence for DKFZp434F054 (NM_032259.1,2191-2209).
gtggcctcccgctcatgaa

SEQ ID NO: 264575 - DNA, 19 bp, Homo sapiens
  siRNA target sequence for DKFZp434F054 (NM_032259.1,2196-2214).
ctcccgctcatgaacagtt

SEQ ID NO: 264576 - DNA, 19 bp, Homo sapiens
  siRNA target sequence for DKFZp434F054 (NM_032259.1,2200-2218).
cgctcatgaacagtttcaa

SEQ ID NO: 264577 - DNA, 19 bp, Homo sapiens
  siRNA target sequence for DKFZp434F054 (NM_032259.1,2212-2230).
gtttcaacctgaaggatat

SEQ ID NO: 264578 - DNA, 19 bp, Homo sapiens
  siRNA target sequence for DKFZP564D0478 (NM_032125.1,62-80).
cggacatgaagcaatatca

SEQ ID NO: 264579 - DNA, 19 bp, Homo sapiens
  siRNA target sequence for DKFZP564D0478 (NM_032125.1,152-170).
cggtgctcacgtggttttt

SEQ ID NO: 264580 - DNA, 19 bp, Homo sapiens
  siRNA target sequence for DKFZP564D0478 (NM_032125.1,198-216).
cacatccacaggagtcatt

SEQ ID NO: 264581 - DNA, 19 bp, Homo sapiens
  siRNA target sequence for DKFZP564D0478 (NM_032125.1,265-283).
ggaaagcctgccaagtact

SEQ ID NO: 264582 - DNA, 19 bp, Homo sapiens
  siRNA target sequence for DKFZP564D0478 (NM_032125.1,367-385).
caccgcatgcacaatctct

SEQ ID NO: 264583 - DNA, 19 bp, Homo sapiens
  siRNA target sequence for DKFZP564D0478 (NM_032125.1,446-464).
gcaccaactggaatatggt

SEQ ID NO: 264584 - DNA, 19 bp, Homo sapiens
  siRNA target sequence for DKFZP564D0478 (NM_032125.1,463-481).
gtgacgctctgcttcttct

SEQ ID NO: 264585 - DNA, 19 bp, Homo sapiens
  siRNA target sequence for DKFZP564D0478 (NM_032125.1,566-584).
ccgtcagcctggtctttaa

SEQ ID NO: 264586 - DNA, 19 bp, Homo sapiens
  siRNA target sequence for EHZF (NM_015461.1,191-209).
ccccaactgtaaacttgaa

SEQ ID NO: 264587 - DNA, 19 bp, Homo sapiens
  siRNA target sequence for EHZF (NM_015461.1,193-211).
ccaactgtaaacttgaaga

SEQ ID NO: 264588 - DNA, 19 bp, Homo sapiens
  siRNA target sequence for EHZF (NM_015461.1,226-244).
gagaggcactagattgtaa

SEQ ID NO: 264589 - DNA, 19 bp, Homo sapiens
  siRNA target sequence for EHZF (NM_015461.1,231-249).
gcactagattgtaagaaga

SEQ ID NO: 264590 - DNA, 19 bp, Homo sapiens
  siRNA target sequence for EHZF (NM_015461.1,318-336).
gaatcgctgagcgatatca

SEQ ID NO: 264591 - DNA, 19 bp, Homo sapiens
  siRNA target sequence for EHZF (NM_015461.1,328-346).
gcgatatcacagaacacaa

SEQ ID NO: 264592 - DNA, 19 bp, Homo sapiens
  siRNA target sequence for EHZF (NM_015461.1,337-355).
cagaacacaagattaatca

SEQ ID NO: 264593 - DNA, 19 bp, Homo sapiens
  siRNA target sequence for EHZF (NM_015461.1,495-513).
cttccatacccgtgtcaat

SEQ ID NO: 264594 - DNA, 19 bp, Homo sapiens
  siRNA target sequence for EHZF (NM_015461.1,498-516).
ccatacccgtgtcaattct

SEQ ID NO: 264595 - DNA, 19 bp, Homo sapiens
  siRNA target sequence for EHZF (NM_015461.1,604-622).
gtaggctgttcaaacacaa

SEQ ID NO: 264596 - DNA, 19 bp, Homo sapiens
  siRNA target sequence for EHZF (NM_015461.1,628-646).
gccgagatcgccacataaa

SEQ ID NO: 264597 - DNA, 19 bp, Homo sapiens
  siRNA target sequence for EHZF (NM_015461.1,671-689).
ccactgcagtgaatgtgat

SEQ ID NO: 264598 - DNA, 19 bp, Homo sapiens
  siRNA target sequence for EHZF (NM_015461.1,700-718).
ccagaagtgatcacttgaa

SEQ ID NO: 264599 - DNA, 19 bp, Homo sapiens
  siRNA target sequence for EHZF (NM_015461.1,716-734).
gaagatccacttaaagact

SEQ ID NO: 264600 - DNA, 19 bp, Homo sapiens
  siRNA target sequence for EHZF (NM_015461.1,739-757).
cgtccaacaagccatataa

SEQ ID NO: 264601 - DNA, 19 bp, Homo sapiens
  siRNA target sequence for EHZF (NM_015461.1,740-758).
gtccaacaagccatataaa

SEQ ID NO: 264602 - DNA, 19 bp, Homo sapiens
  siRNA target sequence for EHZF (NM_015461.1,920-938).
cccggaagacctccaaaaa

SEQ ID NO: 264603 - DNA, 19 bp, Homo sapiens
  siRNA target sequence for EHZF (NM_015461.1,922-940).
cggaagacctccaaaaaca

SEQ ID NO: 264604 - DNA, 19 bp, Homo sapiens
  siRNA target sequence for EHZF (NM_015461.1,958-976).
ccgaatgctccccaaatga

SEQ ID NO: 264605 - DNA, 19 bp, Homo sapiens
  siRNA target sequence for EHZF (NM_015461.1,1076-1094).
gaactcatgcagcatttgt

SEQ ID NO: 264606 - DNA, 19 bp, Homo sapiens
  siRNA target sequence for EHZF (NM_015461.1,1188-1206).
gtcacggtgggctatacct

SEQ ID NO: 264607 - DNA, 19 bp, Homo sapiens
  siRNA target sequence for EHZF (NM_015461.1,1330-1348).
ctggtccctcgagtaaaca

SEQ ID NO: 264608 - DNA, 19 bp, Homo sapiens
  siRNA target sequence for EHZF (NM_015461.1,1336-1354).
cctcgagtaaacaagcaaa

SEQ ID NO: 264609 - DNA, 19 bp, Homo sapiens
  siRNA target sequence for EHZF (NM_015461.1,1337-1355).
ctcgagtaaacaagcaaaa

SEQ ID NO: 264610 - DNA, 19 bp, Homo sapiens
  siRNA target sequence for EHZF (NM_015461.1,1487-1505).
gccctcactctataaccta

SEQ ID NO: 264611 - DNA, 19 bp, Homo sapiens
  siRNA target sequence for EHZF (NM_015461.1,1488-1506).
ccctcactctataacctaa

SEQ ID NO: 264612 - DNA, 19 bp, Homo sapiens
  siRNA target sequence for EHZF (NM_015461.1,1489-1507).
cctcactctataacctaaa

SEQ ID NO: 264613 - DNA, 19 bp, Homo sapiens
  siRNA target sequence for EHZF (NM_015461.1,1570-1588).
ccattgtctaccagtgtaa

SEQ ID NO: 264614 - DNA, 19 bp, Homo sapiens
  siRNA target sequence for EHZF (NM_015461.1,1575-1593).
gtctaccagtgtaacttct

SEQ ID NO: 264615 - DNA, 19 bp, Homo sapiens
  siRNA target sequence for EHZF (NM_015461.1,1637-1655).
ccgatgttctcatggattt

SEQ ID NO: 264616 - DNA, 19 bp, Homo sapiens
  siRNA target sequence for EHZF (NM_015461.1,1642-1660).
gttctcatggatttgcaaa

SEQ ID NO: 264617 - DNA, 19 bp, Homo sapiens
  siRNA target sequence for EHZF (NM_015461.1,1662-1680).
cctgcagctaaagatagta

SEQ ID NO: 264618 - DNA, 19 bp, Homo sapiens
  siRNA target sequence for EHZF (NM_015461.1,1663-1681).
ctgcagctaaagatagtaa

SEQ ID NO: 264619 - DNA, 19 bp, Homo sapiens
  siRNA target sequence for EHZF (NM_015461.1,1668-1686).
gctaaagatagtaatgcat

SEQ ID NO: 264620 - DNA, 19 bp, Homo sapiens
  siRNA target sequence for EHZF (NM_015461.1,1669-1687).
ctaaagatagtaatgcatt

SEQ ID NO: 264621 - DNA, 19 bp, Homo sapiens
  siRNA target sequence for EHZF (NM_015461.1,1674-1692).
gatagtaatgcattctttt

SEQ ID NO: 264622 - DNA, 19 bp, Homo sapiens
  siRNA target sequence for EHZF (NM_015461.1,1793-1811).
gcttgggactcccaaagaa

SEQ ID NO: 264623 - DNA, 19 bp, Homo sapiens
  siRNA target sequence for EHZF (NM_015461.1,1815-1833).
gtagtagaagtctattctt

SEQ ID NO: 264624 - DNA, 19 bp, Homo sapiens
  siRNA target sequence for EHZF (NM_015461.1,1843-1861).
gtacaaattcgccaatatt

SEQ ID NO: 264625 - DNA, 19 bp, Homo sapiens
  siRNA target sequence for EHZF (NM_015461.1,1867-1885).
gcgttcttaaactgaacaa

SEQ ID NO: 264626 - DNA, 19 bp, Homo sapiens
  siRNA target sequence for EHZF (NM_015461.1,1872-1890).
cttaaactgaacaagcata

SEQ ID NO: 264627 - DNA, 19 bp, Homo sapiens
  siRNA target sequence for EHZF (NM_015461.1,1915-1933).
ccttggccctgaattatat

SEQ ID NO: 264628 - DNA, 19 bp, Homo sapiens
  siRNA target sequence for EHZF (NM_015461.1,2061-2079).
caatgtggtgctaagtaca

SEQ ID NO: 264629 - DNA, 19 bp, Homo sapiens
  siRNA target sequence for EHZF (NM_015461.1,2093-2111).
ctttcagactcacctaaaa

SEQ ID NO: 264630 - DNA, 19 bp, Homo sapiens
  siRNA target sequence for EHZF (NM_015461.1,2120-2138).
cgacactgtgcttccaaaa

SEQ ID NO: 264631 - DNA, 19 bp, Homo sapiens
  siRNA target sequence for EHZF (NM_015461.1,2149-2167).
ctcagtgcaacaaggaatt

SEQ ID NO: 264632 - DNA, 19 bp, Homo sapiens
  siRNA target sequence for EHZF (NM_015461.1,2192-2210).
gcatgttaccattcacttt

SEQ ID NO: 264633 - DNA, 19 bp, Homo sapiens
  siRNA target sequence for EHZF (NM_015461.1,2193-2211).
catgttaccattcacttta

SEQ ID NO: 264634 - DNA, 19 bp, Homo sapiens
  siRNA target sequence for EHZF (NM_015461.1,2376-2394).
gtgaagcacagtaacgaaa

SEQ ID NO: 264635 - DNA, 19 bp, Homo sapiens
  siRNA target sequence for EHZF (NM_015461.1,2386-2404).
gtaacgaaaagaaagtcta

SEQ ID NO: 264636 - DNA, 19 bp, Homo sapiens
  siRNA target sequence for EHZF (NM_015461.1,2400-2418).
gtctataggtgcacatctt

SEQ ID NO: 264637 - DNA, 19 bp, Homo sapiens
  siRNA target sequence for EHZF (NM_015461.1,2484-2502).
caagggaaagtgcataagt

SEQ ID NO: 264638 - DNA, 19 bp, Homo sapiens
  siRNA target sequence for EHZF (NM_015461.1,2628-2646).
cacttgcgagaaaaacact

SEQ ID NO: 264639 - DNA, 19 bp, Homo sapiens
  siRNA target sequence for EHZF (NM_015461.1,2826-2844).
gcagcctacactatggaaa

SEQ ID NO: 264640 - DNA, 19 bp, Homo sapiens
  siRNA target sequence for EHZF (NM_015461.1,2829-2847).
gcctacactatggaaactt

SEQ ID NO: 264641 - DNA, 19 bp, Homo sapiens
  siRNA target sequence for EHZF (NM_015461.1,2879-2897).
catcagacctggagaaagt

SEQ ID NO: 264642 - DNA, 19 bp, Homo sapiens
  siRNA target sequence for EHZF (NM_015461.1,2980-2998).
gcctccgggaacatatgca

SEQ ID NO: 264643 - DNA, 19 bp, Homo sapiens
  siRNA target sequence for EHZF (NM_015461.1,3002-3020).
ccacctaggccctgtcaaa

SEQ ID NO: 264644 - DNA, 19 bp, Homo sapiens
  siRNA target sequence for EHZF (NM_015461.1,3058-3076).
cccttttaactcttactga

SEQ ID NO: 264645 - DNA, 19 bp, Homo sapiens
  siRNA target sequence for EHZF (NM_015461.1,3078-3096).
cacaaagtcacgcatagta

SEQ ID NO: 264646 - DNA, 19 bp, Homo sapiens
  siRNA target sequence for EHZF (NM_015461.1,3111-3129).
ggaaactgccggatttgca

SEQ ID NO: 264647 - DNA, 19 bp, Homo sapiens
  siRNA target sequence for EHZF (NM_015461.1,3112-3130).
gaaactgccggatttgcaa

SEQ ID NO: 264648 - DNA, 19 bp, Homo sapiens
  siRNA target sequence for EHZF (NM_015461.1,3244-3262).
ccttggaactcaaaatcca

SEQ ID NO: 264649 - DNA, 19 bp, Homo sapiens
  siRNA target sequence for EHZF (NM_015461.1,3265-3283).
ggacgttccacatgcaaaa

SEQ ID NO: 264650 - DNA, 19 bp, Homo sapiens
  siRNA target sequence for EHZF (NM_015461.1,3322-3340).
gccagcacgtccaaaaact

SEQ ID NO: 264651 - DNA, 19 bp, Homo sapiens
  siRNA target sequence for EHZF (NM_015461.1,3324-3342).
cagcacgtccaaaaactgt

SEQ ID NO: 264652 - DNA, 19 bp, Homo sapiens
  siRNA target sequence for EHZF (NM_015461.1,3326-3344).
gcacgtccaaaaactgtat

SEQ ID NO: 264653 - DNA, 19 bp, Homo sapiens
  siRNA target sequence for EHZF (NM_015461.1,3349-3367).
gcgcatcttgcctcaaaga

SEQ ID NO: 264654 - DNA, 19 bp, Homo sapiens
  siRNA target sequence for EHZF (NM_015461.1,3351-3369).
gcatcttgcctcaaagaat

SEQ ID NO: 264655 - DNA, 19 bp, Homo sapiens
  siRNA target sequence for EHZF (NM_015461.1,3387-3405).
ctggtgaaacttgatatca

SEQ ID NO: 264656 - DNA, 19 bp, Homo sapiens
  siRNA target sequence for EHZF (NM_015461.1,3389-3407).
ggtgaaacttgatatcaat

SEQ ID NO: 264657 - DNA, 19 bp, Homo sapiens
  siRNA target sequence for EHZF (NM_015461.1,3427-3445).
gtgccggctgcgtgaatct

SEQ ID NO: 264658 - DNA, 19 bp, Homo sapiens
  siRNA target sequence for EHZF (NM_015461.1,3429-3447).
gccggctgcgtgaatctca

SEQ ID NO: 264659 - DNA, 19 bp, Homo sapiens
  siRNA target sequence for EHZF (NM_015461.1,3454-3472).
gcgccagcccaggcattaa

SEQ ID NO: 264660 - DNA, 19 bp, Homo sapiens
  siRNA target sequence for EHZF (NM_015461.1,3457-3475).
ccagcccaggcattaacgt

SEQ ID NO: 264661 - DNA, 19 bp, Homo sapiens
  siRNA target sequence for EHZF (NM_015461.1,3474-3492).
gtccctcccggcacgaata

SEQ ID NO: 264662 - DNA, 19 bp, Homo sapiens
  siRNA target sequence for EHZF (NM_015461.1,3476-3494).
ccctcccggcacgaataga

SEQ ID NO: 264663 - DNA, 19 bp, Homo sapiens
  siRNA target sequence for EHZF (NM_015461.1,3568-3586).
gctctagctgcaacgttaa

SEQ ID NO: 264664 - DNA, 19 bp, Homo sapiens
  siRNA target sequence for EHZF (NM_015461.1,3571-3589).
ctagctgcaacgttaagtt

SEQ ID NO: 264665 - DNA, 19 bp, Homo sapiens
  siRNA target sequence for EHZF (NM_015461.1,3574-3592).
gctgcaacgttaagtttga

SEQ ID NO: 264666 - DNA, 19 bp, Homo sapiens
  siRNA target sequence for EHZF (NM_015461.1,3668-3686).
gaaaacgccccaagtatca

SEQ ID NO: 264667 - DNA, 19 bp, Homo sapiens
  siRNA target sequence for EHZF (NM_015461.1,3706-3724).
cctcccagtcggatgagaa

SEQ ID NO: 264668 - DNA, 19 bp, Homo sapiens
  siRNA target sequence for EHZF (NM_015461.1,3711-3729).
cagtcggatgagaagaaga

SEQ ID NO: 264669 - DNA, 19 bp, Homo sapiens
  siRNA target sequence for EHZF (NM_015461.1,3720-3738).
gagaagaagacctatcaat

SEQ ID NO: 264670 - DNA, 19 bp, Homo sapiens
  siRNA target sequence for EHZF (NM_015461.1,3761-3779).
ctacaatgaatgggatatt

SEQ ID NO: 264671 - DNA, 19 bp, Homo sapiens
  siRNA target sequence for EHZF (NM_015461.1,3793-3811).
caaatcacatgattgatga

SEQ ID NO: 264672 - DNA, 19 bp, Homo sapiens
  siRNA target sequence for EHZF (NM_015461.1,3814-3832).
gactgaaccatgaatgcaa

SEQ ID NO: 264673 - DNA, 19 bp, Homo sapiens
  siRNA target sequence for EHZF (NM_015461.1,3924-3942).
ccagtctgctttacagtat

SEQ ID NO: 264674 - DNA, 19 bp, Homo sapiens
  siRNA target sequence for EHZF (NM_015461.1,3931-3949).
gctttacagtatttgttca

SEQ ID NO: 264675 - DNA, 19 bp, Homo sapiens
  siRNA target sequence for EHZF (NM_015461.1,3987-4005).
ggacaagaagacaagatct

SEQ ID NO: 264676 - DNA, 19 bp, Homo sapiens
  siRNA target sequence for ERdj5 (NM_018981.1,505-523).
gggcacagatcaggatttt

SEQ ID NO: 264677 - DNA, 19 bp, Homo sapiens
  siRNA target sequence for ERdj5 (NM_018981.1,506-524).
ggcacagatcaggattttt

SEQ ID NO: 264678 - DNA, 19 bp, Homo sapiens
  siRNA target sequence for ERdj5 (NM_018981.1,512-530).
gatcaggatttttacagtt

SEQ ID NO: 264679 - DNA, 19 bp, Homo sapiens
  siRNA target sequence for ERdj5 (NM_018981.1,606-624).
ctgataaaaacccgaataa

SEQ ID NO: 264680 - DNA, 19 bp, Homo sapiens
  siRNA target sequence for ERdj5 (NM_018981.1,616-634).
cccgaataacccaaatgca

SEQ ID NO: 264681 - DNA, 19 bp, Homo sapiens
  siRNA target sequence for ERdj5 (NM_018981.1,632-650).
gcacatggcgattttttaa

SEQ ID NO: 264682 - DNA, 19 bp, Homo sapiens
  siRNA target sequence for ERdj5 (NM_018981.1,689-707).
ctacggaaaaagtatgaca

SEQ ID NO: 264683 - DNA, 19 bp, Homo sapiens
  siRNA target sequence for ERdj5 (NM_018981.1,692-710).
cggaaaaagtatgacaaat

SEQ ID NO: 264684 - DNA, 19 bp, Homo sapiens
  siRNA target sequence for ERdj5 (NM_018981.1,721-739).
gggacttgaggataatcaa

SEQ ID NO: 264685 - DNA, 19 bp, Homo sapiens
  siRNA target sequence for ERdj5 (NM_018981.1,748-766).
gtatgaaagctggaactat

SEQ ID NO: 264686 - DNA, 19 bp, Homo sapiens
  siRNA target sequence for ERdj5 (NM_018981.1,756-774).
gctggaactattatcgtta

SEQ ID NO: 264687 - DNA, 19 bp, Homo sapiens
  siRNA target sequence for ERdj5 (NM_018981.1,757-775).
ctggaactattatcgttat

SEQ ID NO: 264688 - DNA, 19 bp, Homo sapiens
  siRNA target sequence for ERdj5 (NM_018981.1,759-777).
ggaactattatcgttatga

SEQ ID NO: 264689 - DNA, 19 bp, Homo sapiens
  siRNA target sequence for ERdj5 (NM_018981.1,760-778).
gaactattatcgttatgat

SEQ ID NO: 264690 - DNA, 19 bp, Homo sapiens
  siRNA target sequence for ERdj5 (NM_018981.1,852-870).
gagaactgtggtttgtaaa

SEQ ID NO: 264691 - DNA, 19 bp, Homo sapiens
  siRNA target sequence for ERdj5 (NM_018981.1,888-906).
gttcacactgccatgattt

SEQ ID NO: 264692 - DNA, 19 bp, Homo sapiens
  siRNA target sequence for ERdj5 (NM_018981.1,915-933).
catggagagactttgctaa

SEQ ID NO: 264693 - DNA, 19 bp, Homo sapiens
  siRNA target sequence for ERdj5 (NM_018981.1,953-971).
cgaattggagctgttaact

SEQ ID NO: 264694 - DNA, 19 bp, Homo sapiens
  siRNA target sequence for ERdj5 (NM_018981.1,974-992).
ggtgatgatagaatgcttt

SEQ ID NO: 264695 - DNA, 19 bp, Homo sapiens
  siRNA target sequence for ERdj5 (NM_018981.1,984-1002).
gaatgctttgccgaatgaa

SEQ ID NO: 264696 - DNA, 19 bp, Homo sapiens
  siRNA target sequence for ERdj5 (NM_018981.1,1043-1061).
ggaatggccccagtgaaat

SEQ ID NO: 264697 - DNA, 19 bp, Homo sapiens
  siRNA target sequence for ERdj5 (NM_018981.1,1048-1066).
ggccccagtgaaatatcat

SEQ ID NO: 264698 - DNA, 19 bp, Homo sapiens
  siRNA target sequence for ERdj5 (NM_018981.1,1074-1092).
gatcaaaggagagtttagt

SEQ ID NO: 264699 - DNA, 19 bp, Homo sapiens
  siRNA target sequence for ERdj5 (NM_018981.1,1130-1148).
gaactttggacaggaaatt

SEQ ID NO: 264700 - DNA, 19 bp, Homo sapiens
  siRNA target sequence for ERdj5 (NM_018981.1,1189-1207).
ctggctgatcactttttgt

SEQ ID NO: 264701 - DNA, 19 bp, Homo sapiens
  siRNA target sequence for ERdj5 (NM_018981.1,1258-1276).
catgttggatggtcttgtt

SEQ ID NO: 264702 - DNA, 19 bp, Homo sapiens
  siRNA target sequence for ERdj5 (NM_018981.1,1261-1279).
gttggatggtcttgttaat

SEQ ID NO: 264703 - DNA, 19 bp, Homo sapiens
  siRNA target sequence for ERdj5 (NM_018981.1,1264-1282).
ggatggtcttgttaatgta

SEQ ID NO: 264704 - DNA, 19 bp, Homo sapiens
  siRNA target sequence for ERdj5 (NM_018981.1,1307-1325).
gataacctttgtaaaagct

SEQ ID NO: 264705 - DNA, 19 bp, Homo sapiens
  siRNA target sequence for ERdj5 (NM_018981.1,1328-1346).
gatattacaacaagtacta

SEQ ID NO: 264706 - DNA, 19 bp, Homo sapiens
  siRNA target sequence for ERdj5 (NM_018981.1,1359-1377).
ctcctggagccactttaaa

SEQ ID NO: 264707 - DNA, 19 bp, Homo sapiens
  siRNA target sequence for ERdj5 (NM_018981.1,1362-1380).
ctggagccactttaaataa

SEQ ID NO: 264708 - DNA, 19 bp, Homo sapiens
  siRNA target sequence for ERdj5 (NM_018981.1,1402-1420).
gtttctcaactcattggat

SEQ ID NO: 264709 - DNA, 19 bp, Homo sapiens
  siRNA target sequence for ERdj5 (NM_018981.1,1417-1435).
ggatgctaaagaaatatat

SEQ ID NO: 264710 - DNA, 19 bp, Homo sapiens
  siRNA target sequence for ERdj5 (NM_018981.1,1492-1510).
ggatcgtttggctcatcat

SEQ ID NO: 264711 - DNA, 19 bp, Homo sapiens
  siRNA target sequence for ERdj5 (NM_018981.1,1508-1526).
catcggtggctgttatttt

SEQ ID NO: 264712 - DNA, 19 bp, Homo sapiens
  siRNA target sequence for ERdj5 (NM_018981.1,1631-1649).
gcaccagacatctgtagta

SEQ ID NO: 264713 - DNA, 19 bp, Homo sapiens
  siRNA target sequence for ERdj5 (NM_018981.1,1632-1650).
caccagacatctgtagtaa

SEQ ID NO: 264714 - DNA, 19 bp, Homo sapiens
  siRNA target sequence for ERdj5 (NM_018981.1,1642-1660).
ctgtagtaatctgtatgtt

SEQ ID NO: 264715 - DNA, 19 bp, Homo sapiens
  siRNA target sequence for ERdj5 (NM_018981.1,1667-1685).
ccgtctctagcagtattta

SEQ ID NO: 264716 - DNA, 19 bp, Homo sapiens
  siRNA target sequence for ERdj5 (NM_018981.1,1668-1686).
cgtctctagcagtatttaa

SEQ ID NO: 264717 - DNA, 19 bp, Homo sapiens
  siRNA target sequence for ERdj5 (NM_018981.1,1689-1707).
gacaaggaaccaaagaata

SEQ ID NO: 264718 - DNA, 19 bp, Homo sapiens
  siRNA target sequence for ERdj5 (NM_018981.1,1726-1744).
gaagattctatatgatata

SEQ ID NO: 264719 - DNA, 19 bp, Homo sapiens
  siRNA target sequence for ERdj5 (NM_018981.1,1754-1772).
gccaaagaaagtgtgaatt

SEQ ID NO: 264720 - DNA, 19 bp, Homo sapiens
  siRNA target sequence for ERdj5 (NM_018981.1,1783-1801).
cacgcttggacctcaaaat

SEQ ID NO: 264721 - DNA, 19 bp, Homo sapiens
  siRNA target sequence for ERdj5 (NM_018981.1,1785-1803).
cgcttggacctcaaaattt

SEQ ID NO: 264722 - DNA, 19 bp, Homo sapiens
  siRNA target sequence for ERdj5 (NM_018981.1,1824-1842).
catggcttgttgatttctt

SEQ ID NO: 264723 - DNA, 19 bp, Homo sapiens
  siRNA target sequence for ERdj5 (NM_018981.1,1857-1875).
caccatgtcgagctttact

SEQ ID NO: 264724 - DNA, 19 bp, Homo sapiens
  siRNA target sequence for ERdj5 (NM_018981.1,1882-1900).
gttacgaagagcatcaaat

SEQ ID NO: 264725 - DNA, 19 bp, Homo sapiens
  siRNA target sequence for ERdj5 (NM_018981.1,1904-1922).
ctttatggtcagcttaagt

SEQ ID NO: 264726 - DNA, 19 bp, Homo sapiens
  siRNA target sequence for ERdj5 (NM_018981.1,1915-1933).
gcttaagtttggtacacta

SEQ ID NO: 264727 - DNA, 19 bp, Homo sapiens
  siRNA target sequence for ERdj5 (NM_018981.1,1921-1939).
gtttggtacactagattgt

SEQ ID NO: 264728 - DNA, 19 bp, Homo sapiens
  siRNA target sequence for ERdj5 (NM_018981.1,1949-1967).
gagggactctgtaacatgt

SEQ ID NO: 264729 - DNA, 19 bp, Homo sapiens
  siRNA target sequence for ERdj5 (NM_018981.1,1952-1970).
ggactctgtaacatgtata

SEQ ID NO: 264730 - DNA, 19 bp, Homo sapiens
  siRNA target sequence for ERdj5 (NM_018981.1,1955-1973).
ctctgtaacatgtataaca

SEQ ID NO: 264731 - DNA, 19 bp, Homo sapiens
  siRNA target sequence for ERdj5 (NM_018981.1,1959-1977).
gtaacatgtataacattca

SEQ ID NO: 264732 - DNA, 19 bp, Homo sapiens
  siRNA target sequence for ERdj5 (NM_018981.1,2002-2020).
caaccagtccaacattcat

SEQ ID NO: 264733 - DNA, 19 bp, Homo sapiens
  siRNA target sequence for ERdj5 (NM_018981.1,2008-2026).
gtccaacattcatgagtat

SEQ ID NO: 264734 - DNA, 19 bp, Homo sapiens
  siRNA target sequence for ERdj5 (NM_018981.1,2033-2051).
catcactctgctgaacaaa

SEQ ID NO: 264735 - DNA, 19 bp, Homo sapiens
  siRNA target sequence for ERdj5 (NM_018981.1,2036-2054).
cactctgctgaacaaatct

SEQ ID NO: 264736 - DNA, 19 bp, Homo sapiens
  siRNA target sequence for ERdj5 (NM_018981.1,2062-2080).
catagaggatcttatgaat

SEQ ID NO: 264737 - DNA, 19 bp, Homo sapiens
  siRNA target sequence for ERdj5 (NM_018981.1,2066-2084).
gaggatcttatgaatcctt

SEQ ID NO: 264738 - DNA, 19 bp, Homo sapiens
  siRNA target sequence for ERdj5 (NM_018981.1,2106-2124).
ccaccttcaacgaactagt

SEQ ID NO: 264739 - DNA, 19 bp, Homo sapiens
  siRNA target sequence for ERdj5 (NM_018981.1,2107-2125).
caccttcaacgaactagtt

SEQ ID NO: 264740 - DNA, 19 bp, Homo sapiens
  siRNA target sequence for ERdj5 (NM_018981.1,2110-2128).
cttcaacgaactagttaca

SEQ ID NO: 264741 - DNA, 19 bp, Homo sapiens
  siRNA target sequence for ERdj5 (NM_018981.1,2116-2134).
cgaactagttacacaaaga

SEQ ID NO: 264742 - DNA, 19 bp, Homo sapiens
  siRNA target sequence for ERdj5 (NM_018981.1,2242-2260).
caacgtgggcagtatagat

SEQ ID NO: 264743 - DNA, 19 bp, Homo sapiens
  siRNA target sequence for ERdj5 (NM_018981.1,2253-2271).
gtatagattgccaacagta

SEQ ID NO: 264744 - DNA, 19 bp, Homo sapiens
  siRNA target sequence for ERdj5 (NM_018981.1,2258-2276).
gattgccaacagtatcatt

SEQ ID NO: 264745 - DNA, 19 bp, Homo sapiens
  siRNA target sequence for ERdj5 (NM_018981.1,2262-2280).
gccaacagtatcattcttt

SEQ ID NO: 264746 - DNA, 19 bp, Homo sapiens
  siRNA target sequence for ERdj5 (NM_018981.1,2285-2303).
gcccaggaaaacgttcaaa

SEQ ID NO: 264747 - DNA, 19 bp, Homo sapiens
  siRNA target sequence for ERdj5 (NM_018981.1,2370-2388).
gttggaatagggatgctta

SEQ ID NO: 264748 - DNA, 19 bp, Homo sapiens
  siRNA target sequence for ERdj5 (NM_018981.1,2384-2402).
gcttattccctgagaatct

SEQ ID NO: 264749 - DNA, 19 bp, Homo sapiens
  siRNA target sequence for ERdj5 (NM_018981.1,2401-2419).
ctggggtctaggattttta

SEQ ID NO: 264750 - DNA, 19 bp, Homo sapiens
  siRNA target sequence for ERdj5 (NM_018981.1,2404-2422).
gggtctaggatttttacct

SEQ ID NO: 264751 - DNA, 19 bp, Homo sapiens
  siRNA target sequence for ERdj5 (NM_018981.1,2451-2469).
ctttcagtgaaaaagttct

SEQ ID NO: 264752 - DNA, 19 bp, Homo sapiens
  siRNA target sequence for ERdj5 (NM_018981.1,2635-2653).
cagggcctatccaactgtt

SEQ ID NO: 264753 - DNA, 19 bp, Homo sapiens
  siRNA target sequence for ERdj5 (NM_018981.1,2637-2655).
gggcctatccaactgttaa

SEQ ID NO: 264754 - DNA, 19 bp, Homo sapiens
  siRNA target sequence for ERdj5 (NM_018981.1,2638-2656).
ggcctatccaactgttaaa

SEQ ID NO: 264755 - DNA, 19 bp, Homo sapiens
  siRNA target sequence for ERdj5 (NM_018981.1,2639-2657).
gcctatccaactgttaaat

SEQ ID NO: 264756 - DNA, 19 bp, Homo sapiens
  siRNA target sequence for ERdj5 (NM_018981.1,2641-2659).
ctatccaactgttaaattt

SEQ ID NO: 264757 - DNA, 19 bp, Homo sapiens
  siRNA target sequence for ERdj5 (NM_018981.1,2690-2708).
caagaagagcagataaata

SEQ ID NO: 264758 - DNA, 19 bp, Homo sapiens
  siRNA target sequence for ERdj5 (NM_018981.1,2723-2741).
gcaatcgctgccttaataa

SEQ ID NO: 264759 - DNA, 19 bp, Homo sapiens
  siRNA target sequence for ERdj5 (NM_018981.1,2728-2746).
cgctgccttaataagtgaa

SEQ ID NO: 264760 - DNA, 19 bp, Homo sapiens
  siRNA target sequence for ERdj5 (NM_018981.1,2776-2794).
gaggaataaggatgaactt

SEQ ID NO: 264761 - DNA, 19 bp, Homo sapiens
  siRNA target sequence for ETFA (NM_000126.1,39-57).
ggcctcattgctacgattt

SEQ ID NO: 264762 - DNA, 19 bp, Homo sapiens
  siRNA target sequence for ETFA (NM_000126.1,41-59).
cctcattgctacgatttca

SEQ ID NO: 264763 - DNA, 19 bp, Homo sapiens
  siRNA target sequence for ETFA (NM_000126.1,60-78).
gagtaccctggtaatagct

SEQ ID NO: 264764 - DNA, 19 bp, Homo sapiens
  siRNA target sequence for ETFA (NM_000126.1,76-94).
gctgagcatgcaaatgatt

SEQ ID NO: 264765 - DNA, 19 bp, Homo sapiens
  siRNA target sequence for ETFA (NM_000126.1,189-207).
ggcacaagatctctgtaaa

SEQ ID NO: 264766 - DNA, 19 bp, Homo sapiens
  siRNA target sequence for ETFA (NM_000126.1,300-318).
gaagcagttcaattacaca

SEQ ID NO: 264767 - DNA, 19 bp, Homo sapiens
  siRNA target sequence for ETFA (NM_000126.1,340-358).
gccttcggaaagaaccttt

SEQ ID NO: 264768 - DNA, 19 bp, Homo sapiens
  siRNA target sequence for ETFA (NM_000126.1,341-359).
ccttcggaaagaacctttt

SEQ ID NO: 264769 - DNA, 19 bp, Homo sapiens
  siRNA target sequence for ETFA (NM_000126.1,389-407).
ccccgatttctgacatcat

SEQ ID NO: 264770 - DNA, 19 bp, Homo sapiens
  siRNA target sequence for ETFA (NM_000126.1,424-442).
gacacatttgtgagaacta

SEQ ID NO: 264771 - DNA, 19 bp, Homo sapiens
  siRNA target sequence for ETFA (NM_000126.1,428-446).
catttgtgagaactattta

SEQ ID NO: 264772 - DNA, 19 bp, Homo sapiens
  siRNA target sequence for ETFA (NM_000126.1,504-522).
ccgtggaacatcctttgat

SEQ ID NO: 264773 - DNA, 19 bp, Homo sapiens
  siRNA target sequence for ETFA (NM_000126.1,592-610).
gagtggcttgaccagaaat

SEQ ID NO: 264774 - DNA, 19 bp, Homo sapiens
  siRNA target sequence for ETFA (NM_000126.1,594-612).
gtggcttgaccagaaatta

SEQ ID NO: 264775 - DNA, 19 bp, Homo sapiens
  siRNA target sequence for ETFA (NM_000126.1,680-698).
gtggagagaactttaagtt

SEQ ID NO: 264776 - DNA, 19 bp, Homo sapiens
  siRNA target sequence for ETFA (NM_000126.1,708-726).
cttggcagatcaactacat

SEQ ID NO: 264777 - DNA, 19 bp, Homo sapiens
  siRNA target sequence for ETFA (NM_000126.1,908-926).
cagaagctccaattttcca

SEQ ID NO: 264778 - DNA, 19 bp, Homo sapiens
  siRNA target sequence for ETFA (NM_000126.1,930-948).
ggcagattatggaatagtt

SEQ ID NO: 264779 - DNA, 19 bp, Homo sapiens
  siRNA target sequence for ETFA (NM_000126.1,963-981).
ggtagttcctgaaatgact

SEQ ID NO: 264780 - DNA, 19 bp, Homo sapiens
  siRNA target sequence for ETFA (NM_000126.1,970-988).
cctgaaatgactgagatat

SEQ ID NO: 264781 - DNA, 19 bp, Homo sapiens
  siRNA target sequence for ETFB (NM_001985.1,404-422).
ccatcgatgatgactgtaa

SEQ ID NO: 264782 - DNA, 19 bp, Homo sapiens
  siRNA target sequence for ETFB (NM_001985.1,488-506).
cgctggagggggacaagtt

SEQ ID NO: 264783 - DNA, 19 bp, Homo sapiens
  siRNA target sequence for FBLP-1 (NM_017556.1,468-486).
gtggcatcgtctgtcttta

SEQ ID NO: 264784 - DNA, 19 bp, Homo sapiens
  siRNA target sequence for FBLP-1 (NM_017556.1,952-970).
cggcagaacctgttgagaa

SEQ ID NO: 264785 - DNA, 19 bp, Homo sapiens
  siRNA target sequence for FBLP-1 (NM_017556.1,953-971).
ggcagaacctgttgagaaa

SEQ ID NO: 264786 - DNA, 19 bp, Homo sapiens
  siRNA target sequence for FLJ10900 (NM_018264.1,272-290).
cgcagggcaagaacttaca

SEQ ID NO: 264787 - DNA, 19 bp, Homo sapiens
  siRNA target sequence for FLJ10900 (NM_018264.1,285-303).
cttacaggaaaaatctgtt

SEQ ID NO: 264788 - DNA, 19 bp, Homo sapiens
  siRNA target sequence for FLJ10900 (NM_018264.1,319-337).
gatttgatgacaaatggtt

SEQ ID NO: 264789 - DNA, 19 bp, Homo sapiens
  siRNA target sequence for FLJ10900 (NM_018264.1,335-353).
gttatgtctcccttcaaga

SEQ ID NO: 264790 - DNA, 19 bp, Homo sapiens
  siRNA target sequence for FLJ10900 (NM_018264.1,2046-2064).
ggatctgatccccgaatat

SEQ ID NO: 264791 - DNA, 19 bp, Homo sapiens
  siRNA target sequence for FLJ10900 (NM_018264.1,2050-2068).
ctgatccccgaatatgaaa

SEQ ID NO: 264792 - DNA, 19 bp, Homo sapiens
  siRNA target sequence for FLJ10900 (NM_018264.1,2052-2070).
gatccccgaatatgaaatt

SEQ ID NO: 264793 - DNA, 19 bp, Homo sapiens
  siRNA target sequence for FLJ10900 (NM_018264.1,2056-2074).
cccgaatatgaaattgcat

SEQ ID NO: 264794 - DNA, 19 bp, Homo sapiens
  siRNA target sequence for FLJ10900 (NM_018264.1,2075-2093).
gtgaacacgaacactctaa

SEQ ID NO: 264795 - DNA, 19 bp, Homo sapiens
  siRNA target sequence for FLJ10900 (NM_018264.1,2077-2095).
gaacacgaacactctaatt

SEQ ID NO: 264796 - DNA, 19 bp, Homo sapiens
  siRNA target sequence for FLJ12519 (NM_032168.1,95-113).
gtggcggcagcgagttgaa

SEQ ID NO: 264797 - DNA, 19 bp, Homo sapiens
  siRNA target sequence for FLJ12519 (NM_032168.1,97-115).
ggcggcagcgagttgaact

SEQ ID NO: 264798 - DNA, 19 bp, Homo sapiens
  siRNA target sequence for FLJ12519 (NM_032168.1,98-116).
gcggcagcgagttgaactt

SEQ ID NO: 264799 - DNA, 19 bp, Homo sapiens
  siRNA target sequence for FLJ12519 (NM_032168.1,99-117).
cggcagcgagttgaacttt

SEQ ID NO: 264800 - DNA, 19 bp, Homo sapiens
  siRNA target sequence for FLJ12519 (NM_032168.1,127-145).
gtgttctctgcagattcta

SEQ ID NO: 264801 - DNA, 19 bp, Homo sapiens
  siRNA target sequence for FLJ12519 (NM_032168.1,132-150).
ctctgcagattctaagtat

SEQ ID NO: 264802 - DNA, 19 bp, Homo sapiens
  siRNA target sequence for FLJ12519 (NM_032168.1,136-154).
gcagattctaagtatatct

SEQ ID NO: 264803 - DNA, 19 bp, Homo sapiens
  siRNA target sequence for FLJ12519 (NM_032168.1,137-155).
cagattctaagtatatctt

SEQ ID NO: 264804 - DNA, 19 bp, Homo sapiens
  siRNA target sequence for FLJ12519 (NM_032168.1,139-157).
gattctaagtatatcttct

SEQ ID NO: 264805 - DNA, 19 bp, Homo sapiens
  siRNA target sequence for FLJ12519 (NM_032168.1,164-182).
ctggagactttgttaaagt

SEQ ID NO: 264806 - DNA, 19 bp, Homo sapiens
  siRNA target sequence for FLJ12519 (NM_032168.1,267-285).
ccatctacagctgtattct

SEQ ID NO: 264807 - DNA, 19 bp, Homo sapiens
  siRNA target sequence for FLJ12519 (NM_032168.1,290-308).
cccttgatggcacaattaa

SEQ ID NO: 264808 - DNA, 19 bp, Homo sapiens
  siRNA target sequence for FLJ12519 (NM_032168.1,344-362).
ctttcatagttggatgtaa

SEQ ID NO: 264809 - DNA, 19 bp, Homo sapiens
  siRNA target sequence for FLJ12519 (NM_032168.1,454-472).
gtgaaactgccaaaatcct

SEQ ID NO: 264810 - DNA, 19 bp, Homo sapiens
  siRNA target sequence for FLJ12519 (NM_032168.1,551-569).
gaaacgagggagtatatgt

SEQ ID NO: 264811 - DNA, 19 bp, Homo sapiens
  siRNA target sequence for FLJ12519 (NM_032168.1,572-590).
ctgcagtacgggaatttta

SEQ ID NO: 264812 - DNA, 19 bp, Homo sapiens
  siRNA target sequence for FLJ12519 (NM_032168.1,574-592).
gcagtacgggaattttact

SEQ ID NO: 264813 - DNA, 19 bp, Homo sapiens
  siRNA target sequence for FLJ12519 (NM_032168.1,575-593).
cagtacgggaattttactt

SEQ ID NO: 264814 - DNA, 19 bp, Homo sapiens
  siRNA target sequence for FLJ12519 (NM_032168.1,577-595).
gtacgggaattttacttgt

SEQ ID NO: 264815 - DNA, 19 bp, Homo sapiens
  siRNA target sequence for FLJ12519 (NM_032168.1,583-601).
gaattttacttgtctgttt

SEQ ID NO: 264816 - DNA, 19 bp, Homo sapiens
  siRNA target sequence for FLJ12519 (NM_032168.1,726-744).
catggatggcaaaattcgt

SEQ ID NO: 264817 - DNA, 19 bp, Homo sapiens
  siRNA target sequence for FLJ12519 (NM_032168.1,797-815).
ggcaccatgatatggttat

SEQ ID NO: 264818 - DNA, 19 bp, Homo sapiens
  siRNA target sequence for FLJ12519 (NM_032168.1,852-870).
gagtggcggtcgtgaatct

SEQ ID NO: 264819 - DNA, 19 bp, Homo sapiens
  siRNA target sequence for FLJ12519 (NM_032168.1,854-872).
gtggcggtcgtgaatctgt

SEQ ID NO: 264820 - DNA, 19 bp, Homo sapiens
  siRNA target sequence for FLJ12519 (NM_032168.1,858-876).
cggtcgtgaatctgtactt

SEQ ID NO: 264821 - DNA, 19 bp, Homo sapiens
  siRNA target sequence for FLJ12519 (NM_032168.1,860-878).
gtcgtgaatctgtacttgt

SEQ ID NO: 264822 - DNA, 19 bp, Homo sapiens
  siRNA target sequence for FLJ12519 (NM_032168.1,887-905).
gcgatgcaacagagaagaa

SEQ ID NO: 264823 - DNA, 19 bp, Homo sapiens
  siRNA target sequence for FLJ12519 (NM_032168.1,912-930).
gtttctcccgcgtttagga

SEQ ID NO: 264824 - DNA, 19 bp, Homo sapiens
  siRNA target sequence for FLJ12519 (NM_032168.1,920-938).
cgcgtttaggagctactat

SEQ ID NO: 264825 - DNA, 19 bp, Homo sapiens
  siRNA target sequence for FLJ12519 (NM_032168.1,921-939).
gcgtttaggagctactatt

SEQ ID NO: 264826 - DNA, 19 bp, Homo sapiens
  siRNA target sequence for FLJ12519 (NM_032168.1,923-941).
gtttaggagctactattga

SEQ ID NO: 264827 - DNA, 19 bp, Homo sapiens
  siRNA target sequence for FLJ12519 (NM_032168.1,929-947).
gagctactattgaacatat

SEQ ID NO: 264828 - DNA, 19 bp, Homo sapiens
  siRNA target sequence for FLJ12519 (NM_032168.1,931-949).
gctactattgaacatatct

SEQ ID NO: 264829 - DNA, 19 bp, Homo sapiens
  siRNA target sequence for FLJ12519 (NM_032168.1,977-995).
gcacttctcactctgataa

SEQ ID NO: 264830 - DNA, 19 bp, Homo sapiens
  siRNA target sequence for FLJ12519 (NM_032168.1,985-1003).
cactctgataataagataa

SEQ ID NO: 264831 - DNA, 19 bp, Homo sapiens
  siRNA target sequence for FLJ12519 (NM_032168.1,987-1005).
ctctgataataagataata

SEQ ID NO: 264832 - DNA, 19 bp, Homo sapiens
  siRNA target sequence for FLJ12519 (NM_032168.1,1051-1069).
gtgaaagataggagtatct

SEQ ID NO: 264833 - DNA, 19 bp, Homo sapiens
  siRNA target sequence for FLJ12519 (NM_032168.1,1071-1089).
cactggtttgatgattgat

SEQ ID NO: 264834 - DNA, 19 bp, Homo sapiens
  siRNA target sequence for FLJ12519 (NM_032168.1,1080-1098).
gatgattgatccaagaact

SEQ ID NO: 264835 - DNA, 19 bp, Homo sapiens
  siRNA target sequence for FLJ12519 (NM_032168.1,1107-1125).
ggttttgaatggaaaacct

SEQ ID NO: 264836 - DNA, 19 bp, Homo sapiens
  siRNA target sequence for FLJ12519 (NM_032168.1,1126-1144).
ggccacctgcagttttatt

SEQ ID NO: 264837 - DNA, 19 bp, Homo sapiens
  siRNA target sequence for FLJ12519 (NM_032168.1,1154-1172).
gtgataaacagttatacaa

SEQ ID NO: 264838 - DNA, 19 bp, Homo sapiens
  siRNA target sequence for FLJ12519 (NM_032168.1,1156-1174).
gataaacagttatacaatt

SEQ ID NO: 264839 - DNA, 19 bp, Homo sapiens
  siRNA target sequence for FLJ12519 (NM_032168.1,1177-1195).
gatattatacagcaagaat

SEQ ID NO: 264840 - DNA, 19 bp, Homo sapiens
  siRNA target sequence for FLJ12519 (NM_032168.1,1273-1291).
gtggaacagcggcaagaaa

SEQ ID NO: 264841 - DNA, 19 bp, Homo sapiens
  siRNA target sequence for FLJ12519 (NM_032168.1,1321-1339).
ctgtggatgtataataaga

SEQ ID NO: 264842 - DNA, 19 bp, Homo sapiens
  siRNA target sequence for FLJ12519 (NM_032168.1,1343-1361).
cacaagggtttattcttaa

SEQ ID NO: 264843 - DNA, 19 bp, Homo sapiens
  siRNA target sequence for FLJ12519 (NM_032168.1,1378-1396).
ccacacgaagactgcatta

SEQ ID NO: 264844 - DNA, 19 bp, Homo sapiens
  siRNA target sequence for FLJ12519 (NM_032168.1,1391-1409).
gcattacagctctctgttt

SEQ ID NO: 264845 - DNA, 19 bp, Homo sapiens
  siRNA target sequence for FLJ12519 (NM_032168.1,1429-1447).
gaacagcccaccttggtta

SEQ ID NO: 264846 - DNA, 19 bp, Homo sapiens
  siRNA target sequence for FLJ12519 (NM_032168.1,1440-1458).
cttggttacagctagcaaa

SEQ ID NO: 264847 - DNA, 19 bp, Homo sapiens
  siRNA target sequence for FLJ12519 (NM_032168.1,1467-1485).
cttcaaagtatggatatta

SEQ ID NO: 264848 - DNA, 19 bp, Homo sapiens
  siRNA target sequence for FLJ12519 (NM_032168.1,1470-1488).
caaagtatggatattaaca

SEQ ID NO: 264849 - DNA, 19 bp, Homo sapiens
  siRNA target sequence for FLJ12519 (NM_032168.1,1492-1510).
gactctgacatatacaaaa

SEQ ID NO: 264850 - DNA, 19 bp, Homo sapiens
  siRNA target sequence for FLJ12519 (NM_032168.1,1558-1576).
caagcaactaactgttgtt

SEQ ID NO: 264851 - DNA, 19 bp, Homo sapiens
  siRNA target sequence for FLJ12519 (NM_032168.1,1580-1598).
ccgaagatggttctttact

SEQ ID NO: 264852 - DNA, 19 bp, Homo sapiens
  siRNA target sequence for FLJ12519 (NM_032168.1,1581-1599).
cgaagatggttctttacta

SEQ ID NO: 264853 - DNA, 19 bp, Homo sapiens
  siRNA target sequence for FLJ12519 (NM_032168.1,1612-1630).
gaggaaatagtcacaatat

SEQ ID NO: 264854 - DNA, 19 bp, Homo sapiens
  siRNA target sequence for FLJ12519 (NM_032168.1,1667-1685).
gccaacgagctgggaaaat

SEQ ID NO: 264855 - DNA, 19 bp, Homo sapiens
  siRNA target sequence for FLJ12519 (NM_032168.1,1706-1724).
gattgacgtgttcaaagta

SEQ ID NO: 264856 - DNA, 19 bp, Homo sapiens
  siRNA target sequence for FLJ12519 (NM_032168.1,1710-1728).
gacgtgttcaaagtatcta

SEQ ID NO: 264857 - DNA, 19 bp, Homo sapiens
  siRNA target sequence for FLJ12519 (NM_032168.1,1781-1799).
cattggagtggaatgcaaa

SEQ ID NO: 264858 - DNA, 19 bp, Homo sapiens
  siRNA target sequence for FLJ12519 (NM_032168.1,1870-1888).
ggttcagacttgtttgtat

SEQ ID NO: 264859 - DNA, 19 bp, Homo sapiens
  siRNA target sequence for FLJ12519 (NM_032168.1,1874-1892).
cagacttgtttgtatttaa

SEQ ID NO: 264860 - DNA, 19 bp, Homo sapiens
  siRNA target sequence for FLJ12519 (NM_032168.1,1902-1920).
gccaaggccattgtatatt

SEQ ID NO: 264861 - DNA, 19 bp, Homo sapiens
  siRNA target sequence for FLJ12519 (NM_032168.1,1985-2003).
ccttcacctcagaagctta

SEQ ID NO: 264862 - DNA, 19 bp, Homo sapiens
  siRNA target sequence for FLJ12519 (NM_032168.1,2049-2067).
gagtttattgacattcagt

SEQ ID NO: 264863 - DNA, 19 bp, Homo sapiens
  siRNA target sequence for FLJ12519 (NM_032168.1,2188-2206).
ctaaacgaaactttagaga

SEQ ID NO: 264864 - DNA, 19 bp, Homo sapiens
  siRNA target sequence for FLJ12519 (NM_032168.1,2233-2251).
gaaaacatacccgcaatta

SEQ ID NO: 264865 - DNA, 19 bp, Homo sapiens
  siRNA target sequence for FLJ12519 (NM_032168.1,2346-2364).
gagtgctaaggaaattcct

SEQ ID NO: 264866 - DNA, 19 bp, Homo sapiens
  siRNA target sequence for FLJ12519 (NM_032168.1,2355-2373).
ggaaattcctgaagatgta

SEQ ID NO: 264867 - DNA, 19 bp, Homo sapiens
  siRNA target sequence for FLJ12519 (NM_032168.1,2434-2452).
gtccaggatacaagtaaca

SEQ ID NO: 264868 - DNA, 19 bp, Homo sapiens
  siRNA target sequence for FLJ12519 (NM_032168.1,2481-2499).
gttgtcaaaatctgaagaa

SEQ ID NO: 264869 - DNA, 19 bp, Homo sapiens
  siRNA target sequence for FLJ14627 (NM_032814.1,1058-1076).
ggggatcgcagactttgtt

SEQ ID NO: 264870 - DNA, 19 bp, Homo sapiens
  siRNA target sequence for FLJ14627 (NM_032814.1,1060-1078).
ggatcgcagactttgttct

SEQ ID NO: 264871 - DNA, 19 bp, Homo sapiens
  siRNA target sequence for FLJ14627 (NM_032814.1,1147-1165).
ccaagggaaagttctatct

SEQ ID NO: 264872 - DNA, 19 bp, Homo sapiens
  siRNA target sequence for FLJ14627 (NM_032814.1,1212-1230).
cagctgtggtacaaataca

SEQ ID NO: 264873 - DNA, 19 bp, Homo sapiens
  siRNA target sequence for FLJ14627 (NM_032814.1,1215-1233).
ctgtggtacaaatacatca

SEQ ID NO: 264874 - DNA, 19 bp, Homo sapiens
  siRNA target sequence for FLJ14627 (NM_032814.1,1270-1288).
gggtcctgatcgttctcta

SEQ ID NO: 264875 - DNA, 19 bp, Homo sapiens
  siRNA target sequence for FLJ14627 (NM_032814.1,1321-1339).
gtgtgggcggagttaggaa

SEQ ID NO: 264876 - DNA, 19 bp, Homo sapiens
  siRNA target sequence for FLJ14627 (NM_032814.1,1475-1493).
gttgaaggggcacaagaaa

SEQ ID NO: 264877 - DNA, 19 bp, Homo sapiens
  siRNA target sequence for FLJ14768 (NM_032836.1,785-803).
gctgcgagcgcgacttcaa

SEQ ID NO: 264878 - DNA, 19 bp, Homo sapiens
  siRNA target sequence for FLJ20095 (NM_017666.1,327-345).
ggccactccagctcatctt

SEQ ID NO: 264879 - DNA, 19 bp, Homo sapiens
  siRNA target sequence for FLJ20095 (NM_017666.1,365-383).
gccacacagtccaggtatt

SEQ ID NO: 264880 - DNA, 19 bp, Homo sapiens
  siRNA target sequence for FLJ20095 (NM_017666.1,440-458).
ggctgcctcgcctagattt

SEQ ID NO: 264881 - DNA, 19 bp, Homo sapiens
  siRNA target sequence for FLJ20095 (NM_017666.1,442-460).
ctgcctcgcctagatttca

SEQ ID NO: 264882 - DNA, 19 bp, Homo sapiens
  siRNA target sequence for FLJ20095 (NM_017666.1,445-463).
cctcgcctagatttcatct

SEQ ID NO: 264883 - DNA, 19 bp, Homo sapiens
  siRNA target sequence for FLJ20095 (NM_017666.1,446-464).
ctcgcctagatttcatctt

SEQ ID NO: 264884 - DNA, 19 bp, Homo sapiens
  siRNA target sequence for FLJ20095 (NM_017666.1,448-466).
cgcctagatttcatcttgt

SEQ ID NO: 264885 - DNA, 19 bp, Homo sapiens
  siRNA target sequence for FLJ20095 (NM_017666.1,449-467).
gcctagatttcatcttgta

SEQ ID NO: 264886 - DNA, 19 bp, Homo sapiens
  siRNA target sequence for FLJ20095 (NM_017666.1,454-472).
gatttcatcttgtatctaa

SEQ ID NO: 264887 - DNA, 19 bp, Homo sapiens
  siRNA target sequence for FLJ20095 (NM_017666.1,459-477).
catcttgtatctaaatctt

SEQ ID NO: 264888 - DNA, 19 bp, Homo sapiens
  siRNA target sequence for FLJ20095 (NM_017666.1,478-496).
cacaaagctctgttactgt

SEQ ID NO: 264889 - DNA, 19 bp, Homo sapiens
  siRNA target sequence for FLJ20095 (NM_017666.1,504-522).
gcgtctaaacctgatttta

SEQ ID NO: 264890 - DNA, 19 bp, Homo sapiens
  siRNA target sequence for FLJ20095 (NM_017666.1,537-555).
gttggatcggataattctt

SEQ ID NO: 264891 - DNA, 19 bp, Homo sapiens
  siRNA target sequence for FLJ20095 (NM_017666.1,541-559).
gatcggataattcttcaat

SEQ ID NO: 264892 - DNA, 19 bp, Homo sapiens
  siRNA target sequence for FLJ20095 (NM_017666.1,544-562).
cggataattcttcaatttt

SEQ ID NO: 264893 - DNA, 19 bp, Homo sapiens
  siRNA target sequence for FLJ20095 (NM_017666.1,572-590).
ctcgacccaggaatcacta

SEQ ID NO: 264894 - DNA, 19 bp, Homo sapiens
  siRNA target sequence for FLJ20095 (NM_017666.1,599-617).
ccaagacataccagcaatt

SEQ ID NO: 264895 - DNA, 19 bp, Homo sapiens
  siRNA target sequence for FLJ20095 (NM_017666.1,736-754).
ccacttcattgcctttaat

SEQ ID NO: 264896 - DNA, 19 bp, Homo sapiens
  siRNA target sequence for FLJ20095 (NM_017666.1,737-755).
cacttcattgcctttaatt

SEQ ID NO: 264897 - DNA, 19 bp, Homo sapiens
  siRNA target sequence for FLJ20095 (NM_017666.1,768-786).
gtgacatcctcccaagtta

SEQ ID NO: 264898 - DNA, 19 bp, Homo sapiens
  siRNA target sequence for FLJ20095 (NM_017666.1,778-796).
cccaagttatgctgtcaaa

SEQ ID NO: 264899 - DNA, 19 bp, Homo sapiens
  siRNA target sequence for FLJ20095 (NM_017666.1,779-797).
ccaagttatgctgtcaaaa

SEQ ID NO: 264900 - DNA, 19 bp, Homo sapiens
  siRNA target sequence for FLJ20095 (NM_017666.1,783-801).
gttatgctgtcaaaaggta

SEQ ID NO: 264901 - DNA, 19 bp, Homo sapiens
  siRNA target sequence for FLJ20095 (NM_017666.1,825-843).
gctggagcagattacctaa

SEQ ID NO: 264902 - DNA, 19 bp, Homo sapiens
  siRNA target sequence for FLJ20095 (NM_017666.1,859-877).
gcaatgttcagttcaatct

SEQ ID NO: 264903 - DNA, 19 bp, Homo sapiens
  siRNA target sequence for FLJ20095 (NM_017666.1,928-946).
ctaaatttttgggagtaat

SEQ ID NO: 264904 - DNA, 19 bp, Homo sapiens
  siRNA target sequence for FLJ20095 (NM_017666.1,938-956).
gggagtaattgttaaatca

SEQ ID NO: 264905 - DNA, 19 bp, Homo sapiens
  siRNA target sequence for FLJ20095 (NM_017666.1,1059-1077).
gagccaaagacttacacaa

SEQ ID NO: 264906 - DNA, 19 bp, Homo sapiens
  siRNA target sequence for FLJ20095 (NM_017666.1,1091-1109).
cagttgctcgaaagttctt

SEQ ID NO: 264907 - DNA, 19 bp, Homo sapiens
  siRNA target sequence for FLJ20095 (NM_017666.1,1093-1111).
gttgctcgaaagttcttaa

SEQ ID NO: 264908 - DNA, 19 bp, Homo sapiens
  siRNA target sequence for FLJ20095 (NM_017666.1,1096-1114).
gctcgaaagttcttaaaaa

SEQ ID NO: 264909 - DNA, 19 bp, Homo sapiens
  siRNA target sequence for FLJ20095 (NM_017666.1,1202-1220).
gcactgttaccggcaatat

SEQ ID NO: 264910 - DNA, 19 bp, Homo sapiens
  siRNA target sequence for FLJ20095 (NM_017666.1,1388-1406).
ccagtttagatcatcaaca

SEQ ID NO: 264911 - DNA, 19 bp, Homo sapiens
  siRNA target sequence for FLJ20095 (NM_017666.1,1495-1513).
caaccccctacatgaatca

SEQ ID NO: 264912 - DNA, 19 bp, Homo sapiens
  siRNA target sequence for FLJ20095 (NM_017666.1,1498-1516).
ccccctacatgaatcatta

SEQ ID NO: 264913 - DNA, 19 bp, Homo sapiens
  siRNA target sequence for FLJ20095 (NM_017666.1,1550-1568).
cccaaaatgcagactacaa

SEQ ID NO: 264914 - DNA, 19 bp, Homo sapiens
  siRNA target sequence for FLJ20095 (NM_017666.1,1580-1598).
caaggagaaagctgaacat

SEQ ID NO: 264915 - DNA, 19 bp, Homo sapiens
  siRNA target sequence for FLJ20095 (NM_017666.1,1602-1620).
gcgcagcatcgtacattta

SEQ ID NO: 264916 - DNA, 19 bp, Homo sapiens
  siRNA target sequence for FLJ20095 (NM_017666.1,1604-1622).
gcagcatcgtacatttata

SEQ ID NO: 264917 - DNA, 19 bp, Homo sapiens
  siRNA target sequence for FLJ20095 (NM_017666.1,1683-1701).
ggacctctccagtcaaaat

SEQ ID NO: 264918 - DNA, 19 bp, Homo sapiens
  siRNA target sequence for FLJ20095 (NM_017666.1,1684-1702).
gacctctccagtcaaaatt

SEQ ID NO: 264919 - DNA, 19 bp, Homo sapiens
  siRNA target sequence for FLJ20095 (NM_017666.1,1689-1707).
ctccagtcaaaattaccaa

SEQ ID NO: 264920 - DNA, 19 bp, Homo sapiens
  siRNA target sequence for FLJ20095 (NM_017666.1,1729-1747).
caggcacttcttttcttca

SEQ ID NO: 264921 - DNA, 19 bp, Homo sapiens
  siRNA target sequence for FLJ20095 (NM_017666.1,1751-1769).
cacacctccgacatctcaa

SEQ ID NO: 264922 - DNA, 19 bp, Homo sapiens
  siRNA target sequence for FLJ20095 (NM_017666.1,1755-1773).
cctccgacatctcaaaata

SEQ ID NO: 264923 - DNA, 19 bp, Homo sapiens
  siRNA target sequence for FLJ20095 (NM_017666.1,1798-1816).
ctaatgccagtagatctaa

SEQ ID NO: 264924 - DNA, 19 bp, Homo sapiens
  siRNA target sequence for FLJ20095 (NM_017666.1,1807-1825).
gtagatctaagacaagtaa

SEQ ID NO: 264925 - DNA, 19 bp, Homo sapiens
  siRNA target sequence for FLJ20095 (NM_017666.1,1843-1861).
ccactgcaagtaaagttaa

SEQ ID NO: 264926 - DNA, 19 bp, Homo sapiens
  siRNA target sequence for FLJ20095 (NM_017666.1,1844-1862).
cactgcaagtaaagttaat

SEQ ID NO: 264927 - DNA, 19 bp, Homo sapiens
  siRNA target sequence for FLJ20095 (NM_017666.1,1871-1889).
gccaaggggacgtatagct

SEQ ID NO: 264928 - DNA, 19 bp, Homo sapiens
  siRNA target sequence for FLJ20095 (NM_017666.1,1872-1890).
ccaaggggacgtatagcta

SEQ ID NO: 264929 - DNA, 19 bp, Homo sapiens
  siRNA target sequence for FLJ20095 (NM_017666.1,1873-1891).
caaggggacgtatagctaa

SEQ ID NO: 264930 - DNA, 19 bp, Homo sapiens
  siRNA target sequence for FLJ20095 (NM_017666.1,1922-1940).
gcgacagcgcaacagaaaa

SEQ ID NO: 264931 - DNA, 19 bp, Homo sapiens
  siRNA target sequence for FLJ20095 (NM_017666.1,1956-1974).
gctttgaagaacataaggt

SEQ ID NO: 264932 - DNA, 19 bp, Homo sapiens
  siRNA target sequence for FLJ20095 (NM_017666.1,2029-2047).
caagccacttttctatata

SEQ ID NO: 264933 - DNA, 19 bp, Homo sapiens
  siRNA target sequence for FLJ20095 (NM_017666.1,2057-2075).
cagtttttgcaagtacaat

SEQ ID NO: 264934 - DNA, 19 bp, Homo sapiens
  siRNA target sequence for FLJ20095 (NM_017666.1,2130-2148).
ccaggtaaacggttttgta

SEQ ID NO: 264935 - DNA, 19 bp, Homo sapiens
  siRNA target sequence for FLJ20095 (NM_017666.1,2133-2151).
ggtaaacggttttgtattt

SEQ ID NO: 264936 - DNA, 19 bp, Homo sapiens
  siRNA target sequence for FLJ20095 (NM_017666.1,2221-2239).
cttccggcttagatcgtat

SEQ ID NO: 264937 - DNA, 19 bp, Homo sapiens
  siRNA target sequence for FLJ20095 (NM_017666.1,2232-2250).
gatcgtatggctaaacact

SEQ ID NO: 264938 - DNA, 19 bp, Homo sapiens
  siRNA target sequence for FLJ20095 (NM_017666.1,2235-2253).
cgtatggctaaacacttaa

SEQ ID NO: 264939 - DNA, 19 bp, Homo sapiens
  siRNA target sequence for FLJ20095 (NM_017666.1,2276-2294).
ccaagttataatagagaat

SEQ ID NO: 264940 - DNA, 19 bp, Homo sapiens
  siRNA target sequence for FLJ20095 (NM_017666.1,2300-2318).
caaaagtacctcaacttct

SEQ ID NO: 264941 - DNA, 19 bp, Homo sapiens
  siRNA target sequence for FLJ20095 (NM_017666.1,2326-2344).
ctactggctgctcattgaa

SEQ ID NO: 264942 - DNA, 19 bp, Homo sapiens
  siRNA target sequence for FLJ20511 (NM_017853.1,301-319).
gcccaagctgactagcaaa

SEQ ID NO: 264943 - DNA, 19 bp, Homo sapiens
  siRNA target sequence for FLJ20511 (NM_017853.1,303-321).
ccaagctgactagcaaaaa

SEQ ID NO: 264944 - DNA, 19 bp, Homo sapiens
  siRNA target sequence for FLJ20511 (NM_017853.1,307-325).
gctgactagcaaaaaggaa

SEQ ID NO: 264945 - DNA, 19 bp, Homo sapiens
  siRNA target sequence for FLJ20511 (NM_017853.1,326-344).
gtagaccaggcgataaaaa

SEQ ID NO: 264946 - DNA, 19 bp, Homo sapiens
  siRNA target sequence for FLJ20511 (NM_017853.1,331-349).
ccaggcgataaaaagtact

SEQ ID NO: 264947 - DNA, 19 bp, Homo sapiens
  siRNA target sequence for FLJ20511 (NM_017853.1,403-421).
gcagctagatgatattctt

SEQ ID NO: 264948 - DNA, 19 bp, Homo sapiens
  siRNA target sequence for FLJ20511 (NM_017853.1,430-448).
ctcttctgacttaagtaaa

SEQ ID NO: 264949 - DNA, 19 bp, Homo sapiens
  siRNA target sequence for FLJ20511 (NM_017853.1,432-450).
cttctgacttaagtaaaat

SEQ ID NO: 264950 - DNA, 19 bp, Homo sapiens
  siRNA target sequence for FLJ20511 (NM_017853.1,573-591).
ctccagatcacactaagtt

SEQ ID NO: 264951 - DNA, 19 bp, Homo sapiens
  siRNA target sequence for FLJ20511 (NM_017853.1,576-594).
cagatcacactaagtttgt

SEQ ID NO: 264952 - DNA, 19 bp, Homo sapiens
  siRNA target sequence for FLJ20511 (NM_017853.1,609-627).
ccaaacaagacttcataga

SEQ ID NO: 264953 - DNA, 19 bp, Homo sapiens
  siRNA target sequence for FLJ20511 (NM_017853.1,622-640).
catagatttgattgaagta

SEQ ID NO: 264954 - DNA, 19 bp, Homo sapiens
  siRNA target sequence for FLJ20511 (NM_017853.1,626-644).
gatttgattgaagtaatct

SEQ ID NO: 264955 - DNA, 19 bp, Homo sapiens
  siRNA target sequence for FLJ20511 (NM_017853.1,683-701).
cctattgatcccaagaata

SEQ ID NO: 264956 - DNA, 19 bp, Homo sapiens
  siRNA target sequence for FLJ20511 (NM_017853.1,715-733).
ccttctctatcaagacatt

SEQ ID NO: 264957 - DNA, 19 bp, Homo sapiens
  siRNA target sequence for FLJ22625 (NM_024715.2,739-757).
ctcggctggtggcaagtat

SEQ ID NO: 264958 - DNA, 19 bp, Homo sapiens
  siRNA target sequence for FLJ22625 (NM_024715.2,743-761).
gctggtggcaagtattgct

SEQ ID NO: 264959 - DNA, 19 bp, Homo sapiens
  siRNA target sequence for FLJ22625 (NM_024715.2,805-823).
gaaagtggtcgcttatggt

SEQ ID NO: 264960 - DNA, 19 bp, Homo sapiens
  siRNA target sequence for FLJ22625 (NM_024715.2,1069-1087).
gtccgagagagccttttct

SEQ ID NO: 264961 - DNA, 19 bp, Homo sapiens
  siRNA target sequence for FLJ22625 (NM_024715.2,1171-1189).
ccgacagaggactccaata

SEQ ID NO: 264962 - DNA, 19 bp, Homo sapiens
  siRNA target sequence for FLJ22625 (NM_024715.2,1180-1198).
gactccaataacactgaaa

SEQ ID NO: 264963 - DNA, 19 bp, Homo sapiens
  siRNA target sequence for FLJ22625 (NM_024715.2,1278-1296).
gtcacaggaccttatggat

SEQ ID NO: 264964 - DNA, 19 bp, Homo sapiens
  siRNA target sequence for FLJ22625 (NM_024715.2,1311-1329).
cggtagtgactgtactcta

SEQ ID NO: 264965 - DNA, 19 bp, Homo sapiens
  siRNA target sequence for FLJ22625 (NM_024715.2,1322-1340).
gtactctagtcctgtttta

SEQ ID NO: 264966 - DNA, 19 bp, Homo sapiens
  siRNA target sequence for FLJ22625 (NM_024715.2,1367-1385).
gtttggcccctcactttaa

SEQ ID NO: 264967 - DNA, 19 bp, Homo sapiens
  siRNA target sequence for FLJ22625 (NM_024715.2,1371-1389).
ggcccctcactttaactct

SEQ ID NO: 264968 - DNA, 19 bp, Homo sapiens
  siRNA target sequence for FLJ22625 (NM_024715.2,1469-1487).
ccgtagctgttcctaatat

SEQ ID NO: 264969 - DNA, 19 bp, Homo sapiens
  siRNA target sequence for FLJ22625 (NM_024715.2,1470-1488).
cgtagctgttcctaatatt

SEQ ID NO: 264970 - DNA, 19 bp, Homo sapiens
  siRNA target sequence for FLJ22625 (NM_024715.2,1515-1533).
ggccagatttaatcataca

SEQ ID NO: 264971 - DNA, 19 bp, Homo sapiens
  siRNA target sequence for FLJ22625 (NM_024715.2,1517-1535).
ccagatttaatcatacaga

SEQ ID NO: 264972 - DNA, 19 bp, Homo sapiens
  siRNA target sequence for FLJ22625 (NM_024715.2,1657-1675).
gtggactggttgcttgtat

SEQ ID NO: 264973 - DNA, 19 bp, Homo sapiens
  siRNA target sequence for FLJ22625 (NM_024715.2,1659-1677).
ggactggttgcttgtattt

SEQ ID NO: 264974 - DNA, 19 bp, Homo sapiens
  siRNA target sequence for FLJ22625 (NM_024715.2,1660-1678).
gactggttgcttgtatttt

SEQ ID NO: 264975 - DNA, 19 bp, Homo sapiens
  siRNA target sequence for FLJ22625 (NM_024715.2,1716-1734).
cattcgaactgagagtatt

SEQ ID NO: 264976 - DNA, 19 bp, Homo sapiens
  siRNA target sequence for FLJ22625 (NM_024715.2,1728-1746).
gagtattcggtggctaatt

SEQ ID NO: 264977 - DNA, 19 bp, Homo sapiens
  siRNA target sequence for FLJ23537 (NM_024889.2,67-85).
caaactcacctacaagatt

SEQ ID NO: 264978 - DNA, 19 bp, Homo sapiens
  siRNA target sequence for FLJ23537 (NM_024889.2,112-130).
gaagagaatcattatctta

SEQ ID NO: 264979 - DNA, 19 bp, Homo sapiens
  siRNA target sequence for FLJ23537 (NM_024889.2,134-152).
ctcgaagtgttcttttaga

SEQ ID NO: 264980 - DNA, 19 bp, Homo sapiens
  siRNA target sequence for FLJ23537 (NM_024889.2,238-256).
cattatgagccaatggaat

SEQ ID NO: 264981 - DNA, 19 bp, Homo sapiens
  siRNA target sequence for FLJ23537 (NM_024889.2,358-376).
caaggctcaggaattgatt

SEQ ID NO: 264982 - DNA, 19 bp, Homo sapiens
  siRNA target sequence for FLJ23537 (NM_024889.2,399-417).
ggaagcacagaccacaaat

SEQ ID NO: 264983 - DNA, 19 bp, Homo sapiens
  siRNA target sequence for FLJ23537 (NM_024889.2,426-444).
ggggtcggcctcactaact

SEQ ID NO: 264984 - DNA, 19 bp, Homo sapiens
  siRNA target sequence for FLJ23537 (NM_024889.2,428-446).
ggtcggcctcactaactgt

SEQ ID NO: 264985 - DNA, 19 bp, Homo sapiens
  siRNA target sequence for FLJ23537 (NM_024889.2,429-447).
gtcggcctcactaactgtt

SEQ ID NO: 264986 - DNA, 19 bp, Homo sapiens
  siRNA target sequence for FLJ23537 (NM_024889.2,437-455).
cactaactgttgtgcaatt

SEQ ID NO: 264987 - DNA, 19 bp, Homo sapiens
  siRNA target sequence for FLJ23537 (NM_024889.2,439-457).
ctaactgttgtgcaattgt

SEQ ID NO: 264988 - DNA, 19 bp, Homo sapiens
  siRNA target sequence for FLJ23537 (NM_024889.2,445-463).
gttgtgcaattgtctatat

SEQ ID NO: 264989 - DNA, 19 bp, Homo sapiens
  siRNA target sequence for FLJ23537 (NM_024889.2,451-469).
caattgtctatattaatca

SEQ ID NO: 264990 - DNA, 19 bp, Homo sapiens
  siRNA target sequence for FLJ23537 (NM_024889.2,493-511).
gtggagaaactgaacgttt

SEQ ID NO: 264991 - DNA, 19 bp, Homo sapiens
  siRNA target sequence for FLJ23537 (NM_024889.2,557-575).
ccacaggacggatatgtgt

SEQ ID NO: 264992 - DNA, 19 bp, Homo sapiens
  siRNA target sequence for FLJ23537 (NM_024889.2,598-616).
cgtttgggatgcatatttt

SEQ ID NO: 264993 - DNA, 19 bp, Homo sapiens
  siRNA target sequence for FLJ23537 (NM_024889.2,840-858).
gaggagtccggccattaaa

SEQ ID NO: 264994 - DNA, 19 bp, Homo sapiens
  siRNA target sequence for FLJ23537 (NM_024889.2,842-860).
ggagtccggccattaaaaa

SEQ ID NO: 264995 - DNA, 19 bp, Homo sapiens
  siRNA target sequence for FLJ25369 (NM_152670.1,172-190).
ccctgtggatttagacata

SEQ ID NO: 264996 - DNA, 19 bp, Homo sapiens
  siRNA target sequence for FLJ25369 (NM_152670.1,179-197).
gatttagacatataccaaa

SEQ ID NO: 264997 - DNA, 19 bp, Homo sapiens
  siRNA target sequence for FLJ25369 (NM_152670.1,201-219).
cccacatggtcgactatca

SEQ ID NO: 264998 - DNA, 19 bp, Homo sapiens
  siRNA target sequence for FLJ25369 (NM_152670.1,281-299).
caactccgggacaaagagt

SEQ ID NO: 264999 - DNA, 19 bp, Homo sapiens
  siRNA target sequence for FLJ25369 (NM_152670.1,343-361).
gtaccctgctttcaaaaga

SEQ ID NO: 265000 - DNA, 19 bp, Homo sapiens
  siRNA target sequence for FLJ25369 (NM_152670.1,453-471).
gcacctgccatttcacata

SEQ ID NO: 265001 - DNA, 19 bp, Homo sapiens
  siRNA target sequence for FLJ25369 (NM_152670.1,520-538).
cctccagagtgctgacttt

SEQ ID NO: 265002 - DNA, 19 bp, Homo sapiens
  siRNA target sequence for FLJ25369 (NM_152670.1,617-635).
cttcattgccatatagtca

SEQ ID NO: 265003 - DNA, 19 bp, Homo sapiens
  siRNA target sequence for FLJ25369 (NM_152670.1,632-650).
gtcaaggtccccatcttga

SEQ ID NO: 265004 - DNA, 19 bp, Homo sapiens
  siRNA target sequence for FLJ25369 (NM_152670.1,659-677).
ggacccttgatgccatttt

SEQ ID NO: 265005 - DNA, 19 bp, Homo sapiens
  siRNA target sequence for FLJ31384 (NM_152472.1,1062-1080).
ctttcatgtgccattctta

SEQ ID NO: 265006 - DNA, 19 bp, Homo sapiens
  siRNA target sequence for FLJ31384 (NM_152472.1,1135-1153).
gtgtggtaaggctcacaat

SEQ ID NO: 265007 - DNA, 19 bp, Homo sapiens
  siRNA target sequence for FLJ31384 (NM_152472.1,1137-1155).
gtggtaaggctcacaatca

SEQ ID NO: 265008 - DNA, 19 bp, Homo sapiens
  siRNA target sequence for FLJ31384 (NM_152472.1,1139-1157).
ggtaaggctcacaatcact

SEQ ID NO: 265009 - DNA, 19 bp, Homo sapiens
  siRNA target sequence for FLJ31384 (NM_152472.1,1140-1158).
gtaaggctcacaatcactt

SEQ ID NO: 265010 - DNA, 19 bp, Homo sapiens
  siRNA target sequence for FLJ31384 (NM_152472.1,1144-1162).
ggctcacaatcacttgatt

SEQ ID NO: 265011 - DNA, 19 bp, Homo sapiens
  siRNA target sequence for FLJ40417 (NM_173650.1,440-458).
gcacaccggctgtccaaaa

SEQ ID NO: 265012 - DNA, 19 bp, Homo sapiens
  siRNA target sequence for FLJ40417 (NM_173650.1,549-567).
cccaccctccttttgagta

SEQ ID NO: 265013 - DNA, 19 bp, Homo sapiens
  siRNA target sequence for FLJ40417 (NM_173650.1,550-568).
ccaccctccttttgagtat

SEQ ID NO: 265014 - DNA, 19 bp, Homo sapiens
  siRNA target sequence for FLJ40417 (NM_173650.1,565-583).
gtatcacctgggtaggaaa

SEQ ID NO: 265015 - DNA, 19 bp, Homo sapiens
  siRNA target sequence for FLJ40417 (NM_173650.1,594-612).
ggtatcatcccgacaagaa

SEQ ID NO: 265016 - DNA, 19 bp, Homo sapiens
  siRNA target sequence for FLJ40417 (NM_173650.1,595-613).
gtatcatcccgacaagaat

SEQ ID NO: 265017 - DNA, 19 bp, Homo sapiens
  siRNA target sequence for FLJ40417 (NM_173650.1,666-684).
ccatactgagcgactctaa

SEQ ID NO: 265018 - DNA, 19 bp, Homo sapiens
  siRNA target sequence for FLJ40417 (NM_173650.1,718-736).
gggaatatatctgtatgat

SEQ ID NO: 265019 - DNA, 19 bp, Homo sapiens
  siRNA target sequence for FLJ40417 (NM_173650.1,749-767).
gaaggcgtcagatactatt

SEQ ID NO: 265020 - DNA, 19 bp, Homo sapiens
  siRNA target sequence for FLJ40417 (NM_173650.1,752-770).
ggcgtcagatactatttta

SEQ ID NO: 265021 - DNA, 19 bp, Homo sapiens
  siRNA target sequence for FLJ40417 (NM_173650.1,754-772).
cgtcagatactattttatt

SEQ ID NO: 265022 - DNA, 19 bp, Homo sapiens
  siRNA target sequence for FLJ40417 (NM_173650.1,964-982).
ggaaaatagcgaagatgat

SEQ ID NO: 265023 - DNA, 19 bp, Homo sapiens
  siRNA target sequence for FLJ40417 (NM_173650.1,965-983).
gaaaatagcgaagatgatt

SEQ ID NO: 265024 - DNA, 19 bp, Homo sapiens
  siRNA target sequence for GLRX (NM_002064.1,114-132).
cagtcaattgcccatcaaa

SEQ ID NO: 265025 - DNA, 19 bp, Homo sapiens
  siRNA target sequence for GLRX (NM_002064.1,144-162).
ggaatttgtcgatatcaca

SEQ ID NO: 265026 - DNA, 19 bp, Homo sapiens
  siRNA target sequence for GLRX (NM_002064.1,171-189).
ccacactaacgagattcaa

SEQ ID NO: 265027 - DNA, 19 bp, Homo sapiens
  siRNA target sequence for GLRX (NM_002064.1,174-192).
cactaacgagattcaagat

SEQ ID NO: 265028 - DNA, 19 bp, Homo sapiens
  siRNA target sequence for GLRX (NM_002064.1,221-239).
cggtgcctcgagtctttat

SEQ ID NO: 265029 - DNA, 19 bp, Homo sapiens
  siRNA target sequence for GLRX (NM_002064.1,222-240).
ggtgcctcgagtctttatt

SEQ ID NO: 265030 - DNA, 19 bp, Homo sapiens
  siRNA target sequence for GLRX (NM_002064.1,225-243).
gcctcgagtctttattggt

SEQ ID NO: 265031 - DNA, 19 bp, Homo sapiens
  siRNA target sequence for GLRX (NM_002064.1,226-244).
cctcgagtctttattggta

SEQ ID NO: 265032 - DNA, 19 bp, Homo sapiens
  siRNA target sequence for GLRX (NM_002064.1,230-248).
gagtctttattggtaaaga

SEQ ID NO: 265033 - DNA, 19 bp, Homo sapiens
  siRNA target sequence for GLRX (NM_002064.1,257-275).
gcggatgcagtgatctagt

SEQ ID NO: 265034 - DNA, 19 bp, Homo sapiens
  siRNA target sequence for GLRX2 (NM_016066.3,479-497).
gaaccctcgagataagcaa

SEQ ID NO: 265035 - DNA, 19 bp, Homo sapiens
  siRNA target sequence for GLRX2 (NM_016066.3,506-524).
cttctcccctctaaaggat

SEQ ID NO: 265036 - DNA, 19 bp, Homo sapiens
  siRNA target sequence for GLRX2 (NM_016066.3,513-531).
cctctaaaggatgtttaca

SEQ ID NO: 265037 - DNA, 19 bp, Homo sapiens
  siRNA target sequence for GLRX2 (NM_016066.3,599-617).
gatggagagcaatacatca

SEQ ID NO: 265038 - DNA, 19 bp, Homo sapiens
  siRNA target sequence for GLRX2 (NM_016066.3,656-674).
gatccaagaaacaatttct

SEQ ID NO: 265039 - DNA, 19 bp, Homo sapiens
  siRNA target sequence for GLRX2 (NM_016066.3,667-685).
caatttctgataattgtgt

SEQ ID NO: 265040 - DNA, 19 bp, Homo sapiens
  siRNA target sequence for GLRX2 (NM_016066.3,697-715).
caaaaacatcctgttctta

SEQ ID NO: 265041 - DNA, 19 bp, Homo sapiens
  siRNA target sequence for GLRX2 (NM_016066.3,718-736).
gtacaatggcaaaaaagct

SEQ ID NO: 265042 - DNA, 19 bp, Homo sapiens
  siRNA target sequence for GLRX2 (NM_016066.3,725-743).
ggcaaaaaagcttttccat

SEQ ID NO: 265043 - DNA, 19 bp, Homo sapiens
  siRNA target sequence for HCA127 (NM_018684.1,216-234).
ggcacctgaaggaatacaa

SEQ ID NO: 265044 - DNA, 19 bp, Homo sapiens
  siRNA target sequence for HCA127 (NM_018684.1,311-329).
gtgatggaaaacactatca

SEQ ID NO: 265045 - DNA, 19 bp, Homo sapiens
  siRNA target sequence for HCA127 (NM_018684.1,388-406).
gtataagccactgaaagaa

SEQ ID NO: 265046 - DNA, 19 bp, Homo sapiens
  siRNA target sequence for HCA127 (NM_018684.1,660-678).
catgtcaccagcaaattca

SEQ ID NO: 265047 - DNA, 19 bp, Homo sapiens
  siRNA target sequence for HCA127 (NM_018684.1,677-695).
caccggaatgcacctatat

SEQ ID NO: 265048 - DNA, 19 bp, Homo sapiens
  siRNA target sequence for HECA (NM_016217.1,342-360).
cggcgacgagcaggaaaat

SEQ ID NO: 265049 - DNA, 19 bp, Homo sapiens
  siRNA target sequence for HECA (NM_016217.1,345-363).
cgacgagcaggaaaatgga

SEQ ID NO: 265050 - DNA, 19 bp, Homo sapiens
  siRNA target sequence for HECA (NM_016217.1,757-775).
caatgccgccagaacatgt

SEQ ID NO: 265051 - DNA, 19 bp, Homo sapiens
  siRNA target sequence for HECA (NM_016217.1,824-842).
gtggccagggccacttgaa

SEQ ID NO: 265052 - DNA, 19 bp, Homo sapiens
  siRNA target sequence for HECA (NM_016217.1,827-845).
gccagggccacttgaagaa

SEQ ID NO: 265053 - DNA, 19 bp, Homo sapiens
  siRNA target sequence for HECA (NM_016217.1,872-890).
ggatgcaggacgagaaaaa

SEQ ID NO: 265054 - DNA, 19 bp, Homo sapiens
  siRNA target sequence for HECA (NM_016217.1,1165-1183).
ctcggggagttcttaaaga

SEQ ID NO: 265055 - DNA, 19 bp, Homo sapiens
  siRNA target sequence for HECA (NM_016217.1,1457-1475).
gccacagaaacgtggtaaa

SEQ ID NO: 265056 - DNA, 19 bp, Homo sapiens
  siRNA target sequence for HECA (NM_016217.1,1459-1477).
cacagaaacgtggtaaact

SEQ ID NO: 265057 - DNA, 19 bp, Homo sapiens
  siRNA target sequence for HECA (NM_016217.1,1461-1479).
cagaaacgtggtaaactgt

SEQ ID NO: 265058 - DNA, 19 bp, Homo sapiens
  siRNA target sequence for HECA (NM_016217.1,1520-1538).
cactggtggatggaacttt

SEQ ID NO: 265059 - DNA, 19 bp, Homo sapiens
  siRNA target sequence for HECA (NM_016217.1,1522-1540).
ctggtggatggaactttgt

SEQ ID NO: 265060 - DNA, 19 bp, Homo sapiens
  siRNA target sequence for HECA (NM_016217.1,1547-1565).
gcccgtcgagacatgatga

SEQ ID NO: 265061 - DNA, 19 bp, Homo sapiens
  siRNA target sequence for HECA (NM_016217.1,1556-1574).
gacatgatgagatcgaata

SEQ ID NO: 265062 - DNA, 19 bp, Homo sapiens
  siRNA target sequence for HECA (NM_016217.1,1598-1616).
ggagactcatgcatctgta

SEQ ID NO: 265063 - DNA, 19 bp, Homo sapiens
  siRNA target sequence for HECA (NM_016217.1,1599-1617).
gagactcatgcatctgtat

SEQ ID NO: 265064 - DNA, 19 bp, Homo sapiens
  siRNA target sequence for HECA (NM_016217.1,1659-1677).
ctgcatcaagtgtaagtca

SEQ ID NO: 265065 - DNA, 19 bp, Homo sapiens
  siRNA target sequence for HECA (NM_016217.1,1799-1817).
ggatcgggatgcagtactt

SEQ ID NO: 265066 - DNA, 19 bp, Homo sapiens
  siRNA target sequence for HECA (NM_016217.1,1810-1828).
cagtacttctccgaatata

SEQ ID NO: 265067 - DNA, 19 bp, Homo sapiens
  siRNA target sequence for IMAGE:4215339 (NM_052878.1,385-403).
ccaacgagctgcgaaacat

SEQ ID NO: 265068 - DNA, 19 bp, Homo sapiens
  siRNA target sequence for IMAGE:4215339 (NM_052878.1,429-447).
cagaacgccatcatcgaaa

SEQ ID NO: 265069 - DNA, 19 bp, Homo sapiens
  siRNA target sequence for KIAA0528 (NM_014802.1,313-331).
gtggaggtaaaatttggta

SEQ ID NO: 265070 - DNA, 19 bp, Homo sapiens
  siRNA target sequence for KIAA0528 (NM_014802.1,315-333).
ggaggtaaaatttggtaat

SEQ ID NO: 265071 - DNA, 19 bp, Homo sapiens
  siRNA target sequence for KIAA0528 (NM_014802.1,316-334).
gaggtaaaatttggtaata

SEQ ID NO: 265072 - DNA, 19 bp, Homo sapiens
  siRNA target sequence for KIAA0528 (NM_014802.1,328-346).
ggtaataccacctttaaaa

SEQ ID NO: 265073 - DNA, 19 bp, Homo sapiens
  siRNA target sequence for KIAA0528 (NM_014802.1,420-438).
cttacaagatgaaccttta

SEQ ID NO: 265074 - DNA, 19 bp, Homo sapiens
  siRNA target sequence for KIAA0528 (NM_014802.1,482-500).
ccattggtaaagtgtacat

SEQ ID NO: 265075 - DNA, 19 bp, Homo sapiens
  siRNA target sequence for KIAA0528 (NM_014802.1,502-520).
gatattgatcctttactgt

SEQ ID NO: 265076 - DNA, 19 bp, Homo sapiens
  siRNA target sequence for KIAA0528 (NM_014802.1,577-595).
ggtatccgtggggaaatca

SEQ ID NO: 265077 - DNA, 19 bp, Homo sapiens
  siRNA target sequence for KIAA0528 (NM_014802.1,582-600).
ccgtggggaaatcaatgta

SEQ ID NO: 265078 - DNA, 19 bp, Homo sapiens
  siRNA target sequence for KIAA0528 (NM_014802.1,613-631).
gacctcttcaatgatttaa

SEQ ID NO: 265079 - DNA, 19 bp, Homo sapiens
  siRNA target sequence for KIAA0528 (NM_014802.1,618-636).
cttcaatgatttaaatcga

SEQ ID NO: 265080 - DNA, 19 bp, Homo sapiens
  siRNA target sequence for KIAA0528 (NM_014802.1,634-652).
cgatttaggcagtcatcat

SEQ ID NO: 265081 - DNA, 19 bp, Homo sapiens
  siRNA target sequence for KIAA0528 (NM_014802.1,645-663).
gtcatcatgtggagtcaaa

SEQ ID NO: 265082 - DNA, 19 bp, Homo sapiens
  siRNA target sequence for KIAA0528 (NM_014802.1,666-684).
cttttgcacaacgtctatt

SEQ ID NO: 265083 - DNA, 19 bp, Homo sapiens
  siRNA target sequence for KIAA0528 (NM_014802.1,671-689).
gcacaacgtctattccaaa

SEQ ID NO: 265084 - DNA, 19 bp, Homo sapiens
  siRNA target sequence for KIAA0528 (NM_014802.1,678-696).
gtctattccaaaatgctat

SEQ ID NO: 265085 - DNA, 19 bp, Homo sapiens
  siRNA target sequence for KIAA0528 (NM_014802.1,742-760).
gaagacccagaatatcagt

SEQ ID NO: 265086 - DNA, 19 bp, Homo sapiens
  siRNA target sequence for KIAA0528 (NM_014802.1,803-821).
gacagagactcatttcgtt

SEQ ID NO: 265087 - DNA, 19 bp, Homo sapiens
  siRNA target sequence for KIAA0528 (NM_014802.1,805-823).
cagagactcatttcgttaa

SEQ ID NO: 265088 - DNA, 19 bp, Homo sapiens
  siRNA target sequence for KIAA0528 (NM_014802.1,846-864).
gattggcttgaaagtactt

SEQ ID NO: 265089 - DNA, 19 bp, Homo sapiens
  siRNA target sequence for KIAA0528 (NM_014802.1,850-868).
ggcttgaaagtacttgaaa

SEQ ID NO: 265090 - DNA, 19 bp, Homo sapiens
  siRNA target sequence for KIAA0528 (NM_014802.1,881-899).
cagttgtggggtacttaca

SEQ ID NO: 265091 - DNA, 19 bp, Homo sapiens
  siRNA target sequence for KIAA0528 (NM_014802.1,883-901).
gttgtggggtacttacagt

SEQ ID NO: 265092 - DNA, 19 bp, Homo sapiens
  siRNA target sequence for KIAA0528 (NM_014802.1,950-968).
cggcgtgtactctggataa

SEQ ID NO: 265093 - DNA, 19 bp, Homo sapiens
  siRNA target sequence for KIAA0528 (NM_014802.1,951-969).
ggcgtgtactctggataaa

SEQ ID NO: 265094 - DNA, 19 bp, Homo sapiens
  siRNA target sequence for KIAA0528 (NM_014802.1,952-970).
gcgtgtactctggataaat

SEQ ID NO: 265095 - DNA, 19 bp, Homo sapiens
  siRNA target sequence for KIAA0528 (NM_014802.1,953-971).
cgtgtactctggataaatt

SEQ ID NO: 265096 - DNA, 19 bp, Homo sapiens
  siRNA target sequence for KIAA0528 (NM_014802.1,986-1004).
cattccttcctgcatgtaa

SEQ ID NO: 265097 - DNA, 19 bp, Homo sapiens
  siRNA target sequence for KIAA0528 (NM_014802.1,1029-1047).
gattcccttcaatgaagat

SEQ ID NO: 265098 - DNA, 19 bp, Homo sapiens
  siRNA target sequence for KIAA0528 (NM_014802.1,1079-1097).
caacccctctgaaaaacca

SEQ ID NO: 265099 - DNA, 19 bp, Homo sapiens
  siRNA target sequence for KIAA0528 (NM_014802.1,1215-1233).
gccctttaaagctctttta

SEQ ID NO: 265100 - DNA, 19 bp, Homo sapiens
  siRNA target sequence for KIAA0528 (NM_014802.1,1267-1285).
gaatttccattttttacct

SEQ ID NO: 265101 - DNA, 19 bp, Homo sapiens
  siRNA target sequence for KIAA0528 (NM_014802.1,1315-1333).
cacgttgggggtgtagtta

SEQ ID NO: 265102 - DNA, 19 bp, Homo sapiens
  siRNA target sequence for KIAA0528 (NM_014802.1,1317-1335).
cgttgggggtgtagttagt

SEQ ID NO: 265103 - DNA, 19 bp, Homo sapiens
  siRNA target sequence for KIAA0528 (NM_014802.1,1336-1354).
gcacgttctgtgaagcttt

SEQ ID NO: 265104 - DNA, 19 bp, Homo sapiens
  siRNA target sequence for KIAA0528 (NM_014802.1,1337-1355).
cacgttctgtgaagctttt

SEQ ID NO: 265105 - DNA, 19 bp, Homo sapiens
  siRNA target sequence for KIAA0528 (NM_014802.1,1464-1482).
gggctacagtgaatcaact

SEQ ID NO: 265106 - DNA, 19 bp, Homo sapiens
  siRNA target sequence for KIAA0528 (NM_014802.1,1465-1483).
ggctacagtgaatcaacta

SEQ ID NO: 265107 - DNA, 19 bp, Homo sapiens
  siRNA target sequence for KIAA0528 (NM_014802.1,1520-1538).
gcacagcggctgtactgaa

SEQ ID NO: 265108 - DNA, 19 bp, Homo sapiens
  siRNA target sequence for KIAA0528 (NM_014802.1,1521-1539).
cacagcggctgtactgaat

SEQ ID NO: 265109 - DNA, 19 bp, Homo sapiens
  siRNA target sequence for KIAA0528 (NM_014802.1,1525-1543).
gcggctgtactgaatccta

SEQ ID NO: 265110 - DNA, 19 bp, Homo sapiens
  siRNA target sequence for KIAA0528 (NM_014802.1,1563-1581).
cgtggaaggctgtttggaa

SEQ ID NO: 265111 - DNA, 19 bp, Homo sapiens
  siRNA target sequence for KIAA0528 (NM_014802.1,1602-1620).
gcctacacgttgtggattt

SEQ ID NO: 265112 - DNA, 19 bp, Homo sapiens
  siRNA target sequence for KIAA0528 (NM_014802.1,1609-1627).
cgttgtggattttgtcata

SEQ ID NO: 265113 - DNA, 19 bp, Homo sapiens
  siRNA target sequence for KIAA0528 (NM_014802.1,1615-1633).
ggattttgtcatataccat

SEQ ID NO: 265114 - DNA, 19 bp, Homo sapiens
  siRNA target sequence for KIAA0528 (NM_014802.1,1616-1634).
gattttgtcatataccata

SEQ ID NO: 265115 - DNA, 19 bp, Homo sapiens
  siRNA target sequence for KIAA0528 (NM_014802.1,1631-1649).
catatgatgaactgaatat

SEQ ID NO: 265116 - DNA, 19 bp, Homo sapiens
  siRNA target sequence for KIAA0528 (NM_014802.1,1657-1675).
ccagctcatctcacatatt

SEQ ID NO: 265117 - DNA, 19 bp, Homo sapiens
  siRNA target sequence for KIAA0528 (NM_014802.1,1660-1678).
gctcatctcacatattgct

SEQ ID NO: 265118 - DNA, 19 bp, Homo sapiens
  siRNA target sequence for KIAA0528 (NM_014802.1,1663-1681).
catctcacatattgctata

SEQ ID NO: 265119 - DNA, 19 bp, Homo sapiens
  siRNA target sequence for KIAA0528 (NM_014802.1,1702-1720).
cctgatgttctgtttacaa

SEQ ID NO: 265120 - DNA, 19 bp, Homo sapiens
  siRNA target sequence for KIAA0528 (NM_014802.1,1754-1772).
gaaaaggttgtcttattca

SEQ ID NO: 265121 - DNA, 19 bp, Homo sapiens
  siRNA target sequence for KIAA0528 (NM_014802.1,1778-1796).
ggttatgtcgcttaaaaaa

SEQ ID NO: 265122 - DNA, 19 bp, Homo sapiens
  siRNA target sequence for KIAA0528 (NM_014802.1,1820-1838).
ctacagctatcagtaatct

SEQ ID NO: 265123 - DNA, 19 bp, Homo sapiens
  siRNA target sequence for KIAA0528 (NM_014802.1,1823-1841).
cagctatcagtaatctctt

SEQ ID NO: 265124 - DNA, 19 bp, Homo sapiens
  siRNA target sequence for KIAA0528 (NM_014802.1,1863-1881).
gcatactcagctaatgaat

SEQ ID NO: 265125 - DNA, 19 bp, Homo sapiens
  siRNA target sequence for KIAA0528 (NM_014802.1,1864-1882).
catactcagctaatgaata

SEQ ID NO: 265126 - DNA, 19 bp, Homo sapiens
  siRNA target sequence for KIAA0528 (NM_014802.1,1868-1886).
ctcagctaatgaataaact

SEQ ID NO: 265127 - DNA, 19 bp, Homo sapiens
  siRNA target sequence for KIAA0528 (NM_014802.1,1870-1888).
cagctaatgaataaactaa

SEQ ID NO: 265128 - DNA, 19 bp, Homo sapiens
  siRNA target sequence for KIAA0528 (NM_014802.1,2033-2051).
ctaatgatggctcatatga

SEQ ID NO: 265129 - DNA, 19 bp, Homo sapiens
  siRNA target sequence for KIAA0528 (NM_014802.1,2121-2139).
caatcctccagagatatct

SEQ ID NO: 265130 - DNA, 19 bp, Homo sapiens
  siRNA target sequence for KIAA0528 (NM_014802.1,2175-2193).
gcaacgctcaagacttcta

SEQ ID NO: 265131 - DNA, 19 bp, Homo sapiens
  siRNA target sequence for KIAA0528 (NM_014802.1,2176-2194).
caacgctcaagacttctaa

SEQ ID NO: 265132 - DNA, 19 bp, Homo sapiens
  siRNA target sequence for KIAA0528 (NM_014802.1,2206-2224).
gaaagctcggatgaagtta

SEQ ID NO: 265133 - DNA, 19 bp, Homo sapiens
  siRNA target sequence for KIAA0528 (NM_014802.1,2210-2228).
gctcggatgaagttacaga

SEQ ID NO: 265134 - DNA, 19 bp, Homo sapiens
  siRNA target sequence for KIAA0528 (NM_014802.1,2211-2229).
ctcggatgaagttacagaa

SEQ ID NO: 265135 - DNA, 19 bp, Homo sapiens
  siRNA target sequence for KIAA0528 (NM_014802.1,2296-2314).
gatgtccattctctactta

SEQ ID NO: 265136 - DNA, 19 bp, Homo sapiens
  siRNA target sequence for KIAA0528 (NM_014802.1,2356-2374).
gaaattatgcccggtataa

SEQ ID NO: 265137 - DNA, 19 bp, Homo sapiens
  siRNA target sequence for KIAA0528 (NM_014802.1,2365-2383).
cccggtataaataattgga

SEQ ID NO: 265138 - DNA, 19 bp, Homo sapiens
  siRNA target sequence for KIAA0528 (NM_014802.1,2397-2415).
gatgttcacttcagtaaga

SEQ ID NO: 265139 - DNA, 19 bp, Homo sapiens
  siRNA target sequence for KIAA0528 (NM_014802.1,2400-2418).
gttcacttcagtaagagta

SEQ ID NO: 265140 - DNA, 19 bp, Homo sapiens
  siRNA target sequence for KIAA0528 (NM_014802.1,2429-2447).
gcagcctcaacctgactaa

SEQ ID NO: 265141 - DNA, 19 bp, Homo sapiens
  siRNA target sequence for KIAA0528 (NM_014802.1,2430-2448).
cagcctcaacctgactaat

SEQ ID NO: 265142 - DNA, 19 bp, Homo sapiens
  siRNA target sequence for KIAA0528 (NM_014802.1,2432-2450).
gcctcaacctgactaatca

SEQ ID NO: 265143 - DNA, 19 bp, Homo sapiens
  siRNA target sequence for KIAA0528 (NM_014802.1,2452-2470).
gctctcaataagaacttta

SEQ ID NO: 265144 - DNA, 19 bp, Homo sapiens
  siRNA target sequence for KIAA0528 (NM_014802.1,2453-2471).
ctctcaataagaactttaa

SEQ ID NO: 265145 - DNA, 19 bp, Homo sapiens
  siRNA target sequence for KIAA0528 (NM_014802.1,2491-2509).
ctcaagagcctgtacttta

SEQ ID NO: 265146 - DNA, 19 bp, Homo sapiens
  siRNA target sequence for KIAA0528 (NM_014802.1,2493-2511).
caagagcctgtactttaaa

SEQ ID NO: 265147 - DNA, 19 bp, Homo sapiens
  siRNA target sequence for KIAA0528 (NM_014802.1,2531-2549).
gctgcctttgccatgtaaa

SEQ ID NO: 265148 - DNA, 19 bp, Homo sapiens
  siRNA target sequence for KIAA0528 (NM_014802.1,2532-2550).
ctgcctttgccatgtaaat

SEQ ID NO: 265149 - DNA, 19 bp, Homo sapiens
  siRNA target sequence for KIAA0528 (NM_014802.1,2540-2558).
gccatgtaaattttacagt

SEQ ID NO: 265150 - DNA, 19 bp, Homo sapiens
  siRNA target sequence for KIAA0528 (NM_014802.1,2595-2613).
cacggcagtcgcaatcact

SEQ ID NO: 265151 - DNA, 19 bp, Homo sapiens
  siRNA target sequence for KIAA0528 (NM_014802.1,2597-2615).
cggcagtcgcaatcacttt

SEQ ID NO: 265152 - DNA, 19 bp, Homo sapiens
  siRNA target sequence for KIAA0528 (NM_014802.1,2598-2616).
ggcagtcgcaatcactttt

SEQ ID NO: 265153 - DNA, 19 bp, Homo sapiens
  siRNA target sequence for KIAA0528 (NM_014802.1,2605-2623).
gcaatcacttttgacaaaa

SEQ ID NO: 265154 - DNA, 19 bp, Homo sapiens
  siRNA target sequence for KIAA0528 (NM_014802.1,2675-2693).
cctcaacagataatgaaga

SEQ ID NO: 265155 - DNA, 19 bp, Homo sapiens
  siRNA target sequence for KIAA0528 (NM_014802.1,2763-2781).
catgacagttgaaaaagca

SEQ ID NO: 265156 - DNA, 19 bp, Homo sapiens
  siRNA target sequence for KIAA0528 (NM_014802.1,2797-2815).
ggaaatttccggaatcgtt

SEQ ID NO: 265157 - DNA, 19 bp, Homo sapiens
  siRNA target sequence for KIAA0528 (NM_014802.1,2818-2836).
gctccaccttgtgcaaatt

SEQ ID NO: 265158 - DNA, 19 bp, Homo sapiens
  siRNA target sequence for KIAA0528 (NM_014802.1,2821-2839).
ccaccttgtgcaaattcca

SEQ ID NO: 265159 - DNA, 19 bp, Homo sapiens
  siRNA target sequence for KIAA0528 (NM_014802.1,2840-2858).
cagttggggttgttaagat

SEQ ID NO: 265160 - DNA, 19 bp, Homo sapiens
  siRNA target sequence for KIAA0528 (NM_014802.1,2881-2899).
ggagcaaaaataactaagt

SEQ ID NO: 265161 - DNA, 19 bp, Homo sapiens
  siRNA target sequence for KIAA0528 (NM_014802.1,2882-2900).
gagcaaaaataactaagta

SEQ ID NO: 265162 - DNA, 19 bp, Homo sapiens
  siRNA target sequence for KIAA0528 (NM_014802.1,2894-2912).
ctaagtatcttgggataat

SEQ ID NO: 265163 - DNA, 19 bp, Homo sapiens
  siRNA target sequence for KIAA0528 (NM_014802.1,2905-2923).
gggataattaacatgtttt

SEQ ID NO: 265164 - DNA, 19 bp, Homo sapiens
  siRNA target sequence for KIAA0528 (NM_014802.1,3043-3061).
gttgtctcctacataatga

SEQ ID NO: 265165 - DNA, 19 bp, Homo sapiens
  siRNA target sequence for KIAA0528 (NM_014802.1,3072-3090).
cttcatggagaatccaaat

SEQ ID NO: 265166 - DNA, 19 bp, Homo sapiens
  siRNA target sequence for KIAA0528 (NM_014802.1,3195-3213).
ccagtcatcatgtactgaa

SEQ ID NO: 265167 - DNA, 19 bp, Homo sapiens
  siRNA target sequence for KIAA1441 (NM_020832.1,317-335).
cctgccaccgccagacatt

SEQ ID NO: 265168 - DNA, 19 bp, Homo sapiens
  siRNA target sequence for KIAA1441 (NM_020832.1,318-336).
ctgccaccgccagacattt

SEQ ID NO: 265169 - DNA, 19 bp, Homo sapiens
  siRNA target sequence for KIAA1441 (NM_020832.1,320-338).
gccaccgccagacatttct

SEQ ID NO: 265170 - DNA, 19 bp, Homo sapiens
  siRNA target sequence for KIAA1441 (NM_020832.1,322-340).
caccgccagacatttctgt

SEQ ID NO: 265171 - DNA, 19 bp, Homo sapiens
  siRNA target sequence for KIAA1441 (NM_020832.1,424-442).
ctgctggggtaactaaaga

SEQ ID NO: 265172 - DNA, 19 bp, Homo sapiens
  siRNA target sequence for KIAA1441 (NM_020832.1,459-477).
catcgaatgcagaatggtt

SEQ ID NO: 265173 - DNA, 19 bp, Homo sapiens
  siRNA target sequence for KIAA1441 (NM_020832.1,1066-1084).
gctcctctaggcctcttaa

SEQ ID NO: 265174 - DNA, 19 bp, Homo sapiens
  siRNA target sequence for KIAA1441 (NM_020832.1,1086-1104).
gtgcggatcaagaccatta

SEQ ID NO: 265175 - DNA, 19 bp, Homo sapiens
  siRNA target sequence for KIAA1441 (NM_020832.1,1089-1107).
cggatcaagaccattaaaa

SEQ ID NO: 265176 - DNA, 19 bp, Homo sapiens
  siRNA target sequence for KIAA1441 (NM_020832.1,1195-1213).
ctgaggctagcctcttgaa

SEQ ID NO: 265177 - DNA, 19 bp, Homo sapiens
  siRNA target sequence for KIAA1441 (NM_020832.1,1396-1414).
gccctaagatgattgctaa

SEQ ID NO: 265178 - DNA, 19 bp, Homo sapiens
  siRNA target sequence for KIAA1441 (NM_020832.1,1738-1756).
gcctggcacggcactatga

SEQ ID NO: 265179 - DNA, 19 bp, Homo sapiens
  siRNA target sequence for KIAA1441 (NM_020832.1,1869-1887).
gtcatgcagtgctcacatt

SEQ ID NO: 265180 - DNA, 19 bp, Homo sapiens
  siRNA target sequence for KIAA1441 (NM_020832.1,2099-2117).
ctctgcttacacatgcttt

SEQ ID NO: 265181 - DNA, 19 bp, Homo sapiens
  siRNA target sequence for KIAA1441 (NM_020832.1,2265-2283).
caccagcgcatgcataaga

SEQ ID NO: 265182 - DNA, 19 bp, Homo sapiens
  siRNA target sequence for KIAA1441 (NM_020832.1,2267-2285).
ccagcgcatgcataagaat

SEQ ID NO: 265183 - DNA, 19 bp, Homo sapiens
  siRNA target sequence for KIAA1441 (NM_020832.1,2325-2343).
ctgcaagccaattttcaga

SEQ ID NO: 265184 - DNA, 19 bp, Homo sapiens
  siRNA target sequence for KIAA1441 (NM_020832.1,2452-2470).
cgtcgcactgcgaggtttt

SEQ ID NO: 265185 - DNA, 19 bp, Homo sapiens
  siRNA target sequence for KIAA1441 (NM_020832.1,2654-2672).
ccagcgtgtcagtgtcttt

SEQ ID NO: 265186 - DNA, 19 bp, Homo sapiens
  siRNA target sequence for KIAA1441 (NM_020832.1,3016-3034).
ctgagcgtgatgaatacgt

SEQ ID NO: 265187 - DNA, 19 bp, Homo sapiens
  siRNA target sequence for KIAA1441 (NM_020832.1,3058-3076).
gcaagtcagtgaaaaagtt

SEQ ID NO: 265188 - DNA, 19 bp, Homo sapiens
  siRNA target sequence for KIAA1441 (NM_020832.1,3124-3142).
ggcgccatgtcagagttaa

SEQ ID NO: 265189 - DNA, 19 bp, Homo sapiens
  siRNA target sequence for KIAA1441 (NM_020832.1,3125-3143).
gcgccatgtcagagttaat

SEQ ID NO: 265190 - DNA, 19 bp, Homo sapiens
  siRNA target sequence for KIAA1441 (NM_020832.1,3127-3145).
gccatgtcagagttaatca

SEQ ID NO: 265191 - DNA, 19 bp, Homo sapiens
  siRNA target sequence for KIAA1441 (NM_020832.1,3162-3180).
gtttacccctgcaggtatt

SEQ ID NO: 265192 - DNA, 19 bp, Homo sapiens
  siRNA target sequence for KIAA1573 (NM_020925.1,1131-1149).
gttagcagcgtgaagtctt

SEQ ID NO: 265193 - DNA, 19 bp, Homo sapiens
  siRNA target sequence for KIAA1573 (NM_020925.1,1177-1195).
gattccaaaaggcatttca

SEQ ID NO: 265194 - DNA, 19 bp, Homo sapiens
  siRNA target sequence for KIAA1573 (NM_020925.1,1188-1206).
gcatttcagctgattcgaa

SEQ ID NO: 265195 - DNA, 19 bp, Homo sapiens
  siRNA target sequence for KIAA1573 (NM_020925.1,1194-1212).
cagctgattcgaagtacaa

SEQ ID NO: 265196 - DNA, 19 bp, Homo sapiens
  siRNA target sequence for KIAA1573 (NM_020925.1,1197-1215).
ctgattcgaagtacaaaca

SEQ ID NO: 265197 - DNA, 19 bp, Homo sapiens
  siRNA target sequence for KIAA1573 (NM_020925.1,1199-1217).
gattcgaagtacaaacaat

SEQ ID NO: 265198 - DNA, 19 bp, Homo sapiens
  siRNA target sequence for KIAA1573 (NM_020925.1,1220-1238).
cacaaagttccaagcaaat

SEQ ID NO: 265199 - DNA, 19 bp, Homo sapiens
  siRNA target sequence for KIAA1573 (NM_020925.1,1423-1441).
gggatctagctgaacagaa

SEQ ID NO: 265200 - DNA, 19 bp, Homo sapiens
  siRNA target sequence for KIAA1573 (NM_020925.1,1424-1442).
ggatctagctgaacagaat

SEQ ID NO: 265201 - DNA, 19 bp, Homo sapiens
  siRNA target sequence for KIAA1573 (NM_020925.1,1425-1443).
gatctagctgaacagaatt

SEQ ID NO: 265202 - DNA, 19 bp, Homo sapiens
  siRNA target sequence for KIAA1573 (NM_020925.1,1536-1554).
gtgggcaggttctacacaa

SEQ ID NO: 265203 - DNA, 19 bp, Homo sapiens
  siRNA target sequence for KIAA1573 (NM_020925.1,1541-1559).
caggttctacacaaacctt

SEQ ID NO: 265204 - DNA, 19 bp, Homo sapiens
  siRNA target sequence for KIAA1573 (NM_020925.1,1688-1706).
cgtgaatctggcttacatt

SEQ ID NO: 265205 - DNA, 19 bp, Homo sapiens
  siRNA target sequence for KIAA1573 (NM_020925.1,1707-1725).
cttgaagacgtgacgtatt

SEQ ID NO: 265206 - DNA, 19 bp, Homo sapiens
  siRNA target sequence for KIAA1573 (NM_020925.1,1720-1738).
cgtattaccaagactcttt

SEQ ID NO: 265207 - DNA, 19 bp, Homo sapiens
  siRNA target sequence for KIAA1573 (NM_020925.1,1755-1773).
ctcatagacgacaaaggat

SEQ ID NO: 265208 - DNA, 19 bp, Homo sapiens
  siRNA target sequence for KIAA1573 (NM_020925.1,1757-1775).
catagacgacaaaggatat

SEQ ID NO: 265209 - DNA, 19 bp, Homo sapiens
  siRNA target sequence for KIAA1573 (NM_020925.1,1763-1781).
cgacaaaggatatacactt

SEQ ID NO: 265210 - DNA, 19 bp, Homo sapiens
  siRNA target sequence for KIAA1573 (NM_020925.1,1764-1782).
gacaaaggatatacactta

SEQ ID NO: 265211 - DNA, 19 bp, Homo sapiens
  siRNA target sequence for KIAA1573 (NM_020925.1,1792-1810).
ctcttaccaggccatattt

SEQ ID NO: 265212 - DNA, 19 bp, Homo sapiens
  siRNA target sequence for KIAA1573 (NM_020925.1,1830-1848).
catactgacatcatacatt

SEQ ID NO: 265213 - DNA, 19 bp, Homo sapiens
  siRNA target sequence for KIAA1573 (NM_020925.1,1869-1887).
gaattagttcggcaaaata

SEQ ID NO: 265214 - DNA, 19 bp, Homo sapiens
  siRNA target sequence for KIAA1573 (NM_020925.1,1875-1893).
gttcggcaaaatatcctaa

SEQ ID NO: 265215 - DNA, 19 bp, Homo sapiens
  siRNA target sequence for KIAA1573 (NM_020925.1,1900-1918).
ctctgggcagccagattat

SEQ ID NO: 265216 - DNA, 19 bp, Homo sapiens
  siRNA target sequence for KIAA1573 (NM_020925.1,1939-1957).
ccctgtcttggcacataaa

SEQ ID NO: 265217 - DNA, 19 bp, Homo sapiens
  siRNA target sequence for KIAA1573 (NM_020925.1,1941-1959).
ctgtcttggcacataaaca

SEQ ID NO: 265218 - DNA, 19 bp, Homo sapiens
  siRNA target sequence for KIAA1573 (NM_020925.1,1975-1993).
gaaaggaagcctacaatgt

SEQ ID NO: 265219 - DNA, 19 bp, Homo sapiens
  siRNA target sequence for KIAA1573 (NM_020925.1,2013-2031).
gtacaagacacttccttta

SEQ ID NO: 265220 - DNA, 19 bp, Homo sapiens
  siRNA target sequence for KIAA1573 (NM_020925.1,2036-2054).
gtgtattgtggtgatacaa

SEQ ID NO: 265221 - DNA, 19 bp, Homo sapiens
  siRNA target sequence for KIAA1573 (NM_020925.1,2048-2066).
gatacaaccagaaatacct

SEQ ID NO: 265222 - DNA, 19 bp, Homo sapiens
  siRNA target sequence for KIAA1573 (NM_020925.1,2411-2429).
cattgtccgccgttacata

SEQ ID NO: 265223 - DNA, 19 bp, Homo sapiens
  siRNA target sequence for KIAA1573 (NM_020925.1,2437-2455).
ccaatggcgtcctcagaat

SEQ ID NO: 265224 - DNA, 19 bp, Homo sapiens
  siRNA target sequence for KIAA1573 (NM_020925.1,2438-2456).
caatggcgtcctcagaatt

SEQ ID NO: 265225 - DNA, 19 bp, Homo sapiens
  siRNA target sequence for KIAA1573 (NM_020925.1,2492-2510).
cactaggagacaatggtat

SEQ ID NO: 265226 - DNA, 19 bp, Homo sapiens
  siRNA target sequence for KIAA1573 (NM_020925.1,2513-2531).
ccatgcagtagctaatcca

SEQ ID NO: 265227 - DNA, 19 bp, Homo sapiens
  siRNA target sequence for KIAA1573 (NM_020925.1,2542-2560).
ctttgactggtccttactt

SEQ ID NO: 265228 - DNA, 19 bp, Homo sapiens
  siRNA target sequence for KIAA1573 (NM_020925.1,2546-2564).
gactggtccttacttagat

SEQ ID NO: 265229 - DNA, 19 bp, Homo sapiens
  siRNA target sequence for KIAA1573 (NM_020925.1,2548-2566).
ctggtccttacttagatgt

SEQ ID NO: 265230 - DNA, 19 bp, Homo sapiens
  siRNA target sequence for KIAA1573 (NM_020925.1,2661-2679).
gacttcacactcagatact

SEQ ID NO: 265231 - DNA, 19 bp, Homo sapiens
  siRNA target sequence for KIAA1573 (NM_020925.1,2672-2690).
cagatacttctacaaagtt

SEQ ID NO: 265232 - DNA, 19 bp, Homo sapiens
  siRNA target sequence for KIAA1573 (NM_020925.1,2674-2692).
gatacttctacaaagttct

SEQ ID NO: 265233 - DNA, 19 bp, Homo sapiens
  siRNA target sequence for KIAA1573 (NM_020925.1,2724-2742).
ggtggcaacaaaataaggt

SEQ ID NO: 265234 - DNA, 19 bp, Homo sapiens
  siRNA target sequence for KIAA1573 (NM_020925.1,2732-2750).
caaaataaggtgcttcata

SEQ ID NO: 265235 - DNA, 19 bp, Homo sapiens
  siRNA target sequence for KIAA1573 (NM_020925.1,2840-2858).
ggagcccctggtagcaaat

SEQ ID NO: 265236 - DNA, 19 bp, Homo sapiens
  siRNA target sequence for KIAA1573 (NM_020925.1,2843-2861).
gcccctggtagcaaatgat

SEQ ID NO: 265237 - DNA, 19 bp, Homo sapiens
  siRNA target sequence for KIAA1573 (NM_020925.1,2845-2863).
ccctggtagcaaatgatat

SEQ ID NO: 265238 - DNA, 19 bp, Homo sapiens
  siRNA target sequence for KIAA1573 (NM_020925.1,2917-2935).
gaacggtccagaggtttta

SEQ ID NO: 265239 - DNA, 19 bp, Homo sapiens
  siRNA target sequence for KIAA1573 (NM_020925.1,2920-2938).
cggtccagaggttttataa

SEQ ID NO: 265240 - DNA, 19 bp, Homo sapiens
  siRNA target sequence for KIAA1573 (NM_020925.1,2987-3005).
ccactgttccaaatacaga

SEQ ID NO: 265241 - DNA, 19 bp, Homo sapiens
  siRNA target sequence for KIAA1573 (NM_020925.1,3031-3049).
cgtttgttggcattgtcaa

SEQ ID NO: 265242 - DNA, 19 bp, Homo sapiens
  siRNA target sequence for KIAA1573 (NM_020925.1,3107-3125).
caactgtcaccgaatggaa

SEQ ID NO: 265243 - DNA, 19 bp, Homo sapiens
  siRNA target sequence for KIAA1573 (NM_020925.1,3112-3130).
gtcaccgaatggaacaaaa

SEQ ID NO: 265244 - DNA, 19 bp, Homo sapiens
  siRNA target sequence for KIAA1573 (NM_020925.1,3154-3172).
gccctctagaggtcaatga

SEQ ID NO: 265245 - DNA, 19 bp, Homo sapiens
  siRNA target sequence for KIAA1573 (NM_020925.1,3156-3174).
cctctagaggtcaatgagt

SEQ ID NO: 265246 - DNA, 19 bp, Homo sapiens
  siRNA target sequence for KIAA1573 (NM_020925.1,3428-3446).
gattgtgggagccaaaagt

SEQ ID NO: 265247 - DNA, 19 bp, Homo sapiens
  siRNA target sequence for KIAA1573 (NM_020925.1,3445-3463).
gtccctacgttgatgacat

SEQ ID NO: 265248 - DNA, 19 bp, Homo sapiens
  siRNA target sequence for KIAA1573 (NM_020925.1,3477-3495).
gatgaggtgatcacattaa

SEQ ID NO: 265249 - DNA, 19 bp, Homo sapiens
  siRNA target sequence for KIAA1573 (NM_020925.1,3483-3501).
gtgatcacattaaacatga

SEQ ID NO: 265250 - DNA, 19 bp, Homo sapiens
  siRNA target sequence for KIAA1573 (NM_020925.1,3577-3595).
cctaccgccaccagattca

SEQ ID NO: 265251 - DNA, 19 bp, Homo sapiens
  siRNA target sequence for KIAA1573 (NM_020925.1,3578-3596).
ctaccgccaccagattcat

SEQ ID NO: 265252 - DNA, 19 bp, Homo sapiens
  siRNA target sequence for KIAA1573 (NM_020925.1,3598-3616).
gccggagccatcagcatat

SEQ ID NO: 265253 - DNA, 19 bp, Homo sapiens
  siRNA target sequence for KIAA1573 (NM_020925.1,3602-3620).
gagccatcagcatatgtct

SEQ ID NO: 265254 - DNA, 19 bp, Homo sapiens
  siRNA target sequence for KIAA1573 (NM_020925.1,3716-3734).
cagcaacactcggtttata

SEQ ID NO: 265255 - DNA, 19 bp, Homo sapiens
  siRNA target sequence for KIAA1573 (NM_020925.1,3719-3737).
caacactcggtttatagct

SEQ ID NO: 265256 - DNA, 19 bp, Homo sapiens
  siRNA target sequence for KIAA1573 (NM_020925.1,3938-3956).
gactgctgccctactaagt

SEQ ID NO: 265257 - DNA, 19 bp, Homo sapiens
  siRNA target sequence for KIAA1573 (NM_020925.1,3946-3964).
ccctactaagtcacaagtt

SEQ ID NO: 265258 - DNA, 19 bp, Homo sapiens
  siRNA target sequence for KIAA1573 (NM_020925.1,3983-4001).
ccaccctacacttcatcat

SEQ ID NO: 265259 - DNA, 19 bp, Homo sapiens
  siRNA target sequence for KIAA1573 (NM_020925.1,3984-4002).
caccctacacttcatcata

SEQ ID NO: 265260 - DNA, 19 bp, Homo sapiens
  siRNA target sequence for LOC152485 (NM_178835.2,53-71).
gcgccttccctcacatgtt

SEQ ID NO: 265261 - DNA, 19 bp, Homo sapiens
  siRNA target sequence for LOC152485 (NM_178835.2,54-72).
cgccttccctcacatgtta

SEQ ID NO: 265262 - DNA, 19 bp, Homo sapiens
  siRNA target sequence for LOC152485 (NM_178835.2,108-126).
ggagaacactggtatggaa

SEQ ID NO: 265263 - DNA, 19 bp, Homo sapiens
  siRNA target sequence for LOC152485 (NM_178835.2,168-186).
caggagaactataagttgt

SEQ ID NO: 265264 - DNA, 19 bp, Homo sapiens
  siRNA target sequence for LOC152485 (NM_178835.2,455-473).
ggagtcccccgtaaacgtt

SEQ ID NO: 265265 - DNA, 19 bp, Homo sapiens
  siRNA target sequence for LOC152485 (NM_178835.2,474-492).
ggctcgaacctctcctttt

SEQ ID NO: 265266 - DNA, 19 bp, Homo sapiens
  siRNA target sequence for LOC152485 (NM_178835.2,574-592).
ctccaagtaaccgttttat

SEQ ID NO: 265267 - DNA, 19 bp, Homo sapiens
  siRNA target sequence for LOC152485 (NM_178835.2,645-663).
ccggattcagccatcctaa

SEQ ID NO: 265268 - DNA, 19 bp, Homo sapiens
  siRNA target sequence for LOC152485 (NM_178835.2,646-664).
cggattcagccatcctaaa

SEQ ID NO: 265269 - DNA, 19 bp, Homo sapiens
  siRNA target sequence for LOC152485 (NM_178835.2,647-665).
ggattcagccatcctaaaa

SEQ ID NO: 265270 - DNA, 19 bp, Homo sapiens
  siRNA target sequence for LOC152485 (NM_178835.2,684-702).
gccgttctgcaggacaaat

SEQ ID NO: 265271 - DNA, 19 bp, Homo sapiens
  siRNA target sequence for LOC152485 (NM_178835.2,686-704).
cgttctgcaggacaaatct

SEQ ID NO: 265272 - DNA, 19 bp, Homo sapiens
  siRNA target sequence for LOC152485 (NM_178835.2,797-815).
gaaggtcagtgaaagaagt

SEQ ID NO: 265273 - DNA, 19 bp, Homo sapiens
  siRNA target sequence for LOC152485 (NM_178835.2,1080-1098).
gttcctaagggaagagttt

SEQ ID NO: 265274 - DNA, 19 bp, Homo sapiens
  siRNA target sequence for LOC152485 (NM_178835.2,1083-1101).
cctaagggaagagtttcta

SEQ ID NO: 265275 - DNA, 19 bp, Homo sapiens
  siRNA target sequence for LOC152485 (NM_178835.2,1140-1158).
cctttccagtgtccaatat

SEQ ID NO: 265276 - DNA, 19 bp, Homo sapiens
  siRNA target sequence for LOC152485 (NM_178835.2,1167-1185).
gttattaaaaggaagagtt

SEQ ID NO: 265277 - DNA, 19 bp, Homo sapiens
  siRNA target sequence for LOC152485 (NM_178835.2,1523-1541).
catgatgacgtctaacact

SEQ ID NO: 265278 - DNA, 19 bp, Homo sapiens
  siRNA target sequence for LOC152485 (NM_178835.2,1734-1752).
gttaagatggcgtctgatt

SEQ ID NO: 265279 - DNA, 19 bp, Homo sapiens
  siRNA target sequence for LOC152485 (NM_178835.2,1871-1889).
gttcagcccggaatctgaa

SEQ ID NO: 265280 - DNA, 19 bp, Homo sapiens
  siRNA target sequence for LOC152485 (NM_178835.2,2070-2088).
gactcccatgtctcgatat

SEQ ID NO: 265281 - DNA, 19 bp, Homo sapiens
  siRNA target sequence for LOC152485 (NM_178835.2,2072-2090).
ctcccatgtctcgatatca

SEQ ID NO: 265282 - DNA, 19 bp, Homo sapiens
  siRNA target sequence for LOC152485 (NM_178835.2,2167-2185).
gagtacccccagagagaaa

SEQ ID NO: 265283 - DNA, 19 bp, Homo sapiens
  siRNA target sequence for LOC152485 (NM_178835.2,2196-2214).
caggatatctctgtgaaaa

SEQ ID NO: 265284 - DNA, 19 bp, Homo sapiens
  siRNA target sequence for LOC152485 (NM_178835.2,2337-2355).
ccattcacctccaattcaa

SEQ ID NO: 265285 - DNA, 19 bp, Homo sapiens
  siRNA target sequence for LOC152485 (NM_178835.2,2378-2396).
cgtgctgcacggaagaata

SEQ ID NO: 265286 - DNA, 19 bp, Homo sapiens
  siRNA target sequence for LOC152485 (NM_178835.2,2381-2399).
gctgcacggaagaatatca

SEQ ID NO: 265287 - DNA, 19 bp, Homo sapiens
  siRNA target sequence for LOC152485 (NM_178835.2,2446-2464).
catcctggaaattcaatga

SEQ ID NO: 265288 - DNA, 19 bp, Homo sapiens
  siRNA target sequence for LOC152485 (NM_178835.2,2692-2710).
ggaagaaacatccttatta

SEQ ID NO: 265289 - DNA, 19 bp, Homo sapiens
  siRNA target sequence for LOC152485 (NM_178835.2,2790-2808).
gagcagtggatgttttcga

SEQ ID NO: 265290 - DNA, 19 bp, Homo sapiens
  siRNA target sequence for LOC152485 (NM_178835.2,2897-2915).
gacccccagcgaatcaaat

SEQ ID NO: 265291 - DNA, 19 bp, Homo sapiens
  siRNA target sequence for LOC152485 (NM_178835.2,2955-2973).
gccaacagcaaagatgatt

SEQ ID NO: 265292 - DNA, 19 bp, Homo sapiens
  siRNA target sequence for LOC152485 (NM_178835.2,3066-3084).
ccagagaaagggttcgaat

SEQ ID NO: 265293 - DNA, 19 bp, Homo sapiens
  siRNA target sequence for LOC152485 (NM_178835.2,3075-3093).
gggttcgaatgtgtttttt

SEQ ID NO: 265294 - DNA, 19 bp, Homo sapiens
  siRNA target sequence for LOC152485 (NM_178835.2,3102-3120).
gtctgcaagacgaagaaca

SEQ ID NO: 265295 - DNA, 19 bp, Homo sapiens
  siRNA target sequence for LOC204474 (NM_174924.1,520-538).
caaagtggacattaccata

SEQ ID NO: 265296 - DNA, 19 bp, Homo sapiens
  siRNA target sequence for LOC204474 (NM_174924.1,578-596).
ccggagttgaagctgtttt

SEQ ID NO: 265297 - DNA, 19 bp, Homo sapiens
  siRNA target sequence for LOC204474 (NM_174924.1,648-666).
ctgccttagtcgtttggtt

SEQ ID NO: 265298 - DNA, 19 bp, Homo sapiens
  siRNA target sequence for LOC204474 (NM_174924.1,719-737).
gcagagtttgtgatatcca

SEQ ID NO: 265299 - DNA, 19 bp, Homo sapiens
  siRNA target sequence for LOC204474 (NM_174924.1,814-832).
ctttccagagctaacgttt

SEQ ID NO: 265300 - DNA, 19 bp, Homo sapiens
  siRNA target sequence for LOC204474 (NM_174924.1,823-841).
gctaacgtttggagtcata

SEQ ID NO: 265301 - DNA, 19 bp, Homo sapiens
  siRNA target sequence for LOC204474 (NM_174924.1,824-842).
ctaacgtttggagtcataa

SEQ ID NO: 265302 - DNA, 19 bp, Homo sapiens
  siRNA target sequence for LOC204474 (NM_174924.1,828-846).
cgtttggagtcataacgat

SEQ ID NO: 265303 - DNA, 19 bp, Homo sapiens
  siRNA target sequence for LOC204474 (NM_174924.1,829-847).
gtttggagtcataacgatt

SEQ ID NO: 265304 - DNA, 19 bp, Homo sapiens
  siRNA target sequence for LOC204474 (NM_174924.1,914-932).
gtgaaccgccaaaagctta

SEQ ID NO: 265305 - DNA, 19 bp, Homo sapiens
  siRNA target sequence for LOC204474 (NM_174924.1,916-934).
gaaccgccaaaagcttatt

SEQ ID NO: 265306 - DNA, 19 bp, Homo sapiens
  siRNA target sequence for LOC204474 (NM_174924.1,919-937).
ccgccaaaagcttattaat

SEQ ID NO: 265307 - DNA, 19 bp, Homo sapiens
  siRNA target sequence for LOC204474 (NM_174924.1,955-973).
ggaactcaatcgtgtcata

SEQ ID NO: 265308 - DNA, 19 bp, Homo sapiens
  siRNA target sequence for LOC204474 (NM_174924.1,956-974).
gaactcaatcgtgtcataa

SEQ ID NO: 265309 - DNA, 19 bp, Homo sapiens
  siRNA target sequence for LOC204474 (NM_174924.1,987-1005).
cagattttgtgatcgaata

SEQ ID NO: 265310 - DNA, 19 bp, Homo sapiens
  siRNA target sequence for LOC204474 (NM_174924.1,989-1007).
gattttgtgatcgaataca

SEQ ID NO: 265311 - DNA, 19 bp, Homo sapiens
  siRNA target sequence for LOC204474 (NM_174924.1,1000-1018).
cgaatacaacactgagaat

SEQ ID NO: 265312 - DNA, 19 bp, Homo sapiens
  siRNA target sequence for LOC204474 (NM_174924.1,1071-1089).
ccaaaagctccgagtcata

SEQ ID NO: 265313 - DNA, 19 bp, Homo sapiens
  siRNA target sequence for LOC204474 (NM_174924.1,1072-1090).
caaaagctccgagtcatat

SEQ ID NO: 265314 - DNA, 19 bp, Homo sapiens
  siRNA target sequence for LOC204474 (NM_174924.1,1081-1099).
cgagtcatatggtatcata

SEQ ID NO: 265315 - DNA, 19 bp, Homo sapiens
  siRNA target sequence for LOC204474 (NM_174924.1,1082-1100).
gagtcatatggtatcataa

SEQ ID NO: 265316 - DNA, 19 bp, Homo sapiens
  siRNA target sequence for LOC204474 (NM_174924.1,1084-1102).
gtcatatggtatcataatt

SEQ ID NO: 265317 - DNA, 19 bp, Homo sapiens
  siRNA target sequence for LOC204474 (NM_174924.1,1176-1194).
gaaatggacgtgtcttcaa

SEQ ID NO: 265318 - DNA, 19 bp, Homo sapiens
  siRNA target sequence for LOC204474 (NM_174924.1,1181-1199).
ggacgtgtcttcaagtact

SEQ ID NO: 265319 - DNA, 19 bp, Homo sapiens
  siRNA target sequence for LOC204474 (NM_174924.1,1182-1200).
gacgtgtcttcaagtactt

SEQ ID NO: 265320 - DNA, 19 bp, Homo sapiens
  siRNA target sequence for LOC204474 (NM_174924.1,1203-1221).
gggtcacagaggtcgatat

SEQ ID NO: 265321 - DNA, 19 bp, Homo sapiens
  siRNA target sequence for LOC204474 (NM_174924.1,1222-1240).
cccatccgtccaaatccta

SEQ ID NO: 265322 - DNA, 19 bp, Homo sapiens
  siRNA target sequence for LOC204474 (NM_174924.1,1223-1241).
ccatccgtccaaatcctaa

SEQ ID NO: 265323 - DNA, 19 bp, Homo sapiens
  siRNA target sequence for LOC204474 (NM_174924.1,1224-1242).
catccgtccaaatcctaaa

SEQ ID NO: 265324 - DNA, 19 bp, Homo sapiens
  siRNA target sequence for LOC204474 (NM_174924.1,1229-1247).
gtccaaatcctaaacttga

SEQ ID NO: 265325 - DNA, 19 bp, Homo sapiens
  siRNA target sequence for LOC204474 (NM_174924.1,1251-1269).
ctgacgccaggtacaaaat

SEQ ID NO: 265326 - DNA, 19 bp, Homo sapiens
  siRNA target sequence for LOC204474 (NM_174924.1,1277-1295).
gatgacataacctacgaaa

SEQ ID NO: 265327 - DNA, 19 bp, Homo sapiens
  siRNA target sequence for LOC204474 (NM_174924.1,1326-1344).
gtaaaaatgccacaaaaca

SEQ ID NO: 265328 - DNA, 19 bp, Homo sapiens
  siRNA target sequence for LOC204474 (NM_174924.1,1397-1415).
ctcgtggggaagaacttca

SEQ ID NO: 265329 - DNA, 19 bp, Homo sapiens
  siRNA target sequence for LOC204474 (NM_174924.1,1417-1435).
cgtagtcgtctttgacaaa

SEQ ID NO: 265330 - DNA, 19 bp, Homo sapiens
  siRNA target sequence for LOC204474 (NM_174924.1,1436-1454).
gaaaaggacgtatttgtga

SEQ ID NO: 265331 - DNA, 19 bp, Homo sapiens
  siRNA target sequence for LOC204474 (NM_174924.1,1442-1460).
gacgtatttgtgatgttct

SEQ ID NO: 265332 - DNA, 19 bp, Homo sapiens
  siRNA target sequence for LOC204474 (NM_174924.1,1444-1462).
cgtatttgtgatgttctat

SEQ ID NO: 265333 - DNA, 19 bp, Homo sapiens
  siRNA target sequence for LOC204474 (NM_174924.1,1459-1477).
ctatgcaccctggtctaaa

SEQ ID NO: 265334 - DNA, 19 bp, Homo sapiens
  siRNA target sequence for LOC204474 (NM_174924.1,1463-1481).
gcaccctggtctaaaaagt

SEQ ID NO: 265335 - DNA, 19 bp, Homo sapiens
  siRNA target sequence for LOC204474 (NM_174924.1,1531-1549).
ccactccacaattatcatt

SEQ ID NO: 265336 - DNA, 19 bp, Homo sapiens
  siRNA target sequence for LOC204474 (NM_174924.1,1595-1613).
gaccggtacccattcttca

SEQ ID NO: 265337 - DNA, 19 bp, Homo sapiens
  siRNA target sequence for LOC204474 (NM_174924.1,1634-1652).
caacaagctgtcctgtata

SEQ ID NO: 265338 - DNA, 19 bp, Homo sapiens
  siRNA target sequence for LOC51061 (NM_015914.2,308-326).
cacctgcagtcgagcaaaa

SEQ ID NO: 265339 - DNA, 19 bp, Homo sapiens
  siRNA target sequence for LOC51061 (NM_015914.2,311-329).
ctgcagtcgagcaaaagat

SEQ ID NO: 265340 - DNA, 19 bp, Homo sapiens
  siRNA target sequence for LOC51061 (NM_015914.2,313-331).
gcagtcgagcaaaagatgt

SEQ ID NO: 265341 - DNA, 19 bp, Homo sapiens
  siRNA target sequence for LOC51061 (NM_015914.2,316-334).
gtcgagcaaaagatgtgat

SEQ ID NO: 265342 - DNA, 19 bp, Homo sapiens
  siRNA target sequence for LOC51061 (NM_015914.2,318-336).
cgagcaaaagatgtgataa

SEQ ID NO: 265343 - DNA, 19 bp, Homo sapiens
  siRNA target sequence for LOC51061 (NM_015914.2,395-413).
ccaggggcagctggattat

SEQ ID NO: 265344 - DNA, 19 bp, Homo sapiens
  siRNA target sequence for LOC51061 (NM_015914.2,526-544).
cagatcaggtgttgtttgt

SEQ ID NO: 265345 - DNA, 19 bp, Homo sapiens
  siRNA target sequence for LOC51061 (NM_015914.2,620-638).
gtatcatcggagttttgga

SEQ ID NO: 265346 - DNA, 19 bp, Homo sapiens
  siRNA target sequence for LOC51061 (NM_015914.2,631-649).
gttttggaccaatcgaata

SEQ ID NO: 265347 - DNA, 19 bp, Homo sapiens
  siRNA target sequence for LOC51061 (NM_015914.2,657-675).
cccatgagtgctgtttaca

SEQ ID NO: 265348 - DNA, 19 bp, Homo sapiens
  siRNA target sequence for LOC51061 (NM_015914.2,664-682).
gtgctgtttacattgagaa

SEQ ID NO: 265349 - DNA, 19 bp, Homo sapiens
  siRNA target sequence for LOC51061 (NM_015914.2,711-729).
ctctacatcccatctcaat

SEQ ID NO: 265350 - DNA, 19 bp, Homo sapiens
  siRNA target sequence for LOC51061 (NM_015914.2,726-744).
caatcagaattactagatt

SEQ ID NO: 265351 - DNA, 19 bp, Homo sapiens
  siRNA target sequence for LOC51061 (NM_015914.2,738-756).
ctagattttctctcaaact

SEQ ID NO: 265352 - DNA, 19 bp, Homo sapiens
  siRNA target sequence for LOC51061 (NM_015914.2,766-784).
gagtactcgggtactttga

SEQ ID NO: 265353 - DNA, 19 bp, Homo sapiens
  siRNA target sequence for LOC51061 (NM_015914.2,768-786).
gtactcgggtactttgagt

SEQ ID NO: 265354 - DNA, 19 bp, Homo sapiens
  siRNA target sequence for LOC51061 (NM_015914.2,830-848).
ctcagcattacattcatta

SEQ ID NO: 265355 - DNA, 19 bp, Homo sapiens
  siRNA target sequence for LOC51061 (NM_015914.2,832-850).
cagcattacattcattaaa

SEQ ID NO: 265356 - DNA, 19 bp, Homo sapiens
  siRNA target sequence for LOC51061 (NM_015914.2,860-878).
cctaggaacagtacgattt

SEQ ID NO: 265357 - DNA, 19 bp, Homo sapiens
  siRNA target sequence for LOC51061 (NM_015914.2,870-888).
gtacgatttggggttatca

SEQ ID NO: 265358 - DNA, 19 bp, Homo sapiens
  siRNA target sequence for LOC51061 (NM_015914.2,874-892).
gatttggggttatcacaaa

SEQ ID NO: 265359 - DNA, 19 bp, Homo sapiens
  siRNA target sequence for LOC51061 (NM_015914.2,924-942).
cactctggaagtgtgtatt

SEQ ID NO: 265360 - DNA, 19 bp, Homo sapiens
  siRNA target sequence for LOC51061 (NM_015914.2,1010-1028).
ctgtaagtgggccttagaa

SEQ ID NO: 265361 - DNA, 19 bp, Homo sapiens
  siRNA target sequence for LOC51061 (NM_015914.2,1012-1030).
gtaagtgggccttagaaaa

SEQ ID NO: 265362 - DNA, 19 bp, Homo sapiens
  siRNA target sequence for LOC51061 (NM_015914.2,1075-1093).
gtctcctgctgaataacga

SEQ ID NO: 265363 - DNA, 19 bp, Homo sapiens
  siRNA target sequence for LOC51061 (NM_015914.2,1105-1123).
gaccagcgctgtttctgtt

SEQ ID NO: 265364 - DNA, 19 bp, Homo sapiens
  siRNA target sequence for LOC51061 (NM_015914.2,1144-1162).
ccgaaagtcatcctttaat

SEQ ID NO: 265365 - DNA, 19 bp, Homo sapiens
  siRNA target sequence for LOC51061 (NM_015914.2,1145-1163).
cgaaagtcatcctttaata

SEQ ID NO: 265366 - DNA, 19 bp, Homo sapiens
  siRNA target sequence for LOC51061 (NM_015914.2,1179-1197).
gtggccttggagtacaaca

SEQ ID NO: 265367 - DNA, 19 bp, Homo sapiens
  siRNA target sequence for LOC51061 (NM_015914.2,1471-1489).
cagctctggattctttcta

SEQ ID NO: 265368 - DNA, 19 bp, Homo sapiens
  siRNA target sequence for LOC51061 (NM_015914.2,1496-1514).
ggagcagaccttttatcat

SEQ ID NO: 265369 - DNA, 19 bp, Homo sapiens
  siRNA target sequence for LOC51061 (NM_015914.2,1533-1551).
gaatgcagcaattttttaa

SEQ ID NO: 265370 - DNA, 19 bp, Homo sapiens
  siRNA target sequence for LOC51061 (NM_015914.2,1640-1658).
ctttgaagcccctactgtt

SEQ ID NO: 265371 - DNA, 19 bp, Homo sapiens
  siRNA target sequence for LOC51061 (NM_015914.2,1740-1758).
ccagaagtggacatgacta

SEQ ID NO: 265372 - DNA, 19 bp, Homo sapiens
  siRNA target sequence for LOC51061 (NM_015914.2,1808-1826).
ctaccttttggattcaaat

SEQ ID NO: 265373 - DNA, 19 bp, Homo sapiens
  siRNA target sequence for LOC51061 (NM_015914.2,1864-1882).
gctccactcaggtgaaaga

SEQ ID NO: 265374 - DNA, 19 bp, Homo sapiens
  siRNA target sequence for LOC51061 (NM_015914.2,1867-1885).
ccactcaggtgaaagaatt

SEQ ID NO: 265375 - DNA, 19 bp, Homo sapiens
  siRNA target sequence for LOC51061 (NM_015914.2,1868-1886).
cactcaggtgaaagaattt

SEQ ID NO: 265376 - DNA, 19 bp, Homo sapiens
  siRNA target sequence for LOC51061 (NM_015914.2,1891-1909).
caattgttgacgtgaaaga

SEQ ID NO: 265377 - DNA, 19 bp, Homo sapiens
  siRNA target sequence for LOC51061 (NM_015914.2,1979-1997).
cttcagcgttctctatagt

SEQ ID NO: 265378 - DNA, 19 bp, Homo sapiens
  siRNA target sequence for LOC51061 (NM_015914.2,1999-2017).
ccttgaaaaggcatctcat

SEQ ID NO: 265379 - DNA, 19 bp, Homo sapiens
  siRNA target sequence for LOC51061 (NM_015914.2,2000-2018).
cttgaaaaggcatctcatt

SEQ ID NO: 265380 - DNA, 19 bp, Homo sapiens
  siRNA target sequence for LOC51061 (NM_015914.2,2036-2054).
gttcccgtctcagcattta

SEQ ID NO: 265381 - DNA, 19 bp, Homo sapiens
  siRNA target sequence for LOC51061 (NM_015914.2,2064-2082).
gtgacaactgatacctttt

SEQ ID NO: 265382 - DNA, 19 bp, Homo sapiens
  siRNA target sequence for LOC51061 (NM_015914.2,2083-2101).
gggaagtagtccttcaaaa

SEQ ID NO: 265383 - DNA, 19 bp, Homo sapiens
  siRNA target sequence for LOC51061 (NM_015914.2,2146-2164).
gtccatccctcaatcacat

SEQ ID NO: 265384 - DNA, 19 bp, Homo sapiens
  siRNA target sequence for LOC51061 (NM_015914.2,2216-2234).
gattgacgtgtctcagaat

SEQ ID NO: 265385 - DNA, 19 bp, Homo sapiens
  siRNA target sequence for LOC51061 (NM_015914.2,2393-2411).
ccagaatgtggctaactct

SEQ ID NO: 265386 - DNA, 19 bp, Homo sapiens
  siRNA target sequence for LOC51061 (NM_015914.2,2700-2718).
ctggccgatgcctcagaaa

SEQ ID NO: 265387 - DNA, 19 bp, Homo sapiens
  siRNA target sequence for LOC51066 (NM_015931.1,522-540).
ccgtctggagacctttagt

SEQ ID NO: 265388 - DNA, 19 bp, Homo sapiens
  siRNA target sequence for LOC51066 (NM_015931.1,524-542).
gtctggagacctttagtga

SEQ ID NO: 265389 - DNA, 19 bp, Homo sapiens
  siRNA target sequence for LOC51066 (NM_015931.1,549-567).
gataagcgagtggacattt

SEQ ID NO: 265390 - DNA, 19 bp, Homo sapiens
  siRNA target sequence for LOC51066 (NM_015931.1,561-579).
gacatttcaaccctttact

SEQ ID NO: 265391 - DNA, 19 bp, Homo sapiens
  siRNA target sequence for LOC51066 (NM_015931.1,563-581).
catttcaaccctttactaa

SEQ ID NO: 265392 - DNA, 19 bp, Homo sapiens
  siRNA target sequence for LOC51066 (NM_015931.1,724-742).
gggcgtgggcggtacaagt

SEQ ID NO: 265393 - DNA, 19 bp, Homo sapiens
  siRNA target sequence for LOC51066 (NM_015931.1,937-955).
gtcatcatgtggaagaaca

SEQ ID NO: 265394 - DNA, 19 bp, Homo sapiens
  siRNA target sequence for LOC51066 (NM_015931.1,1022-1040).
gagaaaacctctttaagga

SEQ ID NO: 265395 - DNA, 19 bp, Homo sapiens
  siRNA target sequence for LOC51066 (NM_015931.1,1190-1208).
cagaagttcactattggta

SEQ ID NO: 265396 - DNA, 19 bp, Homo sapiens
  siRNA target sequence for LOC51066 (NM_015931.1,1214-1232).
gaaagacttatgtctacta

SEQ ID NO: 265397 - DNA, 19 bp, Homo sapiens
  siRNA target sequence for LOC51066 (NM_015931.1,1220-1238).
cttatgtctactacatcta

SEQ ID NO: 265398 - DNA, 19 bp, Homo sapiens
  siRNA target sequence for LOC51257 (NM_016496.3,709-727).
cgctgggtgccgtgcataa

SEQ ID NO: 265399 - DNA, 19 bp, Homo sapiens
  siRNA target sequence for LOC51257 (NM_016496.3,711-729).
ctgggtgccgtgcataaga

SEQ ID NO: 265400 - DNA, 19 bp, Homo sapiens
  siRNA target sequence for LOC51257 (NM_016496.3,871-889).
gctgcgacatggtgtgttt

SEQ ID NO: 265401 - DNA, 19 bp, Homo sapiens
  siRNA target sequence for LOC90637 (NM_182491.1,263-281).
gggaagcattgttcagaaa

SEQ ID NO: 265402 - DNA, 19 bp, Homo sapiens
  siRNA target sequence for LOC90637 (NM_182491.1,318-336).
gtgatgcatgtaaacaaga

SEQ ID NO: 265403 - DNA, 19 bp, Homo sapiens
  siRNA target sequence for LOC90637 (NM_182491.1,320-338).
gatgcatgtaaacaagatt

SEQ ID NO: 265404 - DNA, 19 bp, Homo sapiens
  siRNA target sequence for LOC90637 (NM_182491.1,368-386).
cataagtgtccgtttgcat

SEQ ID NO: 265405 - DNA, 19 bp, Homo sapiens
  siRNA target sequence for LOC90637 (NM_182491.1,408-426).
cagtatgcccactctgtaa

SEQ ID NO: 265406 - DNA, 19 bp, Homo sapiens
  siRNA target sequence for LOC90637 (NM_182491.1,410-428).
gtatgcccactctgtaata

SEQ ID NO: 265407 - DNA, 19 bp, Homo sapiens
  siRNA target sequence for LOC90637 (NM_182491.1,534-552).
cataccgttgctcaaaaga

SEQ ID NO: 265408 - DNA, 19 bp, Homo sapiens
  siRNA target sequence for LOC90637 (NM_182491.1,593-611).
caatgtcacggcaacttct

SEQ ID NO: 265409 - DNA, 19 bp, Homo sapiens
  siRNA target sequence for LOC90637 (NM_182491.1,655-673).
gagtcgccccaccatcaaa

SEQ ID NO: 265410 - DNA, 19 bp, Homo sapiens
  siRNA target sequence for MB (NM_005368.1,155-173).
gtcctcatcaggctcttta

SEQ ID NO: 265411 - DNA, 19 bp, Homo sapiens
  siRNA target sequence for MB (NM_005368.1,284-302).
gccctgggtggcatcctta

SEQ ID NO: 265412 - DNA, 19 bp, Homo sapiens
  siRNA target sequence for MB (NM_005368.1,285-303).
ccctgggtggcatccttaa

SEQ ID NO: 265413 - DNA, 19 bp, Homo sapiens
  siRNA target sequence for MB (NM_005368.1,290-308).
ggtggcatccttaagaaga

SEQ ID NO: 265414 - DNA, 19 bp, Homo sapiens
  siRNA target sequence for MB (NM_005368.1,314-332).
catcatgaggcagagatta

SEQ ID NO: 265415 - DNA, 19 bp, Homo sapiens
  siRNA target sequence for MGC10986 (NM_030576.2,304-322).
gtggccgacaagctcattt

SEQ ID NO: 265416 - DNA, 19 bp, Homo sapiens
  siRNA target sequence for MGC10986 (NM_030576.2,308-326).
ccgacaagctcattttcca

SEQ ID NO: 265417 - DNA, 19 bp, Homo sapiens
  siRNA target sequence for MGC14353 (NM_032731.2,162-180).
cctactttacgggttctaa

SEQ ID NO: 265418 - DNA, 19 bp, Homo sapiens
  siRNA target sequence for MGC14353 (NM_032731.2,241-259).
ggggctgaagcacattagt

SEQ ID NO: 265419 - DNA, 19 bp, Homo sapiens
  siRNA target sequence for MGC14353 (NM_032731.2,243-261).
ggctgaagcacattagtga

SEQ ID NO: 265420 - DNA, 19 bp, Homo sapiens
  siRNA target sequence for MGC14353 (NM_032731.2,244-262).
gctgaagcacattagtgaa

SEQ ID NO: 265421 - DNA, 19 bp, Homo sapiens
  siRNA target sequence for MGC14353 (NM_032731.2,263-281).
ggatgtgtgttcatctact

SEQ ID NO: 265422 - DNA, 19 bp, Homo sapiens
  siRNA target sequence for MGC14353 (NM_032731.2,350-368).
gcagtgcctacactactta

SEQ ID NO: 265423 - DNA, 19 bp, Homo sapiens
  siRNA target sequence for MGC14353 (NM_032731.2,351-369).
cagtgcctacactacttaa

SEQ ID NO: 265424 - DNA, 19 bp, Homo sapiens
  siRNA target sequence for MGC14353 (NM_032731.2,353-371).
gtgcctacactacttaagt

SEQ ID NO: 265425 - DNA, 19 bp, Homo sapiens
  siRNA target sequence for MGC14353 (NM_032731.2,355-373).
gcctacactacttaagtat

SEQ ID NO: 265426 - DNA, 19 bp, Homo sapiens
  siRNA target sequence for MGC15482 (NM_032875.1,279-297).
gatgaagctgtaatcaata

SEQ ID NO: 265427 - DNA, 19 bp, Homo sapiens
  siRNA target sequence for MGC15482 (NM_032875.1,318-336).
ctgttacggatattttctt

SEQ ID NO: 265428 - DNA, 19 bp, Homo sapiens
  siRNA target sequence for MGC15482 (NM_032875.1,409-427).
gtaactggcagcgaattga

SEQ ID NO: 265429 - DNA, 19 bp, Homo sapiens
  siRNA target sequence for MGC15482 (NM_032875.1,415-433).
ggcagcgaattgacctatt

SEQ ID NO: 265430 - DNA, 19 bp, Homo sapiens
  siRNA target sequence for MGC15482 (NM_032875.1,416-434).
gcagcgaattgacctattt

SEQ ID NO: 265431 - DNA, 19 bp, Homo sapiens
  siRNA target sequence for MGC15482 (NM_032875.1,419-437).
gcgaattgacctatttgat

SEQ ID NO: 265432 - DNA, 19 bp, Homo sapiens
  siRNA target sequence for MGC15482 (NM_032875.1,420-438).
cgaattgacctatttgatt

SEQ ID NO: 265433 - DNA, 19 bp, Homo sapiens
  siRNA target sequence for MGC15482 (NM_032875.1,421-439).
gaattgacctatttgattt

SEQ ID NO: 265434 - DNA, 19 bp, Homo sapiens
  siRNA target sequence for MGC15482 (NM_032875.1,457-475).
gccgagtagtggagaatat

SEQ ID NO: 265435 - DNA, 19 bp, Homo sapiens
  siRNA target sequence for MGC15482 (NM_032875.1,458-476).
ccgagtagtggagaatatt

SEQ ID NO: 265436 - DNA, 19 bp, Homo sapiens
  siRNA target sequence for MGC15482 (NM_032875.1,459-477).
cgagtagtggagaatattt

SEQ ID NO: 265437 - DNA, 19 bp, Homo sapiens
  siRNA target sequence for MGC15482 (NM_032875.1,490-508).
ggggctttttacgaaagtt

SEQ ID NO: 265438 - DNA, 19 bp, Homo sapiens
  siRNA target sequence for MGC15482 (NM_032875.1,491-509).
gggctttttacgaaagtta

SEQ ID NO: 265439 - DNA, 19 bp, Homo sapiens
  siRNA target sequence for MGC15482 (NM_032875.1,529-547).
gagtgggagacaatgcatt

SEQ ID NO: 265440 - DNA, 19 bp, Homo sapiens
  siRNA target sequence for MGC15482 (NM_032875.1,539-557).
caatgcattaagaaccttt

SEQ ID NO: 265441 - DNA, 19 bp, Homo sapiens
  siRNA target sequence for MGC15482 (NM_032875.1,568-586).
gcaggaacattgaagtact

SEQ ID NO: 265442 - DNA, 19 bp, Homo sapiens
  siRNA target sequence for MGC15482 (NM_032875.1,575-593).
cattgaagtactgaatcta

SEQ ID NO: 265443 - DNA, 19 bp, Homo sapiens
  siRNA target sequence for MGC15482 (NM_032875.1,591-609).
ctaaatgggtgtacaaaga

SEQ ID NO: 265444 - DNA, 19 bp, Homo sapiens
  siRNA target sequence for MGC15482 (NM_032875.1,622-640).
catgtactagccttagcaa

SEQ ID NO: 265445 - DNA, 19 bp, Homo sapiens
  siRNA target sequence for MGC15482 (NM_032875.1,672-690).
gcttcctgtacatcaataa

SEQ ID NO: 265446 - DNA, 19 bp, Homo sapiens
  siRNA target sequence for MGC15482 (NM_032875.1,735-753).
gagcagttgaacatttcct

SEQ ID NO: 265447 - DNA, 19 bp, Homo sapiens
  siRNA target sequence for MGC15482 (NM_032875.1,754-772).
ggtgtgaccaagtaaccaa

SEQ ID NO: 265448 - DNA, 19 bp, Homo sapiens
  siRNA target sequence for MGC15482 (NM_032875.1,805-823).
ggggtctcaaggccttatt

SEQ ID NO: 265449 - DNA, 19 bp, Homo sapiens
  siRNA target sequence for MGC15482 (NM_032875.1,807-825).
ggtctcaaggccttattct

SEQ ID NO: 265450 - DNA, 19 bp, Homo sapiens
  siRNA target sequence for MGC15482 (NM_032875.1,812-830).
caaggccttattcttaaaa

SEQ ID NO: 265451 - DNA, 19 bp, Homo sapiens
  siRNA target sequence for MGC15482 (NM_032875.1,927-945).
gatgaaggtctcattacta

SEQ ID NO: 265452 - DNA, 19 bp, Homo sapiens
  siRNA target sequence for MGC15482 (NM_032875.1,930-948).
gaaggtctcattactatat

SEQ ID NO: 265453 - DNA, 19 bp, Homo sapiens
  siRNA target sequence for MGC15482 (NM_032875.1,949-967).
gcagagggtgccataagtt

SEQ ID NO: 265454 - DNA, 19 bp, Homo sapiens
  siRNA target sequence for MGC15482 (NM_032875.1,950-968).
cagagggtgccataagtta

SEQ ID NO: 265455 - DNA, 19 bp, Homo sapiens
  siRNA target sequence for MGC15482 (NM_032875.1,952-970).
gagggtgccataagttaca

SEQ ID NO: 265456 - DNA, 19 bp, Homo sapiens
  siRNA target sequence for MGC15482 (NM_032875.1,954-972).
gggtgccataagttacaat

SEQ ID NO: 265457 - DNA, 19 bp, Homo sapiens
  siRNA target sequence for MGC15482 (NM_032875.1,1034-1052).
ctgcccacggcttagaata

SEQ ID NO: 265458 - DNA, 19 bp, Homo sapiens
  siRNA target sequence for MGC15482 (NM_032875.1,1159-1177).
cagatagcacattaatcca

SEQ ID NO: 265459 - DNA, 19 bp, Homo sapiens
  siRNA target sequence for MGC15482 (NM_032875.1,1190-1208).
ctgtcctcgacttcaagta

SEQ ID NO: 265460 - DNA, 19 bp, Homo sapiens
  siRNA target sequence for MGC15482 (NM_032875.1,1192-1210).
gtcctcgacttcaagtatt

SEQ ID NO: 265461 - DNA, 19 bp, Homo sapiens
  siRNA target sequence for MGC15482 (NM_032875.1,1194-1212).
cctcgacttcaagtattga

SEQ ID NO: 265462 - DNA, 19 bp, Homo sapiens
  siRNA target sequence for MGC15482 (NM_032875.1,1341-1359).
cacttgaagagctgtcata

SEQ ID NO: 265463 - DNA, 19 bp, Homo sapiens
  siRNA target sequence for MGC15482 (NM_032875.1,1360-1378).
gccttgagcggatagaact

SEQ ID NO: 265464 - DNA, 19 bp, Homo sapiens
  siRNA target sequence for MGC15482 (NM_032875.1,1368-1386).
cggatagaactctatgact

SEQ ID NO: 265465 - DNA, 19 bp, Homo sapiens
  siRNA target sequence for MGC15482 (NM_032875.1,1415-1433).
gagactcaggacccattta

SEQ ID NO: 265466 - DNA, 19 bp, Homo sapiens
  siRNA target sequence for MGC15482 (NM_032875.1,1423-1441).
ggacccatttacccaatat

SEQ ID NO: 265467 - DNA, 19 bp, Homo sapiens
  siRNA target sequence for MGC15482 (NM_032875.1,1424-1442).
gacccatttacccaatatt

SEQ ID NO: 265468 - DNA, 19 bp, Homo sapiens
  siRNA target sequence for MGC15482 (NM_032875.1,1469-1487).
cactccacccccatcagta

SEQ ID NO: 265469 - DNA, 19 bp, Homo sapiens
  siRNA target sequence for MGC33414 (NM_173574.1,465-483).
gctccaccgatgacaagaa

SEQ ID NO: 265470 - DNA, 19 bp, Homo sapiens
  siRNA target sequence for MGC33414 (NM_173574.1,468-486).
ccaccgatgacaagaaatt

SEQ ID NO: 265471 - DNA, 19 bp, Homo sapiens
  siRNA target sequence for MGC33414 (NM_173574.1,593-611).
ccaccgctgcagaacagaa

SEQ ID NO: 265472 - DNA, 19 bp, Homo sapiens
  siRNA target sequence for MGC33414 (NM_173574.1,1079-1097).
ctgtacgagtgcaacatat

SEQ ID NO: 265473 - DNA, 19 bp, Homo sapiens
  siRNA target sequence for MGC33414 (NM_173574.1,1186-1204).
gaagagcttcactcaactt

SEQ ID NO: 265474 - DNA, 19 bp, Homo sapiens
  siRNA target sequence for MGC33414 (NM_173574.1,1281-1299).
gaaatcactggaaaagctt

SEQ ID NO: 265475 - DNA, 19 bp, Homo sapiens
  siRNA target sequence for MGC33414 (NM_173574.1,1534-1552).
ccagggggcactagatctt

SEQ ID NO: 265476 - DNA, 19 bp, Homo sapiens
  siRNA target sequence for MGC33414 (NM_173574.1,1535-1553).
cagggggcactagatctta

SEQ ID NO: 265477 - DNA, 19 bp, Homo sapiens
  siRNA target sequence for MGC34648 (NM_152660.1,238-256).
cagcaggagagtaaaacca

SEQ ID NO: 265478 - DNA, 19 bp, Homo sapiens
  siRNA target sequence for MGC34648 (NM_152660.1,278-296).
ctcagaacgtgcagttgta

SEQ ID NO: 265479 - DNA, 19 bp, Homo sapiens
  siRNA target sequence for MGC34648 (NM_152660.1,384-402).
gtatggaccaccctattct

SEQ ID NO: 265480 - DNA, 19 bp, Homo sapiens
  siRNA target sequence for MGC34648 (NM_152660.1,418-436).
cagcagtgtgcatttgaca

SEQ ID NO: 265481 - DNA, 19 bp, Homo sapiens
  siRNA target sequence for MGC34648 (NM_152660.1,481-499).
ctgtgcacactttcataca

SEQ ID NO: 265482 - DNA, 19 bp, Homo sapiens
  siRNA target sequence for MGC34648 (NM_152660.1,567-585).
ggagaaggagcagtatagt

SEQ ID NO: 265483 - DNA, 19 bp, Homo sapiens
  siRNA target sequence for MGC34648 (NM_152660.1,678-696).
gtcaatcacaactaatgga

SEQ ID NO: 265484 - DNA, 19 bp, Homo sapiens
  siRNA target sequence for MGC34648 (NM_152660.1,731-749).
caggcactgaccactttgt

SEQ ID NO: 265485 - DNA, 19 bp, Homo sapiens
  siRNA target sequence for MGC34648 (NM_152660.1,733-751).
ggcactgaccactttgtca

SEQ ID NO: 265486 - DNA, 19 bp, Homo sapiens
  siRNA target sequence for MGC34648 (NM_152660.1,734-752).
gcactgaccactttgtcat

SEQ ID NO: 265487 - DNA, 19 bp, Homo sapiens
  siRNA target sequence for MGC34648 (NM_152660.1,997-1015).
gagaagtcaggagctataa

SEQ ID NO: 265488 - DNA, 19 bp, Homo sapiens
  siRNA target sequence for MGC48332 (NM_178450.2,371-389).
gggcagccgcagtatgtca

SEQ ID NO: 265489 - DNA, 19 bp, Homo sapiens
  siRNA target sequence for MGC48332 (NM_178450.2,447-465).
cccagagccccttcaatga

SEQ ID NO: 265490 - DNA, 19 bp, Homo sapiens
  siRNA target sequence for MGC48332 (NM_178450.2,537-555).
ggaccttggggacaattca

SEQ ID NO: 265491 - DNA, 19 bp, Homo sapiens
  siRNA target sequence for MGC48332 (NM_178450.2,538-556).
gaccttggggacaattcat

SEQ ID NO: 265492 - DNA, 19 bp, Homo sapiens
  siRNA target sequence for MGC48332 (NM_178450.2,712-730).
ggtgtgcttcttgtttata

SEQ ID NO: 265493 - DNA, 19 bp, Homo sapiens
  siRNA target sequence for MGC48332 (NM_178450.2,776-794).
gtggaccacctgcacttta

SEQ ID NO: 265494 - DNA, 19 bp, Homo sapiens
  siRNA target sequence for MGC48332 (NM_178450.2,778-796).
ggaccacctgcactttagt

SEQ ID NO: 265495 - DNA, 19 bp, Homo sapiens
  siRNA target sequence for MGC48332 (NM_178450.2,781-799).
ccacctgcactttagtagt

SEQ ID NO: 265496 - DNA, 19 bp, Homo sapiens
  siRNA target sequence for MGC48332 (NM_178450.2,805-823).
ggaagccgtcggactgatt

SEQ ID NO: 265497 - DNA, 19 bp, Homo sapiens
  siRNA target sequence for MGC48332 (NM_178450.2,837-855).
cactcttcactatttacct

SEQ ID NO: 265498 - DNA, 19 bp, Homo sapiens
  siRNA target sequence for MGC48332 (NM_178450.2,864-882).
cactagtgtcatttaggta

SEQ ID NO: 265499 - DNA, 19 bp, Homo sapiens
  siRNA target sequence for MGC48332 (NM_178450.2,948-966).
ctgtcaatgtaccttctaa

SEQ ID NO: 265500 - DNA, 19 bp, Homo sapiens
  siRNA target sequence for N33 (NM_006765.2,389-407).
gttccagacgctcaatctt

SEQ ID NO: 265501 - DNA, 19 bp, Homo sapiens
  siRNA target sequence for N33 (NM_006765.2,398-416).
gctcaatcttccgaatgaa

SEQ ID NO: 265502 - DNA, 19 bp, Homo sapiens
  siRNA target sequence for N33 (NM_006765.2,399-417).
ctcaatcttccgaatgaat

SEQ ID NO: 265503 - DNA, 19 bp, Homo sapiens
  siRNA target sequence for N33 (NM_006765.2,408-426).
ccgaatgaatggtgataaa

SEQ ID NO: 265504 - DNA, 19 bp, Homo sapiens
  siRNA target sequence for N33 (NM_006765.2,409-427).
cgaatgaatggtgataaat

SEQ ID NO: 265505 - DNA, 19 bp, Homo sapiens
  siRNA target sequence for N33 (NM_006765.2,448-466).
ccacctcgaaactattcca

SEQ ID NO: 265506 - DNA, 19 bp, Homo sapiens
  siRNA target sequence for N33 (NM_006765.2,449-467).
cacctcgaaactattccat

SEQ ID NO: 265507 - DNA, 19 bp, Homo sapiens
  siRNA target sequence for N33 (NM_006765.2,518-536).
ggcaagctaatgaagaata

SEQ ID NO: 265508 - DNA, 19 bp, Homo sapiens
  siRNA target sequence for N33 (NM_006765.2,549-567).
gaactcctggcgctattca

SEQ ID NO: 265509 - DNA, 19 bp, Homo sapiens
  siRNA target sequence for N33 (NM_006765.2,552-570).
ctcctggcgctattcatct

SEQ ID NO: 265510 - DNA, 19 bp, Homo sapiens
  siRNA target sequence for N33 (NM_006765.2,558-576).
gcgctattcatctgctttt

SEQ ID NO: 265511 - DNA, 19 bp, Homo sapiens
  siRNA target sequence for N33 (NM_006765.2,559-577).
cgctattcatctgcttttt

SEQ ID NO: 265512 - DNA, 19 bp, Homo sapiens
  siRNA target sequence for N33 (NM_006765.2,688-706).
cctaagagagctgatactt

SEQ ID NO: 265513 - DNA, 19 bp, Homo sapiens
  siRNA target sequence for N33 (NM_006765.2,704-722).
cttttgacctccaaagaat

SEQ ID NO: 265514 - DNA, 19 bp, Homo sapiens
  siRNA target sequence for N33 (NM_006765.2,709-727).
gacctccaaagaattggat

SEQ ID NO: 265515 - DNA, 19 bp, Homo sapiens
  siRNA target sequence for N33 (NM_006765.2,760-778).
gacagaacggatgttcata

SEQ ID NO: 265516 - DNA, 19 bp, Homo sapiens
  siRNA target sequence for N33 (NM_006765.2,772-790).
gttcatattcgggttttca

SEQ ID NO: 265517 - DNA, 19 bp, Homo sapiens
  siRNA target sequence for N33 (NM_006765.2,817-835).
gctttggccctgttagtgt

SEQ ID NO: 265518 - DNA, 19 bp, Homo sapiens
  siRNA target sequence for N33 (NM_006765.2,837-855).
gcttgttggaggtttgctt

SEQ ID NO: 265519 - DNA, 19 bp, Homo sapiens
  siRNA target sequence for N33 (NM_006765.2,870-888).
caacttggagttcatctat

SEQ ID NO: 265520 - DNA, 19 bp, Homo sapiens
  siRNA target sequence for N33 (NM_006765.2,877-895).
gagttcatctataacaaga

SEQ ID NO: 265521 - DNA, 19 bp, Homo sapiens
  siRNA target sequence for N33 (NM_006765.2,916-934).
ctgtgtatagtctttgcta

SEQ ID NO: 265522 - DNA, 19 bp, Homo sapiens
  siRNA target sequence for N33 (NM_006765.2,1001-1019).
gacaagtgagctacattca

SEQ ID NO: 265523 - DNA, 19 bp, Homo sapiens
  siRNA target sequence for N33 (NM_006765.2,1056-1074).
cattattctggtactgaat

SEQ ID NO: 265524 - DNA, 19 bp, Homo sapiens
  siRNA target sequence for N33 (NM_006765.2,1085-1103).
ccatggggatggttcttct

SEQ ID NO: 265525 - DNA, 19 bp, Homo sapiens
  siRNA target sequence for N33 (NM_006765.2,1089-1107).
ggggatggttcttctaaat

SEQ ID NO: 265526 - DNA, 19 bp, Homo sapiens
  siRNA target sequence for N33 (NM_006765.2,1195-1213).
ctactttcaatatttcgtt

SEQ ID NO: 265527 - DNA, 19 bp, Homo sapiens
  siRNA target sequence for N33 (NM_006765.2,1218-1236).
gtaccacggctatccttat

SEQ ID NO: 265528 - DNA, 19 bp, Homo sapiens
  siRNA target sequence for N33 (NM_006765.2,1224-1242).
cggctatccttatagtgat

SEQ ID NO: 265529 - DNA, 19 bp, Homo sapiens
  siRNA target sequence for N33 (NM_178234.1,1224-1242).
cggctatccttatagcttt

SEQ ID NO: 265530 - DNA, 19 bp, Homo sapiens
  siRNA target sequence for N33 (NM_178234.1,1225-1243).
ggctatccttatagctttt

SEQ ID NO: 265531 - DNA, 19 bp, Homo sapiens
  siRNA target sequence for NCF2 (NM_000433.1,171-189).
cccactcccggatttgctt

SEQ ID NO: 265532 - DNA, 19 bp, Homo sapiens
  siRNA target sequence for NCF2 (NM_000433.1,178-196).
ccggatttgcttcaacatt

SEQ ID NO: 265533 - DNA, 19 bp, Homo sapiens
  siRNA target sequence for NCF2 (NM_000433.1,241-259).
ggcctttaccagaagcatt

SEQ ID NO: 265534 - DNA, 19 bp, Homo sapiens
  siRNA target sequence for NCF2 (NM_000433.1,242-260).
gcctttaccagaagcatta

SEQ ID NO: 265535 - DNA, 19 bp, Homo sapiens
  siRNA target sequence for NCF2 (NM_000433.1,375-393).
ggaaccagctgatagacta

SEQ ID NO: 265536 - DNA, 19 bp, Homo sapiens
  siRNA target sequence for NCF2 (NM_000433.1,376-394).
gaaccagctgatagactat

SEQ ID NO: 265537 - DNA, 19 bp, Homo sapiens
  siRNA target sequence for NCF2 (NM_000433.1,524-542).
gagcccagacattccaaaa

SEQ ID NO: 265538 - DNA, 19 bp, Homo sapiens
  siRNA target sequence for NCF2 (NM_000433.1,565-583).
ctggaagcagaagctatat

SEQ ID NO: 265539 - DNA, 19 bp, Homo sapiens
  siRNA target sequence for NCF2 (NM_000433.1,567-585).
ggaagcagaagctatatga

SEQ ID NO: 265540 - DNA, 19 bp, Homo sapiens
  siRNA target sequence for NCF2 (NM_000433.1,607-625).
caagctgtttcgaccaaat

SEQ ID NO: 265541 - DNA, 19 bp, Homo sapiens
  siRNA target sequence for NCF2 (NM_000433.1,611-629).
ctgtttcgaccaaatgaga

SEQ ID NO: 265542 - DNA, 19 bp, Homo sapiens
  siRNA target sequence for NCF2 (NM_000433.1,759-777).
cgaaaaccccagagatctt

SEQ ID NO: 265543 - DNA, 19 bp, Homo sapiens
  siRNA target sequence for NCF2 (NM_000433.1,796-814).
ggctcaccgtgtgctattt

SEQ ID NO: 265544 - DNA, 19 bp, Homo sapiens
  siRNA target sequence for NCF2 (NM_000433.1,816-834).
ggtttgtgcctgagacaaa

SEQ ID NO: 265545 - DNA, 19 bp, Homo sapiens
  siRNA target sequence for NCF2 (NM_000433.1,847-865).
ggtcatgccagggaacatt

SEQ ID NO: 265546 - DNA, 19 bp, Homo sapiens
  siRNA target sequence for NCF2 (NM_000433.1,857-875).
gggaacattgtctttgtct

SEQ ID NO: 265547 - DNA, 19 bp, Homo sapiens
  siRNA target sequence for NCF2 (NM_000433.1,874-892).
cttgaagaagggcaatgat

SEQ ID NO: 265548 - DNA, 19 bp, Homo sapiens
  siRNA target sequence for NCF2 (NM_000433.1,897-915).
gggccacggtcatgttcaa

SEQ ID NO: 265549 - DNA, 19 bp, Homo sapiens
  siRNA target sequence for NCF2 (NM_000433.1,1310-1328).
ggccaggtgaaaaactact

SEQ ID NO: 265550 - DNA, 19 bp, Homo sapiens
  siRNA target sequence for NCF2 (NM_000433.1,1419-1437).
caacagaacctcagcttaa

SEQ ID NO: 265551 - DNA, 19 bp, Homo sapiens
  siRNA target sequence for NCF2 (NM_000433.1,1422-1440).
cagaacctcagcttaagaa

SEQ ID NO: 265552 - DNA, 19 bp, Homo sapiens
  siRNA target sequence for NCF2 (NM_000433.1,1453-1471).
ggaggcactcttcagttat

SEQ ID NO: 265553 - DNA, 19 bp, Homo sapiens
  siRNA target sequence for NCF4 (NM_000631.2,280-298).
gtcatcgaggtgaagacaa

SEQ ID NO: 265554 - DNA, 19 bp, Homo sapiens
  siRNA target sequence for NCF4 (NM_000631.2,305-323).
gatccaagtacctcatcta

SEQ ID NO: 265555 - DNA, 19 bp, Homo sapiens
  siRNA target sequence for NCF4 (NM_000631.2,538-556).
gacgtccggatcttctttt

SEQ ID NO: 265556 - DNA, 19 bp, Homo sapiens
  siRNA target sequence for NCF4 (NM_000631.2,751-769).
ctcctcagtcggatcaaca

SEQ ID NO: 265557 - DNA, 19 bp, Homo sapiens
  siRNA target sequence for NCF4 (NM_000631.2,941-959).
gcagcactcccctattgaa

SEQ ID NO: 265558 - DNA, 19 bp, Homo sapiens
  siRNA target sequence for NCF4 (NM_000631.2,942-960).
cagcactcccctattgaaa

SEQ ID NO: 265559 - DNA, 19 bp, Homo sapiens
  siRNA target sequence for NCF4 (NM_000631.2,944-962).
gcactcccctattgaaaga

SEQ ID NO: 265560 - DNA, 19 bp, Homo sapiens
  siRNA target sequence for NCF4 (NM_000631.2,997-1015).
gaggacatagctctgaatt

SEQ ID NO: 265561 - DNA, 19 bp, Homo sapiens
  siRNA target sequence for NCF4 (NM_013416.1,1035-1053).
gagccacaatgctgtaaca

SEQ ID NO: 265562 - DNA, 19 bp, Homo sapiens
  siRNA target sequence for NSE1 (NM_145080.2,146-164).
ggacttcatcaacaacatt

SEQ ID NO: 265563 - DNA, 19 bp, Homo sapiens
  siRNA target sequence for NSE1 (NM_145080.2,173-191).
cttggagtccttgtatatt

SEQ ID NO: 265564 - DNA, 19 bp, Homo sapiens
  siRNA target sequence for NSE1 (NM_145080.2,179-197).
gtccttgtatattgagata

SEQ ID NO: 265565 - DNA, 19 bp, Homo sapiens
  siRNA target sequence for NSE1 (NM_145080.2,269-287).
caaaatggctacggatttt

SEQ ID NO: 265566 - DNA, 19 bp, Homo sapiens
  siRNA target sequence for NSE1 (NM_145080.2,280-298).
cggattttgcagagaatga

SEQ ID NO: 265567 - DNA, 19 bp, Homo sapiens
  siRNA target sequence for NSE1 (NM_145080.2,291-309).
gagaatgaactggatttgt

SEQ ID NO: 265568 - DNA, 19 bp, Homo sapiens
  siRNA target sequence for NSE1 (NM_145080.2,321-339).
ctggaactgattattgact

SEQ ID NO: 265569 - DNA, 19 bp, Homo sapiens
  siRNA target sequence for NSE1 (NM_145080.2,327-345).
ctgattattgactcagaaa

SEQ ID NO: 265570 - DNA, 19 bp, Homo sapiens
  siRNA target sequence for NSE1 (NM_145080.2,354-372).
gcgtcttccacaaacatat

SEQ ID NO: 265571 - DNA, 19 bp, Homo sapiens
  siRNA target sequence for NSE1 (NM_145080.2,428-446).
ggtgctgcagaagtttgtt

SEQ ID NO: 265572 - DNA, 19 bp, Homo sapiens
  siRNA target sequence for NSE1 (NM_145080.2,543-561).
gcggtgaagatctgcaata

SEQ ID NO: 265573 - DNA, 19 bp, Homo sapiens
  siRNA target sequence for NSE1 (NM_145080.2,544-562).
cggtgaagatctgcaatat

SEQ ID NO: 265574 - DNA, 19 bp, Homo sapiens
  siRNA target sequence for NSE1 (NM_145080.2,730-748).
gggagtctggtgtcttgaa

SEQ ID NO: 265575 - DNA, 19 bp, Homo sapiens
  siRNA target sequence for OSR1 (NM_145260.1,572-590).
cctggttccctcatgtcat

SEQ ID NO: 265576 - DNA, 19 bp, Homo sapiens
  siRNA target sequence for OSR1 (NM_145260.1,675-693).
ggcagcaacgcaagaagat

SEQ ID NO: 265577 - DNA, 19 bp, Homo sapiens
  siRNA target sequence for OSR1 (NM_145260.1,863-881).
cctacaacctacttatcca

SEQ ID NO: 265578 - DNA, 19 bp, Homo sapiens
  siRNA target sequence for OSR1 (NM_145260.1,864-882).
ctacaacctacttatccat

SEQ ID NO: 265579 - DNA, 19 bp, Homo sapiens
  siRNA target sequence for OSR1 (NM_145260.1,955-973).
ctgcgagaccacagatata

SEQ ID NO: 265580 - DNA, 19 bp, Homo sapiens
  siRNA target sequence for OSR1 (NM_145260.1,961-979).
gaccacagatatattcact

SEQ ID NO: 265581 - DNA, 19 bp, Homo sapiens
  siRNA target sequence for OSR1 (NM_145260.1,1069-1087).
gtgaaggagctcaaaacct

SEQ ID NO: 265582 - DNA, 19 bp, Homo sapiens
  siRNA target sequence for OSR1 (NM_145260.1,1080-1098).
caaaacctccaagatcaaa

SEQ ID NO: 265583 - DNA, 19 bp, Homo sapiens
  siRNA target sequence for OSR2 (NM_053001.1,763-781).
cttttaccacccacctatt

SEQ ID NO: 265584 - DNA, 19 bp, Homo sapiens
  siRNA target sequence for OSR2 (NM_053001.1,935-953).
catctcgggcctcagtaaa

SEQ ID NO: 265585 - DNA, 19 bp, Homo sapiens
  siRNA target sequence for OSR2 (NM_053001.1,1027-1045).
gcggcagacactttaccaa

SEQ ID NO: 265586 - DNA, 19 bp, Homo sapiens
  siRNA target sequence for OSR2 (NM_053001.1,1028-1046).
cggcagacactttaccaaa

SEQ ID NO: 265587 - DNA, 19 bp, Homo sapiens
  siRNA target sequence for OSR2 (NM_053001.1,1042-1060).
ccaaatcctacaatttgct

SEQ ID NO: 265588 - DNA, 19 bp, Homo sapiens
  siRNA target sequence for OSR2 (NM_053001.1,1151-1169).
cagatacatccattccaaa

SEQ ID NO: 265589 - DNA, 19 bp, Homo sapiens
  siRNA target sequence for OSR2 (NM_053001.1,1203-1221).
ggattttgtcagtctagaa

SEQ ID NO: 265590 - DNA, 19 bp, Homo sapiens
  siRNA target sequence for PDC (NM_002597.3,113-131).
gaaggacaggccacacata

SEQ ID NO: 265591 - DNA, 19 bp, Homo sapiens
  siRNA target sequence for PDC (NM_002597.3,217-235).
gattctcaggcaaatgtct

SEQ ID NO: 265592 - DNA, 19 bp, Homo sapiens
  siRNA target sequence for PDC (NM_002597.3,244-262).
gagtaggaatggcaaagat

SEQ ID NO: 265593 - DNA, 19 bp, Homo sapiens
  siRNA target sequence for PDC (NM_002597.3,269-287).
gaacgagtcagcagaaaga

SEQ ID NO: 265594 - DNA, 19 bp, Homo sapiens
  siRNA target sequence for PDC (NM_002597.3,332-350).
gaaaactgccttcgtaaat

SEQ ID NO: 265595 - DNA, 19 bp, Homo sapiens
  siRNA target sequence for PDC (NM_002597.3,357-375).
gacagtgtatgcaggatat

SEQ ID NO: 265596 - DNA, 19 bp, Homo sapiens
  siRNA target sequence for PDC (NM_002597.3,388-406).
gagttttgggcctagatat

SEQ ID NO: 265597 - DNA, 19 bp, Homo sapiens
  siRNA target sequence for PDC (NM_002597.3,399-417).
ctagatatgggtttgtgta

SEQ ID NO: 265598 - DNA, 19 bp, Homo sapiens
  siRNA target sequence for PDC (NM_002597.3,421-439).
gctggaaactggaaagcaa

SEQ ID NO: 265599 - DNA, 19 bp, Homo sapiens
  siRNA target sequence for PDC (NM_002597.3,422-440).
ctggaaactggaaagcaat

SEQ ID NO: 265600 - DNA, 19 bp, Homo sapiens
  siRNA target sequence for PDC (NM_002597.3,466-484).
gaagatcaccacaattgtt

SEQ ID NO: 265601 - DNA, 19 bp, Homo sapiens
  siRNA target sequence for PDC (NM_002597.3,469-487).
gatcaccacaattgttgtt

SEQ ID NO: 265602 - DNA, 19 bp, Homo sapiens
  siRNA target sequence for PDC (NM_002597.3,518-536).
gatgctctaaacagtagtt

SEQ ID NO: 265603 - DNA, 19 bp, Homo sapiens
  siRNA target sequence for PDC (NM_002597.3,524-542).
ctaaacagtagtttaacat

SEQ ID NO: 265604 - DNA, 19 bp, Homo sapiens
  siRNA target sequence for PDC (NM_002597.3,540-558).
catgccttgcagcagaata

SEQ ID NO: 265605 - DNA, 19 bp, Homo sapiens
  siRNA target sequence for PDC (NM_002597.3,551-569).
gcagaataccctatagtta

SEQ ID NO: 265606 - DNA, 19 bp, Homo sapiens
  siRNA target sequence for PDC (NM_002597.3,552-570).
cagaataccctatagttaa

SEQ ID NO: 265607 - DNA, 19 bp, Homo sapiens
  siRNA target sequence for PDC (NM_002597.3,554-572).
gaataccctatagttaagt

SEQ ID NO: 265608 - DNA, 19 bp, Homo sapiens
  siRNA target sequence for PDC (NM_002597.3,559-577).
ccctatagttaagttttgt

SEQ ID NO: 265609 - DNA, 19 bp, Homo sapiens
  siRNA target sequence for PDC (NM_002597.3,560-578).
cctatagttaagttttgta

SEQ ID NO: 265610 - DNA, 19 bp, Homo sapiens
  siRNA target sequence for PDC (NM_002597.3,610-628).
ccgcttttccttagatgta

SEQ ID NO: 265611 - DNA, 19 bp, Homo sapiens
  siRNA target sequence for PDC (NM_002597.3,612-630).
gcttttccttagatgtact

SEQ ID NO: 265612 - DNA, 19 bp, Homo sapiens
  siRNA target sequence for PDC (NM_002597.3,632-650).
cctacactgctcatctata

SEQ ID NO: 265613 - DNA, 19 bp, Homo sapiens
  siRNA target sequence for PDC (NM_002597.3,659-677).
gaactcataagcaatttta

SEQ ID NO: 265614 - DNA, 19 bp, Homo sapiens
  siRNA target sequence for PDC (NM_002597.3,664-682).
cataagcaattttattagt

SEQ ID NO: 265615 - DNA, 19 bp, Homo sapiens
  siRNA target sequence for PDC (NM_002597.3,714-732).
ctggggatgtggagtcttt

SEQ ID NO: 265616 - DNA, 19 bp, Homo sapiens
  siRNA target sequence for PDC (NM_002597.3,718-736).
ggatgtggagtctttccta

SEQ ID NO: 265617 - DNA, 19 bp, Homo sapiens
  siRNA target sequence for PGBD3 (NM_170753.1,258-276).
gcctcgaacactaagttta

SEQ ID NO: 265618 - DNA, 19 bp, Homo sapiens
  siRNA target sequence for PGBD3 (NM_170753.1,260-278).
ctcgaacactaagtttaca

SEQ ID NO: 265619 - DNA, 19 bp, Homo sapiens
  siRNA target sequence for PGBD3 (NM_170753.1,263-281).
gaacactaagtttacatga

SEQ ID NO: 265620 - DNA, 19 bp, Homo sapiens
  siRNA target sequence for PGBD3 (NM_170753.1,316-334).
gaagcaagtgctatagtga

SEQ ID NO: 265621 - DNA, 19 bp, Homo sapiens
  siRNA target sequence for PGBD3 (NM_170753.1,395-413).
gtggaacaataaataatct

SEQ ID NO: 265622 - DNA, 19 bp, Homo sapiens
  siRNA target sequence for PGBD3 (NM_170753.1,429-447).
gcacacagctgcgtatctt

SEQ ID NO: 265623 - DNA, 19 bp, Homo sapiens
  siRNA target sequence for PGBD3 (NM_170753.1,432-450).
cacagctgcgtatcttatt

SEQ ID NO: 265624 - DNA, 19 bp, Homo sapiens
  siRNA target sequence for PGBD3 (NM_170753.1,437-455).
ctgcgtatcttattcaaga

SEQ ID NO: 265625 - DNA, 19 bp, Homo sapiens
  siRNA target sequence for PGBD3 (NM_170753.1,488-506).
cctcatacgcacctaaaga

SEQ ID NO: 265626 - DNA, 19 bp, Homo sapiens
  siRNA target sequence for PGBD3 (NM_170753.1,624-642).
cgtagcaggtagagttaca

SEQ ID NO: 265627 - DNA, 19 bp, Homo sapiens
  siRNA target sequence for PGBD3 (NM_170753.1,641-659).
cagcaccaccaaacgattt

SEQ ID NO: 265628 - DNA, 19 bp, Homo sapiens
  siRNA target sequence for PGBD3 (NM_170753.1,643-661).
gcaccaccaaacgatttct

SEQ ID NO: 265629 - DNA, 19 bp, Homo sapiens
  siRNA target sequence for PGBD3 (NM_170753.1,655-673).
gatttcttcaccgtaatga

SEQ ID NO: 265630 - DNA, 19 bp, Homo sapiens
  siRNA target sequence for PGBD3 (NM_170753.1,677-695).
ctcccacagaaattcttga

SEQ ID NO: 265631 - DNA, 19 bp, Homo sapiens
  siRNA target sequence for PGBD3 (NM_170753.1,680-698).
ccacagaaattcttgaact

SEQ ID NO: 265632 - DNA, 19 bp, Homo sapiens
  siRNA target sequence for PGBD3 (NM_170753.1,711-729).
cgaggtcattgaactcatt

SEQ ID NO: 265633 - DNA, 19 bp, Homo sapiens
  siRNA target sequence for PGBD3 (NM_170753.1,715-733).
gtcattgaactcattgtca

SEQ ID NO: 265634 - DNA, 19 bp, Homo sapiens
  siRNA target sequence for PGBD3 (NM_170753.1,730-748).
gtcaagtactccaacttat

SEQ ID NO: 265635 - DNA, 19 bp, Homo sapiens
  siRNA target sequence for PGBD3 (NM_170753.1,732-750).
caagtactccaacttatat

SEQ ID NO: 265636 - DNA, 19 bp, Homo sapiens
  siRNA target sequence for PGBD3 (NM_170753.1,735-753).
gtactccaacttatatgct

SEQ ID NO: 265637 - DNA, 19 bp, Homo sapiens
  siRNA target sequence for PGBD3 (NM_170753.1,744-762).
cttatatgcttgcagtaaa

SEQ ID NO: 265638 - DNA, 19 bp, Homo sapiens
  siRNA target sequence for PGBD3 (NM_170753.1,766-784).
gtacatcttggcttgacta

SEQ ID NO: 265639 - DNA, 19 bp, Homo sapiens
  siRNA target sequence for PGBD3 (NM_170753.1,776-794).
gcttgactagctctgaatt

SEQ ID NO: 265640 - DNA, 19 bp, Homo sapiens
  siRNA target sequence for PGBD3 (NM_170753.1,780-798).
gactagctctgaattcaaa

SEQ ID NO: 265641 - DNA, 19 bp, Homo sapiens
  siRNA target sequence for PGBD3 (NM_170753.1,841-859).
cctagaaggcgtatgtttt

SEQ ID NO: 265642 - DNA, 19 bp, Homo sapiens
  siRNA target sequence for PGBD3 (NM_170753.1,869-887).
gaacagatgtgcataatgt

SEQ ID NO: 265643 - DNA, 19 bp, Homo sapiens
  siRNA target sequence for PGBD3 (NM_170753.1,872-890).
cagatgtgcataatgtact

SEQ ID NO: 265644 - DNA, 19 bp, Homo sapiens
  siRNA target sequence for PGBD3 (NM_170753.1,906-924).
gagacgtgaccggtttgaa

SEQ ID NO: 265645 - DNA, 19 bp, Homo sapiens
  siRNA target sequence for PGBD3 (NM_170753.1,910-928).
cgtgaccggtttgaaacta

SEQ ID NO: 265646 - DNA, 19 bp, Homo sapiens
  siRNA target sequence for PGBD3 (NM_170753.1,911-929).
gtgaccggtttgaaactat

SEQ ID NO: 265647 - DNA, 19 bp, Homo sapiens
  siRNA target sequence for PGBD3 (NM_170753.1,913-931).
gaccggtttgaaactatat

SEQ ID NO: 265648 - DNA, 19 bp, Homo sapiens
  siRNA target sequence for PGBD3 (NM_170753.1,946-964).
gttgctgacaatgcaaatt

SEQ ID NO: 265649 - DNA, 19 bp, Homo sapiens
  siRNA target sequence for PGBD3 (NM_170753.1,987-1005).
caaattgcgacctctcata

SEQ ID NO: 265650 - DNA, 19 bp, Homo sapiens
  siRNA target sequence for PGBD3 (NM_170753.1,993-1011).
gcgacctctcataagcaaa

SEQ ID NO: 265651 - DNA, 19 bp, Homo sapiens
  siRNA target sequence for PGBD3 (NM_170753.1,1020-1038).
gagatgcatgaaatttgtt

SEQ ID NO: 265652 - DNA, 19 bp, Homo sapiens
  siRNA target sequence for PGBD3 (NM_170753.1,1066-1084).
gaattcatggttccttatt

SEQ ID NO: 265653 - DNA, 19 bp, Homo sapiens
  siRNA target sequence for PGBD3 (NM_170753.1,1090-1108).
cgtcacgggtgcaaacaat

SEQ ID NO: 265654 - DNA, 19 bp, Homo sapiens
  siRNA target sequence for PGBD3 (NM_170753.1,1091-1109).
gtcacgggtgcaaacaatt

SEQ ID NO: 265655 - DNA, 19 bp, Homo sapiens
  siRNA target sequence for PGBD3 (NM_170753.1,1124-1142).
ccattcggtttggctataa

SEQ ID NO: 265656 - DNA, 19 bp, Homo sapiens
  siRNA target sequence for PGBD3 (NM_170753.1,1158-1176).
cacctgtctgggctacatt

SEQ ID NO: 265657 - DNA, 19 bp, Homo sapiens
  siRNA target sequence for PGBD3 (NM_170753.1,1186-1204).
cagccgtatcagggtaaaa

SEQ ID NO: 265658 - DNA, 19 bp, Homo sapiens
  siRNA target sequence for PGBD3 (NM_170753.1,1280-1298).
cacaccctggacaatacca

SEQ ID NO: 265659 - DNA, 19 bp, Homo sapiens
  siRNA target sequence for PGBD3 (NM_170753.1,1284-1302).
ccctggacaataccatttt

SEQ ID NO: 265660 - DNA, 19 bp, Homo sapiens
  siRNA target sequence for PGBD3 (NM_170753.1,1291-1309).
caataccattttgtattca

SEQ ID NO: 265661 - DNA, 19 bp, Homo sapiens
  siRNA target sequence for PGBD3 (NM_170753.1,1320-1338).
caccagtattgcacttctt

SEQ ID NO: 265662 - DNA, 19 bp, Homo sapiens
  siRNA target sequence for PGBD3 (NM_170753.1,1410-1428).
ggaatcagatgtagcttta

SEQ ID NO: 265663 - DNA, 19 bp, Homo sapiens
  siRNA target sequence for PGBD3 (NM_170753.1,1411-1429).
gaatcagatgtagctttaa

SEQ ID NO: 265664 - DNA, 19 bp, Homo sapiens
  siRNA target sequence for PGBD3 (NM_170753.1,1444-1462).
ggcacatttgattatcgaa

SEQ ID NO: 265665 - DNA, 19 bp, Homo sapiens
  siRNA target sequence for PGBD3 (NM_170753.1,1559-1577).
gtcgttactcccagaaact

SEQ ID NO: 265666 - DNA, 19 bp, Homo sapiens
  siRNA target sequence for PGBD3 (NM_170753.1,1561-1579).
cgttactcccagaaactga

SEQ ID NO: 265667 - DNA, 19 bp, Homo sapiens
  siRNA target sequence for PGBD3 (NM_170753.1,1594-1612).
gttcagcagccaaacatga

SEQ ID NO: 265668 - DNA, 19 bp, Homo sapiens
  siRNA target sequence for PGBD3 (NM_170753.1,1603-1621).
ccaaacatgatcaaagtgt

SEQ ID NO: 265669 - DNA, 19 bp, Homo sapiens
  siRNA target sequence for PGBD3 (NM_170753.1,1604-1622).
caaacatgatcaaagtgta

SEQ ID NO: 265670 - DNA, 19 bp, Homo sapiens
  siRNA target sequence for PGBD3 (NM_170753.1,1679-1697).
catcaatccgtggaaagaa

SEQ ID NO: 265671 - DNA, 19 bp, Homo sapiens
  siRNA target sequence for PGBD3 (NM_170753.1,1686-1704).
ccgtggaaagaaatggtat

SEQ ID NO: 265672 - DNA, 19 bp, Homo sapiens
  siRNA target sequence for PGBD3 (NM_170753.1,1700-1718).
ggtattcaagccctctttt

SEQ ID NO: 265673 - DNA, 19 bp, Homo sapiens
  siRNA target sequence for PGBD3 (NM_170753.1,1724-1742).
gtttcgaactggtcttaca

SEQ ID NO: 265674 - DNA, 19 bp, Homo sapiens
  siRNA target sequence for PGBD3 (NM_170753.1,1728-1746).
cgaactggtcttacaaaat

SEQ ID NO: 265675 - DNA, 19 bp, Homo sapiens
  siRNA target sequence for PGBD3 (NM_170753.1,1732-1750).
ctggtcttacaaaatgctt

SEQ ID NO: 265676 - DNA, 19 bp, Homo sapiens
  siRNA target sequence for PGBD3 (NM_170753.1,1868-1886).
gacctcagaagcgtaacat

SEQ ID NO: 265677 - DNA, 19 bp, Homo sapiens
  siRNA target sequence for PGBD3 (NM_170753.1,1871-1889).
ctcagaagcgtaacattga

SEQ ID NO: 265678 - DNA, 19 bp, Homo sapiens
  siRNA target sequence for PGBD3 (NM_170753.1,1873-1891).
cagaagcgtaacattgact

SEQ ID NO: 265679 - DNA, 19 bp, Homo sapiens
  siRNA target sequence for PGBD3 (NM_170753.1,1892-1910).
cacgttatgatggcataaa

SEQ ID NO: 265680 - DNA, 19 bp, Homo sapiens
  siRNA target sequence for PGBD3 (NM_170753.1,1904-1922).
gcataaatcatgtgatagt

SEQ ID NO: 265681 - DNA, 19 bp, Homo sapiens
  siRNA target sequence for PGBD3 (NM_170753.1,1941-1959).
gcgatgcgctgaatgtcat

SEQ ID NO: 265682 - DNA, 19 bp, Homo sapiens
  siRNA target sequence for PGBD3 (NM_170753.1,1942-1960).
cgatgcgctgaatgtcata

SEQ ID NO: 265683 - DNA, 19 bp, Homo sapiens
  siRNA target sequence for PGBD3 (NM_170753.1,1946-1964).
gcgctgaatgtcataagaa

SEQ ID NO: 265684 - DNA, 19 bp, Homo sapiens
  siRNA target sequence for PGBD3 (NM_170753.1,2005-2023).
gtgaagtgttccgttgaat

SEQ ID NO: 265685 - DNA, 19 bp, Homo sapiens
  siRNA target sequence for PHTF2 (NM_020432.2,89-107).
gtcacagatgctatagtct

SEQ ID NO: 265686 - DNA, 19 bp, Homo sapiens
  siRNA target sequence for PHTF2 (NM_020432.2,99-117).
ctatagtctggtatcaaaa

SEQ ID NO: 265687 - DNA, 19 bp, Homo sapiens
  siRNA target sequence for PHTF2 (NM_020432.2,208-226).
cttcattcagtgtttgatt

SEQ ID NO: 265688 - DNA, 19 bp, Homo sapiens
  siRNA target sequence for PHTF2 (NM_020432.2,217-235).
gtgtttgattggagcatat

SEQ ID NO: 265689 - DNA, 19 bp, Homo sapiens
  siRNA target sequence for PHTF2 (NM_020432.2,219-237).
gtttgattggagcatatga

SEQ ID NO: 265690 - DNA, 19 bp, Homo sapiens
  siRNA target sequence for PHTF2 (NM_020432.2,223-241).
gattggagcatatgatcaa

SEQ ID NO: 265691 - DNA, 19 bp, Homo sapiens
  siRNA target sequence for PHTF2 (NM_020432.2,292-310).
ggggctaaggaataaacca

SEQ ID NO: 265692 - DNA, 19 bp, Homo sapiens
  siRNA target sequence for PHTF2 (NM_020432.2,294-312).
ggctaaggaataaaccaaa

SEQ ID NO: 265693 - DNA, 19 bp, Homo sapiens
  siRNA target sequence for PHTF2 (NM_020432.2,337-355).
cctcatagatgttgatctt

SEQ ID NO: 265694 - DNA, 19 bp, Homo sapiens
  siRNA target sequence for PHTF2 (NM_020432.2,409-427).
gaccagaaagggaattgtt

SEQ ID NO: 265695 - DNA, 19 bp, Homo sapiens
  siRNA target sequence for PHTF2 (NM_020432.2,455-473).
cggtggtggttacaagtaa

SEQ ID NO: 265696 - DNA, 19 bp, Homo sapiens
  siRNA target sequence for PHTF2 (NM_020432.2,462-480).
ggttacaagtaacatcaaa

SEQ ID NO: 265697 - DNA, 19 bp, Homo sapiens
  siRNA target sequence for PHTF2 (NM_020432.2,524-542).
gctgcaatagtattattct

SEQ ID NO: 265698 - DNA, 19 bp, Homo sapiens
  siRNA target sequence for PHTF2 (NM_020432.2,618-636).
ctgtgcattgccagattgt

SEQ ID NO: 265699 - DNA, 19 bp, Homo sapiens
  siRNA target sequence for PHTF2 (NM_020432.2,620-638).
gtgcattgccagattgttt

SEQ ID NO: 265700 - DNA, 19 bp, Homo sapiens
  siRNA target sequence for PHTF2 (NM_020432.2,662-680).
ctaagtacagggggtaaaa

SEQ ID NO: 265701 - DNA, 19 bp, Homo sapiens
  siRNA target sequence for PHTF2 (NM_020432.2,704-722).
gcccatttggaagtacata

SEQ ID NO: 265702 - DNA, 19 bp, Homo sapiens
  siRNA target sequence for PHTF2 (NM_020432.2,863-881).
gcaaagaattcaattgata

SEQ ID NO: 265703 - DNA, 19 bp, Homo sapiens
  siRNA target sequence for PHTF2 (NM_020432.2,917-935).
gatgggaagaagactgtta

SEQ ID NO: 265704 - DNA, 19 bp, Homo sapiens
  siRNA target sequence for PHTF2 (NM_020432.2,965-983).
gaacctcagtgtgaaacta

SEQ ID NO: 265705 - DNA, 19 bp, Homo sapiens
  siRNA target sequence for PHTF2 (NM_020432.2,1021-1039).
gaggaatggtcctagcaaa

SEQ ID NO: 265706 - DNA, 19 bp, Homo sapiens
  siRNA target sequence for PHTF2 (NM_020432.2,1024-1042).
gaatggtcctagcaaagat

SEQ ID NO: 265707 - DNA, 19 bp, Homo sapiens
  siRNA target sequence for PHTF2 (NM_020432.2,1142-1160).
ggtgttcttcggaatagaa

SEQ ID NO: 265708 - DNA, 19 bp, Homo sapiens
  siRNA target sequence for PHTF2 (NM_020432.2,1143-1161).
gtgttcttcggaatagaaa

SEQ ID NO: 265709 - DNA, 19 bp, Homo sapiens
  siRNA target sequence for PHTF2 (NM_020432.2,1162-1180).
gtcacaccattataagaaa

SEQ ID NO: 265710 - DNA, 19 bp, Homo sapiens
  siRNA target sequence for PHTF2 (NM_020432.2,1201-1219).
ccctaaatcgggtactagt

SEQ ID NO: 265711 - DNA, 19 bp, Homo sapiens
  siRNA target sequence for PHTF2 (NM_020432.2,1222-1240).
cagctctcgctgttcaagt

SEQ ID NO: 265712 - DNA, 19 bp, Homo sapiens
  siRNA target sequence for PHTF2 (NM_020432.2,1291-1309).
gttatgggaagacttgtta

SEQ ID NO: 265713 - DNA, 19 bp, Homo sapiens
  siRNA target sequence for PHTF2 (NM_020432.2,1437-1455).
gttcccacccaggattaga

SEQ ID NO: 265714 - DNA, 19 bp, Homo sapiens
  siRNA target sequence for PHTF2 (NM_020432.2,1467-1485).
ctatagtatgggaaggtaa

SEQ ID NO: 265715 - DNA, 19 bp, Homo sapiens
  siRNA target sequence for PHTF2 (NM_020432.2,1507-1525).
gtctgtacttgaaatcagt

SEQ ID NO: 265716 - DNA, 19 bp, Homo sapiens
  siRNA target sequence for PHTF2 (NM_020432.2,1540-1558).
cagagtgaacagccatata

SEQ ID NO: 265717 - DNA, 19 bp, Homo sapiens
  siRNA target sequence for PHTF2 (NM_020432.2,1679-1697).
gaactttatgtgattgcat

SEQ ID NO: 265718 - DNA, 19 bp, Homo sapiens
  siRNA target sequence for PHTF2 (NM_020432.2,1701-1719).
gttctaatgaagatgtcat

SEQ ID NO: 265719 - DNA, 19 bp, Homo sapiens
  siRNA target sequence for PHTF2 (NM_020432.2,1712-1730).
gatgtcatagttctttcta

SEQ ID NO: 265720 - DNA, 19 bp, Homo sapiens
  siRNA target sequence for PHTF2 (NM_020432.2,1717-1735).
catagttctttctatggtt

SEQ ID NO: 265721 - DNA, 19 bp, Homo sapiens
  siRNA target sequence for PHTF2 (NM_020432.2,1728-1746).
ctatggttataataagttt

SEQ ID NO: 265722 - DNA, 19 bp, Homo sapiens
  siRNA target sequence for PHTF2 (NM_020432.2,1814-1832).
cagcgattactttttgcaa

SEQ ID NO: 265723 - DNA, 19 bp, Homo sapiens
  siRNA target sequence for PHTF2 (NM_020432.2,1856-1874).
gcaaggagggctcgaaaat

SEQ ID NO: 265724 - DNA, 19 bp, Homo sapiens
  siRNA target sequence for PHTF2 (NM_020432.2,1860-1878).
ggagggctcgaaaatctga

SEQ ID NO: 265725 - DNA, 19 bp, Homo sapiens
  siRNA target sequence for PHTF2 (NM_020432.2,1924-1942).
gctatctctccgttcctat

SEQ ID NO: 265726 - DNA, 19 bp, Homo sapiens
  siRNA target sequence for PHTF2 (NM_020432.2,1929-1947).
ctctccgttcctatcttaa

SEQ ID NO: 265727 - DNA, 19 bp, Homo sapiens
  siRNA target sequence for PHTF2 (NM_020432.2,1961-1979).
cagcgatcagttgatgtaa

SEQ ID NO: 265728 - DNA, 19 bp, Homo sapiens
  siRNA target sequence for PHTF2 (NM_020432.2,1963-1981).
gcgatcagttgatgtaata

SEQ ID NO: 265729 - DNA, 19 bp, Homo sapiens
  siRNA target sequence for PHTF2 (NM_020432.2,1991-2009).
gctttcttattgactatct

SEQ ID NO: 265730 - DNA, 19 bp, Homo sapiens
  siRNA target sequence for PHTF2 (NM_020432.2,2025-2043).
gttgtgcccagctacttca

SEQ ID NO: 265731 - DNA, 19 bp, Homo sapiens
  siRNA target sequence for PHTF2 (NM_020432.2,2031-2049).
cccagctacttcatgtaca

SEQ ID NO: 265732 - DNA, 19 bp, Homo sapiens
  siRNA target sequence for PHTF2 (NM_020432.2,2048-2066).
cacgagatcttccttgatt

SEQ ID NO: 265733 - DNA, 19 bp, Homo sapiens
  siRNA target sequence for PHTF2 (NM_020432.2,2050-2068).
cgagatcttccttgattgt

SEQ ID NO: 265734 - DNA, 19 bp, Homo sapiens
  siRNA target sequence for PHTF2 (NM_020432.2,2059-2077).
ccttgattgtcactacaat

SEQ ID NO: 265735 - DNA, 19 bp, Homo sapiens
  siRNA target sequence for PHTF2 (NM_020432.2,2071-2089).
ctacaattgggaattggta

SEQ ID NO: 265736 - DNA, 19 bp, Homo sapiens
  siRNA target sequence for PHTF2 (NM_020432.2,2092-2110).
ctggtgcatctcgttaaca

SEQ ID NO: 265737 - DNA, 19 bp, Homo sapiens
  siRNA target sequence for PHTF2 (NM_020432.2,2094-2112).
ggtgcatctcgttaacact

SEQ ID NO: 265738 - DNA, 19 bp, Homo sapiens
  siRNA target sequence for PHTF2 (NM_020432.2,2095-2113).
gtgcatctcgttaacactt

SEQ ID NO: 265739 - DNA, 19 bp, Homo sapiens
  siRNA target sequence for PHTF2 (NM_020432.2,2098-2116).
catctcgttaacacttttt

SEQ ID NO: 265740 - DNA, 19 bp, Homo sapiens
  siRNA target sequence for PHTF2 (NM_020432.2,2169-2187).
cctcaatattacttactga

SEQ ID NO: 265741 - DNA, 19 bp, Homo sapiens
  siRNA target sequence for PHTF2 (NM_020432.2,2236-2254).
ggaactgacactagtgaat

SEQ ID NO: 265742 - DNA, 19 bp, Homo sapiens
  siRNA target sequence for PHTF2 (NM_020432.2,2242-2260).
gacactagtgaataatgtt

SEQ ID NO: 265743 - DNA, 19 bp, Homo sapiens
  siRNA target sequence for PHTF2 (NM_020432.2,2244-2262).
cactagtgaataatgtttt

SEQ ID NO: 265744 - DNA, 19 bp, Homo sapiens
  siRNA target sequence for PHTF2 (NM_020432.2,2271-2289).
ctactaaactgctaaagga

SEQ ID NO: 265745 - DNA, 19 bp, Homo sapiens
  siRNA target sequence for PHTF2 (NM_020432.2,2290-2308).
gttggacagtccttttaga

SEQ ID NO: 265746 - DNA, 19 bp, Homo sapiens
  siRNA target sequence for PHTF2 (NM_020432.2,2307-2325).
gattatatgggcttacaat

SEQ ID NO: 265747 - DNA, 19 bp, Homo sapiens
  siRNA target sequence for PHTF2 (NM_020432.2,2322-2340).
caatgaatccgctgcttta

SEQ ID NO: 265748 - DNA, 19 bp, Homo sapiens
  siRNA target sequence for PHTF2 (NM_020432.2,2330-2348).
ccgctgctttataacatca

SEQ ID NO: 265749 - DNA, 19 bp, Homo sapiens
  siRNA target sequence for PHTF2 (NM_020432.2,2413-2431).
gctatggaagattaagtca

SEQ ID NO: 265750 - DNA, 19 bp, Homo sapiens
  siRNA target sequence for PRDX5 (NM_012094.3,488-506).
ggcctgtctgagtgttaat

SEQ ID NO: 265751 - DNA, 19 bp, Homo sapiens
  siRNA target sequence for PRDX5 (NM_012094.3,490-508).
cctgtctgagtgttaatga

SEQ ID NO: 265752 - DNA, 19 bp, Homo sapiens
  siRNA target sequence for PRDX5 (NM_012094.3,491-509).
ctgtctgagtgttaatgat

SEQ ID NO: 265753 - DNA, 19 bp, Homo sapiens
  siRNA target sequence for PRDX5 (NM_012094.3,501-519).
gttaatgatgcctttgtga

SEQ ID NO: 265754 - DNA, 19 bp, Homo sapiens
  siRNA target sequence for QSCN6 (NM_002826.2,430-448).
ccgactgtgaggttcttca

SEQ ID NO: 265755 - DNA, 19 bp, Homo sapiens
  siRNA target sequence for QSCN6 (NM_002826.2,465-483).
cggctcgggagcagtattt

SEQ ID NO: 265756 - DNA, 19 bp, Homo sapiens
  siRNA target sequence for QSCN6 (NM_002826.2,607-625).
ggattctttgcgagaaata

SEQ ID NO: 265757 - DNA, 19 bp, Homo sapiens
  siRNA target sequence for QSCN6 (NM_002826.2,608-626).
gattctttgcgagaaataa

SEQ ID NO: 265758 - DNA, 19 bp, Homo sapiens
  siRNA target sequence for QSCN6 (NM_002826.2,612-630).
ctttgcgagaaataacgaa

SEQ ID NO: 265759 - DNA, 19 bp, Homo sapiens
  siRNA target sequence for QSCN6 (NM_002826.2,617-635).
cgagaaataacgaagagta

SEQ ID NO: 265760 - DNA, 19 bp, Homo sapiens
  siRNA target sequence for QSCN6 (NM_002826.2,820-838).
gtccccgtgctcatggaat

SEQ ID NO: 265761 - DNA, 19 bp, Homo sapiens
  siRNA target sequence for QSCN6 (NM_002826.2,834-852).
ggaatccaggtccttctat

SEQ ID NO: 265762 - DNA, 19 bp, Homo sapiens
  siRNA target sequence for QSCN6 (NM_002826.2,835-853).
gaatccaggtccttctata

SEQ ID NO: 265763 - DNA, 19 bp, Homo sapiens
  siRNA target sequence for QSCN6 (NM_002826.2,955-973).
gcagatcgctccaagatct

SEQ ID NO: 265764 - DNA, 19 bp, Homo sapiens
  siRNA target sequence for QSCN6 (NM_002826.2,956-974).
cagatcgctccaagatcta

SEQ ID NO: 265765 - DNA, 19 bp, Homo sapiens
  siRNA target sequence for QSCN6 (NM_002826.2,958-976).
gatcgctccaagatctaca

SEQ ID NO: 265766 - DNA, 19 bp, Homo sapiens
  siRNA target sequence for QSCN6 (NM_002826.2,1002-1020).
ctacatcctgcggatagaa

SEQ ID NO: 265767 - DNA, 19 bp, Homo sapiens
  siRNA target sequence for QSCN6 (NM_002826.2,1126-1144).
ctgcactccgtgaatgaat

SEQ ID NO: 265768 - DNA, 19 bp, Homo sapiens
  siRNA target sequence for QSCN6 (NM_002826.2,1326-1344).
ggcagctcggcaaaatgta

SEQ ID NO: 265769 - DNA, 19 bp, Homo sapiens
  siRNA target sequence for QSCN6 (NM_002826.2,1328-1346).
cagctcggcaaaatgtaga

SEQ ID NO: 265770 - DNA, 19 bp, Homo sapiens
  siRNA target sequence for QSCN6 (NM_002826.2,1396-1414).
ggctacgtgcactacttct

SEQ ID NO: 265771 - DNA, 19 bp, Homo sapiens
  siRNA target sequence for QSCN6 (NM_002826.2,1581-1599).
gtggccaccccgtgaactt

SEQ ID NO: 265772 - DNA, 19 bp, Homo sapiens
  siRNA target sequence for QSCN6 (NM_002826.2,1584-1602).
gccaccccgtgaactttgt

SEQ ID NO: 265773 - DNA, 19 bp, Homo sapiens
  siRNA target sequence for QSCN6 (NM_002826.2,1785-1803).
gctggaaagccggaattca

SEQ ID NO: 265774 - DNA, 19 bp, Homo sapiens
  siRNA target sequence for QSCN6 (NM_002826.2,1788-1806).
ggaaagccggaattcaact

SEQ ID NO: 265775 - DNA, 19 bp, Homo sapiens
  siRNA target sequence for RNF34 (NM_025126.2,149-167).
gctgtgggctgctgaatga

SEQ ID NO: 265776 - DNA, 19 bp, Homo sapiens
  siRNA target sequence for RNF34 (NM_025126.2,150-168).
ctgtgggctgctgaatgaa

SEQ ID NO: 265777 - DNA, 19 bp, Homo sapiens
  siRNA target sequence for RNF34 (NM_025126.2,152-170).
gtgggctgctgaatgaagt

SEQ ID NO: 265778 - DNA, 19 bp, Homo sapiens
  siRNA target sequence for RNF34 (NM_025126.2,192-210).
gggccagcagtcagcattt

SEQ ID NO: 265779 - DNA, 19 bp, Homo sapiens
  siRNA target sequence for RNF34 (NM_025126.2,195-213).
ccagcagtcagcatttgca

SEQ ID NO: 265780 - DNA, 19 bp, Homo sapiens
  siRNA target sequence for RNF34 (NM_025126.2,219-237).
caccggtccattcagattt

SEQ ID NO: 265781 - DNA, 19 bp, Homo sapiens
  siRNA target sequence for RNF34 (NM_025126.2,222-240).
cggtccattcagatttaca

SEQ ID NO: 265782 - DNA, 19 bp, Homo sapiens
  siRNA target sequence for RNF34 (NM_025126.2,278-296).
cggaagggcccaacatagt

SEQ ID NO: 265783 - DNA, 19 bp, Homo sapiens
  siRNA target sequence for RNF34 (NM_025126.2,279-297).
ggaagggcccaacatagtt

SEQ ID NO: 265784 - DNA, 19 bp, Homo sapiens
  siRNA target sequence for RNF34 (NM_025126.2,283-301).
gggcccaacatagtttgta

SEQ ID NO: 265785 - DNA, 19 bp, Homo sapiens
  siRNA target sequence for RNF34 (NM_025126.2,284-302).
ggcccaacatagtttgtaa

SEQ ID NO: 265786 - DNA, 19 bp, Homo sapiens
  siRNA target sequence for RNF34 (NM_025126.2,304-322).
gcctgtgggctttcatttt

SEQ ID NO: 265787 - DNA, 19 bp, Homo sapiens
  siRNA target sequence for RNF34 (NM_025126.2,375-393).
cgtttgttcagtcttacaa

SEQ ID NO: 265788 - DNA, 19 bp, Homo sapiens
  siRNA target sequence for RNF34 (NM_025126.2,400-418).
ctccgtagatgttctactt

SEQ ID NO: 265789 - DNA, 19 bp, Homo sapiens
  siRNA target sequence for RNF34 (NM_025126.2,402-420).
ccgtagatgttctacttgt

SEQ ID NO: 265790 - DNA, 19 bp, Homo sapiens
  siRNA target sequence for RNF34 (NM_025126.2,410-428).
gttctacttgtcacttatt

SEQ ID NO: 265791 - DNA, 19 bp, Homo sapiens
  siRNA target sequence for RNF34 (NM_025126.2,478-496).
gacctgcggcagtatctca

SEQ ID NO: 265792 - DNA, 19 bp, Homo sapiens
  siRNA target sequence for RNF34 (NM_025126.2,484-502).
cggcagtatctcattctga

SEQ ID NO: 265793 - DNA, 19 bp, Homo sapiens
  siRNA target sequence for RNF34 (NM_025126.2,521-539).
cttgtcgtgagaaagaaga

SEQ ID NO: 265794 - DNA, 19 bp, Homo sapiens
  siRNA target sequence for RNF34 (NM_025126.2,524-542).
gtcgtgagaaagaagactt

SEQ ID NO: 265795 - DNA, 19 bp, Homo sapiens
  siRNA target sequence for RNF34 (NM_025126.2,621-639).
ccagacttctagctttttt

SEQ ID NO: 265796 - DNA, 19 bp, Homo sapiens
  siRNA target sequence for RNF34 (NM_025126.2,641-659).
cacgttcgtttttttcaaa

SEQ ID NO: 265797 - DNA, 19 bp, Homo sapiens
  siRNA target sequence for RNF34 (NM_025126.2,643-661).
cgttcgtttttttcaaact

SEQ ID NO: 265798 - DNA, 19 bp, Homo sapiens
  siRNA target sequence for RNF34 (NM_025126.2,644-662).
gttcgtttttttcaaacta

SEQ ID NO: 265799 - DNA, 19 bp, Homo sapiens
  siRNA target sequence for RNF34 (NM_025126.2,689-707).
cgtttcagggagagcttat

SEQ ID NO: 265800 - DNA, 19 bp, Homo sapiens
  siRNA target sequence for RNF34 (NM_025126.2,736-754).
gtgccggcacaggtacaaa

SEQ ID NO: 265801 - DNA, 19 bp, Homo sapiens
  siRNA target sequence for RNF34 (NM_025126.2,738-756).
gccggcacaggtacaaagt

SEQ ID NO: 265802 - DNA, 19 bp, Homo sapiens
  siRNA target sequence for RNF34 (NM_025126.2,740-758).
cggcacaggtacaaagtga

SEQ ID NO: 265803 - DNA, 19 bp, Homo sapiens
  siRNA target sequence for RNF34 (NM_025126.2,747-765).
ggtacaaagtgaaatcact

SEQ ID NO: 265804 - DNA, 19 bp, Homo sapiens
  siRNA target sequence for RNF34 (NM_025126.2,921-939).
gcgccagctgaaggaaatt

SEQ ID NO: 265805 - DNA, 19 bp, Homo sapiens
  siRNA target sequence for RNF34 (NM_025126.2,940-958).
ctggctcggaattttgtca

SEQ ID NO: 265806 - DNA, 19 bp, Homo sapiens
  siRNA target sequence for RNF34 (NM_025126.2,946-964).
cggaattttgtcaactatt

SEQ ID NO: 265807 - DNA, 19 bp, Homo sapiens
  siRNA target sequence for RNF34 (NM_025126.2,1005-1023).
ccggttatacaaagagaat

SEQ ID NO: 265808 - DNA, 19 bp, Homo sapiens
  siRNA target sequence for RNF34 (NM_025126.2,1208-1226).
gagccgtgcacgtgttcaa

SEQ ID NO: 265809 - DNA, 19 bp, Homo sapiens
  siRNA target sequence for RNF34 (NM_025126.2,1210-1228).
gccgtgcacgtgttcaagt

SEQ ID NO: 265810 - DNA, 19 bp, Homo sapiens
  siRNA target sequence for SLAMF8 (NM_020125.1,129-147).
ccctacttcccattacagt

SEQ ID NO: 265811 - DNA, 19 bp, Homo sapiens
  siRNA target sequence for SLAMF8 (NM_020125.1,130-148).
cctacttcccattacagtt

SEQ ID NO: 265812 - DNA, 19 bp, Homo sapiens
  siRNA target sequence for SLAMF8 (NM_020125.1,290-308).
ctggagactctgtaccatt

SEQ ID NO: 265813 - DNA, 19 bp, Homo sapiens
  siRNA target sequence for SLAMF8 (NM_020125.1,384-402).
gcaacttctccgtgttgat

SEQ ID NO: 265814 - DNA, 19 bp, Homo sapiens
  siRNA target sequence for SLAMF8 (NM_020125.1,465-483).
ccaggcccgtggtacaagt

SEQ ID NO: 265815 - DNA, 19 bp, Homo sapiens
  siRNA target sequence for SLAMF8 (NM_020125.1,468-486).
ggcccgtggtacaagtgtt

SEQ ID NO: 265816 - DNA, 19 bp, Homo sapiens
  siRNA target sequence for SLAMF8 (NM_020125.1,472-490).
cgtggtacaagtgttcatt

SEQ ID NO: 265817 - DNA, 19 bp, Homo sapiens
  siRNA target sequence for SLAMF8 (NM_020125.1,550-568).
ccccaacatcagcgaaata

SEQ ID NO: 265818 - DNA, 19 bp, Homo sapiens
  siRNA target sequence for SLAMF8 (NM_020125.1,595-613).
catggactttggtatggaa

SEQ ID NO: 265819 - DNA, 19 bp, Homo sapiens
  siRNA target sequence for SLAMF8 (NM_020125.1,768-786).
ggaaggcctcctacaaaga

SEQ ID NO: 265820 - DNA, 19 bp, Homo sapiens
  siRNA target sequence for SLAMF8 (NM_020125.1,769-787).
gaaggcctcctacaaagat

SEQ ID NO: 265821 - DNA, 19 bp, Homo sapiens
  siRNA target sequence for SYTL5 (NM_138780.1,18-36).
gttcatcaatctgtcattt

SEQ ID NO: 265822 - DNA, 19 bp, Homo sapiens
  siRNA target sequence for SYTL5 (NM_138780.1,63-81).
cctgggcgtcctaaagaga

SEQ ID NO: 265823 - DNA, 19 bp, Homo sapiens
  siRNA target sequence for SYTL5 (NM_138780.1,73-91).
ctaaagagagatgaatatt

SEQ ID NO: 265824 - DNA, 19 bp, Homo sapiens
  siRNA target sequence for SYTL5 (NM_138780.1,327-345).
cgcgcagctaaggattata

SEQ ID NO: 265825 - DNA, 19 bp, Homo sapiens
  siRNA target sequence for SYTL5 (NM_138780.1,412-430).
gttgtccgacagtccattt

SEQ ID NO: 265826 - DNA, 19 bp, Homo sapiens
  siRNA target sequence for SYTL5 (NM_138780.1,415-433).
gtccgacagtccattttaa

SEQ ID NO: 265827 - DNA, 19 bp, Homo sapiens
  siRNA target sequence for SYTL5 (NM_138780.1,417-435).
ccgacagtccattttaaga

SEQ ID NO: 265828 - DNA, 19 bp, Homo sapiens
  siRNA target sequence for SYTL5 (NM_138780.1,421-439).
cagtccattttaagaagaa

SEQ ID NO: 265829 - DNA, 19 bp, Homo sapiens
  siRNA target sequence for SYTL5 (NM_138780.1,478-496).
cgccaggatgcagaaaagt

SEQ ID NO: 265830 - DNA, 19 bp, Homo sapiens
  siRNA target sequence for SYTL5 (NM_138780.1,559-577).
cttcttagcaagttcagat

SEQ ID NO: 265831 - DNA, 19 bp, Homo sapiens
  siRNA target sequence for SYTL5 (NM_138780.1,581-599).
caaccagaggagaaatcat

SEQ ID NO: 265832 - DNA, 19 bp, Homo sapiens
  siRNA target sequence for SYTL5 (NM_138780.1,585-603).
cagaggagaaatcataact

SEQ ID NO: 265833 - DNA, 19 bp, Homo sapiens
  siRNA target sequence for SYTL5 (NM_138780.1,613-631).
gacactgggcggagctata

SEQ ID NO: 265834 - DNA, 19 bp, Homo sapiens
  siRNA target sequence for SYTL5 (NM_138780.1,636-654).
ggacttagacggtcaacat

SEQ ID NO: 265835 - DNA, 19 bp, Homo sapiens
  siRNA target sequence for SYTL5 (NM_138780.1,637-655).
gacttagacggtcaacatt

SEQ ID NO: 265836 - DNA, 19 bp, Homo sapiens
  siRNA target sequence for SYTL5 (NM_138780.1,639-657).
cttagacggtcaacatttt

SEQ ID NO: 265837 - DNA, 19 bp, Homo sapiens
  siRNA target sequence for SYTL5 (NM_138780.1,698-716).
ctggctcatcagatctcaa

SEQ ID NO: 265838 - DNA, 19 bp, Homo sapiens
  siRNA target sequence for SYTL5 (NM_138780.1,701-719).
gctcatcagatctcaatga

SEQ ID NO: 265839 - DNA, 19 bp, Homo sapiens
  siRNA target sequence for SYTL5 (NM_138780.1,827-845).
gtagagagtatggttttga

SEQ ID NO: 265840 - DNA, 19 bp, Homo sapiens
  siRNA target sequence for SYTL5 (NM_138780.1,897-915).
gagtcaccgcagaaacact

SEQ ID NO: 265841 - DNA, 19 bp, Homo sapiens
  siRNA target sequence for SYTL5 (NM_138780.1,968-986).
gtcgatctgagttagattt

SEQ ID NO: 265842 - DNA, 19 bp, Homo sapiens
  siRNA target sequence for SYTL5 (NM_138780.1,970-988).
cgatctgagttagatttga

SEQ ID NO: 265843 - DNA, 19 bp, Homo sapiens
  siRNA target sequence for SYTL5 (NM_138780.1,982-1000).
gatttgagtgagtcattta

SEQ ID NO: 265844 - DNA, 19 bp, Homo sapiens
  siRNA target sequence for SYTL5 (NM_138780.1,987-1005).
gagtgagtcatttacagaa

SEQ ID NO: 265845 - DNA, 19 bp, Homo sapiens
  siRNA target sequence for SYTL5 (NM_138780.1,1010-1028).
cagaggatactgtaagcat

SEQ ID NO: 265846 - DNA, 19 bp, Homo sapiens
  siRNA target sequence for SYTL5 (NM_138780.1,1014-1032).
ggatactgtaagcataaga

SEQ ID NO: 265847 - DNA, 19 bp, Homo sapiens
  siRNA target sequence for SYTL5 (NM_138780.1,1015-1033).
gatactgtaagcataagaa

SEQ ID NO: 265848 - DNA, 19 bp, Homo sapiens
  siRNA target sequence for SYTL5 (NM_138780.1,1042-1060).
gtccctggggctttagaca

SEQ ID NO: 265849 - DNA, 19 bp, Homo sapiens
  siRNA target sequence for SYTL5 (NM_138780.1,1106-1124).
cctcgcagttatctacaaa

SEQ ID NO: 265850 - DNA, 19 bp, Homo sapiens
  siRNA target sequence for SYTL5 (NM_138780.1,1185-1203).
cagtgaaacgggagactat

SEQ ID NO: 265851 - DNA, 19 bp, Homo sapiens
  siRNA target sequence for SYTL5 (NM_138780.1,1262-1280).
gtgggctgtacatttttgt

SEQ ID NO: 265852 - DNA, 19 bp, Homo sapiens
  siRNA target sequence for SYTL5 (NM_138780.1,1330-1348).
gatgcttatgtcaagtcat

SEQ ID NO: 265853 - DNA, 19 bp, Homo sapiens
  siRNA target sequence for SYTL5 (NM_138780.1,1334-1352).
cttatgtcaagtcatatct

SEQ ID NO: 265854 - DNA, 19 bp, Homo sapiens
  siRNA target sequence for SYTL5 (NM_138780.1,1380-1398).
gcgtaagaccaaaatcaga

SEQ ID NO: 265855 - DNA, 19 bp, Homo sapiens
  siRNA target sequence for SYTL5 (NM_138780.1,1381-1399).
cgtaagaccaaaatcagaa

SEQ ID NO: 265856 - DNA, 19 bp, Homo sapiens
  siRNA target sequence for SYTL5 (NM_138780.1,1400-1418).
caggcaccaatccagaatt

SEQ ID NO: 265857 - DNA, 19 bp, Homo sapiens
  siRNA target sequence for SYTL5 (NM_138780.1,1402-1420).
ggcaccaatccagaattca

SEQ ID NO: 265858 - DNA, 19 bp, Homo sapiens
  siRNA target sequence for SYTL5 (NM_138780.1,1404-1422).
caccaatccagaattcaat

SEQ ID NO: 265859 - DNA, 19 bp, Homo sapiens
  siRNA target sequence for SYTL5 (NM_138780.1,1406-1424).
ccaatccagaattcaatga

SEQ ID NO: 265860 - DNA, 19 bp, Homo sapiens
  siRNA target sequence for SYTL5 (NM_138780.1,1479-1497).
ctcagtctggcactatgat

SEQ ID NO: 265861 - DNA, 19 bp, Homo sapiens
  siRNA target sequence for SYTL5 (NM_138780.1,1488-1506).
gcactatgatcgatttgga

SEQ ID NO: 265862 - DNA, 19 bp, Homo sapiens
  siRNA target sequence for SYTL5 (NM_138780.1,1495-1513).
gatcgatttggacgtaata

SEQ ID NO: 265863 - DNA, 19 bp, Homo sapiens
  siRNA target sequence for SYTL5 (NM_138780.1,1498-1516).
cgatttggacgtaatagct

SEQ ID NO: 265864 - DNA, 19 bp, Homo sapiens
  siRNA target sequence for SYTL5 (NM_138780.1,1499-1517).
gatttggacgtaatagctt

SEQ ID NO: 265865 - DNA, 19 bp, Homo sapiens
  siRNA target sequence for SYTL5 (NM_138780.1,1609-1627).
cctgatattggccttcaat

SEQ ID NO: 265866 - DNA, 19 bp, Homo sapiens
  siRNA target sequence for SYTL5 (NM_138780.1,1612-1630).
gatattggccttcaataca

SEQ ID NO: 265867 - DNA, 19 bp, Homo sapiens
  siRNA target sequence for SYTL5 (NM_138780.1,1638-1656).
gctgacagttgttttacgt

SEQ ID NO: 265868 - DNA, 19 bp, Homo sapiens
  siRNA target sequence for SYTL5 (NM_138780.1,1814-1832).
gaggcacttctgatagctt

SEQ ID NO: 265869 - DNA, 19 bp, Homo sapiens
  siRNA target sequence for SYTL5 (NM_138780.1,1868-1886).
ccaccaagcacaaaactct

SEQ ID NO: 265870 - DNA, 19 bp, Homo sapiens
  siRNA target sequence for SYTL5 (NM_138780.1,1912-1930).
cagtggaatcatacattca

SEQ ID NO: 265871 - DNA, 19 bp, Homo sapiens
  siRNA target sequence for SYTL5 (NM_138780.1,1962-1980).
gaatgtttgcctagaactt

SEQ ID NO: 265872 - DNA, 19 bp, Homo sapiens
  siRNA target sequence for SYTL5 (NM_138780.1,2022-2040).
gggaggagttcgtttgaat

SEQ ID NO: 265873 - DNA, 19 bp, Homo sapiens
  siRNA target sequence for SYTL5 (NM_138780.1,2164-2182).
cgttccagcatgggaaaat

SEQ ID NO: 265874 - DNA, 19 bp, Homo sapiens
  siRNA target sequence for TLP19 (NM_015913.2,442-460).
ctgcccctgatggtgatta

SEQ ID NO: 265875 - DNA, 19 bp, Homo sapiens
  siRNA target sequence for TLP19 (NM_015913.2,448-466).
ctgatggtgattattcata

SEQ ID NO: 265876 - DNA, 19 bp, Homo sapiens
  siRNA target sequence for TLP19 (NM_015913.2,498-516).
gcccaaatttgcagaatct

SEQ ID NO: 265877 - DNA, 19 bp, Homo sapiens
  siRNA target sequence for TLP19 (NM_015913.2,527-545).
cagaactctcccataattt

SEQ ID NO: 265878 - DNA, 19 bp, Homo sapiens
  siRNA target sequence for TLP19 (NM_015913.2,536-554).
cccataattttgttatggt

SEQ ID NO: 265879 - DNA, 19 bp, Homo sapiens
  siRNA target sequence for TLP19 (NM_015913.2,537-555).
ccataattttgttatggta

SEQ ID NO: 265880 - DNA, 19 bp, Homo sapiens
  siRNA target sequence for TLP19 (NM_015913.2,597-615).
ccctgacgggggttatatt

SEQ ID NO: 265881 - DNA, 19 bp, Homo sapiens
  siRNA target sequence for TLP19 (NM_015913.2,649-667).
gtgcatcctgaaatcatca

SEQ ID NO: 265882 - DNA, 19 bp, Homo sapiens
  siRNA target sequence for TLP19 (NM_015913.2,705-723).
cagtgccgagcaagttgtt

SEQ ID NO: 265883 - DNA, 19 bp, Homo sapiens
  siRNA target sequence for TLP19 (NM_015913.2,707-725).
gtgccgagcaagttgttca

SEQ ID NO: 265884 - DNA, 19 bp, Homo sapiens
  siRNA target sequence for TXNDC (NM_030755.3,204-222).
ggaaggagactggatgata

SEQ ID NO: 265885 - DNA, 19 bp, Homo sapiens
  siRNA target sequence for TXNDC (NM_030755.3,242-260).
gccctgcttgtcaaaatct

SEQ ID NO: 265886 - DNA, 19 bp, Homo sapiens
  siRNA target sequence for TXNDC (NM_030755.3,262-280).
caaccggaatgggaaagtt

SEQ ID NO: 265887 - DNA, 19 bp, Homo sapiens
  siRNA target sequence for TXNDC (NM_030755.3,306-324).
ggttaatattgcgaaagta

SEQ ID NO: 265888 - DNA, 19 bp, Homo sapiens
  siRNA target sequence for TXNDC (NM_030755.3,344-362).
gactgagtggacggtttat

SEQ ID NO: 265889 - DNA, 19 bp, Homo sapiens
  siRNA target sequence for TXNDC (NM_030755.3,346-364).
ctgagtggacggtttatca

SEQ ID NO: 265890 - DNA, 19 bp, Homo sapiens
  siRNA target sequence for TXNDC (NM_030755.3,348-366).
gagtggacggtttatcata

SEQ ID NO: 265891 - DNA, 19 bp, Homo sapiens
  siRNA target sequence for TXNDC (NM_030755.3,431-449).
ctaagaaggacttcataaa

SEQ ID NO: 265892 - DNA, 19 bp, Homo sapiens
  siRNA target sequence for TXNDC (NM_030755.3,438-456).
ggacttcataaactttata

SEQ ID NO: 265893 - DNA, 19 bp, Homo sapiens
  siRNA target sequence for TXNDC (NM_030755.3,444-462).
cataaactttataagtgat

SEQ ID NO: 265894 - DNA, 19 bp, Homo sapiens
  siRNA target sequence for TXNDC (NM_030755.3,483-501).
gcccgtttcatcatggttt

SEQ ID NO: 265895 - DNA, 19 bp, Homo sapiens
  siRNA target sequence for TXNDC (NM_030755.3,508-526).
ggttctgttctgatgagta

SEQ ID NO: 265896 - DNA, 19 bp, Homo sapiens
  siRNA target sequence for TXNDC (NM_030755.3,512-530).
ctgttctgatgagtagtat

SEQ ID NO: 265897 - DNA, 19 bp, Homo sapiens
  siRNA target sequence for TXNDC (NM_030755.3,527-545).
gtatgtcagcactctttca

SEQ ID NO: 265898 - DNA, 19 bp, Homo sapiens
  siRNA target sequence for TXNDC (NM_030755.3,535-553).
gcactctttcagctatcta

SEQ ID NO: 265899 - DNA, 19 bp, Homo sapiens
  siRNA target sequence for TXNDC (NM_030755.3,536-554).
cactctttcagctatctat

SEQ ID NO: 265900 - DNA, 19 bp, Homo sapiens
  siRNA target sequence for TXNDC (NM_030755.3,601-619).
ccagtgtggggatcatata

SEQ ID NO: 265901 - DNA, 19 bp, Homo sapiens
  siRNA target sequence for TXNDC (NM_030755.3,606-624).
gtggggatcatatactgtt

SEQ ID NO: 265902 - DNA, 19 bp, Homo sapiens
  siRNA target sequence for TXNDC (NM_030755.3,642-660).
gttttccggactgttatta

SEQ ID NO: 265903 - DNA, 19 bp, Homo sapiens
  siRNA target sequence for TXNDC (NM_030755.3,662-680).
gactctgtatgatatttgt

SEQ ID NO: 265904 - DNA, 19 bp, Homo sapiens
  siRNA target sequence for TXNDC (NM_030755.3,860-878).
cacagaatgccataagaca

SEQ ID NO: 265905 - DNA, 19 bp, Homo sapiens
  siRNA target sequence for TXNDC (NM_030755.3,893-911).
catcattggccacagataa

SEQ ID NO: 265906 - DNA, 19 bp, Homo sapiens
  siRNA target sequence for TXNL2 (NM_006541.1,99-117).
ccctccttgtggtccattt

SEQ ID NO: 265907 - DNA, 19 bp, Homo sapiens
  siRNA target sequence for TXNL2 (NM_006541.1,101-119).
ctccttgtggtccatttct

SEQ ID NO: 265908 - DNA, 19 bp, Homo sapiens
  siRNA target sequence for TXNL2 (NM_006541.1,143-161).
gcacagatgaacgaagtta

SEQ ID NO: 265909 - DNA, 19 bp, Homo sapiens
  siRNA target sequence for TXNL2 (NM_006541.1,144-162).
cacagatgaacgaagttat

SEQ ID NO: 265910 - DNA, 19 bp, Homo sapiens
  siRNA target sequence for TXNL2 (NM_006541.1,154-172).
cgaagttatggcagagtta

SEQ ID NO: 265911 - DNA, 19 bp, Homo sapiens
  siRNA target sequence for TXNL2 (NM_006541.1,158-176).
gttatggcagagttagcta

SEQ ID NO: 265912 - DNA, 19 bp, Homo sapiens
  siRNA target sequence for TXNL2 (NM_006541.1,179-197).
gaactccctcaagtttcat

SEQ ID NO: 265913 - DNA, 19 bp, Homo sapiens
  siRNA target sequence for TXNL2 (NM_006541.1,185-203).
cctcaagtttcatttgtga

SEQ ID NO: 265914 - DNA, 19 bp, Homo sapiens
  siRNA target sequence for TXNL2 (NM_006541.1,289-307).
gaaaatcgaccgattagat

SEQ ID NO: 265915 - DNA, 19 bp, Homo sapiens
  siRNA target sequence for TXNL2 (NM_006541.1,367-385).
cctacccagcgctaatgaa

SEQ ID NO: 265916 - DNA, 19 bp, Homo sapiens
  siRNA target sequence for TXNL2 (NM_006541.1,372-390).
ccagcgctaatgaacatct

SEQ ID NO: 265917 - DNA, 19 bp, Homo sapiens
  siRNA target sequence for TXNL2 (NM_006541.1,375-393).
gcgctaatgaacatcttaa

SEQ ID NO: 265918 - DNA, 19 bp, Homo sapiens
  siRNA target sequence for TXNL2 (NM_006541.1,376-394).
cgctaatgaacatcttaaa

SEQ ID NO: 265919 - DNA, 19 bp, Homo sapiens
  siRNA target sequence for TXNL2 (NM_006541.1,401-419).
ctcaaccttcgcttgaaga

SEQ ID NO: 265920 - DNA, 19 bp, Homo sapiens
  siRNA target sequence for TXNL2 (NM_006541.1,403-421).
caaccttcgcttgaagaaa

SEQ ID NO: 265921 - DNA, 19 bp, Homo sapiens
  siRNA target sequence for TXNL2 (NM_006541.1,434-452).
gccccctgcatgctgttta

SEQ ID NO: 265922 - DNA, 19 bp, Homo sapiens
  siRNA target sequence for TXNL2 (NM_006541.1,435-453).
ccccctgcatgctgtttat

SEQ ID NO: 265923 - DNA, 19 bp, Homo sapiens
  siRNA target sequence for TXNL2 (NM_006541.1,437-455).
ccctgcatgctgtttatga

SEQ ID NO: 265924 - DNA, 19 bp, Homo sapiens
  siRNA target sequence for TXNL2 (NM_006541.1,527-545).
cagtttagcagttttgata

SEQ ID NO: 265925 - DNA, 19 bp, Homo sapiens
  siRNA target sequence for TXNL2 (NM_006541.1,562-580).
ggttcgacagggactcaaa

SEQ ID NO: 265926 - DNA, 19 bp, Homo sapiens
  siRNA target sequence for TXNL2 (NM_006541.1,572-590).
ggactcaaagcctattcca

SEQ ID NO: 265927 - DNA, 19 bp, Homo sapiens
  siRNA target sequence for TXNL2 (NM_006541.1,600-618).
cctatcctcagctctatgt

SEQ ID NO: 265928 - DNA, 19 bp, Homo sapiens
  siRNA target sequence for TXNL2 (NM_006541.1,601-619).
ctatcctcagctctatgtt

SEQ ID NO: 265929 - DNA, 19 bp, Homo sapiens
  siRNA target sequence for TXNL2 (NM_006541.1,629-647).
ctcataggaggacttgata

SEQ ID NO: 265930 - DNA, 19 bp, Homo sapiens
  siRNA target sequence for TXNL2 (NM_006541.1,631-649).
cataggaggacttgatata

SEQ ID NO: 265931 - DNA, 19 bp, Homo sapiens
  siRNA target sequence for TXNL2 (NM_006541.1,635-653).
ggaggacttgatataatta

SEQ ID NO: 265932 - DNA, 19 bp, Homo sapiens
  siRNA target sequence for TXNL2 (NM_006541.1,669-687).
ctgaagaactagatacaat

SEQ ID NO: 265933 - DNA, 19 bp, Homo sapiens
  siRNA target sequence for TXNL2 (NM_006541.1,719-737).
ctcaaagtgctgacaaata

SEQ ID NO: 265934 - DNA, 19 bp, Homo sapiens
  siRNA target sequence for TXNL2 (NM_006541.1,725-743).
gtgctgacaaataaagctt

SEQ ID NO: 265935 - DNA, 19 bp, Homo sapiens
  siRNA target sequence for TXNL2 (NM_006541.1,786-804).
gtggattcagcaaacaaat

SEQ ID NO: 265936 - DNA, 19 bp, Homo sapiens
  siRNA target sequence for TXNL2 (NM_006541.1,872-890).
cggcaaggattaaaagctt

SEQ ID NO: 265937 - DNA, 19 bp, Homo sapiens
  siRNA target sequence for TXNL2 (NM_006541.1,878-896).
ggattaaaagcttactcaa

SEQ ID NO: 265938 - DNA, 19 bp, Homo sapiens
  siRNA target sequence for TXNL2 (NM_006541.1,980-998).
gaattgctgcctatactga

SEQ ID NO: 265939 - DNA, 19 bp, Homo sapiens
  siRNA target sequence for ZNF330 (NM_014487.2,217-235).
gccgagaacgtgaaaaaca

SEQ ID NO: 265940 - DNA, 19 bp, Homo sapiens
  siRNA target sequence for ZNF330 (NM_014487.2,218-236).
ccgagaacgtgaaaaacaa

SEQ ID NO: 265941 - DNA, 19 bp, Homo sapiens
  siRNA target sequence for ZNF330 (NM_014487.2,222-240).
gaacgtgaaaaacaactaa

SEQ ID NO: 265942 - DNA, 19 bp, Homo sapiens
  siRNA target sequence for ZNF330 (NM_014487.2,254-272).
cactatagatttagctaaa

SEQ ID NO: 265943 - DNA, 19 bp, Homo sapiens
  siRNA target sequence for ZNF330 (NM_014487.2,407-425).
gtcttcagactgtgtcata

SEQ ID NO: 265944 - DNA, 19 bp, Homo sapiens
  siRNA target sequence for ZNF330 (NM_014487.2,409-427).
cttcagactgtgtcataaa

SEQ ID NO: 265945 - DNA, 19 bp, Homo sapiens
  siRNA target sequence for ZNF330 (NM_014487.2,412-430).
cagactgtgtcataaagca

SEQ ID NO: 265946 - DNA, 19 bp, Homo sapiens
  siRNA target sequence for ZNF330 (NM_014487.2,456-474).
gcaatggtgggtgcaatat

SEQ ID NO: 265947 - DNA, 19 bp, Homo sapiens
  siRNA target sequence for ZNF330 (NM_014487.2,588-606).
catggaggcagaatattca

SEQ ID NO: 265948 - DNA, 19 bp, Homo sapiens
  siRNA target sequence for ZNF330 (NM_014487.2,735-753).
cgttgtaaggcttgtttct

SEQ ID NO: 265949 - DNA, 19 bp, Homo sapiens
  siRNA target sequence for ZNF330 (NM_014487.2,745-763).
cttgtttctgtgatgatca

SEQ ID NO: 265950 - DNA, 19 bp, Homo sapiens
  siRNA target sequence for ZNF330 (NM_014487.2,859-877).
caacacgctccctgaaatt

SEQ ID NO: 265951 - DNA, 19 bp, Homo sapiens
  siRNA target sequence for ZNF330 (NM_014487.2,913-931).
cttctgggtatgatgctta

SEQ ID NO: 265952 - DNA, 19 bp, Homo sapiens
  siRNA target sequence for ZNF330 (NM_014487.2,918-936).
gggtatgatgcttattgga

SEQ ID NO: 265953 - DNA, 19 bp, Homo sapiens
  siRNA target sequence for ZNF330 (NM_014487.2,1051-1069).
ctgagtcatcagatttgtt

SEQ ID NO: 265954 - DNA, 19 bp, Homo sapiens
  siRNA target sequence for ZNF363 (NM_015436.1,120-138).
ccttgctgtgacaagcttt

SEQ ID NO: 265955 - DNA, 19 bp, Homo sapiens
  siRNA target sequence for ZNF363 (NM_015436.1,121-139).
cttgctgtgacaagcttta

SEQ ID NO: 265956 - DNA, 19 bp, Homo sapiens
  siRNA target sequence for ZNF363 (NM_015436.1,125-143).
ctgtgacaagctttatact

SEQ ID NO: 265957 - DNA, 19 bp, Homo sapiens
  siRNA target sequence for ZNF363 (NM_015436.1,145-163).
gccgcttgtgtcatgataa

SEQ ID NO: 265958 - DNA, 19 bp, Homo sapiens
  siRNA target sequence for ZNF363 (NM_015436.1,149-167).
cttgtgtcatgataacaat

SEQ ID NO: 265959 - DNA, 19 bp, Homo sapiens
  siRNA target sequence for ZNF363 (NM_015436.1,180-198).
ctagatcgctttaaagtga

SEQ ID NO: 265960 - DNA, 19 bp, Homo sapiens
  siRNA target sequence for ZNF363 (NM_015436.1,201-219).
gaagtgcagtgcataaact

SEQ ID NO: 265961 - DNA, 19 bp, Homo sapiens
  siRNA target sequence for ZNF363 (NM_015436.1,252-270).
gaagaatgtagcacattgt

SEQ ID NO: 265962 - DNA, 19 bp, Homo sapiens
  siRNA target sequence for ZNF363 (NM_015436.1,286-304).
gcgatatatgccatttgtt

SEQ ID NO: 265963 - DNA, 19 bp, Homo sapiens
  siRNA target sequence for ZNF363 (NM_015436.1,287-305).
cgatatatgccatttgttt

SEQ ID NO: 265964 - DNA, 19 bp, Homo sapiens
  siRNA target sequence for ZNF363 (NM_015436.1,312-330).
gataagaagcagtatcact

SEQ ID NO: 265965 - DNA, 19 bp, Homo sapiens
  siRNA target sequence for ZNF363 (NM_015436.1,357-375).
ggtccaaaggaagattttt

SEQ ID NO: 265966 - DNA, 19 bp, Homo sapiens
  siRNA target sequence for ZNF363 (NM_015436.1,391-409).
gtaacttatgcctagctat

SEQ ID NO: 265967 - DNA, 19 bp, Homo sapiens
  siRNA target sequence for ZNF363 (NM_015436.1,417-435).
caaggaagacacaagtgta

SEQ ID NO: 265968 - DNA, 19 bp, Homo sapiens
  siRNA target sequence for ZNF363 (NM_015436.1,449-467).
ccgacagaattgtccaata

SEQ ID NO: 265969 - DNA, 19 bp, Homo sapiens
  siRNA target sequence for ZNF363 (NM_015436.1,450-468).
cgacagaattgtccaatat

SEQ ID NO: 265970 - DNA, 19 bp, Homo sapiens
  siRNA target sequence for ZNF363 (NM_015436.1,564-582).
ggctacagatgtccattat

SEQ ID NO: 265971 - DNA, 19 bp, Homo sapiens
  siRNA target sequence for ZNF363 (NM_015436.1,566-584).
ctacagatgtccattatgt

SEQ ID NO: 265972 - DNA, 19 bp, Homo sapiens
  siRNA target sequence for ZNF363 (NM_015436.1,600-618).
gatatgaccaggtattgga

SEQ ID NO: 265973 - DNA, 19 bp, Homo sapiens
  siRNA target sequence for ZNF363 (NM_015436.1,644-662).
gactcctatgccatcagaa

SEQ ID NO: 265974 - DNA, 19 bp, Homo sapiens
  siRNA target sequence for ZNF363 (NM_015436.1,649-667).
ctatgccatcagaatatca

SEQ ID NO: 265975 - DNA, 19 bp, Homo sapiens
  siRNA target sequence for ZNF363 (NM_015436.1,706-724).
gacgatccactgttcagtt

SEQ ID NO: 265976 - DNA, 19 bp, Homo sapiens
  siRNA target sequence for ZNF363 (NM_015436.1,715-733).
ctgttcagtttcatatatt

SEQ ID NO: 265977 - DNA, 19 bp, Homo sapiens
  siRNA target sequence for ZNF363 (NM_015436.1,726-744).
catatattaggcatgaaat

SEQ ID NO: 265978 - DNA, 19 bp, Homo sapiens
  siRNA target sequence for ZNF451 (NM_015555.1,327-345).
cagtgaaggaccattacga

SEQ ID NO: 265979 - DNA, 19 bp, Homo sapiens
  siRNA target sequence for ZNF451 (NM_015555.1,399-417).
ctcttatactgatgagaat

SEQ ID NO: 265980 - DNA, 19 bp, Homo sapiens
  siRNA target sequence for ZNF451 (NM_015555.1,401-419).
cttatactgatgagaatat

SEQ ID NO: 265981 - DNA, 19 bp, Homo sapiens
  siRNA target sequence for ZNF451 (NM_015555.1,430-448).
gaccatattgattatcaga

SEQ ID NO: 265982 - DNA, 19 bp, Homo sapiens
  siRNA target sequence for ZNF451 (NM_015555.1,739-757).
cctataatgcactgtaaca

SEQ ID NO: 265983 - DNA, 19 bp, Homo sapiens
  siRNA target sequence for ZNF451 (NM_015555.1,740-758).
ctataatgcactgtaacaa

SEQ ID NO: 265984 - DNA, 19 bp, Homo sapiens
  siRNA target sequence for ZNF451 (NM_015555.1,768-786).
caatgggcaccttctctta

SEQ ID NO: 265985 - DNA, 19 bp, Homo sapiens
  siRNA target sequence for ZNF451 (NM_015555.1,778-796).
cttctcttaggacatttga

SEQ ID NO: 265986 - DNA, 19 bp, Homo sapiens
  siRNA target sequence for ZNF451 (NM_015555.1,812-830).
ctccatgtgatccaacaat

SEQ ID NO: 265987 - DNA, 19 bp, Homo sapiens
  siRNA target sequence for ZNF451 (NM_015555.1,852-870).
cagctcctttgcttgtgta

SEQ ID NO: 265988 - DNA, 19 bp, Homo sapiens
  siRNA target sequence for ZNF451 (NM_015555.1,862-880).
gcttgtgtagtatgttata

SEQ ID NO: 265989 - DNA, 19 bp, Homo sapiens
  siRNA target sequence for ZNF451 (NM_015555.1,863-881).
cttgtgtagtatgttataa

SEQ ID NO: 265990 - DNA, 19 bp, Homo sapiens
  siRNA target sequence for ZNF451 (NM_015555.1,889-907).
gttactcaacaacaatata

SEQ ID NO: 265991 - DNA, 19 bp, Homo sapiens
  siRNA target sequence for ZNF451 (NM_015555.1,893-911).
ctcaacaacaatatagaga

SEQ ID NO: 265992 - DNA, 19 bp, Homo sapiens
  siRNA target sequence for ZNF451 (NM_015555.1,932-950).
ccacagatgatggacataa

SEQ ID NO: 265993 - DNA, 19 bp, Homo sapiens
  siRNA target sequence for ZNF451 (NM_015555.1,937-955).
gatgatggacataacaaca

SEQ ID NO: 265994 - DNA, 19 bp, Homo sapiens
  siRNA target sequence for ZNF451 (NM_015555.1,969-987).
gattattcagtgttttgca

SEQ ID NO: 265995 - DNA, 19 bp, Homo sapiens
  siRNA target sequence for ZNF451 (NM_015555.1,1020-1038).
ggaggagtgttcaaagcat

SEQ ID NO: 265996 - DNA, 19 bp, Homo sapiens
  siRNA target sequence for ZNF451 (NM_015555.1,1024-1042).
gagtgttcaaagcatatgt

SEQ ID NO: 265997 - DNA, 19 bp, Homo sapiens
  siRNA target sequence for ZNF451 (NM_015555.1,1035-1053).
gcatatgtctggaaagaat

SEQ ID NO: 265998 - DNA, 19 bp, Homo sapiens
  siRNA target sequence for ZNF451 (NM_015555.1,1071-1089).
caaactgggtgataacaaa

SEQ ID NO: 265999 - DNA, 19 bp, Homo sapiens
  siRNA target sequence for ZNF451 (NM_015555.1,1077-1095).
gggtgataacaaaggaatt

SEQ ID NO: 266000 - DNA, 19 bp, Homo sapiens
  siRNA target sequence for ZNF451 (NM_015555.1,1115-1133).
catcttttgcaaagaaact

SEQ ID NO: 266001 - DNA, 19 bp, Homo sapiens
  siRNA target sequence for ZNF451 (NM_015555.1,1137-1155).
gatctctctgtgcaaagat

SEQ ID NO: 266002 - DNA, 19 bp, Homo sapiens
  siRNA target sequence for ZNF451 (NM_015555.1,1156-1174).
gttccctttcaagttaagt

SEQ ID NO: 266003 - DNA, 19 bp, Homo sapiens
  siRNA target sequence for ZNF451 (NM_015555.1,1212-1230).
gctcactgcccatttcaga

SEQ ID NO: 266004 - DNA, 19 bp, Homo sapiens
  siRNA target sequence for ZNF451 (NM_015555.1,1227-1245).
cagagttcattgtcgaaat

SEQ ID NO: 266005 - DNA, 19 bp, Homo sapiens
  siRNA target sequence for ZNF451 (NM_015555.1,1280-1298).
cccaggttgcagagaaatt

SEQ ID NO: 266006 - DNA, 19 bp, Homo sapiens
  siRNA target sequence for ZNF451 (NM_015555.1,1285-1303).
gttgcagagaaattcatat

SEQ ID NO: 266007 - DNA, 19 bp, Homo sapiens
  siRNA target sequence for ZNF451 (NM_015555.1,1299-1317).
catattaagaggttattgt

SEQ ID NO: 266008 - DNA, 19 bp, Homo sapiens
  siRNA target sequence for ZNF451 (NM_015555.1,1316-1334).
gtccagattgcaatcaagt

SEQ ID NO: 266009 - DNA, 19 bp, Homo sapiens
  siRNA target sequence for ZNF451 (NM_015555.1,1352-1370).
gcacccaaaatcataagca

SEQ ID NO: 266010 - DNA, 19 bp, Homo sapiens
  siRNA target sequence for ZNF451 (NM_015555.1,1381-1399).
cacaaagtccgagtcatta

SEQ ID NO: 266011 - DNA, 19 bp, Homo sapiens
  siRNA target sequence for ZNF451 (NM_015555.1,1408-1426).
gaagaatcagtcttactct

SEQ ID NO: 266012 - DNA, 19 bp, Homo sapiens
  siRNA target sequence for ZNF451 (NM_015555.1,1457-1475).
cttcttctgacttgcattt

SEQ ID NO: 266013 - DNA, 19 bp, Homo sapiens
  siRNA target sequence for ZNF451 (NM_015555.1,1504-1522).
cttaaaagaaccatgtcta

SEQ ID NO: 266014 - DNA, 19 bp, Homo sapiens
  siRNA target sequence for ZNF451 (NM_015555.1,1545-1563).
gtgcattgccattccaaaa

SEQ ID NO: 266015 - DNA, 19 bp, Homo sapiens
  siRNA target sequence for ZNF451 (NM_015555.1,1702-1720).
gcaaacacaatgggttata

SEQ ID NO: 266016 - DNA, 19 bp, Homo sapiens
  siRNA target sequence for ZNF451 (NM_015555.1,1709-1727).
caatgggttataaatgtgt

SEQ ID NO: 266017 - DNA, 19 bp, Homo sapiens
  siRNA target sequence for ZNF451 (NM_015555.1,1731-1749).
ctgtggaaaggtatgtgat

SEQ ID NO: 266018 - DNA, 19 bp, Homo sapiens
  siRNA target sequence for ZNF451 (NM_015555.1,1750-1768).
gattcaggggtcattcgtt

SEQ ID NO: 266019 - DNA, 19 bp, Homo sapiens
  siRNA target sequence for ZNF451 (NM_015555.1,1756-1774).
ggggtcattcgtttacaca

SEQ ID NO: 266020 - DNA, 19 bp, Homo sapiens
  siRNA target sequence for ZNF451 (NM_015555.1,1786-1804).
cacggaggggcacatttaa

SEQ ID NO: 266021 - DNA, 19 bp, Homo sapiens
  siRNA target sequence for ZNF451 (NM_015555.1,1788-1806).
cggaggggcacatttaaat

SEQ ID NO: 266022 - DNA, 19 bp, Homo sapiens
  siRNA target sequence for ZNF451 (NM_015555.1,1789-1807).
ggaggggcacatttaaata

SEQ ID NO: 266023 - DNA, 19 bp, Homo sapiens
  siRNA target sequence for ZNF451 (NM_015555.1,1792-1810).
ggggcacatttaaataact

SEQ ID NO: 266024 - DNA, 19 bp, Homo sapiens
  siRNA target sequence for ZNF451 (NM_015555.1,1796-1814).
cacatttaaataactttct

SEQ ID NO: 266025 - DNA, 19 bp, Homo sapiens
  siRNA target sequence for ZNF451 (NM_015555.1,1823-1841).
gtcggacatgcaaaaagga

SEQ ID NO: 266026 - DNA, 19 bp, Homo sapiens
  siRNA target sequence for ZNF451 (NM_015555.1,1868-1886).
cacatgtgactgaatttca

SEQ ID NO: 266027 - DNA, 19 bp, Homo sapiens
  siRNA target sequence for ZNF451 (NM_015555.1,1875-1893).
gactgaatttcataatgga

SEQ ID NO: 266028 - DNA, 19 bp, Homo sapiens
  siRNA target sequence for ZNF451 (NM_015555.1,1977-1995).
caagccttcatcagctatt

SEQ ID NO: 266029 - DNA, 19 bp, Homo sapiens
  siRNA target sequence for ZNF451 (NM_015555.1,1980-1998).
gccttcatcagctattact

SEQ ID NO: 266030 - DNA, 19 bp, Homo sapiens
  siRNA target sequence for ZNF451 (NM_015555.1,1982-2000).
cttcatcagctattactgt

SEQ ID NO: 266031 - DNA, 19 bp, Homo sapiens
  siRNA target sequence for ZNF451 (NM_015555.1,2042-2060).
ggcaatgccggatttgtga

SEQ ID NO: 266032 - DNA, 19 bp, Homo sapiens
  siRNA target sequence for ZNF451 (NM_015555.1,2043-2061).
gcaatgccggatttgtgaa

SEQ ID NO: 266033 - DNA, 19 bp, Homo sapiens
  siRNA target sequence for ZNF451 (NM_015555.1,2048-2066).
gccggatttgtgaagatat

SEQ ID NO: 266034 - DNA, 19 bp, Homo sapiens
  siRNA target sequence for ZNF451 (NM_015555.1,2050-2068).
cggatttgtgaagatatgt

SEQ ID NO: 266035 - DNA, 19 bp, Homo sapiens
  siRNA target sequence for ZNF451 (NM_015555.1,2051-2069).
ggatttgtgaagatatgtt

SEQ ID NO: 266036 - DNA, 19 bp, Homo sapiens
  siRNA target sequence for ZNF451 (NM_015555.1,2052-2070).
gatttgtgaagatatgttt

SEQ ID NO: 266037 - DNA, 19 bp, Homo sapiens
  siRNA target sequence for ZNF451 (NM_015555.1,2110-2128).
gcaagccacaagtttcata

SEQ ID NO: 266038 - DNA, 19 bp, Homo sapiens
  siRNA target sequence for ZNF451 (NM_015555.1,2114-2132).
gccacaagtttcatagata

SEQ ID NO: 266039 - DNA, 19 bp, Homo sapiens
  siRNA target sequence for ZNF451 (NM_015555.1,2150-2168).
gaaagccttttcataagat

SEQ ID NO: 266040 - DNA, 19 bp, Homo sapiens
  siRNA target sequence for ZNF451 (NM_015555.1,2154-2172).
gccttttcataagatagaa

SEQ ID NO: 266041 - DNA, 19 bp, Homo sapiens
  siRNA target sequence for ZNF451 (NM_015555.1,2233-2251).
gggctttgtgatcttatct

SEQ ID NO: 266042 - DNA, 19 bp, Homo sapiens
  siRNA target sequence for ZNF451 (NM_015555.1,2240-2258).
gtgatcttatctttaatgt

SEQ ID NO: 266043 - DNA, 19 bp, Homo sapiens
  siRNA target sequence for ZNF451 (NM_015555.1,2267-2285).
catttctgagtcattatga

SEQ ID NO: 266044 - DNA, 19 bp, Homo sapiens
  siRNA target sequence for ZNF451 (NM_015555.1,2287-2305).
gagcaccacagcatagatt

SEQ ID NO: 266045 - DNA, 19 bp, Homo sapiens
  siRNA target sequence for ZNF451 (NM_015555.1,2289-2307).
gcaccacagcatagattat

SEQ ID NO: 266046 - DNA, 19 bp, Homo sapiens
  siRNA target sequence for ZNF451 (NM_015555.1,2293-2311).
cacagcatagattatgtat

SEQ ID NO: 266047 - DNA, 19 bp, Homo sapiens
  siRNA target sequence for ZNF451 (NM_015555.1,2370-2388).
gaccagtaaccagttaact

SEQ ID NO: 266048 - DNA, 19 bp, Homo sapiens
  siRNA target sequence for ZNF451 (NM_015555.1,2373-2391).
cagtaaccagttaacttgt

SEQ ID NO: 266049 - DNA, 19 bp, Homo sapiens
  siRNA target sequence for ZNF451 (NM_015555.1,2392-2410).
ggttgccgtgagagttaca

SEQ ID NO: 266050 - DNA, 19 bp, Homo sapiens
  siRNA target sequence for ZNF451 (NM_015555.1,2398-2416).
cgtgagagttacatctgta

SEQ ID NO: 266051 - DNA, 19 bp, Homo sapiens
  siRNA target sequence for ZNF451 (NM_015555.1,2481-2499).
gtttcgctgcagtttatgt

SEQ ID NO: 266052 - DNA, 19 bp, Homo sapiens
  siRNA target sequence for ZNF451 (NM_015555.1,2522-2540).
ccgacatgaacactcatat

SEQ ID NO: 266053 - DNA, 19 bp, Homo sapiens
  siRNA target sequence for ZNF451 (NM_015555.1,2526-2544).
catgaacactcatatccat

SEQ ID NO: 266054 - DNA, 19 bp, Homo sapiens
  siRNA target sequence for ZNF451 (NM_015555.1,2578-2596).
cagcagtatgtaatcaagt

SEQ ID NO: 266055 - DNA, 19 bp, Homo sapiens
  siRNA target sequence for ZNF451 (NM_015555.1,2604-2622).
ctgcaccaaagcatttcat

SEQ ID NO: 266056 - DNA, 19 bp, Homo sapiens
  siRNA target sequence for ZNF451 (NM_015555.1,2606-2624).
gcaccaaagcatttcatga

SEQ ID NO: 266057 - DNA, 19 bp, Homo sapiens
  siRNA target sequence for ZNF451 (NM_015555.1,2755-2773).
ctgaaacaggcaataaact

SEQ ID NO: 266058 - DNA, 19 bp, Homo sapiens
  siRNA target sequence for ZNF451 (NM_015555.1,2854-2872).
cctccgctcaactgtaaga

SEQ ID NO: 266059 - DNA, 19 bp, Homo sapiens
  siRNA target sequence for ZNF451 (NM_015555.1,2855-2873).
ctccgctcaactgtaagat

SEQ ID NO: 266060 - DNA, 19 bp, Homo sapiens
  siRNA target sequence for ZNF451 (NM_015555.1,2857-2875).
ccgctcaactgtaagattt

SEQ ID NO: 266061 - DNA, 19 bp, Homo sapiens
  siRNA target sequence for ZNF451 (NM_015555.1,2858-2876).
cgctcaactgtaagattta

SEQ ID NO: 266062 - DNA, 19 bp, Homo sapiens
  siRNA target sequence for ZNF451 (NM_015555.1,2908-2926).
cttcatcctcgctgtagta

SEQ ID NO: 266063 - DNA, 19 bp, Homo sapiens
  siRNA target sequence for ZNF451 (NM_015555.1,2911-2929).
catcctcgctgtagtaaaa

SEQ ID NO: 266064 - DNA, 19 bp, Homo sapiens
  siRNA target sequence for ZNF451 (NM_015555.1,2915-2933).
ctcgctgtagtaaaagaaa

SEQ ID NO: 266065 - DNA, 19 bp, Homo sapiens
  siRNA target sequence for ZNF451 (NM_015555.1,2941-2959).
gctgattttgccatatgta

SEQ ID NO: 266066 - DNA, 19 bp, Homo sapiens
  siRNA target sequence for ZNF451 (NM_015555.1,2961-2979).
gcatgctggccgtctagat

SEQ ID NO: 266067 - DNA, 19 bp, Homo sapiens
  siRNA target sequence for ZNF451 (NM_015555.1,2966-2984).
ctggccgtctagatgaaca

SEQ ID NO: 266068 - DNA, 19 bp, Homo sapiens
  siRNA target sequence for ZNF451 (NM_015555.1,2969-2987).
gccgtctagatgaacaact

SEQ ID NO: 266069 - DNA, 19 bp, Homo sapiens
  siRNA target sequence for ZNF451 (NM_015555.1,2970-2988).
ccgtctagatgaacaacta

SEQ ID NO: 266070 - DNA, 19 bp, Homo sapiens
  siRNA target sequence for ZNF451 (NM_015555.1,2986-3004).
ctacccaagcaaattcctt

SEQ ID NO: 266071 - DNA, 19 bp, Homo sapiens
  siRNA target sequence for ZNF451 (NM_015555.1,3040-3058).
ctagagaatcaatttaaga

SEQ ID NO: 266072 - DNA, 19 bp, Homo sapiens
  siRNA target sequence for ZNF451 (NM_015555.1,3066-3084).
gaggccagctcatatacta

SEQ ID NO: 266073 - DNA, 19 bp, Homo sapiens
  siRNA target sequence for ZNF451 (NM_015555.1,3123-3141).
gttaaatagcatatctgat

SEQ ID NO: 266074 - DNA, 19 bp, Homo sapiens
  siRNA target sequence for ZNF451 (NM_015555.1,3188-3206).
cttcaataggagaagaatt

SEQ ID NO: 266075 - DNA, 19 bp, Homo sapiens
  siRNA target sequence for ZNF451 (NM_015555.1,3212-3230).
ccacagaagatgtggaatt

SEQ ID NO: 266076 - DNA, 19 bp, Homo sapiens
  siRNA target sequence for ZNF507 (NM_014910.1,277-295).
gggaacaggaagctatact

SEQ ID NO: 266077 - DNA, 19 bp, Homo sapiens
  siRNA target sequence for ZNF507 (NM_014910.1,388-406).
gcaagatagtggaaaatga

SEQ ID NO: 266078 - DNA, 19 bp, Homo sapiens
  siRNA target sequence for ZNF507 (NM_014910.1,437-455).
gaaacgcccacgttcaagt

SEQ ID NO: 266079 - DNA, 19 bp, Homo sapiens
  siRNA target sequence for ZNF507 (NM_014910.1,459-477).
gcaacacactctcttgaaa

SEQ ID NO: 266080 - DNA, 19 bp, Homo sapiens
  siRNA target sequence for ZNF507 (NM_014910.1,490-508).
gtgagattccggctaaagt

SEQ ID NO: 266081 - DNA, 19 bp, Homo sapiens
  siRNA target sequence for ZNF507 (NM_014910.1,492-510).
gagattccggctaaagtaa

SEQ ID NO: 266082 - DNA, 19 bp, Homo sapiens
  siRNA target sequence for ZNF507 (NM_014910.1,540-558).
gctgagatgtcacaaacaa

SEQ ID NO: 266083 - DNA, 19 bp, Homo sapiens
  siRNA target sequence for ZNF507 (NM_014910.1,613-631).
gtagcctttgtaagtttct

SEQ ID NO: 266084 - DNA, 19 bp, Homo sapiens
  siRNA target sequence for ZNF507 (NM_014910.1,618-636).
ctttgtaagtttctatcat

SEQ ID NO: 266085 - DNA, 19 bp, Homo sapiens
  siRNA target sequence for ZNF507 (NM_014910.1,640-658).
ccttttccgtgttaaaaga

SEQ ID NO: 266086 - DNA, 19 bp, Homo sapiens
  siRNA target sequence for ZNF507 (NM_014910.1,641-659).
cttttccgtgttaaaagat

SEQ ID NO: 266087 - DNA, 19 bp, Homo sapiens
  siRNA target sequence for ZNF507 (NM_014910.1,647-665).
cgtgttaaaagatcatatt

SEQ ID NO: 266088 - DNA, 19 bp, Homo sapiens
  siRNA target sequence for ZNF507 (NM_014910.1,648-666).
gtgttaaaagatcatatta

SEQ ID NO: 266089 - DNA, 19 bp, Homo sapiens
  siRNA target sequence for ZNF507 (NM_014910.1,701-719).
gtgctcagagtgccatatt

SEQ ID NO: 266090 - DNA, 19 bp, Homo sapiens
  siRNA target sequence for ZNF507 (NM_014910.1,755-773).
ggtgaatgaccatgacaat

SEQ ID NO: 266091 - DNA, 19 bp, Homo sapiens
  siRNA target sequence for ZNF507 (NM_014910.1,868-886).
cagatatcccagtaagtgt

SEQ ID NO: 266092 - DNA, 19 bp, Homo sapiens
  siRNA target sequence for ZNF507 (NM_014910.1,890-908).
caatctacagactcatact

SEQ ID NO: 266093 - DNA, 19 bp, Homo sapiens
  siRNA target sequence for ZNF507 (NM_014910.1,935-953).
gggtaggaggaaatggtat

SEQ ID NO: 266094 - DNA, 19 bp, Homo sapiens
  siRNA target sequence for ZNF507 (NM_014910.1,940-958).
ggaggaaatggtatgcata

SEQ ID NO: 266095 - DNA, 19 bp, Homo sapiens
  siRNA target sequence for ZNF507 (NM_014910.1,944-962).
gaaatggtatgcatacgaa

SEQ ID NO: 266096 - DNA, 19 bp, Homo sapiens
  siRNA target sequence for ZNF507 (NM_014910.1,949-967).
ggtatgcatacgaacagta

SEQ ID NO: 266097 - DNA, 19 bp, Homo sapiens
  siRNA target sequence for ZNF507 (NM_014910.1,959-977).
cgaacagtacggcatgtat

SEQ ID NO: 266098 - DNA, 19 bp, Homo sapiens
  siRNA target sequence for ZNF507 (NM_014910.1,963-981).
cagtacggcatgtatcgat

SEQ ID NO: 266099 - DNA, 19 bp, Homo sapiens
  siRNA target sequence for ZNF507 (NM_014910.1,971-989).
catgtatcgatgcttgttt

SEQ ID NO: 266100 - DNA, 19 bp, Homo sapiens
  siRNA target sequence for ZNF507 (NM_014910.1,974-992).
gtatcgatgcttgttttgt

SEQ ID NO: 266101 - DNA, 19 bp, Homo sapiens
  siRNA target sequence for ZNF507 (NM_014910.1,978-996).
cgatgcttgttttgtagtt

SEQ ID NO: 266102 - DNA, 19 bp, Homo sapiens
  siRNA target sequence for ZNF507 (NM_014910.1,1000-1018).
cttgtggccagcagagaat

SEQ ID NO: 266103 - DNA, 19 bp, Homo sapiens
  siRNA target sequence for ZNF507 (NM_014910.1,1041-1059).
catgctggggaggttgatt

SEQ ID NO: 266104 - DNA, 19 bp, Homo sapiens
  siRNA target sequence for ZNF507 (NM_014910.1,1053-1071).
gttgattgctcctatccaa

SEQ ID NO: 266105 - DNA, 19 bp, Homo sapiens
  siRNA target sequence for ZNF507 (NM_014910.1,1060-1078).
gctcctatccaatctttga

SEQ ID NO: 266106 - DNA, 19 bp, Homo sapiens
  siRNA target sequence for ZNF507 (NM_014910.1,1061-1079).
ctcctatccaatctttgaa

SEQ ID NO: 266107 - DNA, 19 bp, Homo sapiens
  siRNA target sequence for ZNF507 (NM_014910.1,1095-1113).
ctaggcctgctggattctt

SEQ ID NO: 266108 - DNA, 19 bp, Homo sapiens
  siRNA target sequence for ZNF507 (NM_014910.1,1140-1158).
gatgcagtcgtcattgcta

SEQ ID NO: 266109 - DNA, 19 bp, Homo sapiens
  siRNA target sequence for ZNF507 (NM_014910.1,1197-1215).
gtgcaagtgcagatttgca

SEQ ID NO: 266110 - DNA, 19 bp, Homo sapiens
  siRNA target sequence for ZNF507 (NM_014910.1,1217-1235).
ctcagaacagttatcatct

SEQ ID NO: 266111 - DNA, 19 bp, Homo sapiens
  siRNA target sequence for ZNF507 (NM_014910.1,1264-1282).
gaggagtacacctaagtca

SEQ ID NO: 266112 - DNA, 19 bp, Homo sapiens
  siRNA target sequence for ZNF507 (NM_014910.1,1364-1382).
gcttacatcagcacagaaa

SEQ ID NO: 266113 - DNA, 19 bp, Homo sapiens
  siRNA target sequence for ZNF507 (NM_014910.1,1365-1383).
cttacatcagcacagaaaa

SEQ ID NO: 266114 - DNA, 19 bp, Homo sapiens
  siRNA target sequence for ZNF507 (NM_014910.1,1390-1408).
gcagcagccccaataaaaa

SEQ ID NO: 266115 - DNA, 19 bp, Homo sapiens
  siRNA target sequence for ZNF507 (NM_014910.1,1537-1555).
gcgaaggaatggatgatgt

SEQ ID NO: 266116 - DNA, 19 bp, Homo sapiens
  siRNA target sequence for ZNF507 (NM_014910.1,1538-1556).
cgaaggaatggatgatgtt

SEQ ID NO: 266117 - DNA, 19 bp, Homo sapiens
  siRNA target sequence for ZNF507 (NM_014910.1,1554-1572).
gtttatcgtgctgataaat

SEQ ID NO: 266118 - DNA, 19 bp, Homo sapiens
  siRNA target sequence for ZNF507 (NM_014910.1,1693-1711).
ctgagtctcttcgattaca

SEQ ID NO: 266119 - DNA, 19 bp, Homo sapiens
  siRNA target sequence for ZNF507 (NM_014910.1,1695-1713).
gagtctcttcgattacact

SEQ ID NO: 266120 - DNA, 19 bp, Homo sapiens
  siRNA target sequence for ZNF507 (NM_014910.1,1723-1741).
cagaagcccttgtcacaat

SEQ ID NO: 266121 - DNA, 19 bp, Homo sapiens
  siRNA target sequence for ZNF507 (NM_014910.1,1731-1749).
cttgtcacaatgcctataa

SEQ ID NO: 266122 - DNA, 19 bp, Homo sapiens
  siRNA target sequence for ZNF507 (NM_014910.1,1779-1797).
gggcactatggagatataa

SEQ ID NO: 266123 - DNA, 19 bp, Homo sapiens
  siRNA target sequence for ZNF507 (NM_014910.1,1816-1834).
ctagtcaaaggcaagtaga

SEQ ID NO: 266124 - DNA, 19 bp, Homo sapiens
  siRNA target sequence for ZNF507 (NM_014910.1,1821-1839).
caaaggcaagtagatagta

SEQ ID NO: 266125 - DNA, 19 bp, Homo sapiens
  siRNA target sequence for ZNF507 (NM_014910.1,1825-1843).
ggcaagtagatagtacatt

SEQ ID NO: 266126 - DNA, 19 bp, Homo sapiens
  siRNA target sequence for ZNF507 (NM_014910.1,1840-1858).
cattggcagcgtactcaaa

SEQ ID NO: 266127 - DNA, 19 bp, Homo sapiens
  siRNA target sequence for ZNF507 (NM_014910.1,1846-1864).
cagcgtactcaaaaatgat

SEQ ID NO: 266128 - DNA, 19 bp, Homo sapiens
  siRNA target sequence for ZNF507 (NM_014910.1,1848-1866).
gcgtactcaaaaatgatgt

SEQ ID NO: 266129 - DNA, 19 bp, Homo sapiens
  siRNA target sequence for ZNF507 (NM_014910.1,1865-1883).
gtcgccacttaaaaactct

SEQ ID NO: 266130 - DNA, 19 bp, Homo sapiens
  siRNA target sequence for ZNF507 (NM_014910.1,1897-1915).
ctagtcttaaccaaagcaa

SEQ ID NO: 266131 - DNA, 19 bp, Homo sapiens
  siRNA target sequence for ZNF507 (NM_014910.1,1938-1956).
gagggtaggcaggaattgt

SEQ ID NO: 266132 - DNA, 19 bp, Homo sapiens
  siRNA target sequence for ZNF507 (NM_014910.1,1991-2009).
cttactcaccgtcattgaa

SEQ ID NO: 266133 - DNA, 19 bp, Homo sapiens
  siRNA target sequence for ZNF507 (NM_014910.1,1995-2013).
ctcaccgtcattgaaaaat

SEQ ID NO: 266134 - DNA, 19 bp, Homo sapiens
  siRNA target sequence for ZNF507 (NM_014910.1,2000-2018).
cgtcattgaaaaattgaga

SEQ ID NO: 266135 - DNA, 19 bp, Homo sapiens
  siRNA target sequence for ZNF507 (NM_014910.1,2038-2056).
cttcagacgatgacatttt

SEQ ID NO: 266136 - DNA, 19 bp, Homo sapiens
  siRNA target sequence for ZNF507 (NM_014910.1,2088-2106).
cccaacagcgatacaagtt

SEQ ID NO: 266137 - DNA, 19 bp, Homo sapiens
  siRNA target sequence for ZNF507 (NM_014910.1,2089-2107).
ccaacagcgatacaagttt

SEQ ID NO: 266138 - DNA, 19 bp, Homo sapiens
  siRNA target sequence for ZNF507 (NM_014910.1,2101-2119).
caagtttgtccggaaacaa

SEQ ID NO: 266139 - DNA, 19 bp, Homo sapiens
  siRNA target sequence for ZNF507 (NM_014910.1,2104-2122).
gtttgtccggaaacaatgt

SEQ ID NO: 266140 - DNA, 19 bp, Homo sapiens
  siRNA target sequence for ZNF507 (NM_014910.1,2163-2181).
cgcctgtgtcactacacaa

SEQ ID NO: 266141 - DNA, 19 bp, Homo sapiens
  siRNA target sequence for ZNF507 (NM_014910.1,2184-2202).
ggcaacaagggctacatca

SEQ ID NO: 266142 - DNA, 19 bp, Homo sapiens
  siRNA target sequence for ZNF507 (NM_014910.1,2224-2242).
gacagagacagccttatca

SEQ ID NO: 266143 - DNA, 19 bp, Homo sapiens
  siRNA target sequence for ZNF507 (NM_014910.1,2226-2244).
cagagacagccttatcagt

SEQ ID NO: 266144 - DNA, 19 bp, Homo sapiens
  siRNA target sequence for ZNF507 (NM_014910.1,2265-2283).
gcggacaacagcaaagatt

SEQ ID NO: 266145 - DNA, 19 bp, Homo sapiens
  siRNA target sequence for ZNF507 (NM_014910.1,2266-2284).
cggacaacagcaaagattt

SEQ ID NO: 266146 - DNA, 19 bp, Homo sapiens
  siRNA target sequence for ZNF507 (NM_014910.1,2352-2370).
cattataagagtcaattga

SEQ ID NO: 266147 - DNA, 19 bp, Homo sapiens
  siRNA target sequence for ZNF507 (NM_014910.1,2403-2421).
gataccttgtcaatagcaa

SEQ ID NO: 266148 - DNA, 19 bp, Homo sapiens
  siRNA target sequence for ZNF507 (NM_014910.1,2411-2429).
gtcaatagcaacttctaat

SEQ ID NO: 266149 - DNA, 19 bp, Homo sapiens
  siRNA target sequence for ZNF507 (NM_014910.1,2422-2440).
cttctaatgagccaagaat

SEQ ID NO: 266150 - DNA, 19 bp, Homo sapiens
  siRNA target sequence for ATP5F1 (NM_001688.2,332-350).
ctcggaactgggcttatct

SEQ ID NO: 266151 - DNA, 19 bp, Homo sapiens
  siRNA target sequence for ATP5F1 (NM_001688.2,336-354).
gaactgggcttatcttgta

SEQ ID NO: 266152 - DNA, 19 bp, Homo sapiens
  siRNA target sequence for ATP5F1 (NM_001688.2,344-362).
cttatcttgtacgctttat

SEQ ID NO: 266153 - DNA, 19 bp, Homo sapiens
  siRNA target sequence for ATP5F1 (NM_001688.2,352-370).
gtacgctttatccaaagaa

SEQ ID NO: 266154 - DNA, 19 bp, Homo sapiens
  siRNA target sequence for ATP5F1 (NM_001688.2,355-373).
cgctttatccaaagaaata

SEQ ID NO: 266155 - DNA, 19 bp, Homo sapiens
  siRNA target sequence for ATP5F1 (NM_001688.2,397-415).
cactgccctatcagtacta

SEQ ID NO: 266156 - DNA, 19 bp, Homo sapiens
  siRNA target sequence for ATP5F1 (NM_001688.2,416-434).
ggtgtaatggtctatggaa

SEQ ID NO: 266157 - DNA, 19 bp, Homo sapiens
  siRNA target sequence for ATP5F1 (NM_001688.2,578-596).
cagaagcgccattaccttt

SEQ ID NO: 266158 - DNA, 19 bp, Homo sapiens
  siRNA target sequence for ATP5F1 (NM_001688.2,599-617).
gatgtgcaaaggaataaca

SEQ ID NO: 266159 - DNA, 19 bp, Homo sapiens
  siRNA target sequence for ATP5F1 (NM_001688.2,605-623).
caaaggaataacattgcta

SEQ ID NO: 266160 - DNA, 19 bp, Homo sapiens
  siRNA target sequence for ATP5F1 (NM_001688.2,643-661).
ccgggaacgactgtataga

SEQ ID NO: 266161 - DNA, 19 bp, Homo sapiens
  siRNA target sequence for ATP5F1 (NM_001688.2,645-663).
gggaacgactgtatagagt

SEQ ID NO: 266162 - DNA, 19 bp, Homo sapiens
  siRNA target sequence for ATP5F1 (NM_001688.2,647-665).
gaacgactgtatagagtat

SEQ ID NO: 266163 - DNA, 19 bp, Homo sapiens
  siRNA target sequence for ATP5F1 (NM_001688.2,660-678).
gagtatataaggaagtaaa

SEQ ID NO: 266164 - DNA, 19 bp, Homo sapiens
  siRNA target sequence for ATP5F1 (NM_001688.2,679-697).
gaatcgcctggactatcat

SEQ ID NO: 266165 - DNA, 19 bp, Homo sapiens
  siRNA target sequence for ATP5F1 (NM_001688.2,683-701).
cgcctggactatcatatat

SEQ ID NO: 266166 - DNA, 19 bp, Homo sapiens
  siRNA target sequence for ATP5F1 (NM_001688.2,685-703).
cctggactatcatatatct

SEQ ID NO: 266167 - DNA, 19 bp, Homo sapiens
  siRNA target sequence for ATP5F1 (NM_001688.2,727-745).
ggaacaagaacacatgata

SEQ ID NO: 266168 - DNA, 19 bp, Homo sapiens
  siRNA target sequence for ATP5F1 (NM_001688.2,813-831).
gcattgcggacctaaagct

SEQ ID NO: 266169 - DNA, 19 bp, Homo sapiens
  siRNA target sequence for ATP5H (NM_006356.1,53-71).
ggcgaaaacttgctctaaa

SEQ ID NO: 266170 - DNA, 19 bp, Homo sapiens
  siRNA target sequence for ATP5H (NM_006356.1,54-72).
gcgaaaacttgctctaaaa

SEQ ID NO: 266171 - DNA, 19 bp, Homo sapiens
  siRNA target sequence for ATP5H (NM_006356.1,55-73).
cgaaaacttgctctaaaaa

SEQ ID NO: 266172 - DNA, 19 bp, Homo sapiens
  siRNA target sequence for ATP5I (NM_007100.1,143-161).
ccacgcgctacaattacct

SEQ ID NO: 266173 - DNA, 19 bp, Homo sapiens
  siRNA target sequence for ATP5I (NM_007100.1,144-162).
cacgcgctacaattaccta

SEQ ID NO: 266174 - DNA, 19 bp, Homo sapiens
  siRNA target sequence for ATP5I (NM_007100.1,146-164).
cgcgctacaattacctaaa

SEQ ID NO: 266175 - DNA, 19 bp, Homo sapiens
  siRNA target sequence for ATP5I (NM_007100.1,150-168).
ctacaattacctaaaacct

SEQ ID NO: 266176 - DNA, 19 bp, Homo sapiens
  siRNA target sequence for ATP5I (NM_007100.1,253-271).
gatgacagcatattaaagt

SEQ ID NO: 266177 - DNA, 19 bp, Homo sapiens
  siRNA target sequence for ATP5J (NM_001685.3,749-767).
ccatttgcggaggaacatt

SEQ ID NO: 266178 - DNA, 19 bp, Homo sapiens
  siRNA target sequence for ATP5J (NM_001685.3,758-776).
gaggaacattggtgttaca

SEQ ID NO: 266179 - DNA, 19 bp, Homo sapiens
  siRNA target sequence for ATP5J (NM_001685.3,801-819).
gatcctatacagaaactct

SEQ ID NO: 266180 - DNA, 19 bp, Homo sapiens
  siRNA target sequence for ATP5J2 (NM_004889.1,144-162).
cattttcggagcgtttcaa

SEQ ID NO: 266181 - DNA, 19 bp, Homo sapiens
  siRNA target sequence for ATP5J2 (NM_004889.1,155-173).
cgtttcaaagaggttacta

SEQ ID NO: 266182 - DNA, 19 bp, Homo sapiens
  siRNA target sequence for ATP5J2 (NM_004889.1,166-184).
ggttactaccggtactaca

SEQ ID NO: 266183 - DNA, 19 bp, Homo sapiens
  siRNA target sequence for ATP5J2 (NM_004889.1,167-185).
gttactaccggtactacaa

SEQ ID NO: 266184 - DNA, 19 bp, Homo sapiens
  siRNA target sequence for ATP5J2 (NM_004889.1,175-193).
cggtactacaacaagtaca

SEQ ID NO: 266185 - DNA, 19 bp, Homo sapiens
  siRNA target sequence for ATP5J2 (NM_004889.1,212-230).
gcatctcggggattaccat

SEQ ID NO: 266186 - DNA, 19 bp, Homo sapiens
  siRNA target sequence for ATP5J2 (NM_004889.1,238-256).
gcatgctacgtgctcttta

SEQ ID NO: 266187 - DNA, 19 bp, Homo sapiens
  siRNA target sequence for ATP5J2 (NM_004889.1,242-260).
gctacgtgctctttagcta

SEQ ID NO: 266188 - DNA, 19 bp, Homo sapiens
  siRNA target sequence for ATP5S (NM_015684.1,675-693).
cctgtgcagatcaaatgat

SEQ ID NO: 266189 - DNA, 19 bp, Homo sapiens
  siRNA target sequence for ATP5S (NM_015684.1,716-734).
cagttgtgtggcgtaaaga

SEQ ID NO: 266190 - DNA, 19 bp, Homo sapiens
  siRNA target sequence for ATP5S (NM_015684.1,894-912).
ggtggcagaaggactacaa

SEQ ID NO: 266191 - DNA, 19 bp, Homo sapiens
  siRNA target sequence for ATP5S (NM_015684.1,924-942).
caggccctctggacaaata

SEQ ID NO: 266192 - DNA, 19 bp, Homo sapiens
  siRNA target sequence for ATP5S (NM_015684.1,930-948).
ctctggacaaatacaagat

SEQ ID NO: 266193 - DNA, 19 bp, Homo sapiens
  siRNA target sequence for ATP5S (NM_015684.1,959-977).
gacgccaccgactcttgta

SEQ ID NO: 266194 - DNA, 19 bp, Homo sapiens
  siRNA target sequence for ATP5S (NM_015684.1,962-980).
gccaccgactcttgtatca

SEQ ID NO: 266195 - DNA, 19 bp, Homo sapiens
  siRNA target sequence for ATP5S (NM_015684.1,963-981).
ccaccgactcttgtatcat

SEQ ID NO: 266196 - DNA, 19 bp, Homo sapiens
  siRNA target sequence for ATP5S (NM_015684.1,975-993).
gtatcatgagcattggatt

SEQ ID NO: 266197 - DNA, 19 bp, Homo sapiens
  siRNA target sequence for ATP5S (NM_015684.1,979-997).
catgagcattggatttgat

SEQ ID NO: 266198 - DNA, 19 bp, Homo sapiens
  siRNA target sequence for ATP5S (NM_015684.1,984-1002).
gcattggatttgatcacat

SEQ ID NO: 266199 - DNA, 19 bp, Homo sapiens
  siRNA target sequence for ATP5S (NM_015684.1,1003-1021).
gggtaactaccctatcgtt

SEQ ID NO: 266200 - DNA, 19 bp, Homo sapiens
  siRNA target sequence for ATP5S (NM_015684.1,1004-1022).
ggtaactaccctatcgttt

SEQ ID NO: 266201 - DNA, 19 bp, Homo sapiens
  siRNA target sequence for ATP5S (NM_015684.1,1005-1023).
gtaactaccctatcgtttt

SEQ ID NO: 266202 - DNA, 19 bp, Homo sapiens
  siRNA target sequence for ATP5S (NM_015684.1,1009-1027).
ctaccctatcgttttgcta

SEQ ID NO: 266203 - DNA, 19 bp, Homo sapiens
  siRNA target sequence for ATP5S (NM_015684.1,1012-1030).
ccctatcgttttgctaata

SEQ ID NO: 266204 - DNA, 19 bp, Homo sapiens
  siRNA target sequence for ATP6V0A1 (NM_005177.2,270-288).
gttcagtttcgtgacttaa

SEQ ID NO: 266205 - DNA, 19 bp, Homo sapiens
  siRNA target sequence for ATP6V0A1 (NM_005177.2,275-293).
gtttcgtgacttaaatcca

SEQ ID NO: 266206 - DNA, 19 bp, Homo sapiens
  siRNA target sequence for ATP6V0A1 (NM_005177.2,340-358).
gtgaagaaatggatcgaaa

SEQ ID NO: 266207 - DNA, 19 bp, Homo sapiens
  siRNA target sequence for ATP6V0A1 (NM_005177.2,350-368).
ggatcgaaagcttcgattt

SEQ ID NO: 266208 - DNA, 19 bp, Homo sapiens
  siRNA target sequence for ATP6V0A1 (NM_005177.2,359-377).
gcttcgatttgttgagaaa

SEQ ID NO: 266209 - DNA, 19 bp, Homo sapiens
  siRNA target sequence for ATP6V0A1 (NM_005177.2,391-409).
ctaacattccgattatgga

SEQ ID NO: 266210 - DNA, 19 bp, Homo sapiens
  siRNA target sequence for ATP6V0A1 (NM_005177.2,533-551).
cctggaactgaccgaatta

SEQ ID NO: 266211 - DNA, 19 bp, Homo sapiens
  siRNA target sequence for ATP6V0A1 (NM_005177.2,534-552).
ctggaactgaccgaattaa

SEQ ID NO: 266212 - DNA, 19 bp, Homo sapiens
  siRNA target sequence for ATP6V0A1 (NM_005177.2,542-560).
gaccgaattaaaatttata

SEQ ID NO: 266213 - DNA, 19 bp, Homo sapiens
  siRNA target sequence for ATP6V0A1 (NM_005177.2,843-861).
ggcgatcagctgaaaaaca

SEQ ID NO: 266214 - DNA, 19 bp, Homo sapiens
  siRNA target sequence for ATP6V0A1 (NM_005177.2,845-863).
cgatcagctgaaaaacaga

SEQ ID NO: 266215 - DNA, 19 bp, Homo sapiens
  siRNA target sequence for ATP6V0A1 (NM_005177.2,950-968).
gaataccaggattgatgat

SEQ ID NO: 266216 - DNA, 19 bp, Homo sapiens
  siRNA target sequence for ATP6V0A1 (NM_005177.2,958-976).
ggattgatgatctccaaat

SEQ ID NO: 266217 - DNA, 19 bp, Homo sapiens
  siRNA target sequence for ATP6V0A1 (NM_005177.2,1037-1055).
ccgtgtctggttcatcaaa

SEQ ID NO: 266218 - DNA, 19 bp, Homo sapiens
  siRNA target sequence for ATP6V0A1 (NM_005177.2,1088-1106).
gaacctgtgcaacatagat

SEQ ID NO: 266219 - DNA, 19 bp, Homo sapiens
  siRNA target sequence for ATP6V0A1 (NM_005177.2,1104-1122).
gatgtgactcagaaatgct

SEQ ID NO: 266220 - DNA, 19 bp, Homo sapiens
  siRNA target sequence for ATP6V0A1 (NM_005177.2,1242-1260).
cagactcccccaacctata

SEQ ID NO: 266221 - DNA, 19 bp, Homo sapiens
  siRNA target sequence for ATP6V0A1 (NM_005177.2,1246-1264).
ctcccccaacctataacaa

SEQ ID NO: 266222 - DNA, 19 bp, Homo sapiens
  siRNA target sequence for ATP6V0A1 (NM_005177.2,1280-1298).
ctatggctttcagaacata

SEQ ID NO: 266223 - DNA, 19 bp, Homo sapiens
  siRNA target sequence for ATP6V0A1 (NM_005177.2,1317-1335).
ggaacttaccgagagataa

SEQ ID NO: 266224 - DNA, 19 bp, Homo sapiens
  siRNA target sequence for ATP6V0A1 (NM_005177.2,1318-1336).
gaacttaccgagagataaa

SEQ ID NO: 266225 - DNA, 19 bp, Homo sapiens
  siRNA target sequence for ATP6V0A1 (NM_005177.2,1338-1356).
ccagctccgtatactatta

SEQ ID NO: 266226 - DNA, 19 bp, Homo sapiens
  siRNA target sequence for ATP6V0A1 (NM_005177.2,1339-1357).
cagctccgtatactattat

SEQ ID NO: 266227 - DNA, 19 bp, Homo sapiens
  siRNA target sequence for ATP6V0A1 (NM_005177.2,1394-1412).
cttcggtcatggcatttta

SEQ ID NO: 266228 - DNA, 19 bp, Homo sapiens
  siRNA target sequence for ATP6V0A1 (NM_005177.2,1398-1416).
ggtcatggcattttaatga

SEQ ID NO: 266229 - DNA, 19 bp, Homo sapiens
  siRNA target sequence for ATP6V0A1 (NM_005177.2,1473-1491).
gagaatgagatgtttagca

SEQ ID NO: 266230 - DNA, 19 bp, Homo sapiens
  siRNA target sequence for ATP6V0A1 (NM_005177.2,1496-1514).
gttcagtggtcgatacatt

SEQ ID NO: 266231 - DNA, 19 bp, Homo sapiens
  siRNA target sequence for ATP6V0A1 (NM_005177.2,1499-1517).
cagtggtcgatacattatt

SEQ ID NO: 266232 - DNA, 19 bp, Homo sapiens
  siRNA target sequence for ATP6V0A1 (NM_005177.2,1527-1545).
ggtgtgttctccatgtaca

SEQ ID NO: 266233 - DNA, 19 bp, Homo sapiens
  siRNA target sequence for ATP6V0A1 (NM_005177.2,1604-1622).
gagtgtacggccgatgttt

SEQ ID NO: 266234 - DNA, 19 bp, Homo sapiens
  siRNA target sequence for ATP6V0A1 (NM_005177.2,1608-1626).
gtacggccgatgtttactt

SEQ ID NO: 266235 - DNA, 19 bp, Homo sapiens
  siRNA target sequence for ATP6V0A1 (NM_005177.2,1611-1629).
cggccgatgtttacttata

SEQ ID NO: 266236 - DNA, 19 bp, Homo sapiens
  siRNA target sequence for ATP6V0A1 (NM_005177.2,1612-1630).
ggccgatgtttacttataa

SEQ ID NO: 266237 - DNA, 19 bp, Homo sapiens
  siRNA target sequence for ATP6V0A1 (NM_005177.2,1613-1631).
gccgatgtttacttataat

SEQ ID NO: 266238 - DNA, 19 bp, Homo sapiens
  siRNA target sequence for ATP6V0A1 (NM_005177.2,1614-1632).
ccgatgtttacttataatt

SEQ ID NO: 266239 - DNA, 19 bp, Homo sapiens
  siRNA target sequence for ATP6V0A1 (NM_005177.2,1725-1743).
ccaatttggaacattgcta

SEQ ID NO: 266240 - DNA, 19 bp, Homo sapiens
  siRNA target sequence for ATP6V0A1 (NM_005177.2,1756-1774).
cgttcttgaactcctttaa

SEQ ID NO: 266241 - DNA, 19 bp, Homo sapiens
  siRNA target sequence for ATP6V0A1 (NM_005177.2,1827-1845).
ctgagtctgttcaaccata

SEQ ID NO: 266242 - DNA, 19 bp, Homo sapiens
  siRNA target sequence for ATP6V0A1 (NM_005177.2,1859-1877).
gcccctgaatatctacttt

SEQ ID NO: 266243 - DNA, 19 bp, Homo sapiens
  siRNA target sequence for ATP6V0A1 (NM_005177.2,1906-1924).
cctctttgtttggctattt

SEQ ID NO: 266244 - DNA, 19 bp, Homo sapiens
  siRNA target sequence for ATP6V0A1 (NM_005177.2,1909-1927).
ctttgtttggctatttggt

SEQ ID NO: 266245 - DNA, 19 bp, Homo sapiens
  siRNA target sequence for ATP6V0A1 (NM_005177.2,1917-1935).
ggctatttggttatcctta

SEQ ID NO: 266246 - DNA, 19 bp, Homo sapiens
  siRNA target sequence for ATP6V0A1 (NM_005177.2,1918-1936).
gctatttggttatccttat

SEQ ID NO: 266247 - DNA, 19 bp, Homo sapiens
  siRNA target sequence for ATP6V0A1 (NM_005177.2,1943-1961).
caagtggacggcctatgat

SEQ ID NO: 266248 - DNA, 19 bp, Homo sapiens
  siRNA target sequence for ATP6V0A1 (NM_005177.2,1992-2010).
ctgatccatttcataaaca

SEQ ID NO: 266249 - DNA, 19 bp, Homo sapiens
  siRNA target sequence for ATP6V0A1 (NM_005177.2,2028-2046).
ccagagtctggttattcaa

SEQ ID NO: 266250 - DNA, 19 bp, Homo sapiens
  siRNA target sequence for ATP6V0A1 (NM_005177.2,2029-2047).
cagagtctggttattcaat

SEQ ID NO: 266251 - DNA, 19 bp, Homo sapiens
  siRNA target sequence for ATP6V0A1 (NM_005177.2,2035-2053).
ctggttattcaatgttgta

SEQ ID NO: 266252 - DNA, 19 bp, Homo sapiens
  siRNA target sequence for ATP6V0A1 (NM_005177.2,2136-2154).
gtccttcgccgtcagtatt

SEQ ID NO: 266253 - DNA, 19 bp, Homo sapiens
  siRNA target sequence for ATP6V0A1 (NM_005177.2,2139-2157).
cttcgccgtcagtatttga

SEQ ID NO: 266254 - DNA, 19 bp, Homo sapiens
  siRNA target sequence for ATP6V0A1 (NM_005177.2,2219-2237).
ggaggatgctgagattatt

SEQ ID NO: 266255 - DNA, 19 bp, Homo sapiens
  siRNA target sequence for ATP6V0A1 (NM_005177.2,2268-2286).
gacgcagacgagtttgact

SEQ ID NO: 266256 - DNA, 19 bp, Homo sapiens
  siRNA target sequence for ATP6V0A1 (NM_005177.2,2270-2288).
cgcagacgagtttgacttt

SEQ ID NO: 266257 - DNA, 19 bp, Homo sapiens
  siRNA target sequence for ATP6V0A1 (NM_005177.2,2550-2568).
cacgcactgcgcttacact

SEQ ID NO: 266258 - DNA, 19 bp, Homo sapiens
  siRNA target sequence for ATP6V0A1 (NM_005177.2,2596-2614).
gcgggaccggtttcaagtt

SEQ ID NO: 266259 - DNA, 19 bp, Homo sapiens
  siRNA target sequence for ATP6V0A1 (NM_005177.2,2598-2616).
gggaccggtttcaagttct

SEQ ID NO: 266260 - DNA, 19 bp, Homo sapiens
  siRNA target sequence for ATP6V0A1 (NM_005177.2,2599-2617).
ggaccggtttcaagttctt

SEQ ID NO: 266261 - DNA, 19 bp, Homo sapiens
  siRNA target sequence for ATP6V0A1 (NM_005177.2,2600-2618).
gaccggtttcaagttctta

SEQ ID NO: 266262 - DNA, 19 bp, Homo sapiens
  siRNA target sequence for TCIRG1 (NM_006019.2,1439-1457).
gctacctgctcctgcttat

SEQ ID NO: 266263 - DNA, 19 bp, Homo sapiens
  siRNA target sequence for TCIRG1 (NM_006019.2,1562-1580).
ctggctggagtgatgcatt

SEQ ID NO: 266264 - DNA, 19 bp, Homo sapiens
  siRNA target sequence for TCIRG1 (NM_006019.2,1585-1603).
gcccagcacacgatgctta

SEQ ID NO: 266265 - DNA, 19 bp, Homo sapiens
  siRNA target sequence for TCIRG1 (NM_006019.2,2151-2169).
gcctgacgcatctgtgaat

SEQ ID NO: 266266 - DNA, 19 bp, Homo sapiens
  siRNA target sequence for TMEM1 (NM_003274.2,218-236).
cctgtgctggagatcagaa

SEQ ID NO: 266267 - DNA, 19 bp, Homo sapiens
  siRNA target sequence for TMEM1 (NM_003274.2,223-241).
gctggagatcagaatttat

SEQ ID NO: 266268 - DNA, 19 bp, Homo sapiens
  siRNA target sequence for TMEM1 (NM_003274.2,314-332).
gggctccgaagatgattca

SEQ ID NO: 266269 - DNA, 19 bp, Homo sapiens
  siRNA target sequence for TMEM1 (NM_003274.2,434-452).
gctgtgataccgaagtgta

SEQ ID NO: 266270 - DNA, 19 bp, Homo sapiens
  siRNA target sequence for TMEM1 (NM_003274.2,435-453).
ctgtgataccgaagtgtat

SEQ ID NO: 266271 - DNA, 19 bp, Homo sapiens
  siRNA target sequence for TMEM1 (NM_003274.2,437-455).
gtgataccgaagtgtataa

SEQ ID NO: 266272 - DNA, 19 bp, Homo sapiens
  siRNA target sequence for TMEM1 (NM_003274.2,448-466).
gtgtataaagctacagtaa

SEQ ID NO: 266273 - DNA, 19 bp, Homo sapiens
  siRNA target sequence for TMEM1 (NM_003274.2,450-468).
gtataaagctacagtaaaa

SEQ ID NO: 266274 - DNA, 19 bp, Homo sapiens
  siRNA target sequence for TMEM1 (NM_003274.2,510-528).
ctctgtggactggttaata

SEQ ID NO: 266275 - DNA, 19 bp, Homo sapiens
  siRNA target sequence for TMEM1 (NM_003274.2,512-530).
ctgtggactggttaatagt

SEQ ID NO: 266276 - DNA, 19 bp, Homo sapiens
  siRNA target sequence for TMEM1 (NM_003274.2,519-537).
ctggttaatagtgatagtt

SEQ ID NO: 266277 - DNA, 19 bp, Homo sapiens
  siRNA target sequence for TMEM1 (NM_003274.2,573-591).
ccttccccgaacctctatt

SEQ ID NO: 266278 - DNA, 19 bp, Homo sapiens
  siRNA target sequence for TMEM1 (NM_003274.2,584-602).
cctctattgtggacaaaat

SEQ ID NO: 266279 - DNA, 19 bp, Homo sapiens
  siRNA target sequence for TMEM1 (NM_003274.2,714-732).
gacattgcttcttatgtct

SEQ ID NO: 266280 - DNA, 19 bp, Homo sapiens
  siRNA target sequence for TMEM1 (NM_003274.2,793-811).
gagccaggctggagctttt

SEQ ID NO: 266281 - DNA, 19 bp, Homo sapiens
  siRNA target sequence for TMEM1 (NM_003274.2,947-965).
gtgccaactggctgacttt

SEQ ID NO: 266282 - DNA, 19 bp, Homo sapiens
  siRNA target sequence for TMEM1 (NM_003274.2,950-968).
ccaactggctgactttttt

SEQ ID NO: 266283 - DNA, 19 bp, Homo sapiens
  siRNA target sequence for TMEM1 (NM_003274.2,1277-1295).
gggcacagatcgactcaaa

SEQ ID NO: 266284 - DNA, 19 bp, Homo sapiens
  siRNA target sequence for TMEM1 (NM_003274.2,1279-1297).
gcacagatcgactcaaaca

SEQ ID NO: 266285 - DNA, 19 bp, Homo sapiens
  siRNA target sequence for TMEM1 (NM_003274.2,1280-1298).
cacagatcgactcaaacat

SEQ ID NO: 266286 - DNA, 19 bp, Homo sapiens
  siRNA target sequence for TMEM1 (NM_003274.2,1344-1362).
gtccttgggctatctatgt

SEQ ID NO: 266287 - DNA, 19 bp, Homo sapiens
  siRNA target sequence for TMEM1 (NM_003274.2,1460-1478).
cagctcagagtccttataa

SEQ ID NO: 266288 - DNA, 19 bp, Homo sapiens
  siRNA target sequence for TMEM1 (NM_003274.2,1483-1501).
ctgaaagaagcattatcgt

SEQ ID NO: 266289 - DNA, 19 bp, Homo sapiens
  siRNA target sequence for TMEM1 (NM_003274.2,1511-1529).
cttttgaaaaacactactt

SEQ ID NO: 266290 - DNA, 19 bp, Homo sapiens
  siRNA target sequence for TMEM1 (NM_003274.2,1536-1554).
gtcccatgccaccattgaa

SEQ ID NO: 266291 - DNA, 19 bp, Homo sapiens
  siRNA target sequence for TMEM1 (NM_003274.2,1540-1558).
catgccaccattgaaatgt

SEQ ID NO: 266292 - DNA, 19 bp, Homo sapiens
  siRNA target sequence for TMEM1 (NM_003274.2,1543-1561).
gccaccattgaaatgtata

SEQ ID NO: 266293 - DNA, 19 bp, Homo sapiens
  siRNA target sequence for TMEM1 (NM_003274.2,1545-1563).
caccattgaaatgtataca

SEQ ID NO: 266294 - DNA, 19 bp, Homo sapiens
  siRNA target sequence for TMEM1 (NM_003274.2,1574-1592).
ggattcgatctgctaagtt

SEQ ID NO: 266295 - DNA, 19 bp, Homo sapiens
  siRNA target sequence for TMEM1 (NM_003274.2,1575-1593).
gattcgatctgctaagttt

SEQ ID NO: 266296 - DNA, 19 bp, Homo sapiens
  siRNA target sequence for TMEM1 (NM_003274.2,1583-1601).
ctgctaagtttgttggaaa

SEQ ID NO: 266297 - DNA, 19 bp, Homo sapiens
  siRNA target sequence for TMEM1 (NM_003274.2,1586-1604).
ctaagtttgttggaaaaga

SEQ ID NO: 266298 - DNA, 19 bp, Homo sapiens
  siRNA target sequence for TMEM1 (NM_003274.2,1722-1740).
gcagctggccgaatgtcaa

SEQ ID NO: 266299 - DNA, 19 bp, Homo sapiens
  siRNA target sequence for TMEM1 (NM_003274.2,1827-1845).
cttctgccaggagatactt

SEQ ID NO: 266300 - DNA, 19 bp, Homo sapiens
  siRNA target sequence for TMEM1 (NM_003274.2,1832-1850).
gccaggagatacttgactt

SEQ ID NO: 266301 - DNA, 19 bp, Homo sapiens
  siRNA target sequence for TMEM1 (NM_003274.2,1867-1885).
gacagcccaggtcataaga

SEQ ID NO: 266302 - DNA, 19 bp, Homo sapiens
  siRNA target sequence for TMEM1 (NM_003274.2,1869-1887).
cagcccaggtcataagata

SEQ ID NO: 266303 - DNA, 19 bp, Homo sapiens
  siRNA target sequence for TMEM1 (NM_003274.2,1871-1889).
gcccaggtcataagatagt

SEQ ID NO: 266304 - DNA, 19 bp, Homo sapiens
  siRNA target sequence for TMEM1 (NM_003274.2,1964-1982).
gcgttttgtgcgttgagat

SEQ ID NO: 266305 - DNA, 19 bp, Homo sapiens
  siRNA target sequence for TMEM1 (NM_003274.2,2038-2056).
gtccacttcagcattgaga

SEQ ID NO: 266306 - DNA, 19 bp, Homo sapiens
  siRNA target sequence for TMEM1 (NM_003274.2,2040-2058).
ccacttcagcattgagaaa

SEQ ID NO: 266307 - DNA, 19 bp, Homo sapiens
  siRNA target sequence for TMEM1 (NM_003274.2,2041-2059).
cacttcagcattgagaaaa

SEQ ID NO: 266308 - DNA, 19 bp, Homo sapiens
  siRNA target sequence for TMEM1 (NM_003274.2,2145-2163).
ccctgtatcccaaaacagt

SEQ ID NO: 266309 - DNA, 19 bp, Homo sapiens
  siRNA target sequence for TMEM1 (NM_003274.2,2147-2165).
ctgtatcccaaaacagttt

SEQ ID NO: 266310 - DNA, 19 bp, Homo sapiens
  siRNA target sequence for TMEM1 (NM_003274.2,2170-2188).
gcgctggagttgtatgaaa

SEQ ID NO: 266311 - DNA, 19 bp, Homo sapiens
  siRNA target sequence for TMEM1 (NM_003274.2,2362-2380).
ggggccaaccagataacat

SEQ ID NO: 266312 - DNA, 19 bp, Homo sapiens
  siRNA target sequence for TMEM1 (NM_003274.2,2363-2381).
gggccaaccagataacatt

SEQ ID NO: 266313 - DNA, 19 bp, Homo sapiens
  siRNA target sequence for TMEM1 (NM_003274.2,2394-2412).
caaggaacctggaacgtat

SEQ ID NO: 266314 - DNA, 19 bp, Homo sapiens
  siRNA target sequence for TMEM1 (NM_003274.2,2397-2415).
ggaacctggaacgtataca

SEQ ID NO: 266315 - DNA, 19 bp, Homo sapiens
  siRNA target sequence for TMEM1 (NM_003274.2,2554-2572).
cctcagagagtcaagttca

SEQ ID NO: 266316 - DNA, 19 bp, Homo sapiens
  siRNA target sequence for TMEM1 (NM_003274.2,2582-2600).
ccggccattatacgataaa

SEQ ID NO: 266317 - DNA, 19 bp, Homo sapiens
  siRNA target sequence for TMEM1 (NM_003274.2,2584-2602).
ggccattatacgataaaga

SEQ ID NO: 266318 - DNA, 19 bp, Homo sapiens
  siRNA target sequence for TMEM1 (NM_003274.2,2586-2604).
ccattatacgataaagaat

SEQ ID NO: 266319 - DNA, 19 bp, Homo sapiens
  siRNA target sequence for TMEM1 (NM_003274.2,2767-2785).
gcgtaccacgtgatcgaat

SEQ ID NO: 266320 - DNA, 19 bp, Homo sapiens
  siRNA target sequence for TMEM1 (NM_003274.2,2768-2786).
cgtaccacgtgatcgaatt

SEQ ID NO: 266321 - DNA, 19 bp, Homo sapiens
  siRNA target sequence for TMEM1 (NM_003274.2,2769-2787).
gtaccacgtgatcgaattt

SEQ ID NO: 266322 - DNA, 19 bp, Homo sapiens
  siRNA target sequence for TMEM1 (NM_003274.2,2794-2812).
gaagttctctctttacctt

SEQ ID NO: 266323 - DNA, 19 bp, Homo sapiens
  siRNA target sequence for TMEM1 (NM_003274.2,2917-2935).
cacaaagtgtcgattgact

SEQ ID NO: 266324 - DNA, 19 bp, Homo sapiens
  siRNA target sequence for TMEM1 (NM_003274.2,3017-3035).
gaacacggaaatatgttca

SEQ ID NO: 266325 - DNA, 19 bp, Homo sapiens
  siRNA target sequence for TMEM1 (NM_003274.2,3022-3040).
cggaaatatgttcaagttt

SEQ ID NO: 266326 - DNA, 19 bp, Homo sapiens
  siRNA target sequence for TMEM1 (NM_003274.2,3064-3082).
gactttcagctgtcagata

SEQ ID NO: 266327 - DNA, 19 bp, Homo sapiens
  siRNA target sequence for TMEM1 (NM_003274.2,3066-3084).
ctttcagctgtcagatagt

SEQ ID NO: 266328 - DNA, 19 bp, Homo sapiens
  siRNA target sequence for TMEM1 (NM_003274.2,3075-3093).
gtcagatagttatcttgta

SEQ ID NO: 266329 - DNA, 19 bp, Homo sapiens
  siRNA target sequence for TMEM1 (NM_003274.2,3091-3109).
gtagataccggtgatagta

SEQ ID NO: 266330 - DNA, 19 bp, Homo sapiens
  siRNA target sequence for TMEM1 (NM_003274.2,3107-3125).
gtaccgacctgcaactagt

SEQ ID NO: 266331 - DNA, 19 bp, Homo sapiens
  siRNA target sequence for TMEM1 (NM_003274.2,3257-3275).
ctgaggaacagctgtctat

SEQ ID NO: 266332 - DNA, 19 bp, Homo sapiens
  siRNA target sequence for TMEM1 (NM_003274.2,3276-3294).
ctccttaaagccgtatact

SEQ ID NO: 266333 - DNA, 19 bp, Homo sapiens
  siRNA target sequence for TMEM1 (NM_003274.2,3285-3303).
gccgtatacttatgaattt

SEQ ID NO: 266334 - DNA, 19 bp, Homo sapiens
  siRNA target sequence for TMEM1 (NM_003274.2,3286-3304).
ccgtatacttatgaattta

SEQ ID NO: 266335 - DNA, 19 bp, Homo sapiens
  siRNA target sequence for TMEM1 (NM_003274.2,3287-3305).
cgtatacttatgaatttaa

SEQ ID NO: 266336 - DNA, 19 bp, Homo sapiens
  siRNA target sequence for TMEM1 (NM_003274.2,3355-3373).
ccttcgggaatggagtatt

SEQ ID NO: 266337 - DNA, 19 bp, Homo sapiens
  siRNA target sequence for TMEM1 (NM_003274.2,3472-3490).
catttttcgacaaagctta

SEQ ID NO: 266338 - DNA, 19 bp, Homo sapiens
  siRNA target sequence for TMEM1 (NM_003274.2,3479-3497).
cgacaaagcttatgtatga

SEQ ID NO: 266339 - DNA, 19 bp, Homo sapiens
  siRNA target sequence for TMEM1 (NM_003274.2,3480-3498).
gacaaagcttatgtatgaa

SEQ ID NO: 266340 - DNA, 19 bp, Homo sapiens
  siRNA target sequence for TMEM1 (NM_003274.2,3496-3514).
gaagttgtcgacaacagta

SEQ ID NO: 266341 - DNA, 19 bp, Homo sapiens
  siRNA target sequence for TMEM1 (NM_003274.2,3632-3650).
ccgacgtcaggctgttcaa

SEQ ID NO: 266342 - DNA, 19 bp, Homo sapiens
  siRNA target sequence for TMEM1 (NM_003274.2,3634-3652).
gacgtcaggctgttcaagt

SEQ ID NO: 266343 - DNA, 19 bp, Homo sapiens
  siRNA target sequence for TMEM1 (NM_003274.2,3651-3669).
gtacctcccccatcattct

SEQ ID NO: 266344 - DNA, 19 bp, Homo sapiens
  siRNA target sequence for SLC11A2 (NM_000617.1,150-168).
ctgccagtcttggtaacat

SEQ ID NO: 266345 - DNA, 19 bp, Homo sapiens
  siRNA target sequence for SLC11A2 (NM_000617.1,152-170).
gccagtcttggtaacatca

SEQ ID NO: 266346 - DNA, 19 bp, Homo sapiens
  siRNA target sequence for SLC11A2 (NM_000617.1,166-184).
catcaaccctgcctatagt

SEQ ID NO: 266347 - DNA, 19 bp, Homo sapiens
  siRNA target sequence for SLC11A2 (NM_000617.1,183-201).
gtaatccctctctttcaca

SEQ ID NO: 266348 - DNA, 19 bp, Homo sapiens
  siRNA target sequence for SLC11A2 (NM_000617.1,221-239).
gagtacttcgccacttact

SEQ ID NO: 266349 - DNA, 19 bp, Homo sapiens
  siRNA target sequence for SLC11A2 (NM_000617.1,223-241).
gtacttcgccacttacttt

SEQ ID NO: 266350 - DNA, 19 bp, Homo sapiens
  siRNA target sequence for SLC11A2 (NM_000617.1,263-281).
gaggaggagtactcttgtt

SEQ ID NO: 266351 - DNA, 19 bp, Homo sapiens
  siRNA target sequence for SLC11A2 (NM_000617.1,279-297).
gttttagctttcgtaaact

SEQ ID NO: 266352 - DNA, 19 bp, Homo sapiens
  siRNA target sequence for SLC11A2 (NM_000617.1,309-327).
ccggaccaggttttcttat

SEQ ID NO: 266353 - DNA, 19 bp, Homo sapiens
  siRNA target sequence for SLC11A2 (NM_000617.1,380-398).
gcagtggctggatttaagt

SEQ ID NO: 266354 - DNA, 19 bp, Homo sapiens
  siRNA target sequence for SLC11A2 (NM_000617.1,381-399).
cagtggctggatttaagtt

SEQ ID NO: 266355 - DNA, 19 bp, Homo sapiens
  siRNA target sequence for SLC11A2 (NM_000617.1,588-606).
gctcagccattgctatcaa

SEQ ID NO: 266356 - DNA, 19 bp, Homo sapiens
  siRNA target sequence for SLC11A2 (NM_000617.1,591-609).
cagccattgctatcaatct

SEQ ID NO: 266357 - DNA, 19 bp, Homo sapiens
  siRNA target sequence for SLC11A2 (NM_000617.1,613-631).
gtctgtaggaagaattcct

SEQ ID NO: 266358 - DNA, 19 bp, Homo sapiens
  siRNA target sequence for SLC11A2 (NM_000617.1,652-670).
caccattgcagatactttt

SEQ ID NO: 266359 - DNA, 19 bp, Homo sapiens
  siRNA target sequence for SLC11A2 (NM_000617.1,654-672).
ccattgcagatacttttgt

SEQ ID NO: 266360 - DNA, 19 bp, Homo sapiens
  siRNA target sequence for SLC11A2 (NM_000617.1,722-740).
ggctttctcatcactatta

SEQ ID NO: 266361 - DNA, 19 bp, Homo sapiens
  siRNA target sequence for SLC11A2 (NM_000617.1,744-762).
ccctcacatttggatatga

SEQ ID NO: 266362 - DNA, 19 bp, Homo sapiens
  siRNA target sequence for SLC11A2 (NM_000617.1,746-764).
ctcacatttggatatgagt

SEQ ID NO: 266363 - DNA, 19 bp, Homo sapiens
  siRNA target sequence for SLC11A2 (NM_000617.1,829-847).
ctgtcgcactccacagatt

SEQ ID NO: 266364 - DNA, 19 bp, Homo sapiens
  siRNA target sequence for SLC11A2 (NM_000617.1,831-849).
gtcgcactccacagattga

SEQ ID NO: 266365 - DNA, 19 bp, Homo sapiens
  siRNA target sequence for SLC11A2 (NM_000617.1,926-944).
caggtaaaccggaacaata

SEQ ID NO: 266366 - DNA, 19 bp, Homo sapiens
  siRNA target sequence for SLC11A2 (NM_000617.1,953-971).
gttcgagaagccaataagt

SEQ ID NO: 266367 - DNA, 19 bp, Homo sapiens
  siRNA target sequence for SLC11A2 (NM_000617.1,956-974).
cgagaagccaataagtact

SEQ ID NO: 266368 - DNA, 19 bp, Homo sapiens
  siRNA target sequence for SLC11A2 (NM_000617.1,959-977).
gaagccaataagtactttt

SEQ ID NO: 266369 - DNA, 19 bp, Homo sapiens
  siRNA target sequence for SLC11A2 (NM_000617.1,1078-1096).
ggttgaagtctgtacaaat

SEQ ID NO: 266370 - DNA, 19 bp, Homo sapiens
  siRNA target sequence for SLC11A2 (NM_000617.1,1079-1097).
gttgaagtctgtacaaata

SEQ ID NO: 266371 - DNA, 19 bp, Homo sapiens
  siRNA target sequence for SLC11A2 (NM_000617.1,1115-1133).
ggcctctttcctaaagata

SEQ ID NO: 266372 - DNA, 19 bp, Homo sapiens
  siRNA target sequence for SLC11A2 (NM_000617.1,1140-1158).
cactggctgtggacatcta

SEQ ID NO: 266373 - DNA, 19 bp, Homo sapiens
  siRNA target sequence for SLC11A2 (NM_000617.1,1142-1160).
ctggctgtggacatctaca

SEQ ID NO: 266374 - DNA, 19 bp, Homo sapiens
  siRNA target sequence for SLC11A2 (NM_000617.1,1167-1185).
gtgttgtgctgggatgtta

SEQ ID NO: 266375 - DNA, 19 bp, Homo sapiens
  siRNA target sequence for SLC11A2 (NM_000617.1,1169-1187).
gttgtgctgggatgttact

SEQ ID NO: 266376 - DNA, 19 bp, Homo sapiens
  siRNA target sequence for SLC11A2 (NM_000617.1,1246-1264).
caccatgacaggaacctat

SEQ ID NO: 266377 - DNA, 19 bp, Homo sapiens
  siRNA target sequence for SLC11A2 (NM_000617.1,1286-1304).
ggattcctgaacctaaagt

SEQ ID NO: 266378 - DNA, 19 bp, Homo sapiens
  siRNA target sequence for SLC11A2 (NM_000617.1,1376-1394).
caagatgtagagcatctaa

SEQ ID NO: 266379 - DNA, 19 bp, Homo sapiens
  siRNA target sequence for SLC11A2 (NM_000617.1,1391-1409).
ctaacagggatgaatgact

SEQ ID NO: 266380 - DNA, 19 bp, Homo sapiens
  siRNA target sequence for SLC11A2 (NM_000617.1,1454-1472).
cccatcctcacatttacga

SEQ ID NO: 266381 - DNA, 19 bp, Homo sapiens
  siRNA target sequence for SLC11A2 (NM_000617.1,1470-1488).
cgagcttgcggccagtaat

SEQ ID NO: 266382 - DNA, 19 bp, Homo sapiens
  siRNA target sequence for SLC11A2 (NM_000617.1,1564-1582).
gtactttgtagtggtttat

SEQ ID NO: 266383 - DNA, 19 bp, Homo sapiens
  siRNA target sequence for SLC11A2 (NM_000617.1,1707-1725).
gtgggcatacggtaagcat

SEQ ID NO: 266384 - DNA, 19 bp, Homo sapiens
  siRNA target sequence for SLC11A2 (NM_000617.1,1712-1730).
catacggtaagcatctcta

SEQ ID NO: 266385 - DNA, 19 bp, Homo sapiens
  siRNA target sequence for SLC11A2 (NM_000617.1,1751-1769).
gccacccgtggctacgtta

SEQ ID NO: 266386 - DNA, 19 bp, Homo sapiens
  siRNA target sequence for SLC11A2 (NM_000617.1,1752-1770).
ccacccgtggctacgttaa

SEQ ID NO: 266387 - DNA, 19 bp, Homo sapiens
  siRNA target sequence for SLC11A2 (NM_000617.1,1753-1771).
cacccgtggctacgttaaa

SEQ ID NO: 266388 - DNA, 19 bp, Homo sapiens
  siRNA target sequence for TTYH1 (NM_020659.1,347-365).
gcattggcatcggtttcta

SEQ ID NO: 266389 - DNA, 19 bp, Homo sapiens
  siRNA target sequence for TTYH1 (NM_020659.1,348-366).
cattggcatcggtttctat

SEQ ID NO: 266390 - DNA, 19 bp, Homo sapiens
  siRNA target sequence for TTYH1 (NM_020659.1,632-650).
ccctgcaggtggctgaaaa

SEQ ID NO: 266391 - DNA, 19 bp, Homo sapiens
  siRNA target sequence for TTYH1 (NM_020659.1,633-651).
cctgcaggtggctgaaaat

SEQ ID NO: 266392 - DNA, 19 bp, Homo sapiens
  siRNA target sequence for TTYH1 (NM_020659.1,1369-1387).
cagtggcagtcgtctatct

SEQ ID NO: 266393 - DNA, 19 bp, Homo sapiens
  siRNA target sequence for SLC31A2 (NM_001860.1,92-110).
cagcggtgcttctgtttga

SEQ ID NO: 266394 - DNA, 19 bp, Homo sapiens
  siRNA target sequence for SLC31A2 (NM_001860.1,165-183).
gcttctggctgtactgtat

SEQ ID NO: 266395 - DNA, 19 bp, Homo sapiens
  siRNA target sequence for SLC31A2 (NM_001860.1,400-418).
gccgtaatgtcctacaaca

SEQ ID NO: 266396 - DNA, 19 bp, Homo sapiens
  siRNA target sequence for SLC30A3 (NM_003459.3,413-431).
gtgccgtttgctttgtctt

SEQ ID NO: 266397 - DNA, 19 bp, Homo sapiens
  siRNA target sequence for SLC30A3 (NM_003459.3,1145-1163).
gggcccttacgctcactta

SEQ ID NO: 266398 - DNA, 19 bp, Homo sapiens
  siRNA target sequence for SLC30A3 (NM_003459.3,1149-1167).
ccttacgctcacttaccat

SEQ ID NO: 266399 - DNA, 19 bp, Homo sapiens
  siRNA target sequence for SLC30A3 (NM_003459.3,1240-1258).
ctctactcccggtttggat

SEQ ID NO: 266400 - DNA, 19 bp, Homo sapiens
  siRNA target sequence for SLC30A4 (NM_013309.3,328-346).
gcgtggaagcgcctcaaat

SEQ ID NO: 266401 - DNA, 19 bp, Homo sapiens
  siRNA target sequence for SLC30A4 (NM_013309.3,332-350).
ggaagcgcctcaaatctat

SEQ ID NO: 266402 - DNA, 19 bp, Homo sapiens
  siRNA target sequence for SLC30A4 (NM_013309.3,336-354).
gcgcctcaaatctatgcta

SEQ ID NO: 266403 - DNA, 19 bp, Homo sapiens
  siRNA target sequence for SLC30A4 (NM_013309.3,337-355).
cgcctcaaatctatgctaa

SEQ ID NO: 266404 - DNA, 19 bp, Homo sapiens
  siRNA target sequence for SLC30A4 (NM_013309.3,370-388).
ccgctgtttttaaatgaca

SEQ ID NO: 266405 - DNA, 19 bp, Homo sapiens
  siRNA target sequence for SLC30A4 (NM_013309.3,517-535).
ctccaggccgacgatgatt

SEQ ID NO: 266406 - DNA, 19 bp, Homo sapiens
  siRNA target sequence for SLC30A4 (NM_013309.3,522-540).
ggccgacgatgattcctta

SEQ ID NO: 266407 - DNA, 19 bp, Homo sapiens
  siRNA target sequence for SLC30A4 (NM_013309.3,537-555).
cttactggaccaagactta

SEQ ID NO: 266408 - DNA, 19 bp, Homo sapiens
  siRNA target sequence for SLC30A4 (NM_013309.3,664-682).
gccgttctgtacttgcttt

SEQ ID NO: 266409 - DNA, 19 bp, Homo sapiens
  siRNA target sequence for SLC30A4 (NM_013309.3,732-750).
catgacagatgcacttcat

SEQ ID NO: 266410 - DNA, 19 bp, Homo sapiens
  siRNA target sequence for SLC30A4 (NM_013309.3,737-755).
cagatgcacttcatatgtt

SEQ ID NO: 266411 - DNA, 19 bp, Homo sapiens
  siRNA target sequence for SLC30A4 (NM_013309.3,763-781).
ctaagcgccatcatactca

SEQ ID NO: 266412 - DNA, 19 bp, Homo sapiens
  siRNA target sequence for SLC30A4 (NM_013309.3,791-809).
ctttgtggctatcatcaaa

SEQ ID NO: 266413 - DNA, 19 bp, Homo sapiens
  siRNA target sequence for SLC30A4 (NM_013309.3,824-842).
gattcacctttggatttca

SEQ ID NO: 266414 - DNA, 19 bp, Homo sapiens
  siRNA target sequence for SLC30A4 (NM_013309.3,919-937).
gtgcaaagaactatccata

SEQ ID NO: 266415 - DNA, 19 bp, Homo sapiens
  siRNA target sequence for SLC30A4 (NM_013309.3,926-944).
gaactatccatatgaacta

SEQ ID NO: 266416 - DNA, 19 bp, Homo sapiens
  siRNA target sequence for SLC30A4 (NM_013309.3,929-947).
ctatccatatgaactatga

SEQ ID NO: 266417 - DNA, 19 bp, Homo sapiens
  siRNA target sequence for SLC30A4 (NM_013309.3,980-998).
ctgttggagttgcagttaa

SEQ ID NO: 266418 - DNA, 19 bp, Homo sapiens
  siRNA target sequence for SLC30A4 (NM_013309.3,1050-1068).
ccactccctgccttcaaat

SEQ ID NO: 266419 - DNA, 19 bp, Homo sapiens
  siRNA target sequence for SLC30A4 (NM_013309.3,1164-1182).
gagtgttggtgtgctaata

SEQ ID NO: 266420 - DNA, 19 bp, Homo sapiens
  siRNA target sequence for SLC30A4 (NM_013309.3,1183-1201).
gctgcatacatcatacgat

SEQ ID NO: 266421 - DNA, 19 bp, Homo sapiens
  siRNA target sequence for SLC30A4 (NM_013309.3,1184-1202).
ctgcatacatcatacgatt

SEQ ID NO: 266422 - DNA, 19 bp, Homo sapiens
  siRNA target sequence for SLC30A4 (NM_013309.3,1187-1205).
catacatcatacgattcaa

SEQ ID NO: 266423 - DNA, 19 bp, Homo sapiens
  siRNA target sequence for SLC30A4 (NM_013309.3,1198-1216).
cgattcaagccagaataca

SEQ ID NO: 266424 - DNA, 19 bp, Homo sapiens
  siRNA target sequence for SLC30A4 (NM_013309.3,1222-1240).
gctgaccccatctgtacat

SEQ ID NO: 266425 - DNA, 19 bp, Homo sapiens
  siRNA target sequence for SLC30A4 (NM_013309.3,1227-1245).
ccccatctgtacatacgta

SEQ ID NO: 266426 - DNA, 19 bp, Homo sapiens
  siRNA target sequence for SLC30A4 (NM_013309.3,1262-1280).
cttttacaacatttcgaat

SEQ ID NO: 266427 - DNA, 19 bp, Homo sapiens
  siRNA target sequence for SLC30A4 (NM_013309.3,1281-1299).
catatgggatacagtagtt

SEQ ID NO: 266428 - DNA, 19 bp, Homo sapiens
  siRNA target sequence for SLC30A4 (NM_013309.3,1286-1304).
gggatacagtagttataat

SEQ ID NO: 266429 - DNA, 19 bp, Homo sapiens
  siRNA target sequence for SLC30A4 (NM_013309.3,1313-1331).
gtgtgccaagccatttgaa

SEQ ID NO: 266430 - DNA, 19 bp, Homo sapiens
  siRNA target sequence for SLC30A4 (NM_013309.3,1329-1347).
gaatgtagactatatcaaa

SEQ ID NO: 266431 - DNA, 19 bp, Homo sapiens
  siRNA target sequence for SLC30A4 (NM_013309.3,1407-1425).
cacttcaggaaaatctact

SEQ ID NO: 266432 - DNA, 19 bp, Homo sapiens
  siRNA target sequence for SLC30A4 (NM_013309.3,1421-1439).
ctactgccatagttcacat

SEQ ID NO: 266433 - DNA, 19 bp, Homo sapiens
  siRNA target sequence for SLC30A4 (NM_013309.3,1424-1442).
ctgccatagttcacataca

SEQ ID NO: 266434 - DNA, 19 bp, Homo sapiens
  siRNA target sequence for SLC30A4 (NM_013309.3,1443-1461).
gctaattcctggaagttca

SEQ ID NO: 266435 - DNA, 19 bp, Homo sapiens
  siRNA target sequence for SLC30A4 (NM_013309.3,1474-1492).
gaagtacagtccaaagcaa

SEQ ID NO: 266436 - DNA, 19 bp, Homo sapiens
  siRNA target sequence for SLC30A4 (NM_013309.3,1484-1502).
ccaaagcaaaccatttatt

SEQ ID NO: 266437 - DNA, 19 bp, Homo sapiens
  siRNA target sequence for SLC30A4 (NM_013309.3,1489-1507).
gcaaaccatttattattga

SEQ ID NO: 266438 - DNA, 19 bp, Homo sapiens
  siRNA target sequence for SLC30A4 (NM_013309.3,1516-1534).
ggcatgtatagatgtacta

SEQ ID NO: 266439 - DNA, 19 bp, Homo sapiens
  siRNA target sequence for SLC30A4 (NM_013309.3,1564-1582).
gacagaacttgtgcaaatt

SEQ ID NO: 266440 - DNA, 19 bp, Homo sapiens
  siRNA target sequence for SLC39A2 (NM_014579.1,140-158).
gagcaactactaggaataa

SEQ ID NO: 266441 - DNA, 19 bp, Homo sapiens
  siRNA target sequence for SLC39A2 (NM_014579.1,142-160).
gcaactactaggaataaaa

SEQ ID NO: 266442 - DNA, 19 bp, Homo sapiens
  siRNA target sequence for SLC39A2 (NM_014579.1,212-230).
cccatctgcttcaaatggt

SEQ ID NO: 266443 - DNA, 19 bp, Homo sapiens
  siRNA target sequence for SLC39A2 (NM_014579.1,311-329).
gcagggttcatgcatatga

SEQ ID NO: 266444 - DNA, 19 bp, Homo sapiens
  siRNA target sequence for SLC39A2 (NM_014579.1,772-790).
gcggctagtgcatttaggt

SEQ ID NO: 266445 - DNA, 19 bp, Homo sapiens
  siRNA target sequence for SLC39A2 (NM_014579.1,773-791).
cggctagtgcatttaggta

SEQ ID NO: 266446 - DNA, 19 bp, Homo sapiens
  siRNA target sequence for SLC39A2 (NM_014579.1,805-823).
ggcagtgttctccatacta

SEQ ID NO: 266447 - DNA, 19 bp, Homo sapiens
  siRNA target sequence for SLC39A2 (NM_014579.1,806-824).
gcagtgttctccatactat

SEQ ID NO: 266448 - DNA, 19 bp, Homo sapiens
  siRNA target sequence for SLC39A2 (NM_014579.1,811-829).
gttctccatactattatta

SEQ ID NO: 266449 - DNA, 19 bp, Homo sapiens
  siRNA target sequence for SLC39A2 (NM_014579.1,901-919).
cttagcccaggctgtgtta

SEQ ID NO: 266450 - DNA, 19 bp, Homo sapiens
  siRNA target sequence for SLC39A2 (NM_014579.1,933-951).
ctggtaccttcctgtatgt

SEQ ID NO: 266451 - DNA, 19 bp, Homo sapiens
  siRNA target sequence for SLC39A2 (NM_014579.1,952-970).
caccttcctagaaattctt

SEQ ID NO: 266452 - DNA, 19 bp, Homo sapiens
  siRNA target sequence for RHAG (NM_000324.1,60-78).
cctggaaattgccatgatt

SEQ ID NO: 266453 - DNA, 19 bp, Homo sapiens
  siRNA target sequence for RHAG (NM_000324.1,63-81).
ggaaattgccatgattgtt

SEQ ID NO: 266454 - DNA, 19 bp, Homo sapiens
  siRNA target sequence for RHAG (NM_000324.1,89-107).
gattatttgttgagtatga

SEQ ID NO: 266455 - DNA, 19 bp, Homo sapiens
  siRNA target sequence for RHAG (NM_000324.1,124-142).
ctcgagcagctcaacatca

SEQ ID NO: 266456 - DNA, 19 bp, Homo sapiens
  siRNA target sequence for RHAG (NM_000324.1,149-167).
caacagacatgggcatatt

SEQ ID NO: 266457 - DNA, 19 bp, Homo sapiens
  siRNA target sequence for RHAG (NM_000324.1,182-200).
ctctgttccaagatgtaca

SEQ ID NO: 266458 - DNA, 19 bp, Homo sapiens
  siRNA target sequence for RHAG (NM_000324.1,186-204).
gttccaagatgtacatgtt

SEQ ID NO: 266459 - DNA, 19 bp, Homo sapiens
  siRNA target sequence for RHAG (NM_000324.1,395-413).
ccacagttctgatatcttt

SEQ ID NO: 266460 - DNA, 19 bp, Homo sapiens
  siRNA target sequence for RHAG (NM_000324.1,434-452).
cgagccccacccaaatgct

SEQ ID NO: 266461 - DNA, 19 bp, Homo sapiens
  siRNA target sequence for RHAG (NM_000324.1,440-458).
ccacccaaatgctgatcat

SEQ ID NO: 266462 - DNA, 19 bp, Homo sapiens
  siRNA target sequence for RHAG (NM_000324.1,493-511).
gaatacctggttagtgaaa

SEQ ID NO: 266463 - DNA, 19 bp, Homo sapiens
  siRNA target sequence for RHAG (NM_000324.1,498-516).
cctggttagtgaaatattt

SEQ ID NO: 266464 - DNA, 19 bp, Homo sapiens
  siRNA target sequence for RHAG (NM_000324.1,499-517).
ctggttagtgaaatattta

SEQ ID NO: 266465 - DNA, 19 bp, Homo sapiens
  siRNA target sequence for RHAG (NM_000324.1,578-596).
ctgtagcaggcatcttgta

SEQ ID NO: 266466 - DNA, 19 bp, Homo sapiens
  siRNA target sequence for RHAG (NM_000324.1,628-646).
gaagagtccgcatactact

SEQ ID NO: 266467 - DNA, 19 bp, Homo sapiens
  siRNA target sequence for RHAG (NM_000324.1,638-656).
catactactcagacttgtt

SEQ ID NO: 266468 - DNA, 19 bp, Homo sapiens
  siRNA target sequence for RHAG (NM_000324.1,884-902).
gtgcggatatggcaattca

SEQ ID NO: 266469 - DNA, 19 bp, Homo sapiens
  siRNA target sequence for RHAG (NM_000324.1,894-912).
ggcaattcacccatttggt

SEQ ID NO: 266470 - DNA, 19 bp, Homo sapiens
  siRNA target sequence for RHAG (NM_000324.1,966-984).
cctgactccactttttact

SEQ ID NO: 266471 - DNA, 19 bp, Homo sapiens
  siRNA target sequence for RHAG (NM_000324.1,967-985).
ctgactccactttttacta

SEQ ID NO: 266472 - DNA, 19 bp, Homo sapiens
  siRNA target sequence for RHAG (NM_000324.1,969-987).
gactccactttttactact

SEQ ID NO: 266473 - DNA, 19 bp, Homo sapiens
  siRNA target sequence for RHAG (NM_000324.1,971-989).
ctccactttttactactaa

SEQ ID NO: 266474 - DNA, 19 bp, Homo sapiens
  siRNA target sequence for RHAG (NM_000324.1,974-992).
cactttttactactaaact

SEQ ID NO: 266475 - DNA, 19 bp, Homo sapiens
  siRNA target sequence for RHAG (NM_000324.1,991-1009).
ctgaggatccatgatacat

SEQ ID NO: 266476 - DNA, 19 bp, Homo sapiens
  siRNA target sequence for RHAG (NM_000324.1,993-1011).
gaggatccatgatacatgt

SEQ ID NO: 266477 - DNA, 19 bp, Homo sapiens
  siRNA target sequence for RHAG (NM_000324.1,1207-1225).
cagaactgctatgatgatt

SEQ ID NO: 266478 - DNA, 19 bp, Homo sapiens
  siRNA target sequence for RHAG (NM_000324.1,1215-1233).
ctatgatgattctgtttat

SEQ ID NO: 266479 - DNA, 19 bp, Homo sapiens
  siRNA target sequence for RHBG (NM_020407.1,138-156).
gtccgctacaaccacaaaa

SEQ ID NO: 266480 - DNA, 19 bp, Homo sapiens
  siRNA target sequence for RHBG (NM_020407.1,188-206).
cagtaacgcggacaatgaa

SEQ ID NO: 266481 - DNA, 19 bp, Homo sapiens
  siRNA target sequence for RHBG (NM_020407.1,413-431).
catgatcaatgctgacttt

SEQ ID NO: 266482 - DNA, 19 bp, Homo sapiens
  siRNA target sequence for RHBG (NM_020407.1,672-690).
cagggctccgtctaccatt

SEQ ID NO: 266483 - DNA, 19 bp, Homo sapiens
  siRNA target sequence for RHBG (NM_020407.1,676-694).
gctccgtctaccattcaga

SEQ ID NO: 266484 - DNA, 19 bp, Homo sapiens
  siRNA target sequence for RHBG (NM_020407.1,783-801).
cggacggccctcaacacat

SEQ ID NO: 266485 - DNA, 19 bp, Homo sapiens
  siRNA target sequence for RHBG (NM_020407.1,784-802).
ggacggccctcaacacata

SEQ ID NO: 266486 - DNA, 19 bp, Homo sapiens
  siRNA target sequence for RHBG (NM_020407.1,917-935).
ggtggggacctcaagtgaa

SEQ ID NO: 266487 - DNA, 19 bp, Homo sapiens
  siRNA target sequence for RHBG (NM_020407.1,918-936).
gtggggacctcaagtgaaa

SEQ ID NO: 266488 - DNA, 19 bp, Homo sapiens
  siRNA target sequence for RHBG (NM_020407.1,991-1009).
ccacgctggggtacaagtt

SEQ ID NO: 266489 - DNA, 19 bp, Homo sapiens
  siRNA target sequence for RHBG (NM_020407.1,994-1012).
cgctggggtacaagttctt

SEQ ID NO: 266490 - DNA, 19 bp, Homo sapiens
  siRNA target sequence for RHBG (NM_020407.1,996-1014).
ctggggtacaagttcttca

SEQ ID NO: 266491 - DNA, 19 bp, Homo sapiens
  siRNA target sequence for RHBG (NM_020407.1,1157-1175).
gagtgtgtttccactcata

SEQ ID NO: 266492 - DNA, 19 bp, Homo sapiens
  siRNA target sequence for RHBG (NM_020407.1,1218-1236).
ctcttcgggctgtttgtca

SEQ ID NO: 266493 - DNA, 19 bp, Homo sapiens
  siRNA target sequence for RHBG (NM_020407.1,1351-1369).
ctggcgagcatgaggataa

SEQ ID NO: 266494 - DNA, 19 bp, Homo sapiens
  siRNA target sequence for RHCG (NM_016321.1,345-363).
gggctggttccacttctta

SEQ ID NO: 266495 - DNA, 19 bp, Homo sapiens
  siRNA target sequence for RHCG (NM_016321.1,445-463).
gcagttctgggtaaagtca

SEQ ID NO: 266496 - DNA, 19 bp, Homo sapiens
  siRNA target sequence for RHCG (NM_016321.1,503-521).
ccctcttcgctgtgaatga

SEQ ID NO: 266497 - DNA, 19 bp, Homo sapiens
  siRNA target sequence for RHCG (NM_016321.1,505-523).
ctcttcgctgtgaatgagt

SEQ ID NO: 266498 - DNA, 19 bp, Homo sapiens
  siRNA target sequence for RHCG (NM_016321.1,510-528).
cgctgtgaatgagttcatt

SEQ ID NO: 266499 - DNA, 19 bp, Homo sapiens
  siRNA target sequence for RHCG (NM_016321.1,579-597).
cacatttggcgcctacttt

SEQ ID NO: 266500 - DNA, 19 bp, Homo sapiens
  siRNA target sequence for RHCG (NM_016321.1,642-660).
gagcaaggagagacagaat

SEQ ID NO: 266501 - DNA, 19 bp, Homo sapiens
  siRNA target sequence for RHCG (NM_016321.1,763-781).
caccgagccgccatcaaca

SEQ ID NO: 266502 - DNA, 19 bp, Homo sapiens
  siRNA target sequence for RHCG (NM_016321.1,808-826).
cttacctcggtggcaatat

SEQ ID NO: 266503 - DNA, 19 bp, Homo sapiens
  siRNA target sequence for RHCG (NM_016321.1,905-923).
gtaccgctgctgagatgat

SEQ ID NO: 266504 - DNA, 19 bp, Homo sapiens
  siRNA target sequence for RHCG (NM_016321.1,932-950).
cttacggtgccctcatcat

SEQ ID NO: 266505 - DNA, 19 bp, Homo sapiens
  siRNA target sequence for RHCG (NM_016321.1,1032-1050).
cacatgtggcattaacaat

SEQ ID NO: 266506 - DNA, 19 bp, Homo sapiens
  siRNA target sequence for RHCG (NM_016321.1,1034-1052).
catgtggcattaacaatct

SEQ ID NO: 266507 - DNA, 19 bp, Homo sapiens
  siRNA target sequence for RHCG (NM_016321.1,1107-1125).
cgccagccttgaagtctat

SEQ ID NO: 266508 - DNA, 19 bp, Homo sapiens
  siRNA target sequence for RHCG (NM_016321.1,1138-1156).
cttgtccattcctttgact

SEQ ID NO: 266509 - DNA, 19 bp, Homo sapiens
  siRNA target sequence for RHCG (NM_016321.1,1148-1166).
cctttgactttcaaggttt

SEQ ID NO: 266510 - DNA, 19 bp, Homo sapiens
  siRNA target sequence for RHCG (NM_016321.1,1258-1276).
gtggggctcattttgagat

SEQ ID NO: 266511 - DNA, 19 bp, Homo sapiens
  siRNA target sequence for RHCG (NM_016321.1,1260-1278).
ggggctcattttgagatta

SEQ ID NO: 266512 - DNA, 19 bp, Homo sapiens
  siRNA target sequence for SLC22A1 (NM_003057.2,108-126).
gcccaccgtggatgacatt

SEQ ID NO: 266513 - DNA, 19 bp, Homo sapiens
  siRNA target sequence for SLC22A1 (NM_003057.2,304-322).
gcggaggagctgaactata

SEQ ID NO: 266514 - DNA, 19 bp, Homo sapiens
  siRNA target sequence for SLC22A1 (NM_003057.2,306-324).
ggaggagctgaactataca

SEQ ID NO: 266515 - DNA, 19 bp, Homo sapiens
  siRNA target sequence for SLC22A1 (NM_003057.2,363-381).
ccagtgcaggcgctatgaa

SEQ ID NO: 266516 - DNA, 19 bp, Homo sapiens
  siRNA target sequence for SLC22A1 (NM_003057.2,685-703).
gccttctcgcccaactaca

SEQ ID NO: 266517 - DNA, 19 bp, Homo sapiens
  siRNA target sequence for SLC22A1 (NM_003057.2,768-786).
caccctaatcacagaattt

SEQ ID NO: 266518 - DNA, 19 bp, Homo sapiens
  siRNA target sequence for SLC22A1 (NM_003057.2,790-808).
ggctcgggctccagaagaa

SEQ ID NO: 266519 - DNA, 19 bp, Homo sapiens
  siRNA target sequence for SLC22A1 (NM_003057.2,806-824).
gaacggtggcgatcatgta

SEQ ID NO: 266520 - DNA, 19 bp, Homo sapiens
  siRNA target sequence for SLC22A1 (NM_003057.2,960-978).
ccctcggtggctgttatca

SEQ ID NO: 266521 - DNA, 19 bp, Homo sapiens
  siRNA target sequence for SLC22A1 (NM_003057.2,964-982).
cggtggctgttatcacaaa

SEQ ID NO: 266522 - DNA, 19 bp, Homo sapiens
  siRNA target sequence for SLC22A1 (NM_003057.2,966-984).
gtggctgttatcacaaaaa

SEQ ID NO: 266523 - DNA, 19 bp, Homo sapiens
  siRNA target sequence for SLC22A1 (NM_003057.2,1012-1030).
gaccacatcgctcaaaaga

SEQ ID NO: 266524 - DNA, 19 bp, Homo sapiens
  siRNA target sequence for SLC22A1 (NM_003057.2,1038-1056).
gttgcctcctgctgattta

SEQ ID NO: 266525 - DNA, 19 bp, Homo sapiens
  siRNA target sequence for SLC22A1 (NM_003057.2,1227-1245).
cctctacctggatttcctt

SEQ ID NO: 266526 - DNA, 19 bp, Homo sapiens
  siRNA target sequence for SLC22A1 (NM_003057.2,1351-1369).
gcctgcctcgtcatgattt

SEQ ID NO: 266527 - DNA, 19 bp, Homo sapiens
  siRNA target sequence for SLC22A1 (NM_003057.2,1352-1370).
cctgcctcgtcatgatttt

SEQ ID NO: 266528 - DNA, 19 bp, Homo sapiens
  siRNA target sequence for SLC22A1 (NM_003057.2,1355-1373).
gcctcgtcatgatttttat

SEQ ID NO: 266529 - DNA, 19 bp, Homo sapiens
  siRNA target sequence for SLC22A1 (NM_003057.2,1357-1375).
ctcgtcatgatttttatct

SEQ ID NO: 266530 - DNA, 19 bp, Homo sapiens
  siRNA target sequence for SLC22A1 (NM_003057.2,1378-1396).
cctgacctgcactggttaa

SEQ ID NO: 266531 - DNA, 19 bp, Homo sapiens
  siRNA target sequence for SLC22A1 (NM_003057.2,1379-1397).
ctgacctgcactggttaaa

SEQ ID NO: 266532 - DNA, 19 bp, Homo sapiens
  siRNA target sequence for SLC22A1 (NM_003057.2,1381-1399).
gacctgcactggttaaaca

SEQ ID NO: 266533 - DNA, 19 bp, Homo sapiens
  siRNA target sequence for SLC22A1 (NM_003057.2,1425-1443).
gggaatcaccattgcaata

SEQ ID NO: 266534 - DNA, 19 bp, Homo sapiens
  siRNA target sequence for SLC22A1 (NM_003057.2,1433-1451).
ccattgcaatacaaatgat

SEQ ID NO: 266535 - DNA, 19 bp, Homo sapiens
  siRNA target sequence for SLC22A1 (NM_003057.2,1525-1543).
gacataggtgggataatca

SEQ ID NO: 266536 - DNA, 19 bp, Homo sapiens
  siRNA target sequence for SLC22A1 (NM_003057.2,1536-1554).
gataatcacccccttcata

SEQ ID NO: 266537 - DNA, 19 bp, Homo sapiens
  siRNA target sequence for SLC22A1 (NM_003057.2,1625-1643).
cgggagtgacgctacttct

SEQ ID NO: 266538 - DNA, 19 bp, Homo sapiens
  siRNA target sequence for SLC22A1 (NM_003057.2,1626-1644).
gggagtgacgctacttctt

SEQ ID NO: 266539 - DNA, 19 bp, Homo sapiens
  siRNA target sequence for SLC22A1 (NM_003057.2,1720-1738).
gaaaacacgatttacctta

SEQ ID NO: 266540 - DNA, 19 bp, Homo sapiens
  siRNA target sequence for SLC22A13 (NM_004256.1,45-63).
ggctgaaataggtgacttt

SEQ ID NO: 266541 - DNA, 19 bp, Homo sapiens
  siRNA target sequence for SLC22A13 (NM_004256.1,68-86).
gcttccagatacagctatt

SEQ ID NO: 266542 - DNA, 19 bp, Homo sapiens
  siRNA target sequence for SLC22A13 (NM_004256.1,182-200).
gggtgaagaaccacacttt

SEQ ID NO: 266543 - DNA, 19 bp, Homo sapiens
  siRNA target sequence for SLC22A13 (NM_004256.1,334-352).
gagacgcagccttgtgata

SEQ ID NO: 266544 - DNA, 19 bp, Homo sapiens
  siRNA target sequence for SLC22A13 (NM_004256.1,437-455).
ccacacagtcagtgttcat

SEQ ID NO: 266545 - DNA, 19 bp, Homo sapiens
  siRNA target sequence for SLC22A13 (NM_004256.1,623-641).
ccgtcgctggacttagctt

SEQ ID NO: 266546 - DNA, 19 bp, Homo sapiens
  siRNA target sequence for SLC22A13 (NM_004256.1,634-652).
cttagcttcagcaatgtca

SEQ ID NO: 266547 - DNA, 19 bp, Homo sapiens
  siRNA target sequence for SLC22A13 (NM_004256.1,649-667).
gtcaccctactgacagaat

SEQ ID NO: 266548 - DNA, 19 bp, Homo sapiens
  siRNA target sequence for SLC22A13 (NM_004256.1,800-818).
ctggcttactgctcttctt

SEQ ID NO: 266549 - DNA, 19 bp, Homo sapiens
  siRNA target sequence for SLC22A13 (NM_004256.1,870-888).
gatggacgaggcgatacaa

SEQ ID NO: 266550 - DNA, 19 bp, Homo sapiens
  siRNA target sequence for SLC22A13 (NM_004256.1,910-928).
gtcaataggcggaaactct

SEQ ID NO: 266551 - DNA, 19 bp, Homo sapiens
  siRNA target sequence for SLC22A13 (NM_004256.1,1219-1237).
ggtggcctgatgtgtatca

SEQ ID NO: 266552 - DNA, 19 bp, Homo sapiens
  siRNA target sequence for SLC22A13 (NM_004256.1,1220-1238).
gtggcctgatgtgtatcat

SEQ ID NO: 266553 - DNA, 19 bp, Homo sapiens
  siRNA target sequence for SLC22A13 (NM_004256.1,1580-1598).
cacggtcccccaaatcagt

SEQ ID NO: 266554 - DNA, 19 bp, Homo sapiens
  siRNA target sequence for SLC22A14 (NM_004803.2,295-313).
ctagtagccctcaccttta

SEQ ID NO: 266555 - DNA, 19 bp, Homo sapiens
  siRNA target sequence for SLC22A14 (NM_004803.2,370-388).
cagaagccctattgcaata

SEQ ID NO: 266556 - DNA, 19 bp, Homo sapiens
  siRNA target sequence for SLC22A14 (NM_004803.2,585-603).
gaagcgatcgctgatcaat

SEQ ID NO: 266557 - DNA, 19 bp, Homo sapiens
  siRNA target sequence for SLC22A14 (NM_004803.2,595-613).
ctgatcaatgagtttgact

SEQ ID NO: 266558 - DNA, 19 bp, Homo sapiens
  siRNA target sequence for SLC22A14 (NM_004803.2,674-692).
cgataggctctctcatctt

SEQ ID NO: 266559 - DNA, 19 bp, Homo sapiens
  siRNA target sequence for SLC22A14 (NM_004803.2,1006-1024).
cttgtgatccccttcatct

SEQ ID NO: 266560 - DNA, 19 bp, Homo sapiens
  siRNA target sequence for SLC22A14 (NM_004803.2,1053-1071).
gcggtggctgatgatgaaa

SEQ ID NO: 266561 - DNA, 19 bp, Homo sapiens
  siRNA target sequence for SLC22A14 (NM_004803.2,1108-1126).
gccgcaagtgtgaacaaga

SEQ ID NO: 266562 - DNA, 19 bp, Homo sapiens
  siRNA target sequence for SLC22A14 (NM_004803.2,1109-1127).
ccgcaagtgtgaacaagaa

SEQ ID NO: 266563 - DNA, 19 bp, Homo sapiens
  siRNA target sequence for SLC22A14 (NM_004803.2,1259-1277).
ccgtcagttacacctattt

SEQ ID NO: 266564 - DNA, 19 bp, Homo sapiens
  siRNA target sequence for SLC22A14 (NM_004803.2,1260-1278).
cgtcagttacacctatttt

SEQ ID NO: 266565 - DNA, 19 bp, Homo sapiens
  siRNA target sequence for SLC22A14 (NM_004803.2,1504-1522).
ccggccacagagctgaaat

SEQ ID NO: 266566 - DNA, 19 bp, Homo sapiens
  siRNA target sequence for SLC22A14 (NM_004803.2,1811-1829).
cctcacagataaggaataa

SEQ ID NO: 266567 - DNA, 19 bp, Homo sapiens
  siRNA target sequence for SLC22A2 (NM_003058.2,201-219).
catggaggggagtttcact

SEQ ID NO: 266568 - DNA, 19 bp, Homo sapiens
  siRNA target sequence for SLC22A2 (NM_003058.2,610-628).
ggatgttggacctattcca

SEQ ID NO: 266569 - DNA, 19 bp, Homo sapiens
  siRNA target sequence for SLC22A2 (NM_003058.2,626-644).
ccagtcatcagtgaatgta

SEQ ID NO: 266570 - DNA, 19 bp, Homo sapiens
  siRNA target sequence for SLC22A2 (NM_003058.2,634-652).
cagtgaatgtaggattctt

SEQ ID NO: 266571 - DNA, 19 bp, Homo sapiens
  siRNA target sequence for SLC22A2 (NM_003058.2,711-729).
ctaactacagtcctcataa

SEQ ID NO: 266572 - DNA, 19 bp, Homo sapiens
  siRNA target sequence for SLC22A2 (NM_003058.2,753-771).
gccatttccccaacctata

SEQ ID NO: 266573 - DNA, 19 bp, Homo sapiens
  siRNA target sequence for SLC22A2 (NM_003058.2,872-890).
gagaacagtggggattttt

SEQ ID NO: 266574 - DNA, 19 bp, Homo sapiens
  siRNA target sequence for SLC22A2 (NM_003058.2,893-911).
ccaagttgcctatacagtt

SEQ ID NO: 266575 - DNA, 19 bp, Homo sapiens
  siRNA target sequence for SLC22A2 (NM_003058.2,1060-1078).
ctgaagccatgagaatcat

SEQ ID NO: 266576 - DNA, 19 bp, Homo sapiens
  siRNA target sequence for SLC22A2 (NM_003058.2,1189-1207).
gaactcctcagataaggaa

SEQ ID NO: 266577 - DNA, 19 bp, Homo sapiens
  siRNA target sequence for SLC22A2 (NM_003058.2,1277-1295).
gggccttgcaggtgacaat

SEQ ID NO: 266578 - DNA, 19 bp, Homo sapiens
  siRNA target sequence for SLC22A2 (NM_003058.2,1278-1296).
ggccttgcaggtgacaata

SEQ ID NO: 266579 - DNA, 19 bp, Homo sapiens
  siRNA target sequence for SLC22A2 (NM_003058.2,1279-1297).
gccttgcaggtgacaatat

SEQ ID NO: 266580 - DNA, 19 bp, Homo sapiens
  siRNA target sequence for SLC22A2 (NM_003058.2,1385-1403).
cccttgggctgcatcaaat

SEQ ID NO: 266581 - DNA, 19 bp, Homo sapiens
  siRNA target sequence for SLC22A2 (NM_003058.2,1386-1404).
ccttgggctgcatcaaata

SEQ ID NO: 266582 - DNA, 19 bp, Homo sapiens
  siRNA target sequence for SLC22A2 (NM_003058.2,1387-1405).
cttgggctgcatcaaatat

SEQ ID NO: 266583 - DNA, 19 bp, Homo sapiens
  siRNA target sequence for SLC22A2 (NM_003058.2,1423-1441).
gtctggcctcagtttttat

SEQ ID NO: 266584 - DNA, 19 bp, Homo sapiens
  siRNA target sequence for SLC22A2 (NM_003058.2,1449-1467).
gatctacaatggctaaaaa

SEQ ID NO: 266585 - DNA, 19 bp, Homo sapiens
  siRNA target sequence for SLC22A2 (NM_003058.2,1460-1478).
gctaaaaattattatctca

SEQ ID NO: 266586 - DNA, 19 bp, Homo sapiens
  siRNA target sequence for SLC22A2 (NM_003058.2,1461-1479).
ctaaaaattattatctcat

SEQ ID NO: 266587 - DNA, 19 bp, Homo sapiens
  siRNA target sequence for SLC22A2 (NM_003058.2,1485-1503).
ggaagaatggggatcacaa

SEQ ID NO: 266588 - DNA, 19 bp, Homo sapiens
  siRNA target sequence for SLC22A2 (NM_003058.2,1499-1517).
cacaatggcctatgagata

SEQ ID NO: 266589 - DNA, 19 bp, Homo sapiens
  siRNA target sequence for SLC22A2 (NM_003058.2,1501-1519).
caatggcctatgagatagt

SEQ ID NO: 266590 - DNA, 19 bp, Homo sapiens
  siRNA target sequence for SLC22A2 (NM_003058.2,1547-1565).
cacattcattaggaatctt

SEQ ID NO: 266591 - DNA, 19 bp, Homo sapiens
  siRNA target sequence for SLC22A2 (NM_003058.2,1563-1581).
cttggcgtccacatctgtt

SEQ ID NO: 266592 - DNA, 19 bp, Homo sapiens
  siRNA target sequence for SLC22A2 (NM_003058.2,1593-1611).
gacattggtggcatcatca

SEQ ID NO: 266593 - DNA, 19 bp, Homo sapiens
  siRNA target sequence for SLC22A2 (NM_003058.2,1623-1641).
gtctaccggctcactaaca

SEQ ID NO: 266594 - DNA, 19 bp, Homo sapiens
  siRNA target sequence for SLC22A2 (NM_003058.2,1745-1763).
catcgaggaagccgaaaat

SEQ ID NO: 266595 - DNA, 19 bp, Homo sapiens
  siRNA target sequence for SLC22A2 (NM_003058.2,1751-1769).
ggaagccgaaaatatgcaa

SEQ ID NO: 266596 - DNA, 19 bp, Homo sapiens
  siRNA target sequence for SLC22A2 (NM_003058.2,1752-1770).
gaagccgaaaatatgcaaa

SEQ ID NO: 266597 - DNA, 19 bp, Homo sapiens
  siRNA target sequence for SLC22A3 (NM_021977.2,565-583).
ggcaggatcgtcatttact

SEQ ID NO: 266598 - DNA, 19 bp, Homo sapiens
  siRNA target sequence for SLC22A3 (NM_021977.2,566-584).
gcaggatcgtcatttactt

SEQ ID NO: 266599 - DNA, 19 bp, Homo sapiens
  siRNA target sequence for SLC22A3 (NM_021977.2,711-729).
gattgtgacagaaatagta

SEQ ID NO: 266600 - DNA, 19 bp, Homo sapiens
  siRNA target sequence for SLC22A3 (NM_021977.2,755-773).
gaatcgtgattcaaatgtt

SEQ ID NO: 266601 - DNA, 19 bp, Homo sapiens
  siRNA target sequence for SLC22A3 (NM_021977.2,779-797).
cccttggaatcataattct

SEQ ID NO: 266602 - DNA, 19 bp, Homo sapiens
  siRNA target sequence for SLC22A3 (NM_021977.2,800-818).
ctggaattgcctacttcat

SEQ ID NO: 266603 - DNA, 19 bp, Homo sapiens
  siRNA target sequence for SLC22A3 (NM_021977.2,851-869).
cgctgcccagctttctctt

SEQ ID NO: 266604 - DNA, 19 bp, Homo sapiens
  siRNA target sequence for SLC22A3 (NM_021977.2,909-927).
gctgattactcggaagaaa

SEQ ID NO: 266605 - DNA, 19 bp, Homo sapiens
  siRNA target sequence for SLC22A3 (NM_021977.2,962-980).
ctaagtgcaatgggaaata

SEQ ID NO: 266606 - DNA, 19 bp, Homo sapiens
  siRNA target sequence for SLC22A3 (NM_021977.2,973-991).
gggaaatacctctcatcaa

SEQ ID NO: 266607 - DNA, 19 bp, Homo sapiens
  siRNA target sequence for SLC22A3 (NM_021977.2,974-992).
ggaaatacctctcatcaaa

SEQ ID NO: 266608 - DNA, 19 bp, Homo sapiens
  siRNA target sequence for SLC22A3 (NM_021977.2,998-1016).
cagagatcactgttacaga

SEQ ID NO: 266609 - DNA, 19 bp, Homo sapiens
  siRNA target sequence for SLC22A3 (NM_021977.2,1018-1036).
gaggaagttagtaatccat

SEQ ID NO: 266610 - DNA, 19 bp, Homo sapiens
  siRNA target sequence for SLC22A3 (NM_021977.2,1028-1046).
gtaatccatcctttttaga

SEQ ID NO: 266611 - DNA, 19 bp, Homo sapiens
  siRNA target sequence for SLC22A3 (NM_021977.2,1068-1086).
gaggaaatgcacacttatt

SEQ ID NO: 266612 - DNA, 19 bp, Homo sapiens
  siRNA target sequence for SLC22A3 (NM_021977.2,1076-1094).
gcacacttattcttatgtt

SEQ ID NO: 266613 - DNA, 19 bp, Homo sapiens
  siRNA target sequence for SLC22A3 (NM_021977.2,1077-1095).
cacacttattcttatgttt

SEQ ID NO: 266614 - DNA, 19 bp, Homo sapiens
  siRNA target sequence for SLC22A3 (NM_021977.2,1106-1124).
caagcgcagtggtgtatca

SEQ ID NO: 266615 - DNA, 19 bp, Homo sapiens
  siRNA target sequence for SLC22A3 (NM_021977.2,1132-1150).
gtcatgcgcctgggaatta

SEQ ID NO: 266616 - DNA, 19 bp, Homo sapiens
  siRNA target sequence for SLC22A3 (NM_021977.2,1134-1152).
catgcgcctgggaattata

SEQ ID NO: 266617 - DNA, 19 bp, Homo sapiens
  siRNA target sequence for SLC22A3 (NM_021977.2,1154-1172).
ggggcaacctctatataga

SEQ ID NO: 266618 - DNA, 19 bp, Homo sapiens
  siRNA target sequence for SLC22A3 (NM_021977.2,1156-1174).
ggcaacctctatatagact

SEQ ID NO: 266619 - DNA, 19 bp, Homo sapiens
  siRNA target sequence for SLC22A3 (NM_021977.2,1157-1175).
gcaacctctatatagactt

SEQ ID NO: 266620 - DNA, 19 bp, Homo sapiens
  siRNA target sequence for SLC22A3 (NM_021977.2,1162-1180).
ctctatatagactttttca

SEQ ID NO: 266621 - DNA, 19 bp, Homo sapiens
  siRNA target sequence for SLC22A3 (NM_021977.2,1207-1225).
gctctcttgatcttactaa

SEQ ID NO: 266622 - DNA, 19 bp, Homo sapiens
  siRNA target sequence for SLC22A3 (NM_021977.2,1251-1269).
cccctttgcggcaagcaat

SEQ ID NO: 266623 - DNA, 19 bp, Homo sapiens
  siRNA target sequence for SLC22A3 (NM_021977.2,1252-1270).
ccctttgcggcaagcaata

SEQ ID NO: 266624 - DNA, 19 bp, Homo sapiens
  siRNA target sequence for SLC22A3 (NM_021977.2,1253-1271).
cctttgcggcaagcaatat

SEQ ID NO: 266625 - DNA, 19 bp, Homo sapiens
  siRNA target sequence for SLC22A3 (NM_021977.2,1290-1308).
ccttgtcactgcgttctta

SEQ ID NO: 266626 - DNA, 19 bp, Homo sapiens
  siRNA target sequence for SLC22A3 (NM_021977.2,1352-1370).
gaagactagggataaccat

SEQ ID NO: 266627 - DNA, 19 bp, Homo sapiens
  siRNA target sequence for SLC22A3 (NM_021977.2,1402-1420).
gaattgtacccaacaacat

SEQ ID NO: 266628 - DNA, 19 bp, Homo sapiens
  siRNA target sequence for SLC22A3 (NM_021977.2,1407-1425).
gtacccaacaacattacga

SEQ ID NO: 266629 - DNA, 19 bp, Homo sapiens
  siRNA target sequence for SLC22A3 (NM_021977.2,1412-1430).
caacaacattacgaaattt

SEQ ID NO: 266630 - DNA, 19 bp, Homo sapiens
  siRNA target sequence for BA108L7.2 (NM_030971.2,86-104).
gtgaattgcctttagacat

SEQ ID NO: 266631 - DNA, 19 bp, Homo sapiens
  siRNA target sequence for BA108L7.2 (NM_030971.2,118-136).
cctcgctgggaccaaagta

SEQ ID NO: 266632 - DNA, 19 bp, Homo sapiens
  siRNA target sequence for BA108L7.2 (NM_030971.2,121-139).
cgctgggaccaaagtactt

SEQ ID NO: 266633 - DNA, 19 bp, Homo sapiens
  siRNA target sequence for BA108L7.2 (NM_030971.2,122-140).
gctgggaccaaagtacttt

SEQ ID NO: 266634 - DNA, 19 bp, Homo sapiens
  siRNA target sequence for BA108L7.2 (NM_030971.2,154-172).
cggcactttttcactgtta

SEQ ID NO: 266635 - DNA, 19 bp, Homo sapiens
  siRNA target sequence for BA108L7.2 (NM_030971.2,287-305).
gggccaagtatgtgtatga

SEQ ID NO: 266636 - DNA, 19 bp, Homo sapiens
  siRNA target sequence for BA108L7.2 (NM_030971.2,389-407).
ctggctgcatgctcacatt

SEQ ID NO: 266637 - DNA, 19 bp, Homo sapiens
  siRNA target sequence for BA108L7.2 (NM_030971.2,453-471).
gtccttcaatgccattgtt

SEQ ID NO: 266638 - DNA, 19 bp, Homo sapiens
  siRNA target sequence for BA108L7.2 (NM_030971.2,597-615).
ccccttggtcggcagattt

SEQ ID NO: 266639 - DNA, 19 bp, Homo sapiens
  siRNA target sequence for BA108L7.2 (NM_030971.2,599-617).
ccttggtcggcagatttgt

SEQ ID NO: 266640 - DNA, 19 bp, Homo sapiens
  siRNA target sequence for BA108L7.2 (NM_030971.2,945-963).
gaagagctccatacacata

SEQ ID NO: 266641 - DNA, 19 bp, Homo sapiens
  siRNA target sequence for BA108L7.2 (NM_030971.2,950-968).
gctccatacacataagcaa

SEQ ID NO: 266642 - DNA, 19 bp, Homo sapiens
  siRNA target sequence for BA108L7.2 (NM_030971.2,1013-1031).
gcgttgaagtggtctacta

SEQ ID NO: 266643 - DNA, 19 bp, Homo sapiens
  siRNA target sequence for BA108L7.2 (NM_030971.2,1015-1033).
gttgaagtggtctactaca

SEQ ID NO: 266644 - DNA, 19 bp, Homo sapiens
  siRNA target sequence for BA108L7.2 (NM_030971.2,1018-1036).
gaagtggtctactacaaca

SEQ ID NO: 266645 - DNA, 19 bp, Homo sapiens
  siRNA target sequence for DKFZP434K0427 (NM_032148.2,470-488).
gactatgccaattataatt

SEQ ID NO: 266646 - DNA, 19 bp, Homo sapiens
  siRNA target sequence for DKFZP434K0427 (NM_032148.2,578-596).
gtgaccccaaaattaccaa

SEQ ID NO: 266647 - DNA, 19 bp, Homo sapiens
  siRNA target sequence for DKFZP434K0427 (NM_032148.2,609-627).
gcatcatggcattgcaaat

SEQ ID NO: 266648 - DNA, 19 bp, Homo sapiens
  siRNA target sequence for DKFZP434K0427 (NM_032148.2,610-628).
catcatggcattgcaaata

SEQ ID NO: 266649 - DNA, 19 bp, Homo sapiens
  siRNA target sequence for DKFZP434K0427 (NM_032148.2,613-631).
catggcattgcaaatactt

SEQ ID NO: 266650 - DNA, 19 bp, Homo sapiens
  siRNA target sequence for DKFZP434K0427 (NM_032148.2,669-687).
ctggcatggtactggatat

SEQ ID NO: 266651 - DNA, 19 bp, Homo sapiens
  siRNA target sequence for DKFZP434K0427 (NM_032148.2,673-691).
catggtactggatatagta

SEQ ID NO: 266652 - DNA, 19 bp, Homo sapiens
  siRNA target sequence for DKFZP434K0427 (NM_032148.2,699-717).
gggaggtgttcagaaaagt

SEQ ID NO: 266653 - DNA, 19 bp, Homo sapiens
  siRNA target sequence for DKFZP434K0427 (NM_032148.2,701-719).
gaggtgttcagaaaagtta

SEQ ID NO: 266654 - DNA, 19 bp, Homo sapiens
  siRNA target sequence for DKFZP434K0427 (NM_032148.2,821-839).
gattcacccattgaaaagt

SEQ ID NO: 266655 - DNA, 19 bp, Homo sapiens
  siRNA target sequence for DKFZP434K0427 (NM_032148.2,882-900).
caacagtagtgggttttct

SEQ ID NO: 266656 - DNA, 19 bp, Homo sapiens
  siRNA target sequence for DKFZP434K0427 (NM_032148.2,903-921).
cagctgtggcagcaattat

SEQ ID NO: 266657 - DNA, 19 bp, Homo sapiens
  siRNA target sequence for DKFZP434K0427 (NM_032148.2,905-923).
gctgtggcagcaattatat

SEQ ID NO: 266658 - DNA, 19 bp, Homo sapiens
  siRNA target sequence for DKFZP434K0427 (NM_032148.2,952-970).
ccttgatcattccatactt

SEQ ID NO: 266659 - DNA, 19 bp, Homo sapiens
  siRNA target sequence for DKFZP434K0427 (NM_032148.2,1035-1053).
gggttatcgttggttcaaa

SEQ ID NO: 266660 - DNA, 19 bp, Homo sapiens
  siRNA target sequence for DKFZP434K0427 (NM_032148.2,1037-1055).
gttatcgttggttcaaaga

SEQ ID NO: 266661 - DNA, 19 bp, Homo sapiens
  siRNA target sequence for DKFZP434K0427 (NM_032148.2,1054-1072).
gaagactggtataaatcct

SEQ ID NO: 266662 - DNA, 19 bp, Homo sapiens
  siRNA target sequence for DKFZP434K0427 (NM_032148.2,1086-1104).
cacccattgctgctagttt

SEQ ID NO: 266663 - DNA, 19 bp, Homo sapiens
  siRNA target sequence for DKFZP434K0427 (NM_032148.2,1098-1116).
ctagttttggcgaccttat

SEQ ID NO: 266664 - DNA, 19 bp, Homo sapiens
  siRNA target sequence for DKFZP434K0427 (NM_032148.2,1124-1142).
gccatattggcttggataa

SEQ ID NO: 266665 - DNA, 19 bp, Homo sapiens
  siRNA target sequence for DKFZP434K0427 (NM_032148.2,1161-1179).
gtcttgagacctattacta

SEQ ID NO: 266666 - DNA, 19 bp, Homo sapiens
  siRNA target sequence for DKFZP434K0427 (NM_032148.2,1166-1184).
gagacctattactacattt

SEQ ID NO: 266667 - DNA, 19 bp, Homo sapiens
  siRNA target sequence for DKFZP434K0427 (NM_032148.2,1185-1203).
ctccattagttggtgtatt

SEQ ID NO: 266668 - DNA, 19 bp, Homo sapiens
  siRNA target sequence for DKFZP434K0427 (NM_032148.2,1211-1229).
gctctaacccctatttgga

SEQ ID NO: 266669 - DNA, 19 bp, Homo sapiens
  siRNA target sequence for DKFZP434K0427 (NM_032148.2,1212-1230).
ctctaacccctatttggat

SEQ ID NO: 266670 - DNA, 19 bp, Homo sapiens
  siRNA target sequence for DKFZP434K0427 (NM_032148.2,1214-1232).
ctaacccctatttggatta

SEQ ID NO: 266671 - DNA, 19 bp, Homo sapiens
  siRNA target sequence for DKFZP434K0427 (NM_032148.2,1279-1297).
ctgggagcctgtcataaca

SEQ ID NO: 266672 - DNA, 19 bp, Homo sapiens
  siRNA target sequence for DKFZP434K0427 (NM_032148.2,1289-1307).
gtcataacagctatggtta

SEQ ID NO: 266673 - DNA, 19 bp, Homo sapiens
  siRNA target sequence for DKFZP434K0427 (NM_032148.2,1373-1391).
gtttacacgccagttatta

SEQ ID NO: 266674 - DNA, 19 bp, Homo sapiens
  siRNA target sequence for DKFZP434K0427 (NM_032148.2,1481-1499).
gaacccaaaggttgttact

SEQ ID NO: 266675 - DNA, 19 bp, Homo sapiens
  siRNA target sequence for DKFZP434K0427 (NM_032148.2,1516-1534).
ctttggtccaggagtaaat

SEQ ID NO: 266676 - DNA, 19 bp, Homo sapiens
  siRNA target sequence for DKFZP434K0427 (NM_032148.2,1545-1563).
ctcaagttctactgctttt

SEQ ID NO: 266677 - DNA, 19 bp, Homo sapiens
  siRNA target sequence for DKFZP434K0427 (NM_032148.2,1589-1607).
ctctacactattcatttga

SEQ ID NO: 266678 - DNA, 19 bp, Homo sapiens
  siRNA target sequence for DKFZP434K0427 (NM_032148.2,1606-1624).
gatgaaaagtggtcatact

SEQ ID NO: 266679 - DNA, 19 bp, Homo sapiens
  siRNA target sequence for DKFZP434K0427 (NM_032148.2,1616-1634).
ggtcatacttctttaacta

SEQ ID NO: 266680 - DNA, 19 bp, Homo sapiens
  siRNA target sequence for DKFZP434K0427 (NM_032148.2,1617-1635).
gtcatacttctttaactat

SEQ ID NO: 266681 - DNA, 19 bp, Homo sapiens
  siRNA target sequence for DKFZP434K0427 (NM_032148.2,1632-1650).
ctataatcttcatagtagt

SEQ ID NO: 266682 - DNA, 19 bp, Homo sapiens
  siRNA target sequence for DKFZP434K0427 (NM_032148.2,1662-1680).
gcgctgtgttacaggtatt

SEQ ID NO: 266683 - DNA, 19 bp, Homo sapiens
  siRNA target sequence for DKFZP434K0427 (NM_032148.2,1663-1681).
cgctgtgttacaggtattt

SEQ ID NO: 266684 - DNA, 19 bp, Homo sapiens
  siRNA target sequence for DKFZP434K0427 (NM_032148.2,1730-1748).
ggaaaggacccggatagtt

SEQ ID NO: 266685 - DNA, 19 bp, Homo sapiens
  siRNA target sequence for DKFZP434K0427 (NM_032148.2,1731-1749).
gaaaggacccggatagttt

SEQ ID NO: 266686 - DNA, 19 bp, Homo sapiens
  siRNA target sequence for DKFZP434K0427 (NM_032148.2,1793-1811).
gctctgttagccttaagtt

SEQ ID NO: 266687 - DNA, 19 bp, Homo sapiens
  siRNA target sequence for DKFZP434K0427 (NM_032148.2,1798-1816).
gttagccttaagttttcat

SEQ ID NO: 266688 - DNA, 19 bp, Homo sapiens
  siRNA target sequence for DKFZp547M236 (NM_018713.1,633-651).
cgtgtaactggcagtgtta

SEQ ID NO: 266689 - DNA, 19 bp, Homo sapiens
  siRNA target sequence for DKFZp547M236 (NM_018713.1,699-717).
ctgccttcccgcttatcaa

SEQ ID NO: 266690 - DNA, 19 bp, Homo sapiens
  siRNA target sequence for DKFZp547M236 (NM_018713.1,726-744).
ctgccattctgctacagat

SEQ ID NO: 266691 - DNA, 19 bp, Homo sapiens
  siRNA target sequence for DKFZp547M236 (NM_018713.1,801-819).
gaattagcagtgtacatga

SEQ ID NO: 266692 - DNA, 19 bp, Homo sapiens
  siRNA target sequence for DKFZp547M236 (NM_018713.1,857-875).
gccaccctgcacatcaagt

SEQ ID NO: 266693 - DNA, 19 bp, Homo sapiens
  siRNA target sequence for DKFZp547M236 (NM_018713.1,859-877).
caccctgcacatcaagtat

SEQ ID NO: 266694 - DNA, 19 bp, Homo sapiens
  siRNA target sequence for DKFZp547M236 (NM_018713.1,906-924).
gcacaaaaattcgagaaat

SEQ ID NO: 266695 - DNA, 19 bp, Homo sapiens
  siRNA target sequence for DKFZp547M236 (NM_018713.1,935-953).
gcgggaatccacaatgtga

SEQ ID NO: 266696 - DNA, 19 bp, Homo sapiens
  siRNA target sequence for DKFZp547M236 (NM_018713.1,952-970).
gaccatccagtttgaaaat

SEQ ID NO: 266697 - DNA, 19 bp, Homo sapiens
  siRNA target sequence for DKFZp547M236 (NM_018713.1,1167-1185).
caagagaagtggctattga

SEQ ID NO: 266698 - DNA, 19 bp, Homo sapiens
  siRNA target sequence for DKFZp547M236 (NM_018713.1,1207-1225).
gagtgaccacggacaaagt

SEQ ID NO: 266699 - DNA, 19 bp, Homo sapiens
  siRNA target sequence for DKFZp547M236 (NM_018713.1,1214-1232).
cacggacaaagtcttaaca

SEQ ID NO: 266700 - DNA, 19 bp, Homo sapiens
  siRNA target sequence for DKFZp547M236 (NM_018713.1,1216-1234).
cggacaaagtcttaacaaa

SEQ ID NO: 266701 - DNA, 19 bp, Homo sapiens
  siRNA target sequence for DKFZp547M236 (NM_018713.1,1217-1235).
ggacaaagtcttaacaaaa

SEQ ID NO: 266702 - DNA, 19 bp, Homo sapiens
  siRNA target sequence for DKFZp547M236 (NM_018713.1,1236-1254).
ctcaggaggaccaatgtta

SEQ ID NO: 266703 - DNA, 19 bp, Homo sapiens
  siRNA target sequence for DKFZp547M236 (NM_018713.1,1241-1259).
gaggaccaatgttatgtca

SEQ ID NO: 266704 - DNA, 19 bp, Homo sapiens
  siRNA target sequence for SFXN1 (NM_022754.4,117-135).
ggatcaaagcactttcatt

SEQ ID NO: 266705 - DNA, 19 bp, Homo sapiens
  siRNA target sequence for SFXN1 (NM_022754.4,132-150).
cattggacgagccaatcat

SEQ ID NO: 266706 - DNA, 19 bp, Homo sapiens
  siRNA target sequence for SFXN1 (NM_022754.4,137-155).
gacgagccaatcatttctt

SEQ ID NO: 266707 - DNA, 19 bp, Homo sapiens
  siRNA target sequence for SFXN1 (NM_022754.4,139-157).
cgagccaatcatttcttca

SEQ ID NO: 266708 - DNA, 19 bp, Homo sapiens
  siRNA target sequence for SFXN1 (NM_022754.4,166-184).
gaccccaggaacattctgt

SEQ ID NO: 266709 - DNA, 19 bp, Homo sapiens
  siRNA target sequence for SFXN1 (NM_022754.4,168-186).
ccccaggaacattctgtta

SEQ ID NO: 266710 - DNA, 19 bp, Homo sapiens
  siRNA target sequence for SFXN1 (NM_022754.4,169-187).
cccaggaacattctgttaa

SEQ ID NO: 266711 - DNA, 19 bp, Homo sapiens
  siRNA target sequence for SFXN1 (NM_022754.4,173-191).
ggaacattctgttaaccaa

SEQ ID NO: 266712 - DNA, 19 bp, Homo sapiens
  siRNA target sequence for SFXN1 (NM_022754.4,199-217).
ctcgagagtgcgagaaaaa

SEQ ID NO: 266713 - DNA, 19 bp, Homo sapiens
  siRNA target sequence for SFXN1 (NM_022754.4,201-219).
cgagagtgcgagaaaaata

SEQ ID NO: 266714 - DNA, 19 bp, Homo sapiens
  siRNA target sequence for SFXN1 (NM_022754.4,204-222).
gagtgcgagaaaaatagta

SEQ ID NO: 266715 - DNA, 19 bp, Homo sapiens
  siRNA target sequence for SFXN1 (NM_022754.4,206-224).
gtgcgagaaaaatagtaca

SEQ ID NO: 266716 - DNA, 19 bp, Homo sapiens
  siRNA target sequence for SFXN1 (NM_022754.4,209-227).
cgagaaaaatagtacatga

SEQ ID NO: 266717 - DNA, 19 bp, Homo sapiens
  siRNA target sequence for SFXN1 (NM_022754.4,278-296).
gagcaaagtacatctatga

SEQ ID NO: 266718 - DNA, 19 bp, Homo sapiens
  siRNA target sequence for SFXN1 (NM_022754.4,374-392).
ccatcacaggttgtatgat

SEQ ID NO: 266719 - DNA, 19 bp, Homo sapiens
  siRNA target sequence for SFXN1 (NM_022754.4,382-400).
ggttgtatgatgacgtttt

SEQ ID NO: 266720 - DNA, 19 bp, Homo sapiens
  siRNA target sequence for SFXN1 (NM_022754.4,486-504).
cgcacccctcactgtcaat

SEQ ID NO: 266721 - DNA, 19 bp, Homo sapiens
  siRNA target sequence for SFXN1 (NM_022754.4,507-525).
gttgggaacagcttacgtt

SEQ ID NO: 266722 - DNA, 19 bp, Homo sapiens
  siRNA target sequence for SFXN1 (NM_022754.4,619-637).
gccgtagctgctgctaatt

SEQ ID NO: 266723 - DNA, 19 bp, Homo sapiens
  siRNA target sequence for SFXN1 (NM_022754.4,625-643).
gctgctgctaattgcatta

SEQ ID NO: 266724 - DNA, 19 bp, Homo sapiens
  siRNA target sequence for SFXN1 (NM_022754.4,626-644).
ctgctgctaattgcattaa

SEQ ID NO: 266725 - DNA, 19 bp, Homo sapiens
  siRNA target sequence for SFXN1 (NM_022754.4,629-647).
ctgctaattgcattaatat

SEQ ID NO: 266726 - DNA, 19 bp, Homo sapiens
  siRNA target sequence for SFXN1 (NM_022754.4,723-741).
ggcgaacgctgcgaaacaa

SEQ ID NO: 266727 - DNA, 19 bp, Homo sapiens
  siRNA target sequence for SFXN1 (NM_022754.4,855-873).
gatgagtgcacccattcaa

SEQ ID NO: 266728 - DNA, 19 bp, Homo sapiens
  siRNA target sequence for SFXN1 (NM_022754.4,968-986).
ccgagttgcaagctaagat

SEQ ID NO: 266729 - DNA, 19 bp, Homo sapiens
  siRNA target sequence for SFXN1 (NM_022754.4,1008-1026).
gcgacgcgtgtacttcaat

SEQ ID NO: 266730 - DNA, 19 bp, Homo sapiens
  siRNA target sequence for SFXN1 (NM_022754.4,1009-1027).
cgacgcgtgtacttcaata

SEQ ID NO: 266731 - DNA, 19 bp, Homo sapiens
  siRNA target sequence for SFXN2 (NM_178858.3,174-192).
ctgacctgtctggctttaa

SEQ ID NO: 266732 - DNA, 19 bp, Homo sapiens
  siRNA target sequence for SFXN2 (NM_178858.3,234-252).
gagtgaagcacttcctaaa

SEQ ID NO: 266733 - DNA, 19 bp, Homo sapiens
  siRNA target sequence for SFXN2 (NM_178858.3,236-254).
gtgaagcacttcctaaaca

SEQ ID NO: 266734 - DNA, 19 bp, Homo sapiens
  siRNA target sequence for SFXN2 (NM_178858.3,265-283).
ccgcactgtctttgtatct

SEQ ID NO: 266735 - DNA, 19 bp, Homo sapiens
  siRNA target sequence for SFXN2 (NM_178858.3,455-473).
cctggcggcatgatcatca

SEQ ID NO: 266736 - DNA, 19 bp, Homo sapiens
  siRNA target sequence for SFXN2 (NM_178858.3,653-671).
ggcatgaacatgttgacaa

SEQ ID NO: 266737 - DNA, 19 bp, Homo sapiens
  siRNA target sequence for SFXN2 (NM_178858.3,722-740).
gcggctaactgtgtcaata

SEQ ID NO: 266738 - DNA, 19 bp, Homo sapiens
  siRNA target sequence for SFXN2 (NM_178858.3,723-741).
cggctaactgtgtcaatat

SEQ ID NO: 266739 - DNA, 19 bp, Homo sapiens
  siRNA target sequence for SFXN2 (NM_178858.3,841-859).
cacccaagtagttatttct

SEQ ID NO: 266740 - DNA, 19 bp, Homo sapiens
  siRNA target sequence for SFXN2 (NM_178858.3,978-996).
gcgggtgcttcctcatctt

SEQ ID NO: 266741 - DNA, 19 bp, Homo sapiens
  siRNA target sequence for SFXN2 (NM_178858.3,1035-1053).
gtgaattgccagtttccta

SEQ ID NO: 266742 - DNA, 19 bp, Homo sapiens
  siRNA target sequence for SFXN2 (NM_178858.3,1062-1080).
cgaagctccaagacactat

SEQ ID NO: 266743 - DNA, 19 bp, Homo sapiens
  siRNA target sequence for SFXN2 (NM_178858.3,1075-1093).
cactatcaaggccaagtat

SEQ ID NO: 266744 - DNA, 19 bp, Homo sapiens
  siRNA target sequence for SFXN4 (NM_178867.2,292-310).
gggatcaagtccgtgattt

SEQ ID NO: 266745 - DNA, 19 bp, Homo sapiens
  siRNA target sequence for SFXN4 (NM_178867.2,293-311).
ggatcaagtccgtgatttt

SEQ ID NO: 266746 - DNA, 19 bp, Homo sapiens
  siRNA target sequence for SFXN4 (NM_178867.2,294-312).
gatcaagtccgtgatttta

SEQ ID NO: 266747 - DNA, 19 bp, Homo sapiens
  siRNA target sequence for SFXN4 (NM_178867.2,297-315).
caagtccgtgattttacct

SEQ ID NO: 266748 - DNA, 19 bp, Homo sapiens
  siRNA target sequence for SFXN4 (NM_178867.2,384-402).
gccactagaaagatcatta

SEQ ID NO: 266749 - DNA, 19 bp, Homo sapiens
  siRNA target sequence for SFXN4 (NM_178867.2,386-404).
cactagaaagatcattact

SEQ ID NO: 266750 - DNA, 19 bp, Homo sapiens
  siRNA target sequence for SFXN4 (NM_178867.2,411-429).
gggagccgttgcttcttca

SEQ ID NO: 266751 - DNA, 19 bp, Homo sapiens
  siRNA target sequence for SFXN4 (NM_178867.2,415-433).
gccgttgcttcttcaactt

SEQ ID NO: 266752 - DNA, 19 bp, Homo sapiens
  siRNA target sequence for SFXN4 (NM_178867.2,416-434).
ccgttgcttcttcaacttt

SEQ ID NO: 266753 - DNA, 19 bp, Homo sapiens
  siRNA target sequence for SFXN4 (NM_178867.2,453-471).
gtttgtccagatgaagtat

SEQ ID NO: 266754 - DNA, 19 bp, Homo sapiens
  siRNA target sequence for SFXN4 (NM_178867.2,474-492).
cctgactggcccttggatt

SEQ ID NO: 266755 - DNA, 19 bp, Homo sapiens
  siRNA target sequence for SFXN4 (NM_178867.2,475-493).
ctgactggcccttggatta

SEQ ID NO: 266756 - DNA, 19 bp, Homo sapiens
  siRNA target sequence for SFXN4 (NM_178867.2,477-495).
gactggcccttggattaaa

SEQ ID NO: 266757 - DNA, 19 bp, Homo sapiens
  siRNA target sequence for SFXN4 (NM_178867.2,543-561).
ctacatgtcccgaagtctt

SEQ ID NO: 266758 - DNA, 19 bp, Homo sapiens
  siRNA target sequence for SFXN4 (NM_178867.2,546-564).
catgtcccgaagtcttgaa

SEQ ID NO: 266759 - DNA, 19 bp, Homo sapiens
  siRNA target sequence for SFXN4 (NM_178867.2,606-624).
cctgggtcattccagaatt

SEQ ID NO: 266760 - DNA, 19 bp, Homo sapiens
  siRNA target sequence for SFXN4 (NM_178867.2,650-668).
cgctagcatccagaatagt

SEQ ID NO: 266761 - DNA, 19 bp, Homo sapiens
  siRNA target sequence for SFXN4 (NM_178867.2,686-704).
ctctgattcctgaagtctt

SEQ ID NO: 266762 - DNA, 19 bp, Homo sapiens
  siRNA target sequence for SFXN5 (NM_144579.1,195-213).
cgatgcacctcctttccaa

SEQ ID NO: 266763 - DNA, 19 bp, Homo sapiens
  siRNA target sequence for SFXN5 (NM_144579.1,231-249).
ccagcagacgtccttctat

SEQ ID NO: 266764 - DNA, 19 bp, Homo sapiens
  siRNA target sequence for SFXN5 (NM_144579.1,260-278).
ggcacttcttggatatcat

SEQ ID NO: 266765 - DNA, 19 bp, Homo sapiens
  siRNA target sequence for SFXN5 (NM_144579.1,279-297).
cgaccctcgcacactcttt

SEQ ID NO: 266766 - DNA, 19 bp, Homo sapiens
  siRNA target sequence for SFXN5 (NM_144579.1,384-402).
gctctggagtgcacagaaa

SEQ ID NO: 266767 - DNA, 19 bp, Homo sapiens
  siRNA target sequence for SFXN5 (NM_144579.1,405-423).
caagcaggctattctacat

SEQ ID NO: 266768 - DNA, 19 bp, Homo sapiens
  siRNA target sequence for SFXN5 (NM_144579.1,421-439).
catccggacaccaatgaga

SEQ ID NO: 266769 - DNA, 19 bp, Homo sapiens
  siRNA target sequence for SFXN5 (NM_144579.1,441-459).
gatcttcatgccatttaga

SEQ ID NO: 266770 - DNA, 19 bp, Homo sapiens
  siRNA target sequence for SFXN5 (NM_144579.1,476-494).
cttttgggacgccaattgt

SEQ ID NO: 266771 - DNA, 19 bp, Homo sapiens
  siRNA target sequence for SFXN5 (NM_144579.1,688-706).
gttcagaaagccaacaagt

SEQ ID NO: 266772 - DNA, 19 bp, Homo sapiens
  siRNA target sequence for SFXN5 (NM_144579.1,755-773).
ctgtagccagtgccaatat

SEQ ID NO: 266773 - DNA, 19 bp, Homo sapiens
  siRNA target sequence for SFXN5 (NM_144579.1,757-775).
gtagccagtgccaatatct

SEQ ID NO: 266774 - DNA, 19 bp, Homo sapiens
  siRNA target sequence for SFXN5 (NM_144579.1,804-822).
gctggaggaagggattgat

SEQ ID NO: 266775 - DNA, 19 bp, Homo sapiens
  siRNA target sequence for SFXN5 (NM_144579.1,1129-1147).
cggacagtggtgtacaaca

SEQ ID NO: 266776 - DNA, 19 bp, Homo sapiens
  siRNA target sequence for SLC30A1 (NM_021194.1,46-64).
gcgctgaccttcatgttca

SEQ ID NO: 266777 - DNA, 19 bp, Homo sapiens
  siRNA target sequence for SLC30A1 (NM_021194.1,221-239).
ggatccgagccgaggtaat

SEQ ID NO: 266778 - DNA, 19 bp, Homo sapiens
  siRNA target sequence for SLC30A1 (NM_021194.1,596-614).
ccaacgggctgaaattgga

SEQ ID NO: 266779 - DNA, 19 bp, Homo sapiens
  siRNA target sequence for SLC30A1 (NM_021194.1,633-651).
ccccagaagtggtgataca

SEQ ID NO: 266780 - DNA, 19 bp, Homo sapiens
  siRNA target sequence for SLC30A1 (NM_021194.1,635-653).
ccagaagtggtgatacagt

SEQ ID NO: 266781 - DNA, 19 bp, Homo sapiens
  siRNA target sequence for SLC30A1 (NM_021194.1,683-701).
gagaacctgaccatatgga

SEQ ID NO: 266782 - DNA, 19 bp, Homo sapiens
  siRNA target sequence for SLC30A1 (NM_021194.1,712-730).
gatagggctggacaactta

SEQ ID NO: 266783 - DNA, 19 bp, Homo sapiens
  siRNA target sequence for SLC30A1 (NM_021194.1,716-734).
gggctggacaacttaacat

SEQ ID NO: 266784 - DNA, 19 bp, Homo sapiens
  siRNA target sequence for SLC30A1 (NM_021194.1,773-791).
gttcagtgattgtagtagt

SEQ ID NO: 266785 - DNA, 19 bp, Homo sapiens
  siRNA target sequence for SLC30A1 (NM_021194.1,787-805).
gtagtaaatgccttagtct

SEQ ID NO: 266786 - DNA, 19 bp, Homo sapiens
  siRNA target sequence for SLC30A1 (NM_021194.1,796-814).
gccttagtcttttactttt

SEQ ID NO: 266787 - DNA, 19 bp, Homo sapiens
  siRNA target sequence for SLC30A1 (NM_021194.1,869-887).
cctgcaaagcatttgtaga

SEQ ID NO: 266788 - DNA, 19 bp, Homo sapiens
  siRNA target sequence for SLC30A1 (NM_021194.1,929-947).
cttgctgggtgctatattt

SEQ ID NO: 266789 - DNA, 19 bp, Homo sapiens
  siRNA target sequence for SLC30A1 (NM_021194.1,952-970).
ccaactctttgtgttgtaa

SEQ ID NO: 266790 - DNA, 19 bp, Homo sapiens
  siRNA target sequence for SLC30A1 (NM_021194.1,962-980).
gtgttgtaatggtttgtat

SEQ ID NO: 266791 - DNA, 19 bp, Homo sapiens
  siRNA target sequence for SLC30A1 (NM_021194.1,985-1003).
ctttacacaacctatccat

SEQ ID NO: 266792 - DNA, 19 bp, Homo sapiens
  siRNA target sequence for SLC30A1 (NM_021194.1,990-1008).
cacaacctatccattactt

SEQ ID NO: 266793 - DNA, 19 bp, Homo sapiens
  siRNA target sequence for SLC30A1 (NM_021194.1,992-1010).
caacctatccattacttaa

SEQ ID NO: 266794 - DNA, 19 bp, Homo sapiens
  siRNA target sequence for SLC30A1 (NM_021194.1,1048-1066).
caaattgatatcagaaatt

SEQ ID NO: 266795 - DNA, 19 bp, Homo sapiens
  siRNA target sequence for SLC30A1 (NM_021194.1,1169-1187).
gtgaagatccaacatcata

SEQ ID NO: 266796 - DNA, 19 bp, Homo sapiens
  siRNA target sequence for SLC30A1 (NM_021194.1,1191-1209).
ggaggtggctaaaaccatt

SEQ ID NO: 266797 - DNA, 19 bp, Homo sapiens
  siRNA target sequence for SLC30A1 (NM_021194.1,1192-1210).
gaggtggctaaaaccatta

SEQ ID NO: 266798 - DNA, 19 bp, Homo sapiens
  siRNA target sequence for SLC30A1 (NM_021194.1,1244-1262).
ctaccattcagcctgaatt

SEQ ID NO: 266799 - DNA, 19 bp, Homo sapiens
  siRNA target sequence for SLC30A1 (NM_021194.1,1254-1272).
gcctgaatttgctagtgta

SEQ ID NO: 266800 - DNA, 19 bp, Homo sapiens
  siRNA target sequence for SLC30A1 (NM_021194.1,1264-1282).
gctagtgtaggctctaaat

SEQ ID NO: 266801 - DNA, 19 bp, Homo sapiens
  siRNA target sequence for SLC30A1 (NM_021194.1,1275-1293).
ctctaaatcaagtgtagtt

SEQ ID NO: 266802 - DNA, 19 bp, Homo sapiens
  siRNA target sequence for SLC30A1 (NM_021194.1,1387-1405).
ccagcagttagcatttctt

SEQ ID NO: 266803 - DNA, 19 bp, Homo sapiens
  siRNA target sequence for SLC30A1 (NM_021194.1,1397-1415).
gcatttcttgtttagaact

SEQ ID NO: 266804 - DNA, 19 bp, Homo sapiens
  siRNA target sequence for SLC30A1 (NM_021194.1,1398-1416).
catttcttgtttagaactt

SEQ ID NO: 266805 - DNA, 19 bp, Homo sapiens
  siRNA target sequence for SLC30A1 (NM_021194.1,1406-1424).
gtttagaacttagtaacaa

SEQ ID NO: 266806 - DNA, 19 bp, Homo sapiens
  siRNA target sequence for SLC30A1 (NM_021194.1,1418-1436).
gtaacaatctagagaagaa

SEQ ID NO: 266807 - DNA, 19 bp, Homo sapiens
  siRNA target sequence for SLC30A1 (NM_021194.1,1471-1489).
gttgtgatagagattaaaa

SEQ ID NO: 266808 - DNA, 19 bp, Homo sapiens
  siRNA target sequence for SLC30A2 (NM_032513.2,453-471).
ccatctgcctgttgttcat

SEQ ID NO: 266809 - DNA, 19 bp, Homo sapiens
  siRNA target sequence for SLC30A2 (NM_032513.2,477-495).
gagaagtcgttgagatctt

SEQ ID NO: 266810 - DNA, 19 bp, Homo sapiens
  siRNA target sequence for SLC30A2 (NM_032513.2,621-639).
gcgctgtggctgtgaacat

SEQ ID NO: 266811 - DNA, 19 bp, Homo sapiens
  siRNA target sequence for SLC30A2 (NM_032513.2,737-755).
catgtgatcggcgacttta

SEQ ID NO: 266812 - DNA, 19 bp, Homo sapiens
  siRNA target sequence for SLC30A2 (NM_032513.2,873-891).
ccatcctgagagatgtgat

SEQ ID NO: 266813 - DNA, 19 bp, Homo sapiens
  siRNA target sequence for SLC30A5 (NM_022902.2,270-288).
cgtacccagcgctcgatta

SEQ ID NO: 266814 - DNA, 19 bp, Homo sapiens
  siRNA target sequence for SLC30A5 (NM_022902.2,271-289).
gtacccagcgctcgattaa

SEQ ID NO: 266815 - DNA, 19 bp, Homo sapiens
  siRNA target sequence for SLC30A5 (NM_022902.2,274-292).
cccagcgctcgattaacaa

SEQ ID NO: 266816 - DNA, 19 bp, Homo sapiens
  siRNA target sequence for SLC30A5 (NM_022902.2,275-293).
ccagcgctcgattaacaaa

SEQ ID NO: 266817 - DNA, 19 bp, Homo sapiens
  siRNA target sequence for SLC30A5 (NM_022902.2,276-294).
cagcgctcgattaacaaaa

SEQ ID NO: 266818 - DNA, 19 bp, Homo sapiens
  siRNA target sequence for SLC30A5 (NM_022902.2,278-296).
gcgctcgattaacaaaata

SEQ ID NO: 266819 - DNA, 19 bp, Homo sapiens
  siRNA target sequence for SLC30A5 (NM_022902.2,330-348).
ggctgtgggacttttcgaa

SEQ ID NO: 266820 - DNA, 19 bp, Homo sapiens
  siRNA target sequence for SLC30A5 (NM_022902.2,331-349).
gctgtgggacttttcgaat

SEQ ID NO: 266821 - DNA, 19 bp, Homo sapiens
  siRNA target sequence for SLC30A5 (NM_022902.2,334-352).
gtgggacttttcgaatcat

SEQ ID NO: 266822 - DNA, 19 bp, Homo sapiens
  siRNA target sequence for SLC30A5 (NM_022902.2,336-354).
gggacttttcgaatcatat

SEQ ID NO: 266823 - DNA, 19 bp, Homo sapiens
  siRNA target sequence for SLC30A5 (NM_022902.2,338-356).
gacttttcgaatcatatga

SEQ ID NO: 266824 - DNA, 19 bp, Homo sapiens
  siRNA target sequence for SLC30A5 (NM_022902.2,403-421).
cttgggactgcatttttta

SEQ ID NO: 266825 - DNA, 19 bp, Homo sapiens
  siRNA target sequence for SLC30A5 (NM_022902.2,497-515).
cagttgctgggtgtattat

SEQ ID NO: 266826 - DNA, 19 bp, Homo sapiens
  siRNA target sequence for SLC30A5 (NM_022902.2,499-517).
gttgctgggtgtattattt

SEQ ID NO: 266827 - DNA, 19 bp, Homo sapiens
  siRNA target sequence for SLC30A5 (NM_022902.2,755-773).
gtgctctaactcatatgct

SEQ ID NO: 266828 - DNA, 19 bp, Homo sapiens
  siRNA target sequence for SLC30A5 (NM_022902.2,757-775).
gctctaactcatatgcttt

SEQ ID NO: 266829 - DNA, 19 bp, Homo sapiens
  siRNA target sequence for SLC30A5 (NM_022902.2,758-776).
ctctaactcatatgcttta

SEQ ID NO: 266830 - DNA, 19 bp, Homo sapiens
  siRNA target sequence for SLC30A5 (NM_022902.2,808-826).
cacaagggtggagtattat

SEQ ID NO: 266831 - DNA, 19 bp, Homo sapiens
  siRNA target sequence for SLC30A5 (NM_022902.2,813-831).
gggtggagtattattgcta

SEQ ID NO: 266832 - DNA, 19 bp, Homo sapiens
  siRNA target sequence for SLC30A5 (NM_022902.2,845-863).
gttgtaaagttggttttca

SEQ ID NO: 266833 - DNA, 19 bp, Homo sapiens
  siRNA target sequence for SLC30A5 (NM_022902.2,888-906).
cgacgttggtggagctaaa

SEQ ID NO: 266834 - DNA, 19 bp, Homo sapiens
  siRNA target sequence for SLC30A5 (NM_022902.2,891-909).
cgttggtggagctaaacgt

SEQ ID NO: 266835 - DNA, 19 bp, Homo sapiens
  siRNA target sequence for SLC30A5 (NM_022902.2,902-920).
ctaaacgtcttcaagcttt

SEQ ID NO: 266836 - DNA, 19 bp, Homo sapiens
  siRNA target sequence for SLC30A5 (NM_022902.2,948-966).
gtgcccatgggtcattgtt

SEQ ID NO: 266837 - DNA, 19 bp, Homo sapiens
  siRNA target sequence for SLC30A5 (NM_022902.2,950-968).
gcccatgggtcattgttct

SEQ ID NO: 266838 - DNA, 19 bp, Homo sapiens
  siRNA target sequence for SLC30A5 (NM_022902.2,952-970).
ccatgggtcattgttcttt

SEQ ID NO: 266839 - DNA, 19 bp, Homo sapiens
  siRNA target sequence for SLC30A5 (NM_022902.2,1018-1036).
ccttttgcaacggttatct

SEQ ID NO: 266840 - DNA, 19 bp, Homo sapiens
  siRNA target sequence for SLC30A5 (NM_022902.2,1019-1037).
cttttgcaacggttatctt

SEQ ID NO: 266841 - DNA, 19 bp, Homo sapiens
  siRNA target sequence for SLC30A5 (NM_022902.2,1025-1043).
caacggttatcttttttgt

SEQ ID NO: 266842 - DNA, 19 bp, Homo sapiens
  siRNA target sequence for SLC30A5 (NM_022902.2,1062-1080).
cgtggattccatttgttca

SEQ ID NO: 266843 - DNA, 19 bp, Homo sapiens
  siRNA target sequence for SLC30A5 (NM_022902.2,1114-1132).
ggatcctttcccattttta

SEQ ID NO: 266844 - DNA, 19 bp, Homo sapiens
  siRNA target sequence for SLC30A5 (NM_022902.2,1119-1137).
ctttcccatttttattagt

SEQ ID NO: 266845 - DNA, 19 bp, Homo sapiens
  siRNA target sequence for SLC30A5 (NM_022902.2,1160-1178).
ggacacatccaataacaga

SEQ ID NO: 266846 - DNA, 19 bp, Homo sapiens
  siRNA target sequence for SLC30A5 (NM_022902.2,1180-1198).
cagcttcgggctatgaaca

SEQ ID NO: 266847 - DNA, 19 bp, Homo sapiens
  siRNA target sequence for SLC30A5 (NM_022902.2,1243-1261).
gtggtagtgagtgctatat

SEQ ID NO: 266848 - DNA, 19 bp, Homo sapiens
  siRNA target sequence for SLC30A5 (NM_022902.2,1249-1267).
gtgagtgctatattcttca

SEQ ID NO: 266849 - DNA, 19 bp, Homo sapiens
  siRNA target sequence for SLC30A5 (NM_022902.2,1251-1269).
gagtgctatattcttcatt

SEQ ID NO: 266850 - DNA, 19 bp, Homo sapiens
  siRNA target sequence for SLC30A5 (NM_022902.2,1315-1333).
ggtacccttattggatatt

SEQ ID NO: 266851 - DNA, 19 bp, Homo sapiens
  siRNA target sequence for SLC30A5 (NM_022902.2,1342-1360).
ggaacacctctttataact

SEQ ID NO: 266852 - DNA, 19 bp, Homo sapiens
  siRNA target sequence for SLC30A5 (NM_022902.2,1394-1412).
cgatccctaggtttattaa

SEQ ID NO: 266853 - DNA, 19 bp, Homo sapiens
  siRNA target sequence for SLC30A5 (NM_022902.2,1398-1416).
ccctaggtttattaaggaa

SEQ ID NO: 266854 - DNA, 19 bp, Homo sapiens
  siRNA target sequence for SLC30A5 (NM_022902.2,1399-1417).
cctaggtttattaaggaat

SEQ ID NO: 266855 - DNA, 19 bp, Homo sapiens
  siRNA target sequence for SLC30A5 (NM_022902.2,1403-1421).
ggtttattaaggaatcact

SEQ ID NO: 266856 - DNA, 19 bp, Homo sapiens
  siRNA target sequence for SLC30A5 (NM_022902.2,1404-1422).
gtttattaaggaatcacta

SEQ ID NO: 266857 - DNA, 19 bp, Homo sapiens
  siRNA target sequence for SLC30A5 (NM_022902.2,1543-1561).
gatggattccacatgcttt

SEQ ID NO: 266858 - DNA, 19 bp, Homo sapiens
  siRNA target sequence for SLC30A5 (NM_022902.2,1639-1657).
gggtacggccgaatagaaa

SEQ ID NO: 266859 - DNA, 19 bp, Homo sapiens
  siRNA target sequence for SLC30A5 (NM_022902.2,1640-1658).
ggtacggccgaatagaaat

SEQ ID NO: 266860 - DNA, 19 bp, Homo sapiens
  siRNA target sequence for SLC30A5 (NM_022902.2,1641-1659).
gtacggccgaatagaaatt

SEQ ID NO: 266861 - DNA, 19 bp, Homo sapiens
  siRNA target sequence for SLC30A5 (NM_022902.2,1719-1737).
gtcagtggctagattgatt

SEQ ID NO: 266862 - DNA, 19 bp, Homo sapiens
  siRNA target sequence for SLC30A5 (NM_022902.2,1778-1796).
cagttggagggctgatagt

SEQ ID NO: 266863 - DNA, 19 bp, Homo sapiens
  siRNA target sequence for SLC30A5 (NM_022902.2,1780-1798).
gttggagggctgatagtaa

SEQ ID NO: 266864 - DNA, 19 bp, Homo sapiens
  siRNA target sequence for SLC30A5 (NM_022902.2,1787-1805).
ggctgatagtaaaccttat

SEQ ID NO: 266865 - DNA, 19 bp, Homo sapiens
  siRNA target sequence for SLC30A5 (NM_022902.2,1788-1806).
gctgatagtaaaccttatt

SEQ ID NO: 266866 - DNA, 19 bp, Homo sapiens
  siRNA target sequence for SLC30A5 (NM_022902.2,1791-1809).
gatagtaaaccttattggt

SEQ ID NO: 266867 - DNA, 19 bp, Homo sapiens
  siRNA target sequence for SLC30A5 (NM_022902.2,1883-1901).
gccattcacaccatatgca

SEQ ID NO: 266868 - DNA, 19 bp, Homo sapiens
  siRNA target sequence for SLC30A5 (NM_022902.2,1946-1964).
gtggaggcatgaatgctaa

SEQ ID NO: 266869 - DNA, 19 bp, Homo sapiens
  siRNA target sequence for SLC30A5 (NM_022902.2,1965-1983).
catgaggggtgtatttcta

SEQ ID NO: 266870 - DNA, 19 bp, Homo sapiens
  siRNA target sequence for SLC30A5 (NM_022902.2,1968-1986).
gaggggtgtatttctacat

SEQ ID NO: 266871 - DNA, 19 bp, Homo sapiens
  siRNA target sequence for SLC30A5 (NM_022902.2,2019-2037).
gatcgtatccacagttctt

SEQ ID NO: 266872 - DNA, 19 bp, Homo sapiens
  siRNA target sequence for SLC30A5 (NM_022902.2,2022-2040).
cgtatccacagttcttata

SEQ ID NO: 266873 - DNA, 19 bp, Homo sapiens
  siRNA target sequence for SLC30A5 (NM_022902.2,2108-2126).
gtgttgttccactgattaa

SEQ ID NO: 266874 - DNA, 19 bp, Homo sapiens
  siRNA target sequence for SLC30A5 (NM_022902.2,2151-2169).
gagattgccaccagaatat

SEQ ID NO: 266875 - DNA, 19 bp, Homo sapiens
  siRNA target sequence for SLC30A5 (NM_022902.2,2153-2171).
gattgccaccagaatatga

SEQ ID NO: 266876 - DNA, 19 bp, Homo sapiens
  siRNA target sequence for SLC30A5 (NM_022902.2,2246-2264).
ggcgtcattctgctagtat

SEQ ID NO: 266877 - DNA, 19 bp, Homo sapiens
  siRNA target sequence for SLC30A5 (NM_022902.2,2247-2265).
gcgtcattctgctagtatt

SEQ ID NO: 266878 - DNA, 19 bp, Homo sapiens
  siRNA target sequence for SLC30A5 (NM_022902.2,2261-2279).
gtattgtggcaggaacaat

SEQ ID NO: 266879 - DNA, 19 bp, Homo sapiens
  siRNA target sequence for SLC30A5 (NM_022902.2,2294-2312).
catctgatgtgctagaaca

SEQ ID NO: 266880 - DNA, 19 bp, Homo sapiens
  siRNA target sequence for SLC30A5 (NM_022902.2,2385-2403).
ggaggcatactttcaacat

SEQ ID NO: 266881 - DNA, 19 bp, Homo sapiens
  siRNA target sequence for SLC30A5 (NM_022902.2,2386-2404).
gaggcatactttcaacata

SEQ ID NO: 266882 - DNA, 19 bp, Homo sapiens
  siRNA target sequence for SLC30A5 (NM_022902.2,2389-2407).
gcatactttcaacatatgt

SEQ ID NO: 266883 - DNA, 19 bp, Homo sapiens
  siRNA target sequence for SLC30A5 (NM_022902.2,2411-2429).
gcctaagtactggatttca

SEQ ID NO: 266884 - DNA, 19 bp, Homo sapiens
  siRNA target sequence for SLC30A5 (NM_022902.2,2412-2430).
cctaagtactggatttcat

SEQ ID NO: 266885 - DNA, 19 bp, Homo sapiens
  siRNA target sequence for SLC30A5 (NM_022902.2,2474-2492).
gcaaagatggtacttacat

SEQ ID NO: 266886 - DNA, 19 bp, Homo sapiens
  siRNA target sequence for SLC30A5 (NM_022902.2,2479-2497).
gatggtacttacatcatgt

SEQ ID NO: 266887 - DNA, 19 bp, Homo sapiens
  siRNA target sequence for SLC30A5 (NM_024055.2,535-553).
ccagataattggatcacta

SEQ ID NO: 266888 - DNA, 19 bp, Homo sapiens
  siRNA target sequence for SLC30A5 (NM_024055.2,538-556).
gataattggatcactaaaa

SEQ ID NO: 266889 - DNA, 19 bp, Homo sapiens
  siRNA target sequence for SLC30A5 (NM_024055.2,561-579).
ctggtagaaaagaatttaa

SEQ ID NO: 266890 - DNA, 19 bp, Homo sapiens
  siRNA target sequence for SLC30A6 (NM_017964.2,45-63).
caattcatctctttcgaaa

SEQ ID NO: 266891 - DNA, 19 bp, Homo sapiens
  siRNA target sequence for SLC30A6 (NM_017964.2,85-103).
caagttgttacgggaattt

SEQ ID NO: 266892 - DNA, 19 bp, Homo sapiens
  siRNA target sequence for SLC30A6 (NM_017964.2,88-106).
gttgttacgggaatttaga

SEQ ID NO: 266893 - DNA, 19 bp, Homo sapiens
  siRNA target sequence for SLC30A6 (NM_017964.2,91-109).
gttacgggaatttagactt

SEQ ID NO: 266894 - DNA, 19 bp, Homo sapiens
  siRNA target sequence for SLC30A6 (NM_017964.2,121-139).
ccgaaggtcctggaagata

SEQ ID NO: 266895 - DNA, 19 bp, Homo sapiens
  siRNA target sequence for SLC30A6 (NM_017964.2,168-186).
gtactggcttcctgcttat

SEQ ID NO: 266896 - DNA, 19 bp, Homo sapiens
  siRNA target sequence for SLC30A6 (NM_017964.2,187-205).
gtggtgcagttctactaat

SEQ ID NO: 266897 - DNA, 19 bp, Homo sapiens
  siRNA target sequence for SLC30A6 (NM_017964.2,192-210).
gcagttctactaatagtat

SEQ ID NO: 266898 - DNA, 19 bp, Homo sapiens
  siRNA target sequence for SLC30A6 (NM_017964.2,193-211).
cagttctactaatagtata

SEQ ID NO: 266899 - DNA, 19 bp, Homo sapiens
  siRNA target sequence for SLC30A6 (NM_017964.2,198-216).
ctactaatagtatagcttt

SEQ ID NO: 266900 - DNA, 19 bp, Homo sapiens
  siRNA target sequence for SLC30A6 (NM_017964.2,212-230).
gctttaactgcctatactt

SEQ ID NO: 266901 - DNA, 19 bp, Homo sapiens
  siRNA target sequence for SLC30A6 (NM_017964.2,373-391).
gttgggagctctctttata

SEQ ID NO: 266902 - DNA, 19 bp, Homo sapiens
  siRNA target sequence for SLC30A6 (NM_017964.2,419-437).
gaacagcccgagatacaca

SEQ ID NO: 266903 - DNA, 19 bp, Homo sapiens
  siRNA target sequence for SLC30A6 (NM_017964.2,430-448).
gatacacacgggaagatta

SEQ ID NO: 266904 - DNA, 19 bp, Homo sapiens
  siRNA target sequence for SLC30A6 (NM_017964.2,436-454).
cacgggaagattattagtt

SEQ ID NO: 266905 - DNA, 19 bp, Homo sapiens
  siRNA target sequence for SLC30A6 (NM_017964.2,484-502).
gttcacgatgctttctatt

SEQ ID NO: 266906 - DNA, 19 bp, Homo sapiens
  siRNA target sequence for SLC30A6 (NM_017964.2,493-511).
gctttctattcggaataaa

SEQ ID NO: 266907 - DNA, 19 bp, Homo sapiens
  siRNA target sequence for SLC30A6 (NM_017964.2,557-575).
gagcatgttgcagatctta

SEQ ID NO: 266908 - DNA, 19 bp, Homo sapiens
  siRNA target sequence for SLC30A6 (NM_017964.2,559-577).
gcatgttgcagatcttagt

SEQ ID NO: 266909 - DNA, 19 bp, Homo sapiens
  siRNA target sequence for SLC30A6 (NM_017964.2,579-597).
gaagcttgtgtggaattat

SEQ ID NO: 266910 - DNA, 19 bp, Homo sapiens
  siRNA target sequence for SLC30A6 (NM_017964.2,600-618).
cgggacttagcagtatctt

SEQ ID NO: 266911 - DNA, 19 bp, Homo sapiens
  siRNA target sequence for SLC30A6 (NM_017964.2,616-634).
cttccttccccgaatgaat

SEQ ID NO: 266912 - DNA, 19 bp, Homo sapiens
  siRNA target sequence for SLC30A6 (NM_017964.2,631-649).
gaatccatttgttttgatt

SEQ ID NO: 266913 - DNA, 19 bp, Homo sapiens
  siRNA target sequence for SLC30A6 (NM_017964.2,751-769).
gacatttggcactatgtat

SEQ ID NO: 266914 - DNA, 19 bp, Homo sapiens
  siRNA target sequence for SLC30A6 (NM_017964.2,828-846).
gtcagttggacaaactcat

SEQ ID NO: 266915 - DNA, 19 bp, Homo sapiens
  siRNA target sequence for SLC30A6 (NM_017964.2,847-865).
cagagaggtatctacctta

SEQ ID NO: 266916 - DNA, 19 bp, Homo sapiens
  siRNA target sequence for SLC30A6 (NM_017964.2,858-876).
ctaccttagatggagtttt

SEQ ID NO: 266917 - DNA, 19 bp, Homo sapiens
  siRNA target sequence for SLC30A6 (NM_017964.2,878-896).
gaagtccgaaatgaacatt

SEQ ID NO: 266918 - DNA, 19 bp, Homo sapiens
  siRNA target sequence for SLC30A6 (NM_017964.2,927-945).
gatcagtgcatgtaagaat

SEQ ID NO: 266919 - DNA, 19 bp, Homo sapiens
  siRNA target sequence for SLC30A6 (NM_017964.2,950-968).
cgagatgccaatgaacaaa

SEQ ID NO: 266920 - DNA, 19 bp, Homo sapiens
  siRNA target sequence for SLC30A6 (NM_017964.2,1000-1018).
cactctagtgtctactcta

SEQ ID NO: 266921 - DNA, 19 bp, Homo sapiens
  siRNA target sequence for SLC30A6 (NM_017964.2,1009-1027).
gtctactctaactgttcaa

SEQ ID NO: 266922 - DNA, 19 bp, Homo sapiens
  siRNA target sequence for SLC30A6 (NM_017964.2,1250-1268).
caaacaaggccttatggtt

SEQ ID NO: 266923 - DNA, 19 bp, Homo sapiens
  siRNA target sequence for SLC30A6 (NM_017964.2,1293-1311).
cttacagcagcatgcttaa

SEQ ID NO: 266924 - DNA, 19 bp, Homo sapiens
  siRNA target sequence for SLC30A6 (NM_017964.2,1297-1315).
cagcagcatgcttaatcaa

SEQ ID NO: 266925 - DNA, 19 bp, Homo sapiens
  siRNA target sequence for SLC30A6 (NM_017964.2,1349-1367).
ggattgaggactggtttta

SEQ ID NO: 266926 - DNA, 19 bp, Homo sapiens
  siRNA target sequence for SLC30A6 (NM_017964.2,1380-1398).
gtagatatggaactaataa

SEQ ID NO: 266927 - DNA, 19 bp, Homo sapiens
  siRNA target sequence for SLC30A8 (NM_173851.1,17-35).
gaacgtatcttgtgaatga

SEQ ID NO: 266928 - DNA, 19 bp, Homo sapiens
  siRNA target sequence for SLC30A8 (NM_173851.1,383-401).
cctctaagcggctgacatt

SEQ ID NO: 266929 - DNA, 19 bp, Homo sapiens
  siRNA target sequence for SLC30A8 (NM_173851.1,384-402).
ctctaagcggctgacattt

SEQ ID NO: 266930 - DNA, 19 bp, Homo sapiens
  siRNA target sequence for SLC30A8 (NM_173851.1,494-512).
gcctgctgtatcctgatta

SEQ ID NO: 266931 - DNA, 19 bp, Homo sapiens
  siRNA target sequence for SLC30A8 (NM_173851.1,520-538).
caggcgactgtgatgatca

SEQ ID NO: 266932 - DNA, 19 bp, Homo sapiens
  siRNA target sequence for SLC30A8 (NM_173851.1,561-579).
ggccaacattgtactaact

SEQ ID NO: 266933 - DNA, 19 bp, Homo sapiens
  siRNA target sequence for SLC30A8 (NM_173851.1,563-581).
ccaacattgtactaactgt

SEQ ID NO: 266934 - DNA, 19 bp, Homo sapiens
  siRNA target sequence for SLC30A8 (NM_173851.1,599-617).
gccttggccacaatcacaa

SEQ ID NO: 266935 - DNA, 19 bp, Homo sapiens
  siRNA target sequence for SLC30A8 (NM_173851.1,609-627).
caatcacaaggaagtacaa

SEQ ID NO: 266936 - DNA, 19 bp, Homo sapiens
  siRNA target sequence for SLC30A8 (NM_173851.1,638-656).
gcgtcagagctgcttttgt

SEQ ID NO: 266937 - DNA, 19 bp, Homo sapiens
  siRNA target sequence for SLC30A8 (NM_173851.1,658-676).
catgcccttggagatctat

SEQ ID NO: 266938 - DNA, 19 bp, Homo sapiens
  siRNA target sequence for SLC30A8 (NM_173851.1,662-680).
cccttggagatctatttca

SEQ ID NO: 266939 - DNA, 19 bp, Homo sapiens
  siRNA target sequence for SLC30A8 (NM_173851.1,670-688).
gatctatttcagagtatca

SEQ ID NO: 266940 - DNA, 19 bp, Homo sapiens
  siRNA target sequence for SLC30A8 (NM_173851.1,693-711).
gctaattagtgcacttatt

SEQ ID NO: 266941 - DNA, 19 bp, Homo sapiens
  siRNA target sequence for SLC30A8 (NM_173851.1,694-712).
ctaattagtgcacttatta

SEQ ID NO: 266942 - DNA, 19 bp, Homo sapiens
  siRNA target sequence for SLC30A8 (NM_173851.1,742-760).
gacccaatctgcacattca

SEQ ID NO: 266943 - DNA, 19 bp, Homo sapiens
  siRNA target sequence for SLC30A8 (NM_173851.1,783-801).
cagcaccatcactatctta

SEQ ID NO: 266944 - DNA, 19 bp, Homo sapiens
  siRNA target sequence for SLC30A8 (NM_173851.1,846-864).
gaattacagtggtgtgaaa

SEQ ID NO: 266945 - DNA, 19 bp, Homo sapiens
  siRNA target sequence for SLC30A8 (NM_173851.1,857-875).
gtgtgaaagagcttatttt

SEQ ID NO: 266946 - DNA, 19 bp, Homo sapiens
  siRNA target sequence for SLC30A8 (NM_173851.1,915-933).
ctggtctctaacaatgaat

SEQ ID NO: 266947 - DNA, 19 bp, Homo sapiens
  siRNA target sequence for SLC30A8 (NM_173851.1,922-940).
ctaacaatgaatcaagtaa

SEQ ID NO: 266948 - DNA, 19 bp, Homo sapiens
  siRNA target sequence for SLC30A8 (NM_173851.1,982-1000).
caagtggttcggagagaaa

SEQ ID NO: 266949 - DNA, 19 bp, Homo sapiens
  siRNA target sequence for SLC30A8 (NM_173851.1,1012-1030).
cttagcaaaagctttacga

SEQ ID NO: 266950 - DNA, 19 bp, Homo sapiens
  siRNA target sequence for SLC30A8 (NM_173851.1,1072-1090).
gaccccgactgccttttct

SEQ ID NO: 266951 - DNA, 19 bp, Homo sapiens
  siRNA target sequence for SLC30A8 (NM_173851.1,1074-1092).
ccccgactgccttttctgt

SEQ ID NO: 266952 - DNA, 19 bp, Homo sapiens
  siRNA target sequence for SLC41A1 (NM_173854.3,1486-1504).
cctgatggccacttcagta

SEQ ID NO: 266953 - DNA, 19 bp, Homo sapiens
  siRNA target sequence for SLC41A1 (NM_173854.3,1487-1505).
ctgatggccacttcagtat

SEQ ID NO: 266954 - DNA, 19 bp, Homo sapiens
  siRNA target sequence for SLC41A1 (NM_173854.3,1536-1554).
cgtggccacagccttcatt

SEQ ID NO: 266955 - DNA, 19 bp, Homo sapiens
  siRNA target sequence for SLC41A1 (NM_173854.3,1559-1577).
ccctggtactgggtatgat

SEQ ID NO: 266956 - DNA, 19 bp, Homo sapiens
  siRNA target sequence for SLC41A1 (NM_173854.3,1561-1579).
ctggtactgggtatgatca

SEQ ID NO: 266957 - DNA, 19 bp, Homo sapiens
  siRNA target sequence for SLC41A1 (NM_173854.3,1578-1596).
catgattggagtcatcatt

SEQ ID NO: 266958 - DNA, 19 bp, Homo sapiens
  siRNA target sequence for SLC41A1 (NM_173854.3,1924-1942).
gtcttcacgcctgtgatta

SEQ ID NO: 266959 - DNA, 19 bp, Homo sapiens
  siRNA target sequence for SLC41A1 (NM_173854.3,1926-1944).
cttcacgcctgtgattaat

SEQ ID NO: 266960 - DNA, 19 bp, Homo sapiens
  siRNA target sequence for SLC41A1 (NM_173854.3,2197-2215).
catcatcttctatatgaca

SEQ ID NO: 266961 - DNA, 19 bp, Homo sapiens
  siRNA target sequence for SLC41A1 (NM_173854.3,2288-2306).
ctggacccggacaacttct

SEQ ID NO: 266962 - DNA, 19 bp, Homo sapiens
  siRNA target sequence for MRS2L (NM_020662.1,217-235).
cgagccaacctgattggaa

SEQ ID NO: 266963 - DNA, 19 bp, Homo sapiens
  siRNA target sequence for MRS2L (NM_020662.1,312-330).
cgtctctcaagccacttta

SEQ ID NO: 266964 - DNA, 19 bp, Homo sapiens
  siRNA target sequence for MRS2L (NM_020662.1,375-393).
gggaaacgttacttctttt

SEQ ID NO: 266965 - DNA, 19 bp, Homo sapiens
  siRNA target sequence for MRS2L (NM_020662.1,377-395).
gaaacgttacttcttttga

SEQ ID NO: 266966 - DNA, 19 bp, Homo sapiens
  siRNA target sequence for MRS2L (NM_020662.1,430-448).
cttcaagccagagatttga

SEQ ID NO: 266967 - DNA, 19 bp, Homo sapiens
  siRNA target sequence for MRS2L (NM_020662.1,454-472).
cagcatgtaatgagtatca

SEQ ID NO: 266968 - DNA, 19 bp, Homo sapiens
  siRNA target sequence for MRS2L (NM_020662.1,475-493).
gtcagaaacaataggatta

SEQ ID NO: 266969 - DNA, 19 bp, Homo sapiens
  siRNA target sequence for MRS2L (NM_020662.1,534-552).
gtgtcttctgatattagat

SEQ ID NO: 266970 - DNA, 19 bp, Homo sapiens
  siRNA target sequence for MRS2L (NM_020662.1,541-559).
ctgatattagattatcgta

SEQ ID NO: 266971 - DNA, 19 bp, Homo sapiens
  siRNA target sequence for MRS2L (NM_020662.1,543-561).
gatattagattatcgtaat

SEQ ID NO: 266972 - DNA, 19 bp, Homo sapiens
  siRNA target sequence for MRS2L (NM_020662.1,550-568).
gattatcgtaatttaaact

SEQ ID NO: 266973 - DNA, 19 bp, Homo sapiens
  siRNA target sequence for MRS2L (NM_020662.1,613-631).
gagggtcaactcgttacat

SEQ ID NO: 266974 - DNA, 19 bp, Homo sapiens
  siRNA target sequence for MRS2L (NM_020662.1,624-642).
cgttacataccctttacct

SEQ ID NO: 266975 - DNA, 19 bp, Homo sapiens
  siRNA target sequence for MRS2L (NM_020662.1,625-643).
gttacataccctttacctt

SEQ ID NO: 266976 - DNA, 19 bp, Homo sapiens
  siRNA target sequence for MRS2L (NM_020662.1,633-651).
ccctttaccttttgagttt

SEQ ID NO: 266977 - DNA, 19 bp, Homo sapiens
  siRNA target sequence for MRS2L (NM_020662.1,665-683).
cactcctgcaatattggat

SEQ ID NO: 266978 - DNA, 19 bp, Homo sapiens
  siRNA target sequence for MRS2L (NM_020662.1,670-688).
ctgcaatattggatcaaca

SEQ ID NO: 266979 - DNA, 19 bp, Homo sapiens
  siRNA target sequence for MRS2L (NM_020662.1,747-765).
ggtggaccccaaacattct

SEQ ID NO: 266980 - DNA, 19 bp, Homo sapiens
  siRNA target sequence for MRS2L (NM_020662.1,750-768).
ggaccccaaacattcttct

SEQ ID NO: 266981 - DNA, 19 bp, Homo sapiens
  siRNA target sequence for MRS2L (NM_020662.1,780-798).
caaactgcacattttacta

SEQ ID NO: 266982 - DNA, 19 bp, Homo sapiens
  siRNA target sequence for MRS2L (NM_020662.1,799-817).
cagaatggcaaaagtctat

SEQ ID NO: 266983 - DNA, 19 bp, Homo sapiens
  siRNA target sequence for MRS2L (NM_020662.1,807-825).
caaaagtctatcagagtta

SEQ ID NO: 266984 - DNA, 19 bp, Homo sapiens
  siRNA target sequence for MRS2L (NM_020662.1,889-907).
gaagagctctgtgtatcaa

SEQ ID NO: 266985 - DNA, 19 bp, Homo sapiens
  siRNA target sequence for MRS2L (NM_020662.1,1038-1056).
gctgattgatgattcacaa

SEQ ID NO: 266986 - DNA, 19 bp, Homo sapiens
  siRNA target sequence for MRS2L (NM_020662.1,1041-1059).
gattgatgattcacaaagt

SEQ ID NO: 266987 - DNA, 19 bp, Homo sapiens
  siRNA target sequence for MRS2L (NM_020662.1,1084-1102).
caccgaaacgtgatgatga

SEQ ID NO: 266988 - DNA, 19 bp, Homo sapiens
  siRNA target sequence for MRS2L (NM_020662.1,1092-1110).
cgtgatgatgaggttgaat

SEQ ID NO: 266989 - DNA, 19 bp, Homo sapiens
  siRNA target sequence for MRS2L (NM_020662.1,1192-1210).
cttgaagaggaccatagaa

SEQ ID NO: 266990 - DNA, 19 bp, Homo sapiens
  siRNA target sequence for MRS2L (NM_020662.1,1219-1237).
ctgattacaggaattatgt

SEQ ID NO: 266991 - DNA, 19 bp, Homo sapiens
  siRNA target sequence for MRS2L (NM_020662.1,1307-1325).
ctcctatgatggcttcttt

SEQ ID NO: 266992 - DNA, 19 bp, Homo sapiens
  siRNA target sequence for MRS2L (NM_020662.1,1318-1336).
gcttctttacctaaaaaga

SEQ ID NO: 266993 - DNA, 19 bp, Homo sapiens
  siRNA target sequence for SLC39A11 (NM_139177.2,170-188).
gcagctctcgtgttcgtat

SEQ ID NO: 266994 - DNA, 19 bp, Homo sapiens
  siRNA target sequence for SLC39A11 (NM_139177.2,171-189).
cagctctcgtgttcgtatt

SEQ ID NO: 266995 - DNA, 19 bp, Homo sapiens
  siRNA target sequence for SLC39A11 (NM_139177.2,173-191).
gctctcgtgttcgtattct

SEQ ID NO: 266996 - DNA, 19 bp, Homo sapiens
  siRNA target sequence for SLC39A11 (NM_139177.2,176-194).
ctcgtgttcgtattctcta

SEQ ID NO: 266997 - DNA, 19 bp, Homo sapiens
  siRNA target sequence for SLC39A11 (NM_139177.2,509-527).
ctttccatccggatagaca

SEQ ID NO: 266998 - DNA, 19 bp, Homo sapiens
  siRNA target sequence for SLC39A11 (NM_139177.2,520-538).
gatagacaagagtgagaat

SEQ ID NO: 266999 - DNA, 19 bp, Homo sapiens
  siRNA target sequence for SLC39A11 (NM_139177.2,651-669).
ggatcgcactgctcatctt

SEQ ID NO: 267000 - DNA, 19 bp, Homo sapiens
  siRNA target sequence for SLC39A11 (NM_139177.2,662-680).
ctcatcttggccatcacta

SEQ ID NO: 267001 - DNA, 19 bp, Homo sapiens
  siRNA target sequence for SLC39A11 (NM_139177.2,703-721).
cgctgttggagttggattt

SEQ ID NO: 267002 - DNA, 19 bp, Homo sapiens
  siRNA target sequence for SLC39A11 (NM_139177.2,716-734).
ggatttggggctatagaaa

SEQ ID NO: 267003 - DNA, 19 bp, Homo sapiens
  siRNA target sequence for SLC39A11 (NM_139177.2,780-798).
gaatcgggatccagaattt

SEQ ID NO: 267004 - DNA, 19 bp, Homo sapiens
  siRNA target sequence for SLC39A12 (NM_152725.1,231-249).
cggacaaagctctcagtat

SEQ ID NO: 267005 - DNA, 19 bp, Homo sapiens
  siRNA target sequence for SLC39A12 (NM_152725.1,253-271).
gggtgccattgtttcttct

SEQ ID NO: 267006 - DNA, 19 bp, Homo sapiens
  siRNA target sequence for SLC39A12 (NM_152725.1,273-291).
ctcagccgtgttttttcta

SEQ ID NO: 267007 - DNA, 19 bp, Homo sapiens
  siRNA target sequence for SLC39A12 (NM_152725.1,275-293).
cagccgtgttttttctact

SEQ ID NO: 267008 - DNA, 19 bp, Homo sapiens
  siRNA target sequence for SLC39A12 (NM_152725.1,390-408).
ccccacaaccactcaagaa

SEQ ID NO: 267009 - DNA, 19 bp, Homo sapiens
  siRNA target sequence for SLC39A12 (NM_152725.1,401-419).
ctcaagaagcctcatcaaa

SEQ ID NO: 267010 - DNA, 19 bp, Homo sapiens
  siRNA target sequence for SLC39A12 (NM_152725.1,409-427).
gcctcatcaaaacattgtt

SEQ ID NO: 267011 - DNA, 19 bp, Homo sapiens
  siRNA target sequence for SLC39A12 (NM_152725.1,492-510).
ccagatgcactattactaa

SEQ ID NO: 267012 - DNA, 19 bp, Homo sapiens
  siRNA target sequence for SLC39A12 (NM_152725.1,493-511).
cagatgcactattactaat

SEQ ID NO: 267013 - DNA, 19 bp, Homo sapiens
  siRNA target sequence for SLC39A12 (NM_152725.1,546-564).
gaagtggtccagagagttt

SEQ ID NO: 267014 - DNA, 19 bp, Homo sapiens
  siRNA target sequence for SLC39A12 (NM_152725.1,551-569).
ggtccagagagtttctctt

SEQ ID NO: 267015 - DNA, 19 bp, Homo sapiens
  siRNA target sequence for SLC39A12 (NM_152725.1,572-590).
ccttctctattacattatt

SEQ ID NO: 267016 - DNA, 19 bp, Homo sapiens
  siRNA target sequence for SLC39A12 (NM_152725.1,597-615).
gaagagatctgttcttcaa

SEQ ID NO: 267017 - DNA, 19 bp, Homo sapiens
  siRNA target sequence for SLC39A12 (NM_152725.1,617-635).
gctcaacatgagtaataaa

SEQ ID NO: 267018 - DNA, 19 bp, Homo sapiens
  siRNA target sequence for SLC39A12 (NM_152725.1,785-803).
gcagaaaaaatctggaata

SEQ ID NO: 267019 - DNA, 19 bp, Homo sapiens
  siRNA target sequence for SLC39A12 (NM_152725.1,806-824).
gagcagtgaaggtgctaat

SEQ ID NO: 267020 - DNA, 19 bp, Homo sapiens
  siRNA target sequence for SLC39A12 (NM_152725.1,845-863).
ggcagccatgatcattact

SEQ ID NO: 267021 - DNA, 19 bp, Homo sapiens
  siRNA target sequence for SLC39A12 (NM_152725.1,847-865).
cagccatgatcattacttt

SEQ ID NO: 267022 - DNA, 19 bp, Homo sapiens
  siRNA target sequence for SLC39A12 (NM_152725.1,849-867).
gccatgatcattactttgt

SEQ ID NO: 267023 - DNA, 19 bp, Homo sapiens
  siRNA target sequence for SLC39A12 (NM_152725.1,998-1016).
ctggaccagaagtacttgt

SEQ ID NO: 267024 - DNA, 19 bp, Homo sapiens
  siRNA target sequence for SLC39A12 (NM_152725.1,1000-1018).
ggaccagaagtacttgtat

SEQ ID NO: 267025 - DNA, 19 bp, Homo sapiens
  siRNA target sequence for SLC39A12 (NM_152725.1,1003-1021).
ccagaagtacttgtatcaa

SEQ ID NO: 267026 - DNA, 19 bp, Homo sapiens
  siRNA target sequence for SLC39A12 (NM_152725.1,1012-1030).
cttgtatcaaaaatgagaa

SEQ ID NO: 267027 - DNA, 19 bp, Homo sapiens
  siRNA target sequence for SLC39A12 (NM_152725.1,1302-1320).
cctaccactctggagaaat

SEQ ID NO: 267028 - DNA, 19 bp, Homo sapiens
  siRNA target sequence for SLC39A12 (NM_152725.1,1372-1390).
ggacagcgctggtcctttt

SEQ ID NO: 267029 - DNA, 19 bp, Homo sapiens
  siRNA target sequence for SLC39A12 (NM_152725.1,1375-1393).
cagcgctggtccttttcca

SEQ ID NO: 267030 - DNA, 19 bp, Homo sapiens
  siRNA target sequence for SLC39A12 (NM_152725.1,1377-1395).
gcgctggtccttttccata

SEQ ID NO: 267031 - DNA, 19 bp, Homo sapiens
  siRNA target sequence for SLC39A12 (NM_152725.1,1404-1422).
gagaactacaggcttatct

SEQ ID NO: 267032 - DNA, 19 bp, Homo sapiens
  siRNA target sequence for SLC39A12 (NM_152725.1,1508-1526).
gcaggaagccccagaattt

SEQ ID NO: 267033 - DNA, 19 bp, Homo sapiens
  siRNA target sequence for SLC39A12 (NM_152725.1,1582-1600).
gcatccatggatttttctt

SEQ ID NO: 267034 - DNA, 19 bp, Homo sapiens
  siRNA target sequence for SLC39A12 (NM_152725.1,1676-1694).
gcctataggcagtatgaca

SEQ ID NO: 267035 - DNA, 19 bp, Homo sapiens
  siRNA target sequence for SLC39A12 (NM_152725.1,1696-1714).
cctccaacagaaaatgtaa

SEQ ID NO: 267036 - DNA, 19 bp, Homo sapiens
  siRNA target sequence for SLC39A12 (NM_152725.1,1716-1734).
gccattagcttgttagcaa

SEQ ID NO: 267037 - DNA, 19 bp, Homo sapiens
  siRNA target sequence for SLC39A12 (NM_152725.1,1723-1741).
gcttgttagcaatcatgat

SEQ ID NO: 267038 - DNA, 19 bp, Homo sapiens
  siRNA target sequence for SLC39A12 (NM_152725.1,1724-1742).
cttgttagcaatcatgatt

SEQ ID NO: 267039 - DNA, 19 bp, Homo sapiens
  siRNA target sequence for SLC39A12 (NM_152725.1,1750-1768).
gggacagcctgcataattt

SEQ ID NO: 267040 - DNA, 19 bp, Homo sapiens
  siRNA target sequence for SLC39A12 (NM_152725.1,1837-1855).
ctatcttgtgtcatgaaat

SEQ ID NO: 267041 - DNA, 19 bp, Homo sapiens
  siRNA target sequence for SLC39A12 (NM_152725.1,1872-1890).
gactttgccgtgctcttaa

SEQ ID NO: 267042 - DNA, 19 bp, Homo sapiens
  siRNA target sequence for SLC39A12 (NM_152725.1,1910-1928).
gactgccatcctgatgaat

SEQ ID NO: 267043 - DNA, 19 bp, Homo sapiens
  siRNA target sequence for SLC39A12 (NM_152725.1,1979-1997).
gtcagctgatccatgtgtt

SEQ ID NO: 267044 - DNA, 19 bp, Homo sapiens
  siRNA target sequence for SLC39A12 (NM_152725.1,1995-2013).
gttcaagactggatcttca

SEQ ID NO: 267045 - DNA, 19 bp, Homo sapiens
  siRNA target sequence for SLC39A12 (NM_152725.1,2016-2034).
gtcactgctgggatgttct

SEQ ID NO: 267046 - DNA, 19 bp, Homo sapiens
  siRNA target sequence for SLC39A12 (NM_152725.1,2022-2040).
gctgggatgttcttatatt

SEQ ID NO: 267047 - DNA, 19 bp, Homo sapiens
  siRNA target sequence for SLC39A13 (NM_152264.2,728-746).
ctggccaacaccatcgata

SEQ ID NO: 267048 - DNA, 19 bp, Homo sapiens
  siRNA target sequence for SLC39A13 (NM_152264.2,941-959).
gctggcttcgccatctgta

SEQ ID NO: 267049 - DNA, 19 bp, Homo sapiens
  siRNA target sequence for SLC39A13 (NM_152264.2,1014-1032).
ctggcggctttctctacat

SEQ ID NO: 267050 - DNA, 19 bp, Homo sapiens
  siRNA target sequence for SLC39A13 (NM_152264.2,1110-1128).
gtgcgggcatcgtggtaat

SEQ ID NO: 267051 - DNA, 19 bp, Homo sapiens
  siRNA target sequence for SLC39A13 (NM_152264.2,1113-1131).
cgggcatcgtggtaatggt

SEQ ID NO: 267052 - DNA, 19 bp, Homo sapiens
  siRNA target sequence for SLC39A3 (NM_144564.3,218-236).
gcatggtgggcgtgttctt

SEQ ID NO: 267053 - DNA, 19 bp, Homo sapiens
  siRNA target sequence for SLC39A3 (NM_144564.3,254-272).
ccctgctccccgtgaagat

SEQ ID NO: 267054 - DNA, 19 bp, Homo sapiens
  siRNA target sequence for SLC39A3 (NM_144564.3,295-313).
gcccatcgctcgaaaaaga

SEQ ID NO: 267055 - DNA, 19 bp, Homo sapiens
  siRNA target sequence for SLC39A3 (NM_144564.3,296-314).
cccatcgctcgaaaaagat

SEQ ID NO: 267056 - DNA, 19 bp, Homo sapiens
  siRNA target sequence for SLC39A3 (NM_144564.3,569-587).
gcagcgactcggagtatga

SEQ ID NO: 267057 - DNA, 19 bp, Homo sapiens
  siRNA target sequence for SLC39A3 (NM_144564.3,719-737).
cggcccactcggtctttga

SEQ ID NO: 267058 - DNA, 19 bp, Homo sapiens
  siRNA target sequence for SLC39A4 (NM_017767.1,1738-1756).
gcgacgccgtgcacaactt

SEQ ID NO: 267059 - DNA, 19 bp, Homo sapiens
  siRNA target sequence for SLC39A5 (NM_173596.1,713-731).
cacccccaggggatctact

SEQ ID NO: 267060 - DNA, 19 bp, Homo sapiens
  siRNA target sequence for SLC39A5 (NM_173596.1,810-828).
cctgggacctcgtctacta

SEQ ID NO: 267061 - DNA, 19 bp, Homo sapiens
  siRNA target sequence for SLC39A5 (NM_173596.1,878-896).
gggatgcactgctacatct

SEQ ID NO: 267062 - DNA, 19 bp, Homo sapiens
  siRNA target sequence for SLC39A5 (NM_173596.1,1056-1074).
caggcgaaaacgaaggaat

SEQ ID NO: 267063 - DNA, 19 bp, Homo sapiens
  siRNA target sequence for SLC39A5 (NM_173596.1,1547-1565).
ctggggtcttcctctatgt

SEQ ID NO: 267064 - DNA, 19 bp, Homo sapiens
  siRNA target sequence for SLC39A6 (NM_012319.2,140-158).
ggcgaggaagttatctgta

SEQ ID NO: 267065 - DNA, 19 bp, Homo sapiens
  siRNA target sequence for SLC39A6 (NM_012319.2,190-208).
caaatccccttcatgaact

SEQ ID NO: 267066 - DNA, 19 bp, Homo sapiens
  siRNA target sequence for SLC39A6 (NM_012319.2,225-243).
ccccagaccactgagaaaa

SEQ ID NO: 267067 - DNA, 19 bp, Homo sapiens
  siRNA target sequence for SLC39A6 (NM_012319.2,230-248).
gaccactgagaaaattagt

SEQ ID NO: 267068 - DNA, 19 bp, Homo sapiens
  siRNA target sequence for SLC39A6 (NM_012319.2,256-274).
gggaatctggcattaatgt

SEQ ID NO: 267069 - DNA, 19 bp, Homo sapiens
  siRNA target sequence for SLC39A6 (NM_012319.2,273-291).
gttgacttggcaatttcca

SEQ ID NO: 267070 - DNA, 19 bp, Homo sapiens
  siRNA target sequence for SLC39A6 (NM_012319.2,289-307).
ccacacggcaatatcatct

SEQ ID NO: 267071 - DNA, 19 bp, Homo sapiens
  siRNA target sequence for SLC39A6 (NM_012319.2,290-308).
cacacggcaatatcatcta

SEQ ID NO: 267072 - DNA, 19 bp, Homo sapiens
  siRNA target sequence for SLC39A6 (NM_012319.2,292-310).
cacggcaatatcatctaca

SEQ ID NO: 267073 - DNA, 19 bp, Homo sapiens
  siRNA target sequence for SLC39A6 (NM_012319.2,320-338).
ctaccgctatggagaaaat

SEQ ID NO: 267074 - DNA, 19 bp, Homo sapiens
  siRNA target sequence for SLC39A6 (NM_012319.2,558-576).
ccagaccatgactcagata

SEQ ID NO: 267075 - DNA, 19 bp, Homo sapiens
  siRNA target sequence for SLC39A6 (NM_012319.2,569-587).
ctcagatagttcaggtaaa

SEQ ID NO: 267076 - DNA, 19 bp, Homo sapiens
  siRNA target sequence for SLC39A6 (NM_012319.2,637-655).
gtggtagaaggaatgtcaa

SEQ ID NO: 267077 - DNA, 19 bp, Homo sapiens
  siRNA target sequence for SLC39A6 (NM_012319.2,742-760).
caagacctggaaaactctt

SEQ ID NO: 267078 - DNA, 19 bp, Homo sapiens
  siRNA target sequence for SLC39A6 (NM_012319.2,819-837).
cggctggctggtaggaaaa

SEQ ID NO: 267079 - DNA, 19 bp, Homo sapiens
  siRNA target sequence for SLC39A6 (NM_012319.2,858-876).
ccccgaaaaggctttatgt

SEQ ID NO: 267080 - DNA, 19 bp, Homo sapiens
  siRNA target sequence for SLC39A6 (NM_012319.2,859-877).
cccgaaaaggctttatgta

SEQ ID NO: 267081 - DNA, 19 bp, Homo sapiens
  siRNA target sequence for SLC39A6 (NM_012319.2,860-878).
ccgaaaaggctttatgtat

SEQ ID NO: 267082 - DNA, 19 bp, Homo sapiens
  siRNA target sequence for SLC39A6 (NM_012319.2,954-972).
caggttccgctgaatgcaa

SEQ ID NO: 267083 - DNA, 19 bp, Homo sapiens
  siRNA target sequence for SLC39A6 (NM_012319.2,970-988).
caacagagttcaactatct

SEQ ID NO: 267084 - DNA, 19 bp, Homo sapiens
  siRNA target sequence for SLC39A6 (NM_012319.2,994-1012).
cagccatcatcaaccaaat

SEQ ID NO: 267085 - DNA, 19 bp, Homo sapiens
  siRNA target sequence for SLC39A6 (NM_012319.2,997-1015).
ccatcatcaaccaaattga

SEQ ID NO: 267086 - DNA, 19 bp, Homo sapiens
  siRNA target sequence for SLC39A6 (NM_012319.2,1007-1025).
ccaaattgatgctagatct

SEQ ID NO: 267087 - DNA, 19 bp, Homo sapiens
  siRNA target sequence for SLC39A6 (NM_012319.2,1008-1026).
caaattgatgctagatctt

SEQ ID NO: 267088 - DNA, 19 bp, Homo sapiens
  siRNA target sequence for SLC39A6 (NM_012319.2,1018-1036).
ctagatcttgtctgattca

SEQ ID NO: 267089 - DNA, 19 bp, Homo sapiens
  siRNA target sequence for SLC39A6 (NM_012319.2,1029-1047).
ctgattcatacaagtgaaa

SEQ ID NO: 267090 - DNA, 19 bp, Homo sapiens
  siRNA target sequence for SLC39A6 (NM_012319.2,1061-1079).
ccctccaaagacctattca

SEQ ID NO: 267091 - DNA, 19 bp, Homo sapiens
  siRNA target sequence for SLC39A6 (NM_012319.2,1066-1084).
caaagacctattcattaca

SEQ ID NO: 267092 - DNA, 19 bp, Homo sapiens
  siRNA target sequence for SLC39A6 (NM_012319.2,1161-1179).
ctcatgaatcgggtgtttt

SEQ ID NO: 267093 - DNA, 19 bp, Homo sapiens
  siRNA target sequence for SLC39A6 (NM_012319.2,1166-1184).
gaatcgggtgtttttcaaa

SEQ ID NO: 267094 - DNA, 19 bp, Homo sapiens
  siRNA target sequence for SLC39A6 (NM_012319.2,1340-1358).
gtcttctcaaaacatagaa

SEQ ID NO: 267095 - DNA, 19 bp, Homo sapiens
  siRNA target sequence for SLC39A6 (NM_012319.2,1379-1397).
cacgtggaagggtctaaca

SEQ ID NO: 267096 - DNA, 19 bp, Homo sapiens
  siRNA target sequence for SLC39A6 (NM_012319.2,1418-1436).
catgtttcttgttgaacat

SEQ ID NO: 267097 - DNA, 19 bp, Homo sapiens
  siRNA target sequence for SLC39A6 (NM_012319.2,1439-1457).
cctcacattgatcaaacaa

SEQ ID NO: 267098 - DNA, 19 bp, Homo sapiens
  siRNA target sequence for SLC39A6 (NM_012319.2,1526-1544).
gttgtccaagtatgaatct

SEQ ID NO: 267099 - DNA, 19 bp, Homo sapiens
  siRNA target sequence for SLC39A6 (NM_012319.2,1529-1547).
gtccaagtatgaatctcaa

SEQ ID NO: 267100 - DNA, 19 bp, Homo sapiens
  siRNA target sequence for SLC39A6 (NM_012319.2,1535-1553).
gtatgaatctcaactttca

SEQ ID NO: 267101 - DNA, 19 bp, Homo sapiens
  siRNA target sequence for SLC39A6 (NM_012319.2,1543-1561).
ctcaactttcaacaaatga

SEQ ID NO: 267102 - DNA, 19 bp, Homo sapiens
  siRNA target sequence for SLC39A6 (NM_012319.2,1617-1635).
gagccctcccactttgatt

SEQ ID NO: 267103 - DNA, 19 bp, Homo sapiens
  siRNA target sequence for SLC39A6 (NM_012319.2,1716-1734).
cccagagggtgcaagaata

SEQ ID NO: 267104 - DNA, 19 bp, Homo sapiens
  siRNA target sequence for SLC39A6 (NM_012319.2,1717-1735).
ccagagggtgcaagaataa

SEQ ID NO: 267105 - DNA, 19 bp, Homo sapiens
  siRNA target sequence for SLC39A6 (NM_012319.2,1744-1762).
cacatttccacgatacact

SEQ ID NO: 267106 - DNA, 19 bp, Homo sapiens
  siRNA target sequence for SLC39A6 (NM_012319.2,1765-1783).
gccagtcagacgatctcat

SEQ ID NO: 267107 - DNA, 19 bp, Homo sapiens
  siRNA target sequence for SLC39A6 (NM_012319.2,1766-1784).
ccagtcagacgatctcatt

SEQ ID NO: 267108 - DNA, 19 bp, Homo sapiens
  siRNA target sequence for SLC39A6 (NM_012319.2,1791-1809).
catcatgactaccatcata

SEQ ID NO: 267109 - DNA, 19 bp, Homo sapiens
  siRNA target sequence for SLC39A6 (NM_012319.2,1923-1941).
ggtgatggcctgcacaatt

SEQ ID NO: 267110 - DNA, 19 bp, Homo sapiens
  siRNA target sequence for SLC39A6 (NM_012319.2,1924-1942).
gtgatggcctgcacaattt

SEQ ID NO: 267111 - DNA, 19 bp, Homo sapiens
  siRNA target sequence for SLC39A6 (NM_012319.2,1946-1964).
cgatggcctagcaattggt

SEQ ID NO: 267112 - DNA, 19 bp, Homo sapiens
  siRNA target sequence for SLC39A6 (NM_012319.2,1980-1998).
ggcttatcaagtggtttaa

SEQ ID NO: 267113 - DNA, 19 bp, Homo sapiens
  siRNA target sequence for SLC39A6 (NM_012319.2,2022-2040).
catgagttgcctcatgaat

SEQ ID NO: 267114 - DNA, 19 bp, Homo sapiens
  siRNA target sequence for SLC39A6 (NM_012319.2,2068-2086).
ctggcatgaccgttaagca

SEQ ID NO: 267115 - DNA, 19 bp, Homo sapiens
  siRNA target sequence for SLC39A6 (NM_012319.2,2088-2106).
gctgtcctttataatgcat

SEQ ID NO: 267116 - DNA, 19 bp, Homo sapiens
  siRNA target sequence for SLC39A6 (NM_012319.2,2180-2198).
gtggatatttgcacttact

SEQ ID NO: 267117 - DNA, 19 bp, Homo sapiens
  siRNA target sequence for SLC39A6 (NM_012319.2,2197-2215).
ctgctggcttattcatgta

SEQ ID NO: 267118 - DNA, 19 bp, Homo sapiens
  siRNA target sequence for SLC39A6 (NM_012319.2,2275-2293).
gtagccgctgggggtattt

SEQ ID NO: 267119 - DNA, 19 bp, Homo sapiens
  siRNA target sequence for SLC39A6 (NM_012319.2,2278-2296).
gccgctgggggtatttctt

SEQ ID NO: 267120 - DNA, 19 bp, Homo sapiens
  siRNA target sequence for SLC39A6 (NM_012319.2,2279-2297).
ccgctgggggtatttcttt

SEQ ID NO: 267121 - DNA, 19 bp, Homo sapiens
  siRNA target sequence for SLC39A6 (NM_012319.2,2280-2298).
cgctgggggtatttctttt

SEQ ID NO: 267122 - DNA, 19 bp, Homo sapiens
  siRNA target sequence for SLC39A6 (NM_012319.2,2301-2319).
cagaatgctgggatgcttt

SEQ ID NO: 267123 - DNA, 19 bp, Homo sapiens
  siRNA target sequence for SLC39A6 (NM_012319.2,2321-2339).
gggttttggaattatgtta

SEQ ID NO: 267124 - DNA, 19 bp, Homo sapiens
  siRNA target sequence for SLC39A6 (NM_012319.2,2358-2376).
cataaaatcgtgtttcgta

SEQ ID NO: 267125 - DNA, 19 bp, Homo sapiens
  siRNA target sequence for SLC39A6 (NM_012319.2,2367-2385).
gtgtttcgtataaatttct

SEQ ID NO: 267126 - DNA, 19 bp, Homo sapiens
  siRNA target sequence for SLC39A7 (NM_006979.1,467-485).
caggcactcacatgaagat

SEQ ID NO: 267127 - DNA, 19 bp, Homo sapiens
  siRNA target sequence for SLC39A7 (NM_006979.1,563-581).
cgaccatggacattcacat

SEQ ID NO: 267128 - DNA, 19 bp, Homo sapiens
  siRNA target sequence for SLC39A7 (NM_006979.1,722-740).
cactctctgggcttatgca

SEQ ID NO: 267129 - DNA, 19 bp, Homo sapiens
  siRNA target sequence for SLC39A7 (NM_006979.1,817-835).
ggcatcgctctctacttca

SEQ ID NO: 267130 - DNA, 19 bp, Homo sapiens
  siRNA target sequence for SLC39A7 (NM_006979.1,836-854).
gatcttgctcagttttgct

SEQ ID NO: 267131 - DNA, 19 bp, Homo sapiens
  siRNA target sequence for SLC39A7 (NM_006979.1,989-1007).
gtgggttctcagtggaatt

SEQ ID NO: 267132 - DNA, 19 bp, Homo sapiens
  siRNA target sequence for SLC39A7 (NM_006979.1,1077-1095).
ggacacgctcacagtcata

SEQ ID NO: 267133 - DNA, 19 bp, Homo sapiens
  siRNA target sequence for SLC39A7 (NM_006979.1,1300-1318).
ctgacttggcacacaactt

SEQ ID NO: 267134 - DNA, 19 bp, Homo sapiens
  siRNA target sequence for SLC39A7 (NM_006979.1,1370-1388).
gatcctgaccacaatgact

SEQ ID NO: 267135 - DNA, 19 bp, Homo sapiens
  siRNA target sequence for SLC39A7 (NM_006979.1,1387-1405).
ctgtcctgctacatgaagt

SEQ ID NO: 267136 - DNA, 19 bp, Homo sapiens
  siRNA target sequence for SLC39A8 (NM_022154.4,687-705).
cttcaaccagtgtttaact

SEQ ID NO: 267137 - DNA, 19 bp, Homo sapiens
  siRNA target sequence for SLC39A8 (NM_022154.4,727-745).
catggcttttcaaatgcta

SEQ ID NO: 267138 - DNA, 19 bp, Homo sapiens
  siRNA target sequence for SLC39A8 (NM_022154.4,774-792).
catctgtccagcagtctta

SEQ ID NO: 267139 - DNA, 19 bp, Homo sapiens
  siRNA target sequence for SLC39A8 (NM_022154.4,782-800).
cagcagtcttacagcaatt

SEQ ID NO: 267140 - DNA, 19 bp, Homo sapiens
  siRNA target sequence for SLC39A8 (NM_022154.4,787-805).
gtcttacagcaattgaact

SEQ ID NO: 267141 - DNA, 19 bp, Homo sapiens
  siRNA target sequence for SLC39A8 (NM_022154.4,789-807).
cttacagcaattgaacttt

SEQ ID NO: 267142 - DNA, 19 bp, Homo sapiens
  siRNA target sequence for SLC39A8 (NM_022154.4,820-838).
gatcggcccaagcacaaaa

SEQ ID NO: 267143 - DNA, 19 bp, Homo sapiens
  siRNA target sequence for SLC39A8 (NM_022154.4,839-857).
caagaccaagtcattcaga

SEQ ID NO: 267144 - DNA, 19 bp, Homo sapiens
  siRNA target sequence for SLC39A8 (NM_022154.4,844-862).
ccaagtcattcagaagttt

SEQ ID NO: 267145 - DNA, 19 bp, Homo sapiens
  siRNA target sequence for SLC39A8 (NM_022154.4,876-894).
cctgtcagtgacgattatt

SEQ ID NO: 267146 - DNA, 19 bp, Homo sapiens
  siRNA target sequence for SLC39A8 (NM_022154.4,877-895).
ctgtcagtgacgattatta

SEQ ID NO: 267147 - DNA, 19 bp, Homo sapiens
  siRNA target sequence for SLC39A8 (NM_022154.4,879-897).
gtcagtgacgattattaat

SEQ ID NO: 267148 - DNA, 19 bp, Homo sapiens
  siRNA target sequence for SLC39A8 (NM_022154.4,881-899).
cagtgacgattattaatct

SEQ ID NO: 267149 - DNA, 19 bp, Homo sapiens
  siRNA target sequence for SLC39A8 (NM_022154.4,902-920).
catctctcctcggattgat

SEQ ID NO: 267150 - DNA, 19 bp, Homo sapiens
  siRNA target sequence for SLC39A8 (NM_022154.4,907-925).
ctcctcggattgattttga

SEQ ID NO: 267151 - DNA, 19 bp, Homo sapiens
  siRNA target sequence for SLC39A8 (NM_022154.4,1202-1220).
ctcatcaacctaaagcatt

SEQ ID NO: 267152 - DNA, 19 bp, Homo sapiens
  siRNA target sequence for SLC39A8 (NM_022154.4,1230-1248).
caatggtgtgacatgctat

SEQ ID NO: 267153 - DNA, 19 bp, Homo sapiens
  siRNA target sequence for SLC39A8 (NM_022154.4,1265-1283).
cagaagctaatggacatat

SEQ ID NO: 267154 - DNA, 19 bp, Homo sapiens
  siRNA target sequence for SLC39A8 (NM_022154.4,1270-1288).
gctaatggacatatccatt

SEQ ID NO: 267155 - DNA, 19 bp, Homo sapiens
  siRNA target sequence for SLC39A8 (NM_022154.4,1271-1289).
ctaatggacatatccattt

SEQ ID NO: 267156 - DNA, 19 bp, Homo sapiens
  siRNA target sequence for SLC39A8 (NM_022154.4,1380-1398).
gacgattgcctggatgata

SEQ ID NO: 267157 - DNA, 19 bp, Homo sapiens
  siRNA target sequence for SLC39A8 (NM_022154.4,1406-1424).
gcgatgccctccacaattt

SEQ ID NO: 267158 - DNA, 19 bp, Homo sapiens
  siRNA target sequence for SLC39A8 (NM_022154.4,1473-1491).
gggactcagtacttccata

SEQ ID NO: 267159 - DNA, 19 bp, Homo sapiens
  siRNA target sequence for SLC39A8 (NM_022154.4,1487-1505).
ccatagcaatcctatgtga

SEQ ID NO: 267160 - DNA, 19 bp, Homo sapiens
  siRNA target sequence for SLC39A8 (NM_022154.4,1562-1580).
ctcgacaagccttgctatt

SEQ ID NO: 267161 - DNA, 19 bp, Homo sapiens
  siRNA target sequence for SLC39A8 (NM_022154.4,1564-1582).
cgacaagccttgctattca

SEQ ID NO: 267162 - DNA, 19 bp, Homo sapiens
  siRNA target sequence for SLC39A8 (NM_022154.4,1604-1622).
gctatgttgggctagcttt

SEQ ID NO: 267163 - DNA, 19 bp, Homo sapiens
  siRNA target sequence for SLC39A8 (NM_022154.4,1605-1623).
ctatgttgggctagctttt

SEQ ID NO: 267164 - DNA, 19 bp, Homo sapiens
  siRNA target sequence for SLC39A8 (NM_022154.4,1647-1665).
cgctccaaatattatattt

SEQ ID NO: 267165 - DNA, 19 bp, Homo sapiens
  siRNA target sequence for SLC39A8 (NM_022154.4,1809-1827).
cacagccattctactcatt

SEQ ID NO: 267166 - DNA, 19 bp, Homo sapiens
  siRNA target sequence for SLC39A8 (NM_022154.4,1833-1851).
gtatgcaggagaaatcgaa

SEQ ID NO: 267167 - DNA, 19 bp, Homo sapiens
  siRNA target sequence for SLC39A8 (NM_022154.4,1838-1856).
caggagaaatcgaattgga

SEQ ID NO: 267168 - DNA, 19 bp, Homo sapiens
  siRNA target sequence for SLC39A9 (NM_018375.2,201-219).
gttacgtggccggaatcat

SEQ ID NO: 267169 - DNA, 19 bp, Homo sapiens
  siRNA target sequence for SLC39A9 (NM_018375.2,310-328).
cgtgcctgaaggagtacat

SEQ ID NO: 267170 - DNA, 19 bp, Homo sapiens
  siRNA target sequence for SLC39A9 (NM_018375.2,321-339).
gagtacatgccctttatga

SEQ ID NO: 267171 - DNA, 19 bp, Homo sapiens
  siRNA target sequence for SLC39A9 (NM_018375.2,326-344).
catgccctttatgaagata

SEQ ID NO: 267172 - DNA, 19 bp, Homo sapiens
  siRNA target sequence for SLC39A9 (NM_018375.2,457-475).
gctgcatgcctatattggt

SEQ ID NO: 267173 - DNA, 19 bp, Homo sapiens
  siRNA target sequence for SLC39A9 (NM_018375.2,482-500).
ctcgttctgggcttcgttt

SEQ ID NO: 267174 - DNA, 19 bp, Homo sapiens
  siRNA target sequence for SLC39A9 (NM_018375.2,485-503).
gttctgggcttcgttttca

SEQ ID NO: 267175 - DNA, 19 bp, Homo sapiens
  siRNA target sequence for SLC39A9 (NM_018375.2,560-578).
gcagcaaggtctagcaatt

SEQ ID NO: 267176 - DNA, 19 bp, Homo sapiens
  siRNA target sequence for SLC39A9 (NM_018375.2,563-581).
gcaaggtctagcaattcca

SEQ ID NO: 267177 - DNA, 19 bp, Homo sapiens
  siRNA target sequence for SLC39A9 (NM_018375.2,564-582).
caaggtctagcaattccaa

SEQ ID NO: 267178 - DNA, 19 bp, Homo sapiens
  siRNA target sequence for SLC39A9 (NM_018375.2,567-585).
ggtctagcaattccaaaat

SEQ ID NO: 267179 - DNA, 19 bp, Homo sapiens
  siRNA target sequence for SLC39A9 (NM_018375.2,663-681).
ccagtgtccagttaattgt

SEQ ID NO: 267180 - DNA, 19 bp, Homo sapiens
  siRNA target sequence for SLC39A9 (NM_018375.2,666-684).
gtgtccagttaattgtgtt

SEQ ID NO: 267181 - DNA, 19 bp, Homo sapiens
  siRNA target sequence for SLC39A9 (NM_018375.2,686-704).
gtggcaatcatgctacata

SEQ ID NO: 267182 - DNA, 19 bp, Homo sapiens
  siRNA target sequence for SLC39A9 (NM_018375.2,749-767).
ggcttagagcggaatcgaa

SEQ ID NO: 267183 - DNA, 19 bp, Homo sapiens
  siRNA target sequence for SLC39A9 (NM_018375.2,750-768).
gcttagagcggaatcgaat

SEQ ID NO: 267184 - DNA, 19 bp, Homo sapiens
  siRNA target sequence for SLC39A9 (NM_018375.2,755-773).
gagcggaatcgaatcagaa

SEQ ID NO: 267185 - DNA, 19 bp, Homo sapiens
  siRNA target sequence for SLC39A9 (NM_018375.2,792-810).
cattggcagcaccagttat

SEQ ID NO: 267186 - DNA, 19 bp, Homo sapiens
  siRNA target sequence for SLC39A9 (NM_018375.2,895-913).
ctctgccgggacatttctt

SEQ ID NO: 267187 - DNA, 19 bp, Homo sapiens
  siRNA target sequence for SLC39A9 (NM_018375.2,900-918).
ccgggacatttctttatgt

SEQ ID NO: 267188 - DNA, 19 bp, Homo sapiens
  siRNA target sequence for SLC22A6 (NM_004790.3,622-640).
caccgatggctggatctat

SEQ ID NO: 267189 - DNA, 19 bp, Homo sapiens
  siRNA target sequence for SLC22A6 (NM_004790.3,791-809).
cggaaggtactcatcttga

SEQ ID NO: 267190 - DNA, 19 bp, Homo sapiens
  siRNA target sequence for SLC22A6 (NM_004790.3,941-959).
gagtggatgcccattcaca

SEQ ID NO: 267191 - DNA, 19 bp, Homo sapiens
  siRNA target sequence for SLC22A6 (NM_004790.3,978-996).
ccttgattggctatgtcta

SEQ ID NO: 267192 - DNA, 19 bp, Homo sapiens
  siRNA target sequence for SLC22A6 (NM_004790.3,1064-1082).
ctggtctctgcgccttttt

SEQ ID NO: 267193 - DNA, 19 bp, Homo sapiens
  siRNA target sequence for SLC22A6 (NM_004790.3,1200-1218).
gggaagaaggagccaaatt

SEQ ID NO: 267194 - DNA, 19 bp, Homo sapiens
  siRNA target sequence for SLC22A6 (NM_004790.3,1342-1360).
gtggtttgccactagcttt

SEQ ID NO: 267195 - DNA, 19 bp, Homo sapiens
  siRNA target sequence for SLC22A6 (NM_004790.3,1350-1368).
ccactagctttgcatacta

SEQ ID NO: 267196 - DNA, 19 bp, Homo sapiens
  siRNA target sequence for SLC22A6 (NM_004790.3,1351-1369).
cactagctttgcatactat

SEQ ID NO: 267197 - DNA, 19 bp, Homo sapiens
  siRNA target sequence for SLC22A6 (NM_004790.3,1397-1415).
ggagtcagcatctacctaa

SEQ ID NO: 267198 - DNA, 19 bp, Homo sapiens
  siRNA target sequence for SLC22A6 (NM_004790.3,1398-1416).
gagtcagcatctacctaat

SEQ ID NO: 267199 - DNA, 19 bp, Homo sapiens
  siRNA target sequence for SLC22A6 (NM_004790.3,1636-1654).
gtatactggggaactgtat

SEQ ID NO: 267200 - DNA, 19 bp, Homo sapiens
  siRNA target sequence for SLC22A8 (NM_004254.2,168-186).
gaagcatgggccatttcca

SEQ ID NO: 267201 - DNA, 19 bp, Homo sapiens
  siRNA target sequence for SLC22A8 (NM_004254.2,210-228).
gcctcccgatcctcaacat

SEQ ID NO: 267202 - DNA, 19 bp, Homo sapiens
  siRNA target sequence for SLC22A8 (NM_004254.2,349-367).
gaggtgcctccgttttgta

SEQ ID NO: 267203 - DNA, 19 bp, Homo sapiens
  siRNA target sequence for SLC22A8 (NM_004254.2,351-369).
ggtgcctccgttttgtaca

SEQ ID NO: 267204 - DNA, 19 bp, Homo sapiens
  siRNA target sequence for SLC22A8 (NM_004254.2,523-541).
catggcaggtatactgatt

SEQ ID NO: 267205 - DNA, 19 bp, Homo sapiens
  siRNA target sequence for SLC22A8 (NM_004254.2,710-728).
ctgagcaccgtcatcttga

SEQ ID NO: 267206 - DNA, 19 bp, Homo sapiens
  siRNA target sequence for SLC22A8 (NM_004254.2,841-859).
gcgttggctgcagttaact

SEQ ID NO: 267207 - DNA, 19 bp, Homo sapiens
  siRNA target sequence for SLC22A8 (NM_004254.2,843-861).
gttggctgcagttaactgt

SEQ ID NO: 267208 - DNA, 19 bp, Homo sapiens
  siRNA target sequence for SLC22A8 (NM_004254.2,1014-1032).
gcttggaggagctcaaact

SEQ ID NO: 267209 - DNA, 19 bp, Homo sapiens
  siRNA target sequence for SLC22A8 (NM_004254.2,1109-1127).
cgcatgaccttctgtcttt

SEQ ID NO: 267210 - DNA, 19 bp, Homo sapiens
  siRNA target sequence for SLC22A8 (NM_004254.2,1148-1166).
ggttttgcctactatagtt

SEQ ID NO: 267211 - DNA, 19 bp, Homo sapiens
  siRNA target sequence for SLC22A8 (NM_004254.2,1174-1192).
gggtgtggaagaatttgga

SEQ ID NO: 267212 - DNA, 19 bp, Homo sapiens
  siRNA target sequence for SLC22A8 (NM_004254.2,1254-1272).
ccatcctctccttaagcta

SEQ ID NO: 267213 - DNA, 19 bp, Homo sapiens
  siRNA target sequence for SLC22A8 (NM_004254.2,1426-1444).
cctctacacaagtgaatta

SEQ ID NO: 267214 - DNA, 19 bp, Homo sapiens
  siRNA target sequence for SLC22A8 (NM_004254.2,1427-1445).
ctctacacaagtgaattat

SEQ ID NO: 267215 - DNA, 19 bp, Homo sapiens
  siRNA target sequence for SLC22A8 (NM_004254.2,1467-1485).
caggtatgggcgtaagtaa

SEQ ID NO: 267216 - DNA, 19 bp, Homo sapiens
  siRNA target sequence for SLC22A8 (NM_004254.2,1511-1529).
gtgtccccgctggtgaaaa

SEQ ID NO: 267217 - DNA, 19 bp, Homo sapiens
  siRNA target sequence for SLC22A8 (NM_004254.2,1633-1651).
cttgccagagactatcgaa

SEQ ID NO: 267218 - DNA, 19 bp, Homo sapiens
  siRNA target sequence for SLC22A8 (NM_004254.2,1665-1683).
ggtccctgcgggcaaagaa

SEQ ID NO: 267219 - DNA, 19 bp, Homo sapiens
  siRNA target sequence for SLCO1A2 (NM_005075.2,319-337).
ggatcttatatgaattcca

SEQ ID NO: 267220 - DNA, 19 bp, Homo sapiens
  siRNA target sequence for SLCO1A2 (NM_005075.2,363-381).
caacatcccaacatctcta

SEQ ID NO: 267221 - DNA, 19 bp, Homo sapiens
  siRNA target sequence for SLCO1A2 (NM_005075.2,366-384).
catcccaacatctctagtt

SEQ ID NO: 267222 - DNA, 19 bp, Homo sapiens
  siRNA target sequence for SLCO1A2 (NM_005075.2,377-395).
ctctagttggattcattaa

SEQ ID NO: 267223 - DNA, 19 bp, Homo sapiens
  siRNA target sequence for SLCO1A2 (NM_005075.2,406-424).
gagattggaaatcttttgt

SEQ ID NO: 267224 - DNA, 19 bp, Homo sapiens
  siRNA target sequence for SLCO1A2 (NM_005075.2,459-477).
gcatagacctataatgatt

SEQ ID NO: 267225 - DNA, 19 bp, Homo sapiens
  siRNA target sequence for SLCO1A2 (NM_005075.2,499-517).
ggcttaggctgtttcttaa

SEQ ID NO: 267226 - DNA, 19 bp, Homo sapiens
  siRNA target sequence for SLCO1A2 (NM_005075.2,500-518).
gcttaggctgtttcttaaa

SEQ ID NO: 267227 - DNA, 19 bp, Homo sapiens
  siRNA target sequence for SLCO1A2 (NM_005075.2,643-661).
gatccatcagagtgtacaa

SEQ ID NO: 267228 - DNA, 19 bp, Homo sapiens
  siRNA target sequence for SLCO1A2 (NM_005075.2,664-682).
gaagttaaatcattaatgt

SEQ ID NO: 267229 - DNA, 19 bp, Homo sapiens
  siRNA target sequence for SLCO1A2 (NM_005075.2,690-708).
cgtcctagtaggcaatatt

SEQ ID NO: 267230 - DNA, 19 bp, Homo sapiens
  siRNA target sequence for SLCO1A2 (NM_005075.2,827-845).
gtcctttgattggactttt

SEQ ID NO: 267231 - DNA, 19 bp, Homo sapiens
  siRNA target sequence for SLCO1A2 (NM_005075.2,829-847).
cctttgattggacttttgt

SEQ ID NO: 267232 - DNA, 19 bp, Homo sapiens
  siRNA target sequence for SLCO1A2 (NM_005075.2,1026-1044).
ggaaggactagagactaat

SEQ ID NO: 267233 - DNA, 19 bp, Homo sapiens
  siRNA target sequence for SLCO1A2 (NM_005075.2,1142-1160).
gtctttcctgcaatccaat

SEQ ID NO: 267234 - DNA, 19 bp, Homo sapiens
  siRNA target sequence for SLCO1A2 (NM_005075.2,1151-1169).
gcaatccaatttatatgct

SEQ ID NO: 267235 - DNA, 19 bp, Homo sapiens
  siRNA target sequence for SLCO1A2 (NM_005075.2,1167-1185).
gcttttcatacttgtaagt

SEQ ID NO: 267236 - DNA, 19 bp, Homo sapiens
  siRNA target sequence for SLCO1A2 (NM_005075.2,1173-1191).
catacttgtaagtgtgata

SEQ ID NO: 267237 - DNA, 19 bp, Homo sapiens
  siRNA target sequence for SLCO1A2 (NM_005075.2,1201-1219).
gcattcgttaacatgatct

SEQ ID NO: 267238 - DNA, 19 bp, Homo sapiens
  siRNA target sequence for SLCO1A2 (NM_005075.2,1220-1238).
ccttcatgcctaaatacct

SEQ ID NO: 267239 - DNA, 19 bp, Homo sapiens
  siRNA target sequence for SLCO1A2 (NM_005075.2,1259-1277).
catcttcagatgcaatctt

SEQ ID NO: 267240 - DNA, 19 bp, Homo sapiens
  siRNA target sequence for SLCO1A2 (NM_005075.2,1265-1283).
cagatgcaatctttctaat

SEQ ID NO: 267241 - DNA, 19 bp, Homo sapiens
  siRNA target sequence for SLCO1A2 (NM_005075.2,1296-1314).
cttacctccaatatgtatt

SEQ ID NO: 267242 - DNA, 19 bp, Homo sapiens
  siRNA target sequence for SLCO1A2 (NM_005075.2,1300-1318).
cctccaatatgtattggat

SEQ ID NO: 267243 - DNA, 19 bp, Homo sapiens
  siRNA target sequence for SLCO1A2 (NM_005075.2,1301-1319).
ctccaatatgtattggata

SEQ ID NO: 267244 - DNA, 19 bp, Homo sapiens
  siRNA target sequence for SLCO1A2 (NM_005075.2,1303-1321).
ccaatatgtattggatata

SEQ ID NO: 267245 - DNA, 19 bp, Homo sapiens
  siRNA target sequence for SLCO1A2 (NM_005075.2,1366-1384).
caagctgcccacataggat

SEQ ID NO: 267246 - DNA, 19 bp, Homo sapiens
  siRNA target sequence for SLCO1A2 (NM_005075.2,1374-1392).
ccacataggatgttggtta

SEQ ID NO: 267247 - DNA, 19 bp, Homo sapiens
  siRNA target sequence for SLCO1A2 (NM_005075.2,1375-1393).
cacataggatgttggttat

SEQ ID NO: 267248 - DNA, 19 bp, Homo sapiens
  siRNA target sequence for SLCO1A2 (NM_005075.2,1453-1471).
gttgttggaataaatacct

SEQ ID NO: 267249 - DNA, 19 bp, Homo sapiens
  siRNA target sequence for SLCO1A2 (NM_005075.2,1480-1498).
ggaattccacaagatttat

SEQ ID NO: 267250 - DNA, 19 bp, Homo sapiens
  siRNA target sequence for SLCO1A2 (NM_005075.2,1573-1591).
ggaaacaatggcttgtcat

SEQ ID NO: 267251 - DNA, 19 bp, Homo sapiens
  siRNA target sequence for SLCO1A2 (NM_005075.2,1625-1643).
ccattggaacgggaataaa

SEQ ID NO: 267252 - DNA, 19 bp, Homo sapiens
  siRNA target sequence for SLCO1A2 (NM_005075.2,1662-1680).
cagctgtattcaaacatca

SEQ ID NO: 267253 - DNA, 19 bp, Homo sapiens
  siRNA target sequence for SLCO1A2 (NM_005075.2,1738-1756).
ctccagtacttcctaatct

SEQ ID NO: 267254 - DNA, 19 bp, Homo sapiens
  siRNA target sequence for SLCO1A2 (NM_005075.2,1741-1759).
cagtacttcctaatcttgt

SEQ ID NO: 267255 - DNA, 19 bp, Homo sapiens
  siRNA target sequence for SLCO1A2 (NM_005075.2,1762-1780).
gcgatgagcagtttcattt

SEQ ID NO: 267256 - DNA, 19 bp, Homo sapiens
  siRNA target sequence for SLCO1A2 (NM_005075.2,1763-1781).
cgatgagcagtttcattta

SEQ ID NO: 267257 - DNA, 19 bp, Homo sapiens
  siRNA target sequence for SLCO1A2 (NM_005075.2,1793-1811).
ccatacctggatatatggt

SEQ ID NO: 267258 - DNA, 19 bp, Homo sapiens
  siRNA target sequence for SLCO1A2 (NM_005075.2,1799-1817).
ctggatatatggttctctt

SEQ ID NO: 267259 - DNA, 19 bp, Homo sapiens
  siRNA target sequence for SLCO1A2 (NM_005075.2,1810-1828).
gttctcttgaggtgtatga

SEQ ID NO: 267260 - DNA, 19 bp, Homo sapiens
  siRNA target sequence for SLCO1A2 (NM_005075.2,1815-1833).
cttgaggtgtatgaaatct

SEQ ID NO: 267261 - DNA, 19 bp, Homo sapiens
  siRNA target sequence for SLCO1A2 (NM_005075.2,1844-1862).
cccttggtgtgggattaca

SEQ ID NO: 267262 - DNA, 19 bp, Homo sapiens
  siRNA target sequence for SLCO1A2 (NM_005075.2,1845-1863).
ccttggtgtgggattacat

SEQ ID NO: 267263 - DNA, 19 bp, Homo sapiens
  siRNA target sequence for SLCO1A2 (NM_005075.2,1846-1864).
cttggtgtgggattacata

SEQ ID NO: 267264 - DNA, 19 bp, Homo sapiens
  siRNA target sequence for SLCO1A2 (NM_005075.2,1849-1867).
ggtgtgggattacatacat

SEQ ID NO: 267265 - DNA, 19 bp, Homo sapiens
  siRNA target sequence for SLCO1A2 (NM_005075.2,1850-1868).
gtgtgggattacatacatt

SEQ ID NO: 267266 - DNA, 19 bp, Homo sapiens
  siRNA target sequence for SLCO1A2 (NM_005075.2,1871-1889).
gcacaagagtatttggtaa

SEQ ID NO: 267267 - DNA, 19 bp, Homo sapiens
  siRNA target sequence for SLCO1A2 (NM_005075.2,1909-1927).
catcctatcagaacaatat

SEQ ID NO: 267268 - DNA, 19 bp, Homo sapiens
  siRNA target sequence for SLCO1A2 (NM_005075.2,1912-1930).
cctatcagaacaatattat

SEQ ID NO: 267269 - DNA, 19 bp, Homo sapiens
  siRNA target sequence for SLCO1A2 (NM_005075.2,1913-1931).
ctatcagaacaatattatt

SEQ ID NO: 267270 - DNA, 19 bp, Homo sapiens
  siRNA target sequence for SLCO1A2 (NM_021094.2,281-299).
ccatagaataagatgtctt

SEQ ID NO: 267271 - DNA, 19 bp, Homo sapiens
  siRNA target sequence for SLCO1A2 (NM_021094.2,282-300).
catagaataagatgtcttt

SEQ ID NO: 267272 - DNA, 19 bp, Homo sapiens
  siRNA target sequence for SLCO1A2 (NM_021094.2,286-304).
gaataagatgtctttccaa

SEQ ID NO: 267273 - DNA, 19 bp, Homo sapiens
  siRNA target sequence for SLCO1A2 (NM_021094.2,1965-1983).
gattccacatgtttacact

SEQ ID NO: 267274 - DNA, 19 bp, Homo sapiens
  siRNA target sequence for SLCO1A2 (NM_021094.2,1975-1993).
gtttacactggggaacttt

SEQ ID NO: 267275 - DNA, 19 bp, Homo sapiens
  siRNA target sequence for SLCO1A2 (NM_021094.2,2011-2029).
gggcatgcaggatatatga

SEQ ID NO: 267276 - DNA, 19 bp, Homo sapiens
  siRNA target sequence for SLCO1A2 (NM_021094.2,2013-2031).
gcatgcaggatatatgatt

SEQ ID NO: 267277 - DNA, 19 bp, Homo sapiens
  siRNA target sequence for SLCO1A2 (NM_021094.2,2032-2050).
ccaccaccttcagatacat

SEQ ID NO: 267278 - DNA, 19 bp, Homo sapiens
  siRNA target sequence for SLCO1A2 (NM_021094.2,2035-2053).
ccaccttcagatacatcta

SEQ ID NO: 267279 - DNA, 19 bp, Homo sapiens
  siRNA target sequence for SLCO1A2 (NM_021094.2,2094-2112).
ccagccttaatcatcttaa

SEQ ID NO: 267280 - DNA, 19 bp, Homo sapiens
  siRNA target sequence for SLCO1A2 (NM_021094.2,2095-2113).
cagccttaatcatcttaat

SEQ ID NO: 267281 - DNA, 19 bp, Homo sapiens
  siRNA target sequence for SLCO1A2 (NM_021094.2,2098-2116).
ccttaatcatcttaattct

SEQ ID NO: 267282 - DNA, 19 bp, Homo sapiens
  siRNA target sequence for SLCO1A2 (NM_021094.2,2157-2175).
ggaacagagcttatagaga

SEQ ID NO: 267283 - DNA, 19 bp, Homo sapiens
  siRNA target sequence for SLCO1A2 (NM_021094.2,2161-2179).
cagagcttatagagacaaa

SEQ ID NO: 267284 - DNA, 19 bp, Homo sapiens
  siRNA target sequence for SLCO1A2 (NM_021094.2,2217-2235).
caaaagtccacggttttga

SEQ ID NO: 267285 - DNA, 19 bp, Homo sapiens
  siRNA target sequence for SLCO1A2 (NM_021094.2,2224-2242).
ccacggttttgaaagatga

SEQ ID NO: 267286 - DNA, 19 bp, Homo sapiens
  siRNA target sequence for SLCO1A2 (NM_021094.2,2225-2243).
cacggttttgaaagatgat

SEQ ID NO: 267287 - DNA, 19 bp, Homo sapiens
  siRNA target sequence for SLCO1B3 (NM_019844.1,109-127).
gacgctgcaatggattcaa

SEQ ID NO: 267288 - DNA, 19 bp, Homo sapiens
  siRNA target sequence for SLCO1B3 (NM_019844.1,141-159).
gccctgtcattcagctata

SEQ ID NO: 267289 - DNA, 19 bp, Homo sapiens
  siRNA target sequence for SLCO1B3 (NM_019844.1,168-186).
gcactaggtggaatcatta

SEQ ID NO: 267290 - DNA, 19 bp, Homo sapiens
  siRNA target sequence for SLCO1B3 (NM_019844.1,1153-1171).
ctgcatctcatgctaactt

SEQ ID NO: 267291 - DNA, 19 bp, Homo sapiens
  siRNA target sequence for SLCO1B3 (NM_019844.1,1155-1173).
gcatctcatgctaactttt

SEQ ID NO: 267292 - DNA, 19 bp, Homo sapiens
  siRNA target sequence for SLCO1B3 (NM_019844.1,1169-1187).
ctttttgttgggaatcata

SEQ ID NO: 267293 - DNA, 19 bp, Homo sapiens
  siRNA target sequence for SLCO1B3 (NM_019844.1,1175-1193).
gttgggaatcataaccatt

SEQ ID NO: 267294 - DNA, 19 bp, Homo sapiens
  siRNA target sequence for SLCO1B3 (NM_019844.1,1198-1216).
cggttgcaactggaatgtt

SEQ ID NO: 267295 - DNA, 19 bp, Homo sapiens
  siRNA target sequence for SLCO1B3 (NM_019844.1,1288-1306).
cgatgatatccttcttgtt

SEQ ID NO: 267296 - DNA, 19 bp, Homo sapiens
  siRNA target sequence for SLCO1B3 (NM_019844.1,1292-1310).
gatatccttcttgtttcaa

SEQ ID NO: 267297 - DNA, 19 bp, Homo sapiens
  siRNA target sequence for SLCO1B3 (NM_019844.1,1384-1402).
cagtggcatctcatgtaga

SEQ ID NO: 267298 - DNA, 19 bp, Homo sapiens
  siRNA target sequence for SLCO1B3 (NM_019844.1,1636-1654).
caaggaaatttttcatcta

SEQ ID NO: 267299 - DNA, 19 bp, Homo sapiens
  siRNA target sequence for SLCO1B3 (NM_019844.1,1656-1674).
gttgcaattcaagtcataa

SEQ ID NO: 267300 - DNA, 19 bp, Homo sapiens
  siRNA target sequence for SLCO1B3 (NM_019844.1,1659-1677).
gcaattcaagtcataaact

SEQ ID NO: 267301 - DNA, 19 bp, Homo sapiens
  siRNA target sequence for SLCO1B3 (NM_019844.1,1665-1683).
caagtcataaactctttgt

SEQ ID NO: 267302 - DNA, 19 bp, Homo sapiens
  siRNA target sequence for SLCO1B3 (NM_019844.1,1693-1711).
caggaggtaccacatttat

SEQ ID NO: 267303 - DNA, 19 bp, Homo sapiens
  siRNA target sequence for SLCO1B3 (NM_019844.1,1695-1713).
ggaggtaccacatttatct

SEQ ID NO: 267304 - DNA, 19 bp, Homo sapiens
  siRNA target sequence for SLCO1B3 (NM_019844.1,1712-1730).
cttgttgactgtgaagatt

SEQ ID NO: 267305 - DNA, 19 bp, Homo sapiens
  siRNA target sequence for SLCO1B3 (NM_019844.1,1769-1787).
gtcaatggttataagaaca

SEQ ID NO: 267306 - DNA, 19 bp, Homo sapiens
  siRNA target sequence for SLCO1B3 (NM_019844.1,1886-1904).
gatatataattccgtattt

SEQ ID NO: 267307 - DNA, 19 bp, Homo sapiens
  siRNA target sequence for SLCO1B3 (NM_019844.1,1916-1934).
ctacttgggcttatctata

SEQ ID NO: 267308 - DNA, 19 bp, Homo sapiens
  siRNA target sequence for SLCO1B3 (NM_019844.1,1919-1937).
cttgggcttatctatagct

SEQ ID NO: 267309 - DNA, 19 bp, Homo sapiens
  siRNA target sequence for SLCO1B3 (NM_019844.1,2011-2029).
ccaaggcatcggacaatga

SEQ ID NO: 267310 - DNA, 19 bp, Homo sapiens
  siRNA target sequence for SLCO1B3 (NM_019844.1,2012-2030).
caaggcatcggacaatgaa

SEQ ID NO: 267311 - DNA, 19 bp, Homo sapiens
  siRNA target sequence for SLCO1B3 (NM_019844.1,2015-2033).
ggcatcggacaatgaaaga

SEQ ID NO: 267312 - DNA, 19 bp, Homo sapiens
  siRNA target sequence for SLCO1B3 (NM_019844.1,2017-2035).
catcggacaatgaaagaaa

SEQ ID NO: 267313 - DNA, 19 bp, Homo sapiens
  siRNA target sequence for SLCO1B3 (NM_019844.1,2020-2038).
cggacaatgaaagaaaagt

SEQ ID NO: 267314 - DNA, 19 bp, Homo sapiens
  siRNA target sequence for SLCO1B3 (NM_019844.1,2063-2081).
cttaaataatggtgaacat

SEQ ID NO: 267315 - DNA, 19 bp, Homo sapiens
  siRNA target sequence for SLCO1B3 (NM_019844.1,2092-2110).
ctgctggaacagatagtaa

SEQ ID NO: 267316 - DNA, 19 bp, Homo sapiens
  siRNA target sequence for SLCO1B3 (NM_019844.1,2094-2112).
gctggaacagatagtaaaa

SEQ ID NO: 267317 - DNA, 19 bp, Homo sapiens
  siRNA target sequence for DKFZp761H039 (NM_018711.1,198-216).
ggcagctgccggttgtgaa

SEQ ID NO: 267318 - DNA, 19 bp, Homo sapiens
  siRNA target sequence for DKFZp761H039 (NM_018711.1,353-371).
gccaatcccactgatgata

SEQ ID NO: 267319 - DNA, 19 bp, Homo sapiens
  siRNA target sequence for DKFZp761H039 (NM_018711.1,360-378).
ccactgatgatactttcat

SEQ ID NO: 267320 - DNA, 19 bp, Homo sapiens
  siRNA target sequence for DKFZp761H039 (NM_018711.1,399-417).
ccattggctttggaaaatt

SEQ ID NO: 267321 - DNA, 19 bp, Homo sapiens
  siRNA target sequence for DKFZp761H039 (NM_018711.1,461-479).
gatgccatggagatgatga

SEQ ID NO: 267322 - DNA, 19 bp, Homo sapiens
  siRNA target sequence for DKFZp761H039 (NM_018711.1,547-565).
gacctcggtggtctttgta

SEQ ID NO: 267323 - DNA, 19 bp, Homo sapiens
  siRNA target sequence for DKFZp761H039 (NM_018711.1,582-600).
ccacgctctggggaaatat

SEQ ID NO: 267324 - DNA, 19 bp, Homo sapiens
  siRNA target sequence for DKFZp761H039 (NM_018711.1,607-625).
ccagtacggcaggaaaaca

SEQ ID NO: 267325 - DNA, 19 bp, Homo sapiens
  siRNA target sequence for DKFZp761H039 (NM_018711.1,653-671).
ctgtactatggcatcctta

SEQ ID NO: 267326 - DNA, 19 bp, Homo sapiens
  siRNA target sequence for DKFZp761H039 (NM_018711.1,992-1010).
gcaatcgccaccttaaaga

SEQ ID NO: 267327 - DNA, 19 bp, Homo sapiens
  siRNA target sequence for DKFZp761H039 (NM_018711.1,1041-1059).
cgctggggaaactcatcat

SEQ ID NO: 267328 - DNA, 19 bp, Homo sapiens
  siRNA target sequence for DKFZp761H039 (NM_018711.1,1127-1145).
ctgctgtggtttatatggt

SEQ ID NO: 267329 - DNA, 19 bp, Homo sapiens
  siRNA target sequence for DKFZp761H039 (NM_018711.1,1134-1152).
ggtttatatggttttccaa

SEQ ID NO: 267330 - DNA, 19 bp, Homo sapiens
  siRNA target sequence for DKFZp761H039 (NM_018711.1,1135-1153).
gtttatatggttttccaat

SEQ ID NO: 267331 - DNA, 19 bp, Homo sapiens
  siRNA target sequence for DKFZp761H039 (NM_018711.1,1149-1167).
ccaatgcattctcttacta

SEQ ID NO: 267332 - DNA, 19 bp, Homo sapiens
  siRNA target sequence for DKFZp761H039 (NM_018711.1,1159-1177).
ctcttactacgggttagtt

SEQ ID NO: 267333 - DNA, 19 bp, Homo sapiens
  siRNA target sequence for DKFZp761H039 (NM_018711.1,1161-1179).
cttactacgggttagttct

SEQ ID NO: 267334 - DNA, 19 bp, Homo sapiens
  siRNA target sequence for DKFZp761H039 (NM_018711.1,1334-1352).
cttgtgactctgtggatta

SEQ ID NO: 267335 - DNA, 19 bp, Homo sapiens
  siRNA target sequence for DKFZp761H039 (NM_018711.1,1454-1472).
ctgttactcttcattgcaa

SEQ ID NO: 267336 - DNA, 19 bp, Homo sapiens
  siRNA target sequence for DKFZp761H039 (NM_018711.1,1465-1483).
cattgcaagagcgtttatt

SEQ ID NO: 267337 - DNA, 19 bp, Homo sapiens
  siRNA target sequence for DKFZp761H039 (NM_018711.1,1496-1514).
caagcggcatatgtttaca

SEQ ID NO: 267338 - DNA, 19 bp, Homo sapiens
  siRNA target sequence for DKFZp761H039 (NM_018711.1,1637-1655).
ctgactctggcagtttaca

SEQ ID NO: 267339 - DNA, 19 bp, Homo sapiens
  siRNA target sequence for DKFZp761H039 (NM_018711.1,1639-1657).
gactctggcagtttacagt

SEQ ID NO: 267340 - DNA, 19 bp, Homo sapiens
  siRNA target sequence for PLP2 (NM_002668.1,154-172).
ctcctgtttgctgagatta

SEQ ID NO: 267341 - DNA, 19 bp, Homo sapiens
  siRNA target sequence for PLP2 (NM_002668.1,159-177).
gtttgctgagattatatta

SEQ ID NO: 267342 - DNA, 19 bp, Homo sapiens
  siRNA target sequence for PLP2 (NM_002668.1,227-245).
ccctgtcggtgattgagat

SEQ ID NO: 267343 - DNA, 19 bp, Homo sapiens
  siRNA target sequence for PLP2 (NM_002668.1,243-261).
gatgatccttgctgctatt

SEQ ID NO: 267344 - DNA, 19 bp, Homo sapiens
  siRNA target sequence for PLP2 (NM_002668.1,286-304).
ctgcacaccaagataccat

SEQ ID NO: 267345 - DNA, 19 bp, Homo sapiens
  siRNA target sequence for PLP2 (NM_002668.1,392-410).
gaggaaaccactccaaaat

SEQ ID NO: 267346 - DNA, 19 bp, Homo sapiens
  siRNA target sequence for PLP2 (NM_002668.1,395-413).
gaaaccactccaaaatcgt

SEQ ID NO: 267347 - DNA, 19 bp, Homo sapiens
  siRNA target sequence for PLP2 (NM_002668.1,477-495).
cgttcggcagccaagacat

SEQ ID NO: 267348 - DNA, 19 bp, Homo sapiens
  siRNA target sequence for SLC22A5 (NM_003060.2,640-658).
ggaaggccccactcacaat

SEQ ID NO: 267349 - DNA, 19 bp, Homo sapiens
  siRNA target sequence for SLC22A5 (NM_003060.2,680-698).
gctgttgggctccttcatt

SEQ ID NO: 267350 - DNA, 19 bp, Homo sapiens
  siRNA target sequence for SLC22A5 (NM_003060.2,779-797).
gcagatcttctcgaagaat

SEQ ID NO: 267351 - DNA, 19 bp, Homo sapiens
  siRNA target sequence for SLC22A5 (NM_003060.2,780-798).
cagatcttctcgaagaatt

SEQ ID NO: 267352 - DNA, 19 bp, Homo sapiens
  siRNA target sequence for SLC22A5 (NM_003060.2,790-808).
cgaagaattttgagatgtt

SEQ ID NO: 267353 - DNA, 19 bp, Homo sapiens
  siRNA target sequence for SLC22A5 (NM_003060.2,848-866).
caactatgtggcagcattt

SEQ ID NO: 267354 - DNA, 19 bp, Homo sapiens
  siRNA target sequence for SLC22A5 (NM_003060.2,1073-1091).
catctctcagggacgattt

SEQ ID NO: 267355 - DNA, 19 bp, Homo sapiens
  siRNA target sequence for SLC22A5 (NM_003060.2,1076-1094).
ctctcagggacgatttgaa

SEQ ID NO: 267356 - DNA, 19 bp, Homo sapiens
  siRNA target sequence for SLC22A5 (NM_003060.2,1078-1096).
ctcagggacgatttgaaga

SEQ ID NO: 267357 - DNA, 19 bp, Homo sapiens
  siRNA target sequence for SLC22A5 (NM_003060.2,1140-1158).
gttgtgccttccactatct

SEQ ID NO: 267358 - DNA, 19 bp, Homo sapiens
  siRNA target sequence for SLC22A5 (NM_003060.2,1157-1175).
ctttgacccgagtgagtta

SEQ ID NO: 267359 - DNA, 19 bp, Homo sapiens
  siRNA target sequence for SLC22A5 (NM_003060.2,1170-1188).
gagttacaagacctaagtt

SEQ ID NO: 267360 - DNA, 19 bp, Homo sapiens
  siRNA target sequence for SLC22A5 (NM_003060.2,1196-1214).
gcagcagtcccacaacatt

SEQ ID NO: 267361 - DNA, 19 bp, Homo sapiens
  siRNA target sequence for SLC22A5 (NM_003060.2,1221-1239).
ctgcttcgaacctggaata

SEQ ID NO: 267362 - DNA, 19 bp, Homo sapiens
  siRNA target sequence for SLC22A5 (NM_003060.2,1248-1266).
gtcaccatcatgtccataa

SEQ ID NO: 267363 - DNA, 19 bp, Homo sapiens
  siRNA target sequence for SLC22A5 (NM_003060.2,1252-1270).
ccatcatgtccataatgct

SEQ ID NO: 267364 - DNA, 19 bp, Homo sapiens
  siRNA target sequence for SLC22A5 (NM_003060.2,1268-1286).
gctgtggatgaccatatca

SEQ ID NO: 267365 - DNA, 19 bp, Homo sapiens
  siRNA target sequence for SLC22A5 (NM_003060.2,1279-1297).
ccatatcagtgggctattt

SEQ ID NO: 267366 - DNA, 19 bp, Homo sapiens
  siRNA target sequence for SLC22A5 (NM_003060.2,1280-1298).
catatcagtgggctatttt

SEQ ID NO: 267367 - DNA, 19 bp, Homo sapiens
  siRNA target sequence for SLC22A5 (NM_003060.2,1306-1324).
cgcttgatactcctaactt

SEQ ID NO: 267368 - DNA, 19 bp, Homo sapiens
  siRNA target sequence for SLC22A5 (NM_003060.2,1326-1344).
catggggacatctttgtga

SEQ ID NO: 267369 - DNA, 19 bp, Homo sapiens
  siRNA target sequence for SLC22A5 (NM_003060.2,1364-1382).
ggttgaagtcccagcatat

SEQ ID NO: 267370 - DNA, 19 bp, Homo sapiens
  siRNA target sequence for SLC22A5 (NM_003060.2,1453-1471).
gcagtgtccttctcttcat

SEQ ID NO: 267371 - DNA, 19 bp, Homo sapiens
  siRNA target sequence for SLC22A5 (NM_003060.2,1478-1496).
ggtacccccagacttgtat

SEQ ID NO: 267372 - DNA, 19 bp, Homo sapiens
  siRNA target sequence for SLC22A5 (NM_003060.2,1479-1497).
gtacccccagacttgtatt

SEQ ID NO: 267373 - DNA, 19 bp, Homo sapiens
  siRNA target sequence for SLC22A5 (NM_003060.2,1482-1500).
cccccagacttgtattatt

SEQ ID NO: 267374 - DNA, 19 bp, Homo sapiens
  siRNA target sequence for SLC22A5 (NM_003060.2,1835-1853).
cacaaggatgttaaaagat

SEQ ID NO: 267375 - DNA, 19 bp, Homo sapiens
  siRNA target sequence for SLC22A5 (NM_003060.2,1860-1878).
gaaaggcccacaatcctta

SEQ ID NO: 267376 - DNA, 19 bp, Homo sapiens
  siRNA target sequence for AP1B1 (NM_001127.2,213-231).
ccaagaaaggggagatctt

SEQ ID NO: 267377 - DNA, 19 bp, Homo sapiens
  siRNA target sequence for AP1B1 (NM_001127.2,386-404).
ctagtatacctctacttga

SEQ ID NO: 267378 - DNA, 19 bp, Homo sapiens
  siRNA target sequence for AP1B1 (NM_001127.2,516-534).
gctgcatccgcgttgacaa

SEQ ID NO: 267379 - DNA, 19 bp, Homo sapiens
  siRNA target sequence for AP1B1 (NM_001127.2,519-537).
gcatccgcgttgacaagat

SEQ ID NO: 267380 - DNA, 19 bp, Homo sapiens
  siRNA target sequence for AP1B1 (NM_001127.2,996-1014).
ctaaggacttggactacta

SEQ ID NO: 267381 - DNA, 19 bp, Homo sapiens
  siRNA target sequence for AP1B1 (NM_001127.2,1087-1105).
ggccctgcgcaacatcaat

SEQ ID NO: 267382 - DNA, 19 bp, Homo sapiens
  siRNA target sequence for AP1B1 (NM_001127.2,1091-1109).
ctgcgcaacatcaatctca

SEQ ID NO: 267383 - DNA, 19 bp, Homo sapiens
  siRNA target sequence for AP1B1 (NM_001127.2,1258-1276).
gaaagagtacgcaacagaa

SEQ ID NO: 267384 - DNA, 19 bp, Homo sapiens
  siRNA target sequence for AP1B1 (NM_001127.2,1453-1471).
caagtatgagagtgtgatt

SEQ ID NO: 267385 - DNA, 19 bp, Homo sapiens
  siRNA target sequence for AP1B1 (NM_001127.2,1742-1760).
cgggaccgtggctacatct

SEQ ID NO: 267386 - DNA, 19 bp, Homo sapiens
  siRNA target sequence for AP1B1 (NM_001127.2,1743-1761).
gggaccgtggctacatcta

SEQ ID NO: 267387 - DNA, 19 bp, Homo sapiens
  siRNA target sequence for AP1B1 (NM_001127.2,1846-1864).
catcgagcccacactgtta

SEQ ID NO: 267388 - DNA, 19 bp, Homo sapiens
  siRNA target sequence for AP1B1 (NM_001127.2,1857-1875).
cactgttagacgagcttat

SEQ ID NO: 267389 - DNA, 19 bp, Homo sapiens
  siRNA target sequence for AP1B1 (NM_001127.2,1892-1910).
ctggcttccgtctaccata

SEQ ID NO: 267390 - DNA, 19 bp, Homo sapiens
  siRNA target sequence for AP1B1 (NM_001127.2,2313-2331).
gcaccctgtcaggatcata

SEQ ID NO: 267391 - DNA, 19 bp, Homo sapiens
  siRNA target sequence for AP1B1 (NM_001127.2,2316-2334).
ccctgtcaggatcatatgt

SEQ ID NO: 267392 - DNA, 19 bp, Homo sapiens
  siRNA target sequence for AP1B1 (NM_001127.2,2580-2598).
cggtgggctcggtcatgaa

SEQ ID NO: 267393 - DNA, 19 bp, Homo sapiens
  siRNA target sequence for AP1B1 (NM_001127.2,2582-2600).
gtgggctcggtcatgaaga

SEQ ID NO: 267394 - DNA, 19 bp, Homo sapiens
  siRNA target sequence for AP1G1 (NM_001128.4,365-383).
ccgaacccaagctgaagaa

SEQ ID NO: 267395 - DNA, 19 bp, Homo sapiens
  siRNA target sequence for AP1G1 (NM_001128.4,411-429).
gcaatccggtcatctttta

SEQ ID NO: 267396 - DNA, 19 bp, Homo sapiens
  siRNA target sequence for AP1G1 (NM_001128.4,416-434).
ccggtcatcttttagagaa

SEQ ID NO: 267397 - DNA, 19 bp, Homo sapiens
  siRNA target sequence for AP1G1 (NM_001128.4,557-575).
caaacgcattggctattta

SEQ ID NO: 267398 - DNA, 19 bp, Homo sapiens
  siRNA target sequence for AP1G1 (NM_001128.4,578-596).
ggcaatgctgctgttagat

SEQ ID NO: 267399 - DNA, 19 bp, Homo sapiens
  siRNA target sequence for AP1G1 (NM_001128.4,580-598).
caatgctgctgttagatga

SEQ ID NO: 267400 - DNA, 19 bp, Homo sapiens
  siRNA target sequence for AP1G1 (NM_001128.4,618-636).
ctcatgaccaactgtatca

SEQ ID NO: 267401 - DNA, 19 bp, Homo sapiens
  siRNA target sequence for AP1G1 (NM_001128.4,623-641).
gaccaactgtatcaagaat

SEQ ID NO: 267402 - DNA, 19 bp, Homo sapiens
  siRNA target sequence for AP1G1 (NM_001128.4,626-644).
caactgtatcaagaatgat

SEQ ID NO: 267403 - DNA, 19 bp, Homo sapiens
  siRNA target sequence for AP1G1 (NM_001128.4,669-687).
caggggttagcactttgta

SEQ ID NO: 267404 - DNA, 19 bp, Homo sapiens
  siRNA target sequence for AP1G1 (NM_001128.4,809-827).
caggaaagttcctgaactt

SEQ ID NO: 267405 - DNA, 19 bp, Homo sapiens
  siRNA target sequence for AP1G1 (NM_001128.4,820-838).
ctgaacttatggagatgtt

SEQ ID NO: 267406 - DNA, 19 bp, Homo sapiens
  siRNA target sequence for AP1G1 (NM_001128.4,897-915).
gtagtcctcctcacagaaa

SEQ ID NO: 267407 - DNA, 19 bp, Homo sapiens
  siRNA target sequence for AP1G1 (NM_001128.4,933-951).
gacatgcttgcgcatttca

SEQ ID NO: 267408 - DNA, 19 bp, Homo sapiens
  siRNA target sequence for AP1G1 (NM_001128.4,935-953).
catgcttgcgcatttcaga

SEQ ID NO: 267409 - DNA, 19 bp, Homo sapiens
  siRNA target sequence for AP1G1 (NM_001128.4,962-980).
gcagcttgtgccccaatta

SEQ ID NO: 267410 - DNA, 19 bp, Homo sapiens
  siRNA target sequence for AP1G1 (NM_001128.4,965-983).
gcttgtgccccaattagtt

SEQ ID NO: 267411 - DNA, 19 bp, Homo sapiens
  siRNA target sequence for AP1G1 (NM_001128.4,1001-1019).
catcatgtccggatattca

SEQ ID NO: 267412 - DNA, 19 bp, Homo sapiens
  siRNA target sequence for AP1G1 (NM_001128.4,1010-1028).
cggatattcaccagaacat

SEQ ID NO: 267413 - DNA, 19 bp, Homo sapiens
  siRNA target sequence for AP1G1 (NM_001128.4,1012-1030).
gatattcaccagaacatga

SEQ ID NO: 267414 - DNA, 19 bp, Homo sapiens
  siRNA target sequence for AP1G1 (NM_001128.4,1065-1083).
cgaattttgcggttattaa

SEQ ID NO: 267415 - DNA, 19 bp, Homo sapiens
  siRNA target sequence for AP1G1 (NM_001128.4,1076-1094).
gttattaagaattttagga

SEQ ID NO: 267416 - DNA, 19 bp, Homo sapiens
  siRNA target sequence for AP1G1 (NM_001128.4,1092-1110).
ggacgaaatgatgatgatt

SEQ ID NO: 267417 - DNA, 19 bp, Homo sapiens
  siRNA target sequence for AP1G1 (NM_001128.4,1095-1113).
cgaaatgatgatgattcaa

SEQ ID NO: 267418 - DNA, 19 bp, Homo sapiens
  siRNA target sequence for AP1G1 (NM_001128.4,1173-1191).
gtaggaaatgctattcttt

SEQ ID NO: 267419 - DNA, 19 bp, Homo sapiens
  siRNA target sequence for AP1G1 (NM_001128.4,1177-1195).
gaaatgctattctttatga

SEQ ID NO: 267420 - DNA, 19 bp, Homo sapiens
  siRNA target sequence for AP1G1 (NM_001128.4,1188-1206).
ctttatgaaacggttttga

SEQ ID NO: 267421 - DNA, 19 bp, Homo sapiens
  siRNA target sequence for AP1G1 (NM_001128.4,1200-1218).
gttttgactatcatggata

SEQ ID NO: 267422 - DNA, 19 bp, Homo sapiens
  siRNA target sequence for AP1G1 (NM_001128.4,1238-1256).
gcgagtcctagccataaat

SEQ ID NO: 267423 - DNA, 19 bp, Homo sapiens
  siRNA target sequence for AP1G1 (NM_001128.4,1240-1258).
gagtcctagccataaatat

SEQ ID NO: 267424 - DNA, 19 bp, Homo sapiens
  siRNA target sequence for AP1G1 (NM_001128.4,1325-1343).
gactgtacagacagatcat

SEQ ID NO: 267425 - DNA, 19 bp, Homo sapiens
  siRNA target sequence for AP1G1 (NM_001128.4,1327-1345).
ctgtacagacagatcataa

SEQ ID NO: 267426 - DNA, 19 bp, Homo sapiens
  siRNA target sequence for AP1G1 (NM_001128.4,1379-1397).
ctgtcttaaagatttggat

SEQ ID NO: 267427 - DNA, 19 bp, Homo sapiens
  siRNA target sequence for AP1G1 (NM_001128.4,1410-1428).
cggcgtgcaatggaattga

SEQ ID NO: 267428 - DNA, 19 bp, Homo sapiens
  siRNA target sequence for AP1G1 (NM_001128.4,1412-1430).
gcgtgcaatggaattgagt

SEQ ID NO: 267429 - DNA, 19 bp, Homo sapiens
  siRNA target sequence for AP1G1 (NM_001128.4,1413-1431).
cgtgcaatggaattgagtt

SEQ ID NO: 267430 - DNA, 19 bp, Homo sapiens
  siRNA target sequence for AP1G1 (NM_001128.4,1427-1445).
gagttttgccctggtaaat

SEQ ID NO: 267431 - DNA, 19 bp, Homo sapiens
  siRNA target sequence for AP1G1 (NM_001128.4,1462-1480).
gcatgatgaaagaattact

SEQ ID NO: 267432 - DNA, 19 bp, Homo sapiens
  siRNA target sequence for AP1G1 (NM_001128.4,1495-1513).
cgtgtgagccagaatttaa

SEQ ID NO: 267433 - DNA, 19 bp, Homo sapiens
  siRNA target sequence for AP1G1 (NM_001128.4,1601-1619).
gacaacggcaggaagttat

SEQ ID NO: 267434 - DNA, 19 bp, Homo sapiens
  siRNA target sequence for AP1G1 (NM_001128.4,1603-1621).
caacggcaggaagttatgt

SEQ ID NO: 267435 - DNA, 19 bp, Homo sapiens
  siRNA target sequence for AP1G1 (NM_001128.4,1629-1647).
gatgcagtccccaatttaa

SEQ ID NO: 267436 - DNA, 19 bp, Homo sapiens
  siRNA target sequence for AP1G1 (NM_001128.4,1633-1651).
cagtccccaatttaatcca

SEQ ID NO: 267437 - DNA, 19 bp, Homo sapiens
  siRNA target sequence for AP1G1 (NM_001128.4,1639-1657).
ccaatttaatccagttaat

SEQ ID NO: 267438 - DNA, 19 bp, Homo sapiens
  siRNA target sequence for AP1G1 (NM_001128.4,1640-1658).
caatttaatccagttaata

SEQ ID NO: 267439 - DNA, 19 bp, Homo sapiens
  siRNA target sequence for AP1G1 (NM_001128.4,1649-1667).
ccagttaataactaatagt

SEQ ID NO: 267440 - DNA, 19 bp, Homo sapiens
  siRNA target sequence for AP1G1 (NM_001128.4,1687-1705).
ctgtccagcgcctgtacaa

SEQ ID NO: 267441 - DNA, 19 bp, Homo sapiens
  siRNA target sequence for AP1G1 (NM_001128.4,1753-1771).
catggtgtataggtgaata

SEQ ID NO: 267442 - DNA, 19 bp, Homo sapiens
  siRNA target sequence for AP1G1 (NM_001128.4,1757-1775).
gtgtataggtgaatatggt

SEQ ID NO: 267443 - DNA, 19 bp, Homo sapiens
  siRNA target sequence for AP1G1 (NM_001128.4,1765-1783).
gtgaatatggtgatcttct

SEQ ID NO: 267444 - DNA, 19 bp, Homo sapiens
  siRNA target sequence for AP1G1 (NM_001128.4,1851-1869).
gaaagtgtcctaatctcta

SEQ ID NO: 267445 - DNA, 19 bp, Homo sapiens
  siRNA target sequence for AP1G1 (NM_001128.4,1919-1937).
gctttccactcgattcact

SEQ ID NO: 267446 - DNA, 19 bp, Homo sapiens
  siRNA target sequence for AP1G1 (NM_001128.4,1920-1938).
ctttccactcgattcactt

SEQ ID NO: 267447 - DNA, 19 bp, Homo sapiens
  siRNA target sequence for AP1G1 (NM_001128.4,1925-1943).
cactcgattcacttgtact

SEQ ID NO: 267448 - DNA, 19 bp, Homo sapiens
  siRNA target sequence for AP1G1 (NM_001128.4,1939-1957).
gtactgtaaaccgaattaa

SEQ ID NO: 267449 - DNA, 19 bp, Homo sapiens
  siRNA target sequence for AP1G1 (NM_001128.4,2009-2027).
ggcagtagaatataatgca

SEQ ID NO: 267450 - DNA, 19 bp, Homo sapiens
  siRNA target sequence for AP1G1 (NM_001128.4,2114-2132).
gattgtgcagacaaatgga

SEQ ID NO: 267451 - DNA, 19 bp, Homo sapiens
  siRNA target sequence for AP1G1 (NM_001128.4,2191-2209).
gccaggccaatgatttatt

SEQ ID NO: 267452 - DNA, 19 bp, Homo sapiens
  siRNA target sequence for AP1G1 (NM_001128.4,2253-2271).
gcgcctacaagcaaaccat

SEQ ID NO: 267453 - DNA, 19 bp, Homo sapiens
  siRNA target sequence for AP1G1 (NM_001128.4,2301-2319).
ctgggagacatcaacctta

SEQ ID NO: 267454 - DNA, 19 bp, Homo sapiens
  siRNA target sequence for AP1G1 (NM_001128.4,2384-2402).
gttggatgggctttcatca

SEQ ID NO: 267455 - DNA, 19 bp, Homo sapiens
  siRNA target sequence for AP1G1 (NM_001128.4,2459-2477).
gaatggcttgaagatagaa

SEQ ID NO: 267456 - DNA, 19 bp, Homo sapiens
  siRNA target sequence for AP1G1 (NM_001128.4,2480-2498).
cacctttgaacggtcaaat

SEQ ID NO: 267457 - DNA, 19 bp, Homo sapiens
  siRNA target sequence for AP1G1 (NM_001128.4,2500-2518).
ccaaccccagtgtaacagt

SEQ ID NO: 267458 - DNA, 19 bp, Homo sapiens
  siRNA target sequence for AP1G1 (NM_001128.4,2509-2527).
gtgtaacagtgataacgat

SEQ ID NO: 267459 - DNA, 19 bp, Homo sapiens
  siRNA target sequence for AP1G1 (NM_001128.4,2553-2571).
gatatgacggactttgttt

SEQ ID NO: 267460 - DNA, 19 bp, Homo sapiens
  siRNA target sequence for AP1G1 (NM_001128.4,2577-2595).
gctgcagtaccaaagacat

SEQ ID NO: 267461 - DNA, 19 bp, Homo sapiens
  siRNA target sequence for AP1G1 (NM_001128.4,2626-2644).
gcattgtcccagcatttaa

SEQ ID NO: 267462 - DNA, 19 bp, Homo sapiens
  siRNA target sequence for AP1G1 (NM_001128.4,2650-2668).
ggaccatcacacaagtcat

SEQ ID NO: 267463 - DNA, 19 bp, Homo sapiens
  siRNA target sequence for AP1G1 (NM_001128.4,2651-2669).
gaccatcacacaagtcatt

SEQ ID NO: 267464 - DNA, 19 bp, Homo sapiens
  siRNA target sequence for AP1G1 (NM_001128.4,2653-2671).
ccatcacacaagtcattaa

SEQ ID NO: 267465 - DNA, 19 bp, Homo sapiens
  siRNA target sequence for AP1G1 (NM_001128.4,2654-2672).
catcacacaagtcattaaa

SEQ ID NO: 267466 - DNA, 19 bp, Homo sapiens
  siRNA target sequence for AP1G1 (NM_001128.4,2700-2718).
cgaatgcggatcaagctta

SEQ ID NO: 267467 - DNA, 19 bp, Homo sapiens
  siRNA target sequence for AP1G1 (NM_001128.4,2705-2723).
gcggatcaagcttacatat

SEQ ID NO: 267468 - DNA, 19 bp, Homo sapiens
  siRNA target sequence for AP1G1 (NM_001128.4,2706-2724).
cggatcaagcttacatata

SEQ ID NO: 267469 - DNA, 19 bp, Homo sapiens
  siRNA target sequence for AP1G2 (NM_003917.2,364-382).
ggacctcatcgaagagatt

SEQ ID NO: 267470 - DNA, 19 bp, Homo sapiens
  siRNA target sequence for AP1G2 (NM_003917.2,604-622).
ggccatgcttctattggat

SEQ ID NO: 267471 - DNA, 19 bp, Homo sapiens
  siRNA target sequence for AP1G2 (NM_003917.2,679-697).
ggggattcagccagtacaa

SEQ ID NO: 267472 - DNA, 19 bp, Homo sapiens
  siRNA target sequence for AP1G2 (NM_003917.2,800-818).
cgcaagaaggctattctga

SEQ ID NO: 267473 - DNA, 19 bp, Homo sapiens
  siRNA target sequence for AP1G2 (NM_003917.2,876-894).
gtgcccaactgcttcatga

SEQ ID NO: 267474 - DNA, 19 bp, Homo sapiens
  siRNA target sequence for AP1G2 (NM_003917.2,1257-1275).
gggttctagctgtcaacat

SEQ ID NO: 267475 - DNA, 19 bp, Homo sapiens
  siRNA target sequence for AP1G2 (NM_003917.2,1258-1276).
ggttctagctgtcaacatt

SEQ ID NO: 267476 - DNA, 19 bp, Homo sapiens
  siRNA target sequence for AP1G2 (NM_003917.2,1299-1317).
gtgacaggaacattaggta

SEQ ID NO: 267477 - DNA, 19 bp, Homo sapiens
  siRNA target sequence for AP1G2 (NM_003917.2,1303-1321).
caggaacattaggtatgta

SEQ ID NO: 267478 - DNA, 19 bp, Homo sapiens
  siRNA target sequence for AP1G2 (NM_003917.2,1383-1401).
ccactgtggtggaatgtct

SEQ ID NO: 267479 - DNA, 19 bp, Homo sapiens
  siRNA target sequence for AP1G2 (NM_003917.2,1384-1402).
cactgtggtggaatgtcta

SEQ ID NO: 267480 - DNA, 19 bp, Homo sapiens
  siRNA target sequence for AP1G2 (NM_003917.2,1448-1466).
ctggctctggtaaatagct

SEQ ID NO: 267481 - DNA, 19 bp, Homo sapiens
  siRNA target sequence for AP1G2 (NM_003917.2,1809-1827).
ggaactgcgaggagattga

SEQ ID NO: 267482 - DNA, 19 bp, Homo sapiens
  siRNA target sequence for AP1G2 (NM_003917.2,2043-2061).
cactcttccggaaatacga

SEQ ID NO: 267483 - DNA, 19 bp, Homo sapiens
  siRNA target sequence for AP1G2 (NM_003917.2,2338-2356).
cccagatctcaaagtgttt

SEQ ID NO: 267484 - DNA, 19 bp, Homo sapiens
  siRNA target sequence for AP1G2 (NM_003917.2,2340-2358).
cagatctcaaagtgtttga

SEQ ID NO: 267485 - DNA, 19 bp, Homo sapiens
  siRNA target sequence for AP1G2 (NM_003917.2,2366-2384).
ggagtacagctgaatctgt

SEQ ID NO: 267486 - DNA, 19 bp, Homo sapiens
  siRNA target sequence for AP1G2 (NM_003917.2,2454-2472).
gtgatgtcacccatttcat

SEQ ID NO: 267487 - DNA, 19 bp, Homo sapiens
  siRNA target sequence for AP1G2 (NM_003917.2,2541-2559).
ctcggggtggccttcctat

SEQ ID NO: 267488 - DNA, 19 bp, Homo sapiens
  siRNA target sequence for AP1G2 (NM_003917.2,2641-2659).
gtcggtgcaggagatcttt

SEQ ID NO: 267489 - DNA, 19 bp, Homo sapiens
  siRNA target sequence for AP1M1 (NM_032493.2,272-290).
ccgtttcatgtggatcaaa

SEQ ID NO: 267490 - DNA, 19 bp, Homo sapiens
  siRNA target sequence for AP1M1 (NM_032493.2,274-292).
gtttcatgtggatcaaaca

SEQ ID NO: 267491 - DNA, 19 bp, Homo sapiens
  siRNA target sequence for AP1M1 (NM_032493.2,375-393).
gtgttttccgagtacttca

SEQ ID NO: 267492 - DNA, 19 bp, Homo sapiens
  siRNA target sequence for AP1M1 (NM_032493.2,585-603).
cggtccgaaggcatcaagt

SEQ ID NO: 267493 - DNA, 19 bp, Homo sapiens
  siRNA target sequence for AP1M1 (NM_032493.2,586-604).
ggtccgaaggcatcaagta

SEQ ID NO: 267494 - DNA, 19 bp, Homo sapiens
  siRNA target sequence for AP1M1 (NM_032493.2,587-605).
gtccgaaggcatcaagtat

SEQ ID NO: 267495 - DNA, 19 bp, Homo sapiens
  siRNA target sequence for AP1M1 (NM_032493.2,596-614).
catcaagtatcggaagaat

SEQ ID NO: 267496 - DNA, 19 bp, Homo sapiens
  siRNA target sequence for AP1M1 (NM_032493.2,753-771).
gacaaggtcctctttgaca

SEQ ID NO: 267497 - DNA, 19 bp, Homo sapiens
  siRNA target sequence for AP1M1 (NM_032493.2,920-938).
ccacgtcaagcctttgata

SEQ ID NO: 267498 - DNA, 19 bp, Homo sapiens
  siRNA target sequence for AP1M1 (NM_032493.2,924-942).
gtcaagcctttgatatgga

SEQ ID NO: 267499 - DNA, 19 bp, Homo sapiens
  siRNA target sequence for AP1M1 (NM_032493.2,975-993).
cgcatcgagtacatgatca

SEQ ID NO: 267500 - DNA, 19 bp, Homo sapiens
  siRNA target sequence for AP1M1 (NM_032493.2,976-994).
gcatcgagtacatgatcaa

SEQ ID NO: 267501 - DNA, 19 bp, Homo sapiens
  siRNA target sequence for AP1M1 (NM_032493.2,1046-1064).
cattcccgtgcccaatgat

SEQ ID NO: 267502 - DNA, 19 bp, Homo sapiens
  siRNA target sequence for AP1M1 (NM_032493.2,1065-1083).
gccgactcacccaagttca

SEQ ID NO: 267503 - DNA, 19 bp, Homo sapiens
  siRNA target sequence for AP1M1 (NM_032493.2,1248-1266).
gagatcccttacttcacta

SEQ ID NO: 267504 - DNA, 19 bp, Homo sapiens
  siRNA target sequence for AP1M1 (NM_032493.2,1283-1301).
gcgctacctgaagatcatt

SEQ ID NO: 267505 - DNA, 19 bp, Homo sapiens
  siRNA target sequence for AP1M1 (NM_032493.2,1323-1341).
ctgccctgggtgcgttata

SEQ ID NO: 267506 - DNA, 19 bp, Homo sapiens
  siRNA target sequence for AP1M1 (NM_032493.2,1345-1363).
cgcagaatggagattacca

SEQ ID NO: 267507 - DNA, 19 bp, Homo sapiens
  siRNA target sequence for AP1M2 (NM_005498.3,90-108).
cgcctcggctgtcttcatt

SEQ ID NO: 267508 - DNA, 19 bp, Homo sapiens
  siRNA target sequence for AP1M2 (NM_005498.3,92-110).
cctcggctgtcttcattct

SEQ ID NO: 267509 - DNA, 19 bp, Homo sapiens
  siRNA target sequence for AP1M2 (NM_005498.3,249-267).
ccacttcctatggatcaaa

SEQ ID NO: 267510 - DNA, 19 bp, Homo sapiens
  siRNA target sequence for AP1M2 (NM_005498.3,288-306).
ggccaccacatcgaagaat

SEQ ID NO: 267511 - DNA, 19 bp, Homo sapiens
  siRNA target sequence for AP1M2 (NM_005498.3,349-367).
gaggtattctgcgaatact

SEQ ID NO: 267512 - DNA, 19 bp, Homo sapiens
  siRNA target sequence for AP1M2 (NM_005498.3,560-578).
ggcgctccgagggtatcaa

SEQ ID NO: 267513 - DNA, 19 bp, Homo sapiens
  siRNA target sequence for AP1M2 (NM_005498.3,562-580).
cgctccgagggtatcaagt

SEQ ID NO: 267514 - DNA, 19 bp, Homo sapiens
  siRNA target sequence for AP1M2 (NM_005498.3,563-581).
gctccgagggtatcaagta

SEQ ID NO: 267515 - DNA, 19 bp, Homo sapiens
  siRNA target sequence for AP1M2 (NM_005498.3,566-584).
ccgagggtatcaagtataa

SEQ ID NO: 267516 - DNA, 19 bp, Homo sapiens
  siRNA target sequence for AP1M2 (NM_005498.3,568-586).
gagggtatcaagtataaga

SEQ ID NO: 267517 - DNA, 19 bp, Homo sapiens
  siRNA target sequence for AP1M2 (NM_005498.3,585-603).
gaagaacgaggtcttcatt

SEQ ID NO: 267518 - DNA, 19 bp, Homo sapiens
  siRNA target sequence for AP1M2 (NM_005498.3,594-612).
ggtcttcattgatgtcata

SEQ ID NO: 267519 - DNA, 19 bp, Homo sapiens
  siRNA target sequence for AP1M2 (NM_005498.3,811-829).
cggctctctcgctttgaca

SEQ ID NO: 267520 - DNA, 19 bp, Homo sapiens
  siRNA target sequence for AP1M2 (NM_005498.3,812-830).
ggctctctcgctttgacaa

SEQ ID NO: 267521 - DNA, 19 bp, Homo sapiens
  siRNA target sequence for AP1M2 (NM_005498.3,907-925).
ccactgatctggattgagt

SEQ ID NO: 267522 - DNA, 19 bp, Homo sapiens
  siRNA target sequence for AP1M2 (NM_005498.3,1005-1023).
caacggtgtggagatatct

SEQ ID NO: 267523 - DNA, 19 bp, Homo sapiens
  siRNA target sequence for AP1M2 (NM_005498.3,1093-1111).
gagagaaacgtcgtgattt

SEQ ID NO: 267524 - DNA, 19 bp, Homo sapiens
  siRNA target sequence for AP1M2 (NM_005498.3,1101-1119).
cgtcgtgatttggagtatt

SEQ ID NO: 267525 - DNA, 19 bp, Homo sapiens
  siRNA target sequence for AP1M2 (NM_005498.3,1102-1120).
gtcgtgatttggagtatta

SEQ ID NO: 267526 - DNA, 19 bp, Homo sapiens
  siRNA target sequence for AP1M2 (NM_005498.3,1250-1268).
ggatccaggtccgatacat

SEQ ID NO: 267527 - DNA, 19 bp, Homo sapiens
  siRNA target sequence for AP1M2 (NM_005498.3,1255-1273).
caggtccgatacatgaaga

SEQ ID NO: 267528 - DNA, 19 bp, Homo sapiens
  siRNA target sequence for AP1M2 (NM_005498.3,1260-1278).
ccgatacatgaagatcatt

SEQ ID NO: 267529 - DNA, 19 bp, Homo sapiens
  siRNA target sequence for AP1M2 (NM_005498.3,1303-1321).
ccctgggttcgctacatca

SEQ ID NO: 267530 - DNA, 19 bp, Homo sapiens
  siRNA target sequence for AP1M2 (NM_005498.3,1322-1340).
cccagagtggcgattacca

SEQ ID NO: 267531 - DNA, 19 bp, Homo sapiens
  siRNA target sequence for AP1M2 (NM_005498.3,1323-1341).
ccagagtggcgattaccaa

SEQ ID NO: 267532 - DNA, 19 bp, Homo sapiens
  siRNA target sequence for AP1S1 (NM_001283.2,32-50).
gatgcggttcatgctatta

SEQ ID NO: 267533 - DNA, 19 bp, Homo sapiens
  siRNA target sequence for AP1S1 (NM_001283.2,36-54).
cggttcatgctattattca

SEQ ID NO: 267534 - DNA, 19 bp, Homo sapiens
  siRNA target sequence for AP1S1 (NM_001283.2,150-168).
gctcgaaagcccaagatgt

SEQ ID NO: 267535 - DNA, 19 bp, Homo sapiens
  siRNA target sequence for AP1S1 (NM_001283.2,192-210).
ctcaaagttgtctataaga

SEQ ID NO: 267536 - DNA, 19 bp, Homo sapiens
  siRNA target sequence for AP1S1 (NM_001283.2,211-229).
gatatgccagcctctactt

SEQ ID NO: 267537 - DNA, 19 bp, Homo sapiens
  siRNA target sequence for AP1S1 (NM_001283.2,286-304).
gatacgtggagctcttaga

SEQ ID NO: 267538 - DNA, 19 bp, Homo sapiens
  siRNA target sequence for AP1S1 (NM_001283.2,325-343).
gcgagctggacatcatctt

SEQ ID NO: 267539 - DNA, 19 bp, Homo sapiens
  siRNA target sequence for AP1S3 (NM_178814.2,120-138).
cagtcgacaagggaaatta

SEQ ID NO: 267540 - DNA, 19 bp, Homo sapiens
  siRNA target sequence for AP1S3 (NM_178814.2,131-149).
ggaaattacggctacagaa

SEQ ID NO: 267541 - DNA, 19 bp, Homo sapiens
  siRNA target sequence for AP1S3 (NM_178814.2,192-210).
ccgggaaattgttcagatt

SEQ ID NO: 267542 - DNA, 19 bp, Homo sapiens
  siRNA target sequence for AP1S3 (NM_178814.2,193-211).
cgggaaattgttcagatta

SEQ ID NO: 267543 - DNA, 19 bp, Homo sapiens
  siRNA target sequence for AP1S3 (NM_178814.2,230-248).
ggacaagcagttttgttga

SEQ ID NO: 267544 - DNA, 19 bp, Homo sapiens
  siRNA target sequence for AP1S3 (NM_178814.2,327-345).
gctcttgacgctagagatt

SEQ ID NO: 267545 - DNA, 19 bp, Homo sapiens
  siRNA target sequence for AP2A1 (NM_014203.2,245-263).
gggctcgcggtgttcatct

SEQ ID NO: 267546 - DNA, 19 bp, Homo sapiens
  siRNA target sequence for AP2A1 (NM_014203.2,264-282).
ccgacatccggaactgtaa

SEQ ID NO: 267547 - DNA, 19 bp, Homo sapiens
  siRNA target sequence for AP2A1 (NM_014203.2,356-374).
gccttggatggctacagta

SEQ ID NO: 267548 - DNA, 19 bp, Homo sapiens
  siRNA target sequence for AP2A1 (NM_014203.2,357-375).
ccttggatggctacagtaa

SEQ ID NO: 267549 - DNA, 19 bp, Homo sapiens
  siRNA target sequence for AP2A1 (NM_014203.2,409-427).
cctgcttggccatgacatt

SEQ ID NO: 267550 - DNA, 19 bp, Homo sapiens
  siRNA target sequence for AP2A1 (NM_014203.2,451-469).
gaatctgttgagttccaat

SEQ ID NO: 267551 - DNA, 19 bp, Homo sapiens
  siRNA target sequence for AP2A1 (NM_014203.2,455-473).
ctgttgagttccaataaat

SEQ ID NO: 267552 - DNA, 19 bp, Homo sapiens
  siRNA target sequence for AP2A1 (NM_014203.2,723-741).
gcctccttcgactgtacaa

SEQ ID NO: 267553 - DNA, 19 bp, Homo sapiens
  siRNA target sequence for AP2A1 (NM_014203.2,1157-1175).
ctcatcatccactatgaca

SEQ ID NO: 267554 - DNA, 19 bp, Homo sapiens
  siRNA target sequence for AP2A1 (NM_014203.2,1596-1614).
ggtaccgtgtgctacagat

SEQ ID NO: 267555 - DNA, 19 bp, Homo sapiens
  siRNA target sequence for AP2A1 (NM_014203.2,2429-2447).
gccgatgagttgctgaata

SEQ ID NO: 267556 - DNA, 19 bp, Homo sapiens
  siRNA target sequence for AP2A1 (NM_014203.2,2565-2583).
cggtgcagttccagaattt

SEQ ID NO: 267557 - DNA, 19 bp, Homo sapiens
  siRNA target sequence for AP2A1 (NM_014203.2,2780-2798).
ctcccagtgaccatcaaca

SEQ ID NO: 267558 - DNA, 19 bp, Homo sapiens
  siRNA target sequence for AP2A1 (NM_014203.2,2783-2801).
ccagtgaccatcaacaagt

SEQ ID NO: 267559 - DNA, 19 bp, Homo sapiens
  siRNA target sequence for AP2A1 (NM_014203.2,2873-2891).
gaggcgcagaaaatcttca

SEQ ID NO: 267560 - DNA, 19 bp, Homo sapiens
  siRNA target sequence for AP2A1 (NM_014203.2,2875-2893).
ggcgcagaaaatcttcaaa

SEQ ID NO: 267561 - DNA, 19 bp, Homo sapiens
  siRNA target sequence for AP3B1 (NM_003664.3,128-146).
gtccagcaatagttttcct

SEQ ID NO: 267562 - DNA, 19 bp, Homo sapiens
  siRNA target sequence for AP3B1 (NM_003664.3,130-148).
ccagcaatagttttcctta

SEQ ID NO: 267563 - DNA, 19 bp, Homo sapiens
  siRNA target sequence for AP3B1 (NM_003664.3,191-209).
ggaggcgacctcaaccatt

SEQ ID NO: 267564 - DNA, 19 bp, Homo sapiens
  siRNA target sequence for AP3B1 (NM_003664.3,192-210).
gaggcgacctcaaccattt

SEQ ID NO: 267565 - DNA, 19 bp, Homo sapiens
  siRNA target sequence for AP3B1 (NM_003664.3,222-240).
gccttcggcctctttagca

SEQ ID NO: 267566 - DNA, 19 bp, Homo sapiens
  siRNA target sequence for AP3B1 (NM_003664.3,231-249).
ctctttagcagcgatttga

SEQ ID NO: 267567 - DNA, 19 bp, Homo sapiens
  siRNA target sequence for AP3B1 (NM_003664.3,241-259).
gcgatttgaagaagaatga

SEQ ID NO: 267568 - DNA, 19 bp, Homo sapiens
  siRNA target sequence for AP3B1 (NM_003664.3,275-293).
gttagagagcaacaaagat

SEQ ID NO: 267569 - DNA, 19 bp, Homo sapiens
  siRNA target sequence for AP3B1 (NM_003664.3,459-477).
cttgcactcctgtccataa

SEQ ID NO: 267570 - DNA, 19 bp, Homo sapiens
  siRNA target sequence for AP3B1 (NM_003664.3,503-521).
cccaaaccaactaattcgt

SEQ ID NO: 267571 - DNA, 19 bp, Homo sapiens
  siRNA target sequence for AP3B1 (NM_003664.3,533-551).
gagagttctgtcaagtatt

SEQ ID NO: 267572 - DNA, 19 bp, Homo sapiens
  siRNA target sequence for AP3B1 (NM_003664.3,594-612).
gaagcttctgctgacttat

SEQ ID NO: 267573 - DNA, 19 bp, Homo sapiens
  siRNA target sequence for AP3B1 (NM_003664.3,604-622).
ctgacttatcaccatatgt

SEQ ID NO: 267574 - DNA, 19 bp, Homo sapiens
  siRNA target sequence for AP3B1 (NM_003664.3,606-624).
gacttatcaccatatgtta

SEQ ID NO: 267575 - DNA, 19 bp, Homo sapiens
  siRNA target sequence for AP3B1 (NM_003664.3,629-647).
gaatgcagcccatgcaata

SEQ ID NO: 267576 - DNA, 19 bp, Homo sapiens
  siRNA target sequence for AP3B1 (NM_003664.3,633-651).
gcagcccatgcaatacaaa

SEQ ID NO: 267577 - DNA, 19 bp, Homo sapiens
  siRNA target sequence for AP3B1 (NM_003664.3,634-652).
cagcccatgcaatacaaaa

SEQ ID NO: 267578 - DNA, 19 bp, Homo sapiens
  siRNA target sequence for AP3B1 (NM_003664.3,637-655).
cccatgcaatacaaaaatt

SEQ ID NO: 267579 - DNA, 19 bp, Homo sapiens
  siRNA target sequence for AP3B1 (NM_003664.3,772-790).
cggacagaatagatctgat

SEQ ID NO: 267580 - DNA, 19 bp, Homo sapiens
  siRNA target sequence for AP3B1 (NM_003664.3,803-821).
ccgcaagctatgtaactta

SEQ ID NO: 267581 - DNA, 19 bp, Homo sapiens
  siRNA target sequence for AP3B1 (NM_003664.3,818-836).
cttactagtggatgttgaa

SEQ ID NO: 267582 - DNA, 19 bp, Homo sapiens
  siRNA target sequence for AP3B1 (NM_003664.3,839-857).
gtgggggcaggttgtcata

SEQ ID NO: 267583 - DNA, 19 bp, Homo sapiens
  siRNA target sequence for AP3B1 (NM_003664.3,841-859).
gggggcaggttgtcataat

SEQ ID NO: 267584 - DNA, 19 bp, Homo sapiens
  siRNA target sequence for AP3B1 (NM_003664.3,844-862).
ggcaggttgtcataatcca

SEQ ID NO: 267585 - DNA, 19 bp, Homo sapiens
  siRNA target sequence for AP3B1 (NM_003664.3,860-878).
ccacatgctaactcgatat

SEQ ID NO: 267586 - DNA, 19 bp, Homo sapiens
  siRNA target sequence for AP3B1 (NM_003664.3,879-897).
gctcggacacagtttgtca

SEQ ID NO: 267587 - DNA, 19 bp, Homo sapiens
  siRNA target sequence for AP3B1 (NM_003664.3,904-922).
ggaaagagggtgatgaatt

SEQ ID NO: 267588 - DNA, 19 bp, Homo sapiens
  siRNA target sequence for AP3B1 (NM_003664.3,938-956).
gaatttctacgaatctgat

SEQ ID NO: 267589 - DNA, 19 bp, Homo sapiens
  siRNA target sequence for AP3B1 (NM_003664.3,989-1007).
gaagccgtatactatggat

SEQ ID NO: 267590 - DNA, 19 bp, Homo sapiens
  siRNA target sequence for AP3B1 (NM_003664.3,1008-1026).
ccagatcatagactcttaa

SEQ ID NO: 267591 - DNA, 19 bp, Homo sapiens
  siRNA target sequence for AP3B1 (NM_003664.3,1009-1027).
cagatcatagactcttaat

SEQ ID NO: 267592 - DNA, 19 bp, Homo sapiens
  siRNA target sequence for AP3B1 (NM_003664.3,1011-1029).
gatcatagactcttaatta

SEQ ID NO: 267593 - DNA, 19 bp, Homo sapiens
  siRNA target sequence for AP3B1 (NM_003664.3,1116-1134).
gaagctggcataatttcta

SEQ ID NO: 267594 - DNA, 19 bp, Homo sapiens
  siRNA target sequence for AP3B1 (NM_003664.3,1119-1137).
gctggcataatttctaaat

SEQ ID NO: 267595 - DNA, 19 bp, Homo sapiens
  siRNA target sequence for AP3B1 (NM_003664.3,1123-1141).
gcataatttctaaatcact

SEQ ID NO: 267596 - DNA, 19 bp, Homo sapiens
  siRNA target sequence for AP3B1 (NM_003664.3,1145-1163).
gcgtttacttcgtagcaat

SEQ ID NO: 267597 - DNA, 19 bp, Homo sapiens
  siRNA target sequence for AP3B1 (NM_003664.3,1146-1164).
cgtttacttcgtagcaata

SEQ ID NO: 267598 - DNA, 19 bp, Homo sapiens
  siRNA target sequence for AP3B1 (NM_003664.3,1173-1191).
cagtatattgtcctacaaa

SEQ ID NO: 267599 - DNA, 19 bp, Homo sapiens
  siRNA target sequence for AP3B1 (NM_003664.3,1182-1200).
gtcctacaaaatatagcaa

SEQ ID NO: 267600 - DNA, 19 bp, Homo sapiens
  siRNA target sequence for AP3B1 (NM_003664.3,1201-1219).
ctatgtcaattcaaagaaa

SEQ ID NO: 267601 - DNA, 19 bp, Homo sapiens
  siRNA target sequence for AP3B1 (NM_003664.3,1220-1238).
ggggatgtttgaaccttat

SEQ ID NO: 267602 - DNA, 19 bp, Homo sapiens
  siRNA target sequence for AP3B1 (NM_003664.3,1250-1268).
ctatgttaggtcaactgat

SEQ ID NO: 267603 - DNA, 19 bp, Homo sapiens
  siRNA target sequence for AP3B1 (NM_003664.3,1258-1276).
ggtcaactgatccaactat

SEQ ID NO: 267604 - DNA, 19 bp, Homo sapiens
  siRNA target sequence for AP3B1 (NM_003664.3,1261-1279).
caactgatccaactatgat

SEQ ID NO: 267605 - DNA, 19 bp, Homo sapiens
  siRNA target sequence for AP3B1 (NM_003664.3,1264-1282).
ctgatccaactatgatcaa

SEQ ID NO: 267606 - DNA, 19 bp, Homo sapiens
  siRNA target sequence for AP3B1 (NM_003664.3,1333-1351).
caactcttcttcgagaatt

SEQ ID NO: 267607 - DNA, 19 bp, Homo sapiens
  siRNA target sequence for AP3B1 (NM_003664.3,1390-1408).
cagccactattcagactat

SEQ ID NO: 267608 - DNA, 19 bp, Homo sapiens
  siRNA target sequence for AP3B1 (NM_003664.3,1477-1495).
ccaacagggatgaaatagt

SEQ ID NO: 267609 - DNA, 19 bp, Homo sapiens
  siRNA target sequence for AP3B1 (NM_003664.3,1478-1496).
caacagggatgaaatagtt

SEQ ID NO: 267610 - DNA, 19 bp, Homo sapiens
  siRNA target sequence for AP3B1 (NM_003664.3,1500-1518).
gctgaaagtgtggttgtta

SEQ ID NO: 267611 - DNA, 19 bp, Homo sapiens
  siRNA target sequence for AP3B1 (NM_003664.3,1501-1519).
ctgaaagtgtggttgttat

SEQ ID NO: 267612 - DNA, 19 bp, Homo sapiens
  siRNA target sequence for AP3B1 (NM_003664.3,1503-1521).
gaaagtgtggttgttataa

SEQ ID NO: 267613 - DNA, 19 bp, Homo sapiens
  siRNA target sequence for AP3B1 (NM_003664.3,1507-1525).
gtgtggttgttataaagaa

SEQ ID NO: 267614 - DNA, 19 bp, Homo sapiens
  siRNA target sequence for AP3B1 (NM_003664.3,1603-1621).
ctgttgctagagcaagtat

SEQ ID NO: 267615 - DNA, 19 bp, Homo sapiens
  siRNA target sequence for AP3B1 (NM_003664.3,1643-1661).
ctgtgaacgagttcctaaa

SEQ ID NO: 267616 - DNA, 19 bp, Homo sapiens
  siRNA target sequence for AP3B1 (NM_003664.3,1768-1786).
ccaaacagacaaaattgct

SEQ ID NO: 267617 - DNA, 19 bp, Homo sapiens
  siRNA target sequence for AP3B1 (NM_003664.3,1784-1802).
gcttacccagtacatatta

SEQ ID NO: 267618 - DNA, 19 bp, Homo sapiens
  siRNA target sequence for AP3B1 (NM_003664.3,1789-1807).
cccagtacatattaaatct

SEQ ID NO: 267619 - DNA, 19 bp, Homo sapiens
  siRNA target sequence for AP3B1 (NM_003664.3,1806-1824).
ctcggcaagtatgatcaaa

SEQ ID NO: 267620 - DNA, 19 bp, Homo sapiens
  siRNA target sequence for AP3B1 (NM_003664.3,1810-1828).
gcaagtatgatcaaaacta

SEQ ID NO: 267621 - DNA, 19 bp, Homo sapiens
  siRNA target sequence for AP3B1 (NM_003664.3,1832-1850).
catcagagaccgtacaaga

SEQ ID NO: 267622 - DNA, 19 bp, Homo sapiens
  siRNA target sequence for AP3B1 (NM_003664.3,1837-1855).
gagaccgtacaagatttat

SEQ ID NO: 267623 - DNA, 19 bp, Homo sapiens
  siRNA target sequence for AP3B1 (NM_003664.3,1839-1857).
gaccgtacaagatttatta

SEQ ID NO: 267624 - DNA, 19 bp, Homo sapiens
  siRNA target sequence for AP3B1 (NM_003664.3,1849-1867).
gatttattaggcagcttat

SEQ ID NO: 267625 - DNA, 19 bp, Homo sapiens
  siRNA target sequence for AP3B1 (NM_003664.3,1862-1880).
gcttattgttccgaatgta

SEQ ID NO: 267626 - DNA, 19 bp, Homo sapiens
  siRNA target sequence for AP3B1 (NM_003664.3,1863-1881).
cttattgttccgaatgtaa

SEQ ID NO: 267627 - DNA, 19 bp, Homo sapiens
  siRNA target sequence for AP3B1 (NM_003664.3,1883-1901).
gagtggagctttaagtaaa

SEQ ID NO: 267628 - DNA, 19 bp, Homo sapiens
  siRNA target sequence for AP3B1 (NM_003664.3,1941-1959).
ctgcttgagtctcctttta

SEQ ID NO: 267629 - DNA, 19 bp, Homo sapiens
  siRNA target sequence for AP3B1 (NM_003664.3,1979-1997).
gcttggcaccttatctcat

SEQ ID NO: 267630 - DNA, 19 bp, Homo sapiens
  siRNA target sequence for AP3B1 (NM_003664.3,1980-1998).
cttggcaccttatctcata

SEQ ID NO: 267631 - DNA, 19 bp, Homo sapiens
  siRNA target sequence for AP3B1 (NM_003664.3,1984-2002).
gcaccttatctcatactct

SEQ ID NO: 267632 - DNA, 19 bp, Homo sapiens
  siRNA target sequence for AP3B1 (NM_003664.3,1993-2011).
ctcatactctcaacattaa

SEQ ID NO: 267633 - DNA, 19 bp, Homo sapiens
  siRNA target sequence for AP3B1 (NM_003664.3,2014-2032).
ctactgggtacctggaatt

SEQ ID NO: 267634 - DNA, 19 bp, Homo sapiens
  siRNA target sequence for AP3B1 (NM_003664.3,2019-2037).
gggtacctggaattatcta

SEQ ID NO: 267635 - DNA, 19 bp, Homo sapiens
  siRNA target sequence for AP3B1 (NM_003664.3,2020-2038).
ggtacctggaattatctaa

SEQ ID NO: 267636 - DNA, 19 bp, Homo sapiens
  siRNA target sequence for AP3B1 (NM_003664.3,2021-2039).
gtacctggaattatctaat

SEQ ID NO: 267637 - DNA, 19 bp, Homo sapiens
  siRNA target sequence for AP3B1 (NM_003664.3,2056-2074).
ccgacccatcagttcgaaa

SEQ ID NO: 267638 - DNA, 19 bp, Homo sapiens
  siRNA target sequence for AP3B1 (NM_003664.3,2057-2075).
cgacccatcagttcgaaat

SEQ ID NO: 267639 - DNA, 19 bp, Homo sapiens
  siRNA target sequence for AP3B1 (NM_003664.3,2060-2078).
cccatcagttcgaaatgta

SEQ ID NO: 267640 - DNA, 19 bp, Homo sapiens
  siRNA target sequence for AP3B1 (NM_003664.3,2062-2080).
catcagttcgaaatgtaga

SEQ ID NO: 267641 - DNA, 19 bp, Homo sapiens
  siRNA target sequence for AP3B1 (NM_003664.3,2067-2085).
gttcgaaatgtagaagtaa

SEQ ID NO: 267642 - DNA, 19 bp, Homo sapiens
  siRNA target sequence for AP3B1 (NM_003664.3,2169-2187).
gaggaggactcttctgata

SEQ ID NO: 267643 - DNA, 19 bp, Homo sapiens
  siRNA target sequence for AP3B1 (NM_003664.3,2171-2189).
ggaggactcttctgatagt

SEQ ID NO: 267644 - DNA, 19 bp, Homo sapiens
  siRNA target sequence for AP3B1 (NM_003664.3,2512-2530).
gagtcactaaggagaaaga

SEQ ID NO: 267645 - DNA, 19 bp, Homo sapiens
  siRNA target sequence for AP3B1 (NM_003664.3,2554-2572).
ctcctcttaccaaagatgt

SEQ ID NO: 267646 - DNA, 19 bp, Homo sapiens
  siRNA target sequence for AP3B1 (NM_003664.3,2577-2595).
cttctagatctggatgatt

SEQ ID NO: 267647 - DNA, 19 bp, Homo sapiens
  siRNA target sequence for AP3B1 (NM_003664.3,2580-2598).
ctagatctggatgatttta

SEQ ID NO: 267648 - DNA, 19 bp, Homo sapiens
  siRNA target sequence for AP3B1 (NM_003664.3,2654-2672).
ggctgatcttgaaggttta

SEQ ID NO: 267649 - DNA, 19 bp, Homo sapiens
  siRNA target sequence for AP3B1 (NM_003664.3,2658-2676).
gatcttgaaggtttacact

SEQ ID NO: 267650 - DNA, 19 bp, Homo sapiens
  siRNA target sequence for AP3B1 (NM_003664.3,2664-2682).
gaaggtttacacttgtcaa

SEQ ID NO: 267651 - DNA, 19 bp, Homo sapiens
  siRNA target sequence for AP3B1 (NM_003664.3,2715-2733).
gcatttgtaccaacgaaaa

SEQ ID NO: 267652 - DNA, 19 bp, Homo sapiens
  siRNA target sequence for AP3B1 (NM_003664.3,2741-2759).
gctgcttcatcgaatgagt

SEQ ID NO: 267653 - DNA, 19 bp, Homo sapiens
  siRNA target sequence for AP3B1 (NM_003664.3,2766-2784).
ggactagctgcccattatt

SEQ ID NO: 267654 - DNA, 19 bp, Homo sapiens
  siRNA target sequence for AP3B1 (NM_003664.3,2767-2785).
gactagctgcccattattt

SEQ ID NO: 267655 - DNA, 19 bp, Homo sapiens
  siRNA target sequence for AP3B1 (NM_003664.3,2769-2787).
ctagctgcccattatttct

SEQ ID NO: 267656 - DNA, 19 bp, Homo sapiens
  siRNA target sequence for AP3B1 (NM_003664.3,2775-2793).
gcccattatttctttccaa

SEQ ID NO: 267657 - DNA, 19 bp, Homo sapiens
  siRNA target sequence for AP3B1 (NM_003664.3,2803-2821).
gcatttttggtgataagat

SEQ ID NO: 267658 - DNA, 19 bp, Homo sapiens
  siRNA target sequence for AP3B1 (NM_003664.3,2812-2830).
gtgataagatggtctctat

SEQ ID NO: 267659 - DNA, 19 bp, Homo sapiens
  siRNA target sequence for AP3B1 (NM_003664.3,2849-2867).
cactactgatcgaaagata

SEQ ID NO: 267660 - DNA, 19 bp, Homo sapiens
  siRNA target sequence for AP3B1 (NM_003664.3,2851-2869).
ctactgatcgaaagataga

SEQ ID NO: 267661 - DNA, 19 bp, Homo sapiens
  siRNA target sequence for AP3B1 (NM_003664.3,2854-2872).
ctgatcgaaagatagaaaa

SEQ ID NO: 267662 - DNA, 19 bp, Homo sapiens
  siRNA target sequence for AP3B1 (NM_003664.3,2945-2963).
gcctgagggatccattaca

SEQ ID NO: 267663 - DNA, 19 bp, Homo sapiens
  siRNA target sequence for AP3B1 (NM_003664.3,2947-2965).
ctgagggatccattacagt

SEQ ID NO: 267664 - DNA, 19 bp, Homo sapiens
  siRNA target sequence for AP3B1 (NM_003664.3,2949-2967).
gagggatccattacagttt

SEQ ID NO: 267665 - DNA, 19 bp, Homo sapiens
  siRNA target sequence for AP3B1 (NM_003664.3,2951-2969).
gggatccattacagtttca

SEQ ID NO: 267666 - DNA, 19 bp, Homo sapiens
  siRNA target sequence for AP3B1 (NM_003664.3,2952-2970).
ggatccattacagtttcaa

SEQ ID NO: 267667 - DNA, 19 bp, Homo sapiens
  siRNA target sequence for AP3B1 (NM_003664.3,2962-2980).
cagtttcaatgggtattga

SEQ ID NO: 267668 - DNA, 19 bp, Homo sapiens
  siRNA target sequence for AP3B1 (NM_003664.3,2964-2982).
gtttcaatgggtattgact

SEQ ID NO: 267669 - DNA, 19 bp, Homo sapiens
  siRNA target sequence for AP3B1 (NM_003664.3,2972-2990).
gggtattgacttttgtgat

SEQ ID NO: 267670 - DNA, 19 bp, Homo sapiens
  siRNA target sequence for AP3B1 (NM_003664.3,2973-2991).
ggtattgacttttgtgatt

SEQ ID NO: 267671 - DNA, 19 bp, Homo sapiens
  siRNA target sequence for AP3B1 (NM_003664.3,3019-3037).
gtaccaaggatgattgctt

SEQ ID NO: 267672 - DNA, 19 bp, Homo sapiens
  siRNA target sequence for AP3B1 (NM_003664.3,3023-3041).
caaggatgattgcttcaat

SEQ ID NO: 267673 - DNA, 19 bp, Homo sapiens
  siRNA target sequence for AP3B1 (NM_003664.3,3026-3044).
ggatgattgcttcaatgtt

SEQ ID NO: 267674 - DNA, 19 bp, Homo sapiens
  siRNA target sequence for AP3B1 (NM_003664.3,3027-3045).
gatgattgcttcaatgtta

SEQ ID NO: 267675 - DNA, 19 bp, Homo sapiens
  siRNA target sequence for AP3B1 (NM_003664.3,3030-3048).
gattgcttcaatgttaata

SEQ ID NO: 267676 - DNA, 19 bp, Homo sapiens
  siRNA target sequence for AP3B1 (NM_003664.3,3159-3177).
gctgcaccacagaatttca

SEQ ID NO: 267677 - DNA, 19 bp, Homo sapiens
  siRNA target sequence for AP3B1 (NM_003664.3,3230-3248).
cccttctggccaggataat

SEQ ID NO: 267678 - DNA, 19 bp, Homo sapiens
  siRNA target sequence for AP3B1 (NM_003664.3,3254-3272).
caggtttgcagctaaaact

SEQ ID NO: 267679 - DNA, 19 bp, Homo sapiens
  siRNA target sequence for AP3B1 (NM_003664.3,3256-3274).
ggtttgcagctaaaactgt

SEQ ID NO: 267680 - DNA, 19 bp, Homo sapiens
  siRNA target sequence for AP3B1 (NM_003664.3,3273-3291).
gtgcacagtgggtcattga

SEQ ID NO: 267681 - DNA, 19 bp, Homo sapiens
  siRNA target sequence for AP3B1 (NM_003664.3,3319-3337).
gctctacagcccagcttat

SEQ ID NO: 267682 - DNA, 19 bp, Homo sapiens
  siRNA target sequence for AP3B1 (NM_003664.3,3325-3343).
cagcccagcttatcataaa

SEQ ID NO: 267683 - DNA, 19 bp, Homo sapiens
  siRNA target sequence for AP3B1 (NM_003664.3,3327-3345).
gcccagcttatcataaaca

SEQ ID NO: 267684 - DNA, 19 bp, Homo sapiens
  siRNA target sequence for AP3B2 (NM_004644.3,354-372).
gaggattgtggcgatgatt

SEQ ID NO: 267685 - DNA, 19 bp, Homo sapiens
  siRNA target sequence for AP3B2 (NM_004644.3,420-438).
cgtggcctgtaagaacata

SEQ ID NO: 267686 - DNA, 19 bp, Homo sapiens
  siRNA target sequence for AP3B2 (NM_004644.3,522-540).
ccaacgtggcctaaaggat

SEQ ID NO: 267687 - DNA, 19 bp, Homo sapiens
  siRNA target sequence for AP3B2 (NM_004644.3,724-742).
ctgatagaagtcattgaga

SEQ ID NO: 267688 - DNA, 19 bp, Homo sapiens
  siRNA target sequence for AP3B2 (NM_004644.3,814-832).
cgcatcgacctgattcaca

SEQ ID NO: 267689 - DNA, 19 bp, Homo sapiens
  siRNA target sequence for AP3B2 (NM_004644.3,820-838).
gacctgattcacaaaaact

SEQ ID NO: 267690 - DNA, 19 bp, Homo sapiens
  siRNA target sequence for AP3B2 (NM_004644.3,878-896).
ggggccaggtggtcatcat

SEQ ID NO: 267691 - DNA, 19 bp, Homo sapiens
  siRNA target sequence for AP3B2 (NM_004644.3,1052-1070).
cccgaaagccctatgtcat

SEQ ID NO: 267692 - DNA, 19 bp, Homo sapiens
  siRNA target sequence for AP3B2 (NM_004644.3,1403-1421).
ctgtcctacgggaattcca

SEQ ID NO: 267693 - DNA, 19 bp, Homo sapiens
  siRNA target sequence for AP3B2 (NM_004644.3,1477-1495).
ggacgctgtgcaactaaca

SEQ ID NO: 267694 - DNA, 19 bp, Homo sapiens
  siRNA target sequence for AP3B2 (NM_004644.3,1478-1496).
gacgctgtgcaactaacat

SEQ ID NO: 267695 - DNA, 19 bp, Homo sapiens
  siRNA target sequence for AP3B2 (NM_004644.3,1570-1588).
gagtcagtggtcgtcatta

SEQ ID NO: 267696 - DNA, 19 bp, Homo sapiens
  siRNA target sequence for AP3B2 (NM_004644.3,1748-1766).
gaaaaatggccaagtcatt

SEQ ID NO: 267697 - DNA, 19 bp, Homo sapiens
  siRNA target sequence for AP3B2 (NM_004644.3,1819-1837).
ctctacctgaccaactcta

SEQ ID NO: 267698 - DNA, 19 bp, Homo sapiens
  siRNA target sequence for AP3B2 (NM_004644.3,1821-1839).
ctacctgaccaactctaaa

SEQ ID NO: 267699 - DNA, 19 bp, Homo sapiens
  siRNA target sequence for AP3B2 (NM_004644.3,1877-1895).
ccaaatatgaccagaacta

SEQ ID NO: 267700 - DNA, 19 bp, Homo sapiens
  siRNA target sequence for AP3B2 (NM_004644.3,1878-1896).
caaatatgaccagaactat

SEQ ID NO: 267701 - DNA, 19 bp, Homo sapiens
  siRNA target sequence for AP3B2 (NM_004644.3,2010-2028).
cttggagtcatccttcaaa

SEQ ID NO: 267702 - DNA, 19 bp, Homo sapiens
  siRNA target sequence for AP3B2 (NM_004644.3,2398-2416).
gatggtaagaggaagacaa

SEQ ID NO: 267703 - DNA, 19 bp, Homo sapiens
  siRNA target sequence for AP3B2 (NM_004644.3,2592-2610).
gatctccctgcttgatcta

SEQ ID NO: 267704 - DNA, 19 bp, Homo sapiens
  siRNA target sequence for AP3B2 (NM_004644.3,2804-2822).
ccttcagccgccaaccttt

SEQ ID NO: 267705 - DNA, 19 bp, Homo sapiens
  siRNA target sequence for AP3B2 (NM_004644.3,2938-2956).
gaatttcccgaaattgagt

SEQ ID NO: 267706 - DNA, 19 bp, Homo sapiens
  siRNA target sequence for AP3B2 (NM_004644.3,2958-2976).
cctggcacctggagaatct

SEQ ID NO: 267707 - DNA, 19 bp, Homo sapiens
  siRNA target sequence for AP3B2 (NM_004644.3,2981-2999).
ctgctgtaatgggcattaa

SEQ ID NO: 267708 - DNA, 19 bp, Homo sapiens
  siRNA target sequence for AP3B2 (NM_004644.3,2983-3001).
gctgtaatgggcattaatt

SEQ ID NO: 267709 - DNA, 19 bp, Homo sapiens
  siRNA target sequence for AP3B2 (NM_004644.3,2986-3004).
gtaatgggcattaatttct

SEQ ID NO: 267710 - DNA, 19 bp, Homo sapiens
  siRNA target sequence for AP3B2 (NM_004644.3,3356-3374).
ctgtcaacagcgagaaaat

SEQ ID NO: 267711 - DNA, 19 bp, Homo sapiens
  siRNA target sequence for AP3D1 (NM_003938.4,256-274).
gcatgttcgacaagaatct

SEQ ID NO: 267712 - DNA, 19 bp, Homo sapiens
  siRNA target sequence for AP3D1 (NM_003938.4,309-327).
gaggacgaggcaaaataca

SEQ ID NO: 267713 - DNA, 19 bp, Homo sapiens
  siRNA target sequence for AP3D1 (NM_003938.4,311-329).
ggacgaggcaaaatacata

SEQ ID NO: 267714 - DNA, 19 bp, Homo sapiens
  siRNA target sequence for AP3D1 (NM_003938.4,312-330).
gacgaggcaaaatacatat

SEQ ID NO: 267715 - DNA, 19 bp, Homo sapiens
  siRNA target sequence for AP3D1 (NM_003938.4,326-344).
catatctcagtgcattgat

SEQ ID NO: 267716 - DNA, 19 bp, Homo sapiens
  siRNA target sequence for AP3D1 (NM_003938.4,331-349).
ctcagtgcattgatgagat

SEQ ID NO: 267717 - DNA, 19 bp, Homo sapiens
  siRNA target sequence for AP3D1 (NM_003938.4,396-414).
gtctgcaagctgacgtatt

SEQ ID NO: 267718 - DNA, 19 bp, Homo sapiens
  siRNA target sequence for AP3D1 (NM_003938.4,655-673).
gagacctggcaaatgacat

SEQ ID NO: 267719 - DNA, 19 bp, Homo sapiens
  siRNA target sequence for AP3D1 (NM_003938.4,690-708).
cacaccaagccctacatca

SEQ ID NO: 267720 - DNA, 19 bp, Homo sapiens
  siRNA target sequence for AP3D1 (NM_003938.4,717-735).
gctgtgctgatcatgtaca

SEQ ID NO: 267721 - DNA, 19 bp, Homo sapiens
  siRNA target sequence for AP3D1 (NM_003938.4,823-841).
cggctgccgtcaatgtcat

SEQ ID NO: 267722 - DNA, 19 bp, Homo sapiens
  siRNA target sequence for AP3D1 (NM_003938.4,853-871).
ccagacgcaaccctaagaa

SEQ ID NO: 267723 - DNA, 19 bp, Homo sapiens
  siRNA target sequence for AP3D1 (NM_003938.4,856-874).
gacgcaaccctaagaacta

SEQ ID NO: 267724 - DNA, 19 bp, Homo sapiens
  siRNA target sequence for AP3D1 (NM_003938.4,950-968).
gctgttcggtgctcttact

SEQ ID NO: 267725 - DNA, 19 bp, Homo sapiens
  siRNA target sequence for AP3D1 (NM_003938.4,1002-1020).
gagcccctcaccaatctca

SEQ ID NO: 267726 - DNA, 19 bp, Homo sapiens
  siRNA target sequence for AP3D1 (NM_003938.4,1040-1058).
gtctctcctctatgaatgt

SEQ ID NO: 267727 - DNA, 19 bp, Homo sapiens
  siRNA target sequence for AP3D1 (NM_003938.4,1042-1060).
ctctcctctatgaatgtgt

SEQ ID NO: 267728 - DNA, 19 bp, Homo sapiens
  siRNA target sequence for AP3D1 (NM_003938.4,1161-1179).
gactccgatcagaacttga

SEQ ID NO: 267729 - DNA, 19 bp, Homo sapiens
  siRNA target sequence for AP3D1 (NM_003938.4,1165-1183).
ccgatcagaacttgaagta

SEQ ID NO: 267730 - DNA, 19 bp, Homo sapiens
  siRNA target sequence for AP3D1 (NM_003938.4,1406-1424).
gctgctcaccaagatcatt

SEQ ID NO: 267731 - DNA, 19 bp, Homo sapiens
  siRNA target sequence for AP3D1 (NM_003938.4,2087-2105).
cctggacgcctggatcaat

SEQ ID NO: 267732 - DNA, 19 bp, Homo sapiens
  siRNA target sequence for AP3D1 (NM_003938.4,2375-2393).
gcctatgtcagatcagtat

SEQ ID NO: 267733 - DNA, 19 bp, Homo sapiens
  siRNA target sequence for AP3D1 (NM_003938.4,2581-2599).
ccagcgacgaggatgacaa

SEQ ID NO: 267734 - DNA, 19 bp, Homo sapiens
  siRNA target sequence for AP3D1 (NM_003938.4,2659-2677).
gcgagaaactgcctattca

SEQ ID NO: 267735 - DNA, 19 bp, Homo sapiens
  siRNA target sequence for AP3D1 (NM_003938.4,2718-2736).
gacgttcccatggtagaaa

SEQ ID NO: 267736 - DNA, 19 bp, Homo sapiens
  siRNA target sequence for AP3D1 (NM_003938.4,2721-2739).
gttcccatggtagaaaaga

SEQ ID NO: 267737 - DNA, 19 bp, Homo sapiens
  siRNA target sequence for AP3D1 (NM_003938.4,2987-3005).
ctccctcctcgctgaaaat

SEQ ID NO: 267738 - DNA, 19 bp, Homo sapiens
  siRNA target sequence for AP3D1 (NM_003938.4,2993-3011).
cctcgctgaaaattcctat

SEQ ID NO: 267739 - DNA, 19 bp, Homo sapiens
  siRNA target sequence for AP3D1 (NM_003938.4,2996-3014).
cgctgaaaattcctatgtt

SEQ ID NO: 267740 - DNA, 19 bp, Homo sapiens
  siRNA target sequence for AP3D1 (NM_003938.4,3217-3235).
ccaacgaagcccagtatgt

SEQ ID NO: 267741 - DNA, 19 bp, Homo sapiens
  siRNA target sequence for AP3D1 (NM_003938.4,3385-3403).
gtgacgcctttgctaagtt

SEQ ID NO: 267742 - DNA, 19 bp, Homo sapiens
  siRNA target sequence for AP3D1 (NM_003938.4,3454-3472).
ggatgtccttccagaatct

SEQ ID NO: 267743 - DNA, 19 bp, Homo sapiens
  siRNA target sequence for AP3M1 (NM_012095.2,75-93).
ccacagtctatttctcata

SEQ ID NO: 267744 - DNA, 19 bp, Homo sapiens
  siRNA target sequence for AP3M1 (NM_012095.2,76-94).
cacagtctatttctcataa

SEQ ID NO: 267745 - DNA, 19 bp, Homo sapiens
  siRNA target sequence for AP3M1 (NM_012095.2,96-114).
ctgttccggtgacatattt

SEQ ID NO: 267746 - DNA, 19 bp, Homo sapiens
  siRNA target sequence for AP3M1 (NM_012095.2,98-116).
gttccggtgacatatttct

SEQ ID NO: 267747 - DNA, 19 bp, Homo sapiens
  siRNA target sequence for AP3M1 (NM_012095.2,101-119).
ccggtgacatatttctaga

SEQ ID NO: 267748 - DNA, 19 bp, Homo sapiens
  siRNA target sequence for AP3M1 (NM_012095.2,143-161).
gccagtctgtctgtgatta

SEQ ID NO: 267749 - DNA, 19 bp, Homo sapiens
  siRNA target sequence for AP3M1 (NM_012095.2,144-162).
ccagtctgtctgtgattat

SEQ ID NO: 267750 - DNA, 19 bp, Homo sapiens
  siRNA target sequence for AP3M1 (NM_012095.2,145-163).
cagtctgtctgtgattatt

SEQ ID NO: 267751 - DNA, 19 bp, Homo sapiens
  siRNA target sequence for AP3M1 (NM_012095.2,226-244).
caccactacctcatcagta

SEQ ID NO: 267752 - DNA, 19 bp, Homo sapiens
  siRNA target sequence for AP3M1 (NM_012095.2,242-260).
gtatctaccgggataagct

SEQ ID NO: 267753 - DNA, 19 bp, Homo sapiens
  siRNA target sequence for AP3M1 (NM_012095.2,249-267).
ccgggataagctcttcttt

SEQ ID NO: 267754 - DNA, 19 bp, Homo sapiens
  siRNA target sequence for AP3M1 (NM_012095.2,252-270).
ggataagctcttctttgta

SEQ ID NO: 267755 - DNA, 19 bp, Homo sapiens
  siRNA target sequence for AP3M1 (NM_012095.2,285-303).
cgaagtgccacctctcttt

SEQ ID NO: 267756 - DNA, 19 bp, Homo sapiens
  siRNA target sequence for AP3M1 (NM_012095.2,364-382).
gaggctgcaattaaggata

SEQ ID NO: 267757 - DNA, 19 bp, Homo sapiens
  siRNA target sequence for AP3M1 (NM_012095.2,366-384).
ggctgcaattaaggataat

SEQ ID NO: 267758 - DNA, 19 bp, Homo sapiens
  siRNA target sequence for AP3M1 (NM_012095.2,379-397).
gataatgtggtcatagtat

SEQ ID NO: 267759 - DNA, 19 bp, Homo sapiens
  siRNA target sequence for AP3M1 (NM_012095.2,417-435).
gttagacaatggatttcca

SEQ ID NO: 267760 - DNA, 19 bp, Homo sapiens
  siRNA target sequence for AP3M1 (NM_012095.2,433-451).
ccactggctaccgaatcta

SEQ ID NO: 267761 - DNA, 19 bp, Homo sapiens
  siRNA target sequence for AP3M1 (NM_012095.2,434-452).
cactggctaccgaatctaa

SEQ ID NO: 267762 - DNA, 19 bp, Homo sapiens
  siRNA target sequence for AP3M1 (NM_012095.2,436-454).
ctggctaccgaatctaaca

SEQ ID NO: 267763 - DNA, 19 bp, Homo sapiens
  siRNA target sequence for AP3M1 (NM_012095.2,468-486).
gattaaaccaccaacaatt

SEQ ID NO: 267764 - DNA, 19 bp, Homo sapiens
  siRNA target sequence for AP3M1 (NM_012095.2,490-508).
cgctctgttgtcaactcta

SEQ ID NO: 267765 - DNA, 19 bp, Homo sapiens
  siRNA target sequence for AP3M1 (NM_012095.2,491-509).
gctctgttgtcaactctat

SEQ ID NO: 267766 - DNA, 19 bp, Homo sapiens
  siRNA target sequence for AP3M1 (NM_012095.2,546-564).
cgggcagctgtccaacata

SEQ ID NO: 267767 - DNA, 19 bp, Homo sapiens
  siRNA target sequence for AP3M1 (NM_012095.2,571-589).
cgtcgggcaggggtaaagt

SEQ ID NO: 267768 - DNA, 19 bp, Homo sapiens
  siRNA target sequence for AP3M1 (NM_012095.2,572-590).
gtcgggcaggggtaaagta

SEQ ID NO: 267769 - DNA, 19 bp, Homo sapiens
  siRNA target sequence for AP3M1 (NM_012095.2,574-592).
cgggcaggggtaaagtaca

SEQ ID NO: 267770 - DNA, 19 bp, Homo sapiens
  siRNA target sequence for AP3M1 (NM_012095.2,577-595).
gcaggggtaaagtacacaa

SEQ ID NO: 267771 - DNA, 19 bp, Homo sapiens
  siRNA target sequence for AP3M1 (NM_012095.2,580-598).
ggggtaaagtacacaaaca

SEQ ID NO: 267772 - DNA, 19 bp, Homo sapiens
  siRNA target sequence for AP3M1 (NM_012095.2,682-700).
gtcattgatgcttgcatta

SEQ ID NO: 267773 - DNA, 19 bp, Homo sapiens
  siRNA target sequence for AP3M1 (NM_012095.2,688-706).
gatgcttgcattaaactat

SEQ ID NO: 267774 - DNA, 19 bp, Homo sapiens
  siRNA target sequence for AP3M1 (NM_012095.2,786-804).
caagcgttgggaatctgaa

SEQ ID NO: 267775 - DNA, 19 bp, Homo sapiens
  siRNA target sequence for AP3M1 (NM_012095.2,791-809).
gttgggaatctgaaagagt

SEQ ID NO: 267776 - DNA, 19 bp, Homo sapiens
  siRNA target sequence for AP3M1 (NM_012095.2,796-814).
gaatctgaaagagttttgt

SEQ ID NO: 267777 - DNA, 19 bp, Homo sapiens
  siRNA target sequence for AP3M1 (NM_012095.2,832-850).
ggaaatttccgactcatat

SEQ ID NO: 267778 - DNA, 19 bp, Homo sapiens
  siRNA target sequence for AP3M1 (NM_012095.2,855-873).
ccgtgtcagctcacaaaat

SEQ ID NO: 267779 - DNA, 19 bp, Homo sapiens
  siRNA target sequence for AP3M1 (NM_012095.2,933-951).
cggcagatttgatataaca

SEQ ID NO: 267780 - DNA, 19 bp, Homo sapiens
  siRNA target sequence for AP3M1 (NM_012095.2,935-953).
gcagatttgatataacaat

SEQ ID NO: 267781 - DNA, 19 bp, Homo sapiens
  siRNA target sequence for AP3M1 (NM_012095.2,974-992).
ggaaaactattgaaggaat

SEQ ID NO: 267782 - DNA, 19 bp, Homo sapiens
  siRNA target sequence for AP3M1 (NM_012095.2,1042-1060).
cccacacaaggcagctata

SEQ ID NO: 267783 - DNA, 19 bp, Homo sapiens
  siRNA target sequence for AP3M1 (NM_012095.2,1044-1062).
cacacaaggcagctataca

SEQ ID NO: 267784 - DNA, 19 bp, Homo sapiens
  siRNA target sequence for AP3M1 (NM_012095.2,1069-1087).
ccagtcaccaaggtactaa

SEQ ID NO: 267785 - DNA, 19 bp, Homo sapiens
  siRNA target sequence for AP3M1 (NM_012095.2,1072-1090).
gtcaccaaggtactaacat

SEQ ID NO: 267786 - DNA, 19 bp, Homo sapiens
  siRNA target sequence for AP3M1 (NM_012095.2,1114-1132).
caaaagctcccaagtctta

SEQ ID NO: 267787 - DNA, 19 bp, Homo sapiens
  siRNA target sequence for AP3M1 (NM_012095.2,1129-1147).
cttaaaggactggtaaatt

SEQ ID NO: 267788 - DNA, 19 bp, Homo sapiens
  siRNA target sequence for AP3M1 (NM_012095.2,1181-1199).
cgagcctcaacatacagtt

SEQ ID NO: 267789 - DNA, 19 bp, Homo sapiens
  siRNA target sequence for AP3M1 (NM_012095.2,1184-1202).
gcctcaacatacagtttaa

SEQ ID NO: 267790 - DNA, 19 bp, Homo sapiens
  siRNA target sequence for AP3M1 (NM_012095.2,1186-1204).
ctcaacatacagtttaaga

SEQ ID NO: 267791 - DNA, 19 bp, Homo sapiens
  siRNA target sequence for AP3M1 (NM_012095.2,1217-1235).
ctatttcaggcttaaaagt

SEQ ID NO: 267792 - DNA, 19 bp, Homo sapiens
  siRNA target sequence for AP3M2 (NM_006803.2,99-117).
catagtcttttcttgatca

SEQ ID NO: 267793 - DNA, 19 bp, Homo sapiens
  siRNA target sequence for AP3M2 (NM_006803.2,116-134).
caactcctctggagacatt

SEQ ID NO: 267794 - DNA, 19 bp, Homo sapiens
  siRNA target sequence for AP3M2 (NM_006803.2,161-179).
ggtcagccgttctgtttgt

SEQ ID NO: 267795 - DNA, 19 bp, Homo sapiens
  siRNA target sequence for AP3M2 (NM_006803.2,166-184).
gccgttctgtttgtgatta

SEQ ID NO: 267796 - DNA, 19 bp, Homo sapiens
  siRNA target sequence for AP3M2 (NM_006803.2,168-186).
cgttctgtttgtgattact

SEQ ID NO: 267797 - DNA, 19 bp, Homo sapiens
  siRNA target sequence for AP3M2 (NM_006803.2,241-259).
ctacccctcaccactatct

SEQ ID NO: 267798 - DNA, 19 bp, Homo sapiens
  siRNA target sequence for AP3M2 (NM_006803.2,244-262).
cccctcaccactatctctt

SEQ ID NO: 267799 - DNA, 19 bp, Homo sapiens
  siRNA target sequence for AP3M2 (NM_006803.2,245-263).
ccctcaccactatctctta

SEQ ID NO: 267800 - DNA, 19 bp, Homo sapiens
  siRNA target sequence for AP3M2 (NM_006803.2,265-283).
gtgtttaccgccacaagat

SEQ ID NO: 267801 - DNA, 19 bp, Homo sapiens
  siRNA target sequence for AP3M2 (NM_006803.2,267-285).
gtttaccgccacaagatct

SEQ ID NO: 267802 - DNA, 19 bp, Homo sapiens
  siRNA target sequence for AP3M2 (NM_006803.2,308-326).
ggaggtcccccctctgttt

SEQ ID NO: 267803 - DNA, 19 bp, Homo sapiens
  siRNA target sequence for AP3M2 (NM_006803.2,312-330).
gtcccccctctgtttgtca

SEQ ID NO: 267804 - DNA, 19 bp, Homo sapiens
  siRNA target sequence for AP3M2 (NM_006803.2,382-400).
gttcagagccagtgatcaa

SEQ ID NO: 267805 - DNA, 19 bp, Homo sapiens
  siRNA target sequence for AP3M2 (NM_006803.2,389-407).
gccagtgatcaaagacaat

SEQ ID NO: 267806 - DNA, 19 bp, Homo sapiens
  siRNA target sequence for AP3M2 (NM_006803.2,437-455).
gatgcttgacaatggtttt

SEQ ID NO: 267807 - DNA, 19 bp, Homo sapiens
  siRNA target sequence for AP3M2 (NM_006803.2,440-458).
gcttgacaatggttttcca

SEQ ID NO: 267808 - DNA, 19 bp, Homo sapiens
  siRNA target sequence for AP3M2 (NM_006803.2,441-459).
cttgacaatggttttccat

SEQ ID NO: 267809 - DNA, 19 bp, Homo sapiens
  siRNA target sequence for AP3M2 (NM_006803.2,463-481).
ctaccgagtcgaacattct

SEQ ID NO: 267810 - DNA, 19 bp, Homo sapiens
  siRNA target sequence for AP3M2 (NM_006803.2,466-484).
ccgagtcgaacattcttaa

SEQ ID NO: 267811 - DNA, 19 bp, Homo sapiens
  siRNA target sequence for AP3M2 (NM_006803.2,467-485).
cgagtcgaacattcttaaa

SEQ ID NO: 267812 - DNA, 19 bp, Homo sapiens
  siRNA target sequence for AP3M2 (NM_006803.2,470-488).
gtcgaacattcttaaagaa

SEQ ID NO: 267813 - DNA, 19 bp, Homo sapiens
  siRNA target sequence for AP3M2 (NM_006803.2,472-490).
cgaacattcttaaagaact

SEQ ID NO: 267814 - DNA, 19 bp, Homo sapiens
  siRNA target sequence for AP3M2 (NM_006803.2,594-612).
cgacggactggggtgaaat

SEQ ID NO: 267815 - DNA, 19 bp, Homo sapiens
  siRNA target sequence for AP3M2 (NM_006803.2,626-644).
ggcctattttgatgtgatt

SEQ ID NO: 267816 - DNA, 19 bp, Homo sapiens
  siRNA target sequence for AP3M2 (NM_006803.2,695-713).
gatccagggggtgattgat

SEQ ID NO: 267817 - DNA, 19 bp, Homo sapiens
  siRNA target sequence for AP3M2 (NM_006803.2,733-751).
gcatgccagaccttacact

SEQ ID NO: 267818 - DNA, 19 bp, Homo sapiens
  siRNA target sequence for AP3M2 (NM_006803.2,766-784).
ctaggttgttggatgatgt

SEQ ID NO: 267819 - DNA, 19 bp, Homo sapiens
  siRNA target sequence for AP3M2 (NM_006803.2,863-881).
ccgcctgctgtcttaccat

SEQ ID NO: 267820 - DNA, 19 bp, Homo sapiens
  siRNA target sequence for AP3M2 (NM_006803.2,899-917).
ggttgcaatcccagtgtat

SEQ ID NO: 267821 - DNA, 19 bp, Homo sapiens
  siRNA target sequence for AP3M2 (NM_006803.2,912-930).
gtgtatgtcaaacataaca

SEQ ID NO: 267822 - DNA, 19 bp, Homo sapiens
  siRNA target sequence for AP3M2 (NM_006803.2,918-936).
gtcaaacataacatcagtt

SEQ ID NO: 267823 - DNA, 19 bp, Homo sapiens
  siRNA target sequence for AP3M2 (NM_006803.2,1069-1087).
cacaggggacacacacatt

SEQ ID NO: 267824 - DNA, 19 bp, Homo sapiens
  siRNA target sequence for AP3M2 (NM_006803.2,1084-1102).
cattcgacccagtcacaaa

SEQ ID NO: 267825 - DNA, 19 bp, Homo sapiens
  siRNA target sequence for AP3M2 (NM_006803.2,1114-1132).
gggatgtaggaaaaataaa

SEQ ID NO: 267826 - DNA, 19 bp, Homo sapiens
  siRNA target sequence for AP3M2 (NM_006803.2,1194-1212).
gatgaaaaccccacaatta

SEQ ID NO: 267827 - DNA, 19 bp, Homo sapiens
  siRNA target sequence for AP3M2 (NM_006803.2,1269-1287).
gatatgtatggagaaaagt

SEQ ID NO: 267828 - DNA, 19 bp, Homo sapiens
  siRNA target sequence for AP3S1 (NM_001284.1,145-163).
ccagccctacagtgaagat

SEQ ID NO: 267829 - DNA, 19 bp, Homo sapiens
  siRNA target sequence for AP3S1 (NM_001284.1,146-164).
cagccctacagtgaagata

SEQ ID NO: 267830 - DNA, 19 bp, Homo sapiens
  siRNA target sequence for AP3S1 (NM_001284.1,148-166).
gccctacagtgaagataca

SEQ ID NO: 267831 - DNA, 19 bp, Homo sapiens
  siRNA target sequence for AP3S1 (NM_001284.1,263-281).
gacaacaaactgatttata

SEQ ID NO: 267832 - DNA, 19 bp, Homo sapiens
  siRNA target sequence for AP3S1 (NM_001284.1,268-286).
caaactgatttatagacat

SEQ ID NO: 267833 - DNA, 19 bp, Homo sapiens
  siRNA target sequence for AP3S1 (NM_001284.1,274-292).
gatttatagacattatgca

SEQ ID NO: 267834 - DNA, 19 bp, Homo sapiens
  siRNA target sequence for AP3S1 (NM_001284.1,282-300).
gacattatgcaacgttata

SEQ ID NO: 267835 - DNA, 19 bp, Homo sapiens
  siRNA target sequence for AP3S1 (NM_001284.1,291-309).
caacgttatattttgtctt

SEQ ID NO: 267836 - DNA, 19 bp, Homo sapiens
  siRNA target sequence for AP3S1 (NM_001284.1,310-328).
ctgtgtggattcttcagaa

SEQ ID NO: 267837 - DNA, 19 bp, Homo sapiens
  siRNA target sequence for AP3S1 (NM_001284.1,422-440).
gtagacaaggttcacaata

SEQ ID NO: 267838 - DNA, 19 bp, Homo sapiens
  siRNA target sequence for AP3S1 (NM_001284.1,427-445).
caaggttcacaatattctt

SEQ ID NO: 267839 - DNA, 19 bp, Homo sapiens
  siRNA target sequence for AP3S1 (NM_001284.1,493-511).
gattgttacacaaattgat

SEQ ID NO: 267840 - DNA, 19 bp, Homo sapiens
  siRNA target sequence for AP3S1 (NM_001284.1,501-519).
cacaaattgatgcacaaaa

SEQ ID NO: 267841 - DNA, 19 bp, Homo sapiens
  siRNA target sequence for AP3S1 (NM_001284.1,566-584).
gctgtatcagctgtaaaga

SEQ ID NO: 267842 - DNA, 19 bp, Homo sapiens
  siRNA target sequence for AP3S1 (NM_001284.1,597-615).
ctgagatcccaagaaatat

SEQ ID NO: 267843 - DNA, 19 bp, Homo sapiens
  siRNA target sequence for AP3S1 (NM_001284.1,619-637).
cattggtgacatcagtata

SEQ ID NO: 267844 - DNA, 19 bp, Homo sapiens
  siRNA target sequence for AP3S1 (NM_001284.1,624-642).
gtgacatcagtataaaagt

SEQ ID NO: 267845 - DNA, 19 bp, Homo sapiens
  siRNA target sequence for AP3S1 (NM_001284.1,645-663).
caaacctgccctcttttaa

SEQ ID NO: 267846 - DNA, 19 bp, Homo sapiens
  siRNA target sequence for AP3S2 (NM_005829.3,28-46).
caggcgattctggttttca

SEQ ID NO: 267847 - DNA, 19 bp, Homo sapiens
  siRNA target sequence for AP3S2 (NM_005829.3,82-100).
cagcgtttcccagaagaaa

SEQ ID NO: 267848 - DNA, 19 bp, Homo sapiens
  siRNA target sequence for AP3S2 (NM_005829.3,145-163).
cgggatgacaacatctgta

SEQ ID NO: 267849 - DNA, 19 bp, Homo sapiens
  siRNA target sequence for AP3S2 (NM_005829.3,222-240).
ctatgctaccctctacttt

SEQ ID NO: 267850 - DNA, 19 bp, Homo sapiens
  siRNA target sequence for AP3S2 (NM_005829.3,226-244).
gctaccctctactttgtat

SEQ ID NO: 267851 - DNA, 19 bp, Homo sapiens
  siRNA target sequence for AP3S2 (NM_005829.3,227-245).
ctaccctctactttgtatt

SEQ ID NO: 267852 - DNA, 19 bp, Homo sapiens
  siRNA target sequence for AP3S2 (NM_005829.3,303-321).
ggaaactctggataagtgt

SEQ ID NO: 267853 - DNA, 19 bp, Homo sapiens
  siRNA target sequence for AP3S2 (NM_005829.3,310-328).
ctggataagtgtttcgaaa

SEQ ID NO: 267854 - DNA, 19 bp, Homo sapiens
  siRNA target sequence for AP3S2 (NM_005829.3,312-330).
ggataagtgtttcgaaaat

SEQ ID NO: 267855 - DNA, 19 bp, Homo sapiens
  siRNA target sequence for AP3S2 (NM_005829.3,416-434).
caaacatgaatgaaatcgt

SEQ ID NO: 267856 - DNA, 19 bp, Homo sapiens
  siRNA target sequence for AP3S2 (NM_005829.3,535-553).
gagattcctcggaacatca

SEQ ID NO: 267857 - DNA, 19 bp, Homo sapiens
  siRNA target sequence for AP3S2 (NM_005829.3,561-579).
cgatctcaacatcaaagtt

SEQ ID NO: 267858 - DNA, 19 bp, Homo sapiens
  siRNA target sequence for APBA1 (NM_001163.2,1361-1379).
gtcatgcgccaggacatta

SEQ ID NO: 267859 - DNA, 19 bp, Homo sapiens
  siRNA target sequence for APBA1 (NM_001163.2,1462-1480).
gtcatcaagcacatctctt

SEQ ID NO: 267860 - DNA, 19 bp, Homo sapiens
  siRNA target sequence for APBA1 (NM_001163.2,1498-1516).
ggaagcgtccactaataaa

SEQ ID NO: 267861 - DNA, 19 bp, Homo sapiens
  siRNA target sequence for APBA1 (NM_001163.2,1502-1520).
gcgtccactaataaagagt

SEQ ID NO: 267862 - DNA, 19 bp, Homo sapiens
  siRNA target sequence for APBA1 (NM_001163.2,1543-1561).
cccaacctacgttgaagtt

SEQ ID NO: 267863 - DNA, 19 bp, Homo sapiens
  siRNA target sequence for APBA1 (NM_001163.2,1585-1603).
cttgatcgatggaatcatt

SEQ ID NO: 267864 - DNA, 19 bp, Homo sapiens
  siRNA target sequence for APBA1 (NM_001163.2,1631-1649).
cagctgctctcagacaaaa

SEQ ID NO: 267865 - DNA, 19 bp, Homo sapiens
  siRNA target sequence for APBA1 (NM_001163.2,1643-1661).
gacaaaactccttccaaaa

SEQ ID NO: 267866 - DNA, 19 bp, Homo sapiens
  siRNA target sequence for APBA1 (NM_001163.2,1688-1706).
gccgtaagcaggatcaaga

SEQ ID NO: 267867 - DNA, 19 bp, Homo sapiens
  siRNA target sequence for APBA1 (NM_001163.2,1689-1707).
ccgtaagcaggatcaagat

SEQ ID NO: 267868 - DNA, 19 bp, Homo sapiens
  siRNA target sequence for APBA1 (NM_001163.2,1740-1758).
ctcctgaaggcgaatctca

SEQ ID NO: 267869 - DNA, 19 bp, Homo sapiens
  siRNA target sequence for APBA1 (NM_001163.2,1788-1806).
ctacccagagaatcaaagt

SEQ ID NO: 267870 - DNA, 19 bp, Homo sapiens
  siRNA target sequence for APBA1 (NM_001163.2,1841-1859).
caccctctgaggaccattt

SEQ ID NO: 267871 - DNA, 19 bp, Homo sapiens
  siRNA target sequence for APBA1 (NM_001163.2,1964-1982).
gggaaaaggcagtacaaga

SEQ ID NO: 267872 - DNA, 19 bp, Homo sapiens
  siRNA target sequence for APBA1 (NM_001163.2,2082-2100).
ggattaaccccgaagatct

SEQ ID NO: 267873 - DNA, 19 bp, Homo sapiens
  siRNA target sequence for APBA1 (NM_001163.2,2167-2185).
ctccaagtcggaaaactgt

SEQ ID NO: 267874 - DNA, 19 bp, Homo sapiens
  siRNA target sequence for APBA1 (NM_001163.2,2175-2193).
cggaaaactgtaaagatgt

SEQ ID NO: 267875 - DNA, 19 bp, Homo sapiens
  siRNA target sequence for APBA1 (NM_001163.2,2294-2312).
ggtggccctgcggagaaat

SEQ ID NO: 267876 - DNA, 19 bp, Homo sapiens
  siRNA target sequence for APBA1 (NM_001163.2,2382-2400).
ccacctgccagagcattat

SEQ ID NO: 267877 - DNA, 19 bp, Homo sapiens
  siRNA target sequence for APBA1 (NM_001163.2,2385-2403).
cctgccagagcattattaa

SEQ ID NO: 267878 - DNA, 19 bp, Homo sapiens
  siRNA target sequence for APBA1 (NM_001163.2,2453-2471).
ccggtgaccaccgtgttaa

SEQ ID NO: 267879 - DNA, 19 bp, Homo sapiens
  siRNA target sequence for APBA1 (NM_001163.2,2575-2593).
ggggcaccggatcattgaa

SEQ ID NO: 267880 - DNA, 19 bp, Homo sapiens
  siRNA target sequence for APBA1 (NM_001163.2,2576-2594).
gggcaccggatcattgaaa

SEQ ID NO: 267881 - DNA, 19 bp, Homo sapiens
  siRNA target sequence for APBA1 (NM_001163.2,2577-2595).
ggcaccggatcattgaaat

SEQ ID NO: 267882 - DNA, 19 bp, Homo sapiens
  siRNA target sequence for ARCN1 (NM_001655.3,205-223).
ctcgacagtttgtggaaat

SEQ ID NO: 267883 - DNA, 19 bp, Homo sapiens
  siRNA target sequence for ARCN1 (NM_001655.3,207-225).
cgacagtttgtggaaatga

SEQ ID NO: 267884 - DNA, 19 bp, Homo sapiens
  siRNA target sequence for ARCN1 (NM_001655.3,236-254).
gattgagggcttattagca

SEQ ID NO: 267885 - DNA, 19 bp, Homo sapiens
  siRNA target sequence for ARCN1 (NM_001655.3,245-263).
cttattagcagcttttcca

SEQ ID NO: 267886 - DNA, 19 bp, Homo sapiens
  siRNA target sequence for ARCN1 (NM_001655.3,297-315).
gttgaaacagagagtgtaa

SEQ ID NO: 267887 - DNA, 19 bp, Homo sapiens
  siRNA target sequence for ARCN1 (NM_001655.3,306-324).
gagagtgtaagatatgtct

SEQ ID NO: 267888 - DNA, 19 bp, Homo sapiens
  siRNA target sequence for ARCN1 (NM_001655.3,350-368).
ggtactgatcactaccaaa

SEQ ID NO: 267889 - DNA, 19 bp, Homo sapiens
  siRNA target sequence for ARCN1 (NM_001655.3,351-369).
gtactgatcactaccaaaa

SEQ ID NO: 267890 - DNA, 19 bp, Homo sapiens
  siRNA target sequence for ARCN1 (NM_001655.3,412-430).
caagagtgatccctgaata

SEQ ID NO: 267891 - DNA, 19 bp, Homo sapiens
  siRNA target sequence for ARCN1 (NM_001655.3,433-451).
gccgagccttagaagagaa

SEQ ID NO: 267892 - DNA, 19 bp, Homo sapiens
  siRNA target sequence for ARCN1 (NM_001655.3,509-527).
gggataccgggagaatgtt

SEQ ID NO: 267893 - DNA, 19 bp, Homo sapiens
  siRNA target sequence for ARCN1 (NM_001655.3,510-528).
ggataccgggagaatgtta

SEQ ID NO: 267894 - DNA, 19 bp, Homo sapiens
  siRNA target sequence for ARCN1 (NM_001655.3,511-529).
gataccgggagaatgttaa

SEQ ID NO: 267895 - DNA, 19 bp, Homo sapiens
  siRNA target sequence for ARCN1 (NM_001655.3,590-608).
cgtcagagagactcaagaa

SEQ ID NO: 267896 - DNA, 19 bp, Homo sapiens
  siRNA target sequence for ARCN1 (NM_001655.3,620-638).
ggctgagatgcgtcgtaaa

SEQ ID NO: 267897 - DNA, 19 bp, Homo sapiens
  siRNA target sequence for ARCN1 (NM_001655.3,629-647).
gcgtcgtaaagcaaaggaa

SEQ ID NO: 267898 - DNA, 19 bp, Homo sapiens
  siRNA target sequence for ARCN1 (NM_001655.3,895-913).
ccatcatgtcctctagtat

SEQ ID NO: 267899 - DNA, 19 bp, Homo sapiens
  siRNA target sequence for ARCN1 (NM_001655.3,914-932).
gggcaagcgtacttctgaa

SEQ ID NO: 267900 - DNA, 19 bp, Homo sapiens
  siRNA target sequence for ARCN1 (NM_001655.3,970-988).
gtgtacatatgaagattga

SEQ ID NO: 267901 - DNA, 19 bp, Homo sapiens
  siRNA target sequence for ARCN1 (NM_001655.3,1014-1032).
cgagacggaggattacaga

SEQ ID NO: 267902 - DNA, 19 bp, Homo sapiens
  siRNA target sequence for ARCN1 (NM_001655.3,1015-1033).
gagacggaggattacagaa

SEQ ID NO: 267903 - DNA, 19 bp, Homo sapiens
  siRNA target sequence for ARCN1 (NM_001655.3,1017-1035).
gacggaggattacagaata

SEQ ID NO: 267904 - DNA, 19 bp, Homo sapiens
  siRNA target sequence for ARCN1 (NM_001655.3,1064-1082).
gatctcagatgacaagtat

SEQ ID NO: 267905 - DNA, 19 bp, Homo sapiens
  siRNA target sequence for ARCN1 (NM_001655.3,1076-1094).
caagtatggccgaattcgt

SEQ ID NO: 267906 - DNA, 19 bp, Homo sapiens
  siRNA target sequence for ARCN1 (NM_001655.3,1138-1156).
cccatccaaatgtggataa

SEQ ID NO: 267907 - DNA, 19 bp, Homo sapiens
  siRNA target sequence for ARCN1 (NM_001655.3,1222-1240).
gtgacgtaggggtgctaaa

SEQ ID NO: 267908 - DNA, 19 bp, Homo sapiens
  siRNA target sequence for ARCN1 (NM_001655.3,1224-1242).
gacgtaggggtgctaaagt

SEQ ID NO: 267909 - DNA, 19 bp, Homo sapiens
  siRNA target sequence for ARCN1 (NM_001655.3,1235-1253).
gctaaagtggagactacaa

SEQ ID NO: 267910 - DNA, 19 bp, Homo sapiens
  siRNA target sequence for ARCN1 (NM_001655.3,1236-1254).
ctaaagtggagactacaaa

SEQ ID NO: 267911 - DNA, 19 bp, Homo sapiens
  siRNA target sequence for ARCN1 (NM_001655.3,1315-1333).
gctgtgatgtcaacataga

SEQ ID NO: 267912 - DNA, 19 bp, Homo sapiens
  siRNA target sequence for ARCN1 (NM_001655.3,1544-1562).
cttcttccctgttcaagtt

SEQ ID NO: 267913 - DNA, 19 bp, Homo sapiens
  siRNA target sequence for ARCN1 (NM_001655.3,1646-1664).
cacagagaccactttccta

SEQ ID NO: 267914 - DNA, 19 bp, Homo sapiens
  siRNA target sequence for ARCN1 (NM_001655.3,1661-1679).
cctagtggataagtatgaa

SEQ ID NO: 267915 - DNA, 19 bp, Homo sapiens
  siRNA target sequence for BCAP29 (NM_018844.1,65-83).
gcagtggcaacctttcttt

SEQ ID NO: 267916 - DNA, 19 bp, Homo sapiens
  siRNA target sequence for BCAP29 (NM_018844.1,76-94).
ctttctttatgccgaaata

SEQ ID NO: 267917 - DNA, 19 bp, Homo sapiens
  siRNA target sequence for BCAP29 (NM_018844.1,169-187).
gggtaaaattgcaactttt

SEQ ID NO: 267918 - DNA, 19 bp, Homo sapiens
  siRNA target sequence for BCAP29 (NM_018844.1,203-221).
cttaccattatcatcctat

SEQ ID NO: 267919 - DNA, 19 bp, Homo sapiens
  siRNA target sequence for BCAP29 (NM_018844.1,208-226).
cattatcatcctattgatt

SEQ ID NO: 267920 - DNA, 19 bp, Homo sapiens
  siRNA target sequence for BCAP29 (NM_018844.1,303-321).
gacctgatgcctatgaaca

SEQ ID NO: 267921 - DNA, 19 bp, Homo sapiens
  siRNA target sequence for BCAP29 (NM_018844.1,404-422).
cgtctggttacgcttatta

SEQ ID NO: 267922 - DNA, 19 bp, Homo sapiens
  siRNA target sequence for BCAP29 (NM_018844.1,409-427).
ggttacgcttattactcaa

SEQ ID NO: 267923 - DNA, 19 bp, Homo sapiens
  siRNA target sequence for BCAP29 (NM_018844.1,484-502).
caaggctgccaaaaaattt

SEQ ID NO: 267924 - DNA, 19 bp, Homo sapiens
  siRNA target sequence for BCAP29 (NM_018844.1,608-626).
ctgaaaactgaattaagga

SEQ ID NO: 267925 - DNA, 19 bp, Homo sapiens
  siRNA target sequence for BCAP29 (NM_018844.1,688-706).
gagactttcgaaagaatat

SEQ ID NO: 267926 - DNA, 19 bp, Homo sapiens
  siRNA target sequence for BCAP29 (NM_018844.1,696-714).
cgaaagaatatgatcaact

SEQ ID NO: 267927 - DNA, 19 bp, Homo sapiens
  siRNA target sequence for BCAP29 (NM_018844.1,729-747).
ctgaacttcaggatcgttt

SEQ ID NO: 267928 - DNA, 19 bp, Homo sapiens
  siRNA target sequence for BCAP29 (NM_018844.1,734-752).
cttcaggatcgtttagaaa

SEQ ID NO: 267929 - DNA, 19 bp, Homo sapiens
  siRNA target sequence for BCAP31 (NM_005745.5,172-190).
ctatgcggaggtctttgtt

SEQ ID NO: 267930 - DNA, 19 bp, Homo sapiens
  siRNA target sequence for BCAP31 (NM_005745.5,274-292).
ctatggcaacaccttcttt

SEQ ID NO: 267931 - DNA, 19 bp, Homo sapiens
  siRNA target sequence for BCAP31 (NM_005745.5,328-346).
cgatgccgtgcgcgaaatt

SEQ ID NO: 267932 - DNA, 19 bp, Homo sapiens
  siRNA target sequence for BCAP31 (NM_005745.5,337-355).
gcgcgaaattcggaagtat

SEQ ID NO: 267933 - DNA, 19 bp, Homo sapiens
  siRNA target sequence for BCAP31 (NM_005745.5,339-357).
gcgaaattcggaagtatga

SEQ ID NO: 267934 - DNA, 19 bp, Homo sapiens
  siRNA target sequence for BCAP31 (NM_005745.5,340-358).
cgaaattcggaagtatgat

SEQ ID NO: 267935 - DNA, 19 bp, Homo sapiens
  siRNA target sequence for BCAP31 (NM_005745.5,373-391).
ggtgaacctccagaacaat

SEQ ID NO: 267936 - DNA, 19 bp, Homo sapiens
  siRNA target sequence for BCAP31 (NM_005745.5,428-446).
cgtgcccagaggaatctct

SEQ ID NO: 267937 - DNA, 19 bp, Homo sapiens
  siRNA target sequence for BCAP31 (NM_005745.5,429-447).
gtgcccagaggaatctcta

SEQ ID NO: 267938 - DNA, 19 bp, Homo sapiens
  siRNA target sequence for BCAP31 (NM_005745.5,488-506).
cgcctggtgactctcattt

SEQ ID NO: 267939 - DNA, 19 bp, Homo sapiens
  siRNA target sequence for BCAP31 (NM_005745.5,528-546).
cctccaatgaagcctttaa

SEQ ID NO: 267940 - DNA, 19 bp, Homo sapiens
  siRNA target sequence for BCAP31 (NM_005745.5,529-547).
ctccaatgaagcctttaaa

SEQ ID NO: 267941 - DNA, 19 bp, Homo sapiens
  siRNA target sequence for BCAP31 (NM_005745.5,718-736).
gctggccagcactaagcaa

SEQ ID NO: 267942 - DNA, 19 bp, Homo sapiens
  siRNA target sequence for BET1 (NM_005868.2,361-379).
ctatgggcaaactgaagat

SEQ ID NO: 267943 - DNA, 19 bp, Homo sapiens
  siRNA target sequence for BET1 (NM_005868.2,365-383).
gggcaaactgaagatttta

SEQ ID NO: 267944 - DNA, 19 bp, Homo sapiens
  siRNA target sequence for BET1 (NM_005868.2,385-403).
ccagagggagccaaacaaa

SEQ ID NO: 267945 - DNA, 19 bp, Homo sapiens
  siRNA target sequence for BET1 (NM_005868.2,400-418).
caaagctgctgtgctatat

SEQ ID NO: 267946 - DNA, 19 bp, Homo sapiens
  siRNA target sequence for C14orf163 (NM_016106.2,89-107).
ctttgaagcgtatgttgaa

SEQ ID NO: 267947 - DNA, 19 bp, Homo sapiens
  siRNA target sequence for C14orf163 (NM_016106.2,98-116).
gtatgttgaatttcaatgt

SEQ ID NO: 267948 - DNA, 19 bp, Homo sapiens
  siRNA target sequence for C14orf163 (NM_016106.2,146-164).
cagtatggaaggtactcat

SEQ ID NO: 267949 - DNA, 19 bp, Homo sapiens
  siRNA target sequence for C14orf163 (NM_016106.2,148-166).
gtatggaaggtactcattt

SEQ ID NO: 267950 - DNA, 19 bp, Homo sapiens
  siRNA target sequence for C14orf163 (NM_016106.2,236-254).
ctctgcatctgcttttaca

SEQ ID NO: 267951 - DNA, 19 bp, Homo sapiens
  siRNA target sequence for C14orf163 (NM_016106.2,238-256).
ctgcatctgcttttacact

SEQ ID NO: 267952 - DNA, 19 bp, Homo sapiens
  siRNA target sequence for C14orf163 (NM_016106.2,255-273).
ctctgatcgagatcctatt

SEQ ID NO: 267953 - DNA, 19 bp, Homo sapiens
  siRNA target sequence for C14orf163 (NM_016106.2,294-312).
ctttgtaatgccaactgaa

SEQ ID NO: 267954 - DNA, 19 bp, Homo sapiens
  siRNA target sequence for C14orf163 (NM_016106.2,337-355).
gatcttcgaaatcaactat

SEQ ID NO: 267955 - DNA, 19 bp, Homo sapiens
  siRNA target sequence for C14orf163 (NM_016106.2,446-464).
cacaagtagccaaggtttt

SEQ ID NO: 267956 - DNA, 19 bp, Homo sapiens
  siRNA target sequence for C14orf163 (NM_016106.2,455-473).
ccaaggtttttgaccaata

SEQ ID NO: 267957 - DNA, 19 bp, Homo sapiens
  siRNA target sequence for C14orf163 (NM_016106.2,456-474).
caaggtttttgaccaatat

SEQ ID NO: 267958 - DNA, 19 bp, Homo sapiens
  siRNA target sequence for C14orf163 (NM_016106.2,492-510).
ggaagatgatatgtttgta

SEQ ID NO: 267959 - DNA, 19 bp, Homo sapiens
  siRNA target sequence for C14orf163 (NM_016106.2,528-546).
ggagcttgtttcatatcgt

SEQ ID NO: 267960 - DNA, 19 bp, Homo sapiens
  siRNA target sequence for C14orf163 (NM_016106.2,573-591).
cacggaaatggaaactgtt

SEQ ID NO: 267961 - DNA, 19 bp, Homo sapiens
  siRNA target sequence for C14orf163 (NM_016106.2,587-605).
ctgttatggacactatagt

SEQ ID NO: 267962 - DNA, 19 bp, Homo sapiens
  siRNA target sequence for C14orf163 (NM_016106.2,634-652).
ctgggtgctgttcctataa

SEQ ID NO: 267963 - DNA, 19 bp, Homo sapiens
  siRNA target sequence for C14orf163 (NM_016106.2,640-658).
gctgttcctataatcagat

SEQ ID NO: 267964 - DNA, 19 bp, Homo sapiens
  siRNA target sequence for C14orf163 (NM_016106.2,760-778).
cttggagctggccaattca

SEQ ID NO: 267965 - DNA, 19 bp, Homo sapiens
  siRNA target sequence for C14orf163 (NM_016106.2,791-809).
ccttattagtccttgttga

SEQ ID NO: 267966 - DNA, 19 bp, Homo sapiens
  siRNA target sequence for C14orf163 (NM_016106.2,825-843).
ggcaactcctttacatcat

SEQ ID NO: 267967 - DNA, 19 bp, Homo sapiens
  siRNA target sequence for C14orf163 (NM_016106.2,826-844).
gcaactcctttacatcata

SEQ ID NO: 267968 - DNA, 19 bp, Homo sapiens
  siRNA target sequence for C14orf163 (NM_016106.2,860-878).
cattggtgcacgatgtact

SEQ ID NO: 267969 - DNA, 19 bp, Homo sapiens
  siRNA target sequence for C14orf163 (NM_016106.2,897-915).
ggttaatttggaagaatct

SEQ ID NO: 267970 - DNA, 19 bp, Homo sapiens
  siRNA target sequence for C14orf163 (NM_016106.2,976-994).
gatttaactccggttgata

SEQ ID NO: 267971 - DNA, 19 bp, Homo sapiens
  siRNA target sequence for C14orf163 (NM_016106.2,1026-1044).
cccagaagttgcagaatca

SEQ ID NO: 267972 - DNA, 19 bp, Homo sapiens
  siRNA target sequence for C14orf163 (NM_016106.2,1043-1061).
cagttcagcaagaactaga

SEQ ID NO: 267973 - DNA, 19 bp, Homo sapiens
  siRNA target sequence for C14orf163 (NM_016106.2,1084-1102).
gaggtcaaacgacttaaaa

SEQ ID NO: 267974 - DNA, 19 bp, Homo sapiens
  siRNA target sequence for C14orf163 (NM_016106.2,1087-1105).
gtcaaacgacttaaaagca

SEQ ID NO: 267975 - DNA, 19 bp, Homo sapiens
  siRNA target sequence for C14orf163 (NM_016106.2,1089-1107).
caaacgacttaaaagcatt

SEQ ID NO: 267976 - DNA, 19 bp, Homo sapiens
  siRNA target sequence for C14orf163 (NM_016106.2,1153-1171).
gacaataccgctaagctaa

SEQ ID NO: 267977 - DNA, 19 bp, Homo sapiens
  siRNA target sequence for C14orf163 (NM_016106.2,1167-1185).
gctaacatcagctgttagt

SEQ ID NO: 267978 - DNA, 19 bp, Homo sapiens
  siRNA target sequence for C14orf163 (NM_016106.2,1168-1186).
ctaacatcagctgttagtt

SEQ ID NO: 267979 - DNA, 19 bp, Homo sapiens
  siRNA target sequence for C14orf163 (NM_016106.2,1172-1190).
catcagctgttagttcttt

SEQ ID NO: 267980 - DNA, 19 bp, Homo sapiens
  siRNA target sequence for C14orf163 (NM_016106.2,1241-1259).
ccactgctgttttagaaca

SEQ ID NO: 267981 - DNA, 19 bp, Homo sapiens
  siRNA target sequence for C14orf163 (NM_016106.2,1313-1331).
gcaaaactactctggataa

SEQ ID NO: 267982 - DNA, 19 bp, Homo sapiens
  siRNA target sequence for C14orf163 (NM_016106.2,1435-1453).
gctgatttggagcaatata

SEQ ID NO: 267983 - DNA, 19 bp, Homo sapiens
  siRNA target sequence for C14orf163 (NM_016106.2,1475-1493).
gatgcaaccttaatccttt

SEQ ID NO: 267984 - DNA, 19 bp, Homo sapiens
  siRNA target sequence for C14orf163 (NM_016106.2,1478-1496).
gcaaccttaatcctttaca

SEQ ID NO: 267985 - DNA, 19 bp, Homo sapiens
  siRNA target sequence for C14orf163 (NM_016106.2,1479-1497).
caaccttaatcctttacaa

SEQ ID NO: 267986 - DNA, 19 bp, Homo sapiens
  siRNA target sequence for C14orf163 (NM_016106.2,1554-1572).
cagcactaccactaaacca

SEQ ID NO: 267987 - DNA, 19 bp, Homo sapiens
  siRNA target sequence for C14orf163 (NM_016106.2,1556-1574).
gcactaccactaaaccaat

SEQ ID NO: 267988 - DNA, 19 bp, Homo sapiens
  siRNA target sequence for C14orf163 (NM_016106.2,1657-1675).
ctacctgttactcgtattt

SEQ ID NO: 267989 - DNA, 19 bp, Homo sapiens
  siRNA target sequence for C14orf163 (NM_016106.2,1661-1679).
ctgttactcgtattttgga

SEQ ID NO: 267990 - DNA, 19 bp, Homo sapiens
  siRNA target sequence for C14orf163 (NM_016106.2,1667-1685).
ctcgtattttggacaatct

SEQ ID NO: 267991 - DNA, 19 bp, Homo sapiens
  siRNA target sequence for C14orf163 (NM_016106.2,1669-1687).
cgtattttggacaatctta

SEQ ID NO: 267992 - DNA, 19 bp, Homo sapiens
  siRNA target sequence for C14orf163 (NM_016106.2,1698-1716).
gtcaaaccccgaaactgat

SEQ ID NO: 267993 - DNA, 19 bp, Homo sapiens
  siRNA target sequence for C14orf163 (NM_016106.2,1705-1723).
cccgaaactgatgactata

SEQ ID NO: 267994 - DNA, 19 bp, Homo sapiens
  siRNA target sequence for C14orf163 (NM_016106.2,1707-1725).
cgaaactgatgactataga

SEQ ID NO: 267995 - DNA, 19 bp, Homo sapiens
  siRNA target sequence for C14orf163 (NM_016106.2,1712-1730).
ctgatgactatagatattt

SEQ ID NO: 267996 - DNA, 19 bp, Homo sapiens
  siRNA target sequence for C14orf163 (NM_016106.2,1812-1830).
gggaggaggcaactacatt

SEQ ID NO: 267997 - DNA, 19 bp, Homo sapiens
  siRNA target sequence for C14orf163 (NM_016106.2,1814-1832).
gaggaggcaactacattga

SEQ ID NO: 267998 - DNA, 19 bp, Homo sapiens
  siRNA target sequence for C14orf163 (NM_016106.2,1817-1835).
gaggcaactacattgaata

SEQ ID NO: 267999 - DNA, 19 bp, Homo sapiens
  siRNA target sequence for C14orf163 (NM_016106.2,1820-1838).
gcaactacattgaatatca

SEQ ID NO: 268000 - DNA, 19 bp, Homo sapiens
  siRNA target sequence for C14orf163 (NM_016106.2,1824-1842).
ctacattgaatatcagaat

SEQ ID NO: 268001 - DNA, 19 bp, Homo sapiens
  siRNA target sequence for C14orf163 (NM_016106.2,1827-1845).
cattgaatatcagaatctt

SEQ ID NO: 268002 - DNA, 19 bp, Homo sapiens
  siRNA target sequence for C14orf163 (NM_016106.2,1862-1880).
ggaaacaaggcaaacacat

SEQ ID NO: 268003 - DNA, 19 bp, Homo sapiens
  siRNA target sequence for C14orf163 (NM_016106.2,1890-1908).
ctgcagtgagctttttaat

SEQ ID NO: 268004 - DNA, 19 bp, Homo sapiens
  siRNA target sequence for C14orf163 (NM_016106.2,1910-1928).
ctacacagttcataaaaca

SEQ ID NO: 268005 - DNA, 19 bp, Homo sapiens
  siRNA target sequence for C20orf161 (NM_033421.2,496-514).
ccagcgctaacgttgtcaa

SEQ ID NO: 268006 - DNA, 19 bp, Homo sapiens
  siRNA target sequence for C20orf161 (NM_033421.2,598-616).
gccgttactcggactttga

SEQ ID NO: 268007 - DNA, 19 bp, Homo sapiens
  siRNA target sequence for C20orf161 (NM_033421.2,1100-1118).
cctggacaaacgtcaatca

SEQ ID NO: 268008 - DNA, 19 bp, Homo sapiens
  siRNA target sequence for C20orf161 (NM_033421.2,1171-1189).
ccagtctcaaagaattgct

SEQ ID NO: 268009 - DNA, 19 bp, Homo sapiens
  siRNA target sequence for CHS1 (NM_000081.1,207-225).
ctcactggcacgtgaattt

SEQ ID NO: 268010 - DNA, 19 bp, Homo sapiens
  siRNA target sequence for CHS1 (NM_000081.1,330-348).
ccatggtcgaggatttcta

SEQ ID NO: 268011 - DNA, 19 bp, Homo sapiens
  siRNA target sequence for CHS1 (NM_000081.1,331-349).
catggtcgaggatttctat

SEQ ID NO: 268012 - DNA, 19 bp, Homo sapiens
  siRNA target sequence for CHS1 (NM_000081.1,335-353).
gtcgaggatttctattact

SEQ ID NO: 268013 - DNA, 19 bp, Homo sapiens
  siRNA target sequence for CHS1 (NM_000081.1,346-364).
ctattacttaccaagctaa

SEQ ID NO: 268014 - DNA, 19 bp, Homo sapiens
  siRNA target sequence for CHS1 (NM_000081.1,381-399).
ggcattgacatgtagagaa

SEQ ID NO: 268015 - DNA, 19 bp, Homo sapiens
  siRNA target sequence for CHS1 (NM_000081.1,444-462).
gatacctgtccaagaagaa

SEQ ID NO: 268016 - DNA, 19 bp, Homo sapiens
  siRNA target sequence for CHS1 (NM_000081.1,465-483).
ggcaacagattttaaccta

SEQ ID NO: 268017 - DNA, 19 bp, Homo sapiens
  siRNA target sequence for CHS1 (NM_000081.1,484-502).
ccgctctcagcagatataa

SEQ ID NO: 268018 - DNA, 19 bp, Homo sapiens
  siRNA target sequence for CHS1 (NM_000081.1,485-503).
cgctctcagcagatataat

SEQ ID NO: 268019 - DNA, 19 bp, Homo sapiens
  siRNA target sequence for CHS1 (NM_000081.1,617-635).
gcagacgacagcgtaaaat

SEQ ID NO: 268020 - DNA, 19 bp, Homo sapiens
  siRNA target sequence for CHS1 (NM_000081.1,618-636).
cagacgacagcgtaaaatt

SEQ ID NO: 268021 - DNA, 19 bp, Homo sapiens
  siRNA target sequence for CHS1 (NM_000081.1,721-739).
gcaatgaataagcatagaa

SEQ ID NO: 268022 - DNA, 19 bp, Homo sapiens
  siRNA target sequence for CHS1 (NM_000081.1,742-760).
ccccatctgctgcatcatt

SEQ ID NO: 268023 - DNA, 19 bp, Homo sapiens
  siRNA target sequence for CHS1 (NM_000081.1,767-785).
catcgtttcctaaacaaga

SEQ ID NO: 268024 - DNA, 19 bp, Homo sapiens
  siRNA target sequence for CHS1 (NM_000081.1,781-799).
caagaccaccccaaagcta

SEQ ID NO: 268025 - DNA, 19 bp, Homo sapiens
  siRNA target sequence for CHS1 (NM_000081.1,883-901).
gggtcaaacactgacattt

SEQ ID NO: 268026 - DNA, 19 bp, Homo sapiens
  siRNA target sequence for CHS1 (NM_000081.1,916-934).
gccttgtctgttatcagta

SEQ ID NO: 268027 - DNA, 19 bp, Homo sapiens
  siRNA target sequence for CHS1 (NM_000081.1,947-965).
ctccatttgacttatgtca

SEQ ID NO: 268028 - DNA, 19 bp, Homo sapiens
  siRNA target sequence for CHS1 (NM_000081.1,1003-1021).
gacgttaccttgaatcata

SEQ ID NO: 268029 - DNA, 19 bp, Homo sapiens
  siRNA target sequence for CHS1 (NM_000081.1,1005-1023).
cgttaccttgaatcataat

SEQ ID NO: 268030 - DNA, 19 bp, Homo sapiens
  siRNA target sequence for CHS1 (NM_000081.1,1006-1024).
gttaccttgaatcataatt

SEQ ID NO: 268031 - DNA, 19 bp, Homo sapiens
  siRNA target sequence for CHS1 (NM_000081.1,1045-1063).
gtgcccacactaactgaat

SEQ ID NO: 268032 - DNA, 19 bp, Homo sapiens
  siRNA target sequence for CHS1 (NM_000081.1,1049-1067).
ccacactaactgaattcct

SEQ ID NO: 268033 - DNA, 19 bp, Homo sapiens
  siRNA target sequence for CHS1 (NM_000081.1,1088-1106).
gcagtctgagcgacaactt

SEQ ID NO: 268034 - DNA, 19 bp, Homo sapiens
  siRNA target sequence for CHS1 (NM_000081.1,1104-1122).
cttggagagtcgagtagtt

SEQ ID NO: 268035 - DNA, 19 bp, Homo sapiens
  siRNA target sequence for CHS1 (NM_000081.1,1144-1162).
ccggtggctttgattcaaa

SEQ ID NO: 268036 - DNA, 19 bp, Homo sapiens
  siRNA target sequence for CHS1 (NM_000081.1,1194-1212).
gtcagtagatgttagtact

SEQ ID NO: 268037 - DNA, 19 bp, Homo sapiens
  siRNA target sequence for CHS1 (NM_000081.1,1372-1390).
cgtcatagagcccttcttt

SEQ ID NO: 268038 - DNA, 19 bp, Homo sapiens
  siRNA target sequence for CHS1 (NM_000081.1,1469-1487).
gtcaagccatggatttggt

SEQ ID NO: 268039 - DNA, 19 bp, Homo sapiens
  siRNA target sequence for CHS1 (NM_000081.1,1501-1519).
cagcatcatggatttaatt

SEQ ID NO: 268040 - DNA, 19 bp, Homo sapiens
  siRNA target sequence for CHS1 (NM_000081.1,1531-1549).
gcagttcttcaaatggaat

SEQ ID NO: 268041 - DNA, 19 bp, Homo sapiens
  siRNA target sequence for CHS1 (NM_000081.1,1545-1563).
ggaatggctggttttaaga

SEQ ID NO: 268042 - DNA, 19 bp, Homo sapiens
  siRNA target sequence for CHS1 (NM_000081.1,1631-1649).
gcactgtcaaaaaagtgaa

SEQ ID NO: 268043 - DNA, 19 bp, Homo sapiens
  siRNA target sequence for CHS1 (NM_000081.1,1663-1681).
catcattcgatgtgtacaa

SEQ ID NO: 268044 - DNA, 19 bp, Homo sapiens
  siRNA target sequence for CHS1 (NM_000081.1,1666-1684).
cattcgatgtgtacaagaa

SEQ ID NO: 268045 - DNA, 19 bp, Homo sapiens
  siRNA target sequence for CHS1 (NM_000081.1,1688-1706).
ggcacagacgatgtgaata

SEQ ID NO: 268046 - DNA, 19 bp, Homo sapiens
  siRNA target sequence for CHS1 (NM_000081.1,1689-1707).
gcacagacgatgtgaatat

SEQ ID NO: 268047 - DNA, 19 bp, Homo sapiens
  siRNA target sequence for CHS1 (NM_000081.1,1692-1710).
cagacgatgtgaatattct

SEQ ID NO: 268048 - DNA, 19 bp, Homo sapiens
  siRNA target sequence for CHS1 (NM_000081.1,1696-1714).
cgatgtgaatattctcatt

SEQ ID NO: 268049 - DNA, 19 bp, Homo sapiens
  siRNA target sequence for CHS1 (NM_000081.1,1905-1923).
gatcctatcgggtgttcat

SEQ ID NO: 268050 - DNA, 19 bp, Homo sapiens
  siRNA target sequence for CHS1 (NM_000081.1,1909-1927).
ctatcgggtgttcataaca

SEQ ID NO: 268051 - DNA, 19 bp, Homo sapiens
  siRNA target sequence for CHS1 (NM_000081.1,1948-1966).
gatcccaaatctgtaatca

SEQ ID NO: 268052 - DNA, 19 bp, Homo sapiens
  siRNA target sequence for CHS1 (NM_000081.1,2092-2110).
gcagcttgtaatatttgta

SEQ ID NO: 268053 - DNA, 19 bp, Homo sapiens
  siRNA target sequence for CHS1 (NM_000081.1,2124-2142).
ccaactagcccaattagaa

SEQ ID NO: 268054 - DNA, 19 bp, Homo sapiens
  siRNA target sequence for CHS1 (NM_000081.1,2151-2169).
gcagggaaacttatgtgat

SEQ ID NO: 268055 - DNA, 19 bp, Homo sapiens
  siRNA target sequence for CHS1 (NM_000081.1,2170-2188).
gctgaactctcctcaagtt

SEQ ID NO: 268056 - DNA, 19 bp, Homo sapiens
  siRNA target sequence for CHS1 (NM_000081.1,2223-2241).
gcccagcagtggatctgaa

SEQ ID NO: 268057 - DNA, 19 bp, Homo sapiens
  siRNA target sequence for CHS1 (NM_000081.1,2250-2268).
gtggaaatgggatgcttta

SEQ ID NO: 268058 - DNA, 19 bp, Homo sapiens
  siRNA target sequence for CHS1 (NM_000081.1,2252-2270).
ggaaatgggatgctttaaa

SEQ ID NO: 268059 - DNA, 19 bp, Homo sapiens
  siRNA target sequence for CHS1 (NM_000081.1,2303-2321).
gattacatagtatacagat

SEQ ID NO: 268060 - DNA, 19 bp, Homo sapiens
  siRNA target sequence for CHS1 (NM_000081.1,2308-2326).
catagtatacagattgcaa

SEQ ID NO: 268061 - DNA, 19 bp, Homo sapiens
  siRNA target sequence for CHS1 (NM_000081.1,2346-2364).
ccagaaaggcaatatagtt

SEQ ID NO: 268062 - DNA, 19 bp, Homo sapiens
  siRNA target sequence for CHS1 (NM_000081.1,2362-2380).
gttgttcagtggaaattat

SEQ ID NO: 268063 - DNA, 19 bp, Homo sapiens
  siRNA target sequence for CHS1 (NM_000081.1,2365-2383).
gttcagtggaaattatata

SEQ ID NO: 268064 - DNA, 19 bp, Homo sapiens
  siRNA target sequence for CHS1 (NM_000081.1,2416-2434).
gttgaattagcacatcatt

SEQ ID NO: 268065 - DNA, 19 bp, Homo sapiens
  siRNA target sequence for CHS1 (NM_000081.1,2448-2466).
cgttacttcagctcaaagt

SEQ ID NO: 268066 - DNA, 19 bp, Homo sapiens
  siRNA target sequence for CHS1 (NM_000081.1,2458-2476).
gctcaaagtcatgtatgta

SEQ ID NO: 268067 - DNA, 19 bp, Homo sapiens
  siRNA target sequence for CHS1 (NM_000081.1,2530-2548).
ctgcctatcctgcttaaat

SEQ ID NO: 268068 - DNA, 19 bp, Homo sapiens
  siRNA target sequence for CHS1 (NM_000081.1,2533-2551).
cctatcctgcttaaatcca

SEQ ID NO: 268069 - DNA, 19 bp, Homo sapiens
  siRNA target sequence for CHS1 (NM_000081.1,2542-2560).
cttaaatccagggtaataa

SEQ ID NO: 268070 - DNA, 19 bp, Homo sapiens
  siRNA target sequence for CHS1 (NM_000081.1,2574-2592).
gagttgtaatggagtaagt

SEQ ID NO: 268071 - DNA, 19 bp, Homo sapiens
  siRNA target sequence for CHS1 (NM_000081.1,2579-2597).
gtaatggagtaagtcaaat

SEQ ID NO: 268072 - DNA, 19 bp, Homo sapiens
  siRNA target sequence for CHS1 (NM_000081.1,2585-2603).
gagtaagtcaaataatcga

SEQ ID NO: 268073 - DNA, 19 bp, Homo sapiens
  siRNA target sequence for CHS1 (NM_000081.1,2587-2605).
gtaagtcaaataatcgaat

SEQ ID NO: 268074 - DNA, 19 bp, Homo sapiens
  siRNA target sequence for CHS1 (NM_000081.1,2621-2639).
gtattcgaagtcattctct

SEQ ID NO: 268075 - DNA, 19 bp, Homo sapiens
  siRNA target sequence for CHS1 (NM_000081.1,2743-2761).
gtacatgtgggtacttctt

SEQ ID NO: 268076 - DNA, 19 bp, Homo sapiens
  siRNA target sequence for CHS1 (NM_000081.1,2791-2809).
cctcagagtctcagcaaat

SEQ ID NO: 268077 - DNA, 19 bp, Homo sapiens
  siRNA target sequence for CHS1 (NM_000081.1,2820-2838).
cctcaaagaagcttatcca

SEQ ID NO: 268078 - DNA, 19 bp, Homo sapiens
  siRNA target sequence for CHS1 (NM_000081.1,2843-2861).
gacggaagactgttaacca

SEQ ID NO: 268079 - DNA, 19 bp, Homo sapiens
  siRNA target sequence for CHS1 (NM_000081.1,2850-2868).
gactgttaaccaagatgtt

SEQ ID NO: 268080 - DNA, 19 bp, Homo sapiens
  siRNA target sequence for CHS1 (NM_000081.1,2863-2881).
gatgttcatatcaacacaa

SEQ ID NO: 268081 - DNA, 19 bp, Homo sapiens
  siRNA target sequence for CHS1 (NM_000081.1,2866-2884).
gttcatatcaacacaataa

SEQ ID NO: 268082 - DNA, 19 bp, Homo sapiens
  siRNA target sequence for CHS1 (NM_000081.1,2902-2920).
gcttttttatgcgtaagta

SEQ ID NO: 268083 - DNA, 19 bp, Homo sapiens
  siRNA target sequence for CHS1 (NM_000081.1,2962-2980).
gatacttctggctatgaca

SEQ ID NO: 268084 - DNA, 19 bp, Homo sapiens
  siRNA target sequence for CHS1 (NM_000081.1,3002-3020).
gtcatatgctgccatgtat

SEQ ID NO: 268085 - DNA, 19 bp, Homo sapiens
  siRNA target sequence for CHS1 (NM_000081.1,3004-3022).
catatgctgccatgtatat

SEQ ID NO: 268086 - DNA, 19 bp, Homo sapiens
  siRNA target sequence for CHS1 (NM_000081.1,3060-3078).
gcaccaagcagcagacatt

SEQ ID NO: 268087 - DNA, 19 bp, Homo sapiens
  siRNA target sequence for CHS1 (NM_000081.1,3150-3168).
ccgagtatgccataagtta

SEQ ID NO: 268088 - DNA, 19 bp, Homo sapiens
  siRNA target sequence for CHS1 (NM_000081.1,3151-3169).
cgagtatgccataagttaa

SEQ ID NO: 268089 - DNA, 19 bp, Homo sapiens
  siRNA target sequence for CHS1 (NM_000081.1,3360-3378).
gagtgctgacagtttaggt

SEQ ID NO: 268090 - DNA, 19 bp, Homo sapiens
  siRNA target sequence for CHS1 (NM_000081.1,3362-3380).
gtgctgacagtttaggtaa

SEQ ID NO: 268091 - DNA, 19 bp, Homo sapiens
  siRNA target sequence for CHS1 (NM_000081.1,3371-3389).
gtttaggtaaattagagtt

SEQ ID NO: 268092 - DNA, 19 bp, Homo sapiens
  siRNA target sequence for CHS1 (NM_000081.1,3442-3460).
cccgaggaagcaaagctat

SEQ ID NO: 268093 - DNA, 19 bp, Homo sapiens
  siRNA target sequence for CHS1 (NM_000081.1,3539-3557).
ccagaactagtcaacagaa

SEQ ID NO: 268094 - DNA, 19 bp, Homo sapiens
  siRNA target sequence for CHS1 (NM_000081.1,3548-3566).
gtcaacagaagatggaatt

SEQ ID NO: 268095 - DNA, 19 bp, Homo sapiens
  siRNA target sequence for CHS1 (NM_000081.1,3561-3579).
ggaattggagttacctaat

SEQ ID NO: 268096 - DNA, 19 bp, Homo sapiens
  siRNA target sequence for CHS1 (NM_000081.1,3588-3606).
gtctgtggaaagtatatta

SEQ ID NO: 268097 - DNA, 19 bp, Homo sapiens
  siRNA target sequence for CHS1 (NM_000081.1,3629-3647).
cccagtcaaaggtgattga

SEQ ID NO: 268098 - DNA, 19 bp, Homo sapiens
  siRNA target sequence for CHS1 (NM_000081.1,3631-3649).
cagtcaaaggtgattgaaa

SEQ ID NO: 268099 - DNA, 19 bp, Homo sapiens
  siRNA target sequence for CHS1 (NM_000081.1,3639-3657).
ggtgattgaaacacaacta

SEQ ID NO: 268100 - DNA, 19 bp, Homo sapiens
  siRNA target sequence for CHS1 (NM_000081.1,3686-3704).
gagttgccctcgggaatta

SEQ ID NO: 268101 - DNA, 19 bp, Homo sapiens
  siRNA target sequence for CHS1 (NM_000081.1,3802-3820).
gaggattctcagtgttgta

SEQ ID NO: 268102 - DNA, 19 bp, Homo sapiens
  siRNA target sequence for CHS1 (NM_000081.1,3805-3823).
gattctcagtgttgtagtt

SEQ ID NO: 268103 - DNA, 19 bp, Homo sapiens
  siRNA target sequence for CHS1 (NM_000081.1,3898-3916).
gatggggtagacttaaagt

SEQ ID NO: 268104 - DNA, 19 bp, Homo sapiens
  siRNA target sequence for CHS1 (NM_000081.1,3950-3968).
caaatgacttactcgaaaa

SEQ ID NO: 268105 - DNA, 19 bp, Homo sapiens
  siRNA target sequence for CHS1 (NM_000081.1,3999-4017).
gatttgtatgctggaatta

SEQ ID NO: 268106 - DNA, 19 bp, Homo sapiens
  siRNA target sequence for CHS1 (NM_000081.1,4008-4026).
gctggaattaaatttgctt

SEQ ID NO: 268107 - DNA, 19 bp, Homo sapiens
  siRNA target sequence for CHS1 (NM_000081.1,4048-4066).
gatgtgcttgcccatgtat

SEQ ID NO: 268108 - DNA, 19 bp, Homo sapiens
  siRNA target sequence for CHS1 (NM_000081.1,4058-4076).
cccatgtatttgagagttt

SEQ ID NO: 268109 - DNA, 19 bp, Homo sapiens
  siRNA target sequence for CHS1 (NM_000081.1,4128-4146).
gggaactgtgaaaaatctt

SEQ ID NO: 268110 - DNA, 19 bp, Homo sapiens
  siRNA target sequence for CHS1 (NM_000081.1,4153-4171).
gggttcttgagtattttaa

SEQ ID NO: 268111 - DNA, 19 bp, Homo sapiens
  siRNA target sequence for CHS1 (NM_000081.1,4155-4173).
gttcttgagtattttaaca

SEQ ID NO: 268112 - DNA, 19 bp, Homo sapiens
  siRNA target sequence for CHS1 (NM_000081.1,4196-4214).
catgccagagagtattggt

SEQ ID NO: 268113 - DNA, 19 bp, Homo sapiens
  siRNA target sequence for CHS1 (NM_000081.1,4205-4223).
gagtattggtggatctttt

SEQ ID NO: 268114 - DNA, 19 bp, Homo sapiens
  siRNA target sequence for CHS1 (NM_000081.1,4225-4243).
gtatctttgatgagttcaa

SEQ ID NO: 268115 - DNA, 19 bp, Homo sapiens
  siRNA target sequence for CHS1 (NM_000081.1,4260-4278).
gctaacccttcttttgaga

SEQ ID NO: 268116 - DNA, 19 bp, Homo sapiens
  siRNA target sequence for CHS1 (NM_000081.1,4387-4405).
ctgcacgctccaaatttaa

SEQ ID NO: 268117 - DNA, 19 bp, Homo sapiens
  siRNA target sequence for CHS1 (NM_000081.1,4390-4408).
cacgctccaaatttaagca

SEQ ID NO: 268118 - DNA, 19 bp, Homo sapiens
  siRNA target sequence for CHS1 (NM_000081.1,4407-4425).
caacggtgtttcatcacaa

SEQ ID NO: 268119 - DNA, 19 bp, Homo sapiens
  siRNA target sequence for CHS1 (NM_000081.1,4432-4450).
cctgggattttaaacagta

SEQ ID NO: 268120 - DNA, 19 bp, Homo sapiens
  siRNA target sequence for CHS1 (NM_000081.1,4448-4466).
gtaaggccatgggtttatt

SEQ ID NO: 268121 - DNA, 19 bp, Homo sapiens
  siRNA target sequence for CHS1 (NM_000081.1,4452-4470).
ggccatgggtttattgaga

SEQ ID NO: 268122 - DNA, 19 bp, Homo sapiens
  siRNA target sequence for CHS1 (NM_000081.1,4519-4537).
ccccatcggctgctttcat

SEQ ID NO: 268123 - DNA, 19 bp, Homo sapiens
  siRNA target sequence for CHS1 (NM_000081.1,4521-4539).
ccatcggctgctttcatct

SEQ ID NO: 268124 - DNA, 19 bp, Homo sapiens
  siRNA target sequence for CHS1 (NM_000081.1,4564-4582).
ccgttgctggggcaaaact

SEQ ID NO: 268125 - DNA, 19 bp, Homo sapiens
  siRNA target sequence for CHS1 (NM_000081.1,4583-4601).
gctggccacacctatcaga

SEQ ID NO: 268126 - DNA, 19 bp, Homo sapiens
  siRNA target sequence for CHS1 (NM_000081.1,4584-4602).
ctggccacacctatcagaa

SEQ ID NO: 268127 - DNA, 19 bp, Homo sapiens
  siRNA target sequence for CHS1 (NM_000081.1,4593-4611).
cctatcagaaggtttcagt

SEQ ID NO: 268128 - DNA, 19 bp, Homo sapiens
  siRNA target sequence for CHS1 (NM_000081.1,4622-4640).
ggtttaatgtggagtgtat

SEQ ID NO: 268129 - DNA, 19 bp, Homo sapiens
  siRNA target sequence for CHS1 (NM_000081.1,4649-4667).
ctgagagtactacagaaaa

SEQ ID NO: 268130 - DNA, 19 bp, Homo sapiens
  siRNA target sequence for CHS1 (NM_000081.1,4653-4671).
gagtactacagaaaaagga

SEQ ID NO: 268131 - DNA, 19 bp, Homo sapiens
  siRNA target sequence for CHS1 (NM_000081.1,4745-4763).
cagaaggtgcagagtacat

SEQ ID NO: 268132 - DNA, 19 bp, Homo sapiens
  siRNA target sequence for CHS1 (NM_000081.1,4769-4787).
ctggtgaaagactcataga

SEQ ID NO: 268133 - DNA, 19 bp, Homo sapiens
  siRNA target sequence for CHS1 (NM_000081.1,4816-4834).
ggatccaaagcgttgatga

SEQ ID NO: 268134 - DNA, 19 bp, Homo sapiens
  siRNA target sequence for CHS1 (NM_000081.1,4817-4835).
gatccaaagcgttgatgat

SEQ ID NO: 268135 - DNA, 19 bp, Homo sapiens
  siRNA target sequence for CHS1 (NM_000081.1,4852-4870).
ccccacaatgccactctta

SEQ ID NO: 268136 - DNA, 19 bp, Homo sapiens
  siRNA target sequence for CHS1 (NM_000081.1,4876-4894).
cgtgtgtgcatggattcaa

SEQ ID NO: 268137 - DNA, 19 bp, Homo sapiens
  siRNA target sequence for CHS1 (NM_000081.1,4877-4895).
gtgtgtgcatggattcaaa

SEQ ID NO: 268138 - DNA, 19 bp, Homo sapiens
  siRNA target sequence for CHS1 (NM_000081.1,4958-4976).
gcaaatggcaacatttagt

SEQ ID NO: 268139 - DNA, 19 bp, Homo sapiens
  siRNA target sequence for CHS1 (NM_000081.1,5049-5067).
gaggaagcctgatgttact

SEQ ID NO: 268140 - DNA, 19 bp, Homo sapiens
  siRNA target sequence for CHS1 (NM_000081.1,5056-5074).
cctgatgttactttggatt

SEQ ID NO: 268141 - DNA, 19 bp, Homo sapiens
  siRNA target sequence for CHS1 (NM_000081.1,5100-5118).
gtcatctgatagcaataaa

SEQ ID NO: 268142 - DNA, 19 bp, Homo sapiens
  siRNA target sequence for CHS1 (NM_000081.1,5126-5144).
gcatgattggccattgttt

SEQ ID NO: 268143 - DNA, 19 bp, Homo sapiens
  siRNA target sequence for CHS1 (NM_000081.1,5127-5145).
catgattggccattgttta

SEQ ID NO: 268144 - DNA, 19 bp, Homo sapiens
  siRNA target sequence for CHS1 (NM_000081.1,5130-5148).
gattggccattgtttatca

SEQ ID NO: 268145 - DNA, 19 bp, Homo sapiens
  siRNA target sequence for CHS1 (NM_000081.1,5205-5223).
cttcaacggagctaaggtt

SEQ ID NO: 268146 - DNA, 19 bp, Homo sapiens
  siRNA target sequence for CHS1 (NM_000081.1,5228-5246).
cacaagaggccttttatct

SEQ ID NO: 268147 - DNA, 19 bp, Homo sapiens
  siRNA target sequence for CHS1 (NM_000081.1,5236-5254).
gccttttatctgtatgctt

SEQ ID NO: 268148 - DNA, 19 bp, Homo sapiens
  siRNA target sequence for CHS1 (NM_000081.1,5293-5311).
ggcaagccagtcaatgact

SEQ ID NO: 268149 - DNA, 19 bp, Homo sapiens
  siRNA target sequence for CHS1 (NM_000081.1,5308-5326).
gactactccaaatatatta

SEQ ID NO: 268150 - DNA, 19 bp, Homo sapiens
  siRNA target sequence for CHS1 (NM_000081.1,5385-5403).
ggatattggtctcttaatt

SEQ ID NO: 268151 - DNA, 19 bp, Homo sapiens
  siRNA target sequence for CHS1 (NM_000081.1,5416-5434).
gttgtttatacaacttact

SEQ ID NO: 268152 - DNA, 19 bp, Homo sapiens
  siRNA target sequence for CHS1 (NM_000081.1,5435-5453).
gtcctgctcagtataccat

SEQ ID NO: 268153 - DNA, 19 bp, Homo sapiens
  siRNA target sequence for CHS1 (NM_000081.1,5451-5469).
catctatgaaccagtgatt

SEQ ID NO: 268154 - DNA, 19 bp, Homo sapiens
  siRNA target sequence for CHS1 (NM_000081.1,5458-5476).
gaaccagtgattagactta

SEQ ID NO: 268155 - DNA, 19 bp, Homo sapiens
  siRNA target sequence for CHS1 (NM_000081.1,5507-5525).
gacccttcagctcaaaaga

SEQ ID NO: 268156 - DNA, 19 bp, Homo sapiens
  siRNA target sequence for CHS1 (NM_000081.1,5538-5556).
cttattagaacctcatcat

SEQ ID NO: 268157 - DNA, 19 bp, Homo sapiens
  siRNA target sequence for CHS1 (NM_000081.1,5562-5580).
gaatctccaacctactgaa

SEQ ID NO: 268158 - DNA, 19 bp, Homo sapiens
  siRNA target sequence for CHS1 (NM_000081.1,5566-5584).
ctccaacctactgaatata

SEQ ID NO: 268159 - DNA, 19 bp, Homo sapiens
  siRNA target sequence for CHS1 (NM_000081.1,5572-5590).
cctactgaatataaaacta

SEQ ID NO: 268160 - DNA, 19 bp, Homo sapiens
  siRNA target sequence for CHS1 (NM_000081.1,5598-5616).
cattctgcacgaaattggt

SEQ ID NO: 268161 - DNA, 19 bp, Homo sapiens
  siRNA target sequence for CHS1 (NM_000081.1,5684-5702).
cattagcactgcgagttat

SEQ ID NO: 268162 - DNA, 19 bp, Homo sapiens
  siRNA target sequence for CHS1 (NM_000081.1,5689-5707).
gcactgcgagttatactct

SEQ ID NO: 268163 - DNA, 19 bp, Homo sapiens
  siRNA target sequence for CHS1 (NM_000081.1,5694-5712).
gcgagttatactctcatta

SEQ ID NO: 268164 - DNA, 19 bp, Homo sapiens
  siRNA target sequence for CHS1 (NM_000081.1,5695-5713).
cgagttatactctcattaa

SEQ ID NO: 268165 - DNA, 19 bp, Homo sapiens
  siRNA target sequence for CHS1 (NM_000081.1,5724-5742).
ccaacaaagagtacatgaa

SEQ ID NO: 268166 - DNA, 19 bp, Homo sapiens
  siRNA target sequence for CHS1 (NM_000081.1,5837-5855).
gatgctgtggtgaagatat

SEQ ID NO: 268167 - DNA, 19 bp, Homo sapiens
  siRNA target sequence for CHS1 (NM_000081.1,5952-5970).
gaagatatggagtaaagca

SEQ ID NO: 268168 - DNA, 19 bp, Homo sapiens
  siRNA target sequence for CHS1 (NM_000081.1,6030-6048).
ccaccagcagatgtttaat

SEQ ID NO: 268169 - DNA, 19 bp, Homo sapiens
  siRNA target sequence for CHS1 (NM_000081.1,6034-6052).
cagcagatgtttaatatta

SEQ ID NO: 268170 - DNA, 19 bp, Homo sapiens
  siRNA target sequence for CHS1 (NM_000081.1,6141-6159).
gccccgagaggtttgtaga

SEQ ID NO: 268171 - DNA, 19 bp, Homo sapiens
  siRNA target sequence for CHS1 (NM_000081.1,6142-6160).
ccccgagaggtttgtagat

SEQ ID NO: 268172 - DNA, 19 bp, Homo sapiens
  siRNA target sequence for CHS1 (NM_000081.1,6145-6163).
cgagaggtttgtagatcat

SEQ ID NO: 268173 - DNA, 19 bp, Homo sapiens
  siRNA target sequence for CHS1 (NM_000081.1,6199-6217).
ccagatttggaattattga

SEQ ID NO: 268174 - DNA, 19 bp, Homo sapiens
  siRNA target sequence for CHS1 (NM_000081.1,6202-6220).
gatttggaattattgacaa

SEQ ID NO: 268175 - DNA, 19 bp, Homo sapiens
  siRNA target sequence for CHS1 (NM_000081.1,6242-6260).
cagttcaccctcctactaa

SEQ ID NO: 268176 - DNA, 19 bp, Homo sapiens
  siRNA target sequence for CHS1 (NM_000081.1,6244-6262).
gttcaccctcctactaata

SEQ ID NO: 268177 - DNA, 19 bp, Homo sapiens
  siRNA target sequence for CHS1 (NM_000081.1,6247-6265).
caccctcctactaatactt

SEQ ID NO: 268178 - DNA, 19 bp, Homo sapiens
  siRNA target sequence for CHS1 (NM_000081.1,6253-6271).
cctactaatacttacgttt

SEQ ID NO: 268179 - DNA, 19 bp, Homo sapiens
  siRNA target sequence for CHS1 (NM_000081.1,6257-6275).
ctaatacttacgtttgtca

SEQ ID NO: 268180 - DNA, 19 bp, Homo sapiens
  siRNA target sequence for CHS1 (NM_000081.1,6284-6302).
cgaacttctacttttcttt

SEQ ID NO: 268181 - DNA, 19 bp, Homo sapiens
  siRNA target sequence for CHS1 (NM_000081.1,6387-6405).
gagccctggatttatggta

SEQ ID NO: 268182 - DNA, 19 bp, Homo sapiens
  siRNA target sequence for CHS1 (NM_000081.1,6389-6407).
gccctggatttatggtaat

SEQ ID NO: 268183 - DNA, 19 bp, Homo sapiens
  siRNA target sequence for CHS1 (NM_000081.1,6442-6460).
ggagagaattcctctaata

SEQ ID NO: 268184 - DNA, 19 bp, Homo sapiens
  siRNA target sequence for CHS1 (NM_000081.1,6484-6502).
catatgctgcgttctagaa

SEQ ID NO: 268185 - DNA, 19 bp, Homo sapiens
  siRNA target sequence for CHS1 (NM_000081.1,6516-6534).
ccctacttcttcactacta

SEQ ID NO: 268186 - DNA, 19 bp, Homo sapiens
  siRNA target sequence for CHS1 (NM_000081.1,6557-6575).
gaagtttgggttgtagtat

SEQ ID NO: 268187 - DNA, 19 bp, Homo sapiens
  siRNA target sequence for CHS1 (NM_000081.1,6572-6590).
gtatcgacaggttacaaaa

SEQ ID NO: 268188 - DNA, 19 bp, Homo sapiens
  siRNA target sequence for CHS1 (NM_000081.1,6576-6594).
cgacaggttacaaaatatt

SEQ ID NO: 268189 - DNA, 19 bp, Homo sapiens
  siRNA target sequence for CHS1 (NM_000081.1,6607-6625).
gttgccacccaatcaaaga

SEQ ID NO: 268190 - DNA, 19 bp, Homo sapiens
  siRNA target sequence for CHS1 (NM_000081.1,6644-6662).
gttccgacacactgaaaaa

SEQ ID NO: 268191 - DNA, 19 bp, Homo sapiens
  siRNA target sequence for CHS1 (NM_000081.1,6765-6783).
gggagtgctgggatttcca

SEQ ID NO: 268192 - DNA, 19 bp, Homo sapiens
  siRNA target sequence for CHS1 (NM_000081.1,6784-6802).
gtggtcaaagcagatcata

SEQ ID NO: 268193 - DNA, 19 bp, Homo sapiens
  siRNA target sequence for CHS1 (NM_000081.1,6857-6875).
gcccacgccgacctgatta

SEQ ID NO: 268194 - DNA, 19 bp, Homo sapiens
  siRNA target sequence for CHS1 (NM_000081.1,6860-6878).
cacgccgacctgattacct

SEQ ID NO: 268195 - DNA, 19 bp, Homo sapiens
  siRNA target sequence for CHS1 (NM_000081.1,6862-6880).
cgccgacctgattacctaa

SEQ ID NO: 268196 - DNA, 19 bp, Homo sapiens
  siRNA target sequence for CHS1 (NM_000081.1,6863-6881).
gccgacctgattacctaaa

SEQ ID NO: 268197 - DNA, 19 bp, Homo sapiens
  siRNA target sequence for CHS1 (NM_000081.1,6900-6918).
gcgaagccacagcactatt

SEQ ID NO: 268198 - DNA, 19 bp, Homo sapiens
  siRNA target sequence for CHS1 (NM_000081.1,6925-6943).
cttgggctagcttttcctt

SEQ ID NO: 268199 - DNA, 19 bp, Homo sapiens
  siRNA target sequence for CHS1 (NM_000081.1,6969-6987).
ccgttggccaagtcttgtt

SEQ ID NO: 268200 - DNA, 19 bp, Homo sapiens
  siRNA target sequence for CHS1 (NM_000081.1,6971-6989).
gttggccaagtcttgttga

SEQ ID NO: 268201 - DNA, 19 bp, Homo sapiens
  siRNA target sequence for CHS1 (NM_000081.1,6976-6994).
ccaagtcttgttgatagaa

SEQ ID NO: 268202 - DNA, 19 bp, Homo sapiens
  siRNA target sequence for CHS1 (NM_000081.1,7027-7045).
cttggttatgagccaaatt

SEQ ID NO: 268203 - DNA, 19 bp, Homo sapiens
  siRNA target sequence for CHS1 (NM_000081.1,7030-7048).
ggttatgagccaaattaca

SEQ ID NO: 268204 - DNA, 19 bp, Homo sapiens
  siRNA target sequence for CHS1 (NM_000081.1,7061-7079).
gtgctcacagtgtaactga

SEQ ID NO: 268205 - DNA, 19 bp, Homo sapiens
  siRNA target sequence for CHS1 (NM_000081.1,7081-7099).
gactgtttggtacctatat

SEQ ID NO: 268206 - DNA, 19 bp, Homo sapiens
  siRNA target sequence for CHS1 (NM_000081.1,7094-7112).
ctatatgctgtggattata

SEQ ID NO: 268207 - DNA, 19 bp, Homo sapiens
  siRNA target sequence for CHS1 (NM_000081.1,7100-7118).
gctgtggattatatgaact

SEQ ID NO: 268208 - DNA, 19 bp, Homo sapiens
  siRNA target sequence for CHS1 (NM_000081.1,7120-7138).
ctaagtggggttcttctta

SEQ ID NO: 268209 - DNA, 19 bp, Homo sapiens
  siRNA target sequence for CHS1 (NM_000081.1,7193-7211).
cacttttggtcctcgttaa

SEQ ID NO: 268210 - DNA, 19 bp, Homo sapiens
  siRNA target sequence for CHS1 (NM_000081.1,7212-7230).
ccacccatcaccagctata

SEQ ID NO: 268211 - DNA, 19 bp, Homo sapiens
  siRNA target sequence for CHS1 (NM_000081.1,7234-7252).
caaggtgttattaaactat

SEQ ID NO: 268212 - DNA, 19 bp, Homo sapiens
  siRNA target sequence for CHS1 (NM_000081.1,7323-7341).
gctagccaaccagttgtat

SEQ ID NO: 268213 - DNA, 19 bp, Homo sapiens
  siRNA target sequence for CHS1 (NM_000081.1,7329-7347).
caaccagttgtatcttcat

SEQ ID NO: 268214 - DNA, 19 bp, Homo sapiens
  siRNA target sequence for CHS1 (NM_000081.1,7348-7366).
cgaggaactcaagaattgt

SEQ ID NO: 268215 - DNA, 19 bp, Homo sapiens
  siRNA target sequence for CHS1 (NM_000081.1,7369-7387).
gaatgcttcatcgaaatgt

SEQ ID NO: 268216 - DNA, 19 bp, Homo sapiens
  siRNA target sequence for CHS1 (NM_000081.1,7386-7404).
gttctttggtcgacatatt

SEQ ID NO: 268217 - DNA, 19 bp, Homo sapiens
  siRNA target sequence for CHS1 (NM_000081.1,7475-7493).
ctattctgggactaataga

SEQ ID NO: 268218 - DNA, 19 bp, Homo sapiens
  siRNA target sequence for CHS1 (NM_000081.1,7492-7510).
gagacctctctatatgaca

SEQ ID NO: 268219 - DNA, 19 bp, Homo sapiens
  siRNA target sequence for CHS1 (NM_000081.1,7497-7515).
ctctctatatgacaacata

SEQ ID NO: 268220 - DNA, 19 bp, Homo sapiens
  siRNA target sequence for CHS1 (NM_000081.1,7499-7517).
ctctatatgacaacatact

SEQ ID NO: 268221 - DNA, 19 bp, Homo sapiens
  siRNA target sequence for CHS1 (NM_000081.1,7509-7527).
caacatactcttgcataat

SEQ ID NO: 268222 - DNA, 19 bp, Homo sapiens
  siRNA target sequence for CHS1 (NM_000081.1,7512-7530).
catactcttgcataatgct

SEQ ID NO: 268223 - DNA, 19 bp, Homo sapiens
  siRNA target sequence for CHS1 (NM_000081.1,7518-7536).
cttgcataatgctctttta

SEQ ID NO: 268224 - DNA, 19 bp, Homo sapiens
  siRNA target sequence for CHS1 (NM_000081.1,7521-7539).
gcataatgctcttttactt

SEQ ID NO: 268225 - DNA, 19 bp, Homo sapiens
  siRNA target sequence for CHS1 (NM_000081.1,7540-7558).
cttctccaaattttaaatt

SEQ ID NO: 268226 - DNA, 19 bp, Homo sapiens
  siRNA target sequence for CHS1 (NM_000081.1,7587-7605).
ggataatggtctactctat

SEQ ID NO: 268227 - DNA, 19 bp, Homo sapiens
  siRNA target sequence for CHS1 (NM_000081.1,7594-7612).
ggtctactctatgtgttat

SEQ ID NO: 268228 - DNA, 19 bp, Homo sapiens
  siRNA target sequence for CHS1 (NM_000081.1,7597-7615).
ctactctatgtgttatgta

SEQ ID NO: 268229 - DNA, 19 bp, Homo sapiens
  siRNA target sequence for CHS1 (NM_000081.1,7621-7639).
gtagcagccctgaatggat

SEQ ID NO: 268230 - DNA, 19 bp, Homo sapiens
  siRNA target sequence for CHS1 (NM_000081.1,7625-7643).
cagccctgaatggattaga

SEQ ID NO: 268231 - DNA, 19 bp, Homo sapiens
  siRNA target sequence for CHS1 (NM_000081.1,7627-7645).
gccctgaatggattagaaa

SEQ ID NO: 268232 - DNA, 19 bp, Homo sapiens
  siRNA target sequence for CHS1 (NM_000081.1,7628-7646).
ccctgaatggattagaaaa

SEQ ID NO: 268233 - DNA, 19 bp, Homo sapiens
  siRNA target sequence for CHS1 (NM_000081.1,7682-7700).
gtgatatacagcaactttt

SEQ ID NO: 268234 - DNA, 19 bp, Homo sapiens
  siRNA target sequence for CHS1 (NM_000081.1,7701-7719).
catagcagttacaattcat

SEQ ID NO: 268235 - DNA, 19 bp, Homo sapiens
  siRNA target sequence for CHS1 (NM_000081.1,7780-7798).
ggatatcttcaaaatagca

SEQ ID NO: 268236 - DNA, 19 bp, Homo sapiens
  siRNA target sequence for CHS1 (NM_000081.1,7871-7889).
ggaccaccgcaaatcatga

SEQ ID NO: 268237 - DNA, 19 bp, Homo sapiens
  siRNA target sequence for CHS1 (NM_000081.1,7945-7963).
gttcaaaagcggaaaagca

SEQ ID NO: 268238 - DNA, 19 bp, Homo sapiens
  siRNA target sequence for CHS1 (NM_000081.1,7984-8002).
ccccttgctcaaactgaat

SEQ ID NO: 268239 - DNA, 19 bp, Homo sapiens
  siRNA target sequence for CHS1 (NM_000081.1,7997-8015).
ctgaatcgcttctgatgaa

SEQ ID NO: 268240 - DNA, 19 bp, Homo sapiens
  siRNA target sequence for CHS1 (NM_000081.1,7999-8017).
gaatcgcttctgatgaaaa

SEQ ID NO: 268241 - DNA, 19 bp, Homo sapiens
  siRNA target sequence for CHS1 (NM_000081.1,8019-8037).
gcgttcagtggcaaatgat

SEQ ID NO: 268242 - DNA, 19 bp, Homo sapiens
  siRNA target sequence for CHS1 (NM_000081.1,8080-8098).
cctagccaagcaactgaaa

SEQ ID NO: 268243 - DNA, 19 bp, Homo sapiens
  siRNA target sequence for CHS1 (NM_000081.1,8121-8139).
gaggctcactgttttagca

SEQ ID NO: 268244 - DNA, 19 bp, Homo sapiens
  siRNA target sequence for CHS1 (NM_000081.1,8137-8155).
gcagtcaacaggattattt

SEQ ID NO: 268245 - DNA, 19 bp, Homo sapiens
  siRNA target sequence for CHS1 (NM_000081.1,8138-8156).
cagtcaacaggattattta

SEQ ID NO: 268246 - DNA, 19 bp, Homo sapiens
  siRNA target sequence for CHS1 (NM_000081.1,8227-8245).
gttttccagaccgaaattt

SEQ ID NO: 268247 - DNA, 19 bp, Homo sapiens
  siRNA target sequence for CHS1 (NM_000081.1,8309-8327).
catatctggtagaaggatt

SEQ ID NO: 268248 - DNA, 19 bp, Homo sapiens
  siRNA target sequence for CHS1 (NM_000081.1,8332-8350).
gtatctattggttcaagta

SEQ ID NO: 268249 - DNA, 19 bp, Homo sapiens
  siRNA target sequence for CHS1 (NM_000081.1,8364-8382).
caagcagcaatggactaaa

SEQ ID NO: 268250 - DNA, 19 bp, Homo sapiens
  siRNA target sequence for CHS1 (NM_000081.1,8367-8385).
gcagcaatggactaaaatt

SEQ ID NO: 268251 - DNA, 19 bp, Homo sapiens
  siRNA target sequence for CHS1 (NM_000081.1,8371-8389).
caatggactaaaattctgt

SEQ ID NO: 268252 - DNA, 19 bp, Homo sapiens
  siRNA target sequence for CHS1 (NM_000081.1,8423-8441).
ggagactactagtgcatat

SEQ ID NO: 268253 - DNA, 19 bp, Homo sapiens
  siRNA target sequence for CHS1 (NM_000081.1,8424-8442).
gagactactagtgcatatt

SEQ ID NO: 268254 - DNA, 19 bp, Homo sapiens
  siRNA target sequence for CHS1 (NM_000081.1,8426-8444).
gactactagtgcatatttt

SEQ ID NO: 268255 - DNA, 19 bp, Homo sapiens
  siRNA target sequence for CHS1 (NM_000081.1,8532-8550).
cagcccatccctacaacat

SEQ ID NO: 268256 - DNA, 19 bp, Homo sapiens
  siRNA target sequence for CHS1 (NM_000081.1,8548-8566).
catggagccaagttagttt

SEQ ID NO: 268257 - DNA, 19 bp, Homo sapiens
  siRNA target sequence for CHS1 (NM_000081.1,8551-8569).
ggagccaagttagttttgt

SEQ ID NO: 268258 - DNA, 19 bp, Homo sapiens
  siRNA target sequence for CHS1 (NM_000081.1,8574-8592).
gtcagagttgatacataat

SEQ ID NO: 268259 - DNA, 19 bp, Homo sapiens
  siRNA target sequence for CHS1 (NM_000081.1,8576-8594).
cagagttgatacataatca

SEQ ID NO: 268260 - DNA, 19 bp, Homo sapiens
  siRNA target sequence for CHS1 (NM_000081.1,8600-8618).
gtgaattgactgaagaaga

SEQ ID NO: 268261 - DNA, 19 bp, Homo sapiens
  siRNA target sequence for CHS1 (NM_000081.1,8624-8642).
gcacagcagaactgcttat

SEQ ID NO: 268262 - DNA, 19 bp, Homo sapiens
  siRNA target sequence for CHS1 (NM_000081.1,8627-8645).
cagcagaactgcttatgaa

SEQ ID NO: 268263 - DNA, 19 bp, Homo sapiens
  siRNA target sequence for CHS1 (NM_000081.1,8632-8650).
gaactgcttatgaatgctt

SEQ ID NO: 268264 - DNA, 19 bp, Homo sapiens
  siRNA target sequence for CHS1 (NM_000081.1,8638-8656).
cttatgaatgctttgaagt

SEQ ID NO: 268265 - DNA, 19 bp, Homo sapiens
  siRNA target sequence for CHS1 (NM_000081.1,8678-8696).
ctcccagtgcatcaacaaa

SEQ ID NO: 268266 - DNA, 19 bp, Homo sapiens
  siRNA target sequence for CHS1 (NM_000081.1,8693-8711).
caaaagcagaccttattaa

SEQ ID NO: 268267 - DNA, 19 bp, Homo sapiens
  siRNA target sequence for CHS1 (NM_000081.1,8767-8785).
gcttggcagaaaacagtta

SEQ ID NO: 268268 - DNA, 19 bp, Homo sapiens
  siRNA target sequence for CHS1 (NM_000081.1,8812-8830).
cgtctggattcaaaatcaa

SEQ ID NO: 268269 - DNA, 19 bp, Homo sapiens
  siRNA target sequence for CHS1 (NM_000081.1,8813-8831).
gtctggattcaaaatcaaa

SEQ ID NO: 268270 - DNA, 19 bp, Homo sapiens
  siRNA target sequence for CHS1 (NM_000081.1,8840-8858).
ctaaaatagctgcagatat

SEQ ID NO: 268271 - DNA, 19 bp, Homo sapiens
  siRNA target sequence for CHS1 (NM_000081.1,8901-8919).
ggtgatccagcatattaga

SEQ ID NO: 268272 - DNA, 19 bp, Homo sapiens
  siRNA target sequence for CHS1 (NM_000081.1,8910-8928).
gcatattagaggaatgtat

SEQ ID NO: 268273 - DNA, 19 bp, Homo sapiens
  siRNA target sequence for CHS1 (NM_000081.1,8918-8936).
gaggaatgtataaagtaga

SEQ ID NO: 268274 - DNA, 19 bp, Homo sapiens
  siRNA target sequence for CHS1 (NM_000081.1,8920-8938).
ggaatgtataaagtagatt

SEQ ID NO: 268275 - DNA, 19 bp, Homo sapiens
  siRNA target sequence for CHS1 (NM_000081.1,8925-8943).
gtataaagtagatttgagt

SEQ ID NO: 268276 - DNA, 19 bp, Homo sapiens
  siRNA target sequence for CHS1 (NM_000081.1,8971-8989).
cagcagctgacacatgata

SEQ ID NO: 268277 - DNA, 19 bp, Homo sapiens
  siRNA target sequence for CHS1 (NM_000081.1,8973-8991).
gcagctgacacatgataga

SEQ ID NO: 268278 - DNA, 19 bp, Homo sapiens
  siRNA target sequence for CHS1 (NM_000081.1,8999-9017).
ggtatgaccccatctacta

SEQ ID NO: 268279 - DNA, 19 bp, Homo sapiens
  siRNA target sequence for CHS1 (NM_000081.1,9000-9018).
gtatgaccccatctactat

SEQ ID NO: 268280 - DNA, 19 bp, Homo sapiens
  siRNA target sequence for CHS1 (NM_000081.1,9004-9022).
gaccccatctactatccaa

SEQ ID NO: 268281 - DNA, 19 bp, Homo sapiens
  siRNA target sequence for CHS1 (NM_000081.1,9030-9048).
gcagttggatccaacagaa

SEQ ID NO: 268282 - DNA, 19 bp, Homo sapiens
  siRNA target sequence for CHS1 (NM_000081.1,9068-9086).
gacgtttacagagatgtta

SEQ ID NO: 268283 - DNA, 19 bp, Homo sapiens
  siRNA target sequence for CHS1 (NM_000081.1,9070-9088).
cgtttacagagatgttatt

SEQ ID NO: 268284 - DNA, 19 bp, Homo sapiens
  siRNA target sequence for CHS1 (NM_000081.1,9076-9094).
cagagatgttatttaacta

SEQ ID NO: 268285 - DNA, 19 bp, Homo sapiens
  siRNA target sequence for CHS1 (NM_000081.1,9112-9130).
cttagggatagacagaaat

SEQ ID NO: 268286 - DNA, 19 bp, Homo sapiens
  siRNA target sequence for CHS1 (NM_000081.1,9152-9170).
cactctcttacctgtttga

SEQ ID NO: 268287 - DNA, 19 bp, Homo sapiens
  siRNA target sequence for CHS1 (NM_000081.1,9210-9228).
caaagctgcaagtgaatct

SEQ ID NO: 268288 - DNA, 19 bp, Homo sapiens
  siRNA target sequence for CHS1 (NM_000081.1,9252-9270).
cagtgttgcaccatctaga

SEQ ID NO: 268289 - DNA, 19 bp, Homo sapiens
  siRNA target sequence for CHS1 (NM_000081.1,9273-9291).
gacagctggtgaattgtta

SEQ ID NO: 268290 - DNA, 19 bp, Homo sapiens
  siRNA target sequence for CHS1 (NM_000081.1,9275-9293).
cagctggtgaattgttact

SEQ ID NO: 268291 - DNA, 19 bp, Homo sapiens
  siRNA target sequence for CHS1 (NM_000081.1,9281-9299).
gtgaattgttactaggtaa

SEQ ID NO: 268292 - DNA, 19 bp, Homo sapiens
  siRNA target sequence for CHS1 (NM_000081.1,9429-9447).
gcaattgagagataatgct

SEQ ID NO: 268293 - DNA, 19 bp, Homo sapiens
  siRNA target sequence for CHS1 (NM_000081.1,9478-9496).
ctcctgttggcatttgata

SEQ ID NO: 268294 - DNA, 19 bp, Homo sapiens
  siRNA target sequence for CHS1 (NM_000081.1,9481-9499).
ctgttggcatttgataaca

SEQ ID NO: 268295 - DNA, 19 bp, Homo sapiens
  siRNA target sequence for CHS1 (NM_000081.1,9517-9535).
gtataccacaatatactca

SEQ ID NO: 268296 - DNA, 19 bp, Homo sapiens
  siRNA target sequence for CHS1 (NM_000081.1,9536-9554).
caaataacctccctaatct

SEQ ID NO: 268297 - DNA, 19 bp, Homo sapiens
  siRNA target sequence for CHS1 (NM_000081.1,9573-9591).
caccgctctgacaaattta

SEQ ID NO: 268298 - DNA, 19 bp, Homo sapiens
  siRNA target sequence for CHS1 (NM_000081.1,9577-9595).
gctctgacaaatttatggt

SEQ ID NO: 268299 - DNA, 19 bp, Homo sapiens
  siRNA target sequence for CHS1 (NM_000081.1,9580-9598).
ctgacaaatttatggtata

SEQ ID NO: 268300 - DNA, 19 bp, Homo sapiens
  siRNA target sequence for CHS1 (NM_000081.1,9582-9600).
gacaaatttatggtatact

SEQ ID NO: 268301 - DNA, 19 bp, Homo sapiens
  siRNA target sequence for CHS1 (NM_000081.1,9594-9612).
gtatactgggcaaattact

SEQ ID NO: 268302 - DNA, 19 bp, Homo sapiens
  siRNA target sequence for CHS1 (NM_000081.1,9647-9665).
ctggccgatccttcaatga

SEQ ID NO: 268303 - DNA, 19 bp, Homo sapiens
  siRNA target sequence for CHS1 (NM_000081.1,9650-9668).
gccgatccttcaatgatct

SEQ ID NO: 268304 - DNA, 19 bp, Homo sapiens
  siRNA target sequence for CHS1 (NM_000081.1,9749-9767).
gaaatctctctaaacctat

SEQ ID NO: 268305 - DNA, 19 bp, Homo sapiens
  siRNA target sequence for CHS1 (NM_000081.1,9763-9781).
cctatagctgttcagtata

SEQ ID NO: 268306 - DNA, 19 bp, Homo sapiens
  siRNA target sequence for CHS1 (NM_000081.1,9868-9886).
cccgtgcagccctatcact

SEQ ID NO: 268307 - DNA, 19 bp, Homo sapiens
  siRNA target sequence for CHS1 (NM_000081.1,9889-9907).
ggctcccactattccaata

SEQ ID NO: 268308 - DNA, 19 bp, Homo sapiens
  siRNA target sequence for CHS1 (NM_000081.1,9936-9954).
gatgcctcctttcactaaa

SEQ ID NO: 268309 - DNA, 19 bp, Homo sapiens
  siRNA target sequence for CHS1 (NM_000081.1,9957-9975).
gtttttagcctatcaagat

SEQ ID NO: 268310 - DNA, 19 bp, Homo sapiens
  siRNA target sequence for CHS1 (NM_000081.1,10022-10040).
cttggcgactctcatcttt

SEQ ID NO: 268311 - DNA, 19 bp, Homo sapiens
  siRNA target sequence for CHS1 (NM_000081.1,10026-10044).
gcgactctcatcttttgaa

SEQ ID NO: 268312 - DNA, 19 bp, Homo sapiens
  siRNA target sequence for CHS1 (NM_000081.1,10027-10045).
cgactctcatcttttgaat

SEQ ID NO: 268313 - DNA, 19 bp, Homo sapiens
  siRNA target sequence for CHS1 (NM_000081.1,10087-10105).
cttccagagttcctagtta

SEQ ID NO: 268314 - DNA, 19 bp, Homo sapiens
  siRNA target sequence for CHS1 (NM_000081.1,10107-10125).
ccgtgaaggttttgatttt

SEQ ID NO: 268315 - DNA, 19 bp, Homo sapiens
  siRNA target sequence for CHS1 (NM_000081.1,10269-10287).
ggtgtttgggtataagcaa

SEQ ID NO: 268316 - DNA, 19 bp, Homo sapiens
  siRNA target sequence for CHS1 (NM_000081.1,10270-10288).
gtgtttgggtataagcaaa

SEQ ID NO: 268317 - DNA, 19 bp, Homo sapiens
  siRNA target sequence for CHS1 (NM_000081.1,10290-10308).
ggggaaggcttctgttcaa

SEQ ID NO: 268318 - DNA, 19 bp, Homo sapiens
  siRNA target sequence for CHS1 (NM_000081.1,10301-10319).
ctgttcaagcgatcaatgt

SEQ ID NO: 268319 - DNA, 19 bp, Homo sapiens
  siRNA target sequence for CHS1 (NM_000081.1,10303-10321).
gttcaagcgatcaatgttt

SEQ ID NO: 268320 - DNA, 19 bp, Homo sapiens
  siRNA target sequence for CHS1 (NM_000081.1,10347-10365).
ggatgtctctgcagttgaa

SEQ ID NO: 268321 - DNA, 19 bp, Homo sapiens
  siRNA target sequence for CHS1 (NM_000081.1,10375-10393).
cagagacgagcgctagaaa

SEQ ID NO: 268322 - DNA, 19 bp, Homo sapiens
  siRNA target sequence for CHS1 (NM_000081.1,10379-10397).
gacgagcgctagaaaccat

SEQ ID NO: 268323 - DNA, 19 bp, Homo sapiens
  siRNA target sequence for CHS1 (NM_000081.1,10384-10402).
gcgctagaaaccatgataa

SEQ ID NO: 268324 - DNA, 19 bp, Homo sapiens
  siRNA target sequence for CHS1 (NM_000081.1,10385-10403).
cgctagaaaccatgataaa

SEQ ID NO: 268325 - DNA, 19 bp, Homo sapiens
  siRNA target sequence for CHS1 (NM_000081.1,10457-10475).
ctggagccaagctcaatat

SEQ ID NO: 268326 - DNA, 19 bp, Homo sapiens
  siRNA target sequence for CHS1 (NM_000081.1,10460-10478).
gagccaagctcaatattga

SEQ ID NO: 268327 - DNA, 19 bp, Homo sapiens
  siRNA target sequence for CHS1 (NM_000081.1,10557-10575).
ctatccgagtcctttgtca

SEQ ID NO: 268328 - DNA, 19 bp, Homo sapiens
  siRNA target sequence for CHS1 (NM_000081.1,10686-10704).
gcccaccagagcaatctgt

SEQ ID NO: 268329 - DNA, 19 bp, Homo sapiens
  siRNA target sequence for CHS1 (NM_000081.1,10703-10721).
gtggtttgtcacggaattt

SEQ ID NO: 268330 - DNA, 19 bp, Homo sapiens
  siRNA target sequence for CHS1 (NM_000081.1,10705-10723).
ggtttgtcacggaatttct

SEQ ID NO: 268331 - DNA, 19 bp, Homo sapiens
  siRNA target sequence for CHS1 (NM_000081.1,10797-10815).
cctgagctggggatatgct

SEQ ID NO: 268332 - DNA, 19 bp, Homo sapiens
  siRNA target sequence for CHS1 (NM_000081.1,10806-10824).
gggatatgctgataatatt

SEQ ID NO: 268333 - DNA, 19 bp, Homo sapiens
  siRNA target sequence for CHS1 (NM_000081.1,10813-10831).
gctgataatattttaaggt

SEQ ID NO: 268334 - DNA, 19 bp, Homo sapiens
  siRNA target sequence for CHS1 (NM_000081.1,10847-10865).
gtgagcctccagtaaactt

SEQ ID NO: 268335 - DNA, 19 bp, Homo sapiens
  siRNA target sequence for CHS1 (NM_000081.1,10882-10900).
cagtaccaggtgactagtt

SEQ ID NO: 268336 - DNA, 19 bp, Homo sapiens
  siRNA target sequence for CHS1 (NM_000081.1,10884-10902).
gtaccaggtgactagttgt

SEQ ID NO: 268337 - DNA, 19 bp, Homo sapiens
  siRNA target sequence for CHS1 (NM_000081.1,10917-10935).
cagttgccagctgtttact

SEQ ID NO: 268338 - DNA, 19 bp, Homo sapiens
  siRNA target sequence for CHS1 (NM_000081.1,10951-10969).
gtcatcacagcctacacaa

SEQ ID NO: 268339 - DNA, 19 bp, Homo sapiens
  siRNA target sequence for CHS1 (NM_000081.1,10958-10976).
cagcctacacaaacagatt

SEQ ID NO: 268340 - DNA, 19 bp, Homo sapiens
  siRNA target sequence for CHS1 (NM_000081.1,10960-10978).
gcctacacaaacagattta

SEQ ID NO: 268341 - DNA, 19 bp, Homo sapiens
  siRNA target sequence for CHS1 (NM_000081.1,10982-11000).
gcagcacgccatcagaaat

SEQ ID NO: 268342 - DNA, 19 bp, Homo sapiens
  siRNA target sequence for CHS1 (NM_000081.1,10985-11003).
gcacgccatcagaaataga

SEQ ID NO: 268343 - DNA, 19 bp, Homo sapiens
  siRNA target sequence for CHS1 (NM_000081.1,11032-11050).
cacacagaagagataacca

SEQ ID NO: 268344 - DNA, 19 bp, Homo sapiens
  siRNA target sequence for CHS1 (NM_000081.1,11038-11056).
gaagagataaccagcttat

SEQ ID NO: 268345 - DNA, 19 bp, Homo sapiens
  siRNA target sequence for CHS1 (NM_000081.1,11098-11116).
gacggaacctgcatcatat

SEQ ID NO: 268346 - DNA, 19 bp, Homo sapiens
  siRNA target sequence for CHS1 (NM_000081.1,11127-11145).
caggttatgctatgtacaa

SEQ ID NO: 268347 - DNA, 19 bp, Homo sapiens
  siRNA target sequence for CHS1 (NM_000081.1,11189-11207).
gtgaaacctcaggtgatat

SEQ ID NO: 268348 - DNA, 19 bp, Homo sapiens
  siRNA target sequence for CHS1 (NM_000081.1,11325-11343).
ccagcctgagggagtatct

SEQ ID NO: 268349 - DNA, 19 bp, Homo sapiens
  siRNA target sequence for CHS1 (NM_000081.1,11329-11347).
cctgagggagtatctatca

SEQ ID NO: 268350 - DNA, 19 bp, Homo sapiens
  siRNA target sequence for CHS1 (NM_000081.1,11330-11348).
ctgagggagtatctatcaa

SEQ ID NO: 268351 - DNA, 19 bp, Homo sapiens
  siRNA target sequence for CHS1 (NM_000081.1,11334-11352).
gggagtatctatcaatgta

SEQ ID NO: 268352 - DNA, 19 bp, Homo sapiens
  siRNA target sequence for CHS1 (NM_000081.1,11335-11353).
ggagtatctatcaatgtaa

SEQ ID NO: 268353 - DNA, 19 bp, Homo sapiens
  siRNA target sequence for CHS1 (NM_000081.1,11355-11373).
cgctgggggattagaaaat

SEQ ID NO: 268354 - DNA, 19 bp, Homo sapiens
  siRNA target sequence for CHS1 (NM_000081.1,11374-11392).
ggaattgtaaggttatgga

SEQ ID NO: 268355 - DNA, 19 bp, Homo sapiens
  siRNA target sequence for CHS1 (NM_000081.1,11471-11489).
gtgatggccaccatttgta

SEQ ID NO: 268356 - DNA, 19 bp, Homo sapiens
  siRNA target sequence for CHS1 (NM_000081.1,11532-11550).
ggaccagcagcgcttgaaa

SEQ ID NO: 268357 - DNA, 19 bp, Homo sapiens
  siRNA target sequence for CHS1 (NM_000081.1,11543-11561).
gcttgaaacagccaatgtt

SEQ ID NO: 268358 - DNA, 19 bp, Homo sapiens
  siRNA target sequence for CHS1 (NM_000081.1,11547-11565).
gaaacagccaatgttctat

SEQ ID NO: 268359 - DNA, 19 bp, Homo sapiens
  siRNA target sequence for COG1 (NM_018714.1,73-91).
gcgaccctgcggctctttt

SEQ ID NO: 268360 - DNA, 19 bp, Homo sapiens
  siRNA target sequence for COG1 (NM_018714.1,383-401).
ccagatcaagctactctta

SEQ ID NO: 268361 - DNA, 19 bp, Homo sapiens
  siRNA target sequence for COG1 (NM_018714.1,386-404).
gatcaagctactcttagaa

SEQ ID NO: 268362 - DNA, 19 bp, Homo sapiens
  siRNA target sequence for COG1 (NM_018714.1,389-407).
caagctactcttagaaatt

SEQ ID NO: 268363 - DNA, 19 bp, Homo sapiens
  siRNA target sequence for COG1 (NM_018714.1,402-420).
gaaattccggagaagatct

SEQ ID NO: 268364 - DNA, 19 bp, Homo sapiens
  siRNA target sequence for COG1 (NM_018714.1,492-510).
ctgctccagctggattctt

SEQ ID NO: 268365 - DNA, 19 bp, Homo sapiens
  siRNA target sequence for COG1 (NM_018714.1,497-515).
ccagctggattcttctagt

SEQ ID NO: 268366 - DNA, 19 bp, Homo sapiens
  siRNA target sequence for COG1 (NM_018714.1,531-549).
gtcctctcccggtttccta

SEQ ID NO: 268367 - DNA, 19 bp, Homo sapiens
  siRNA target sequence for COG1 (NM_018714.1,533-551).
cctctcccggtttcctata

SEQ ID NO: 268368 - DNA, 19 bp, Homo sapiens
  siRNA target sequence for COG1 (NM_018714.1,538-556).
cccggtttcctatactcat

SEQ ID NO: 268369 - DNA, 19 bp, Homo sapiens
  siRNA target sequence for COG1 (NM_018714.1,577-595).
gccacttccggtcaactat

SEQ ID NO: 268370 - DNA, 19 bp, Homo sapiens
  siRNA target sequence for COG1 (NM_018714.1,578-596).
ccacttccggtcaactatt

SEQ ID NO: 268371 - DNA, 19 bp, Homo sapiens
  siRNA target sequence for COG1 (NM_018714.1,658-676).
ccctgtgctctataatgct

SEQ ID NO: 268372 - DNA, 19 bp, Homo sapiens
  siRNA target sequence for COG1 (NM_018714.1,665-683).
ctctataatgctcttagaa

SEQ ID NO: 268373 - DNA, 19 bp, Homo sapiens
  siRNA target sequence for COG1 (NM_018714.1,724-742).
ccagaaaggcaactattca

SEQ ID NO: 268374 - DNA, 19 bp, Homo sapiens
  siRNA target sequence for COG1 (NM_018714.1,731-749).
ggcaactattcagaaactt

SEQ ID NO: 268375 - DNA, 19 bp, Homo sapiens
  siRNA target sequence for COG1 (NM_018714.1,736-754).
ctattcagaaacttctcaa

SEQ ID NO: 268376 - DNA, 19 bp, Homo sapiens
  siRNA target sequence for COG1 (NM_018714.1,774-792).
ggtatcaaggctcagattt

SEQ ID NO: 268377 - DNA, 19 bp, Homo sapiens
  siRNA target sequence for COG1 (NM_018714.1,784-802).
ctcagatttgctcattagt

SEQ ID NO: 268378 - DNA, 19 bp, Homo sapiens
  siRNA target sequence for COG1 (NM_018714.1,1087-1105).
ggatccacatgtgtaatga

SEQ ID NO: 268379 - DNA, 19 bp, Homo sapiens
  siRNA target sequence for COG1 (NM_018714.1,1088-1106).
gatccacatgtgtaatgaa

SEQ ID NO: 268380 - DNA, 19 bp, Homo sapiens
  siRNA target sequence for COG1 (NM_018714.1,1179-1197).
gccatgtgggagttactta

SEQ ID NO: 268381 - DNA, 19 bp, Homo sapiens
  siRNA target sequence for COG1 (NM_018714.1,1184-1202).
gtgggagttacttaccaat

SEQ ID NO: 268382 - DNA, 19 bp, Homo sapiens
  siRNA target sequence for COG1 (NM_018714.1,1188-1206).
gagttacttaccaatgagt

SEQ ID NO: 268383 - DNA, 19 bp, Homo sapiens
  siRNA target sequence for COG1 (NM_018714.1,1394-1412).
cagcaactccccttcaaat

SEQ ID NO: 268384 - DNA, 19 bp, Homo sapiens
  siRNA target sequence for COG1 (NM_018714.1,1396-1414).
gcaactccccttcaaataa

SEQ ID NO: 268385 - DNA, 19 bp, Homo sapiens
  siRNA target sequence for COG1 (NM_018714.1,1502-1520).
ggcaaaccggggtcagttt

SEQ ID NO: 268386 - DNA, 19 bp, Homo sapiens
  siRNA target sequence for COG1 (NM_018714.1,1594-1612).
ctaagctgaaggttaaact

SEQ ID NO: 268387 - DNA, 19 bp, Homo sapiens
  siRNA target sequence for COG1 (NM_018714.1,1598-1616).
gctgaaggttaaactagat

SEQ ID NO: 268388 - DNA, 19 bp, Homo sapiens
  siRNA target sequence for COG1 (NM_018714.1,1916-1934).
gtgcatcctgggaaaatca

SEQ ID NO: 268389 - DNA, 19 bp, Homo sapiens
  siRNA target sequence for COG1 (NM_018714.1,2021-2039).
caagtggcaagaggttaaa

SEQ ID NO: 268390 - DNA, 19 bp, Homo sapiens
  siRNA target sequence for COG1 (NM_018714.1,2080-2098).
ggagcagtgcagttgtgaa

SEQ ID NO: 268391 - DNA, 19 bp, Homo sapiens
  siRNA target sequence for COG1 (NM_018714.1,2081-2099).
gagcagtgcagttgtgaaa

SEQ ID NO: 268392 - DNA, 19 bp, Homo sapiens
  siRNA target sequence for COG1 (NM_018714.1,2083-2101).
gcagtgcagttgtgaaagt

SEQ ID NO: 268393 - DNA, 19 bp, Homo sapiens
  siRNA target sequence for COG1 (NM_018714.1,2117-2135).
cacccagtcattacttcta

SEQ ID NO: 268394 - DNA, 19 bp, Homo sapiens
  siRNA target sequence for COG1 (NM_018714.1,2119-2137).
cccagtcattacttctaga

SEQ ID NO: 268395 - DNA, 19 bp, Homo sapiens
  siRNA target sequence for COG1 (NM_018714.1,2171-2189).
ctgggatgagctagaaatt

SEQ ID NO: 268396 - DNA, 19 bp, Homo sapiens
  siRNA target sequence for COG1 (NM_018714.1,2351-2369).
ctgtatggttcaagtagta

SEQ ID NO: 268397 - DNA, 19 bp, Homo sapiens
  siRNA target sequence for COG1 (NM_018714.1,2465-2483).
gcgttacctcaacattgtt

SEQ ID NO: 268398 - DNA, 19 bp, Homo sapiens
  siRNA target sequence for COG1 (NM_018714.1,2467-2485).
gttacctcaacattgttct

SEQ ID NO: 268399 - DNA, 19 bp, Homo sapiens
  siRNA target sequence for COG1 (NM_018714.1,2627-2645).
cctggtgcagcgaacttct

SEQ ID NO: 268400 - DNA, 19 bp, Homo sapiens
  siRNA target sequence for COG1 (NM_018714.1,2630-2648).
ggtgcagcgaacttctgtt

SEQ ID NO: 268401 - DNA, 19 bp, Homo sapiens
  siRNA target sequence for COG1 (NM_018714.1,2636-2654).
gcgaacttctgttctgttt

SEQ ID NO: 268402 - DNA, 19 bp, Homo sapiens
  siRNA target sequence for COG1 (NM_018714.1,2691-2709).
cggagcagtacgttcaact

SEQ ID NO: 268403 - DNA, 19 bp, Homo sapiens
  siRNA target sequence for COG1 (NM_018714.1,2766-2784).
ctcccactgagcatgacaa

SEQ ID NO: 268404 - DNA, 19 bp, Homo sapiens
  siRNA target sequence for COG1 (NM_018714.1,2786-2804).
cactcgaaaggctaaatca

SEQ ID NO: 268405 - DNA, 19 bp, Homo sapiens
  siRNA target sequence for COG1 (NM_018714.1,2806-2824).
ccagaaacatcgaaacaaa

SEQ ID NO: 268406 - DNA, 19 bp, Homo sapiens
  siRNA target sequence for COG1 (NM_018714.1,2917-2935).
cgtctgcaccttcattatt

SEQ ID NO: 268407 - DNA, 19 bp, Homo sapiens
  siRNA target sequence for COG1 (NM_018714.1,2920-2938).
ctgcaccttcattattcaa

SEQ ID NO: 268408 - DNA, 19 bp, Homo sapiens
  siRNA target sequence for COG1 (NM_018714.1,2940-2958).
cttggctggctctctagta

SEQ ID NO: 268409 - DNA, 19 bp, Homo sapiens
  siRNA target sequence for COG1 (NM_018714.1,2947-2965).
ggctctctagtatgactaa

SEQ ID NO: 268410 - DNA, 19 bp, Homo sapiens
  siRNA target sequence for COG1 (NM_018714.1,2949-2967).
ctctctagtatgactaagt

SEQ ID NO: 268411 - DNA, 19 bp, Homo sapiens
  siRNA target sequence for COG2 (NM_007357.1,239-257).
cctggagctctactataaa

SEQ ID NO: 268412 - DNA, 19 bp, Homo sapiens
  siRNA target sequence for COG2 (NM_007357.1,242-260).
ggagctctactataaactt

SEQ ID NO: 268413 - DNA, 19 bp, Homo sapiens
  siRNA target sequence for COG2 (NM_007357.1,245-263).
gctctactataaacttctt

SEQ ID NO: 268414 - DNA, 19 bp, Homo sapiens
  siRNA target sequence for COG2 (NM_007357.1,268-286).
cagccatggtcgaactcat

SEQ ID NO: 268415 - DNA, 19 bp, Homo sapiens
  siRNA target sequence for COG2 (NM_007357.1,271-289).
ccatggtcgaactcatcaa

SEQ ID NO: 268416 - DNA, 19 bp, Homo sapiens
  siRNA target sequence for COG2 (NM_007357.1,279-297).
gaactcatcaacaaggatt

SEQ ID NO: 268417 - DNA, 19 bp, Homo sapiens
  siRNA target sequence for COG2 (NM_007357.1,284-302).
catcaacaaggattatgca

SEQ ID NO: 268418 - DNA, 19 bp, Homo sapiens
  siRNA target sequence for COG2 (NM_007357.1,361-379).
ctgtgcctttgggacaatt

SEQ ID NO: 268419 - DNA, 19 bp, Homo sapiens
  siRNA target sequence for COG2 (NM_007357.1,365-383).
gcctttgggacaattacga

SEQ ID NO: 268420 - DNA, 19 bp, Homo sapiens
  siRNA target sequence for COG2 (NM_007357.1,406-424).
cgtctgtcagtgaaggaat

SEQ ID NO: 268421 - DNA, 19 bp, Homo sapiens
  siRNA target sequence for COG2 (NM_007357.1,479-497).
gtgtgtattgaggcttata

SEQ ID NO: 268422 - DNA, 19 bp, Homo sapiens
  siRNA target sequence for COG2 (NM_007357.1,481-499).
gtgtattgaggcttataca

SEQ ID NO: 268423 - DNA, 19 bp, Homo sapiens
  siRNA target sequence for COG2 (NM_007357.1,573-591).
gcaagcagcccccttttga

SEQ ID NO: 268424 - DNA, 19 bp, Homo sapiens
  siRNA target sequence for COG2 (NM_007357.1,583-601).
cccttttgactggacaaat

SEQ ID NO: 268425 - DNA, 19 bp, Homo sapiens
  siRNA target sequence for COG2 (NM_007357.1,655-673).
gcaaaggcatgcctctttt

SEQ ID NO: 268426 - DNA, 19 bp, Homo sapiens
  siRNA target sequence for COG2 (NM_007357.1,700-718).
gcattacagccatgttaca

SEQ ID NO: 268427 - DNA, 19 bp, Homo sapiens
  siRNA target sequence for COG2 (NM_007357.1,728-746).
ggaaggtctcctattagaa

SEQ ID NO: 268428 - DNA, 19 bp, Homo sapiens
  siRNA target sequence for COG2 (NM_007357.1,755-773).
gacgtctgacgtcgatata

SEQ ID NO: 268429 - DNA, 19 bp, Homo sapiens
  siRNA target sequence for COG2 (NM_007357.1,757-775).
cgtctgacgtcgatataat

SEQ ID NO: 268430 - DNA, 19 bp, Homo sapiens
  siRNA target sequence for COG2 (NM_007357.1,758-776).
gtctgacgtcgatataata

SEQ ID NO: 268431 - DNA, 19 bp, Homo sapiens
  siRNA target sequence for COG2 (NM_007357.1,793-811).
cttacgccacgattgacaa

SEQ ID NO: 268432 - DNA, 19 bp, Homo sapiens
  siRNA target sequence for COG2 (NM_007357.1,818-836).
ggacgcggaggccttagtt

SEQ ID NO: 268433 - DNA, 19 bp, Homo sapiens
  siRNA target sequence for COG2 (NM_007357.1,830-848).
cttagttggccaagtacta

SEQ ID NO: 268434 - DNA, 19 bp, Homo sapiens
  siRNA target sequence for COG2 (NM_007357.1,906-924).
ggccttcaggtcatgtata

SEQ ID NO: 268435 - DNA, 19 bp, Homo sapiens
  siRNA target sequence for COG2 (NM_007357.1,907-925).
gccttcaggtcatgtataa

SEQ ID NO: 268436 - DNA, 19 bp, Homo sapiens
  siRNA target sequence for COG2 (NM_007357.1,1039-1057).
ctgtttggccacaaatagt

SEQ ID NO: 268437 - DNA, 19 bp, Homo sapiens
  siRNA target sequence for COG2 (NM_007357.1,1076-1094).
gttaccctcgctttttaat

SEQ ID NO: 268438 - DNA, 19 bp, Homo sapiens
  siRNA target sequence for COG2 (NM_007357.1,1099-1117).
ggaatcccgatgcatttca

SEQ ID NO: 268439 - DNA, 19 bp, Homo sapiens
  siRNA target sequence for COG2 (NM_007357.1,1105-1123).
ccgatgcatttcatgagaa

SEQ ID NO: 268440 - DNA, 19 bp, Homo sapiens
  siRNA target sequence for COG2 (NM_007357.1,1106-1124).
cgatgcatttcatgagaaa

SEQ ID NO: 268441 - DNA, 19 bp, Homo sapiens
  siRNA target sequence for COG2 (NM_007357.1,1176-1194).
caggctagtgtaaagagat

SEQ ID NO: 268442 - DNA, 19 bp, Homo sapiens
  siRNA target sequence for COG2 (NM_007357.1,1209-1227).
gcctatcacagcttcaata

SEQ ID NO: 268443 - DNA, 19 bp, Homo sapiens
  siRNA target sequence for COG2 (NM_007357.1,1283-1301).
cttagaagcagcacttaca

SEQ ID NO: 268444 - DNA, 19 bp, Homo sapiens
  siRNA target sequence for COG2 (NM_007357.1,1378-1396).
ggtgttggtcagatgagat

SEQ ID NO: 268445 - DNA, 19 bp, Homo sapiens
  siRNA target sequence for COG2 (NM_007357.1,1384-1402).
ggtcagatgagatgttctt

SEQ ID NO: 268446 - DNA, 19 bp, Homo sapiens
  siRNA target sequence for COG2 (NM_007357.1,1450-1468).
cacgatactctgtgtttgt

SEQ ID NO: 268447 - DNA, 19 bp, Homo sapiens
  siRNA target sequence for COG2 (NM_007357.1,1452-1470).
cgatactctgtgtttgtca

SEQ ID NO: 268448 - DNA, 19 bp, Homo sapiens
  siRNA target sequence for COG2 (NM_007357.1,1453-1471).
gatactctgtgtttgtcaa

SEQ ID NO: 268449 - DNA, 19 bp, Homo sapiens
  siRNA target sequence for COG2 (NM_007357.1,1480-1498).
cactcaggcccatttctaa

SEQ ID NO: 268450 - DNA, 19 bp, Homo sapiens
  siRNA target sequence for COG2 (NM_007357.1,1484-1502).
caggcccatttctaatgaa

SEQ ID NO: 268451 - DNA, 19 bp, Homo sapiens
  siRNA target sequence for COG2 (NM_007357.1,1504-1522).
gtcccaaggagatcaagaa

SEQ ID NO: 268452 - DNA, 19 bp, Homo sapiens
  siRNA target sequence for COG2 (NM_007357.1,1529-1547).
ggtaactggtagcaaagaa

SEQ ID NO: 268453 - DNA, 19 bp, Homo sapiens
  siRNA target sequence for COG2 (NM_007357.1,1549-1567).
cttccatcacccaaggaaa

SEQ ID NO: 268454 - DNA, 19 bp, Homo sapiens
  siRNA target sequence for COG2 (NM_007357.1,1553-1571).
catcacccaaggaaacact

SEQ ID NO: 268455 - DNA, 19 bp, Homo sapiens
  siRNA target sequence for COG2 (NM_007357.1,1710-1728).
gaaatgattggctttaaga

SEQ ID NO: 268456 - DNA, 19 bp, Homo sapiens
  siRNA target sequence for COG2 (NM_007357.1,1758-1776).
gactcccagagctcttttt

SEQ ID NO: 268457 - DNA, 19 bp, Homo sapiens
  siRNA target sequence for COG2 (NM_007357.1,1760-1778).
ctcccagagctctttttca

SEQ ID NO: 268458 - DNA, 19 bp, Homo sapiens
  siRNA target sequence for COG2 (NM_007357.1,1927-1945).
ctctgaagcccttattcca

SEQ ID NO: 268459 - DNA, 19 bp, Homo sapiens
  siRNA target sequence for COG2 (NM_007357.1,1950-1968).
cagagcggacacaaggata

SEQ ID NO: 268460 - DNA, 19 bp, Homo sapiens
  siRNA target sequence for COG2 (NM_007357.1,1954-1972).
gcggacacaaggataagct

SEQ ID NO: 268461 - DNA, 19 bp, Homo sapiens
  siRNA target sequence for COG2 (NM_007357.1,2014-2032).
gtgaaagcactcataagta

SEQ ID NO: 268462 - DNA, 19 bp, Homo sapiens
  siRNA target sequence for COG2 (NM_007357.1,2016-2034).
gaaagcactcataagtact

SEQ ID NO: 268463 - DNA, 19 bp, Homo sapiens
  siRNA target sequence for COG2 (NM_007357.1,2020-2038).
gcactcataagtactatga

SEQ ID NO: 268464 - DNA, 19 bp, Homo sapiens
  siRNA target sequence for COG2 (NM_007357.1,2021-2039).
cactcataagtactatgaa

SEQ ID NO: 268465 - DNA, 19 bp, Homo sapiens
  siRNA target sequence for COG2 (NM_007357.1,2037-2055).
gaaaccgtgtcagatgtat

SEQ ID NO: 268466 - DNA, 19 bp, Homo sapiens
  siRNA target sequence for COG2 (NM_007357.1,2045-2063).
gtcagatgtattaaactct

SEQ ID NO: 268467 - DNA, 19 bp, Homo sapiens
  siRNA target sequence for COG2 (NM_007357.1,2182-2200).
ccctagatgttgagtactt

SEQ ID NO: 268468 - DNA, 19 bp, Homo sapiens
  siRNA target sequence for COG2 (NM_007357.1,2233-2251).
caagtgacataaaaagctt

SEQ ID NO: 268469 - DNA, 19 bp, Homo sapiens
  siRNA target sequence for COG3 (NM_031431.2,268-286).
cagctgagcttccaattga

SEQ ID NO: 268470 - DNA, 19 bp, Homo sapiens
  siRNA target sequence for COG3 (NM_031431.2,288-306).
gacttgtgcagtttaacat

SEQ ID NO: 268471 - DNA, 19 bp, Homo sapiens
  siRNA target sequence for COG3 (NM_031431.2,308-326).
ccagtcactgcccattgaa

SEQ ID NO: 268472 - DNA, 19 bp, Homo sapiens
  siRNA target sequence for COG3 (NM_031431.2,349-367).
ctacagaagacattctctt

SEQ ID NO: 268473 - DNA, 19 bp, Homo sapiens
  siRNA target sequence for COG3 (NM_031431.2,377-395).
cacttccttaggaatggaa

SEQ ID NO: 268474 - DNA, 19 bp, Homo sapiens
  siRNA target sequence for COG3 (NM_031431.2,408-426).
gaaaccgcacagcagtttt

SEQ ID NO: 268475 - DNA, 19 bp, Homo sapiens
  siRNA target sequence for COG3 (NM_031431.2,419-437).
gcagtttttctcatggttt

SEQ ID NO: 268476 - DNA, 19 bp, Homo sapiens
  siRNA target sequence for COG3 (NM_031431.2,515-533).
ggagcagtgtgatgctata

SEQ ID NO: 268477 - DNA, 19 bp, Homo sapiens
  siRNA target sequence for COG3 (NM_031431.2,516-534).
gagcagtgtgatgctatat

SEQ ID NO: 268478 - DNA, 19 bp, Homo sapiens
  siRNA target sequence for COG3 (NM_031431.2,521-539).
gtgtgatgctatattgaat

SEQ ID NO: 268479 - DNA, 19 bp, Homo sapiens
  siRNA target sequence for COG3 (NM_031431.2,605-623).
gacaggaaccctacatgaa

SEQ ID NO: 268480 - DNA, 19 bp, Homo sapiens
  siRNA target sequence for COG3 (NM_031431.2,625-643).
cctgtgaacagctcctaaa

SEQ ID NO: 268481 - DNA, 19 bp, Homo sapiens
  siRNA target sequence for COG3 (NM_031431.2,681-699).
caacaaaagctttcctatt

SEQ ID NO: 268482 - DNA, 19 bp, Homo sapiens
  siRNA target sequence for COG3 (NM_031431.2,689-707).
gctttcctattttaacgaa

SEQ ID NO: 268483 - DNA, 19 bp, Homo sapiens
  siRNA target sequence for COG3 (NM_031431.2,715-733).
ctattaacacaaaattgaa

SEQ ID NO: 268484 - DNA, 19 bp, Homo sapiens
  siRNA target sequence for COG3 (NM_031431.2,750-768).
gtgaatagtgacggattta

SEQ ID NO: 268485 - DNA, 19 bp, Homo sapiens
  siRNA target sequence for COG3 (NM_031431.2,752-770).
gaatagtgacggatttata

SEQ ID NO: 268486 - DNA, 19 bp, Homo sapiens
  siRNA target sequence for COG3 (NM_031431.2,779-797).
ggccaagttagatgattgt

SEQ ID NO: 268487 - DNA, 19 bp, Homo sapiens
  siRNA target sequence for COG3 (NM_031431.2,781-799).
ccaagttagatgattgtat

SEQ ID NO: 268488 - DNA, 19 bp, Homo sapiens
  siRNA target sequence for COG3 (NM_031431.2,785-803).
gttagatgattgtataaca

SEQ ID NO: 268489 - DNA, 19 bp, Homo sapiens
  siRNA target sequence for COG3 (NM_031431.2,789-807).
gatgattgtataacatata

SEQ ID NO: 268490 - DNA, 19 bp, Homo sapiens
  siRNA target sequence for COG3 (NM_031431.2,854-872).
gtttaaacagtgtctttct

SEQ ID NO: 268491 - DNA, 19 bp, Homo sapiens
  siRNA target sequence for COG3 (NM_031431.2,881-899).
gcacctcatgaagacatat

SEQ ID NO: 268492 - DNA, 19 bp, Homo sapiens
  siRNA target sequence for COG3 (NM_031431.2,917-935).
gaccctcacaagtcagtta

SEQ ID NO: 268493 - DNA, 19 bp, Homo sapiens
  siRNA target sequence for COG3 (NM_031431.2,919-937).
ccctcacaagtcagttact

SEQ ID NO: 268494 - DNA, 19 bp, Homo sapiens
  siRNA target sequence for COG3 (NM_031431.2,938-956).
gaaaagggatccttcatct

SEQ ID NO: 268495 - DNA, 19 bp, Homo sapiens
  siRNA target sequence for COG3 (NM_031431.2,966-984).
gcagacaatgccttcacat

SEQ ID NO: 268496 - DNA, 19 bp, Homo sapiens
  siRNA target sequence for COG3 (NM_031431.2,1014-1032).
cccaaagtcagaactctta

SEQ ID NO: 268497 - DNA, 19 bp, Homo sapiens
  siRNA target sequence for COG3 (NM_031431.2,1015-1033).
ccaaagtcagaactcttat

SEQ ID NO: 268498 - DNA, 19 bp, Homo sapiens
  siRNA target sequence for COG3 (NM_031431.2,1024-1042).
gaactcttattgaacaaat

SEQ ID NO: 268499 - DNA, 19 bp, Homo sapiens
  siRNA target sequence for COG3 (NM_031431.2,1073-1091).
ccaacaactgctaaatgat

SEQ ID NO: 268500 - DNA, 19 bp, Homo sapiens
  siRNA target sequence for COG3 (NM_031431.2,1326-1344).
gtcttcaggccattgatca

SEQ ID NO: 268501 - DNA, 19 bp, Homo sapiens
  siRNA target sequence for COG3 (NM_031431.2,1328-1346).
cttcaggccattgatcatt

SEQ ID NO: 268502 - DNA, 19 bp, Homo sapiens
  siRNA target sequence for COG3 (NM_031431.2,1331-1349).
caggccattgatcattcat

SEQ ID NO: 268503 - DNA, 19 bp, Homo sapiens
  siRNA target sequence for COG3 (NM_031431.2,1334-1352).
gccattgatcattcatgtt

SEQ ID NO: 268504 - DNA, 19 bp, Homo sapiens
  siRNA target sequence for COG3 (NM_031431.2,1336-1354).
cattgatcattcatgttat

SEQ ID NO: 268505 - DNA, 19 bp, Homo sapiens
  siRNA target sequence for COG3 (NM_031431.2,1347-1365).
catgttattcacttagaga

SEQ ID NO: 268506 - DNA, 19 bp, Homo sapiens
  siRNA target sequence for COG3 (NM_031431.2,1362-1380).
gagactctgtcggaacttt

SEQ ID NO: 268507 - DNA, 19 bp, Homo sapiens
  siRNA target sequence for COG3 (NM_031431.2,1364-1382).
gactctgtcggaactttgt

SEQ ID NO: 268508 - DNA, 19 bp, Homo sapiens
  siRNA target sequence for COG3 (NM_031431.2,1433-1451).
gcaactgggggcatttgca

SEQ ID NO: 268509 - DNA, 19 bp, Homo sapiens
  siRNA target sequence for COG3 (NM_031431.2,1496-1514).
ctaccgaacccacatctat

SEQ ID NO: 268510 - DNA, 19 bp, Homo sapiens
  siRNA target sequence for COG3 (NM_031431.2,1499-1517).
ccgaacccacatctatatt

SEQ ID NO: 268511 - DNA, 19 bp, Homo sapiens
  siRNA target sequence for COG3 (NM_031431.2,1522-1540).
cggacatcacgggctataa

SEQ ID NO: 268512 - DNA, 19 bp, Homo sapiens
  siRNA target sequence for COG3 (NM_031431.2,1523-1541).
ggacatcacgggctataaa

SEQ ID NO: 268513 - DNA, 19 bp, Homo sapiens
  siRNA target sequence for COG3 (NM_031431.2,1526-1544).
catcacgggctataaacca

SEQ ID NO: 268514 - DNA, 19 bp, Homo sapiens
  siRNA target sequence for COG3 (NM_031431.2,1557-1575).
ctggcatatcccgataagt

SEQ ID NO: 268515 - DNA, 19 bp, Homo sapiens
  siRNA target sequence for COG3 (NM_031431.2,1559-1577).
ggcatatcccgataagtta

SEQ ID NO: 268516 - DNA, 19 bp, Homo sapiens
  siRNA target sequence for COG3 (NM_031431.2,1561-1579).
catatcccgataagttagt

SEQ ID NO: 268517 - DNA, 19 bp, Homo sapiens
  siRNA target sequence for COG3 (NM_031431.2,1567-1585).
ccgataagttagtcatgat

SEQ ID NO: 268518 - DNA, 19 bp, Homo sapiens
  siRNA target sequence for COG3 (NM_031431.2,1619-1637).
gaagaaggtaccttcagaa

SEQ ID NO: 268519 - DNA, 19 bp, Homo sapiens
  siRNA target sequence for COG3 (NM_031431.2,1673-1691).
gtctaacagtctgacaaaa

SEQ ID NO: 268520 - DNA, 19 bp, Homo sapiens
  siRNA target sequence for COG3 (NM_031431.2,1799-1817).
caaattatacagatgcata

SEQ ID NO: 268521 - DNA, 19 bp, Homo sapiens
  siRNA target sequence for COG3 (NM_031431.2,1822-1840).
gggcagtgttccaaggatt

SEQ ID NO: 268522 - DNA, 19 bp, Homo sapiens
  siRNA target sequence for COG3 (NM_031431.2,1823-1841).
ggcagtgttccaaggatta

SEQ ID NO: 268523 - DNA, 19 bp, Homo sapiens
  siRNA target sequence for COG3 (NM_031431.2,1824-1842).
gcagtgttccaaggattat

SEQ ID NO: 268524 - DNA, 19 bp, Homo sapiens
  siRNA target sequence for COG3 (NM_031431.2,1837-1855).
gattatcacaggaagcatt

SEQ ID NO: 268525 - DNA, 19 bp, Homo sapiens
  siRNA target sequence for COG3 (NM_031431.2,1881-1899).
ggagcgtcagagtctatca

SEQ ID NO: 268526 - DNA, 19 bp, Homo sapiens
  siRNA target sequence for COG3 (NM_031431.2,1914-1932).
cagattgatggacaacttt

SEQ ID NO: 268527 - DNA, 19 bp, Homo sapiens
  siRNA target sequence for COG3 (NM_031431.2,1924-1942).
gacaacttttcttaattaa

SEQ ID NO: 268528 - DNA, 19 bp, Homo sapiens
  siRNA target sequence for COG3 (NM_031431.2,1972-1990).
ctccatttcacactgaatt

SEQ ID NO: 268529 - DNA, 19 bp, Homo sapiens
  siRNA target sequence for COG3 (NM_031431.2,2010-2028).
ctggacctcaagaaaacta

SEQ ID NO: 268530 - DNA, 19 bp, Homo sapiens
  siRNA target sequence for COG3 (NM_031431.2,2015-2033).
cctcaagaaaactagagat

SEQ ID NO: 268531 - DNA, 19 bp, Homo sapiens
  siRNA target sequence for COG3 (NM_031431.2,2060-2078).
gactgtcccaagatttttt

SEQ ID NO: 268532 - DNA, 19 bp, Homo sapiens
  siRNA target sequence for COG3 (NM_031431.2,2089-2107).
gcaacaatgccttgataga

SEQ ID NO: 268533 - DNA, 19 bp, Homo sapiens
  siRNA target sequence for COG3 (NM_031431.2,2097-2115).
gccttgatagagttcttgt

SEQ ID NO: 268534 - DNA, 19 bp, Homo sapiens
  siRNA target sequence for COG3 (NM_031431.2,2098-2116).
ccttgatagagttcttgtt

SEQ ID NO: 268535 - DNA, 19 bp, Homo sapiens
  siRNA target sequence for COG3 (NM_031431.2,2122-2140).
gtactcctgagataagaga

SEQ ID NO: 268536 - DNA, 19 bp, Homo sapiens
  siRNA target sequence for COG3 (NM_031431.2,2165-2183).
cgtagaccgtcatctgaaa

SEQ ID NO: 268537 - DNA, 19 bp, Homo sapiens
  siRNA target sequence for COG3 (NM_031431.2,2166-2184).
gtagaccgtcatctgaaat

SEQ ID NO: 268538 - DNA, 19 bp, Homo sapiens
  siRNA target sequence for COG3 (NM_031431.2,2185-2203).
cggcctgtgagcagtttat

SEQ ID NO: 268539 - DNA, 19 bp, Homo sapiens
  siRNA target sequence for COG3 (NM_031431.2,2186-2204).
ggcctgtgagcagtttatt

SEQ ID NO: 268540 - DNA, 19 bp, Homo sapiens
  siRNA target sequence for COG3 (NM_031431.2,2188-2206).
cctgtgagcagtttattca

SEQ ID NO: 268541 - DNA, 19 bp, Homo sapiens
  siRNA target sequence for COG3 (NM_031431.2,2210-2228).
gcagaccaagctgtttgta

SEQ ID NO: 268542 - DNA, 19 bp, Homo sapiens
  siRNA target sequence for COG3 (NM_031431.2,2240-2258).
ggagttcatgacaaaggtt

SEQ ID NO: 268543 - DNA, 19 bp, Homo sapiens
  siRNA target sequence for COG3 (NM_031431.2,2241-2259).
gagttcatgacaaaggttt

SEQ ID NO: 268544 - DNA, 19 bp, Homo sapiens
  siRNA target sequence for COG3 (NM_031431.2,2251-2269).
caaaggtttcagcgttaaa

SEQ ID NO: 268545 - DNA, 19 bp, Homo sapiens
  siRNA target sequence for COG3 (NM_031431.2,2255-2273).
ggtttcagcgttaaaaaca

SEQ ID NO: 268546 - DNA, 19 bp, Homo sapiens
  siRNA target sequence for COG3 (NM_031431.2,2256-2274).
gtttcagcgttaaaaacaa

SEQ ID NO: 268547 - DNA, 19 bp, Homo sapiens
  siRNA target sequence for COG3 (NM_031431.2,2345-2363).
ccttgcggcaactgcatat

SEQ ID NO: 268548 - DNA, 19 bp, Homo sapiens
  siRNA target sequence for COG3 (NM_031431.2,2346-2364).
cttgcggcaactgcatata

SEQ ID NO: 268549 - DNA, 19 bp, Homo sapiens
  siRNA target sequence for COG3 (NM_031431.2,2405-2423).
gtccttgtacctatccaat

SEQ ID NO: 268550 - DNA, 19 bp, Homo sapiens
  siRNA target sequence for COG3 (NM_031431.2,2407-2425).
ccttgtacctatccaataa

SEQ ID NO: 268551 - DNA, 19 bp, Homo sapiens
  siRNA target sequence for COG3 (NM_031431.2,2427-2445).
gataccgagttcatcttgt

SEQ ID NO: 268552 - DNA, 19 bp, Homo sapiens
  siRNA target sequence for COG3 (NM_031431.2,2432-2450).
cgagttcatcttgtttaaa

SEQ ID NO: 268553 - DNA, 19 bp, Homo sapiens
  siRNA target sequence for COG3 (NM_031431.2,2435-2453).
gttcatcttgtttaaacct

SEQ ID NO: 268554 - DNA, 19 bp, Homo sapiens
  siRNA target sequence for COG3 (NM_031431.2,2483-2501).
gaagttccacgctctgtta

SEQ ID NO: 268555 - DNA, 19 bp, Homo sapiens
  siRNA target sequence for COG3 (NM_031431.2,2489-2507).
ccacgctctgttaaaggaa

SEQ ID NO: 268556 - DNA, 19 bp, Homo sapiens
  siRNA target sequence for COG4 (NM_015386.1,126-144).
gctggaggctgtatacgaa

SEQ ID NO: 268557 - DNA, 19 bp, Homo sapiens
  siRNA target sequence for COG4 (NM_015386.1,234-252).
ccaccgaatgggtcctaat

SEQ ID NO: 268558 - DNA, 19 bp, Homo sapiens
  siRNA target sequence for COG4 (NM_015386.1,356-374).
ccaagaaccgcctctatca

SEQ ID NO: 268559 - DNA, 19 bp, Homo sapiens
  siRNA target sequence for COG4 (NM_015386.1,367-385).
ctctatcaggccattcaga

SEQ ID NO: 268560 - DNA, 19 bp, Homo sapiens
  siRNA target sequence for COG4 (NM_015386.1,593-611).
ccattgtggcagagaagtt

SEQ ID NO: 268561 - DNA, 19 bp, Homo sapiens
  siRNA target sequence for COG4 (NM_015386.1,649-667).
gagcgcttcttcaagatct

SEQ ID NO: 268562 - DNA, 19 bp, Homo sapiens
  siRNA target sequence for COG4 (NM_015386.1,723-741).
caagcaggtggccagtaaa

SEQ ID NO: 268563 - DNA, 19 bp, Homo sapiens
  siRNA target sequence for COG4 (NM_015386.1,801-819).
catctttgcagatacactt

SEQ ID NO: 268564 - DNA, 19 bp, Homo sapiens
  siRNA target sequence for COG4 (NM_015386.1,865-883).
ccaatagtggagacctatt

SEQ ID NO: 268565 - DNA, 19 bp, Homo sapiens
  siRNA target sequence for COG4 (NM_015386.1,866-884).
caatagtggagacctatta

SEQ ID NO: 268566 - DNA, 19 bp, Homo sapiens
  siRNA target sequence for COG4 (NM_015386.1,896-914).
gactctataccctgatcaa

SEQ ID NO: 268567 - DNA, 19 bp, Homo sapiens
  siRNA target sequence for COG4 (NM_015386.1,898-916).
ctctataccctgatcaaat

SEQ ID NO: 268568 - DNA, 19 bp, Homo sapiens
  siRNA target sequence for COG4 (NM_015386.1,900-918).
ctataccctgatcaaatat

SEQ ID NO: 268569 - DNA, 19 bp, Homo sapiens
  siRNA target sequence for COG4 (NM_015386.1,1073-1091).
ctgaggtcaccctgatgaa

SEQ ID NO: 268570 - DNA, 19 bp, Homo sapiens
  siRNA target sequence for COG4 (NM_015386.1,1120-1138).
ctcaagaagaggattagct

SEQ ID NO: 268571 - DNA, 19 bp, Homo sapiens
  siRNA target sequence for COG4 (NM_015386.1,1201-1219).
ctggacaaactcctcaata

SEQ ID NO: 268572 - DNA, 19 bp, Homo sapiens
  siRNA target sequence for COG4 (NM_015386.1,1204-1222).
gacaaactcctcaataact

SEQ ID NO: 268573 - DNA, 19 bp, Homo sapiens
  siRNA target sequence for COG4 (NM_015386.1,1235-1253).
gtaccatgcaggagctaat

SEQ ID NO: 268574 - DNA, 19 bp, Homo sapiens
  siRNA target sequence for COG4 (NM_015386.1,1248-1266).
gctaattggcttatatgtt

SEQ ID NO: 268575 - DNA, 19 bp, Homo sapiens
  siRNA target sequence for COG4 (NM_015386.1,1249-1267).
ctaattggcttatatgtta

SEQ ID NO: 268576 - DNA, 19 bp, Homo sapiens
  siRNA target sequence for COG4 (NM_015386.1,1363-1381).
gtcttctacattgttaaga

SEQ ID NO: 268577 - DNA, 19 bp, Homo sapiens
  siRNA target sequence for COG4 (NM_015386.1,1470-1488).
cagggatgttctgtgtaat

SEQ ID NO: 268578 - DNA, 19 bp, Homo sapiens
  siRNA target sequence for COG4 (NM_015386.1,1544-1562).
caagtgccgtgaacatcat

SEQ ID NO: 268579 - DNA, 19 bp, Homo sapiens
  siRNA target sequence for COG4 (NM_015386.1,1861-1879).
gtgcagccttggatcaaca

SEQ ID NO: 268580 - DNA, 19 bp, Homo sapiens
  siRNA target sequence for COG4 (NM_015386.1,1911-1929).
ggaagaattcaatgactat

SEQ ID NO: 268581 - DNA, 19 bp, Homo sapiens
  siRNA target sequence for COG4 (NM_015386.1,2054-2072).
ccgtcgagttggagaaagt

SEQ ID NO: 268582 - DNA, 19 bp, Homo sapiens
  siRNA target sequence for COG4 (NM_015386.1,2074-2092).
gtgctgaaatccaccttta

SEQ ID NO: 268583 - DNA, 19 bp, Homo sapiens
  siRNA target sequence for COG4 (NM_015386.1,2165-2183).
ggaccatccgagacaagtt

SEQ ID NO: 268584 - DNA, 19 bp, Homo sapiens
  siRNA target sequence for COG4 (NM_015386.1,2166-2184).
gaccatccgagacaagttt

SEQ ID NO: 268585 - DNA, 19 bp, Homo sapiens
  siRNA target sequence for COG4 (NM_015386.1,2323-2341).
gacttccgcagtgaagata

SEQ ID NO: 268586 - DNA, 19 bp, Homo sapiens
  siRNA target sequence for COG4 (NM_015386.1,2329-2347).
cgcagtgaagatatcaaga

SEQ ID NO: 268587 - DNA, 19 bp, Homo sapiens
  siRNA target sequence for COG5 (NM_006348.2,229-247).
ctgcaggacgggtgttata

SEQ ID NO: 268588 - DNA, 19 bp, Homo sapiens
  siRNA target sequence for COG5 (NM_006348.2,231-249).
gcaggacgggtgttatagt

SEQ ID NO: 268589 - DNA, 19 bp, Homo sapiens
  siRNA target sequence for COG5 (NM_006348.2,271-289).
gatgtaaagacttatactt

SEQ ID NO: 268590 - DNA, 19 bp, Homo sapiens
  siRNA target sequence for COG5 (NM_006348.2,281-299).
cttatacttctcaatctat

SEQ ID NO: 268591 - DNA, 19 bp, Homo sapiens
  siRNA target sequence for COG5 (NM_006348.2,296-314).
ctattcatcaagctgtaat

SEQ ID NO: 268592 - DNA, 19 bp, Homo sapiens
  siRNA target sequence for COG5 (NM_006348.2,357-375).
ggacagagaactacactta

SEQ ID NO: 268593 - DNA, 19 bp, Homo sapiens
  siRNA target sequence for COG5 (NM_006348.2,378-396).
ggttgttgcaagacatgaa

SEQ ID NO: 268594 - DNA, 19 bp, Homo sapiens
  siRNA target sequence for COG5 (NM_006348.2,409-427).
caagcaactgggattgagt

SEQ ID NO: 268595 - DNA, 19 bp, Homo sapiens
  siRNA target sequence for COG5 (NM_006348.2,426-444).
gtcgttggaaggtgttctt

SEQ ID NO: 268596 - DNA, 19 bp, Homo sapiens
  siRNA target sequence for COG5 (NM_006348.2,428-446).
cgttggaaggtgttcttca

SEQ ID NO: 268597 - DNA, 19 bp, Homo sapiens
  siRNA target sequence for COG5 (NM_006348.2,447-465).
gatgatgcagacgagaatt

SEQ ID NO: 268598 - DNA, 19 bp, Homo sapiens
  siRNA target sequence for COG5 (NM_006348.2,484-502).
gttgataggataaaagcaa

SEQ ID NO: 268599 - DNA, 19 bp, Homo sapiens
  siRNA target sequence for COG5 (NM_006348.2,508-526).
gttgaaccatacaataaga

SEQ ID NO: 268600 - DNA, 19 bp, Homo sapiens
  siRNA target sequence for COG5 (NM_006348.2,581-599).
ggaggattattcgtatctt

SEQ ID NO: 268601 - DNA, 19 bp, Homo sapiens
  siRNA target sequence for COG5 (NM_006348.2,584-602).
ggattattcgtatcttgaa

SEQ ID NO: 268602 - DNA, 19 bp, Homo sapiens
  siRNA target sequence for COG5 (NM_006348.2,585-603).
gattattcgtatcttgaat

SEQ ID NO: 268603 - DNA, 19 bp, Homo sapiens
  siRNA target sequence for COG5 (NM_006348.2,593-611).
gtatcttgaatctcagtaa

SEQ ID NO: 268604 - DNA, 19 bp, Homo sapiens
  siRNA target sequence for COG5 (NM_006348.2,666-684).
gagtctcaatgaacttgat

SEQ ID NO: 268605 - DNA, 19 bp, Homo sapiens
  siRNA target sequence for COG5 (NM_006348.2,672-690).
caatgaacttgattatctt

SEQ ID NO: 268606 - DNA, 19 bp, Homo sapiens
  siRNA target sequence for COG5 (NM_006348.2,749-767).
caagagcccgacttgaagt

SEQ ID NO: 268607 - DNA, 19 bp, Homo sapiens
  siRNA target sequence for COG5 (NM_006348.2,859-877).
ggaactttgaaggatacta

SEQ ID NO: 268608 - DNA, 19 bp, Homo sapiens
  siRNA target sequence for COG5 (NM_006348.2,860-878).
gaactttgaaggatactat

SEQ ID NO: 268609 - DNA, 19 bp, Homo sapiens
  siRNA target sequence for COG5 (NM_006348.2,924-942).
caacagtgcattagacata

SEQ ID NO: 268610 - DNA, 19 bp, Homo sapiens
  siRNA target sequence for COG5 (NM_006348.2,931-949).
gcattagacataaaagttt

SEQ ID NO: 268611 - DNA, 19 bp, Homo sapiens
  siRNA target sequence for COG5 (NM_006348.2,1046-1064).
ccaatatggagaaacttat

SEQ ID NO: 268612 - DNA, 19 bp, Homo sapiens
  siRNA target sequence for COG5 (NM_006348.2,1054-1072).
gagaaacttatggatcata

SEQ ID NO: 268613 - DNA, 19 bp, Homo sapiens
  siRNA target sequence for COG5 (NM_006348.2,1085-1103).
gtggacaggtacaacatct

SEQ ID NO: 268614 - DNA, 19 bp, Homo sapiens
  siRNA target sequence for COG5 (NM_006348.2,1092-1110).
ggtacaacatctacaaaaa

SEQ ID NO: 268615 - DNA, 19 bp, Homo sapiens
  siRNA target sequence for COG5 (NM_006348.2,1174-1192).
ggacaaccggaaattttct

SEQ ID NO: 268616 - DNA, 19 bp, Homo sapiens
  siRNA target sequence for COG5 (NM_006348.2,1175-1193).
gacaaccggaaattttcta

SEQ ID NO: 268617 - DNA, 19 bp, Homo sapiens
  siRNA target sequence for COG5 (NM_006348.2,1177-1195).
caaccggaaattttctaca

SEQ ID NO: 268618 - DNA, 19 bp, Homo sapiens
  siRNA target sequence for COG5 (NM_006348.2,1216-1234).
caggcactttcttctcaat

SEQ ID NO: 268619 - DNA, 19 bp, Homo sapiens
  siRNA target sequence for COG5 (NM_006348.2,1247-1265).
caaactcttcgatgttttt

SEQ ID NO: 268620 - DNA, 19 bp, Homo sapiens
  siRNA target sequence for COG5 (NM_006348.2,1279-1297).
gaaggagaataccctaaat

SEQ ID NO: 268621 - DNA, 19 bp, Homo sapiens
  siRNA target sequence for COG5 (NM_006348.2,1303-1321).
cgtctttataatgacttat

SEQ ID NO: 268622 - DNA, 19 bp, Homo sapiens
  siRNA target sequence for COG5 (NM_006348.2,1317-1335).
cttatggaagcgtcttcaa

SEQ ID NO: 268623 - DNA, 19 bp, Homo sapiens
  siRNA target sequence for COG5 (NM_006348.2,1322-1340).
ggaagcgtcttcaacaata

SEQ ID NO: 268624 - DNA, 19 bp, Homo sapiens
  siRNA target sequence for COG5 (NM_006348.2,1326-1344).
gcgtcttcaacaatacagt

SEQ ID NO: 268625 - DNA, 19 bp, Homo sapiens
  siRNA target sequence for COG5 (NM_006348.2,1347-1365).
gcatatccaagggaatttt

SEQ ID NO: 268626 - DNA, 19 bp, Homo sapiens
  siRNA target sequence for COG5 (NM_006348.2,1353-1371).
ccaagggaattttaatgca

SEQ ID NO: 268627 - DNA, 19 bp, Homo sapiens
  siRNA target sequence for COG5 (NM_006348.2,1414-1432).
gatgatgcacaagatatat

SEQ ID NO: 268628 - DNA, 19 bp, Homo sapiens
  siRNA target sequence for COG5 (NM_006348.2,1426-1444).
gatatattcataccaaaaa

SEQ ID NO: 268629 - DNA, 19 bp, Homo sapiens
  siRNA target sequence for COG5 (NM_006348.2,1491-1509).
ctatgaggctgcttatcta

SEQ ID NO: 268630 - DNA, 19 bp, Homo sapiens
  siRNA target sequence for COG5 (NM_006348.2,1495-1513).
gaggctgcttatctatcaa

SEQ ID NO: 268631 - DNA, 19 bp, Homo sapiens
  siRNA target sequence for COG5 (NM_006348.2,1497-1515).
ggctgcttatctatcaaaa

SEQ ID NO: 268632 - DNA, 19 bp, Homo sapiens
  siRNA target sequence for COG5 (NM_006348.2,1498-1516).
gctgcttatctatcaaaat

SEQ ID NO: 268633 - DNA, 19 bp, Homo sapiens
  siRNA target sequence for COG5 (NM_006348.2,1523-1541).
ctcgactcttcgatcctat

SEQ ID NO: 268634 - DNA, 19 bp, Homo sapiens
  siRNA target sequence for COG5 (NM_006348.2,1526-1544).
gactcttcgatcctatcaa

SEQ ID NO: 268635 - DNA, 19 bp, Homo sapiens
  siRNA target sequence for COG5 (NM_006348.2,1534-1552).
gatcctatcaacttggttt

SEQ ID NO: 268636 - DNA, 19 bp, Homo sapiens
  siRNA target sequence for COG5 (NM_006348.2,1574-1592).
ctccttcctctgatgaact

SEQ ID NO: 268637 - DNA, 19 bp, Homo sapiens
  siRNA target sequence for COG5 (NM_006348.2,1577-1595).
cttcctctgatgaacttga

SEQ ID NO: 268638 - DNA, 19 bp, Homo sapiens
  siRNA target sequence for COG5 (NM_006348.2,1588-1606).
gaacttgatggtattatta

SEQ ID NO: 268639 - DNA, 19 bp, Homo sapiens
  siRNA target sequence for COG5 (NM_006348.2,1610-1628).
ctatagcaagtgaactaaa

SEQ ID NO: 268640 - DNA, 19 bp, Homo sapiens
  siRNA target sequence for COG5 (NM_006348.2,1679-1697).
caaagaccatccagttata

SEQ ID NO: 268641 - DNA, 19 bp, Homo sapiens
  siRNA target sequence for COG5 (NM_006348.2,1683-1701).
gaccatccagttatacagt

SEQ ID NO: 268642 - DNA, 19 bp, Homo sapiens
  siRNA target sequence for COG5 (NM_006348.2,1692-1710).
gttatacagtgtaaaatca

SEQ ID NO: 268643 - DNA, 19 bp, Homo sapiens
  siRNA target sequence for COG5 (NM_006348.2,1746-1764).
ggtgattgggcctcttact

SEQ ID NO: 268644 - DNA, 19 bp, Homo sapiens
  siRNA target sequence for COG5 (NM_006348.2,1749-1767).
gattgggcctcttactgaa

SEQ ID NO: 268645 - DNA, 19 bp, Homo sapiens
  siRNA target sequence for COG5 (NM_006348.2,1783-1801).
gtggcagtagtgaattcat

SEQ ID NO: 268646 - DNA, 19 bp, Homo sapiens
  siRNA target sequence for COG5 (NM_006348.2,1786-1804).
gcagtagtgaattcattgt

SEQ ID NO: 268647 - DNA, 19 bp, Homo sapiens
  siRNA target sequence for COG5 (NM_006348.2,1787-1805).
cagtagtgaattcattgta

SEQ ID NO: 268648 - DNA, 19 bp, Homo sapiens
  siRNA target sequence for COG5 (NM_006348.2,1809-1827).
gttgcaccaatcagtaaca

SEQ ID NO: 268649 - DNA, 19 bp, Homo sapiens
  siRNA target sequence for COG5 (NM_006348.2,1862-1880).
cagctgagcaaactataat

SEQ ID NO: 268650 - DNA, 19 bp, Homo sapiens
  siRNA target sequence for COG5 (NM_006348.2,1864-1882).
gctgagcaaactataattt

SEQ ID NO: 268651 - DNA, 19 bp, Homo sapiens
  siRNA target sequence for COG5 (NM_006348.2,1883-1901).
cagctctaaaggctattca

SEQ ID NO: 268652 - DNA, 19 bp, Homo sapiens
  siRNA target sequence for COG5 (NM_006348.2,1895-1913).
ctattcatgctcttatgga

SEQ ID NO: 268653 - DNA, 19 bp, Homo sapiens
  siRNA target sequence for COG5 (NM_006348.2,1918-1936).
gctgtgcaacccttactca

SEQ ID NO: 268654 - DNA, 19 bp, Homo sapiens
  siRNA target sequence for COG5 (NM_006348.2,1951-1969).
gctatagaggccataatca

SEQ ID NO: 268655 - DNA, 19 bp, Homo sapiens
  siRNA target sequence for COG5 (NM_006348.2,1968-1986).
catcaccatgcatcaagaa

SEQ ID NO: 268656 - DNA, 19 bp, Homo sapiens
  siRNA target sequence for COG5 (NM_006348.2,1973-1991).
ccatgcatcaagaagactt

SEQ ID NO: 268657 - DNA, 19 bp, Homo sapiens
  siRNA target sequence for COG5 (NM_006348.2,1974-1992).
catgcatcaagaagacttt

SEQ ID NO: 268658 - DNA, 19 bp, Homo sapiens
  siRNA target sequence for COG5 (NM_006348.2,2060-2078).
gtttcattgccagagttat

SEQ ID NO: 268659 - DNA, 19 bp, Homo sapiens
  siRNA target sequence for COG5 (NM_006348.2,2064-2082).
cattgccagagttatgagt

SEQ ID NO: 268660 - DNA, 19 bp, Homo sapiens
  siRNA target sequence for COG5 (NM_006348.2,2072-2090).
gagttatgagtgactattt

SEQ ID NO: 268661 - DNA, 19 bp, Homo sapiens
  siRNA target sequence for COG5 (NM_006348.2,2074-2092).
gttatgagtgactatttta

SEQ ID NO: 268662 - DNA, 19 bp, Homo sapiens
  siRNA target sequence for COG5 (NM_006348.2,2095-2113).
cactttgaatgcttggatt

SEQ ID NO: 268663 - DNA, 19 bp, Homo sapiens
  siRNA target sequence for COG5 (NM_006348.2,2166-2184).
ccgccatgccagtctcata

SEQ ID NO: 268664 - DNA, 19 bp, Homo sapiens
  siRNA target sequence for COG5 (NM_006348.2,2167-2185).
cgccatgccagtctcataa

SEQ ID NO: 268665 - DNA, 19 bp, Homo sapiens
  siRNA target sequence for COG5 (NM_006348.2,2169-2187).
ccatgccagtctcataaga

SEQ ID NO: 268666 - DNA, 19 bp, Homo sapiens
  siRNA target sequence for COG5 (NM_006348.2,2211-2229).
gcgacttgctgctgatttt

SEQ ID NO: 268667 - DNA, 19 bp, Homo sapiens
  siRNA target sequence for COG5 (NM_006348.2,2245-2263).
gctgtgggtccattctgta

SEQ ID NO: 268668 - DNA, 19 bp, Homo sapiens
  siRNA target sequence for COG5 (NM_006348.2,2259-2277).
ctgtagacgagtatctgat

SEQ ID NO: 268669 - DNA, 19 bp, Homo sapiens
  siRNA target sequence for COG5 (NM_006348.2,2261-2279).
gtagacgagtatctgattt

SEQ ID NO: 268670 - DNA, 19 bp, Homo sapiens
  siRNA target sequence for COG5 (NM_006348.2,2266-2284).
cgagtatctgatttaggaa

SEQ ID NO: 268671 - DNA, 19 bp, Homo sapiens
  siRNA target sequence for COG5 (NM_006348.2,2322-2340).
cttccaggcaagtgaacat

SEQ ID NO: 268672 - DNA, 19 bp, Homo sapiens
  siRNA target sequence for COG5 (NM_006348.2,2354-2372).
ctgcattgggggatgtgat

SEQ ID NO: 268673 - DNA, 19 bp, Homo sapiens
  siRNA target sequence for COG5 (NM_006348.2,2370-2388).
gattccgttcagcatcatt

SEQ ID NO: 268674 - DNA, 19 bp, Homo sapiens
  siRNA target sequence for COG5 (NM_006348.2,2381-2399).
gcatcattattcagttttt

SEQ ID NO: 268675 - DNA, 19 bp, Homo sapiens
  siRNA target sequence for COG5 (NM_006348.2,2408-2426).
gagcacccgctgaactgaa

SEQ ID NO: 268676 - DNA, 19 bp, Homo sapiens
  siRNA target sequence for COG5 (NM_006348.2,2479-2497).
gatgaccatccatctgaaa

SEQ ID NO: 268677 - DNA, 19 bp, Homo sapiens
  siRNA target sequence for COG5 (NM_006348.2,2539-2557).
gttcaatcagtgagaagta

SEQ ID NO: 268678 - DNA, 19 bp, Homo sapiens
  siRNA target sequence for COG5 (NM_006348.2,2576-2594).
caccagtttatcccataat

SEQ ID NO: 268679 - DNA, 19 bp, Homo sapiens
  siRNA target sequence for COG5 (NM_006348.2,2604-2622).
gcttcaaaaggctatgtct

SEQ ID NO: 268680 - DNA, 19 bp, Homo sapiens
  siRNA target sequence for COG6 (NM_020751.1,157-175).
cgcgcaagctgcataagat

SEQ ID NO: 268681 - DNA, 19 bp, Homo sapiens
  siRNA target sequence for COG6 (NM_020751.1,194-212).
caacgacaaggagatgtta

SEQ ID NO: 268682 - DNA, 19 bp, Homo sapiens
  siRNA target sequence for COG6 (NM_020751.1,197-215).
cgacaaggagatgttagaa

SEQ ID NO: 268683 - DNA, 19 bp, Homo sapiens
  siRNA target sequence for COG6 (NM_020751.1,216-234).
gctctcaaggcactttcaa

SEQ ID NO: 268684 - DNA, 19 bp, Homo sapiens
  siRNA target sequence for COG6 (NM_020751.1,224-242).
ggcactttcaacctttttt

SEQ ID NO: 268685 - DNA, 19 bp, Homo sapiens
  siRNA target sequence for COG6 (NM_020751.1,226-244).
cactttcaaccttttttgt

SEQ ID NO: 268686 - DNA, 19 bp, Homo sapiens
  siRNA target sequence for COG6 (NM_020751.1,253-271).
gtctgcggactcgaagaaa

SEQ ID NO: 268687 - DNA, 19 bp, Homo sapiens
  siRNA target sequence for COG6 (NM_020751.1,255-273).
ctgcggactcgaagaaatt

SEQ ID NO: 268688 - DNA, 19 bp, Homo sapiens
  siRNA target sequence for COG6 (NM_020751.1,268-286).
gaaatttacgtggagatat

SEQ ID NO: 268689 - DNA, 19 bp, Homo sapiens
  siRNA target sequence for COG6 (NM_020751.1,277-295).
gtggagatattgaacgtaa

SEQ ID NO: 268690 - DNA, 19 bp, Homo sapiens
  siRNA target sequence for COG6 (NM_020751.1,279-297).
ggagatattgaacgtaaaa

SEQ ID NO: 268691 - DNA, 19 bp, Homo sapiens
  siRNA target sequence for COG6 (NM_020751.1,305-323).
catcaatgaagaatttgta

SEQ ID NO: 268692 - DNA, 19 bp, Homo sapiens
  siRNA target sequence for COG6 (NM_020751.1,312-330).
gaagaatttgtaagcattt

SEQ ID NO: 268693 - DNA, 19 bp, Homo sapiens
  siRNA target sequence for COG6 (NM_020751.1,345-363).
gaggaacttgaaagcataa

SEQ ID NO: 268694 - DNA, 19 bp, Homo sapiens
  siRNA target sequence for COG6 (NM_020751.1,358-376).
gcataagcgaagatgttca

SEQ ID NO: 268695 - DNA, 19 bp, Homo sapiens
  siRNA target sequence for COG6 (NM_020751.1,383-401).
gagcaactgttgtcaagat

SEQ ID NO: 268696 - DNA, 19 bp, Homo sapiens
  siRNA target sequence for COG6 (NM_020751.1,389-407).
ctgttgtcaagatatgaca

SEQ ID NO: 268697 - DNA, 19 bp, Homo sapiens
  siRNA target sequence for COG6 (NM_020751.1,429-447).
gaacagactcaagatttaa

SEQ ID NO: 268698 - DNA, 19 bp, Homo sapiens
  siRNA target sequence for COG6 (NM_020751.1,434-452).
gactcaagatttaatagta

SEQ ID NO: 268699 - DNA, 19 bp, Homo sapiens
  siRNA target sequence for COG6 (NM_020751.1,457-475).
ccactaagcttcaatctga

SEQ ID NO: 268700 - DNA, 19 bp, Homo sapiens
  siRNA target sequence for COG6 (NM_020751.1,458-476).
cactaagcttcaatctgaa

SEQ ID NO: 268701 - DNA, 19 bp, Homo sapiens
  siRNA target sequence for COG6 (NM_020751.1,479-497).
ccaaaaattagagataaga

SEQ ID NO: 268702 - DNA, 19 bp, Homo sapiens
  siRNA target sequence for COG6 (NM_020751.1,504-522).
gttgcagatgccttcttat

SEQ ID NO: 268703 - DNA, 19 bp, Homo sapiens
  siRNA target sequence for COG6 (NM_020751.1,527-545).
gttccaactgacttctgat

SEQ ID NO: 268704 - DNA, 19 bp, Homo sapiens
  siRNA target sequence for COG6 (NM_020751.1,530-548).
ccaactgacttctgatgaa

SEQ ID NO: 268705 - DNA, 19 bp, Homo sapiens
  siRNA target sequence for COG6 (NM_020751.1,571-589).
gagaaggacccattactga

SEQ ID NO: 268706 - DNA, 19 bp, Homo sapiens
  siRNA target sequence for COG6 (NM_020751.1,577-595).
gacccattactgaggattt

SEQ ID NO: 268707 - DNA, 19 bp, Homo sapiens
  siRNA target sequence for COG6 (NM_020751.1,647-665).
cttgcgtacaaatcaacaa

SEQ ID NO: 268708 - DNA, 19 bp, Homo sapiens
  siRNA target sequence for COG6 (NM_020751.1,692-710).
gatggccttacttcaagaa

SEQ ID NO: 268709 - DNA, 19 bp, Homo sapiens
  siRNA target sequence for COG6 (NM_020751.1,712-730).
cggcttatgaaagacttta

SEQ ID NO: 268710 - DNA, 19 bp, Homo sapiens
  siRNA target sequence for COG6 (NM_020751.1,731-749).
ccgatgggctcaaagtgaa

SEQ ID NO: 268711 - DNA, 19 bp, Homo sapiens
  siRNA target sequence for COG6 (NM_020751.1,732-750).
cgatgggctcaaagtgaat

SEQ ID NO: 268712 - DNA, 19 bp, Homo sapiens
  siRNA target sequence for COG6 (NM_020751.1,819-837).
gacagacctgtcttatata

SEQ ID NO: 268713 - DNA, 19 bp, Homo sapiens
  siRNA target sequence for COG6 (NM_020751.1,877-895).
cagttgttcgtggatttat

SEQ ID NO: 268714 - DNA, 19 bp, Homo sapiens
  siRNA target sequence for COG6 (NM_020751.1,925-943).
gtacacctagaccaattga

SEQ ID NO: 268715 - DNA, 19 bp, Homo sapiens
  siRNA target sequence for COG6 (NM_020751.1,928-946).
cacctagaccaattgaaat

SEQ ID NO: 268716 - DNA, 19 bp, Homo sapiens
  siRNA target sequence for COG6 (NM_020751.1,931-949).
ctagaccaattgaaatgca

SEQ ID NO: 268717 - DNA, 19 bp, Homo sapiens
  siRNA target sequence for COG6 (NM_020751.1,1109-1127).
gtgcaggcctctaaaggtt

SEQ ID NO: 268718 - DNA, 19 bp, Homo sapiens
  siRNA target sequence for COG6 (NM_020751.1,1114-1132).
ggcctctaaaggttcgaat

SEQ ID NO: 268719 - DNA, 19 bp, Homo sapiens
  siRNA target sequence for COG6 (NM_020751.1,1115-1133).
gcctctaaaggttcgaatt

SEQ ID NO: 268720 - DNA, 19 bp, Homo sapiens
  siRNA target sequence for COG6 (NM_020751.1,1117-1135).
ctctaaaggttcgaattga

SEQ ID NO: 268721 - DNA, 19 bp, Homo sapiens
  siRNA target sequence for COG6 (NM_020751.1,1125-1143).
gttcgaattgagcaagtaa

SEQ ID NO: 268722 - DNA, 19 bp, Homo sapiens
  siRNA target sequence for COG6 (NM_020751.1,1129-1147).
gaattgagcaagtaatagt

SEQ ID NO: 268723 - DNA, 19 bp, Homo sapiens
  siRNA target sequence for COG6 (NM_020751.1,1152-1170).
gaacctggggcagttttat

SEQ ID NO: 268724 - DNA, 19 bp, Homo sapiens
  siRNA target sequence for COG6 (NM_020751.1,1158-1176).
ggggcagttttattatata

SEQ ID NO: 268725 - DNA, 19 bp, Homo sapiens
  siRNA target sequence for COG6 (NM_020751.1,1159-1177).
gggcagttttattatataa

SEQ ID NO: 268726 - DNA, 19 bp, Homo sapiens
  siRNA target sequence for COG6 (NM_020751.1,1236-1254).
gcaactgcattattgacta

SEQ ID NO: 268727 - DNA, 19 bp, Homo sapiens
  siRNA target sequence for COG6 (NM_020751.1,1363-1381).
caagttctgcactaaatca

SEQ ID NO: 268728 - DNA, 19 bp, Homo sapiens
  siRNA target sequence for COG6 (NM_020751.1,1388-1406).
catgttgctgcgtgaagtt

SEQ ID NO: 268729 - DNA, 19 bp, Homo sapiens
  siRNA target sequence for COG6 (NM_020751.1,1391-1409).
gttgctgcgtgaagtttta

SEQ ID NO: 268730 - DNA, 19 bp, Homo sapiens
  siRNA target sequence for COG6 (NM_020751.1,1395-1413).
ctgcgtgaagttttagcat

SEQ ID NO: 268731 - DNA, 19 bp, Homo sapiens
  siRNA target sequence for COG6 (NM_020751.1,1444-1462).
ctcgtcaagctgattttgt

SEQ ID NO: 268732 - DNA, 19 bp, Homo sapiens
  siRNA target sequence for COG6 (NM_020751.1,1493-1511).
cctacagatgtgtactgta

SEQ ID NO: 268733 - DNA, 19 bp, Homo sapiens
  siRNA target sequence for COG6 (NM_020751.1,1494-1512).
ctacagatgtgtactgtat

SEQ ID NO: 268734 - DNA, 19 bp, Homo sapiens
  siRNA target sequence for COG6 (NM_020751.1,1533-1551).
gctgacatggccactttca

SEQ ID NO: 268735 - DNA, 19 bp, Homo sapiens
  siRNA target sequence for COG6 (NM_020751.1,1542-1560).
gccactttcatggtcaatt

SEQ ID NO: 268736 - DNA, 19 bp, Homo sapiens
  siRNA target sequence for COG6 (NM_020751.1,1550-1568).
catggtcaattcactatat

SEQ ID NO: 268737 - DNA, 19 bp, Homo sapiens
  siRNA target sequence for COG6 (NM_020751.1,1554-1572).
gtcaattcactatatatga

SEQ ID NO: 268738 - DNA, 19 bp, Homo sapiens
  siRNA target sequence for COG6 (NM_020751.1,1577-1595).
gacaacattagctctattt

SEQ ID NO: 268739 - DNA, 19 bp, Homo sapiens
  siRNA target sequence for COG6 (NM_020751.1,1579-1597).
caacattagctctatttga

SEQ ID NO: 268740 - DNA, 19 bp, Homo sapiens
  siRNA target sequence for COG6 (NM_020751.1,1607-1625).
cagacgtctggaaatgcta

SEQ ID NO: 268741 - DNA, 19 bp, Homo sapiens
  siRNA target sequence for COG6 (NM_020751.1,1612-1630).
gtctggaaatgctacagtt

SEQ ID NO: 268742 - DNA, 19 bp, Homo sapiens
  siRNA target sequence for COG6 (NM_020751.1,1665-1683).
gagcaagcctcttatgttt

SEQ ID NO: 268743 - DNA, 19 bp, Homo sapiens
  siRNA target sequence for COG6 (NM_020751.1,1667-1685).
gcaagcctcttatgtttta

SEQ ID NO: 268744 - DNA, 19 bp, Homo sapiens
  siRNA target sequence for COG6 (NM_020751.1,1690-1708).
gggtaggcttgagttacat

SEQ ID NO: 268745 - DNA, 19 bp, Homo sapiens
  siRNA target sequence for COG6 (NM_020751.1,1692-1710).
gtaggcttgagttacatct

SEQ ID NO: 268746 - DNA, 19 bp, Homo sapiens
  siRNA target sequence for COG6 (NM_020751.1,1700-1718).
gagttacatctataacact

SEQ ID NO: 268747 - DNA, 19 bp, Homo sapiens
  siRNA target sequence for COG6 (NM_020751.1,1737-1755).
gaacagggctctttagcta

SEQ ID NO: 268748 - DNA, 19 bp, Homo sapiens
  siRNA target sequence for COG6 (NM_020751.1,1740-1758).
cagggctctttagctaata

SEQ ID NO: 268749 - DNA, 19 bp, Homo sapiens
  siRNA target sequence for COG6 (NM_020751.1,1787-1805).
ggctgcaatggttcagttt

SEQ ID NO: 268750 - DNA, 19 bp, Homo sapiens
  siRNA target sequence for COG6 (NM_020751.1,1789-1807).
ctgcaatggttcagtttga

SEQ ID NO: 268751 - DNA, 19 bp, Homo sapiens
  siRNA target sequence for COG6 (NM_020751.1,1796-1814).
ggttcagtttgatcgttat

SEQ ID NO: 268752 - DNA, 19 bp, Homo sapiens
  siRNA target sequence for COG6 (NM_020751.1,1800-1818).
cagtttgatcgttatctgt

SEQ ID NO: 268753 - DNA, 19 bp, Homo sapiens
  siRNA target sequence for COG6 (NM_020751.1,1819-1837).
cagccccagacaacctatt

SEQ ID NO: 268754 - DNA, 19 bp, Homo sapiens
  siRNA target sequence for COG6 (NM_020751.1,1821-1839).
gccccagacaacctattga

SEQ ID NO: 268755 - DNA, 19 bp, Homo sapiens
  siRNA target sequence for COG6 (NM_020751.1,1872-1890).
gtgaaagagcagatcgtaa

SEQ ID NO: 268756 - DNA, 19 bp, Homo sapiens
  siRNA target sequence for COG6 (NM_020751.1,1878-1896).
gagcagatcgtaaaacaat

SEQ ID NO: 268757 - DNA, 19 bp, Homo sapiens
  siRNA target sequence for COG6 (NM_020751.1,1880-1898).
gcagatcgtaaaacaatct

SEQ ID NO: 268758 - DNA, 19 bp, Homo sapiens
  siRNA target sequence for COG6 (NM_020751.1,1881-1899).
cagatcgtaaaacaatcta

SEQ ID NO: 268759 - DNA, 19 bp, Homo sapiens
  siRNA target sequence for COG6 (NM_020751.1,1883-1901).
gatcgtaaaacaatctaca

SEQ ID NO: 268760 - DNA, 19 bp, Homo sapiens
  siRNA target sequence for COG6 (NM_020751.1,1886-1904).
cgtaaaacaatctacagaa

SEQ ID NO: 268761 - DNA, 19 bp, Homo sapiens
  siRNA target sequence for COG6 (NM_020751.1,1893-1911).
caatctacagaattagtct

SEQ ID NO: 268762 - DNA, 19 bp, Homo sapiens
  siRNA target sequence for COG6 (NM_020751.1,1931-1949).
gtatgcagccgtgatgaat

SEQ ID NO: 268763 - DNA, 19 bp, Homo sapiens
  siRNA target sequence for COG7 (NM_153603.1,343-361).
cacgccgtggaggaaacaa

SEQ ID NO: 268764 - DNA, 19 bp, Homo sapiens
  siRNA target sequence for COG7 (NM_153603.1,345-363).
cgccgtggaggaaacaagt

SEQ ID NO: 268765 - DNA, 19 bp, Homo sapiens
  siRNA target sequence for COG7 (NM_153603.1,451-469).
cttgtcaaggaggacatta

SEQ ID NO: 268766 - DNA, 19 bp, Homo sapiens
  siRNA target sequence for COG7 (NM_153603.1,582-600).
cacgttgagcgccgatatt

SEQ ID NO: 268767 - DNA, 19 bp, Homo sapiens
  siRNA target sequence for COG7 (NM_153603.1,584-602).
cgttgagcgccgatattga

SEQ ID NO: 268768 - DNA, 19 bp, Homo sapiens
  siRNA target sequence for COG7 (NM_153603.1,593-611).
ccgatattgaggagacatt

SEQ ID NO: 268769 - DNA, 19 bp, Homo sapiens
  siRNA target sequence for COG7 (NM_153603.1,621-639).
ggacatagctgtgatttct

SEQ ID NO: 268770 - DNA, 19 bp, Homo sapiens
  siRNA target sequence for COG7 (NM_153603.1,631-649).
gtgatttctgccaagctaa

SEQ ID NO: 268771 - DNA, 19 bp, Homo sapiens
  siRNA target sequence for COG7 (NM_153603.1,652-670).
ggtatgcagaacagcttaa

SEQ ID NO: 268772 - DNA, 19 bp, Homo sapiens
  siRNA target sequence for COG7 (NM_153603.1,688-706).
ccagactactcagaaaagt

SEQ ID NO: 268773 - DNA, 19 bp, Homo sapiens
  siRNA target sequence for COG7 (NM_153603.1,744-762).
cctagccagtccacagatt

SEQ ID NO: 268774 - DNA, 19 bp, Homo sapiens
  siRNA target sequence for COG7 (NM_153603.1,787-805).
gtagatcagtccaaagtgt

SEQ ID NO: 268775 - DNA, 19 bp, Homo sapiens
  siRNA target sequence for COG7 (NM_153603.1,793-811).
cagtccaaagtgtttgtga

SEQ ID NO: 268776 - DNA, 19 bp, Homo sapiens
  siRNA target sequence for COG7 (NM_153603.1,804-822).
gtttgtgaaggtgtttact

SEQ ID NO: 268777 - DNA, 19 bp, Homo sapiens
  siRNA target sequence for COG7 (NM_153603.1,894-912).
gcaagagctgtgtcaaagt

SEQ ID NO: 268778 - DNA, 19 bp, Homo sapiens
  siRNA target sequence for COG7 (NM_153603.1,930-948).
gcagcttaccggactctat

SEQ ID NO: 268779 - DNA, 19 bp, Homo sapiens
  siRNA target sequence for COG7 (NM_153603.1,933-951).
gcttaccggactctatgat

SEQ ID NO: 268780 - DNA, 19 bp, Homo sapiens
  siRNA target sequence for COG7 (NM_153603.1,965-983).
cttggcacacacaaatcca

SEQ ID NO: 268781 - DNA, 19 bp, Homo sapiens
  siRNA target sequence for COG7 (NM_153603.1,1010-1028).
cccacgaggtggtaatggt

SEQ ID NO: 268782 - DNA, 19 bp, Homo sapiens
  siRNA target sequence for COG7 (NM_153603.1,1235-1253).
ctgtgtatgatccatacaa

SEQ ID NO: 268783 - DNA, 19 bp, Homo sapiens
  siRNA target sequence for COG7 (NM_153603.1,1323-1341).
ggagcatggggaagtgatt

SEQ ID NO: 268784 - DNA, 19 bp, Homo sapiens
  siRNA target sequence for COG7 (NM_153603.1,1327-1345).
catggggaagtgattgact

SEQ ID NO: 268785 - DNA, 19 bp, Homo sapiens
  siRNA target sequence for COG7 (NM_153603.1,1507-1525).
cagtccatacgaaagaagt

SEQ ID NO: 268786 - DNA, 19 bp, Homo sapiens
  siRNA target sequence for COG7 (NM_153603.1,1567-1585).
gattggacggcttttcaga

SEQ ID NO: 268787 - DNA, 19 bp, Homo sapiens
  siRNA target sequence for COG7 (NM_153603.1,1648-1666).
cagctagccaacaggattt

SEQ ID NO: 268788 - DNA, 19 bp, Homo sapiens
  siRNA target sequence for COG7 (NM_153603.1,1651-1669).
ctagccaacaggattttgt

SEQ ID NO: 268789 - DNA, 19 bp, Homo sapiens
  siRNA target sequence for COG7 (NM_153603.1,1676-1694).
ctgggaagtatctatctga

SEQ ID NO: 268790 - DNA, 19 bp, Homo sapiens
  siRNA target sequence for COG7 (NM_153603.1,1772-1790).
ggcaagaatataattacct

SEQ ID NO: 268791 - DNA, 19 bp, Homo sapiens
  siRNA target sequence for COG7 (NM_153603.1,1895-1913).
cgctgactcggcttaacca

SEQ ID NO: 268792 - DNA, 19 bp, Homo sapiens
  siRNA target sequence for COG7 (NM_153603.1,1920-1938).
ccaccagctggctttcgat

SEQ ID NO: 268793 - DNA, 19 bp, Homo sapiens
  siRNA target sequence for COG7 (NM_153603.1,1921-1939).
caccagctggctttcgatt

SEQ ID NO: 268794 - DNA, 19 bp, Homo sapiens
  siRNA target sequence for COG7 (NM_153603.1,1963-1981).
cagctgttgcttatttcga

SEQ ID NO: 268795 - DNA, 19 bp, Homo sapiens
  siRNA target sequence for COG7 (NM_153603.1,2128-2146).
gaggactctgccttagagt

SEQ ID NO: 268796 - DNA, 19 bp, Homo sapiens
  siRNA target sequence for COG7 (NM_153603.1,2324-2342).
ctgacatcgactatctgat

SEQ ID NO: 268797 - DNA, 19 bp, Homo sapiens
  siRNA target sequence for COG7 (NM_153603.1,2414-2432).
ggcctgaggactatagaca

SEQ ID NO: 268798 - DNA, 19 bp, Homo sapiens
  siRNA target sequence for COG7 (NM_153603.1,2477-2495).
ccatgcggagtgtgaatta

SEQ ID NO: 268799 - DNA, 19 bp, Homo sapiens
  siRNA target sequence for COG8 (NM_032382.2,551-569).
ctgtgtccggaacagttat

SEQ ID NO: 268800 - DNA, 19 bp, Homo sapiens
  siRNA target sequence for COG8 (NM_032382.2,553-571).
gtgtccggaacagttatta

SEQ ID NO: 268801 - DNA, 19 bp, Homo sapiens
  siRNA target sequence for COG8 (NM_032382.2,557-575).
ccggaacagttattatgaa

SEQ ID NO: 268802 - DNA, 19 bp, Homo sapiens
  siRNA target sequence for COG8 (NM_032382.2,603-621).
cgccgactggagaggaaat

SEQ ID NO: 268803 - DNA, 19 bp, Homo sapiens
  siRNA target sequence for COG8 (NM_032382.2,604-622).
gccgactggagaggaaata

SEQ ID NO: 268804 - DNA, 19 bp, Homo sapiens
  siRNA target sequence for COG8 (NM_032382.2,833-851).
cctgactgccattcctaat

SEQ ID NO: 268805 - DNA, 19 bp, Homo sapiens
  siRNA target sequence for COG8 (NM_032382.2,836-854).
gactgccattcctaatgat

SEQ ID NO: 268806 - DNA, 19 bp, Homo sapiens
  siRNA target sequence for COG8 (NM_032382.2,847-865).
ctaatgatgatccctattt

SEQ ID NO: 268807 - DNA, 19 bp, Homo sapiens
  siRNA target sequence for COG8 (NM_032382.2,894-912).
cgtgtccatctctttgata

SEQ ID NO: 268808 - DNA, 19 bp, Homo sapiens
  siRNA target sequence for COG8 (NM_032382.2,895-913).
gtgtccatctctttgatat

SEQ ID NO: 268809 - DNA, 19 bp, Homo sapiens
  siRNA target sequence for COG8 (NM_032382.2,921-939).
cagtaccgtgccatcttct

SEQ ID NO: 268810 - DNA, 19 bp, Homo sapiens
  siRNA target sequence for COG8 (NM_032382.2,971-989).
gggtgagcacactgtgaat

SEQ ID NO: 268811 - DNA, 19 bp, Homo sapiens
  siRNA target sequence for COG8 (NM_032382.2,1335-1353).
cccatggtgctcctagatt

SEQ ID NO: 268812 - DNA, 19 bp, Homo sapiens
  siRNA target sequence for COG8 (NM_032382.2,1336-1354).
ccatggtgctcctagattt

SEQ ID NO: 268813 - DNA, 19 bp, Homo sapiens
  siRNA target sequence for COG8 (NM_032382.2,1461-1479).
gcccttgccaaggtaacta

SEQ ID NO: 268814 - DNA, 19 bp, Homo sapiens
  siRNA target sequence for COG8 (NM_032382.2,1462-1480).
cccttgccaaggtaactaa

SEQ ID NO: 268815 - DNA, 19 bp, Homo sapiens
  siRNA target sequence for COG8 (NM_032382.2,1467-1485).
gccaaggtaactaaaataa

SEQ ID NO: 268816 - DNA, 19 bp, Homo sapiens
  siRNA target sequence for COG8 (NM_032382.2,1468-1486).
ccaaggtaactaaaataat

SEQ ID NO: 268817 - DNA, 19 bp, Homo sapiens
  siRNA target sequence for COG8 (NM_032382.2,1661-1679).
ctccaagtacggtaaccta

SEQ ID NO: 268818 - DNA, 19 bp, Homo sapiens
  siRNA target sequence for COPB (NM_016451.3,309-327).
cggctgagaacgtatgcta

SEQ ID NO: 268819 - DNA, 19 bp, Homo sapiens
  siRNA target sequence for COPB (NM_016451.3,319-337).
cgtatgctacacgttaatt

SEQ ID NO: 268820 - DNA, 19 bp, Homo sapiens
  siRNA target sequence for COPB (NM_016451.3,324-342).
gctacacgttaattaacgt

SEQ ID NO: 268821 - DNA, 19 bp, Homo sapiens
  siRNA target sequence for COPB (NM_016451.3,356-374).
gaaccaccatctgaaatta

SEQ ID NO: 268822 - DNA, 19 bp, Homo sapiens
  siRNA target sequence for COPB (NM_016451.3,362-380).
ccatctgaaattagcttaa

SEQ ID NO: 268823 - DNA, 19 bp, Homo sapiens
  siRNA target sequence for COPB (NM_016451.3,411-429).
caaagactgaagctttgaa

SEQ ID NO: 268824 - DNA, 19 bp, Homo sapiens
  siRNA target sequence for COPB (NM_016451.3,476-494).
ctgatgaccatcattcgtt

SEQ ID NO: 268825 - DNA, 19 bp, Homo sapiens
  siRNA target sequence for COPB (NM_016451.3,511-529).
ggatcacactatcaagaaa

SEQ ID NO: 268826 - DNA, 19 bp, Homo sapiens
  siRNA target sequence for COPB (NM_016451.3,512-530).
gatcacactatcaagaaat

SEQ ID NO: 268827 - DNA, 19 bp, Homo sapiens
  siRNA target sequence for COPB (NM_016451.3,567-585).
ctccagatgggagactttt

SEQ ID NO: 268828 - DNA, 19 bp, Homo sapiens
  siRNA target sequence for COPB (NM_016451.3,587-605).
catgagatgatccttgtat

SEQ ID NO: 268829 - DNA, 19 bp, Homo sapiens
  siRNA target sequence for COPB (NM_016451.3,592-610).
gatgatccttgtatgtgat

SEQ ID NO: 268830 - DNA, 19 bp, Homo sapiens
  siRNA target sequence for COPB (NM_016451.3,654-672).
gatctactcttcgttttct

SEQ ID NO: 268831 - DNA, 19 bp, Homo sapiens
  siRNA target sequence for COPB (NM_016451.3,665-683).
cgttttctttgcaaattga

SEQ ID NO: 268832 - DNA, 19 bp, Homo sapiens
  siRNA target sequence for COPB (NM_016451.3,692-710).
gaattgctagaacctttaa

SEQ ID NO: 268833 - DNA, 19 bp, Homo sapiens
  siRNA target sequence for COPB (NM_016451.3,736-754).
gcatcgacacagctatgtt

SEQ ID NO: 268834 - DNA, 19 bp, Homo sapiens
  siRNA target sequence for COPB (NM_016451.3,772-790).
ggccatctataccatctat

SEQ ID NO: 268835 - DNA, 19 bp, Homo sapiens
  siRNA target sequence for COPB (NM_016451.3,773-791).
gccatctataccatctata

SEQ ID NO: 268836 - DNA, 19 bp, Homo sapiens
  siRNA target sequence for COPB (NM_016451.3,778-796).
ctataccatctatagaaat

SEQ ID NO: 268837 - DNA, 19 bp, Homo sapiens
  siRNA target sequence for COPB (NM_016451.3,813-831).
ctgatgctcctgaactgat

SEQ ID NO: 268838 - DNA, 19 bp, Homo sapiens
  siRNA target sequence for COPB (NM_016451.3,821-839).
cctgaactgatacatgatt

SEQ ID NO: 268839 - DNA, 19 bp, Homo sapiens
  siRNA target sequence for COPB (NM_016451.3,822-840).
ctgaactgatacatgattt

SEQ ID NO: 268840 - DNA, 19 bp, Homo sapiens
  siRNA target sequence for COPB (NM_016451.3,905-923).
caggatcgagctttggatt

SEQ ID NO: 268841 - DNA, 19 bp, Homo sapiens
  siRNA target sequence for COPB (NM_016451.3,914-932).
gctttggattacttaagta

SEQ ID NO: 268842 - DNA, 19 bp, Homo sapiens
  siRNA target sequence for COPB (NM_016451.3,964-982).
cattctgcagctggttatt

SEQ ID NO: 268843 - DNA, 19 bp, Homo sapiens
  siRNA target sequence for COPB (NM_016451.3,1000-1018).
ggtctgtcatgctaatcca

SEQ ID NO: 268844 - DNA, 19 bp, Homo sapiens
  siRNA target sequence for COPB (NM_016451.3,1001-1019).
gtctgtcatgctaatccat

SEQ ID NO: 268845 - DNA, 19 bp, Homo sapiens
  siRNA target sequence for COPB (NM_016451.3,1020-1038).
cagaaagagctcgttttat

SEQ ID NO: 268846 - DNA, 19 bp, Homo sapiens
  siRNA target sequence for COPB (NM_016451.3,1040-1058).
cgctgcatctataacttat

SEQ ID NO: 268847 - DNA, 19 bp, Homo sapiens
  siRNA target sequence for COPB (NM_016451.3,1042-1060).
ctgcatctataacttatta

SEQ ID NO: 268848 - DNA, 19 bp, Homo sapiens
  siRNA target sequence for COPB (NM_016451.3,1065-1083).
catccagccctgctgtaaa

SEQ ID NO: 268849 - DNA, 19 bp, Homo sapiens
  siRNA target sequence for COPB (NM_016451.3,1174-1192).
ggagagcgacaacaatgta

SEQ ID NO: 268850 - DNA, 19 bp, Homo sapiens
  siRNA target sequence for COPB (NM_016451.3,1175-1193).
gagagcgacaacaatgtaa

SEQ ID NO: 268851 - DNA, 19 bp, Homo sapiens
  siRNA target sequence for COPB (NM_016451.3,1207-1225).
ggatcgcttgatagaatta

SEQ ID NO: 268852 - DNA, 19 bp, Homo sapiens
  siRNA target sequence for COPB (NM_016451.3,1208-1226).
gatcgcttgatagaattaa

SEQ ID NO: 268853 - DNA, 19 bp, Homo sapiens
  siRNA target sequence for COPB (NM_016451.3,1262-1280).
ctggttatggatatcctaa

SEQ ID NO: 268854 - DNA, 19 bp, Homo sapiens
  siRNA target sequence for COPB (NM_016451.3,1290-1308).
gcacaccagacttagaagt

SEQ ID NO: 268855 - DNA, 19 bp, Homo sapiens
  siRNA target sequence for COPB (NM_016451.3,1296-1314).
cagacttagaagtacgaaa

SEQ ID NO: 268856 - DNA, 19 bp, Homo sapiens
  siRNA target sequence for COPB (NM_016451.3,1336-1354).
ggatcttgtctcttctaga

SEQ ID NO: 268857 - DNA, 19 bp, Homo sapiens
  siRNA target sequence for COPB (NM_016451.3,1409-1427).
gtgtctgagcatgaagata

SEQ ID NO: 268858 - DNA, 19 bp, Homo sapiens
  siRNA target sequence for COPB (NM_016451.3,1411-1429).
gtctgagcatgaagatact

SEQ ID NO: 268859 - DNA, 19 bp, Homo sapiens
  siRNA target sequence for COPB (NM_016451.3,1418-1436).
catgaagatactgacaaat

SEQ ID NO: 268860 - DNA, 19 bp, Homo sapiens
  siRNA target sequence for COPB (NM_016451.3,1447-1465).
cctagtgcgaacattgcat

SEQ ID NO: 268861 - DNA, 19 bp, Homo sapiens
  siRNA target sequence for COPB (NM_016451.3,1448-1466).
ctagtgcgaacattgcatt

SEQ ID NO: 268862 - DNA, 19 bp, Homo sapiens
  siRNA target sequence for COPB (NM_016451.3,1468-1486).
ctgttctgtccgatttcca

SEQ ID NO: 268863 - DNA, 19 bp, Homo sapiens
  siRNA target sequence for COPB (NM_016451.3,1580-1598).
gccattcagcgctttgata

SEQ ID NO: 268864 - DNA, 19 bp, Homo sapiens
  siRNA target sequence for COPB (NM_016451.3,1600-1618).
cctgagaatgcttattgtt

SEQ ID NO: 268865 - DNA, 19 bp, Homo sapiens
  siRNA target sequence for COPB (NM_016451.3,1660-1678).
gatttaccgaggagcatta

SEQ ID NO: 268866 - DNA, 19 bp, Homo sapiens
  siRNA target sequence for COPB (NM_016451.3,1698-1716).
gtagtaccaaggaagacat

SEQ ID NO: 268867 - DNA, 19 bp, Homo sapiens
  siRNA target sequence for COPB (NM_016451.3,1752-1770).
gagagatcccaattgtaga

SEQ ID NO: 268868 - DNA, 19 bp, Homo sapiens
  siRNA target sequence for COPB (NM_016451.3,1827-1845).
ggccagttcagaaattggt

SEQ ID NO: 268869 - DNA, 19 bp, Homo sapiens
  siRNA target sequence for COPB (NM_016451.3,1829-1847).
ccagttcagaaattggtta

SEQ ID NO: 268870 - DNA, 19 bp, Homo sapiens
  siRNA target sequence for COPB (NM_016451.3,1975-1993).
cacaactctgaccaagatt

SEQ ID NO: 268871 - DNA, 19 bp, Homo sapiens
  siRNA target sequence for COPB (NM_016451.3,1980-1998).
ctctgaccaagattgcatt

SEQ ID NO: 268872 - DNA, 19 bp, Homo sapiens
  siRNA target sequence for COPB (NM_016451.3,1995-2013).
cattgcgctatgtagcttt

SEQ ID NO: 268873 - DNA, 19 bp, Homo sapiens
  siRNA target sequence for COPB (NM_016451.3,1999-2017).
gcgctatgtagctttggtt

SEQ ID NO: 268874 - DNA, 19 bp, Homo sapiens
  siRNA target sequence for COPB (NM_016451.3,2078-2096).
ctgcatttgggaaaatcct

SEQ ID NO: 268875 - DNA, 19 bp, Homo sapiens
  siRNA target sequence for COPB (NM_016451.3,2107-2125).
gaagccaattactgatgat

SEQ ID NO: 268876 - DNA, 19 bp, Homo sapiens
  siRNA target sequence for COPB (NM_016451.3,2110-2128).
gccaattactgatgatgat

SEQ ID NO: 268877 - DNA, 19 bp, Homo sapiens
  siRNA target sequence for COPB (NM_016451.3,2123-2141).
gatgatgtggatcgaattt

SEQ ID NO: 268878 - DNA, 19 bp, Homo sapiens
  siRNA target sequence for COPB (NM_016451.3,2161-2179).
gtctgaatgttcaccttta

SEQ ID NO: 268879 - DNA, 19 bp, Homo sapiens
  siRNA target sequence for COPB (NM_016451.3,2323-2341).
gcaactaactgctaagaat

SEQ ID NO: 268880 - DNA, 19 bp, Homo sapiens
  siRNA target sequence for COPB (NM_016451.3,2418-2436).
cagatcccctagcatctaa

SEQ ID NO: 268881 - DNA, 19 bp, Homo sapiens
  siRNA target sequence for COPB (NM_016451.3,2426-2444).
ctagcatctaaacttaaca

SEQ ID NO: 268882 - DNA, 19 bp, Homo sapiens
  siRNA target sequence for COPB (NM_016451.3,2494-2512).
cgttcatgtcaaccaatat

SEQ ID NO: 268883 - DNA, 19 bp, Homo sapiens
  siRNA target sequence for COPB (NM_016451.3,2539-2557).
gaaccaaaccagtgatact

SEQ ID NO: 268884 - DNA, 19 bp, Homo sapiens
  siRNA target sequence for COPB (NM_016451.3,2552-2570).
gatactttgcagaattgca

SEQ ID NO: 268885 - DNA, 19 bp, Homo sapiens
  siRNA target sequence for COPB (NM_016451.3,2563-2581).
gaattgcacattagaacta

SEQ ID NO: 268886 - DNA, 19 bp, Homo sapiens
  siRNA target sequence for COPB (NM_016451.3,2583-2601).
ctacactaggggatctgaa

SEQ ID NO: 268887 - DNA, 19 bp, Homo sapiens
  siRNA target sequence for COPB (NM_016451.3,2586-2604).
cactaggggatctgaaact

SEQ ID NO: 268888 - DNA, 19 bp, Homo sapiens
  siRNA target sequence for COPB (NM_016451.3,2628-2646).
ctcttgctcctcatgactt

SEQ ID NO: 268889 - DNA, 19 bp, Homo sapiens
  siRNA target sequence for COPB (NM_016451.3,2636-2654).
cctcatgacttcgcaaata

SEQ ID NO: 268890 - DNA, 19 bp, Homo sapiens
  siRNA target sequence for COPB (NM_016451.3,2637-2655).
ctcatgacttcgcaaatat

SEQ ID NO: 268891 - DNA, 19 bp, Homo sapiens
  siRNA target sequence for COPB (NM_016451.3,2665-2683).
cgtcaaagtagcatcaaca

SEQ ID NO: 268892 - DNA, 19 bp, Homo sapiens
  siRNA target sequence for COPB (NM_016451.3,2668-2686).
caaagtagcatcaacagaa

SEQ ID NO: 268893 - DNA, 19 bp, Homo sapiens
  siRNA target sequence for COPB (NM_016451.3,2748-2766).
gtgtggttctcagtgatat

SEQ ID NO: 268894 - DNA, 19 bp, Homo sapiens
  siRNA target sequence for COPB (NM_016451.3,2753-2771).
gttctcagtgatattcaca

SEQ ID NO: 268895 - DNA, 19 bp, Homo sapiens
  siRNA target sequence for COPB (NM_016451.3,2827-2845).
gatgtgggccgaatttgaa

SEQ ID NO: 268896 - DNA, 19 bp, Homo sapiens
  siRNA target sequence for COPB (NM_016451.3,2869-2887).
caccaacatggttgattta

SEQ ID NO: 268897 - DNA, 19 bp, Homo sapiens
  siRNA target sequence for COPB (NM_016451.3,2872-2890).
caacatggttgatttaaat

SEQ ID NO: 268898 - DNA, 19 bp, Homo sapiens
  siRNA target sequence for COPB (NM_016451.3,2891-2909).
gactacttacagcacatat

SEQ ID NO: 268899 - DNA, 19 bp, Homo sapiens
  siRNA target sequence for COPB (NM_016451.3,2974-2992).
ggcagccaacctttatgct

SEQ ID NO: 268900 - DNA, 19 bp, Homo sapiens
  siRNA target sequence for COPB (NM_016451.3,3021-3039).
caaatgtcagcattgagaa

SEQ ID NO: 268901 - DNA, 19 bp, Homo sapiens
  siRNA target sequence for COPB (NM_016451.3,3030-3048).
gcattgagaagccaattca

SEQ ID NO: 268902 - DNA, 19 bp, Homo sapiens
  siRNA target sequence for COPB (NM_016451.3,3065-3083).
gctgttaccggccatataa

SEQ ID NO: 268903 - DNA, 19 bp, Homo sapiens
  siRNA target sequence for COPB (NM_016451.3,3068-3086).
gttaccggccatataagaa

SEQ ID NO: 268904 - DNA, 19 bp, Homo sapiens
  siRNA target sequence for COPB (NM_016451.3,3073-3091).
cggccatataagaattcgt

SEQ ID NO: 268905 - DNA, 19 bp, Homo sapiens
  siRNA target sequence for COPB (NM_016451.3,3111-3129).
ccttaagtcttggagataa

SEQ ID NO: 268906 - DNA, 19 bp, Homo sapiens
  siRNA target sequence for COPB (NM_016451.3,3112-3130).
cttaagtcttggagataaa

SEQ ID NO: 268907 - DNA, 19 bp, Homo sapiens
  siRNA target sequence for COPE (NM_007263.3,94-112).
gagctgttcgacgtaaaga

SEQ ID NO: 268908 - DNA, 19 bp, Homo sapiens
  siRNA target sequence for COPE (NM_007263.3,106-124).
gtaaagaacgccttctaca

SEQ ID NO: 268909 - DNA, 19 bp, Homo sapiens
  siRNA target sequence for COPE (NM_007263.3,131-149).
gctaccagcagtgcataaa

SEQ ID NO: 268910 - DNA, 19 bp, Homo sapiens
  siRNA target sequence for COPE (NM_007263.3,154-172).
gcgcagcgggtgaagctat

SEQ ID NO: 268911 - DNA, 19 bp, Homo sapiens
  siRNA target sequence for COPE (NM_007263.3,285-303).
ccaggccgtgcgcatgttt

SEQ ID NO: 268912 - DNA, 19 bp, Homo sapiens
  siRNA target sequence for COPE (NM_007263.3,763-781).
gaggcgctagacaaggata

SEQ ID NO: 268913 - DNA, 19 bp, Homo sapiens
  siRNA target sequence for COPG (NM_016128.3,185-203).
caggaggcccgtgtattta

SEQ ID NO: 268914 - DNA, 19 bp, Homo sapiens
  siRNA target sequence for COPG (NM_016128.3,187-205).
ggaggcccgtgtatttaat

SEQ ID NO: 268915 - DNA, 19 bp, Homo sapiens
  siRNA target sequence for COPG (NM_016128.3,190-208).
ggcccgtgtatttaatgaa

SEQ ID NO: 268916 - DNA, 19 bp, Homo sapiens
  siRNA target sequence for COPG (NM_016128.3,191-209).
gcccgtgtatttaatgaaa

SEQ ID NO: 268917 - DNA, 19 bp, Homo sapiens
  siRNA target sequence for COPG (NM_016128.3,193-211).
ccgtgtatttaatgaaact

SEQ ID NO: 268918 - DNA, 19 bp, Homo sapiens
  siRNA target sequence for COPG (NM_016128.3,247-265).
caagattctttatctcata

SEQ ID NO: 268919 - DNA, 19 bp, Homo sapiens
  siRNA target sequence for COPG (NM_016128.3,353-371).
cgtcggatgtgctacttga

SEQ ID NO: 268920 - DNA, 19 bp, Homo sapiens
  siRNA target sequence for COPG (NM_016128.3,413-431).
gtcaccagcagcctaacaa

SEQ ID NO: 268921 - DNA, 19 bp, Homo sapiens
  siRNA target sequence for COPG (NM_016128.3,415-433).
caccagcagcctaacaaaa

SEQ ID NO: 268922 - DNA, 19 bp, Homo sapiens
  siRNA target sequence for COPG (NM_016128.3,417-435).
ccagcagcctaacaaaaga

SEQ ID NO: 268923 - DNA, 19 bp, Homo sapiens
  siRNA target sequence for COPG (NM_016128.3,420-438).
gcagcctaacaaaagacat

SEQ ID NO: 268924 - DNA, 19 bp, Homo sapiens
  siRNA target sequence for COPG (NM_016128.3,482-500).
ctctgccagatcactgata

SEQ ID NO: 268925 - DNA, 19 bp, Homo sapiens
  siRNA target sequence for COPG (NM_016128.3,504-522).
ccatgctgcaggctattga

SEQ ID NO: 268926 - DNA, 19 bp, Homo sapiens
  siRNA target sequence for COPG (NM_016128.3,515-533).
gctattgagcgctacatga

SEQ ID NO: 268927 - DNA, 19 bp, Homo sapiens
  siRNA target sequence for COPG (NM_016128.3,516-534).
ctattgagcgctacatgaa

SEQ ID NO: 268928 - DNA, 19 bp, Homo sapiens
  siRNA target sequence for COPG (NM_016128.3,651-669).
cagcatccagtgataacat

SEQ ID NO: 268929 - DNA, 19 bp, Homo sapiens
  siRNA target sequence for COPG (NM_016128.3,700-718).
gtaccatgtgcgtaagaat

SEQ ID NO: 268930 - DNA, 19 bp, Homo sapiens
  siRNA target sequence for COPG (NM_016128.3,719-737).
gaccgcctagccgtcaata

SEQ ID NO: 268931 - DNA, 19 bp, Homo sapiens
  siRNA target sequence for COPG (NM_016128.3,722-740).
cgcctagccgtcaataaga

SEQ ID NO: 268932 - DNA, 19 bp, Homo sapiens
  siRNA target sequence for COPG (NM_016128.3,723-741).
gcctagccgtcaataagat

SEQ ID NO: 268933 - DNA, 19 bp, Homo sapiens
  siRNA target sequence for COPG (NM_016128.3,725-743).
ctagccgtcaataagatga

SEQ ID NO: 268934 - DNA, 19 bp, Homo sapiens
  siRNA target sequence for COPG (NM_016128.3,728-746).
gccgtcaataagatgatca

SEQ ID NO: 268935 - DNA, 19 bp, Homo sapiens
  siRNA target sequence for COPG (NM_016128.3,838-856).
ccgtgacagcccactgttt

SEQ ID NO: 268936 - DNA, 19 bp, Homo sapiens
  siRNA target sequence for COPG (NM_016128.3,842-860).
gacagcccactgtttgact

SEQ ID NO: 268937 - DNA, 19 bp, Homo sapiens
  siRNA target sequence for COPG (NM_016128.3,889-907).
cgagatggtggtgtatgaa

SEQ ID NO: 268938 - DNA, 19 bp, Homo sapiens
  siRNA target sequence for COPG (NM_016128.3,1019-1037).
gctgttcgtaccctcaata

SEQ ID NO: 268939 - DNA, 19 bp, Homo sapiens
  siRNA target sequence for COPG (NM_016128.3,1020-1038).
ctgttcgtaccctcaataa

SEQ ID NO: 268940 - DNA, 19 bp, Homo sapiens
  siRNA target sequence for COPG (NM_016128.3,1062-1080).
ctgtgacagcttgtaatct

SEQ ID NO: 268941 - DNA, 19 bp, Homo sapiens
  siRNA target sequence for COPG (NM_016128.3,1090-1108).
gaacctggtcacagattca

SEQ ID NO: 268942 - DNA, 19 bp, Homo sapiens
  siRNA target sequence for COPG (NM_016128.3,1167-1185).
gcatcgaccgcctcatgaa

SEQ ID NO: 268943 - DNA, 19 bp, Homo sapiens
  siRNA target sequence for COPG (NM_016128.3,1275-1293).
gcaaacacgccgtccttat

SEQ ID NO: 268944 - DNA, 19 bp, Homo sapiens
  siRNA target sequence for COPG (NM_016128.3,1280-1298).
cacgccgtccttatgaact

SEQ ID NO: 268945 - DNA, 19 bp, Homo sapiens
  siRNA target sequence for COPG (NM_016128.3,1322-1340).
gagggtggctttgagtata

SEQ ID NO: 268946 - DNA, 19 bp, Homo sapiens
  siRNA target sequence for COPG (NM_016128.3,1450-1468).
gctggccacccgtattcta

SEQ ID NO: 268947 - DNA, 19 bp, Homo sapiens
  siRNA target sequence for COPG (NM_016128.3,1453-1471).
ggccacccgtattctacat

SEQ ID NO: 268948 - DNA, 19 bp, Homo sapiens
  siRNA target sequence for COPG (NM_016128.3,1455-1473).
ccacccgtattctacatct

SEQ ID NO: 268949 - DNA, 19 bp, Homo sapiens
  siRNA target sequence for COPG (NM_016128.3,1497-1515).
ccaccaatccctcaaagta

SEQ ID NO: 268950 - DNA, 19 bp, Homo sapiens
  siRNA target sequence for COPG (NM_016128.3,1500-1518).
ccaatccctcaaagtacat

SEQ ID NO: 268951 - DNA, 19 bp, Homo sapiens
  siRNA target sequence for COPG (NM_016128.3,1513-1531).
gtacatccgcttcatctat

SEQ ID NO: 268952 - DNA, 19 bp, Homo sapiens
  siRNA target sequence for COPG (NM_016128.3,1679-1697).
cgagccaccttctacctaa

SEQ ID NO: 268953 - DNA, 19 bp, Homo sapiens
  siRNA target sequence for COPG (NM_016128.3,1683-1701).
ccaccttctacctaaatgt

SEQ ID NO: 268954 - DNA, 19 bp, Homo sapiens
  siRNA target sequence for COPG (NM_016128.3,1714-1732).
gcagaaggcccttaatgca

SEQ ID NO: 268955 - DNA, 19 bp, Homo sapiens
  siRNA target sequence for COPG (NM_016128.3,1722-1740).
cccttaatgcaggctatat

SEQ ID NO: 268956 - DNA, 19 bp, Homo sapiens
  siRNA target sequence for COPG (NM_016128.3,1795-1813).
cactctagaaccatcagaa

SEQ ID NO: 268957 - DNA, 19 bp, Homo sapiens
  siRNA target sequence for COPG (NM_016128.3,2025-2043).
cagagacggagtatgtcat

SEQ ID NO: 268958 - DNA, 19 bp, Homo sapiens
  siRNA target sequence for COPG (NM_016128.3,2376-2394).
ctgtagctgatcacattca

SEQ ID NO: 268959 - DNA, 19 bp, Homo sapiens
  siRNA target sequence for COPG (NM_016128.3,2382-2400).
ctgatcacattcaaaaggt

SEQ ID NO: 268960 - DNA, 19 bp, Homo sapiens
  siRNA target sequence for COPG2 (NM_012133.1,828-846).
gagctgcttgcgaaataaa

SEQ ID NO: 268961 - DNA, 19 bp, Homo sapiens
  siRNA target sequence for COPG2 (NM_012133.1,830-848).
gctgcttgcgaaataaaca

SEQ ID NO: 268962 - DNA, 19 bp, Homo sapiens
  siRNA target sequence for COPG2 (NM_012133.1,960-978).
gccagccttgagatatgca

SEQ ID NO: 268963 - DNA, 19 bp, Homo sapiens
  siRNA target sequence for COPG2 (NM_012133.1,980-998).
ctgtgaggaccttgaacaa

SEQ ID NO: 268964 - DNA, 19 bp, Homo sapiens
  siRNA target sequence for COPG2 (NM_012133.1,1031-1049).
cctgcaatctggacttaga

SEQ ID NO: 268965 - DNA, 19 bp, Homo sapiens
  siRNA target sequence for COPG2 (NM_012133.1,1032-1050).
ctgcaatctggacttagaa

SEQ ID NO: 268966 - DNA, 19 bp, Homo sapiens
  siRNA target sequence for COPG2 (NM_012133.1,1071-1089).
cagaagcattgctacctta

SEQ ID NO: 268967 - DNA, 19 bp, Homo sapiens
  siRNA target sequence for COPG2 (NM_012133.1,1127-1145).
gtgtggaccggctcatgaa

SEQ ID NO: 268968 - DNA, 19 bp, Homo sapiens
  siRNA target sequence for COPG2 (NM_012133.1,1192-1210).
gtggttgtacaggcaatta

SEQ ID NO: 268969 - DNA, 19 bp, Homo sapiens
  siRNA target sequence for COPG2 (NM_012133.1,1240-1258).
cacagtgtcatgatgactt

SEQ ID NO: 268970 - DNA, 19 bp, Homo sapiens
  siRNA target sequence for COPG2 (NM_012133.1,1305-1323).
ggccattgtggactgtata

SEQ ID NO: 268971 - DNA, 19 bp, Homo sapiens
  siRNA target sequence for COPG2 (NM_012133.1,1306-1324).
gccattgtggactgtataa

SEQ ID NO: 268972 - DNA, 19 bp, Homo sapiens
  siRNA target sequence for COPG2 (NM_012133.1,1307-1325).
ccattgtggactgtataat

SEQ ID NO: 268973 - DNA, 19 bp, Homo sapiens
  siRNA target sequence for COPG2 (NM_012133.1,1415-1433).
ctactaagattctacactt

SEQ ID NO: 268974 - DNA, 19 bp, Homo sapiens
  siRNA target sequence for COPG2 (NM_012133.1,1469-1487).
ccaaatatatccgttttat

SEQ ID NO: 268975 - DNA, 19 bp, Homo sapiens
  siRNA target sequence for COPG2 (NM_012133.1,1534-1552).
gtgagtgctttggctaaat

SEQ ID NO: 268976 - DNA, 19 bp, Homo sapiens
  siRNA target sequence for COPG2 (NM_012133.1,1583-1601).
gcatccttgtactcttaca

SEQ ID NO: 268977 - DNA, 19 bp, Homo sapiens
  siRNA target sequence for COPG2 (NM_012133.1,1594-1612).
ctcttacagaggtgtatga

SEQ ID NO: 268978 - DNA, 19 bp, Homo sapiens
  siRNA target sequence for COPG2 (NM_012133.1,1600-1618).
cagaggtgtatgatggata

SEQ ID NO: 268979 - DNA, 19 bp, Homo sapiens
  siRNA target sequence for COPG2 (NM_012133.1,1604-1622).
ggtgtatgatggatactga

SEQ ID NO: 268980 - DNA, 19 bp, Homo sapiens
  siRNA target sequence for COPG2 (NM_012133.1,1640-1658).
gagctaccttctatctgaa

SEQ ID NO: 268981 - DNA, 19 bp, Homo sapiens
  siRNA target sequence for COPG2 (NM_012133.1,1643-1661).
ctaccttctatctgaatgt

SEQ ID NO: 268982 - DNA, 19 bp, Homo sapiens
  siRNA target sequence for COPG2 (NM_012133.1,1671-1689).
gaggcagatggcactaaat

SEQ ID NO: 268983 - DNA, 19 bp, Homo sapiens
  siRNA target sequence for COPG2 (NM_012133.1,1755-1773).
cacgttggagccttcagaa

SEQ ID NO: 268984 - DNA, 19 bp, Homo sapiens
  siRNA target sequence for COPG2 (NM_012133.1,1777-1795).
ccgtttgacatgaaatcaa

SEQ ID NO: 268985 - DNA, 19 bp, Homo sapiens
  siRNA target sequence for COPG2 (NM_012133.1,1778-1796).
cgtttgacatgaaatcaat

SEQ ID NO: 268986 - DNA, 19 bp, Homo sapiens
  siRNA target sequence for COPG2 (NM_012133.1,1933-1951).
ggacccttgttcaagtctt

SEQ ID NO: 268987 - DNA, 19 bp, Homo sapiens
  siRNA target sequence for COPG2 (NM_012133.1,1997-2015).
gatgtatcaagcacatgtt

SEQ ID NO: 268988 - DNA, 19 bp, Homo sapiens
  siRNA target sequence for COPG2 (NM_012133.1,2094-2112).
ggagccatcagattcctat

SEQ ID NO: 268989 - DNA, 19 bp, Homo sapiens
  siRNA target sequence for COPZ1 (NM_016057.1,55-73).
ggaaccttccctgtatact

SEQ ID NO: 268990 - DNA, 19 bp, Homo sapiens
  siRNA target sequence for COPZ1 (NM_016057.1,85-103).
cctgattctggacaatgat

SEQ ID NO: 268991 - DNA, 19 bp, Homo sapiens
  siRNA target sequence for COPZ1 (NM_016057.1,110-128).
cgactttttgccaagtact

SEQ ID NO: 268992 - DNA, 19 bp, Homo sapiens
  siRNA target sequence for COPZ1 (NM_016057.1,111-129).
gactttttgccaagtacta

SEQ ID NO: 268993 - DNA, 19 bp, Homo sapiens
  siRNA target sequence for COPZ1 (NM_016057.1,194-212).
catcggactgacagtgaaa

SEQ ID NO: 268994 - DNA, 19 bp, Homo sapiens
  siRNA target sequence for COPZ1 (NM_016057.1,229-247).
cctgacagtggtatacaaa

SEQ ID NO: 268995 - DNA, 19 bp, Homo sapiens
  siRNA target sequence for COPZ1 (NM_016057.1,238-256).
ggtatacaaaagcagtata

SEQ ID NO: 268996 - DNA, 19 bp, Homo sapiens
  siRNA target sequence for COPZ1 (NM_016057.1,249-267).
gcagtatagatctctattt

SEQ ID NO: 268997 - DNA, 19 bp, Homo sapiens
  siRNA target sequence for COPZ1 (NM_016057.1,252-270).
gtatagatctctatttcta

SEQ ID NO: 268998 - DNA, 19 bp, Homo sapiens
  siRNA target sequence for COPZ1 (NM_016057.1,279-297).
gcagctcctatgaaaatga

SEQ ID NO: 268999 - DNA, 19 bp, Homo sapiens
  siRNA target sequence for COPZ1 (NM_016057.1,464-482).
gtacaccgggtggcattaa

SEQ ID NO: 269000 - DNA, 19 bp, Homo sapiens
  siRNA target sequence for COPZ2 (NM_016429.1,185-203).
cggctgctggccaagtatt

SEQ ID NO: 269001 - DNA, 19 bp, Homo sapiens
  siRNA target sequence for COPZ2 (NM_016429.1,271-289).
ccggactgagagtgagatt

SEQ ID NO: 269002 - DNA, 19 bp, Homo sapiens
  siRNA target sequence for COPZ2 (NM_016429.1,303-321).
gtatgaccatcgtctacaa

SEQ ID NO: 269003 - DNA, 19 bp, Homo sapiens
  siRNA target sequence for COPZ2 (NM_016429.1,327-345).
gcattgacctcttcctata

SEQ ID NO: 269004 - DNA, 19 bp, Homo sapiens
  siRNA target sequence for COPZ2 (NM_016429.1,354-372).
gctcatcctacgagaatga

SEQ ID NO: 269005 - DNA, 19 bp, Homo sapiens
  siRNA target sequence for COPZ2 (NM_016429.1,409-427).
gtctctgaaccacatgtta

SEQ ID NO: 269006 - DNA, 19 bp, Homo sapiens
  siRNA target sequence for COPZ2 (NM_016429.1,413-431).
ctgaaccacatgttaagga

SEQ ID NO: 269007 - DNA, 19 bp, Homo sapiens
  siRNA target sequence for COPZ2 (NM_016429.1,607-625).
gtctgccaaggaacaaatt

SEQ ID NO: 269008 - DNA, 19 bp, Homo sapiens
  siRNA target sequence for EIF4ENIF1 (NM_019843.2,63-81).
gaagtatgggtgaaacaga

SEQ ID NO: 269009 - DNA, 19 bp, Homo sapiens
  siRNA target sequence for EIF4ENIF1 (NM_019843.2,129-147).
gcccccatcgctatacaaa

SEQ ID NO: 269010 - DNA, 19 bp, Homo sapiens
  siRNA target sequence for EIF4ENIF1 (NM_019843.2,133-151).
ccatcgctatacaaaagaa

SEQ ID NO: 269011 - DNA, 19 bp, Homo sapiens
  siRNA target sequence for EIF4ENIF1 (NM_019843.2,331-349).
cctggtgcgcaggatagta

SEQ ID NO: 269012 - DNA, 19 bp, Homo sapiens
  siRNA target sequence for EIF4ENIF1 (NM_019843.2,334-352).
ggtgcgcaggatagtagat

SEQ ID NO: 269013 - DNA, 19 bp, Homo sapiens
  siRNA target sequence for EIF4ENIF1 (NM_019843.2,354-372).
cacgagagcgtgtgaaaga

SEQ ID NO: 269014 - DNA, 19 bp, Homo sapiens
  siRNA target sequence for EIF4ENIF1 (NM_019843.2,454-472).
gcgctcaggaagtccatta

SEQ ID NO: 269015 - DNA, 19 bp, Homo sapiens
  siRNA target sequence for EIF4ENIF1 (NM_019843.2,499-517).
gcttggtggacgtaggatt

SEQ ID NO: 269016 - DNA, 19 bp, Homo sapiens
  siRNA target sequence for EIF4ENIF1 (NM_019843.2,520-538).
cagtgggaggataatctct

SEQ ID NO: 269017 - DNA, 19 bp, Homo sapiens
  siRNA target sequence for EIF4ENIF1 (NM_019843.2,537-555).
ctgcccggacctttgagaa

SEQ ID NO: 269018 - DNA, 19 bp, Homo sapiens
  siRNA target sequence for EIF4ENIF1 (NM_019843.2,671-689).
gagcgtagaagaaatgatt

SEQ ID NO: 269019 - DNA, 19 bp, Homo sapiens
  siRNA target sequence for EIF4ENIF1 (NM_019843.2,728-746).
cccacaagtcagtctgaaa

SEQ ID NO: 269020 - DNA, 19 bp, Homo sapiens
  siRNA target sequence for EIF4ENIF1 (NM_019843.2,751-769).
cgaactgactggctttgat

SEQ ID NO: 269021 - DNA, 19 bp, Homo sapiens
  siRNA target sequence for EIF4ENIF1 (NM_019843.2,755-773).
ctgactggctttgatgata

SEQ ID NO: 269022 - DNA, 19 bp, Homo sapiens
  siRNA target sequence for EIF4ENIF1 (NM_019843.2,763-781).
ctttgatgataagatacta

SEQ ID NO: 269023 - DNA, 19 bp, Homo sapiens
  siRNA target sequence for EIF4ENIF1 (NM_019843.2,977-995).
gagttctttaaccttgata

SEQ ID NO: 269024 - DNA, 19 bp, Homo sapiens
  siRNA target sequence for EIF4ENIF1 (NM_019843.2,1005-1023).
gcttggcttcgatgataga

SEQ ID NO: 269025 - DNA, 19 bp, Homo sapiens
  siRNA target sequence for EIF4ENIF1 (NM_019843.2,1006-1024).
cttggcttcgatgatagaa

SEQ ID NO: 269026 - DNA, 19 bp, Homo sapiens
  siRNA target sequence for EIF4ENIF1 (NM_019843.2,1009-1027).
ggcttcgatgatagaagat

SEQ ID NO: 269027 - DNA, 19 bp, Homo sapiens
  siRNA target sequence for EIF4ENIF1 (NM_019843.2,1011-1029).
cttcgatgatagaagatgt

SEQ ID NO: 269028 - DNA, 19 bp, Homo sapiens
  siRNA target sequence for EIF4ENIF1 (NM_019843.2,1179-1197).
gacagaactcggggaatta

SEQ ID NO: 269029 - DNA, 19 bp, Homo sapiens
  siRNA target sequence for EIF4ENIF1 (NM_019843.2,1181-1199).
cagaactcggggaattact

SEQ ID NO: 269030 - DNA, 19 bp, Homo sapiens
  siRNA target sequence for EIF4ENIF1 (NM_019843.2,1183-1201).
gaactcggggaattacttt

SEQ ID NO: 269031 - DNA, 19 bp, Homo sapiens
  siRNA target sequence for EIF4ENIF1 (NM_019843.2,1338-1356).
caggggttgtgctttcagt

SEQ ID NO: 269032 - DNA, 19 bp, Homo sapiens
  siRNA target sequence for EIF4ENIF1 (NM_019843.2,1394-1412).
gaccagcaagtgaagaatt

SEQ ID NO: 269033 - DNA, 19 bp, Homo sapiens
  siRNA target sequence for EIF4ENIF1 (NM_019843.2,1446-1464).
ccttgagtgccgtaaccaa

SEQ ID NO: 269034 - DNA, 19 bp, Homo sapiens
  siRNA target sequence for EIF4ENIF1 (NM_019843.2,1450-1468).
gagtgccgtaaccaacaat

SEQ ID NO: 269035 - DNA, 19 bp, Homo sapiens
  siRNA target sequence for EIF4ENIF1 (NM_019843.2,1461-1479).
ccaacaatcgacaactgaa

SEQ ID NO: 269036 - DNA, 19 bp, Homo sapiens
  siRNA target sequence for EIF4ENIF1 (NM_019843.2,1465-1483).
caatcgacaactgaagaaa

SEQ ID NO: 269037 - DNA, 19 bp, Homo sapiens
  siRNA target sequence for EIF4ENIF1 (NM_019843.2,1490-1508).
gacatgactgcgttcaaca

SEQ ID NO: 269038 - DNA, 19 bp, Homo sapiens
  siRNA target sequence for EIF4ENIF1 (NM_019843.2,1559-1577).
gtcagccgaaaccttgaaa

SEQ ID NO: 269039 - DNA, 19 bp, Homo sapiens
  siRNA target sequence for EIF4ENIF1 (NM_019843.2,1585-1603).
gatgtcccctgctgagatt

SEQ ID NO: 269040 - DNA, 19 bp, Homo sapiens
  siRNA target sequence for EIF4ENIF1 (NM_019843.2,1608-1626).
gccagcctgtccctaagaa

SEQ ID NO: 269041 - DNA, 19 bp, Homo sapiens
  siRNA target sequence for EIF4ENIF1 (NM_019843.2,1699-1717).
gagcttggagcctacaaca

SEQ ID NO: 269042 - DNA, 19 bp, Homo sapiens
  siRNA target sequence for EIF4ENIF1 (NM_019843.2,1702-1720).
cttggagcctacaacatct

SEQ ID NO: 269043 - DNA, 19 bp, Homo sapiens
  siRNA target sequence for EIF4ENIF1 (NM_019843.2,1705-1723).
ggagcctacaacatcttta

SEQ ID NO: 269044 - DNA, 19 bp, Homo sapiens
  siRNA target sequence for EIF4ENIF1 (NM_019843.2,1753-1771).
gtcacaggtgtttcaaact

SEQ ID NO: 269045 - DNA, 19 bp, Homo sapiens
  siRNA target sequence for EIF4ENIF1 (NM_019843.2,1789-1807).
ctaccttcgcccaagaata

SEQ ID NO: 269046 - DNA, 19 bp, Homo sapiens
  siRNA target sequence for EIF4ENIF1 (NM_019843.2,1792-1810).
ccttcgcccaagaatacca

SEQ ID NO: 269047 - DNA, 19 bp, Homo sapiens
  siRNA target sequence for EIF4ENIF1 (NM_019843.2,1793-1811).
cttcgcccaagaataccat

SEQ ID NO: 269048 - DNA, 19 bp, Homo sapiens
  siRNA target sequence for EIF4ENIF1 (NM_019843.2,1918-1936).
gcaacaggcagctttagaa

SEQ ID NO: 269049 - DNA, 19 bp, Homo sapiens
  siRNA target sequence for EIF4ENIF1 (NM_019843.2,1964-1982).
gtacaggcagcaaacttct

SEQ ID NO: 269050 - DNA, 19 bp, Homo sapiens
  siRNA target sequence for EIF4ENIF1 (NM_019843.2,2148-2166).
cctcagtgattcgtaagat

SEQ ID NO: 269051 - DNA, 19 bp, Homo sapiens
  siRNA target sequence for EIF4ENIF1 (NM_019843.2,2151-2169).
cagtgattcgtaagatgta

SEQ ID NO: 269052 - DNA, 19 bp, Homo sapiens
  siRNA target sequence for EIF4ENIF1 (NM_019843.2,2214-2232).
cagctcttggtgacagtaa

SEQ ID NO: 269053 - DNA, 19 bp, Homo sapiens
  siRNA target sequence for EIF4ENIF1 (NM_019843.2,2396-2414).
gattatcgacctaaagcaa

SEQ ID NO: 269054 - DNA, 19 bp, Homo sapiens
  siRNA target sequence for EIF4ENIF1 (NM_019843.2,2494-2512).
cccccatgtccctatggtt

SEQ ID NO: 269055 - DNA, 19 bp, Homo sapiens
  siRNA target sequence for EIF4ENIF1 (NM_019843.2,2495-2513).
ccccatgtccctatggtta

SEQ ID NO: 269056 - DNA, 19 bp, Homo sapiens
  siRNA target sequence for EIF4ENIF1 (NM_019843.2,2554-2572).
gctggcccagggagtacat

SEQ ID NO: 269057 - DNA, 19 bp, Homo sapiens
  siRNA target sequence for EIF4ENIF1 (NM_019843.2,2618-2636).
gggatggacttgagtcatt

SEQ ID NO: 269058 - DNA, 19 bp, Homo sapiens
  siRNA target sequence for EIF4ENIF1 (NM_019843.2,2619-2637).
ggatggacttgagtcattt

SEQ ID NO: 269059 - DNA, 19 bp, Homo sapiens
  siRNA target sequence for EIF4ENIF1 (NM_019843.2,2620-2638).
gatggacttgagtcattta

SEQ ID NO: 269060 - DNA, 19 bp, Homo sapiens
  siRNA target sequence for EIF4ENIF1 (NM_019843.2,2668-2686).
gcccttttaccctttacct

SEQ ID NO: 269061 - DNA, 19 bp, Homo sapiens
  siRNA target sequence for EIF4ENIF1 (NM_019843.2,2911-2929).
gggccttgccaaatggttt

SEQ ID NO: 269062 - DNA, 19 bp, Homo sapiens
  siRNA target sequence for EIF4ENIF1 (NM_019843.2,2982-3000).
gtgtagatgaattggaata

SEQ ID NO: 269063 - DNA, 19 bp, Homo sapiens
  siRNA target sequence for EPIM (NM_001980.2,191-209).
gacggcgtgtaggaagaat

SEQ ID NO: 269064 - DNA, 19 bp, Homo sapiens
  siRNA target sequence for EPIM (NM_001980.2,193-211).
cggcgtgtaggaagaatga

SEQ ID NO: 269065 - DNA, 19 bp, Homo sapiens
  siRNA target sequence for EPIM (NM_001980.2,194-212).
ggcgtgtaggaagaatgat

SEQ ID NO: 269066 - DNA, 19 bp, Homo sapiens
  siRNA target sequence for EPIM (NM_001980.2,196-214).
cgtgtaggaagaatgatga

SEQ ID NO: 269067 - DNA, 19 bp, Homo sapiens
  siRNA target sequence for EPIM (NM_001980.2,243-261).
gatcatttcatggatgatt

SEQ ID NO: 269068 - DNA, 19 bp, Homo sapiens
  siRNA target sequence for EPIM (NM_001980.2,278-296).
ggagattagaaacagtatt

SEQ ID NO: 269069 - DNA, 19 bp, Homo sapiens
  siRNA target sequence for EPIM (NM_001980.2,355-373).
caccaaacccggaaggaaa

SEQ ID NO: 269070 - DNA, 19 bp, Homo sapiens
  siRNA target sequence for EPIM (NM_001980.2,436-454).
ccaagttaaaggctattga

SEQ ID NO: 269071 - DNA, 19 bp, Homo sapiens
  siRNA target sequence for EPIM (NM_001980.2,437-455).
caagttaaaggctattgaa

SEQ ID NO: 269072 - DNA, 19 bp, Homo sapiens
  siRNA target sequence for EPIM (NM_001980.2,440-458).
gttaaaggctattgaacaa

SEQ ID NO: 269073 - DNA, 19 bp, Homo sapiens
  siRNA target sequence for EPIM (NM_001980.2,446-464).
ggctattgaacaaagtttt

SEQ ID NO: 269074 - DNA, 19 bp, Homo sapiens
  siRNA target sequence for EPIM (NM_001980.2,448-466).
ctattgaacaaagttttga

SEQ ID NO: 269075 - DNA, 19 bp, Homo sapiens
  siRNA target sequence for EPIM (NM_001980.2,495-513).
gtggatcttcggatacgaa

SEQ ID NO: 269076 - DNA, 19 bp, Homo sapiens
  siRNA target sequence for EPIM (NM_001980.2,527-545).
ggtgctgtctcggaagttt

SEQ ID NO: 269077 - DNA, 19 bp, Homo sapiens
  siRNA target sequence for EPIM (NM_001980.2,553-571).
ccatggcggagtacaatga

SEQ ID NO: 269078 - DNA, 19 bp, Homo sapiens
  siRNA target sequence for EPIM (NM_001980.2,614-632).
gcgccagctggagataact

SEQ ID NO: 269079 - DNA, 19 bp, Homo sapiens
  siRNA target sequence for EPIM (NM_001980.2,692-710).
cttcacttccgacattata

SEQ ID NO: 269080 - DNA, 19 bp, Homo sapiens
  siRNA target sequence for EPIM (NM_001980.2,695-713).
cacttccgacattatatca

SEQ ID NO: 269081 - DNA, 19 bp, Homo sapiens
  siRNA target sequence for EPIM (NM_001980.2,697-715).
cttccgacattatatcaga

SEQ ID NO: 269082 - DNA, 19 bp, Homo sapiens
  siRNA target sequence for EPIM (NM_001980.2,701-719).
cgacattatatcagattca

SEQ ID NO: 269083 - DNA, 19 bp, Homo sapiens
  siRNA target sequence for EPIM (NM_001980.2,704-722).
cattatatcagattcacaa

SEQ ID NO: 269084 - DNA, 19 bp, Homo sapiens
  siRNA target sequence for EPIM (NM_001980.2,727-745).
ctagacaagctctcaatga

SEQ ID NO: 269085 - DNA, 19 bp, Homo sapiens
  siRNA target sequence for EPIM (NM_001980.2,754-772).
cacgtcacaaggacatcat

SEQ ID NO: 269086 - DNA, 19 bp, Homo sapiens
  siRNA target sequence for EPIM (NM_001980.2,756-774).
cgtcacaaggacatcatga

SEQ ID NO: 269087 - DNA, 19 bp, Homo sapiens
  siRNA target sequence for EPIM (NM_001980.2,812-830).
catggacatggctatgttt

SEQ ID NO: 269088 - DNA, 19 bp, Homo sapiens
  siRNA target sequence for EPIM (NM_001980.2,834-852).
gagactcagggtgaaatga

SEQ ID NO: 269089 - DNA, 19 bp, Homo sapiens
  siRNA target sequence for EPIM (NM_001980.2,883-901).
ccacagactatgtagaaca

SEQ ID NO: 269090 - DNA, 19 bp, Homo sapiens
  siRNA target sequence for EPIM (NM_001980.2,995-1013).
gatccttggaattatccta

SEQ ID NO: 269091 - DNA, 19 bp, Homo sapiens
  siRNA target sequence for EPIM (NM_194356.1,993-1011).
gccataatcgctctaatta

SEQ ID NO: 269092 - DNA, 19 bp, Homo sapiens
  siRNA target sequence for EPIM (NM_194356.1,994-1012).
ccataatcgctctaattat

SEQ ID NO: 269093 - DNA, 19 bp, Homo sapiens
  siRNA target sequence for EXO70 (NM_015219.1,109-127).
gaccagctcactaagaaca

SEQ ID NO: 269094 - DNA, 19 bp, Homo sapiens
  siRNA target sequence for EXO70 (NM_015219.1,126-144).
catggtgtctatcttatca

SEQ ID NO: 269095 - DNA, 19 bp, Homo sapiens
  siRNA target sequence for EXO70 (NM_015219.1,132-150).
gtctatcttatcatccttt

SEQ ID NO: 269096 - DNA, 19 bp, Homo sapiens
  siRNA target sequence for EXO70 (NM_015219.1,401-419).
gcccggaactcaacaaagt

SEQ ID NO: 269097 - DNA, 19 bp, Homo sapiens
  siRNA target sequence for EXO70 (NM_015219.1,403-421).
ccggaactcaacaaagtga

SEQ ID NO: 269098 - DNA, 19 bp, Homo sapiens
  siRNA target sequence for EXO70 (NM_015219.1,404-422).
cggaactcaacaaagtgaa

SEQ ID NO: 269099 - DNA, 19 bp, Homo sapiens
  siRNA target sequence for EXO70 (NM_015219.1,584-602).
gcgtgctccaggatgtcat

SEQ ID NO: 269100 - DNA, 19 bp, Homo sapiens
  siRNA target sequence for EXO70 (NM_015219.1,612-630).
ccgctggctggtggaatat

SEQ ID NO: 269101 - DNA, 19 bp, Homo sapiens
  siRNA target sequence for EXO70 (NM_015219.1,631-649).
ggccgcaaccaagatttca

SEQ ID NO: 269102 - DNA, 19 bp, Homo sapiens
  siRNA target sequence for EXO70 (NM_015219.1,632-650).
gccgcaaccaagatttcat

SEQ ID NO: 269103 - DNA, 19 bp, Homo sapiens
  siRNA target sequence for EXO70 (NM_015219.1,681-699).
gctggaccgctccatcaaa

SEQ ID NO: 269104 - DNA, 19 bp, Homo sapiens
  siRNA target sequence for EXO70 (NM_015219.1,938-956).
ccttcgactccctgataca

SEQ ID NO: 269105 - DNA, 19 bp, Homo sapiens
  siRNA target sequence for EXO70 (NM_015219.1,1077-1095).
gcagaccaagcctgagttt

SEQ ID NO: 269106 - DNA, 19 bp, Homo sapiens
  siRNA target sequence for EXO70 (NM_015219.1,1189-1207).
gacttcgcagacaacatca

SEQ ID NO: 269107 - DNA, 19 bp, Homo sapiens
  siRNA target sequence for EXO70 (NM_015219.1,1194-1212).
cgcagacaacatcaagaat

SEQ ID NO: 269108 - DNA, 19 bp, Homo sapiens
  siRNA target sequence for EXO70 (NM_015219.1,1216-1234).
ccggacaaggagtacaaca

SEQ ID NO: 269109 - DNA, 19 bp, Homo sapiens
  siRNA target sequence for EXO70 (NM_015219.1,1384-1402).
cggctgctaagcacctata

SEQ ID NO: 269110 - DNA, 19 bp, Homo sapiens
  siRNA target sequence for EXO70 (NM_015219.1,1385-1403).
ggctgctaagcacctatat

SEQ ID NO: 269111 - DNA, 19 bp, Homo sapiens
  siRNA target sequence for EXO70 (NM_015219.1,1387-1405).
ctgctaagcacctatatct

SEQ ID NO: 269112 - DNA, 19 bp, Homo sapiens
  siRNA target sequence for EXO70 (NM_015219.1,1417-1435).
ggcaacctgcagttgaact

SEQ ID NO: 269113 - DNA, 19 bp, Homo sapiens
  siRNA target sequence for EXO70 (NM_015219.1,1418-1436).
gcaacctgcagttgaactt

SEQ ID NO: 269114 - DNA, 19 bp, Homo sapiens
  siRNA target sequence for EXO70 (NM_015219.1,1625-1643).
ggttaaaggtgactgatta

SEQ ID NO: 269115 - DNA, 19 bp, Homo sapiens
  siRNA target sequence for EXO70 (NM_015219.1,1644-1662).
catcgcagagaagaatcta

SEQ ID NO: 269116 - DNA, 19 bp, Homo sapiens
  siRNA target sequence for EXO70 (NM_015219.1,1719-1737).
gcgttttaagggcttcaat

SEQ ID NO: 269117 - DNA, 19 bp, Homo sapiens
  siRNA target sequence for EXO70 (NM_015219.1,1721-1739).
gttttaagggcttcaatga

SEQ ID NO: 269118 - DNA, 19 bp, Homo sapiens
  siRNA target sequence for EXO70 (NM_015219.1,1817-1835).
cccagaagaccattgtcaa

SEQ ID NO: 269119 - DNA, 19 bp, Homo sapiens
  siRNA target sequence for EXO70 (NM_015219.1,1892-1910).
cggagaagtacatcaagta

SEQ ID NO: 269120 - DNA, 19 bp, Homo sapiens
  siRNA target sequence for GGA1 (NM_013365.2,43-61).
ctggaggcgcgaatcaata

SEQ ID NO: 269121 - DNA, 19 bp, Homo sapiens
  siRNA target sequence for GGA1 (NM_013365.2,45-63).
ggaggcgcgaatcaataga

SEQ ID NO: 269122 - DNA, 19 bp, Homo sapiens
  siRNA target sequence for GGA1 (NM_013365.2,65-83).
ccacgaaccccctgaacaa

SEQ ID NO: 269123 - DNA, 19 bp, Homo sapiens
  siRNA target sequence for GGA1 (NM_013365.2,271-289).
ggcaagttccgctttctca

SEQ ID NO: 269124 - DNA, 19 bp, Homo sapiens
  siRNA target sequence for GGA1 (NM_013365.2,272-290).
gcaagttccgctttctcaa

SEQ ID NO: 269125 - DNA, 19 bp, Homo sapiens
  siRNA target sequence for GGA1 (NM_013365.2,303-321).
ggtcgtgtctcccaagtat

SEQ ID NO: 269126 - DNA, 19 bp, Homo sapiens
  siRNA target sequence for GGA1 (NM_013365.2,391-409).
ctgcccgaggaggtgaaaa

SEQ ID NO: 269127 - DNA, 19 bp, Homo sapiens
  siRNA target sequence for GGA1 (NM_013365.2,415-433).
gaggcctaccagatgctaa

SEQ ID NO: 269128 - DNA, 19 bp, Homo sapiens
  siRNA target sequence for GGA1 (NM_013365.2,497-515).
ctccacggccgaagaatgt

SEQ ID NO: 269129 - DNA, 19 bp, Homo sapiens
  siRNA target sequence for GGA1 (NM_013365.2,500-518).
cacggccgaagaatgtgat

SEQ ID NO: 269130 - DNA, 19 bp, Homo sapiens
  siRNA target sequence for GGA1 (NM_013365.2,503-521).
ggccgaagaatgtgatctt

SEQ ID NO: 269131 - DNA, 19 bp, Homo sapiens
  siRNA target sequence for GGA1 (NM_013365.2,673-691).
gaggtgaacaacaatgtga

SEQ ID NO: 269132 - DNA, 19 bp, Homo sapiens
  siRNA target sequence for GGA1 (NM_013365.2,1378-1396).
ctccgggacctgcagaata

SEQ ID NO: 269133 - DNA, 19 bp, Homo sapiens
  siRNA target sequence for GGA1 (NM_013365.2,1521-1539).
gcccctggagtccatcaaa

SEQ ID NO: 269134 - DNA, 19 bp, Homo sapiens
  siRNA target sequence for GGA1 (NM_013365.2,1551-1569).
cctgcccgtgactgtgtat

SEQ ID NO: 269135 - DNA, 19 bp, Homo sapiens
  siRNA target sequence for GGA1 (NM_013365.2,1700-1718).
cagctgtccccaaggttat

SEQ ID NO: 269136 - DNA, 19 bp, Homo sapiens
  siRNA target sequence for GGA1 (NM_013365.2,1702-1720).
gctgtccccaaggttatga

SEQ ID NO: 269137 - DNA, 19 bp, Homo sapiens
  siRNA target sequence for GOSR2 (NM_004287.2,388-406).
ctgacaccaccataccaat

SEQ ID NO: 269138 - DNA, 19 bp, Homo sapiens
  siRNA target sequence for GOSR2 (NM_004287.2,408-426).
gacgaatcactgcagttta

SEQ ID NO: 269139 - DNA, 19 bp, Homo sapiens
  siRNA target sequence for GOSR2 (NM_004287.2,433-451).
ccctccagaaagttcacaa

SEQ ID NO: 269140 - DNA, 19 bp, Homo sapiens
  siRNA target sequence for GOSR2 (NM_004287.2,458-476).
ggatgacctcattttagat

SEQ ID NO: 269141 - DNA, 19 bp, Homo sapiens
  siRNA target sequence for IPO11 (NM_016338.3,183-201).
gtgccagcactgttgttct

SEQ ID NO: 269142 - DNA, 19 bp, Homo sapiens
  siRNA target sequence for IPO11 (NM_016338.3,194-212).
gttgttcttcaggtgttaa

SEQ ID NO: 269143 - DNA, 19 bp, Homo sapiens
  siRNA target sequence for IPO11 (NM_016338.3,227-245).
caggatactgctgtgttaa

SEQ ID NO: 269144 - DNA, 19 bp, Homo sapiens
  siRNA target sequence for IPO11 (NM_016338.3,277-295).
gacacagccaggtttctat

SEQ ID NO: 269145 - DNA, 19 bp, Homo sapiens
  siRNA target sequence for IPO11 (NM_016338.3,318-336).
ccaaccacactttggatat

SEQ ID NO: 269146 - DNA, 19 bp, Homo sapiens
  siRNA target sequence for IPO11 (NM_016338.3,319-337).
caaccacactttggatata

SEQ ID NO: 269147 - DNA, 19 bp, Homo sapiens
  siRNA target sequence for IPO11 (NM_016338.3,457-475).
caacttcaatgaaccaata

SEQ ID NO: 269148 - DNA, 19 bp, Homo sapiens
  siRNA target sequence for IPO11 (NM_016338.3,537-555).
gacagtggcctgaactaat

SEQ ID NO: 269149 - DNA, 19 bp, Homo sapiens
  siRNA target sequence for IPO11 (NM_016338.3,561-579).
ctcttatagagtctgttaa

SEQ ID NO: 269150 - DNA, 19 bp, Homo sapiens
  siRNA target sequence for IPO11 (NM_016338.3,634-652).
caagacactggcatctaaa

SEQ ID NO: 269151 - DNA, 19 bp, Homo sapiens
  siRNA target sequence for IPO11 (NM_016338.3,637-655).
gacactggcatctaaacga

SEQ ID NO: 269152 - DNA, 19 bp, Homo sapiens
  siRNA target sequence for IPO11 (NM_016338.3,653-671).
cgacttgctgctgatagaa

SEQ ID NO: 269153 - DNA, 19 bp, Homo sapiens
  siRNA target sequence for IPO11 (NM_016338.3,683-701).
gatttagcttctggaattt

SEQ ID NO: 269154 - DNA, 19 bp, Homo sapiens
  siRNA target sequence for IPO11 (NM_016338.3,794-812).
gaacgaacactgctatcat

SEQ ID NO: 269155 - DNA, 19 bp, Homo sapiens
  siRNA target sequence for IPO11 (NM_016338.3,797-815).
cgaacactgctatcattga

SEQ ID NO: 269156 - DNA, 19 bp, Homo sapiens
  siRNA target sequence for IPO11 (NM_016338.3,801-819).
cactgctatcattgaaagt

SEQ ID NO: 269157 - DNA, 19 bp, Homo sapiens
  siRNA target sequence for IPO11 (NM_016338.3,820-838).
gctgcgtaagttaactgtt

SEQ ID NO: 269158 - DNA, 19 bp, Homo sapiens
  siRNA target sequence for IPO11 (NM_016338.3,821-839).
ctgcgtaagttaactgtta

SEQ ID NO: 269159 - DNA, 19 bp, Homo sapiens
  siRNA target sequence for IPO11 (NM_016338.3,843-861).
gatttgtggaacctcataa

SEQ ID NO: 269160 - DNA, 19 bp, Homo sapiens
  siRNA target sequence for IPO11 (NM_016338.3,891-909).
gaatatttgaacgtctaaa

SEQ ID NO: 269161 - DNA, 19 bp, Homo sapiens
  siRNA target sequence for IPO11 (NM_016338.3,917-935).
ctggaatgcagtagaagta

SEQ ID NO: 269162 - DNA, 19 bp, Homo sapiens
  siRNA target sequence for IPO11 (NM_016338.3,933-951).
gtataggtacagataatgt

SEQ ID NO: 269163 - DNA, 19 bp, Homo sapiens
  siRNA target sequence for IPO11 (NM_016338.3,944-962).
gataatgtgtgtagagata

SEQ ID NO: 269164 - DNA, 19 bp, Homo sapiens
  siRNA target sequence for IPO11 (NM_016338.3,1018-1036).
gcatcctttttcatttact

SEQ ID NO: 269165 - DNA, 19 bp, Homo sapiens
  siRNA target sequence for IPO11 (NM_016338.3,1088-1106).
gttggtgaaggcgttacat

SEQ ID NO: 269166 - DNA, 19 bp, Homo sapiens
  siRNA target sequence for IPO11 (NM_016338.3,1098-1116).
gcgttacatttgaacgatt

SEQ ID NO: 269167 - DNA, 19 bp, Homo sapiens
  siRNA target sequence for IPO11 (NM_016338.3,1117-1135).
cattgtccaatgtatgaat

SEQ ID NO: 269168 - DNA, 19 bp, Homo sapiens
  siRNA target sequence for IPO11 (NM_016338.3,1123-1141).
ccaatgtatgaatcttatt

SEQ ID NO: 269169 - DNA, 19 bp, Homo sapiens
  siRNA target sequence for IPO11 (NM_016338.3,1136-1154).
cttattaagatgattgtca

SEQ ID NO: 269170 - DNA, 19 bp, Homo sapiens
  siRNA target sequence for IPO11 (NM_016338.3,1144-1162).
gatgattgtcaaaaattat

SEQ ID NO: 269171 - DNA, 19 bp, Homo sapiens
  siRNA target sequence for IPO11 (NM_016338.3,1163-1181).
gcttataagccatccaaaa

SEQ ID NO: 269172 - DNA, 19 bp, Homo sapiens
  siRNA target sequence for IPO11 (NM_016338.3,1164-1182).
cttataagccatccaaaaa

SEQ ID NO: 269173 - DNA, 19 bp, Homo sapiens
  siRNA target sequence for IPO11 (NM_016338.3,1208-1226).
cttgaagcccataagatta

SEQ ID NO: 269174 - DNA, 19 bp, Homo sapiens
  siRNA target sequence for IPO11 (NM_016338.3,1228-1246).
gatggcattcttcacatat

SEQ ID NO: 269175 - DNA, 19 bp, Homo sapiens
  siRNA target sequence for IPO11 (NM_016338.3,1232-1250).
gcattcttcacatatccta

SEQ ID NO: 269176 - DNA, 19 bp, Homo sapiens
  siRNA target sequence for IPO11 (NM_016338.3,1240-1258).
cacatatcctactttgaca

SEQ ID NO: 269177 - DNA, 19 bp, Homo sapiens
  siRNA target sequence for IPO11 (NM_016338.3,1272-1290).
gattagtctctcattattt

SEQ ID NO: 269178 - DNA, 19 bp, Homo sapiens
  siRNA target sequence for IPO11 (NM_016338.3,1384-1402).
gaggccatgcactgaagta

SEQ ID NO: 269179 - DNA, 19 bp, Homo sapiens
  siRNA target sequence for IPO11 (NM_016338.3,1435-1453).
gactcttactcctgtactt

SEQ ID NO: 269180 - DNA, 19 bp, Homo sapiens
  siRNA target sequence for IPO11 (NM_016338.3,1437-1455).
ctcttactcctgtacttct

SEQ ID NO: 269181 - DNA, 19 bp, Homo sapiens
  siRNA target sequence for IPO11 (NM_016338.3,1496-1514).
gatatgaatgcactgttaa

SEQ ID NO: 269182 - DNA, 19 bp, Homo sapiens
  siRNA target sequence for IPO11 (NM_016338.3,1550-1568).
gcttatgagctctttgaca

SEQ ID NO: 269183 - DNA, 19 bp, Homo sapiens
  siRNA target sequence for IPO11 (NM_016338.3,1610-1628).
gaattacaagtcattcaca

SEQ ID NO: 269184 - DNA, 19 bp, Homo sapiens
  siRNA target sequence for IPO11 (NM_016338.3,1666-1684).
catcggtcagtggatttct

SEQ ID NO: 269185 - DNA, 19 bp, Homo sapiens
  siRNA target sequence for IPO11 (NM_016338.3,1702-1720).
cttaagacccatgctttat

SEQ ID NO: 269186 - DNA, 19 bp, Homo sapiens
  siRNA target sequence for IPO11 (NM_016338.3,1710-1728).
ccatgctttatgaagcaat

SEQ ID NO: 269187 - DNA, 19 bp, Homo sapiens
  siRNA target sequence for IPO11 (NM_016338.3,1714-1732).
gctttatgaagcaatctgt

SEQ ID NO: 269188 - DNA, 19 bp, Homo sapiens
  siRNA target sequence for IPO11 (NM_016338.3,1715-1733).
ctttatgaagcaatctgta

SEQ ID NO: 269189 - DNA, 19 bp, Homo sapiens
  siRNA target sequence for IPO11 (NM_016338.3,1729-1747).
ctgtaacttgcttcaagat

SEQ ID NO: 269190 - DNA, 19 bp, Homo sapiens
  siRNA target sequence for IPO11 (NM_016338.3,1738-1756).
gcttcaagatcaagattta

SEQ ID NO: 269191 - DNA, 19 bp, Homo sapiens
  siRNA target sequence for IPO11 (NM_016338.3,1775-1793).
gctacaactttgaagttaa

SEQ ID NO: 269192 - DNA, 19 bp, Homo sapiens
  siRNA target sequence for IPO11 (NM_016338.3,1854-1872).
cactactttttcagttact

SEQ ID NO: 269193 - DNA, 19 bp, Homo sapiens
  siRNA target sequence for IPO11 (NM_016338.3,1923-1941).
cttgtgtgatcgaaagagt

SEQ ID NO: 269194 - DNA, 19 bp, Homo sapiens
  siRNA target sequence for IPO11 (NM_016338.3,1945-1963).
catgcagatacgaccatat

SEQ ID NO: 269195 - DNA, 19 bp, Homo sapiens
  siRNA target sequence for IPO11 (NM_016338.3,1964-1982).
gtgggatgtttggtacaat

SEQ ID NO: 269196 - DNA, 19 bp, Homo sapiens
  siRNA target sequence for IPO11 (NM_016338.3,1966-1984).
gggatgtttggtacaatat

SEQ ID NO: 269197 - DNA, 19 bp, Homo sapiens
  siRNA target sequence for IPO11 (NM_016338.3,2003-2021).
cagagtgaagaacacaata

SEQ ID NO: 269198 - DNA, 19 bp, Homo sapiens
  siRNA target sequence for IPO11 (NM_016338.3,2007-2025).
gtgaagaacacaatatgtt

SEQ ID NO: 269199 - DNA, 19 bp, Homo sapiens
  siRNA target sequence for IPO11 (NM_016338.3,2012-2030).
gaacacaatatgttgagat

SEQ ID NO: 269200 - DNA, 19 bp, Homo sapiens
  siRNA target sequence for IPO11 (NM_016338.3,2041-2059).
gacaacacttattcatctt

SEQ ID NO: 269201 - DNA, 19 bp, Homo sapiens
  siRNA target sequence for IPO11 (NM_016338.3,2043-2061).
caacacttattcatcttgt

SEQ ID NO: 269202 - DNA, 19 bp, Homo sapiens
  siRNA target sequence for IPO11 (NM_016338.3,2165-2183).
gatggtttagaattatggt

SEQ ID NO: 269203 - DNA, 19 bp, Homo sapiens
  siRNA target sequence for IPO11 (NM_016338.3,2174-2192).
gaattatggttagtaactt

SEQ ID NO: 269204 - DNA, 19 bp, Homo sapiens
  siRNA target sequence for IPO11 (NM_016338.3,2214-2232).
caccagagttgcttcgtat

SEQ ID NO: 269205 - DNA, 19 bp, Homo sapiens
  siRNA target sequence for IPO11 (NM_016338.3,2216-2234).
ccagagttgcttcgtatat

SEQ ID NO: 269206 - DNA, 19 bp, Homo sapiens
  siRNA target sequence for IPO11 (NM_016338.3,2217-2235).
cagagttgcttcgtatatt

SEQ ID NO: 269207 - DNA, 19 bp, Homo sapiens
  siRNA target sequence for IPO11 (NM_016338.3,2224-2242).
gcttcgtatatttcagaat

SEQ ID NO: 269208 - DNA, 19 bp, Homo sapiens
  siRNA target sequence for IPO11 (NM_016338.3,2225-2243).
cttcgtatatttcagaata

SEQ ID NO: 269209 - DNA, 19 bp, Homo sapiens
  siRNA target sequence for IPO11 (NM_016338.3,2249-2267).
ccacttcttgaactaagtt

SEQ ID NO: 269210 - DNA, 19 bp, Homo sapiens
  siRNA target sequence for IPO11 (NM_016338.3,2261-2279).
ctaagttcagaaaatctta

SEQ ID NO: 269211 - DNA, 19 bp, Homo sapiens
  siRNA target sequence for IPO11 (NM_016338.3,2351-2369).
ggtctatgccagtcctttt

SEQ ID NO: 269212 - DNA, 19 bp, Homo sapiens
  siRNA target sequence for IPO11 (NM_016338.3,2474-2492).
ccgattttaccctatgttt

SEQ ID NO: 269213 - DNA, 19 bp, Homo sapiens
  siRNA target sequence for IPO11 (NM_016338.3,2475-2493).
cgattttaccctatgtttt

SEQ ID NO: 269214 - DNA, 19 bp, Homo sapiens
  siRNA target sequence for IPO11 (NM_016338.3,2535-2553).
ccacgtatcttggagttat

SEQ ID NO: 269215 - DNA, 19 bp, Homo sapiens
  siRNA target sequence for IPO11 (NM_016338.3,2554-2572).
gggtcgagttctactacaa

SEQ ID NO: 269216 - DNA, 19 bp, Homo sapiens
  siRNA target sequence for IPO11 (NM_016338.3,2555-2573).
ggtcgagttctactacaaa

SEQ ID NO: 269217 - DNA, 19 bp, Homo sapiens
  siRNA target sequence for IPO11 (NM_016338.3,2556-2574).
gtcgagttctactacaaaa

SEQ ID NO: 269218 - DNA, 19 bp, Homo sapiens
  siRNA target sequence for IPO11 (NM_016338.3,2558-2576).
cgagttctactacaaaaca

SEQ ID NO: 269219 - DNA, 19 bp, Homo sapiens
  siRNA target sequence for IPO11 (NM_016338.3,2603-2621).
gagatggcccataaattta

SEQ ID NO: 269220 - DNA, 19 bp, Homo sapiens
  siRNA target sequence for IPO11 (NM_016338.3,2669-2687).
gatcgaatggacaacatta

SEQ ID NO: 269221 - DNA, 19 bp, Homo sapiens
  siRNA target sequence for IPO11 (NM_016338.3,2732-2750).
cttctgccatctgataata

SEQ ID NO: 269222 - DNA, 19 bp, Homo sapiens
  siRNA target sequence for IPO11 (NM_016338.3,2738-2756).
ccatctgataatagtgtta

SEQ ID NO: 269223 - DNA, 19 bp, Homo sapiens
  siRNA target sequence for IPO11 (NM_016338.3,2742-2760).
ctgataatagtgttatcca

SEQ ID NO: 269224 - DNA, 19 bp, Homo sapiens
  siRNA target sequence for IPO11 (NM_016338.3,2753-2771).
gttatccaagataaattct

SEQ ID NO: 269225 - DNA, 19 bp, Homo sapiens
  siRNA target sequence for IPO11 (NM_016338.3,2776-2794).
gattataaacatttcagta

SEQ ID NO: 269226 - DNA, 19 bp, Homo sapiens
  siRNA target sequence for IPO11 (NM_016338.3,2815-2833).
gacggaagatcctgaaaca

SEQ ID NO: 269227 - DNA, 19 bp, Homo sapiens
  siRNA target sequence for IPO11 (NM_016338.3,2900-2918).
ccacccacagaacaagata

SEQ ID NO: 269228 - DNA, 19 bp, Homo sapiens
  siRNA target sequence for IPO11 (NM_016338.3,2903-2921).
cccacagaacaagataaga

SEQ ID NO: 269229 - DNA, 19 bp, Homo sapiens
  siRNA target sequence for IPO11 (NM_016338.3,2941-2959).
gaaggaccctgttcataca

SEQ ID NO: 269230 - DNA, 19 bp, Homo sapiens
  siRNA target sequence for IPO11 (NM_016338.3,3066-3084).
cccagctacaggagttttt

SEQ ID NO: 269231 - DNA, 19 bp, Homo sapiens
  siRNA target sequence for IPO13 (NM_014652.1,748-766).
cgctgcaccagctctacta

SEQ ID NO: 269232 - DNA, 19 bp, Homo sapiens
  siRNA target sequence for IPO13 (NM_014652.1,752-770).
gcaccagctctactatgat

SEQ ID NO: 269233 - DNA, 19 bp, Homo sapiens
  siRNA target sequence for IPO13 (NM_014652.1,768-786).
gatcccaacattgagaata

SEQ ID NO: 269234 - DNA, 19 bp, Homo sapiens
  siRNA target sequence for IPO13 (NM_014652.1,1001-1019).
cagtggctccaagattgta

SEQ ID NO: 269235 - DNA, 19 bp, Homo sapiens
  siRNA target sequence for IPO13 (NM_014652.1,1147-1165).
gctgcctagccctgttaga

SEQ ID NO: 269236 - DNA, 19 bp, Homo sapiens
  siRNA target sequence for IPO13 (NM_014652.1,1320-1338).
cagaaggtgctcaagtgtt

SEQ ID NO: 269237 - DNA, 19 bp, Homo sapiens
  siRNA target sequence for IPO13 (NM_014652.1,1662-1680).
ctggcactcgtcaacatga

SEQ ID NO: 269238 - DNA, 19 bp, Homo sapiens
  siRNA target sequence for IPO13 (NM_014652.1,1664-1682).
ggcactcgtcaacatgatt

SEQ ID NO: 269239 - DNA, 19 bp, Homo sapiens
  siRNA target sequence for IPO13 (NM_014652.1,1665-1683).
gcactcgtcaacatgatta

SEQ ID NO: 269240 - DNA, 19 bp, Homo sapiens
  siRNA target sequence for IPO13 (NM_014652.1,1666-1684).
cactcgtcaacatgattat

SEQ ID NO: 269241 - DNA, 19 bp, Homo sapiens
  siRNA target sequence for IPO13 (NM_014652.1,1668-1686).
ctcgtcaacatgattatgt

SEQ ID NO: 269242 - DNA, 19 bp, Homo sapiens
  siRNA target sequence for IPO13 (NM_014652.1,1707-1725).
cactatcctgtcaatgaga

SEQ ID NO: 269243 - DNA, 19 bp, Homo sapiens
  siRNA target sequence for IPO13 (NM_014652.1,1761-1779).
ctgcaggatgatattctat

SEQ ID NO: 269244 - DNA, 19 bp, Homo sapiens
  siRNA target sequence for IPO13 (NM_014652.1,1943-1961).
ctcagacacgctcatgtat

SEQ ID NO: 269245 - DNA, 19 bp, Homo sapiens
  siRNA target sequence for IPO13 (NM_014652.1,1947-1965).
gacacgctcatgtatgtct

SEQ ID NO: 269246 - DNA, 19 bp, Homo sapiens
  siRNA target sequence for IPO13 (NM_014652.1,1949-1967).
cacgctcatgtatgtctat

SEQ ID NO: 269247 - DNA, 19 bp, Homo sapiens
  siRNA target sequence for IPO13 (NM_014652.1,1951-1969).
cgctcatgtatgtctatga

SEQ ID NO: 269248 - DNA, 19 bp, Homo sapiens
  siRNA target sequence for IPO13 (NM_014652.1,1989-2007).
ctcagcaacctctatgaca

SEQ ID NO: 269249 - DNA, 19 bp, Homo sapiens
  siRNA target sequence for IPO13 (NM_014652.1,2096-2114).
gaccattgacgtcaactat

SEQ ID NO: 269250 - DNA, 19 bp, Homo sapiens
  siRNA target sequence for IPO13 (NM_014652.1,2226-2244).
gaccaccccgtcatgatca

SEQ ID NO: 269251 - DNA, 19 bp, Homo sapiens
  siRNA target sequence for IPO13 (NM_014652.1,2324-2342).
ctgccgagagtgcaagtat

SEQ ID NO: 269252 - DNA, 19 bp, Homo sapiens
  siRNA target sequence for IPO13 (NM_014652.1,2326-2344).
gccgagagtgcaagtatga

SEQ ID NO: 269253 - DNA, 19 bp, Homo sapiens
  siRNA target sequence for IPO13 (NM_014652.1,2353-2371).
cctatgctgccaacattgt

SEQ ID NO: 269254 - DNA, 19 bp, Homo sapiens
  siRNA target sequence for IPO13 (NM_014652.1,2489-2507).
cctgcactcgcttatctca

SEQ ID NO: 269255 - DNA, 19 bp, Homo sapiens
  siRNA target sequence for IPO13 (NM_014652.1,2497-2515).
cgcttatctcaccctatat

SEQ ID NO: 269256 - DNA, 19 bp, Homo sapiens
  siRNA target sequence for IPO13 (NM_014652.1,2771-2789).
ggcggtgtgcgctatcttt

SEQ ID NO: 269257 - DNA, 19 bp, Homo sapiens
  siRNA target sequence for IPO13 (NM_014652.1,2773-2791).
cggtgtgcgctatctttga

SEQ ID NO: 269258 - DNA, 19 bp, Homo sapiens
  siRNA target sequence for IPO13 (NM_014652.1,2775-2793).
gtgtgcgctatctttgaga

SEQ ID NO: 269259 - DNA, 19 bp, Homo sapiens
  siRNA target sequence for IPO13 (NM_014652.1,2938-2956).
cccactttcccccaattga

SEQ ID NO: 269260 - DNA, 19 bp, Homo sapiens
  siRNA target sequence for IPO13 (NM_014652.1,3021-3039).
cctgatattgttgattcat

SEQ ID NO: 269261 - DNA, 19 bp, Homo sapiens
  siRNA target sequence for IPO13 (NM_014652.1,3091-3109).
gtgaacgattggatgtcaa

SEQ ID NO: 269262 - DNA, 19 bp, Homo sapiens
  siRNA target sequence for IPO13 (NM_014652.1,3168-3186).
gcctcctgtggcttcttta

SEQ ID NO: 269263 - DNA, 19 bp, Homo sapiens
  siRNA target sequence for IPO13 (NM_014652.1,3170-3188).
ctcctgtggcttctttaca

SEQ ID NO: 269264 - DNA, 19 bp, Homo sapiens
  siRNA target sequence for IPO13 (NM_014652.1,3199-3217).
ctcggtgtggggaagtaga

SEQ ID NO: 269265 - DNA, 19 bp, Homo sapiens
  siRNA target sequence for IPO13 (NM_014652.1,3421-3439).
ctgaacagaaggatacctt

SEQ ID NO: 269266 - DNA, 19 bp, Homo sapiens
  siRNA target sequence for IPO13 (NM_014652.1,3456-3474).
cgcgagcgagtgaacaaga

SEQ ID NO: 269267 - DNA, 19 bp, Homo sapiens
  siRNA target sequence for IPO9 (NM_018085.3,814-832).
gtgacagccctagtgaaaa

SEQ ID NO: 269268 - DNA, 19 bp, Homo sapiens
  siRNA target sequence for IPO9 (NM_018085.3,864-882).
gcagattctgcctattgtt

SEQ ID NO: 269269 - DNA, 19 bp, Homo sapiens
  siRNA target sequence for IPO9 (NM_018085.3,916-934).
gtgaggacagaagtaaatt

SEQ ID NO: 269270 - DNA, 19 bp, Homo sapiens
  siRNA target sequence for IPO9 (NM_018085.3,996-1014).
cgtctttagcatttttgaa

SEQ ID NO: 269271 - DNA, 19 bp, Homo sapiens
  siRNA target sequence for IPO9 (NM_018085.3,1018-1036).
gtccatgctctactagaaa

SEQ ID NO: 269272 - DNA, 19 bp, Homo sapiens
  siRNA target sequence for IPO9 (NM_018085.3,1020-1038).
ccatgctctactagaaaat

SEQ ID NO: 269273 - DNA, 19 bp, Homo sapiens
  siRNA target sequence for IPO9 (NM_018085.3,1021-1039).
catgctctactagaaaata

SEQ ID NO: 269274 - DNA, 19 bp, Homo sapiens
  siRNA target sequence for IPO9 (NM_018085.3,1024-1042).
gctctactagaaaatagca

SEQ ID NO: 269275 - DNA, 19 bp, Homo sapiens
  siRNA target sequence for IPO9 (NM_018085.3,1067-1085).
ccttgcctgaattgattta

SEQ ID NO: 269276 - DNA, 19 bp, Homo sapiens
  siRNA target sequence for IPO9 (NM_018085.3,1072-1090).
cctgaattgatttattata

SEQ ID NO: 269277 - DNA, 19 bp, Homo sapiens
  siRNA target sequence for IPO9 (NM_018085.3,1112-1130).
ctgaggagcagattaaagt

SEQ ID NO: 269278 - DNA, 19 bp, Homo sapiens
  siRNA target sequence for IPO9 (NM_018085.3,1136-1154).
cagccaacccccaacaatt

SEQ ID NO: 269279 - DNA, 19 bp, Homo sapiens
  siRNA target sequence for IPO9 (NM_018085.3,1139-1157).
ccaacccccaacaatttgt

SEQ ID NO: 269280 - DNA, 19 bp, Homo sapiens
  siRNA target sequence for IPO9 (NM_018085.3,1143-1161).
cccccaacaatttgtagaa

SEQ ID NO: 269281 - DNA, 19 bp, Homo sapiens
  siRNA target sequence for IPO9 (NM_018085.3,1171-1189).
gatgatacattctcctata

SEQ ID NO: 269282 - DNA, 19 bp, Homo sapiens
  siRNA target sequence for IPO9 (NM_018085.3,1182-1200).
ctcctatactgttagaata

SEQ ID NO: 269283 - DNA, 19 bp, Homo sapiens
  siRNA target sequence for IPO9 (NM_018085.3,1185-1203).
ctatactgttagaatagca

SEQ ID NO: 269284 - DNA, 19 bp, Homo sapiens
  siRNA target sequence for IPO9 (NM_018085.3,1271-1289).
cagccactcgacatttaca

SEQ ID NO: 269285 - DNA, 19 bp, Homo sapiens
  siRNA target sequence for IPO9 (NM_018085.3,1274-1292).
ccactcgacatttacaaga

SEQ ID NO: 269286 - DNA, 19 bp, Homo sapiens
  siRNA target sequence for IPO9 (NM_018085.3,1383-1401).
cactgacagtgtgaaaaat

SEQ ID NO: 269287 - DNA, 19 bp, Homo sapiens
  siRNA target sequence for IPO9 (NM_018085.3,1402-1420).
ggcaggattcattttgaca

SEQ ID NO: 269288 - DNA, 19 bp, Homo sapiens
  siRNA target sequence for IPO9 (NM_018085.3,1426-1444).
gggttcctgaccaatgtca

SEQ ID NO: 269289 - DNA, 19 bp, Homo sapiens
  siRNA target sequence for IPO9 (NM_018085.3,1427-1445).
ggttcctgaccaatgtcat

SEQ ID NO: 269290 - DNA, 19 bp, Homo sapiens
  siRNA target sequence for IPO9 (NM_018085.3,1551-1569).
cctacaggcaacagttagt

SEQ ID NO: 269291 - DNA, 19 bp, Homo sapiens
  siRNA target sequence for IPO9 (NM_018085.3,1628-1646).
gttattgtgaccaactgaa

SEQ ID NO: 269292 - DNA, 19 bp, Homo sapiens
  siRNA target sequence for IPO9 (NM_018085.3,1753-1771).
gagaccctgtgcatcgttt

SEQ ID NO: 269293 - DNA, 19 bp, Homo sapiens
  siRNA target sequence for IPO9 (NM_018085.3,1758-1776).
cctgtgcatcgtttgtaca

SEQ ID NO: 269294 - DNA, 19 bp, Homo sapiens
  siRNA target sequence for IPO9 (NM_018085.3,1761-1779).
gtgcatcgtttgtacagta

SEQ ID NO: 269295 - DNA, 19 bp, Homo sapiens
  siRNA target sequence for IPO9 (NM_018085.3,1824-1842).
caccatcgccattttccta

SEQ ID NO: 269296 - DNA, 19 bp, Homo sapiens
  siRNA target sequence for IPO9 (NM_018085.3,1826-1844).
ccatcgccattttcctaaa

SEQ ID NO: 269297 - DNA, 19 bp, Homo sapiens
  siRNA target sequence for IPO9 (NM_018085.3,1871-1889).
cactggctcaggacatctt

SEQ ID NO: 269298 - DNA, 19 bp, Homo sapiens
  siRNA target sequence for IPO9 (NM_018085.3,1914-1932).
ctgtcagggcccaatgcaa

SEQ ID NO: 269299 - DNA, 19 bp, Homo sapiens
  siRNA target sequence for IPO9 (NM_018085.3,1916-1934).
gtcagggcccaatgcaaat

SEQ ID NO: 269300 - DNA, 19 bp, Homo sapiens
  siRNA target sequence for IPO9 (NM_018085.3,1918-1936).
cagggcccaatgcaaatga

SEQ ID NO: 269301 - DNA, 19 bp, Homo sapiens
  siRNA target sequence for IPO9 (NM_018085.3,1949-1967).
ctctggtcagcataatgca

SEQ ID NO: 269302 - DNA, 19 bp, Homo sapiens
  siRNA target sequence for IPO9 (NM_018085.3,2003-2021).
cgacagccattgatatcct

SEQ ID NO: 269303 - DNA, 19 bp, Homo sapiens
  siRNA target sequence for IPO9 (NM_018085.3,2022-2040).
gacaacagtagtacgaaat

SEQ ID NO: 269304 - DNA, 19 bp, Homo sapiens
  siRNA target sequence for IPO9 (NM_018085.3,2327-2345).
gggaactcggggagaatct

SEQ ID NO: 269305 - DNA, 19 bp, Homo sapiens
  siRNA target sequence for IPO9 (NM_018085.3,2359-2377).
cgtgccatcctcagtaaga

SEQ ID NO: 269306 - DNA, 19 bp, Homo sapiens
  siRNA target sequence for IPO9 (NM_018085.3,2360-2378).
gtgccatcctcagtaagat

SEQ ID NO: 269307 - DNA, 19 bp, Homo sapiens
  siRNA target sequence for IPO9 (NM_018085.3,2495-2513).
gcaaacctgctctagagtt

SEQ ID NO: 269308 - DNA, 19 bp, Homo sapiens
  siRNA target sequence for IPO9 (NM_018085.3,2535-2553).
ccgacagcacctgttctat

SEQ ID NO: 269309 - DNA, 19 bp, Homo sapiens
  siRNA target sequence for IPO9 (NM_018085.3,2609-2627).
gcatcaatgcagatgacaa

SEQ ID NO: 269310 - DNA, 19 bp, Homo sapiens
  siRNA target sequence for IPO9 (NM_018085.3,2685-2703).
ccgcacccgctctaagtca

SEQ ID NO: 269311 - DNA, 19 bp, Homo sapiens
  siRNA target sequence for IPO9 (NM_018085.3,2713-2731).
ccagaacgctggacaaaca

SEQ ID NO: 269312 - DNA, 19 bp, Homo sapiens
  siRNA target sequence for IPO9 (NM_018085.3,2714-2732).
cagaacgctggacaaacat

SEQ ID NO: 269313 - DNA, 19 bp, Homo sapiens
  siRNA target sequence for IPO9 (NM_018085.3,2890-2908).
ggtttagctggccaacttt

SEQ ID NO: 269314 - DNA, 19 bp, Homo sapiens
  siRNA target sequence for IPO9 (NM_018085.3,2891-2909).
gtttagctggccaactttt

SEQ ID NO: 269315 - DNA, 19 bp, Homo sapiens
  siRNA target sequence for IPO9 (NM_018085.3,2916-2934).
cattcttgctacaagtaaa

SEQ ID NO: 269316 - DNA, 19 bp, Homo sapiens
  siRNA target sequence for IPO9 (NM_018085.3,2982-3000).
cctgaaggatcctctctat

SEQ ID NO: 269317 - DNA, 19 bp, Homo sapiens
  siRNA target sequence for IPO9 (NM_018085.3,3052-3070).
cagccctgctacataatgt

SEQ ID NO: 269318 - DNA, 19 bp, Homo sapiens
  siRNA target sequence for IPO9 (NM_018085.3,3054-3072).
gccctgctacataatgttt

SEQ ID NO: 269319 - DNA, 19 bp, Homo sapiens
  siRNA target sequence for IPO9 (NM_018085.3,3055-3073).
ccctgctacataatgtttt

SEQ ID NO: 269320 - DNA, 19 bp, Homo sapiens
  siRNA target sequence for IPO9 (NM_018085.3,3074-3092).
caggccaccttaatgacaa

SEQ ID NO: 269321 - DNA, 19 bp, Homo sapiens
  siRNA target sequence for KPNA4 (NM_002268.3,330-348).
caaccaacggctcaagaat

SEQ ID NO: 269322 - DNA, 19 bp, Homo sapiens
  siRNA target sequence for KPNA4 (NM_002268.3,364-382).
cgcgacttggagactatga

SEQ ID NO: 269323 - DNA, 19 bp, Homo sapiens
  siRNA target sequence for KPNA4 (NM_002268.3,366-384).
cgacttggagactatgaga

SEQ ID NO: 269324 - DNA, 19 bp, Homo sapiens
  siRNA target sequence for KPNA4 (NM_002268.3,377-395).
ctatgagaagacaacgaaa

SEQ ID NO: 269325 - DNA, 19 bp, Homo sapiens
  siRNA target sequence for KPNA4 (NM_002268.3,381-399).
gagaagacaacgaaatgaa

SEQ ID NO: 269326 - DNA, 19 bp, Homo sapiens
  siRNA target sequence for KPNA4 (NM_002268.3,400-418).
gttgtagttgaattaagga

SEQ ID NO: 269327 - DNA, 19 bp, Homo sapiens
  siRNA target sequence for KPNA4 (NM_002268.3,452-470).
ggaatgtaccacatgaaga

SEQ ID NO: 269328 - DNA, 19 bp, Homo sapiens
  siRNA target sequence for KPNA4 (NM_002268.3,453-471).
gaatgtaccacatgaagat

SEQ ID NO: 269329 - DNA, 19 bp, Homo sapiens
  siRNA target sequence for KPNA4 (NM_002268.3,457-475).
gtaccacatgaagatatct

SEQ ID NO: 269330 - DNA, 19 bp, Homo sapiens
  siRNA target sequence for KPNA4 (NM_002268.3,476-494).
gtgaagactctgatataga

SEQ ID NO: 269331 - DNA, 19 bp, Homo sapiens
  siRNA target sequence for KPNA4 (NM_002268.3,497-515).
gtgattatagagtgcaaaa

SEQ ID NO: 269332 - DNA, 19 bp, Homo sapiens
  siRNA target sequence for KPNA4 (NM_002268.3,510-528).
gcaaaatacctctctagaa

SEQ ID NO: 269333 - DNA, 19 bp, Homo sapiens
  siRNA target sequence for KPNA4 (NM_002268.3,518-536).
cctctctagaagctattgt

SEQ ID NO: 269334 - DNA, 19 bp, Homo sapiens
  siRNA target sequence for KPNA4 (NM_002268.3,519-537).
ctctctagaagctattgtt

SEQ ID NO: 269335 - DNA, 19 bp, Homo sapiens
  siRNA target sequence for KPNA4 (NM_002268.3,603-621).
gtccagtgatcgaaatcca

SEQ ID NO: 269336 - DNA, 19 bp, Homo sapiens
  siRNA target sequence for KPNA4 (NM_002268.3,647-665).
gaatattgcccattttagt

SEQ ID NO: 269337 - DNA, 19 bp, Homo sapiens
  siRNA target sequence for KPNA4 (NM_002268.3,838-856).
gtgtgggcattgggaaata

SEQ ID NO: 269338 - DNA, 19 bp, Homo sapiens
  siRNA target sequence for KPNA4 (NM_002268.3,843-861).
ggcattgggaaatatcata

SEQ ID NO: 269339 - DNA, 19 bp, Homo sapiens
  siRNA target sequence for KPNA4 (NM_002268.3,943-961).
cctataacattcttaagaa

SEQ ID NO: 269340 - DNA, 19 bp, Homo sapiens
  siRNA target sequence for KPNA4 (NM_002268.3,1060-1078).
catcacacagatgtaaata

SEQ ID NO: 269341 - DNA, 19 bp, Homo sapiens
  siRNA target sequence for KPNA4 (NM_002268.3,1095-1113).
ctgggccctctcttacctt

SEQ ID NO: 269342 - DNA, 19 bp, Homo sapiens
  siRNA target sequence for KPNA4 (NM_002268.3,1143-1161).
ggtaatagactctggaata

SEQ ID NO: 269343 - DNA, 19 bp, Homo sapiens
  siRNA target sequence for KPNA4 (NM_002268.3,1157-1175).
gaatagttcctcatttggt

SEQ ID NO: 269344 - DNA, 19 bp, Homo sapiens
  siRNA target sequence for KPNA4 (NM_002268.3,1247-1265).
gaactgatgagcaaacaca

SEQ ID NO: 269345 - DNA, 19 bp, Homo sapiens
  siRNA target sequence for KPNA4 (NM_002268.3,1383-1401).
gcaggtacaggcagtaatt

SEQ ID NO: 269346 - DNA, 19 bp, Homo sapiens
  siRNA target sequence for KPNA4 (NM_002268.3,1418-1436).
caatgataatacacctttt

SEQ ID NO: 269347 - DNA, 19 bp, Homo sapiens
  siRNA target sequence for KPNA4 (NM_002268.3,1422-1440).
gataatacaccttttggat

SEQ ID NO: 269348 - DNA, 19 bp, Homo sapiens
  siRNA target sequence for KPNA4 (NM_002268.3,1444-1462).
ggggattttggcactcaaa

SEQ ID NO: 269349 - DNA, 19 bp, Homo sapiens
  siRNA target sequence for KPNA4 (NM_002268.3,1468-1486).
gctgcttgggccataagta

SEQ ID NO: 269350 - DNA, 19 bp, Homo sapiens
  siRNA target sequence for KPNA4 (NM_002268.3,1469-1487).
ctgcttgggccataagtaa

SEQ ID NO: 269351 - DNA, 19 bp, Homo sapiens
  siRNA target sequence for KPNA4 (NM_002268.3,1540-1558).
gttatcccacctttttgca

SEQ ID NO: 269352 - DNA, 19 bp, Homo sapiens
  siRNA target sequence for KPNA4 (NM_002268.3,1597-1615).
gtactcgatggactaagta

SEQ ID NO: 269353 - DNA, 19 bp, Homo sapiens
  siRNA target sequence for KPNA4 (NM_002268.3,1600-1618).
ctcgatggactaagtaata

SEQ ID NO: 269354 - DNA, 19 bp, Homo sapiens
  siRNA target sequence for KPNA4 (NM_002268.3,1602-1620).
cgatggactaagtaatata

SEQ ID NO: 269355 - DNA, 19 bp, Homo sapiens
  siRNA target sequence for KPNA4 (NM_002268.3,1603-1621).
gatggactaagtaatatat

SEQ ID NO: 269356 - DNA, 19 bp, Homo sapiens
  siRNA target sequence for KPNA4 (NM_002268.3,1606-1624).
ggactaagtaatatattaa

SEQ ID NO: 269357 - DNA, 19 bp, Homo sapiens
  siRNA target sequence for KPNA4 (NM_002268.3,1650-1668).
cataggcaatcttatagaa

SEQ ID NO: 269358 - DNA, 19 bp, Homo sapiens
  siRNA target sequence for KPNA4 (NM_002268.3,1736-1754).
cctatgagatcattgatca

SEQ ID NO: 269359 - DNA, 19 bp, Homo sapiens
  siRNA target sequence for KPNA4 (NM_002268.3,1814-1832).
gcggaacatttggtttcaa

SEQ ID NO: 269360 - DNA, 19 bp, Homo sapiens
  siRNA target sequence for KPNA4 (NM_002268.3,1815-1833).
cggaacatttggtttcaat

SEQ ID NO: 269361 - DNA, 19 bp, Homo sapiens
  siRNA target sequence for KPNA5 (NM_002269.2,143-161).
ggctagtccagggaaagat

SEQ ID NO: 269362 - DNA, 19 bp, Homo sapiens
  siRNA target sequence for KPNA5 (NM_002269.2,144-162).
gctagtccagggaaagata

SEQ ID NO: 269363 - DNA, 19 bp, Homo sapiens
  siRNA target sequence for KPNA5 (NM_002269.2,193-211).
ccctaaatcctcaagagat

SEQ ID NO: 269364 - DNA, 19 bp, Homo sapiens
  siRNA target sequence for KPNA5 (NM_002269.2,209-227).
gatgcgtagacgaagagaa

SEQ ID NO: 269365 - DNA, 19 bp, Homo sapiens
  siRNA target sequence for KPNA5 (NM_002269.2,269-287).
gttgttcaaacgcagaaat

SEQ ID NO: 269366 - DNA, 19 bp, Homo sapiens
  siRNA target sequence for KPNA5 (NM_002269.2,333-351).
caggatccagatattagtt

SEQ ID NO: 269367 - DNA, 19 bp, Homo sapiens
  siRNA target sequence for KPNA5 (NM_002269.2,401-419).
gatgattttttctaataat

SEQ ID NO: 269368 - DNA, 19 bp, Homo sapiens
  siRNA target sequence for KPNA5 (NM_002269.2,475-493).
ctaatccaccaatagatca

SEQ ID NO: 269369 - DNA, 19 bp, Homo sapiens
  siRNA target sequence for KPNA5 (NM_002269.2,576-594).
gcatgggcattaacaaata

SEQ ID NO: 269370 - DNA, 19 bp, Homo sapiens
  siRNA target sequence for KPNA5 (NM_002269.2,577-595).
catgggcattaacaaatat

SEQ ID NO: 269371 - DNA, 19 bp, Homo sapiens
  siRNA target sequence for KPNA5 (NM_002269.2,614-632).
gcataccaaggtagtgatt

SEQ ID NO: 269372 - DNA, 19 bp, Homo sapiens
  siRNA target sequence for KPNA5 (NM_002269.2,620-638).
caaggtagtgattgaaact

SEQ ID NO: 269373 - DNA, 19 bp, Homo sapiens
  siRNA target sequence for KPNA5 (NM_002269.2,649-667).
cgatttttatcaaacttct

SEQ ID NO: 269374 - DNA, 19 bp, Homo sapiens
  siRNA target sequence for KPNA5 (NM_002269.2,700-718).
ctgtttgggcacttggtaa

SEQ ID NO: 269375 - DNA, 19 bp, Homo sapiens
  siRNA target sequence for KPNA5 (NM_002269.2,771-789).
cttccacctcttttagagt

SEQ ID NO: 269376 - DNA, 19 bp, Homo sapiens
  siRNA target sequence for KPNA5 (NM_002269.2,774-792).
ccacctcttttagagttat

SEQ ID NO: 269377 - DNA, 19 bp, Homo sapiens
  siRNA target sequence for KPNA5 (NM_002269.2,777-795).
cctcttttagagttattaa

SEQ ID NO: 269378 - DNA, 19 bp, Homo sapiens
  siRNA target sequence for KPNA5 (NM_002269.2,833-851).
gtgggccctctcaaattta

SEQ ID NO: 269379 - DNA, 19 bp, Homo sapiens
  siRNA target sequence for KPNA5 (NM_002269.2,836-854).
ggccctctcaaatttatgt

SEQ ID NO: 269380 - DNA, 19 bp, Homo sapiens
  siRNA target sequence for KPNA5 (NM_002269.2,839-857).
cctctcaaatttatgtaga

SEQ ID NO: 269381 - DNA, 19 bp, Homo sapiens
  siRNA target sequence for KPNA5 (NM_002269.2,867-885).
cctcctccaaactttagta

SEQ ID NO: 269382 - DNA, 19 bp, Homo sapiens
  siRNA target sequence for KPNA5 (NM_002269.2,887-905).
ggtttcaccttgcttaaat

SEQ ID NO: 269383 - DNA, 19 bp, Homo sapiens
  siRNA target sequence for KPNA5 (NM_002269.2,909-927).
ctgtcacgactgttgttta

SEQ ID NO: 269384 - DNA, 19 bp, Homo sapiens
  siRNA target sequence for KPNA5 (NM_002269.2,1018-1036).
ctggagtctgtcgaagatt

SEQ ID NO: 269385 - DNA, 19 bp, Homo sapiens
  siRNA target sequence for KPNA5 (NM_002269.2,1029-1047).
cgaagattggtggaacttt

SEQ ID NO: 269386 - DNA, 19 bp, Homo sapiens
  siRNA target sequence for KPNA5 (NM_002269.2,1033-1051).
gattggtggaacttttgat

SEQ ID NO: 269387 - DNA, 19 bp, Homo sapiens
  siRNA target sequence for KPNA5 (NM_002269.2,1068-1086).
gttgtatcacctgcattaa

SEQ ID NO: 269388 - DNA, 19 bp, Homo sapiens
  siRNA target sequence for KPNA5 (NM_002269.2,1081-1099).
cattaagggcagttggtaa

SEQ ID NO: 269389 - DNA, 19 bp, Homo sapiens
  siRNA target sequence for KPNA5 (NM_002269.2,1282-1300).
ctgttttgattgagattct

SEQ ID NO: 269390 - DNA, 19 bp, Homo sapiens
  siRNA target sequence for KPNA5 (NM_002269.2,1403-1421).
ctgcattaaaccactttgt

SEQ ID NO: 269391 - DNA, 19 bp, Homo sapiens
  siRNA target sequence for KPNA5 (NM_002269.2,1405-1423).
gcattaaaccactttgtga

SEQ ID NO: 269392 - DNA, 19 bp, Homo sapiens
  siRNA target sequence for KPNA5 (NM_002269.2,1413-1431).
ccactttgtgatcttttga

SEQ ID NO: 269393 - DNA, 19 bp, Homo sapiens
  siRNA target sequence for KPNA5 (NM_002269.2,1461-1479).
gctttaaatggacttgaaa

SEQ ID NO: 269394 - DNA, 19 bp, Homo sapiens
  siRNA target sequence for KPNA5 (NM_002269.2,1503-1521).
gaatctaagcagaatggaa

SEQ ID NO: 269395 - DNA, 19 bp, Homo sapiens
  siRNA target sequence for KPNA5 (NM_002269.2,1519-1537).
gaataggcattaatccata

SEQ ID NO: 269396 - DNA, 19 bp, Homo sapiens
  siRNA target sequence for KPNA5 (NM_002269.2,1619-1637).
ggcatttgatctgattgaa

SEQ ID NO: 269397 - DNA, 19 bp, Homo sapiens
  siRNA target sequence for KPNA5 (NM_002269.2,1674-1692).
gtacctcaggtggatgaaa

SEQ ID NO: 269398 - DNA, 19 bp, Homo sapiens
  siRNA target sequence for KPNA5 (NM_002269.2,1718-1736).
gcaggaagcaccaatggat

SEQ ID NO: 269399 - DNA, 19 bp, Homo sapiens
  siRNA target sequence for KPNA6 (NM_012316.3,112-130).
cgaatgaagagctataaga

SEQ ID NO: 269400 - DNA, 19 bp, Homo sapiens
  siRNA target sequence for KPNA6 (NM_012316.3,202-220).
cgagagcaacaacttttta

SEQ ID NO: 269401 - DNA, 19 bp, Homo sapiens
  siRNA target sequence for KPNA6 (NM_012316.3,250-268).
gaagctgccatgttcgata

SEQ ID NO: 269402 - DNA, 19 bp, Homo sapiens
  siRNA target sequence for KPNA6 (NM_012316.3,254-272).
ctgccatgttcgatagtct

SEQ ID NO: 269403 - DNA, 19 bp, Homo sapiens
  siRNA target sequence for KPNA6 (NM_012316.3,366-384).
gttagcaaccacacagaaa

SEQ ID NO: 269404 - DNA, 19 bp, Homo sapiens
  siRNA target sequence for KPNA6 (NM_012316.3,408-426).
gcctagtcctccaatagat

SEQ ID NO: 269405 - DNA, 19 bp, Homo sapiens
  siRNA target sequence for KPNA6 (NM_012316.3,413-431).
gtcctccaatagatgaagt

SEQ ID NO: 269406 - DNA, 19 bp, Homo sapiens
  siRNA target sequence for KPNA6 (NM_012316.3,419-437).
caatagatgaagttatcaa

SEQ ID NO: 269407 - DNA, 19 bp, Homo sapiens
  siRNA target sequence for KPNA6 (NM_012316.3,457-475).
cggttcgtggagtttctga

SEQ ID NO: 269408 - DNA, 19 bp, Homo sapiens
  siRNA target sequence for KPNA6 (NM_012316.3,511-529).
gcctgggctctaacgaata

SEQ ID NO: 269409 - DNA, 19 bp, Homo sapiens
  siRNA target sequence for KPNA6 (NM_012316.3,512-530).
cctgggctctaacgaatat

SEQ ID NO: 269410 - DNA, 19 bp, Homo sapiens
  siRNA target sequence for KPNA6 (NM_012316.3,513-531).
ctgggctctaacgaatatt

SEQ ID NO: 269411 - DNA, 19 bp, Homo sapiens
  siRNA target sequence for KPNA6 (NM_012316.3,545-563).
ctcagcagaccaaaattgt

SEQ ID NO: 269412 - DNA, 19 bp, Homo sapiens
  siRNA target sequence for KPNA6 (NM_012316.3,547-565).
cagcagaccaaaattgtca

SEQ ID NO: 269413 - DNA, 19 bp, Homo sapiens
  siRNA target sequence for KPNA6 (NM_012316.3,576-594).
ggctgtccccatttttata

SEQ ID NO: 269414 - DNA, 19 bp, Homo sapiens
  siRNA target sequence for KPNA6 (NM_012316.3,671-689).
ctgtttgccgagattacgt

SEQ ID NO: 269415 - DNA, 19 bp, Homo sapiens
  siRNA target sequence for KPNA6 (NM_012316.3,677-695).
gccgagattacgtcttgaa

SEQ ID NO: 269416 - DNA, 19 bp, Homo sapiens
  siRNA target sequence for KPNA6 (NM_012316.3,679-697).
cgagattacgtcttgaact

SEQ ID NO: 269417 - DNA, 19 bp, Homo sapiens
  siRNA target sequence for KPNA6 (NM_012316.3,682-700).
gattacgtcttgaactgtt

SEQ ID NO: 269418 - DNA, 19 bp, Homo sapiens
  siRNA target sequence for KPNA6 (NM_012316.3,702-720).
catccttaatcctttgtta

SEQ ID NO: 269419 - DNA, 19 bp, Homo sapiens
  siRNA target sequence for KPNA6 (NM_012316.3,1063-1081).
caggtcattcttaactgtt

SEQ ID NO: 269420 - DNA, 19 bp, Homo sapiens
  siRNA target sequence for KPNA6 (NM_012316.3,1141-1159).
gcttgctggactatttcaa

SEQ ID NO: 269421 - DNA, 19 bp, Homo sapiens
  siRNA target sequence for KPNA6 (NM_012316.3,1172-1190).
gcaacagggctcaaataca

SEQ ID NO: 269422 - DNA, 19 bp, Homo sapiens
  siRNA target sequence for KPNA6 (NM_012316.3,1224-1242).
gatcgaaatccttcagaaa

SEQ ID NO: 269423 - DNA, 19 bp, Homo sapiens
  siRNA target sequence for KPNA6 (NM_012316.3,1329-1347).
ctcactgggctgcatcaaa

SEQ ID NO: 269424 - DNA, 19 bp, Homo sapiens
  siRNA target sequence for KPNA6 (NM_012316.3,1355-1373).
gtgacttgctgactgtaat

SEQ ID NO: 269425 - DNA, 19 bp, Homo sapiens
  siRNA target sequence for KPNA6 (NM_012316.3,1453-1471).
ggctcaggggtcaatcctt

SEQ ID NO: 269426 - DNA, 19 bp, Homo sapiens
  siRNA target sequence for KPNA6 (NM_012316.3,1454-1472).
gctcaggggtcaatcctta

SEQ ID NO: 269427 - DNA, 19 bp, Homo sapiens
  siRNA target sequence for KPNA6 (NM_012316.3,1469-1487).
cttattgtggcctcataga

SEQ ID NO: 269428 - DNA, 19 bp, Homo sapiens
  siRNA target sequence for KPNA6 (NM_012316.3,1489-1507).
gaagcctatggcttggata

SEQ ID NO: 269429 - DNA, 19 bp, Homo sapiens
  siRNA target sequence for KPNA6 (NM_012316.3,1563-1581).
cctcattgagcactacttt

SEQ ID NO: 269430 - DNA, 19 bp, Homo sapiens
  siRNA target sequence for KPNA6 (NM_012316.3,1582-1600).
ggtgtagaagacgatgata

SEQ ID NO: 269431 - DNA, 19 bp, Homo sapiens
  siRNA target sequence for KPNA6 (NM_012316.3,1609-1627).
gctccccaagtcgatgaaa

SEQ ID NO: 269432 - DNA, 19 bp, Homo sapiens
  siRNA target sequence for KPNA6 (NM_012316.3,1628-1646).
cgcaacagcagttcatctt

SEQ ID NO: 269433 - DNA, 19 bp, Homo sapiens
  siRNA target sequence for MTX1 (NM_002455.2,631-649).
gctgacctatgccagattt

SEQ ID NO: 269434 - DNA, 19 bp, Homo sapiens
  siRNA target sequence for MTX1 (NM_002455.2,632-650).
ctgacctatgccagattta

SEQ ID NO: 269435 - DNA, 19 bp, Homo sapiens
  siRNA target sequence for MTX1 (NM_002455.2,634-652).
gacctatgccagatttact

SEQ ID NO: 269436 - DNA, 19 bp, Homo sapiens
  siRNA target sequence for MTX1 (NM_002455.2,749-767).
gttccacacaagatcatca

SEQ ID NO: 269437 - DNA, 19 bp, Homo sapiens
  siRNA target sequence for MTX1 (NM_002455.2,866-884).
ctcccggtgctggtacata

SEQ ID NO: 269438 - DNA, 19 bp, Homo sapiens
  siRNA target sequence for MTX1 (NM_002455.2,868-886).
cccggtgctggtacatact

SEQ ID NO: 269439 - DNA, 19 bp, Homo sapiens
  siRNA target sequence for MTX1 (NM_002455.2,869-887).
ccggtgctggtacatactt

SEQ ID NO: 269440 - DNA, 19 bp, Homo sapiens
  siRNA target sequence for MTX1 (NM_002455.2,870-888).
cggtgctggtacatacttt

SEQ ID NO: 269441 - DNA, 19 bp, Homo sapiens
  siRNA target sequence for MTX1 (NM_002455.2,881-899).
catactttttggatagaca

SEQ ID NO: 269442 - DNA, 19 bp, Homo sapiens
  siRNA target sequence for MTX1 (NM_002455.2,978-996).
gcatgcagcggcagtacat

SEQ ID NO: 269443 - DNA, 19 bp, Homo sapiens
  siRNA target sequence for MTX1 (NM_002455.2,1237-1255).
caacctctgtgcctattgt

SEQ ID NO: 269444 - DNA, 19 bp, Homo sapiens
  siRNA target sequence for MTX1 (NM_002455.2,1248-1266).
cctattgtacccacattct

SEQ ID NO: 269445 - DNA, 19 bp, Homo sapiens
  siRNA target sequence for MTX1 (NM_198883.1,773-791).
cttcgaaaagaggtacata

SEQ ID NO: 269446 - DNA, 19 bp, Homo sapiens
  siRNA target sequence for MTX1 (NM_198883.1,776-794).
cgaaaagaggtacatactt

SEQ ID NO: 269447 - DNA, 19 bp, Homo sapiens
  siRNA target sequence for MTX2 (NM_006554.1,261-279).
ggcctgaaaatgctacatt

SEQ ID NO: 269448 - DNA, 19 bp, Homo sapiens
  siRNA target sequence for MTX2 (NM_006554.1,262-280).
gcctgaaaatgctacatta

SEQ ID NO: 269449 - DNA, 19 bp, Homo sapiens
  siRNA target sequence for MTX2 (NM_006554.1,358-376).
gtgtaacttgcctatcaaa

SEQ ID NO: 269450 - DNA, 19 bp, Homo sapiens
  siRNA target sequence for MTX2 (NM_006554.1,406-424).
gtctccatctggtaaagta

SEQ ID NO: 269451 - DNA, 19 bp, Homo sapiens
  siRNA target sequence for MTX2 (NM_006554.1,437-455).
gtgggaaatcaagtagtat

SEQ ID NO: 269452 - DNA, 19 bp, Homo sapiens
  siRNA target sequence for MTX2 (NM_006554.1,439-457).
gggaaatcaagtagtatca

SEQ ID NO: 269453 - DNA, 19 bp, Homo sapiens
  siRNA target sequence for MTX2 (NM_006554.1,465-483).
gtccaatagtccaatttgt

SEQ ID NO: 269454 - DNA, 19 bp, Homo sapiens
  siRNA target sequence for MTX2 (NM_006554.1,467-485).
ccaatagtccaatttgtta

SEQ ID NO: 269455 - DNA, 19 bp, Homo sapiens
  siRNA target sequence for MTX2 (NM_006554.1,468-486).
caatagtccaatttgttaa

SEQ ID NO: 269456 - DNA, 19 bp, Homo sapiens
  siRNA target sequence for MTX2 (NM_006554.1,490-508).
caagggccattctcttagt

SEQ ID NO: 269457 - DNA, 19 bp, Homo sapiens
  siRNA target sequence for MTX2 (NM_006554.1,541-559).
gaaagcttacatggaatta

SEQ ID NO: 269458 - DNA, 19 bp, Homo sapiens
  siRNA target sequence for MTX2 (NM_006554.1,545-563).
gcttacatggaattagtca

SEQ ID NO: 269459 - DNA, 19 bp, Homo sapiens
  siRNA target sequence for MTX2 (NM_006554.1,625-643).
gatcactcatgctaggtat

SEQ ID NO: 269460 - DNA, 19 bp, Homo sapiens
  siRNA target sequence for MTX2 (NM_006554.1,696-714).
gggaagtcaaacgtaagat

SEQ ID NO: 269461 - DNA, 19 bp, Homo sapiens
  siRNA target sequence for MTX2 (NM_006554.1,698-716).
gaagtcaaacgtaagatga

SEQ ID NO: 269462 - DNA, 19 bp, Homo sapiens
  siRNA target sequence for MTX2 (NM_006554.1,800-818).
ggaacacaaccgtatttct

SEQ ID NO: 269463 - DNA, 19 bp, Homo sapiens
  siRNA target sequence for MTX2 (NM_006554.1,801-819).
gaacacaaccgtatttctt

SEQ ID NO: 269464 - DNA, 19 bp, Homo sapiens
  siRNA target sequence for MTX2 (NM_006554.1,804-822).
cacaaccgtatttcttcaa

SEQ ID NO: 269465 - DNA, 19 bp, Homo sapiens
  siRNA target sequence for MTX2 (NM_006554.1,810-828).
cgtatttcttcaataagca

SEQ ID NO: 269466 - DNA, 19 bp, Homo sapiens
  siRNA target sequence for MTX2 (NM_006554.1,820-838).
caataagcagcctactgaa

SEQ ID NO: 269467 - DNA, 19 bp, Homo sapiens
  siRNA target sequence for MTX2 (NM_006554.1,851-869).
gtatttggccatctataca

SEQ ID NO: 269468 - DNA, 19 bp, Homo sapiens
  siRNA target sequence for MTX2 (NM_006554.1,870-888).
ccattcttaccacacaatt

SEQ ID NO: 269469 - DNA, 19 bp, Homo sapiens
  siRNA target sequence for MTX2 (NM_006554.1,875-893).
cttaccacacaattgacaa

SEQ ID NO: 269470 - DNA, 19 bp, Homo sapiens
  siRNA target sequence for MTX2 (NM_006554.1,906-924).
ctgagaaggtgaaaaacta

SEQ ID NO: 269471 - DNA, 19 bp, Homo sapiens
  siRNA target sequence for MTX2 (NM_006554.1,939-957).
ctttctgtaggagaattga

SEQ ID NO: 269472 - DNA, 19 bp, Homo sapiens
  siRNA target sequence for NAPA (NM_003827.1,119-137).
gagcgcaaagtgaagaact

SEQ ID NO: 269473 - DNA, 19 bp, Homo sapiens
  siRNA target sequence for NAPA (NM_003827.1,160-178).
ctttggaggctcatccaaa

SEQ ID NO: 269474 - DNA, 19 bp, Homo sapiens
  siRNA target sequence for NAPA (NM_003827.1,165-183).
gaggctcatccaaaataga

SEQ ID NO: 269475 - DNA, 19 bp, Homo sapiens
  siRNA target sequence for NAPA (NM_003827.1,358-376).
ccaagaggccattaactgt

SEQ ID NO: 269476 - DNA, 19 bp, Homo sapiens
  siRNA target sequence for NAPA (NM_003827.1,359-377).
caagaggccattaactgtt

SEQ ID NO: 269477 - DNA, 19 bp, Homo sapiens
  siRNA target sequence for NAPA (NM_003827.1,383-401).
cgagcaatcgagatctaca

SEQ ID NO: 269478 - DNA, 19 bp, Homo sapiens
  siRNA target sequence for NAPA (NM_003827.1,506-524).
cagtctgcagactactaca

SEQ ID NO: 269479 - DNA, 19 bp, Homo sapiens
  siRNA target sequence for NAPA (NM_003827.1,669-687).
gcgccaaagactacttctt

SEQ ID NO: 269480 - DNA, 19 bp, Homo sapiens
  siRNA target sequence for NAPA (NM_003827.1,774-792).
ctgattcccgggaatgcaa

SEQ ID NO: 269481 - DNA, 19 bp, Homo sapiens
  siRNA target sequence for NAPA (NM_003827.1,780-798).
cccgggaatgcaagttgat

SEQ ID NO: 269482 - DNA, 19 bp, Homo sapiens
  siRNA target sequence for NAPA (NM_003827.1,782-800).
cgggaatgcaagttgatga

SEQ ID NO: 269483 - DNA, 19 bp, Homo sapiens
  siRNA target sequence for NAPA (NM_003827.1,846-864).
ccgagtcggtgaaggaata

SEQ ID NO: 269484 - DNA, 19 bp, Homo sapiens
  siRNA target sequence for NAPG (NM_003826.1,78-96).
cggctcagaagataaacga

SEQ ID NO: 269485 - DNA, 19 bp, Homo sapiens
  siRNA target sequence for NAPG (NM_003826.1,174-192).
ccgcttctgaatatggaaa

SEQ ID NO: 269486 - DNA, 19 bp, Homo sapiens
  siRNA target sequence for NAPG (NM_003826.1,175-193).
cgcttctgaatatggaaaa

SEQ ID NO: 269487 - DNA, 19 bp, Homo sapiens
  siRNA target sequence for NAPG (NM_003826.1,257-275).
gctgttgcccatgaaaata

SEQ ID NO: 269488 - DNA, 19 bp, Homo sapiens
  siRNA target sequence for NAPG (NM_003826.1,348-366).
cagaggccgttcagctaat

SEQ ID NO: 269489 - DNA, 19 bp, Homo sapiens
  siRNA target sequence for NAPG (NM_003826.1,353-371).
gccgttcagctaattgaga

SEQ ID NO: 269490 - DNA, 19 bp, Homo sapiens
  siRNA target sequence for NAPG (NM_003826.1,373-391).
ggccagcatgatgtatcta

SEQ ID NO: 269491 - DNA, 19 bp, Homo sapiens
  siRNA target sequence for NAPG (NM_003826.1,375-393).
ccagcatgatgtatctaga

SEQ ID NO: 269492 - DNA, 19 bp, Homo sapiens
  siRNA target sequence for NAPG (NM_003826.1,427-445).
ggagcgagctggaaagctt

SEQ ID NO: 269493 - DNA, 19 bp, Homo sapiens
  siRNA target sequence for NAPG (NM_003826.1,430-448).
gcgagctggaaagcttata

SEQ ID NO: 269494 - DNA, 19 bp, Homo sapiens
  siRNA target sequence for NAPG (NM_003826.1,432-450).
gagctggaaagcttataga

SEQ ID NO: 269495 - DNA, 19 bp, Homo sapiens
  siRNA target sequence for NAPG (NM_003826.1,434-452).
gctggaaagcttatagaaa

SEQ ID NO: 269496 - DNA, 19 bp, Homo sapiens
  siRNA target sequence for NAPG (NM_003826.1,469-487).
ggctgtacagttatatcaa

SEQ ID NO: 269497 - DNA, 19 bp, Homo sapiens
  siRNA target sequence for NAPG (NM_003826.1,485-503).
caacagacagctaatgtgt

SEQ ID NO: 269498 - DNA, 19 bp, Homo sapiens
  siRNA target sequence for NAPG (NM_003826.1,490-508).
gacagctaatgtgtttgaa

SEQ ID NO: 269499 - DNA, 19 bp, Homo sapiens
  siRNA target sequence for NAPG (NM_003826.1,520-538).
cttacgacaggcagttgaa

SEQ ID NO: 269500 - DNA, 19 bp, Homo sapiens
  siRNA target sequence for NAPG (NM_003826.1,570-588).
gaggacgtaggtttgatga

SEQ ID NO: 269501 - DNA, 19 bp, Homo sapiens
  siRNA target sequence for NAPG (NM_003826.1,590-608).
gcggcactctctattcaga

SEQ ID NO: 269502 - DNA, 19 bp, Homo sapiens
  siRNA target sequence for NAPG (NM_003826.1,591-609).
cggcactctctattcagaa

SEQ ID NO: 269503 - DNA, 19 bp, Homo sapiens
  siRNA target sequence for NAPG (NM_003826.1,669-687).
ctcaagtcttagttcatct

SEQ ID NO: 269504 - DNA, 19 bp, Homo sapiens
  siRNA target sequence for NAPG (NM_003826.1,722-740).
gtccgggagagctatagca

SEQ ID NO: 269505 - DNA, 19 bp, Homo sapiens
  siRNA target sequence for NAPG (NM_003826.1,840-858).
caccgcttttcaagtacat

SEQ ID NO: 269506 - DNA, 19 bp, Homo sapiens
  siRNA target sequence for Nup37 (NM_024057.2,71-89).
gcaagatgcctcaagaaat

SEQ ID NO: 269507 - DNA, 19 bp, Homo sapiens
  siRNA target sequence for Nup37 (NM_024057.2,95-113).
ctacactgtggattgtgaa

SEQ ID NO: 269508 - DNA, 19 bp, Homo sapiens
  siRNA target sequence for Nup37 (NM_024057.2,120-138).
gtgcatgtggtagaattta

SEQ ID NO: 269509 - DNA, 19 bp, Homo sapiens
  siRNA target sequence for Nup37 (NM_024057.2,122-140).
gcatgtggtagaatttaat

SEQ ID NO: 269510 - DNA, 19 bp, Homo sapiens
  siRNA target sequence for Nup37 (NM_024057.2,153-171).
ggggattcaggaaacctaa

SEQ ID NO: 269511 - DNA, 19 bp, Homo sapiens
  siRNA target sequence for Nup37 (NM_024057.2,154-172).
gggattcaggaaacctaat

SEQ ID NO: 269512 - DNA, 19 bp, Homo sapiens
  siRNA target sequence for Nup37 (NM_024057.2,155-173).
ggattcaggaaacctaatt

SEQ ID NO: 269513 - DNA, 19 bp, Homo sapiens
  siRNA target sequence for Nup37 (NM_024057.2,174-192).
gcatatggtggcaataatt

SEQ ID NO: 269514 - DNA, 19 bp, Homo sapiens
  siRNA target sequence for Nup37 (NM_024057.2,200-218).
cattggcacgtgtacgttt

SEQ ID NO: 269515 - DNA, 19 bp, Homo sapiens
  siRNA target sequence for Nup37 (NM_024057.2,211-229).
gtacgtttcaggaagaaga

SEQ ID NO: 269516 - DNA, 19 bp, Homo sapiens
  siRNA target sequence for Nup37 (NM_024057.2,234-252).
gacgttgaaggcattcagt

SEQ ID NO: 269517 - DNA, 19 bp, Homo sapiens
  siRNA target sequence for Nup37 (NM_024057.2,305-323).
gagcccagagactagactt

SEQ ID NO: 269518 - DNA, 19 bp, Homo sapiens
  siRNA target sequence for Nup37 (NM_024057.2,308-326).
cccagagactagacttgat

SEQ ID NO: 269519 - DNA, 19 bp, Homo sapiens
  siRNA target sequence for Nup37 (NM_024057.2,312-330).
gagactagacttgattcat

SEQ ID NO: 269520 - DNA, 19 bp, Homo sapiens
  siRNA target sequence for Nup37 (NM_024057.2,328-346).
cattgcctccagtaatcaa

SEQ ID NO: 269521 - DNA, 19 bp, Homo sapiens
  siRNA target sequence for Nup37 (NM_024057.2,332-350).
gcctccagtaatcaaattt

SEQ ID NO: 269522 - DNA, 19 bp, Homo sapiens
  siRNA target sequence for Nup37 (NM_024057.2,333-351).
cctccagtaatcaaatttt

SEQ ID NO: 269523 - DNA, 19 bp, Homo sapiens
  siRNA target sequence for Nup37 (NM_024057.2,336-354).
ccagtaatcaaattttgta

SEQ ID NO: 269524 - DNA, 19 bp, Homo sapiens
  siRNA target sequence for Nup37 (NM_024057.2,352-370).
gtacttcagctgctgatat

SEQ ID NO: 269525 - DNA, 19 bp, Homo sapiens
  siRNA target sequence for Nup37 (NM_024057.2,355-373).
cttcagctgctgatatgaa

SEQ ID NO: 269526 - DNA, 19 bp, Homo sapiens
  siRNA target sequence for Nup37 (NM_024057.2,426-444).
gagggccataccgatttca

SEQ ID NO: 269527 - DNA, 19 bp, Homo sapiens
  siRNA target sequence for Nup37 (NM_024057.2,428-446).
gggccataccgatttcatt

SEQ ID NO: 269528 - DNA, 19 bp, Homo sapiens
  siRNA target sequence for Nup37 (NM_024057.2,429-447).
ggccataccgatttcatta

SEQ ID NO: 269529 - DNA, 19 bp, Homo sapiens
  siRNA target sequence for Nup37 (NM_024057.2,430-448).
gccataccgatttcattaa

SEQ ID NO: 269530 - DNA, 19 bp, Homo sapiens
  siRNA target sequence for Nup37 (NM_024057.2,431-449).
ccataccgatttcattaat

SEQ ID NO: 269531 - DNA, 19 bp, Homo sapiens
  siRNA target sequence for Nup37 (NM_024057.2,436-454).
ccgatttcattaatggttt

SEQ ID NO: 269532 - DNA, 19 bp, Homo sapiens
  siRNA target sequence for Nup37 (NM_024057.2,501-519).
gatcacacctgcaggattt

SEQ ID NO: 269533 - DNA, 19 bp, Homo sapiens
  siRNA target sequence for Nup37 (NM_024057.2,591-609).
gaggagacttttaagctaa

SEQ ID NO: 269534 - DNA, 19 bp, Homo sapiens
  siRNA target sequence for Nup37 (NM_024057.2,628-646).
gaacaatccggttttatga

SEQ ID NO: 269535 - DNA, 19 bp, Homo sapiens
  siRNA target sequence for Nup37 (NM_024057.2,653-671).
ggcccaacaggctatttta

SEQ ID NO: 269536 - DNA, 19 bp, Homo sapiens
  siRNA target sequence for Nup37 (NM_024057.2,741-759).
gccgttgcaggaaatgatt

SEQ ID NO: 269537 - DNA, 19 bp, Homo sapiens
  siRNA target sequence for Nup37 (NM_024057.2,761-779).
gttaatttgggatattact

SEQ ID NO: 269538 - DNA, 19 bp, Homo sapiens
  siRNA target sequence for Nup37 (NM_024057.2,781-799).
ggtccagttatcctcaaaa

SEQ ID NO: 269539 - DNA, 19 bp, Homo sapiens
  siRNA target sequence for Nup37 (NM_024057.2,784-802).
ccagttatcctcaaaataa

SEQ ID NO: 269540 - DNA, 19 bp, Homo sapiens
  siRNA target sequence for Nup37 (NM_024057.2,1009-1027).
gagaccacaagctgttgtt

SEQ ID NO: 269541 - DNA, 19 bp, Homo sapiens
  siRNA target sequence for Nup37 (NM_024057.2,1011-1029).
gaccacaagctgttgtttt

SEQ ID NO: 269542 - DNA, 19 bp, Homo sapiens
  siRNA target sequence for NUP98 (NM_005387.3,362-380).
gtttggaaccagttcattt

SEQ ID NO: 269543 - DNA, 19 bp, Homo sapiens
  siRNA target sequence for NUP98 (NM_005387.3,430-448).
caggaacagcaaatacctt

SEQ ID NO: 269544 - DNA, 19 bp, Homo sapiens
  siRNA target sequence for NUP98 (NM_005387.3,494-512).
caatgcctttgcacaaaat

SEQ ID NO: 269545 - DNA, 19 bp, Homo sapiens
  siRNA target sequence for NUP98 (NM_005387.3,561-579).
ctctttggaaccacaaata

SEQ ID NO: 269546 - DNA, 19 bp, Homo sapiens
  siRNA target sequence for NUP98 (NM_005387.3,572-590).
cacaaataccacctctaat

SEQ ID NO: 269547 - DNA, 19 bp, Homo sapiens
  siRNA target sequence for NUP98 (NM_005387.3,614-632).
cctctttgggccaagtagt

SEQ ID NO: 269548 - DNA, 19 bp, Homo sapiens
  siRNA target sequence for NUP98 (NM_005387.3,615-633).
ctctttgggccaagtagtt

SEQ ID NO: 269549 - DNA, 19 bp, Homo sapiens
  siRNA target sequence for NUP98 (NM_005387.3,642-660).
gctcctactgggactacta

SEQ ID NO: 269550 - DNA, 19 bp, Homo sapiens
  siRNA target sequence for NUP98 (NM_005387.3,643-661).
ctcctactgggactactat

SEQ ID NO: 269551 - DNA, 19 bp, Homo sapiens
  siRNA target sequence for NUP98 (NM_005387.3,645-663).
cctactgggactactatta

SEQ ID NO: 269552 - DNA, 19 bp, Homo sapiens
  siRNA target sequence for NUP98 (NM_005387.3,646-664).
ctactgggactactattaa

SEQ ID NO: 269553 - DNA, 19 bp, Homo sapiens
  siRNA target sequence for NUP98 (NM_005387.3,649-667).
ctgggactactattaaatt

SEQ ID NO: 269554 - DNA, 19 bp, Homo sapiens
  siRNA target sequence for NUP98 (NM_005387.3,651-669).
gggactactattaaattta

SEQ ID NO: 269555 - DNA, 19 bp, Homo sapiens
  siRNA target sequence for NUP98 (NM_005387.3,652-670).
ggactactattaaatttaa

SEQ ID NO: 269556 - DNA, 19 bp, Homo sapiens
  siRNA target sequence for NUP98 (NM_005387.3,672-690).
cctccaactggtacagata

SEQ ID NO: 269557 - DNA, 19 bp, Homo sapiens
  siRNA target sequence for NUP98 (NM_005387.3,676-694).
caactggtacagatactat

SEQ ID NO: 269558 - DNA, 19 bp, Homo sapiens
  siRNA target sequence for NUP98 (NM_005387.3,702-720).
gctggagttagcactaaca

SEQ ID NO: 269559 - DNA, 19 bp, Homo sapiens
  siRNA target sequence for NUP98 (NM_005387.3,703-721).
ctggagttagcactaacat

SEQ ID NO: 269560 - DNA, 19 bp, Homo sapiens
  siRNA target sequence for NUP98 (NM_005387.3,708-726).
gttagcactaacataagta

SEQ ID NO: 269561 - DNA, 19 bp, Homo sapiens
  siRNA target sequence for NUP98 (NM_005387.3,772-790).
cactagaggaacttcgttt

SEQ ID NO: 269562 - DNA, 19 bp, Homo sapiens
  siRNA target sequence for NUP98 (NM_005387.3,902-920).
ctcctccaccactaattca

SEQ ID NO: 269563 - DNA, 19 bp, Homo sapiens
  siRNA target sequence for NUP98 (NM_005387.3,948-966).
gcctttggaactagtacaa

SEQ ID NO: 269564 - DNA, 19 bp, Homo sapiens
  siRNA target sequence for NUP98 (NM_005387.3,1221-1239).
ctctttgggcagaccaata

SEQ ID NO: 269565 - DNA, 19 bp, Homo sapiens
  siRNA target sequence for NUP98 (NM_005387.3,1223-1241).
ctttgggcagaccaatact

SEQ ID NO: 269566 - DNA, 19 bp, Homo sapiens
  siRNA target sequence for NUP98 (NM_005387.3,1272-1290).
ggcaataacaagcttacta

SEQ ID NO: 269567 - DNA, 19 bp, Homo sapiens
  siRNA target sequence for NUP98 (NM_005387.3,1274-1292).
caataacaagcttactaca

SEQ ID NO: 269568 - DNA, 19 bp, Homo sapiens
  siRNA target sequence for NUP98 (NM_005387.3,1280-1298).
caagcttactacatttgga

SEQ ID NO: 269569 - DNA, 19 bp, Homo sapiens
  siRNA target sequence for NUP98 (NM_005387.3,1452-1470).
gctggacaggcatctttgt

SEQ ID NO: 269570 - DNA, 19 bp, Homo sapiens
  siRNA target sequence for NUP98 (NM_005387.3,1453-1471).
ctggacaggcatctttgtt

SEQ ID NO: 269571 - DNA, 19 bp, Homo sapiens
  siRNA target sequence for NUP98 (NM_005387.3,1475-1493).
gaacaaccaacctaagatt

SEQ ID NO: 269572 - DNA, 19 bp, Homo sapiens
  siRNA target sequence for NUP98 (NM_005387.3,1631-1649).
gcagcacatcaatagtcta

SEQ ID NO: 269573 - DNA, 19 bp, Homo sapiens
  siRNA target sequence for NUP98 (NM_005387.3,1632-1650).
cagcacatcaatagtctaa

SEQ ID NO: 269574 - DNA, 19 bp, Homo sapiens
  siRNA target sequence for NUP98 (NM_005387.3,1634-1652).
gcacatcaatagtctaaca

SEQ ID NO: 269575 - DNA, 19 bp, Homo sapiens
  siRNA target sequence for NUP98 (NM_005387.3,1690-1708).
cgatgtcagaccctaagaa

SEQ ID NO: 269576 - DNA, 19 bp, Homo sapiens
  siRNA target sequence for NUP98 (NM_005387.3,1743-1761).
gcccagaaggctcttacta

SEQ ID NO: 269577 - DNA, 19 bp, Homo sapiens
  siRNA target sequence for NUP98 (NM_005387.3,1745-1763).
ccagaaggctcttactaca

SEQ ID NO: 269578 - DNA, 19 bp, Homo sapiens
  siRNA target sequence for NUP98 (NM_005387.3,1759-1777).
ctacacctactcattataa

SEQ ID NO: 269579 - DNA, 19 bp, Homo sapiens
  siRNA target sequence for NUP98 (NM_005387.3,1764-1782).
cctactcattataaactga

SEQ ID NO: 269580 - DNA, 19 bp, Homo sapiens
  siRNA target sequence for NUP98 (NM_005387.3,1805-1823).
ccggccaaaggctttacaa

SEQ ID NO: 269581 - DNA, 19 bp, Homo sapiens
  siRNA target sequence for NUP98 (NM_005387.3,1806-1824).
cggccaaaggctttacaaa

SEQ ID NO: 269582 - DNA, 19 bp, Homo sapiens
  siRNA target sequence for NUP98 (NM_005387.3,1808-1826).
gccaaaggctttacaaaca

SEQ ID NO: 269583 - DNA, 19 bp, Homo sapiens
  siRNA target sequence for NUP98 (NM_005387.3,1912-1930).
gcattaagaagttggtttt

SEQ ID NO: 269584 - DNA, 19 bp, Homo sapiens
  siRNA target sequence for NUP98 (NM_005387.3,1926-1944).
gttttgaagaaccttaata

SEQ ID NO: 269585 - DNA, 19 bp, Homo sapiens
  siRNA target sequence for NUP98 (NM_005387.3,1938-1956).
cttaataatagcaatctct

SEQ ID NO: 269586 - DNA, 19 bp, Homo sapiens
  siRNA target sequence for NUP98 (NM_005387.3,1963-1981).
ctgttaatcgtgattcaga

SEQ ID NO: 269587 - DNA, 19 bp, Homo sapiens
  siRNA target sequence for NUP98 (NM_005387.3,2019-2037).
gagagatttagtttcctaa

SEQ ID NO: 269588 - DNA, 19 bp, Homo sapiens
  siRNA target sequence for NUP98 (NM_005387.3,2023-2041).
gatttagtttcctaagcaa

SEQ ID NO: 269589 - DNA, 19 bp, Homo sapiens
  siRNA target sequence for NUP98 (NM_005387.3,2033-2051).
cctaagcaaacctgttgat

SEQ ID NO: 269590 - DNA, 19 bp, Homo sapiens
  siRNA target sequence for NUP98 (NM_005387.3,2079-2097).
gattcccttgtttcacatt

SEQ ID NO: 269591 - DNA, 19 bp, Homo sapiens
  siRNA target sequence for NUP98 (NM_005387.3,2237-2255).
cagtgaagaaacgtctttt

SEQ ID NO: 269592 - DNA, 19 bp, Homo sapiens
  siRNA target sequence for NUP98 (NM_005387.3,2273-2291).
ggatgaccgagaagaaata

SEQ ID NO: 269593 - DNA, 19 bp, Homo sapiens
  siRNA target sequence for NUP98 (NM_005387.3,2312-2330).
gcacccagcaggtattatt

SEQ ID NO: 269594 - DNA, 19 bp, Homo sapiens
  siRNA target sequence for NUP98 (NM_005387.3,2320-2338).
caggtattattctcactaa

SEQ ID NO: 269595 - DNA, 19 bp, Homo sapiens
  siRNA target sequence for NUP98 (NM_005387.3,2339-2357).
ggttggttactatactatt

SEQ ID NO: 269596 - DNA, 19 bp, Homo sapiens
  siRNA target sequence for NUP98 (NM_005387.3,2411-2429).
ctctgatttcactattggt

SEQ ID NO: 269597 - DNA, 19 bp, Homo sapiens
  siRNA target sequence for NUP98 (NM_005387.3,2422-2440).
ctattggtcggaaaggtta

SEQ ID NO: 269598 - DNA, 19 bp, Homo sapiens
  siRNA target sequence for NUP98 (NM_005387.3,2427-2445).
ggtcggaaaggttatggtt

SEQ ID NO: 269599 - DNA, 19 bp, Homo sapiens
  siRNA target sequence for NUP98 (NM_005387.3,2436-2454).
ggttatggttcaatctatt

SEQ ID NO: 269600 - DNA, 19 bp, Homo sapiens
  siRNA target sequence for NUP98 (NM_005387.3,2437-2455).
gttatggttcaatctattt

SEQ ID NO: 269601 - DNA, 19 bp, Homo sapiens
  siRNA target sequence for NUP98 (NM_005387.3,2466-2484).
gtgaatttgacaaatctaa

SEQ ID NO: 269602 - DNA, 19 bp, Homo sapiens
  siRNA target sequence for NUP98 (NM_005387.3,2507-2525).
ccggaggaaagaagtagtt

SEQ ID NO: 269603 - DNA, 19 bp, Homo sapiens
  siRNA target sequence for NUP98 (NM_005387.3,2509-2527).
ggaggaaagaagtagttgt

SEQ ID NO: 269604 - DNA, 19 bp, Homo sapiens
  siRNA target sequence for NUP98 (NM_005387.3,2512-2530).
ggaaagaagtagttgtcta

SEQ ID NO: 269605 - DNA, 19 bp, Homo sapiens
  siRNA target sequence for NUP98 (NM_005387.3,2523-2541).
gttgtctacttagatgata

SEQ ID NO: 269606 - DNA, 19 bp, Homo sapiens
  siRNA target sequence for NUP98 (NM_005387.3,2560-2578).
gtgaagggctaaataggaa

SEQ ID NO: 269607 - DNA, 19 bp, Homo sapiens
  siRNA target sequence for NUP98 (NM_005387.3,2579-2597).
ggctgaagttacattggat

SEQ ID NO: 269608 - DNA, 19 bp, Homo sapiens
  siRNA target sequence for NUP98 (NM_005387.3,2644-2662).
cagatcgccttgctgatat

SEQ ID NO: 269609 - DNA, 19 bp, Homo sapiens
  siRNA target sequence for NUP98 (NM_005387.3,2646-2664).
gatcgccttgctgatatca

SEQ ID NO: 269610 - DNA, 19 bp, Homo sapiens
  siRNA target sequence for NUP98 (NM_005387.3,2649-2667).
cgccttgctgatatcaact

SEQ ID NO: 269611 - DNA, 19 bp, Homo sapiens
  siRNA target sequence for NUP98 (NM_005387.3,2650-2668).
gccttgctgatatcaacta

SEQ ID NO: 269612 - DNA, 19 bp, Homo sapiens
  siRNA target sequence for NUP98 (NM_005387.3,2703-2721).
ggagctcaattcaaagaat

SEQ ID NO: 269613 - DNA, 19 bp, Homo sapiens
  siRNA target sequence for NUP98 (NM_005387.3,2737-2755).
gttcttgggtgtttaaggt

SEQ ID NO: 269614 - DNA, 19 bp, Homo sapiens
  siRNA target sequence for NUP98 (NM_005387.3,2747-2765).
gtttaaggtctcccatttt

SEQ ID NO: 269615 - DNA, 19 bp, Homo sapiens
  siRNA target sequence for NUP98 (NM_005387.3,2801-2819).
ggaggagcatccgtctaaa

SEQ ID NO: 269616 - DNA, 19 bp, Homo sapiens
  siRNA target sequence for NUP98 (NM_005387.3,2802-2820).
gaggagcatccgtctaaaa

SEQ ID NO: 269617 - DNA, 19 bp, Homo sapiens
  siRNA target sequence for NUP98 (NM_005387.3,2804-2822).
ggagcatccgtctaaaact

SEQ ID NO: 269618 - DNA, 19 bp, Homo sapiens
  siRNA target sequence for NUP98 (NM_005387.3,2805-2823).
gagcatccgtctaaaacta

SEQ ID NO: 269619 - DNA, 19 bp, Homo sapiens
  siRNA target sequence for NUP98 (NM_005387.3,2807-2825).
gcatccgtctaaaactagt

SEQ ID NO: 269620 - DNA, 19 bp, Homo sapiens
  siRNA target sequence for NUP98 (NM_005387.3,2808-2826).
catccgtctaaaactagta

SEQ ID NO: 269621 - DNA, 19 bp, Homo sapiens
  siRNA target sequence for NUP98 (NM_005387.3,2811-2829).
ccgtctaaaactagtacaa

SEQ ID NO: 269622 - DNA, 19 bp, Homo sapiens
  siRNA target sequence for NUP98 (NM_005387.3,2812-2830).
cgtctaaaactagtacaaa

SEQ ID NO: 269623 - DNA, 19 bp, Homo sapiens
  siRNA target sequence for NUP98 (NM_005387.3,2821-2839).
ctagtacaaagaagttgaa

SEQ ID NO: 269624 - DNA, 19 bp, Homo sapiens
  siRNA target sequence for NUP98 (NM_005387.3,2875-2893).
ccttgcagatggctcttaa

SEQ ID NO: 269625 - DNA, 19 bp, Homo sapiens
  siRNA target sequence for NUP98 (NM_005387.3,2964-2982).
gacagtgacatggtagata

SEQ ID NO: 269626 - DNA, 19 bp, Homo sapiens
  siRNA target sequence for NUP98 (NM_005387.3,2988-3006).
caggagccagttttggata

SEQ ID NO: 269627 - DNA, 19 bp, Homo sapiens
  siRNA target sequence for NUP98 (NM_005387.3,3045-3063).
gtgtctgcctcaacacata

SEQ ID NO: 269628 - DNA, 19 bp, Homo sapiens
  siRNA target sequence for NUP98 (NM_005387.3,3051-3069).
gcctcaacacatattgcat

SEQ ID NO: 269629 - DNA, 19 bp, Homo sapiens
  siRNA target sequence for NUP98 (NM_005387.3,3067-3085).
catcttcactgggaattaa

SEQ ID NO: 269630 - DNA, 19 bp, Homo sapiens
  siRNA target sequence for NUP98 (NM_005387.3,3179-3197).
caaagcagatacttctcaa

SEQ ID NO: 269631 - DNA, 19 bp, Homo sapiens
  siRNA target sequence for NUP98 (NM_005387.3,3228-3246).
gcatcccactcgtcgaaaa

SEQ ID NO: 269632 - DNA, 19 bp, Homo sapiens
  siRNA target sequence for NUP98 (NM_005387.3,3239-3257).
gtcgaaaactcgttcacta

SEQ ID NO: 269633 - DNA, 19 bp, Homo sapiens
  siRNA target sequence for NUP98 (NM_005387.3,3242-3260).
gaaaactcgttcactagtt

SEQ ID NO: 269634 - DNA, 19 bp, Homo sapiens
  siRNA target sequence for NUP98 (NM_005387.3,3258-3276).
gttggtgggttactacaat

SEQ ID NO: 269635 - DNA, 19 bp, Homo sapiens
  siRNA target sequence for NUP98 (NM_005387.3,3261-3279).
ggtgggttactacaatcaa

SEQ ID NO: 269636 - DNA, 19 bp, Homo sapiens
  siRNA target sequence for NUP98 (NM_005387.3,3340-3358).
gagcagcatctttaatgaa

SEQ ID NO: 269637 - DNA, 19 bp, Homo sapiens
  siRNA target sequence for NUP98 (NM_005387.3,3428-3446).
ccctgaggttccgttgaaa

SEQ ID NO: 269638 - DNA, 19 bp, Homo sapiens
  siRNA target sequence for NUP98 (NM_005387.3,3472-3490).
gcctagtccctcgtgaaaa

SEQ ID NO: 269639 - DNA, 19 bp, Homo sapiens
  siRNA target sequence for NUP98 (NM_005387.3,3474-3492).
ctagtccctcgtgaaaagt

SEQ ID NO: 269640 - DNA, 19 bp, Homo sapiens
  siRNA target sequence for NUP98 (NM_005387.3,3499-3517).
cctatggcaagggaaaact

SEQ ID NO: 269641 - DNA, 19 bp, Homo sapiens
  siRNA target sequence for NUP98 (NM_005387.3,3505-3523).
gcaagggaaaactcttgat

SEQ ID NO: 269642 - DNA, 19 bp, Homo sapiens
  siRNA target sequence for NUP98 (NM_005387.3,3571-3589).
ccaactggactcttgctaa

SEQ ID NO: 269643 - DNA, 19 bp, Homo sapiens
  siRNA target sequence for NUP98 (NM_005387.3,3572-3590).
caactggactcttgctaat

SEQ ID NO: 269644 - DNA, 19 bp, Homo sapiens
  siRNA target sequence for NUP98 (NM_005387.3,3667-3685).
ccaatccagtagctgttaa

SEQ ID NO: 269645 - DNA, 19 bp, Homo sapiens
  siRNA target sequence for NUP98 (NM_005387.3,3700-3718).
ccccattcaaagttcactt

SEQ ID NO: 269646 - DNA, 19 bp, Homo sapiens
  siRNA target sequence for NUP98 (NM_005387.3,3703-3721).
cattcaaagttcacttaga

SEQ ID NO: 269647 - DNA, 19 bp, Homo sapiens
  siRNA target sequence for NUP98 (NM_005387.3,3711-3729).
gttcacttagaaaaactca

SEQ ID NO: 269648 - DNA, 19 bp, Homo sapiens
  siRNA target sequence for NUP98 (NM_005387.3,3726-3744).
ctcagtttgagacaaagaa

SEQ ID NO: 269649 - DNA, 19 bp, Homo sapiens
  siRNA target sequence for NUP98 (NM_005387.3,3747-3765).
ccagatgaagacatgaaat

SEQ ID NO: 269650 - DNA, 19 bp, Homo sapiens
  siRNA target sequence for NUP98 (NM_005387.3,3777-3795).
cctctggagctcaaattaa

SEQ ID NO: 269651 - DNA, 19 bp, Homo sapiens
  siRNA target sequence for NUP98 (NM_005387.3,3850-3868).
gagttgctgtcattcatga

SEQ ID NO: 269652 - DNA, 19 bp, Homo sapiens
  siRNA target sequence for NUP98 (NM_005387.3,3869-3887).
ctatgcagattgggttaaa

SEQ ID NO: 269653 - DNA, 19 bp, Homo sapiens
  siRNA target sequence for NUP98 (NM_005387.3,3902-3920).
cttaccagaagcacaaatt

SEQ ID NO: 269654 - DNA, 19 bp, Homo sapiens
  siRNA target sequence for NUP98 (NM_005387.3,3935-3953).
cctgacatggacactatgt

SEQ ID NO: 269655 - DNA, 19 bp, Homo sapiens
  siRNA target sequence for NUP98 (NM_005387.3,3980-3998).
gcttgacagccagctaaat

SEQ ID NO: 269656 - DNA, 19 bp, Homo sapiens
  siRNA target sequence for NUP98 (NM_005387.3,4004-4022).
ccgtgaatacattcaaatt

SEQ ID NO: 269657 - DNA, 19 bp, Homo sapiens
  siRNA target sequence for NUP98 (NM_005387.3,4063-4081).
ctgccacacctcagattga

SEQ ID NO: 269658 - DNA, 19 bp, Homo sapiens
  siRNA target sequence for NUP98 (NM_005387.3,4344-4362).
gtgtggcagctctcagaaa

SEQ ID NO: 269659 - DNA, 19 bp, Homo sapiens
  siRNA target sequence for NUP98 (NM_005387.3,4377-4395).
gtgtgctcccagttggatt

SEQ ID NO: 269660 - DNA, 19 bp, Homo sapiens
  siRNA target sequence for NUP98 (NM_005387.3,4409-4427).
ggctatccatctttggtat

SEQ ID NO: 269661 - DNA, 19 bp, Homo sapiens
  siRNA target sequence for NUP98 (NM_005387.3,4410-4428).
gctatccatctttggtatt

SEQ ID NO: 269662 - DNA, 19 bp, Homo sapiens
  siRNA target sequence for NUP98 (NM_005387.3,4411-4429).
ctatccatctttggtattt

SEQ ID NO: 269663 - DNA, 19 bp, Homo sapiens
  siRNA target sequence for NUP98 (NM_005387.3,4493-4511).
ctctgacagtgacagatat

SEQ ID NO: 269664 - DNA, 19 bp, Homo sapiens
  siRNA target sequence for NUP98 (NM_005387.3,4517-4535).
ctccccacttccttcgtat

SEQ ID NO: 269665 - DNA, 19 bp, Homo sapiens
  siRNA target sequence for NUP98 (NM_005387.3,4541-4559).
gggttctggctgtgtgata

SEQ ID NO: 269666 - DNA, 19 bp, Homo sapiens
  siRNA target sequence for NUP98 (NM_005387.3,4617-4635).
ctctacagtgacagacatt

SEQ ID NO: 269667 - DNA, 19 bp, Homo sapiens
  siRNA target sequence for NUP98 (NM_005387.3,4652-4670).
gctggagcctcgaagcata

SEQ ID NO: 269668 - DNA, 19 bp, Homo sapiens
  siRNA target sequence for NUP98 (NM_005387.3,4653-4671).
ctggagcctcgaagcataa

SEQ ID NO: 269669 - DNA, 19 bp, Homo sapiens
  siRNA target sequence for NUP98 (NM_005387.3,4655-4673).
ggagcctcgaagcataaca

SEQ ID NO: 269670 - DNA, 19 bp, Homo sapiens
  siRNA target sequence for NUP98 (NM_005387.3,4666-4684).
gcataacagcagatccttt

SEQ ID NO: 269671 - DNA, 19 bp, Homo sapiens
  siRNA target sequence for NUP98 (NM_005387.3,4783-4801).
ctggccagcttgaaagtga

SEQ ID NO: 269672 - DNA, 19 bp, Homo sapiens
  siRNA target sequence for NUP98 (NM_005387.3,4901-4919).
gttggagacccctgaatct

SEQ ID NO: 269673 - DNA, 19 bp, Homo sapiens
  siRNA target sequence for NUP98 (NM_005387.3,4914-4932).
gaatcttgggctaaagaga

SEQ ID NO: 269674 - DNA, 19 bp, Homo sapiens
  siRNA target sequence for NUP98 (NM_005387.3,4922-4940).
ggctaaagagactttcctt

SEQ ID NO: 269675 - DNA, 19 bp, Homo sapiens
  siRNA target sequence for NUP98 (NM_005387.3,4923-4941).
gctaaagagactttcctta

SEQ ID NO: 269676 - DNA, 19 bp, Homo sapiens
  siRNA target sequence for NUP98 (NM_005387.3,4953-4971).
cgtgtacctgccaaatgga

SEQ ID NO: 269677 - DNA, 19 bp, Homo sapiens
  siRNA target sequence for NUP98 (NM_005387.3,4989-5007).
gtgcgagcacacatggaat

SEQ ID NO: 269678 - DNA, 19 bp, Homo sapiens
  siRNA target sequence for NUP98 (NM_005387.3,5018-5036).
cttagaggccctttgctta

SEQ ID NO: 269679 - DNA, 19 bp, Homo sapiens
  siRNA target sequence for NUP98 (NM_005387.3,5069-5087).
gctcatcatccgacactta

SEQ ID NO: 269680 - DNA, 19 bp, Homo sapiens
  siRNA target sequence for NUP98 (NM_005387.3,5098-5116).
ccatcattaatgagaacta

SEQ ID NO: 269681 - DNA, 19 bp, Homo sapiens
  siRNA target sequence for NUP98 (NM_005387.3,5184-5202).
gaaacatctgggcttgttt

SEQ ID NO: 269682 - DNA, 19 bp, Homo sapiens
  siRNA target sequence for NUP98 (NM_005387.3,5196-5214).
cttgtttacctggactata

SEQ ID NO: 269683 - DNA, 19 bp, Homo sapiens
  siRNA target sequence for NUP98 (NM_005387.3,5207-5225).
ggactatattagagtcatt

SEQ ID NO: 269684 - DNA, 19 bp, Homo sapiens
  siRNA target sequence for NUP98 (NM_005387.3,5288-5306).
gacctggagcagttacaca

SEQ ID NO: 269685 - DNA, 19 bp, Homo sapiens
  siRNA target sequence for NUP98 (NM_016320.2,4716-4734).
gtgctgagggctcttaact

SEQ ID NO: 269686 - DNA, 19 bp, Homo sapiens
  siRNA target sequence for NUP98 (NM_016320.2,4719-4737).
ctgagggctcttaactaca

SEQ ID NO: 269687 - DNA, 19 bp, Homo sapiens
  siRNA target sequence for NUP98 (NM_016320.2,5277-5295).
cagttacacatcaaagtga

SEQ ID NO: 269688 - DNA, 19 bp, Homo sapiens
  siRNA target sequence for NUP98 (NM_016320.2,5308-5326).
gtcggatagagcagattca

SEQ ID NO: 269689 - DNA, 19 bp, Homo sapiens
  siRNA target sequence for NUP98 (NM_016320.2,5316-5334).
gagcagattcagtgttaca

SEQ ID NO: 269690 - DNA, 19 bp, Homo sapiens
  siRNA target sequence for NUP98 (NM_139131.1,2908-2926).
ctccacctcaggtagagaa

SEQ ID NO: 269691 - DNA, 19 bp, Homo sapiens
  siRNA target sequence for NUP98 (NM_139131.1,2910-2928).
ccacctcaggtagagaaaa

SEQ ID NO: 269692 - DNA, 19 bp, Homo sapiens
  siRNA target sequence for NUTF2 (NM_005796.1,434-452).
gggtttgcaccaatgacat

SEQ ID NO: 269693 - DNA, 19 bp, Homo sapiens
  siRNA target sequence for NUTF2 (NM_005796.1,459-477).
gctcgccctgcacaacttt

SEQ ID NO: 269694 - DNA, 19 bp, Homo sapiens
  siRNA target sequence for NXT1 (NM_013248.2,584-602).
cttccagcgagttccaaat

SEQ ID NO: 269695 - DNA, 19 bp, Homo sapiens
  siRNA target sequence for NXT2 (NM_018698.3,155-173).
gaagaagtaactattatga

SEQ ID NO: 269696 - DNA, 19 bp, Homo sapiens
  siRNA target sequence for NXT2 (NM_018698.3,270-288).
ggccacgtctctggatttt

SEQ ID NO: 269697 - DNA, 19 bp, Homo sapiens
  siRNA target sequence for NXT2 (NM_018698.3,271-289).
gccacgtctctggatttta

SEQ ID NO: 269698 - DNA, 19 bp, Homo sapiens
  siRNA target sequence for NXT2 (NM_018698.3,272-290).
ccacgtctctggattttaa

SEQ ID NO: 269699 - DNA, 19 bp, Homo sapiens
  siRNA target sequence for NXT2 (NM_018698.3,390-408).
ggacaaggccaccttaata

SEQ ID NO: 269700 - DNA, 19 bp, Homo sapiens
  siRNA target sequence for NXT2 (NM_018698.3,391-409).
gacaaggccaccttaatat

SEQ ID NO: 269701 - DNA, 19 bp, Homo sapiens
  siRNA target sequence for NXT2 (NM_018698.3,396-414).
ggccaccttaatatggaat

SEQ ID NO: 269702 - DNA, 19 bp, Homo sapiens
  siRNA target sequence for NXT2 (NM_018698.3,402-420).
cttaatatggaatggaaat

SEQ ID NO: 269703 - DNA, 19 bp, Homo sapiens
  siRNA target sequence for NXT2 (NM_018698.3,431-449).
ggctggatgccctaaataa

SEQ ID NO: 269704 - DNA, 19 bp, Homo sapiens
  siRNA target sequence for NXT2 (NM_018698.3,475-493).
gagttccaggtcaatatgt

SEQ ID NO: 269705 - DNA, 19 bp, Homo sapiens
  siRNA target sequence for NXT2 (NM_018698.3,481-499).
caggtcaatatgttagatt

SEQ ID NO: 269706 - DNA, 19 bp, Homo sapiens
  siRNA target sequence for NXT2 (NM_018698.3,520-538).
gcaactcagtcccaaacta

SEQ ID NO: 269707 - DNA, 19 bp, Homo sapiens
  siRNA target sequence for NXT2 (NM_018698.3,624-642).
gtccactcccaacaatact

SEQ ID NO: 269708 - DNA, 19 bp, Homo sapiens
  siRNA target sequence for NXT2 (NM_018698.3,676-694).
caagattggtctagtagtt

SEQ ID NO: 269709 - DNA, 19 bp, Homo sapiens
  siRNA target sequence for PEX13 (NM_002618.1,136-154).
ctgatttgggtcctacttt

SEQ ID NO: 269710 - DNA, 19 bp, Homo sapiens
  siRNA target sequence for PEX13 (NM_002618.1,138-156).
gatttgggtcctactttaa

SEQ ID NO: 269711 - DNA, 19 bp, Homo sapiens
  siRNA target sequence for PEX13 (NM_002618.1,143-161).
gggtcctactttaatgaca

SEQ ID NO: 269712 - DNA, 19 bp, Homo sapiens
  siRNA target sequence for PEX13 (NM_002618.1,144-162).
ggtcctactttaatgacaa

SEQ ID NO: 269713 - DNA, 19 bp, Homo sapiens
  siRNA target sequence for PEX13 (NM_002618.1,187-205).
gagtgcccccacctattct

SEQ ID NO: 269714 - DNA, 19 bp, Homo sapiens
  siRNA target sequence for PEX13 (NM_002618.1,253-271).
gacctgcttacagttcatt

SEQ ID NO: 269715 - DNA, 19 bp, Homo sapiens
  siRNA target sequence for PEX13 (NM_002618.1,279-297).
ggatatggtgcctatggaa

SEQ ID NO: 269716 - DNA, 19 bp, Homo sapiens
  siRNA target sequence for PEX13 (NM_002618.1,280-298).
gatatggtgcctatggaaa

SEQ ID NO: 269717 - DNA, 19 bp, Homo sapiens
  siRNA target sequence for PEX13 (NM_002618.1,319-337).
gtccttatagttatggata

SEQ ID NO: 269718 - DNA, 19 bp, Homo sapiens
  siRNA target sequence for PEX13 (NM_002618.1,321-339).
ccttatagttatggatata

SEQ ID NO: 269719 - DNA, 19 bp, Homo sapiens
  siRNA target sequence for PEX13 (NM_002618.1,353-371).
caaccgcctccgtgtagat

SEQ ID NO: 269720 - DNA, 19 bp, Homo sapiens
  siRNA target sequence for PEX13 (NM_002618.1,356-374).
ccgcctccgtgtagatgat

SEQ ID NO: 269721 - DNA, 19 bp, Homo sapiens
  siRNA target sequence for PEX13 (NM_002618.1,358-376).
gcctccgtgtagatgatct

SEQ ID NO: 269722 - DNA, 19 bp, Homo sapiens
  siRNA target sequence for PEX13 (NM_002618.1,359-377).
cctccgtgtagatgatctt

SEQ ID NO: 269723 - DNA, 19 bp, Homo sapiens
  siRNA target sequence for PEX13 (NM_002618.1,412-430).
gcagcaggggtgcatttca

SEQ ID NO: 269724 - DNA, 19 bp, Homo sapiens
  siRNA target sequence for PEX13 (NM_002618.1,487-505).
ccttttcagctgtctataa

SEQ ID NO: 269725 - DNA, 19 bp, Homo sapiens
  siRNA target sequence for PEX13 (NM_002618.1,495-513).
gctgtctataacagtttca

SEQ ID NO: 269726 - DNA, 19 bp, Homo sapiens
  siRNA target sequence for PEX13 (NM_002618.1,508-526).
gtttcagggctgtattgga

SEQ ID NO: 269727 - DNA, 19 bp, Homo sapiens
  siRNA target sequence for PEX13 (NM_002618.1,544-562).
cccgattgaaaatacactt

SEQ ID NO: 269728 - DNA, 19 bp, Homo sapiens
  siRNA target sequence for PEX13 (NM_002618.1,545-563).
ccgattgaaaatacacttt

SEQ ID NO: 269729 - DNA, 19 bp, Homo sapiens
  siRNA target sequence for PEX13 (NM_002618.1,621-639).
ctacagcggatgttaggtt

SEQ ID NO: 269730 - DNA, 19 bp, Homo sapiens
  siRNA target sequence for PEX13 (NM_002618.1,624-642).
cagcggatgttaggtttaa

SEQ ID NO: 269731 - DNA, 19 bp, Homo sapiens
  siRNA target sequence for PEX13 (NM_002618.1,626-644).
gcggatgttaggtttaaga

SEQ ID NO: 269732 - DNA, 19 bp, Homo sapiens
  siRNA target sequence for PEX13 (NM_002618.1,627-645).
cggatgttaggtttaagaa

SEQ ID NO: 269733 - DNA, 19 bp, Homo sapiens
  siRNA target sequence for PEX13 (NM_002618.1,629-647).
gatgttaggtttaagaaga

SEQ ID NO: 269734 - DNA, 19 bp, Homo sapiens
  siRNA target sequence for PEX13 (NM_002618.1,800-818).
gtctactcacagtgatgaa

SEQ ID NO: 269735 - DNA, 19 bp, Homo sapiens
  siRNA target sequence for PEX13 (NM_002618.1,802-820).
ctactcacagtgatgaagt

SEQ ID NO: 269736 - DNA, 19 bp, Homo sapiens
  siRNA target sequence for PEX13 (NM_002618.1,867-885).
gccagagcagaatatgatt

SEQ ID NO: 269737 - DNA, 19 bp, Homo sapiens
  siRNA target sequence for PEX13 (NM_002618.1,913-931).
ctttccgggctggtgatat

SEQ ID NO: 269738 - DNA, 19 bp, Homo sapiens
  siRNA target sequence for PEX13 (NM_002618.1,935-953).
gaacttagctctcaaagaa

SEQ ID NO: 269739 - DNA, 19 bp, Homo sapiens
  siRNA target sequence for PEX13 (NM_002618.1,1009-1027).
gacttatacctgcgaatta

SEQ ID NO: 269740 - DNA, 19 bp, Homo sapiens
  siRNA target sequence for PEX13 (NM_002618.1,1017-1035).
cctgcgaattatgtcaaaa

SEQ ID NO: 269741 - DNA, 19 bp, Homo sapiens
  siRNA target sequence for PEX13 (NM_002618.1,1058-1076).
gaaaacggtggaatcaagt

SEQ ID NO: 269742 - DNA, 19 bp, Homo sapiens
  siRNA target sequence for PEX13 (NM_002618.1,1063-1081).
cggtggaatcaagtaaagt

SEQ ID NO: 269743 - DNA, 19 bp, Homo sapiens
  siRNA target sequence for PEX13 (NM_002618.1,1065-1083).
gtggaatcaagtaaagttt

SEQ ID NO: 269744 - DNA, 19 bp, Homo sapiens
  siRNA target sequence for PEX13 (NM_002618.1,1105-1123).
ccaacccaacactaactaa

SEQ ID NO: 269745 - DNA, 19 bp, Homo sapiens
  siRNA target sequence for PEX13 (NM_002618.1,1128-1146).
gccacggttgctgattctt

SEQ ID NO: 269746 - DNA, 19 bp, Homo sapiens
  siRNA target sequence for PEX13 (NM_002618.1,1129-1147).
ccacggttgctgattcttt

SEQ ID NO: 269747 - DNA, 19 bp, Homo sapiens
  siRNA target sequence for PIGR (NM_002644.2,234-252).
gaagagtcccatatttggt

SEQ ID NO: 269748 - DNA, 19 bp, Homo sapiens
  siRNA target sequence for PIGR (NM_002644.2,325-343).
cggcacacccggaagtact

SEQ ID NO: 269749 - DNA, 19 bp, Homo sapiens
  siRNA target sequence for PIGR (NM_002644.2,358-376).
gctagaggtggctgcataa

SEQ ID NO: 269750 - DNA, 19 bp, Homo sapiens
  siRNA target sequence for PIGR (NM_002644.2,394-412).
ggctacgtctccagcaaat

SEQ ID NO: 269751 - DNA, 19 bp, Homo sapiens
  siRNA target sequence for PIGR (NM_002644.2,395-413).
gctacgtctccagcaaata

SEQ ID NO: 269752 - DNA, 19 bp, Homo sapiens
  siRNA target sequence for PIGR (NM_002644.2,396-414).
ctacgtctccagcaaatat

SEQ ID NO: 269753 - DNA, 19 bp, Homo sapiens
  siRNA target sequence for PIGR (NM_002644.2,399-417).
cgtctccagcaaatatgca

SEQ ID NO: 269754 - DNA, 19 bp, Homo sapiens
  siRNA target sequence for PIGR (NM_002644.2,441-459).
cccggagaacggcacattt

SEQ ID NO: 269755 - DNA, 19 bp, Homo sapiens
  siRNA target sequence for PIGR (NM_002644.2,443-461).
cggagaacggcacatttgt

SEQ ID NO: 269756 - DNA, 19 bp, Homo sapiens
  siRNA target sequence for PIGR (NM_002644.2,575-593).
ggctcctaaatgacactaa

SEQ ID NO: 269757 - DNA, 19 bp, Homo sapiens
  siRNA target sequence for PIGR (NM_002644.2,576-594).
gctcctaaatgacactaaa

SEQ ID NO: 269758 - DNA, 19 bp, Homo sapiens
  siRNA target sequence for PIGR (NM_002644.2,580-598).
ctaaatgacactaaagtct

SEQ ID NO: 269759 - DNA, 19 bp, Homo sapiens
  siRNA target sequence for PIGR (NM_002644.2,626-644).
ccatcaactgccctttcaa

SEQ ID NO: 269760 - DNA, 19 bp, Homo sapiens
  siRNA target sequence for PIGR (NM_002644.2,636-654).
ccctttcaagactgagaat

SEQ ID NO: 269761 - DNA, 19 bp, Homo sapiens
  siRNA target sequence for PIGR (NM_002644.2,708-726).
catcgactccagtggttat

SEQ ID NO: 269762 - DNA, 19 bp, Homo sapiens
  siRNA target sequence for PIGR (NM_002644.2,711-729).
cgactccagtggttatgta

SEQ ID NO: 269763 - DNA, 19 bp, Homo sapiens
  siRNA target sequence for PIGR (NM_002644.2,714-732).
ctccagtggttatgtaaat

SEQ ID NO: 269764 - DNA, 19 bp, Homo sapiens
  siRNA target sequence for PIGR (NM_002644.2,745-763).
ggaagaatacgccttgata

SEQ ID NO: 269765 - DNA, 19 bp, Homo sapiens
  siRNA target sequence for PIGR (NM_002644.2,746-764).
gaagaatacgccttgatat

SEQ ID NO: 269766 - DNA, 19 bp, Homo sapiens
  siRNA target sequence for PIGR (NM_002644.2,749-767).
gaatacgccttgatattca

SEQ ID NO: 269767 - DNA, 19 bp, Homo sapiens
  siRNA target sequence for PIGR (NM_002644.2,769-787).
ggtactggccagttactgt

SEQ ID NO: 269768 - DNA, 19 bp, Homo sapiens
  siRNA target sequence for PIGR (NM_002644.2,843-861).
ggctggggatgattccaat

SEQ ID NO: 269769 - DNA, 19 bp, Homo sapiens
  siRNA target sequence for PIGR (NM_002644.2,844-862).
gctggggatgattccaata

SEQ ID NO: 269770 - DNA, 19 bp, Homo sapiens
  siRNA target sequence for PIGR (NM_002644.2,847-865).
ggggatgattccaatagta

SEQ ID NO: 269771 - DNA, 19 bp, Homo sapiens
  siRNA target sequence for PIGR (NM_002644.2,858-876).
caatagtaataagaagaat

SEQ ID NO: 269772 - DNA, 19 bp, Homo sapiens
  siRNA target sequence for PIGR (NM_002644.2,899-917).
ccgagcccgagctggttta

SEQ ID NO: 269773 - DNA, 19 bp, Homo sapiens
  siRNA target sequence for PIGR (NM_002644.2,900-918).
cgagcccgagctggtttat

SEQ ID NO: 269774 - DNA, 19 bp, Homo sapiens
  siRNA target sequence for PIGR (NM_002644.2,903-921).
gcccgagctggtttatgaa

SEQ ID NO: 269775 - DNA, 19 bp, Homo sapiens
  siRNA target sequence for PIGR (NM_002644.2,969-987).
ggcaaacgtggccaaattt

SEQ ID NO: 269776 - DNA, 19 bp, Homo sapiens
  siRNA target sequence for PIGR (NM_002644.2,1532-1550).
ccaccgtggagatcaagat

SEQ ID NO: 269777 - DNA, 19 bp, Homo sapiens
  siRNA target sequence for PIGR (NM_002644.2,1625-1643).
gtcactttccatgcaaatt

SEQ ID NO: 269778 - DNA, 19 bp, Homo sapiens
  siRNA target sequence for PIGR (NM_002644.2,1627-1645).
cactttccatgcaaattct

SEQ ID NO: 269779 - DNA, 19 bp, Homo sapiens
  siRNA target sequence for PIGR (NM_002644.2,1818-1836).
gaagcagggccacttctat

SEQ ID NO: 269780 - DNA, 19 bp, Homo sapiens
  siRNA target sequence for PIGR (NM_002644.2,1851-1869).
cgtctatgtggcagttgaa

SEQ ID NO: 269781 - DNA, 19 bp, Homo sapiens
  siRNA target sequence for PIGR (NM_002644.2,1935-1953).
ggtgctagactctggtttt

SEQ ID NO: 269782 - DNA, 19 bp, Homo sapiens
  siRNA target sequence for PIGR (NM_002644.2,1949-1967).
gttttcgggagattgagaa

SEQ ID NO: 269783 - DNA, 19 bp, Homo sapiens
  siRNA target sequence for PIGR (NM_002644.2,2010-2028).
ggtggcagatacaagagat

SEQ ID NO: 269784 - DNA, 19 bp, Homo sapiens
  siRNA target sequence for PIGR (NM_002644.2,2181-2199).
gaacgtcgaccgagtttca

SEQ ID NO: 269785 - DNA, 19 bp, Homo sapiens
  siRNA target sequence for PIGR (NM_002644.2,2185-2203).
gtcgaccgagtttcaatca

SEQ ID NO: 269786 - DNA, 19 bp, Homo sapiens
  siRNA target sequence for PIGR (NM_002644.2,2187-2205).
cgaccgagtttcaatcaga

SEQ ID NO: 269787 - DNA, 19 bp, Homo sapiens
  siRNA target sequence for PIGR (NM_002644.2,2188-2206).
gaccgagtttcaatcagaa

SEQ ID NO: 269788 - DNA, 19 bp, Homo sapiens
  siRNA target sequence for PIGR (NM_002644.2,2238-2256).
cgagaactccagggaattt

SEQ ID NO: 269789 - DNA, 19 bp, Homo sapiens
  siRNA target sequence for PIGR (NM_002644.2,2241-2259).
gaactccagggaatttgga

SEQ ID NO: 269790 - DNA, 19 bp, Homo sapiens
  siRNA target sequence for PIGR (NM_002644.2,2396-2414).
ccgagatggcctacaaaga

SEQ ID NO: 269791 - DNA, 19 bp, Homo sapiens
  siRNA target sequence for SCAMP1 (NM_004866.3,171-189).
ccgacccggatctcaacaa

SEQ ID NO: 269792 - DNA, 19 bp, Homo sapiens
  siRNA target sequence for SCAMP1 (NM_004866.3,172-190).
cgacccggatctcaacaat

SEQ ID NO: 269793 - DNA, 19 bp, Homo sapiens
  siRNA target sequence for SCAMP1 (NM_004866.3,199-217).
ggatccatcagttacacaa

SEQ ID NO: 269794 - DNA, 19 bp, Homo sapiens
  siRNA target sequence for SCAMP1 (NM_004866.3,242-260).
cttgatgaatataatccat

SEQ ID NO: 269795 - DNA, 19 bp, Homo sapiens
  siRNA target sequence for SCAMP1 (NM_004866.3,257-275).
ccattctcggattctagaa

SEQ ID NO: 269796 - DNA, 19 bp, Homo sapiens
  siRNA target sequence for SCAMP1 (NM_004866.3,301-319).
gcctaatgtacccaataca

SEQ ID NO: 269797 - DNA, 19 bp, Homo sapiens
  siRNA target sequence for SCAMP1 (NM_004866.3,313-331).
caatacacaaccagcaata

SEQ ID NO: 269798 - DNA, 19 bp, Homo sapiens
  siRNA target sequence for SCAMP1 (NM_004866.3,346-364).
ggaacatccagcttataca

SEQ ID NO: 269799 - DNA, 19 bp, Homo sapiens
  siRNA target sequence for SCAMP1 (NM_004866.3,356-374).
gcttatacacagattgcaa

SEQ ID NO: 269800 - DNA, 19 bp, Homo sapiens
  siRNA target sequence for SCAMP1 (NM_004866.3,389-407).
gcccaagctgaacttctta

SEQ ID NO: 269801 - DNA, 19 bp, Homo sapiens
  siRNA target sequence for SCAMP1 (NM_004866.3,410-428).
cgccaggaagaactagaaa

SEQ ID NO: 269802 - DNA, 19 bp, Homo sapiens
  siRNA target sequence for SCAMP1 (NM_004866.3,429-447).
gaaaagccgcagaattaga

SEQ ID NO: 269803 - DNA, 19 bp, Homo sapiens
  siRNA target sequence for SCAMP1 (NM_004866.3,450-468).
gtcgggaacgagaaatgca

SEQ ID NO: 269804 - DNA, 19 bp, Homo sapiens
  siRNA target sequence for SCAMP1 (NM_004866.3,475-493).
cagtcaacatggtagaaaa

SEQ ID NO: 269805 - DNA, 19 bp, Homo sapiens
  siRNA target sequence for SCAMP1 (NM_004866.3,502-520).
gccacctcttcctagcaat

SEQ ID NO: 269806 - DNA, 19 bp, Homo sapiens
  siRNA target sequence for SCAMP1 (NM_004866.3,525-543).
ctgtcggaccttgtttcta

SEQ ID NO: 269807 - DNA, 19 bp, Homo sapiens
  siRNA target sequence for SCAMP1 (NM_004866.3,541-559).
ctatcaggatttttctgta

SEQ ID NO: 269808 - DNA, 19 bp, Homo sapiens
  siRNA target sequence for SCAMP1 (NM_004866.3,557-575).
gtagacattcctgtagaat

SEQ ID NO: 269809 - DNA, 19 bp, Homo sapiens
  siRNA target sequence for SCAMP1 (NM_004866.3,585-603).
cagtaaagcttatgtacta

SEQ ID NO: 269810 - DNA, 19 bp, Homo sapiens
  siRNA target sequence for SCAMP1 (NM_004866.3,610-628).
gatgttccatgcagtaaca

SEQ ID NO: 269811 - DNA, 19 bp, Homo sapiens
  siRNA target sequence for SCAMP1 (NM_004866.3,646-664).
cggatgcttggcttggttt

SEQ ID NO: 269812 - DNA, 19 bp, Homo sapiens
  siRNA target sequence for SCAMP1 (NM_004866.3,681-699).
gagcggttgattttggatt

SEQ ID NO: 269813 - DNA, 19 bp, Homo sapiens
  siRNA target sequence for SCAMP1 (NM_004866.3,706-724).
cctgtggttcttgcttttt

SEQ ID NO: 269814 - DNA, 19 bp, Homo sapiens
  siRNA target sequence for SCAMP1 (NM_004866.3,744-762).
gttggtacagaccacttta

SEQ ID NO: 269815 - DNA, 19 bp, Homo sapiens
  siRNA target sequence for SCAMP1 (NM_004866.3,748-766).
gtacagaccactttatgga

SEQ ID NO: 269816 - DNA, 19 bp, Homo sapiens
  siRNA target sequence for SCAMP1 (NM_004866.3,775-793).
gagtgacagttcatttaga

SEQ ID NO: 269817 - DNA, 19 bp, Homo sapiens
  siRNA target sequence for SCAMP1 (NM_004866.3,777-795).
gtgacagttcatttagatt

SEQ ID NO: 269818 - DNA, 19 bp, Homo sapiens
  siRNA target sequence for SCAMP1 (NM_004866.3,800-818).
gtattcttcttcgtctata

SEQ ID NO: 269819 - DNA, 19 bp, Homo sapiens
  siRNA target sequence for SCAMP1 (NM_004866.3,805-823).
cttcttcgtctatatttgt

SEQ ID NO: 269820 - DNA, 19 bp, Homo sapiens
  siRNA target sequence for SCAMP1 (NM_004866.3,811-829).
cgtctatatttgtcagttt

SEQ ID NO: 269821 - DNA, 19 bp, Homo sapiens
  siRNA target sequence for SCAMP1 (NM_004866.3,893-911).
cttactggtctcaaccaaa

SEQ ID NO: 269822 - DNA, 19 bp, Homo sapiens
  siRNA target sequence for SCAMP1 (NM_004866.3,917-935).
cctgttggaatcatgatga

SEQ ID NO: 269823 - DNA, 19 bp, Homo sapiens
  siRNA target sequence for SCAMP1 (NM_004866.3,918-936).
ctgttggaatcatgatgat

SEQ ID NO: 269824 - DNA, 19 bp, Homo sapiens
  siRNA target sequence for SCAMP1 (NM_004866.3,920-938).
gttggaatcatgatgataa

SEQ ID NO: 269825 - DNA, 19 bp, Homo sapiens
  siRNA target sequence for SCAMP1 (NM_004866.3,923-941).
ggaatcatgatgataatca

SEQ ID NO: 269826 - DNA, 19 bp, Homo sapiens
  siRNA target sequence for SCAMP1 (NM_004866.3,924-942).
gaatcatgatgataatcat

SEQ ID NO: 269827 - DNA, 19 bp, Homo sapiens
  siRNA target sequence for SCAMP1 (NM_004866.3,965-983).
gcagtcatctcactagtta

SEQ ID NO: 269828 - DNA, 19 bp, Homo sapiens
  siRNA target sequence for SCAMP1 (NM_004866.3,966-984).
cagtcatctcactagttat

SEQ ID NO: 269829 - DNA, 19 bp, Homo sapiens
  siRNA target sequence for SCAMP1 (NM_004866.3,968-986).
gtcatctcactagttatgt

SEQ ID NO: 269830 - DNA, 19 bp, Homo sapiens
  siRNA target sequence for SCAMP1 (NM_004866.3,973-991).
ctcactagttatgttcaaa

SEQ ID NO: 269831 - DNA, 19 bp, Homo sapiens
  siRNA target sequence for SCAMP1 (NM_004866.3,1011-1029).
gcacaacaggtgctagttt

SEQ ID NO: 269832 - DNA, 19 bp, Homo sapiens
  siRNA target sequence for SCAMP1 (NM_004866.3,1012-1030).
cacaacaggtgctagtttt

SEQ ID NO: 269833 - DNA, 19 bp, Homo sapiens
  siRNA target sequence for SCAMP1 (NM_004866.3,1014-1032).
caacaggtgctagttttga

SEQ ID NO: 269834 - DNA, 19 bp, Homo sapiens
  siRNA target sequence for SCAMP1 (NM_004866.3,1037-1055).
gcccaacaggagtttgcaa

SEQ ID NO: 269835 - DNA, 19 bp, Homo sapiens
  siRNA target sequence for SCAMP1 (NM_004866.3,1125-1143).
cagctcagaatgctttcaa

SEQ ID NO: 269836 - DNA, 19 bp, Homo sapiens
  siRNA target sequence for SCAMP2 (NM_005697.3,102-120).
gcggacccagtggatgtaa

SEQ ID NO: 269837 - DNA, 19 bp, Homo sapiens
  siRNA target sequence for SCAMP2 (NM_005697.3,103-121).
cggacccagtggatgtaaa

SEQ ID NO: 269838 - DNA, 19 bp, Homo sapiens
  siRNA target sequence for SCAMP2 (NM_005697.3,188-206).
ccccttctcagagacaaat

SEQ ID NO: 269839 - DNA, 19 bp, Homo sapiens
  siRNA target sequence for SCAMP2 (NM_005697.3,414-432).
catgtgagacagaacaact

SEQ ID NO: 269840 - DNA, 19 bp, Homo sapiens
  siRNA target sequence for SCAMP2 (NM_005697.3,520-538).
gcaagatgctctactatct

SEQ ID NO: 269841 - DNA, 19 bp, Homo sapiens
  siRNA target sequence for SCAMP2 (NM_005697.3,634-652).
ccatcctgtggtttctgat

SEQ ID NO: 269842 - DNA, 19 bp, Homo sapiens
  siRNA target sequence for SCAMP2 (NM_005697.3,639-657).
ctgtggtttctgatcttca

SEQ ID NO: 269843 - DNA, 19 bp, Homo sapiens
  siRNA target sequence for SCAMP2 (NM_005697.3,713-731).
caactctttcagcttcttt

SEQ ID NO: 269844 - DNA, 19 bp, Homo sapiens
  siRNA target sequence for SCAMP2 (NM_005697.3,754-772).
gtcaaatagggatctacat

SEQ ID NO: 269845 - DNA, 19 bp, Homo sapiens
  siRNA target sequence for SCAMP2 (NM_005697.3,756-774).
caaatagggatctacatca

SEQ ID NO: 269846 - DNA, 19 bp, Homo sapiens
  siRNA target sequence for SCAMP2 (NM_005697.3,800-818).
gggggacagcggttggatt

SEQ ID NO: 269847 - DNA, 19 bp, Homo sapiens
  siRNA target sequence for SCAMP2 (NM_005697.3,823-841).
ccctgtctacactggataa

SEQ ID NO: 269848 - DNA, 19 bp, Homo sapiens
  siRNA target sequence for SCAMP2 (NM_005697.3,824-842).
cctgtctacactggataat

SEQ ID NO: 269849 - DNA, 19 bp, Homo sapiens
  siRNA target sequence for SCAMP2 (NM_005697.3,827-845).
gtctacactggataatcat

SEQ ID NO: 269850 - DNA, 19 bp, Homo sapiens
  siRNA target sequence for SCAMP3 (NM_005698.2,360-378).
ccacgcttgacgtctacaa

SEQ ID NO: 269851 - DNA, 19 bp, Homo sapiens
  siRNA target sequence for SCAMP3 (NM_005698.2,484-502).
cacagaacctaagaactat

SEQ ID NO: 269852 - DNA, 19 bp, Homo sapiens
  siRNA target sequence for SCAMP3 (NM_005698.2,715-733).
ggagatcccccaagaattt

SEQ ID NO: 269853 - DNA, 19 bp, Homo sapiens
  siRNA target sequence for SCAMP3 (NM_005698.2,931-949).
gagtgacagttcattcaat

SEQ ID NO: 269854 - DNA, 19 bp, Homo sapiens
  siRNA target sequence for SCAMP3 (NM_005698.2,933-951).
gtgacagttcattcaattt

SEQ ID NO: 269855 - DNA, 19 bp, Homo sapiens
  siRNA target sequence for SCAMP3 (NM_005698.2,942-960).
cattcaatttcttcgtttt

SEQ ID NO: 269856 - DNA, 19 bp, Homo sapiens
  siRNA target sequence for SCAMP3 (NM_005698.2,995-1013).
gtcctccaggccattggta

SEQ ID NO: 269857 - DNA, 19 bp, Homo sapiens
  siRNA target sequence for SCAMP3 (NM_005698.2,1261-1279).
cgctggggctgctgaaaat

SEQ ID NO: 269858 - DNA, 19 bp, Homo sapiens
  siRNA target sequence for SEC10L1 (NM_006544.2,288-306).
ccttttgtggcagatgaat

SEQ ID NO: 269859 - DNA, 19 bp, Homo sapiens
  siRNA target sequence for SEC10L1 (NM_006544.2,352-370).
gtggacctgaagcttttga

SEQ ID NO: 269860 - DNA, 19 bp, Homo sapiens
  siRNA target sequence for SEC10L1 (NM_006544.2,373-391).
ctaaaagattattagaaga

SEQ ID NO: 269861 - DNA, 19 bp, Homo sapiens
  siRNA target sequence for SEC10L1 (NM_006544.2,549-567).
gaactagatgagcacatta

SEQ ID NO: 269862 - DNA, 19 bp, Homo sapiens
  siRNA target sequence for SEC10L1 (NM_006544.2,552-570).
ctagatgagcacattagct

SEQ ID NO: 269863 - DNA, 19 bp, Homo sapiens
  siRNA target sequence for SEC10L1 (NM_006544.2,568-586).
gctatgtagcaactaaagt

SEQ ID NO: 269864 - DNA, 19 bp, Homo sapiens
  siRNA target sequence for SEC10L1 (NM_006544.2,603-621).
cagttagagggggtaaaca

SEQ ID NO: 269865 - DNA, 19 bp, Homo sapiens
  siRNA target sequence for SEC10L1 (NM_006544.2,605-623).
gttagagggggtaaacaca

SEQ ID NO: 269866 - DNA, 19 bp, Homo sapiens
  siRNA target sequence for SEC10L1 (NM_006544.2,758-776).
cctaattgcccaagagtta

SEQ ID NO: 269867 - DNA, 19 bp, Homo sapiens
  siRNA target sequence for SEC10L1 (NM_006544.2,813-831).
gcaagtaaataccatgatt

SEQ ID NO: 269868 - DNA, 19 bp, Homo sapiens
  siRNA target sequence for SEC10L1 (NM_006544.2,814-832).
caagtaaataccatgattt

SEQ ID NO: 269869 - DNA, 19 bp, Homo sapiens
  siRNA target sequence for SEC10L1 (NM_006544.2,926-944).
gggttattcccattgtgtt

SEQ ID NO: 269870 - DNA, 19 bp, Homo sapiens
  siRNA target sequence for SEC10L1 (NM_006544.2,962-980).
gtgccaggagggtgcttat

SEQ ID NO: 269871 - DNA, 19 bp, Homo sapiens
  siRNA target sequence for SEC10L1 (NM_006544.2,966-984).
caggagggtgcttatttga

SEQ ID NO: 269872 - DNA, 19 bp, Homo sapiens
  siRNA target sequence for SEC10L1 (NM_006544.2,968-986).
ggagggtgcttatttgaga

SEQ ID NO: 269873 - DNA, 19 bp, Homo sapiens
  siRNA target sequence for SEC10L1 (NM_006544.2,969-987).
gagggtgcttatttgagaa

SEQ ID NO: 269874 - DNA, 19 bp, Homo sapiens
  siRNA target sequence for SEC10L1 (NM_006544.2,973-991).
gtgcttatttgagaaatga

SEQ ID NO: 269875 - DNA, 19 bp, Homo sapiens
  siRNA target sequence for SEC10L1 (NM_006544.2,975-993).
gcttatttgagaaatgata

SEQ ID NO: 269876 - DNA, 19 bp, Homo sapiens
  siRNA target sequence for SEC10L1 (NM_006544.2,999-1017).
gaagacgctggaatactct

SEQ ID NO: 269877 - DNA, 19 bp, Homo sapiens
  siRNA target sequence for SEC10L1 (NM_006544.2,1005-1023).
gctggaatactctgtcaaa

SEQ ID NO: 269878 - DNA, 19 bp, Homo sapiens
  siRNA target sequence for SEC10L1 (NM_006544.2,1009-1027).
gaatactctgtcaaagagt

SEQ ID NO: 269879 - DNA, 19 bp, Homo sapiens
  siRNA target sequence for SEC10L1 (NM_006544.2,1035-1053).
caagttggagatatcttca

SEQ ID NO: 269880 - DNA, 19 bp, Homo sapiens
  siRNA target sequence for SEC10L1 (NM_006544.2,1148-1166).
gtccgatgcagagcaatat

SEQ ID NO: 269881 - DNA, 19 bp, Homo sapiens
  siRNA target sequence for SEC10L1 (NM_006544.2,1150-1168).
ccgatgcagagcaatatct

SEQ ID NO: 269882 - DNA, 19 bp, Homo sapiens
  siRNA target sequence for SEC10L1 (NM_006544.2,1213-1231).
gcaagctgatggagtttaa

SEQ ID NO: 269883 - DNA, 19 bp, Homo sapiens
  siRNA target sequence for SEC10L1 (NM_006544.2,1217-1235).
gctgatggagtttaattta

SEQ ID NO: 269884 - DNA, 19 bp, Homo sapiens
  siRNA target sequence for SEC10L1 (NM_006544.2,1220-1238).
gatggagtttaatttaggt

SEQ ID NO: 269885 - DNA, 19 bp, Homo sapiens
  siRNA target sequence for SEC10L1 (NM_006544.2,1237-1255).
gtactgataaacagacttt

SEQ ID NO: 269886 - DNA, 19 bp, Homo sapiens
  siRNA target sequence for SEC10L1 (NM_006544.2,1250-1268).
gactttcttgtctaagctt

SEQ ID NO: 269887 - DNA, 19 bp, Homo sapiens
  siRNA target sequence for SEC10L1 (NM_006544.2,2144-2162).
gttggccatttgtgatgta

SEQ ID NO: 269888 - DNA, 19 bp, Homo sapiens
  siRNA target sequence for SEC10L1 (NM_006544.2,2179-2197).
gtgccaaagacttcaagat

SEQ ID NO: 269889 - DNA, 19 bp, Homo sapiens
  siRNA target sequence for SEC10L1 (NM_006544.2,2189-2207).
cttcaagattccaatggta

SEQ ID NO: 269890 - DNA, 19 bp, Homo sapiens
  siRNA target sequence for SEC10L1 (NM_006544.2,2195-2213).
gattccaatggtattacat

SEQ ID NO: 269891 - DNA, 19 bp, Homo sapiens
  siRNA target sequence for SEC10L1 (NM_006544.2,2204-2222).
ggtattacatctttttgat

SEQ ID NO: 269892 - DNA, 19 bp, Homo sapiens
  siRNA target sequence for SEC10L1 (NM_006544.2,2249-2267).
ggtagttgccccagataat

SEQ ID NO: 269893 - DNA, 19 bp, Homo sapiens
  siRNA target sequence for SEC10L1 (NM_006544.2,2250-2268).
gtagttgccccagataatt

SEQ ID NO: 269894 - DNA, 19 bp, Homo sapiens
  siRNA target sequence for SEC10L1 (NM_006544.2,2257-2275).
ccccagataatttaaagca

SEQ ID NO: 269895 - DNA, 19 bp, Homo sapiens
  siRNA target sequence for SEC10L1 (NM_006544.2,2298-2316).
gctaatctggacaagaata

SEQ ID NO: 269896 - DNA, 19 bp, Homo sapiens
  siRNA target sequence for SEC10L1 (NM_006544.2,2334-2352).
caacttcgtgctgattata

SEQ ID NO: 269897 - DNA, 19 bp, Homo sapiens
  siRNA target sequence for SEC10L1 (NM_006544.2,2337-2355).
cttcgtgctgattatagat

SEQ ID NO: 269898 - DNA, 19 bp, Homo sapiens
  siRNA target sequence for SEC13L1 (NM_030673.2,183-201).
ctcccatgaggacatgatt

SEQ ID NO: 269899 - DNA, 19 bp, Homo sapiens
  siRNA target sequence for SEC13L1 (NM_030673.2,185-203).
cccatgaggacatgattca

SEQ ID NO: 269900 - DNA, 19 bp, Homo sapiens
  siRNA target sequence for SEC13L1 (NM_030673.2,207-225).
cgcccagatggactactat

SEQ ID NO: 269901 - DNA, 19 bp, Homo sapiens
  siRNA target sequence for SEC13L1 (NM_030673.2,251-269).
cagacaggtccgtcaaaat

SEQ ID NO: 269902 - DNA, 19 bp, Homo sapiens
  siRNA target sequence for SEC13L1 (NM_030673.2,253-271).
gacaggtccgtcaaaatct

SEQ ID NO: 269903 - DNA, 19 bp, Homo sapiens
  siRNA target sequence for SEC13L1 (NM_030673.2,255-273).
caggtccgtcaaaatcttt

SEQ ID NO: 269904 - DNA, 19 bp, Homo sapiens
  siRNA target sequence for SEC13L1 (NM_030673.2,257-275).
ggtccgtcaaaatctttga

SEQ ID NO: 269905 - DNA, 19 bp, Homo sapiens
  siRNA target sequence for SEC13L1 (NM_030673.2,258-276).
gtccgtcaaaatctttgat

SEQ ID NO: 269906 - DNA, 19 bp, Homo sapiens
  siRNA target sequence for SEC13L1 (NM_030673.2,260-278).
ccgtcaaaatctttgatgt

SEQ ID NO: 269907 - DNA, 19 bp, Homo sapiens
  siRNA target sequence for SEC13L1 (NM_030673.2,387-405).
ctatgaccggaaagtcatt

SEQ ID NO: 269908 - DNA, 19 bp, Homo sapiens
  siRNA target sequence for SEC13L1 (NM_030673.2,391-409).
gaccggaaagtcattatct

SEQ ID NO: 269909 - DNA, 19 bp, Homo sapiens
  siRNA target sequence for SEC13L1 (NM_030673.2,562-580).
gaaggccaatgggaagtaa

SEQ ID NO: 269910 - DNA, 19 bp, Homo sapiens
  siRNA target sequence for SEC13L1 (NM_030673.2,668-686).
cggggcagaaacccaatta

SEQ ID NO: 269911 - DNA, 19 bp, Homo sapiens
  siRNA target sequence for SEC13L1 (NM_030673.2,865-883).
ggtcgtgtgttcatttgga

SEQ ID NO: 269912 - DNA, 19 bp, Homo sapiens
  siRNA target sequence for SEC13L1 (NM_030673.2,892-910).
gatgcctcaagcaatacgt

SEQ ID NO: 269913 - DNA, 19 bp, Homo sapiens
  siRNA target sequence for SEC13L1 (NM_030673.2,908-926).
cgtggtcccctaaattgtt

SEQ ID NO: 269914 - DNA, 19 bp, Homo sapiens
  siRNA target sequence for SEC13L1 (NM_030673.2,917-935).
ctaaattgttgcacaagtt

SEQ ID NO: 269915 - DNA, 19 bp, Homo sapiens
  siRNA target sequence for SEC13L1 (NM_030673.2,988-1006).
gtctctggtggagacaata

SEQ ID NO: 269916 - DNA, 19 bp, Homo sapiens
  siRNA target sequence for SEC13L1 (NM_030673.2,992-1010).
ctggtggagacaataaggt

SEQ ID NO: 269917 - DNA, 19 bp, Homo sapiens
  siRNA target sequence for SEC13L1 (NM_030673.2,1017-1035).
gtggaaggagtcagttgat

SEQ ID NO: 269918 - DNA, 19 bp, Homo sapiens
  siRNA target sequence for SEC15L1 (NM_019053.2,183-201).
gtatccgtaatcatgacaa

SEQ ID NO: 269919 - DNA, 19 bp, Homo sapiens
  siRNA target sequence for SEC15L1 (NM_019053.2,188-206).
cgtaatcatgacaaggaaa

SEQ ID NO: 269920 - DNA, 19 bp, Homo sapiens
  siRNA target sequence for SEC15L1 (NM_019053.2,236-254).
ggttttgtagatgctatta

SEQ ID NO: 269921 - DNA, 19 bp, Homo sapiens
  siRNA target sequence for SEC15L1 (NM_019053.2,249-267).
ctattacagaactccttaa

SEQ ID NO: 269922 - DNA, 19 bp, Homo sapiens
  siRNA target sequence for SEC15L1 (NM_019053.2,312-330).
ccaaccgaaggtttcaaga

SEQ ID NO: 269923 - DNA, 19 bp, Homo sapiens
  siRNA target sequence for SEC15L1 (NM_019053.2,313-331).
caaccgaaggtttcaagat

SEQ ID NO: 269924 - DNA, 19 bp, Homo sapiens
  siRNA target sequence for SEC15L1 (NM_019053.2,346-364).
gatagtccacacagaagat

SEQ ID NO: 269925 - DNA, 19 bp, Homo sapiens
  siRNA target sequence for SEC15L1 (NM_019053.2,350-368).
gtccacacagaagatatca

SEQ ID NO: 269926 - DNA, 19 bp, Homo sapiens
  siRNA target sequence for SEC15L1 (NM_019053.2,362-380).
gatatcattcgatgtagaa

SEQ ID NO: 269927 - DNA, 19 bp, Homo sapiens
  siRNA target sequence for SEC15L1 (NM_019053.2,402-420).
ctgtagtagaaaaattgca

SEQ ID NO: 269928 - DNA, 19 bp, Homo sapiens
  siRNA target sequence for SEC15L1 (NM_019053.2,407-425).
gtagaaaaattgcagttat

SEQ ID NO: 269929 - DNA, 19 bp, Homo sapiens
  siRNA target sequence for SEC15L1 (NM_019053.2,428-446).
cttcctgtgctagaaatgt

SEQ ID NO: 269930 - DNA, 19 bp, Homo sapiens
  siRNA target sequence for SEC15L1 (NM_019053.2,431-449).
cctgtgctagaaatgtaca

SEQ ID NO: 269931 - DNA, 19 bp, Homo sapiens
  siRNA target sequence for SEC15L1 (NM_019053.2,464-482).
cagatgagtgccaaaaggt

SEQ ID NO: 269932 - DNA, 19 bp, Homo sapiens
  siRNA target sequence for SEC15L1 (NM_019053.2,484-502).
ctattctgccctaaaaact

SEQ ID NO: 269933 - DNA, 19 bp, Homo sapiens
  siRNA target sequence for SEC15L1 (NM_019053.2,540-558).
gtcaataccggttttgtca

SEQ ID NO: 269934 - DNA, 19 bp, Homo sapiens
  siRNA target sequence for SEC15L1 (NM_019053.2,579-597).
ccaaactccgtgaggatat

SEQ ID NO: 269935 - DNA, 19 bp, Homo sapiens
  siRNA target sequence for SEC15L1 (NM_019053.2,580-598).
caaactccgtgaggatatt

SEQ ID NO: 269936 - DNA, 19 bp, Homo sapiens
  siRNA target sequence for SEC15L1 (NM_019053.2,586-604).
ccgtgaggatattaaagaa

SEQ ID NO: 269937 - DNA, 19 bp, Homo sapiens
  siRNA target sequence for SEC15L1 (NM_019053.2,587-605).
cgtgaggatattaaagaaa

SEQ ID NO: 269938 - DNA, 19 bp, Homo sapiens
  siRNA target sequence for SEC15L1 (NM_019053.2,635-653).
gaaagtattcgaaaacatt

SEQ ID NO: 269939 - DNA, 19 bp, Homo sapiens
  siRNA target sequence for SEC15L1 (NM_019053.2,912-930).
gtgacgaggaaacatttga

SEQ ID NO: 269940 - DNA, 19 bp, Homo sapiens
  siRNA target sequence for SEC15L1 (NM_019053.2,983-1001).
cagtcgaatatgcatgaaa

SEQ ID NO: 269941 - DNA, 19 bp, Homo sapiens
  siRNA target sequence for SEC15L1 (NM_019053.2,985-1003).
gtcgaatatgcatgaaaca

SEQ ID NO: 269942 - DNA, 19 bp, Homo sapiens
  siRNA target sequence for SEC15L1 (NM_019053.2,987-1005).
cgaatatgcatgaaacagt

SEQ ID NO: 269943 - DNA, 19 bp, Homo sapiens
  siRNA target sequence for SEC15L1 (NM_019053.2,1004-1022).
gttgatggctatagaagat

SEQ ID NO: 269944 - DNA, 19 bp, Homo sapiens
  siRNA target sequence for SEC15L1 (NM_019053.2,1007-1025).
gatggctatagaagatatt

SEQ ID NO: 269945 - DNA, 19 bp, Homo sapiens
  siRNA target sequence for SEC15L1 (NM_019053.2,1020-1038).
gatatttcactcaaattgt

SEQ ID NO: 269946 - DNA, 19 bp, Homo sapiens
  siRNA target sequence for SEC15L1 (NM_019053.2,1042-1060).
gttctttgtggtagaagat

SEQ ID NO: 269947 - DNA, 19 bp, Homo sapiens
  siRNA target sequence for SEC15L1 (NM_019053.2,1096-1114).
ggcatacactgatgaactt

SEQ ID NO: 269948 - DNA, 19 bp, Homo sapiens
  siRNA target sequence for SEC15L1 (NM_019053.2,1120-1138).
catggccctctcaaagata

SEQ ID NO: 269949 - DNA, 19 bp, Homo sapiens
  siRNA target sequence for SEC15L1 (NM_019053.2,1123-1141).
ggccctctcaaagataatt

SEQ ID NO: 269950 - DNA, 19 bp, Homo sapiens
  siRNA target sequence for SEC15L1 (NM_019053.2,1154-1172).
gctcattcatcctattgca

SEQ ID NO: 269951 - DNA, 19 bp, Homo sapiens
  siRNA target sequence for SEC15L1 (NM_019053.2,1248-1266).
cagtgaaccgactttttga

SEQ ID NO: 269952 - DNA, 19 bp, Homo sapiens
  siRNA target sequence for SEC15L1 (NM_019053.2,1255-1273).
ccgactttttgacctttta

SEQ ID NO: 269953 - DNA, 19 bp, Homo sapiens
  siRNA target sequence for SEC15L1 (NM_019053.2,1402-1420).
cagcaaatttccctttcaa

SEQ ID NO: 269954 - DNA, 19 bp, Homo sapiens
  siRNA target sequence for SEC15L1 (NM_019053.2,1469-1487).
cagtcagtgcctcatattt

SEQ ID NO: 269955 - DNA, 19 bp, Homo sapiens
  siRNA target sequence for SEC15L1 (NM_019053.2,1473-1491).
cagtgcctcatatttacat

SEQ ID NO: 269956 - DNA, 19 bp, Homo sapiens
  siRNA target sequence for SEC15L1 (NM_019053.2,1543-1561).
ccggagctcaacagaaata

SEQ ID NO: 269957 - DNA, 19 bp, Homo sapiens
  siRNA target sequence for SEC15L1 (NM_019053.2,1545-1563).
ggagctcaacagaaataga

SEQ ID NO: 269958 - DNA, 19 bp, Homo sapiens
  siRNA target sequence for SEC15L1 (NM_019053.2,1556-1574).
gaaatagacgatatgctta

SEQ ID NO: 269959 - DNA, 19 bp, Homo sapiens
  siRNA target sequence for SEC15L1 (NM_019053.2,1562-1580).
gacgatatgcttagaaaat

SEQ ID NO: 269960 - DNA, 19 bp, Homo sapiens
  siRNA target sequence for SEC15L1 (NM_019053.2,1564-1582).
cgatatgcttagaaaatca

SEQ ID NO: 269961 - DNA, 19 bp, Homo sapiens
  siRNA target sequence for SEC15L1 (NM_019053.2,1605-1623).
ctttgagtagctgtttact

SEQ ID NO: 269962 - DNA, 19 bp, Homo sapiens
  siRNA target sequence for SEC15L1 (NM_019053.2,1614-1632).
gctgtttactgaaccttat

SEQ ID NO: 269963 - DNA, 19 bp, Homo sapiens
  siRNA target sequence for SEC15L1 (NM_019053.2,1658-1676).
gagctggtacaaatcatca

SEQ ID NO: 269964 - DNA, 19 bp, Homo sapiens
  siRNA target sequence for SEC15L1 (NM_019053.2,1660-1678).
gctggtacaaatcatcata

SEQ ID NO: 269965 - DNA, 19 bp, Homo sapiens
  siRNA target sequence for SEC15L1 (NM_019053.2,1661-1679).
ctggtacaaatcatcataa

SEQ ID NO: 269966 - DNA, 19 bp, Homo sapiens
  siRNA target sequence for SEC15L1 (NM_019053.2,1690-1708).
cctggagcaagcttgtaaa

SEQ ID NO: 269967 - DNA, 19 bp, Homo sapiens
  siRNA target sequence for SEC15L1 (NM_019053.2,1691-1709).
ctggagcaagcttgtaaat

SEQ ID NO: 269968 - DNA, 19 bp, Homo sapiens
  siRNA target sequence for SEC15L1 (NM_019053.2,1715-1733).
gaggactttataactaaca

SEQ ID NO: 269969 - DNA, 19 bp, Homo sapiens
  siRNA target sequence for SEC15L1 (NM_019053.2,1717-1735).
ggactttataactaacatt

SEQ ID NO: 269970 - DNA, 19 bp, Homo sapiens
  siRNA target sequence for SEC15L1 (NM_019053.2,1814-1832).
gaaggagaaatatatacca

SEQ ID NO: 269971 - DNA, 19 bp, Homo sapiens
  siRNA target sequence for SEC15L1 (NM_019053.2,1862-1880).
cagcttgctgattatgact

SEQ ID NO: 269972 - DNA, 19 bp, Homo sapiens
  siRNA target sequence for SEC15L1 (NM_019053.2,2041-2059).
gctactggacagtgagtta

SEQ ID NO: 269973 - DNA, 19 bp, Homo sapiens
  siRNA target sequence for SEC15L1 (NM_019053.2,2076-2094).
gagctgttcagcagtttaa

SEQ ID NO: 269974 - DNA, 19 bp, Homo sapiens
  siRNA target sequence for SEC15L1 (NM_019053.2,2099-2117).
gatgtcatacagtgtgaat

SEQ ID NO: 269975 - DNA, 19 bp, Homo sapiens
  siRNA target sequence for SEC15L1 (NM_019053.2,2102-2120).
gtcatacagtgtgaattgt

SEQ ID NO: 269976 - DNA, 19 bp, Homo sapiens
  siRNA target sequence for SEC15L1 (NM_019053.2,2189-2207).
caactccttgacctgttta

SEQ ID NO: 269977 - DNA, 19 bp, Homo sapiens
  siRNA target sequence for SEC15L1 (NM_019053.2,2195-2213).
cttgacctgtttatggttt

SEQ ID NO: 269978 - DNA, 19 bp, Homo sapiens
  siRNA target sequence for SEC15L1 (NM_019053.2,2215-2233).
ggattggtctacttaccta

SEQ ID NO: 269979 - DNA, 19 bp, Homo sapiens
  siRNA target sequence for SEC15L1 (NM_019053.2,2223-2241).
ctacttacctagctgatta

SEQ ID NO: 269980 - DNA, 19 bp, Homo sapiens
  siRNA target sequence for SEC15L1 (NM_019053.2,2316-2334).
ctagcaaaaagaacaatat

SEQ ID NO: 269981 - DNA, 19 bp, Homo sapiens
  siRNA target sequence for SEC15L1 (NM_019053.2,2403-2421).
gaagtttggtgaatggtat

SEQ ID NO: 269982 - DNA, 19 bp, Homo sapiens
  siRNA target sequence for SEC23A (NM_006364.2,228-246).
caacctatttggaattcat

SEQ ID NO: 269983 - DNA, 19 bp, Homo sapiens
  siRNA target sequence for SEC23A (NM_006364.2,263-281).
cgagatggagtccgattta

SEQ ID NO: 269984 - DNA, 19 bp, Homo sapiens
  siRNA target sequence for SEC23A (NM_006364.2,266-284).
gatggagtccgatttagtt

SEQ ID NO: 269985 - DNA, 19 bp, Homo sapiens
  siRNA target sequence for SEC23A (NM_006364.2,274-292).
ccgatttagttggaatgtt

SEQ ID NO: 269986 - DNA, 19 bp, Homo sapiens
  siRNA target sequence for SEC23A (NM_006364.2,369-387).
ctgacttaccacctattca

SEQ ID NO: 269987 - DNA, 19 bp, Homo sapiens
  siRNA target sequence for SEC23A (NM_006364.2,371-389).
gacttaccacctattcaat

SEQ ID NO: 269988 - DNA, 19 bp, Homo sapiens
  siRNA target sequence for SEC23A (NM_006364.2,414-432).
ccacttgccgtgcagtttt

SEQ ID NO: 269989 - DNA, 19 bp, Homo sapiens
  siRNA target sequence for SEC23A (NM_006364.2,417-435).
cttgccgtgcagttttgaa

SEQ ID NO: 269990 - DNA, 19 bp, Homo sapiens
  siRNA target sequence for SEC23A (NM_006364.2,422-440).
cgtgcagttttgaatcctt

SEQ ID NO: 269991 - DNA, 19 bp, Homo sapiens
  siRNA target sequence for SEC23A (NM_006364.2,471-489).
gggcttgcaacttttgtta

SEQ ID NO: 269992 - DNA, 19 bp, Homo sapiens
  siRNA target sequence for SEC23A (NM_006364.2,509-527).
cctagttatgctggtatat

SEQ ID NO: 269993 - DNA, 19 bp, Homo sapiens
  siRNA target sequence for SEC23A (NM_006364.2,522-540).
gtatatctgaactgaatca

SEQ ID NO: 269994 - DNA, 19 bp, Homo sapiens
  siRNA target sequence for SEC23A (NM_006364.2,606-624).
ctttgatattcctctatgt

SEQ ID NO: 269995 - DNA, 19 bp, Homo sapiens
  siRNA target sequence for SEC23A (NM_006364.2,764-782).
gaaggcatttcaaaaagct

SEQ ID NO: 269996 - DNA, 19 bp, Homo sapiens
  siRNA target sequence for SEC23A (NM_006364.2,841-859).
ctctaaagtaccacttact

SEQ ID NO: 269997 - DNA, 19 bp, Homo sapiens
  siRNA target sequence for SEC23A (NM_006364.2,843-861).
ctaaagtaccacttactca

SEQ ID NO: 269998 - DNA, 19 bp, Homo sapiens
  siRNA target sequence for SEC23A (NM_006364.2,894-912).
ctccttccaacagattctt

SEQ ID NO: 269999 - DNA, 19 bp, Homo sapiens
  siRNA target sequence for SEC23A (NM_006364.2,897-915).
cttccaacagattcttaca

SEQ ID NO: 270000 - DNA, 19 bp, Homo sapiens
  siRNA target sequence for SEC23A (NM_006364.2,1041-1059).
gactgctggagtgtacttt

SEQ ID NO: 270001 - DNA, 19 bp, Homo sapiens
  siRNA target sequence for SEC23A (NM_006364.2,1068-1086).
ctggtgctcgtatcatgat

SEQ ID NO: 270002 - DNA, 19 bp, Homo sapiens
  siRNA target sequence for SEC23A (NM_006364.2,1071-1089).
gtgctcgtatcatgatgtt

SEQ ID NO: 270003 - DNA, 19 bp, Homo sapiens
  siRNA target sequence for SEC23A (NM_006364.2,1073-1091).
gctcgtatcatgatgttca

SEQ ID NO: 270004 - DNA, 19 bp, Homo sapiens
  siRNA target sequence for SEC23A (NM_006364.2,1074-1092).
ctcgtatcatgatgttcat

SEQ ID NO: 270005 - DNA, 19 bp, Homo sapiens
  siRNA target sequence for SEC23A (NM_006364.2,1136-1154).
gagttgaagacacctataa

SEQ ID NO: 270006 - DNA, 19 bp, Homo sapiens
  siRNA target sequence for SEC23A (NM_006364.2,1238-1256).
gctacaactggccatgtta

SEQ ID NO: 270007 - DNA, 19 bp, Homo sapiens
  siRNA target sequence for SEC23A (NM_006364.2,1239-1257).
ctacaactggccatgttat

SEQ ID NO: 270008 - DNA, 19 bp, Homo sapiens
  siRNA target sequence for SEC23A (NM_006364.2,1242-1260).
caactggccatgttattga

SEQ ID NO: 270009 - DNA, 19 bp, Homo sapiens
  siRNA target sequence for SEC23A (NM_006364.2,1247-1265).
ggccatgttattgatatct

SEQ ID NO: 270010 - DNA, 19 bp, Homo sapiens
  siRNA target sequence for SEC23A (NM_006364.2,1264-1282).
ctatgcgtgtgcattagat

SEQ ID NO: 270011 - DNA, 19 bp, Homo sapiens
  siRNA target sequence for SEC23A (NM_006364.2,1292-1310).
ctcctggagatgaaatgct

SEQ ID NO: 270012 - DNA, 19 bp, Homo sapiens
  siRNA target sequence for SEC23A (NM_006364.2,1400-1418).
gacatgcatggacagttta

SEQ ID NO: 270013 - DNA, 19 bp, Homo sapiens
  siRNA target sequence for SEC23A (NM_006364.2,1430-1448).
ggtggtacgctagaaataa

SEQ ID NO: 270014 - DNA, 19 bp, Homo sapiens
  siRNA target sequence for SEC23A (NM_006364.2,1431-1449).
gtggtacgctagaaataaa

SEQ ID NO: 270015 - DNA, 19 bp, Homo sapiens
  siRNA target sequence for SEC23A (NM_006364.2,1433-1451).
ggtacgctagaaataaaga

SEQ ID NO: 270016 - DNA, 19 bp, Homo sapiens
  siRNA target sequence for SEC23A (NM_006364.2,1487-1505).
ccctgtgtgtcactcaatt

SEQ ID NO: 270017 - DNA, 19 bp, Homo sapiens
  siRNA target sequence for SEC23A (NM_006364.2,1491-1509).
gtgtgtcactcaattctaa

SEQ ID NO: 270018 - DNA, 19 bp, Homo sapiens
  siRNA target sequence for SEC23A (NM_006364.2,1495-1513).
gtcactcaattctaaagga

SEQ ID NO: 270019 - DNA, 19 bp, Homo sapiens
  siRNA target sequence for SEC23A (NM_006364.2,1561-1579).
gaagatatgtggacttagt

SEQ ID NO: 270020 - DNA, 19 bp, Homo sapiens
  siRNA target sequence for SEC23A (NM_006364.2,1571-1589).
ggacttagtcccactacaa

SEQ ID NO: 270021 - DNA, 19 bp, Homo sapiens
  siRNA target sequence for SEC23A (NM_006364.2,1584-1602).
ctacaaccttagccatata

SEQ ID NO: 270022 - DNA, 19 bp, Homo sapiens
  siRNA target sequence for SEC23A (NM_006364.2,1621-1639).
gcataatgctccaattcct

SEQ ID NO: 270023 - DNA, 19 bp, Homo sapiens
  siRNA target sequence for SEC23A (NM_006364.2,1913-1931).
gacccaagttccttcagat

SEQ ID NO: 270024 - DNA, 19 bp, Homo sapiens
  siRNA target sequence for SEC23A (NM_006364.2,1915-1933).
cccaagttccttcagattt

SEQ ID NO: 270025 - DNA, 19 bp, Homo sapiens
  siRNA target sequence for SEC23A (NM_006364.2,1916-1934).
ccaagttccttcagatttt

SEQ ID NO: 270026 - DNA, 19 bp, Homo sapiens
  siRNA target sequence for SEC23A (NM_006364.2,1947-1965).
ccctttatccacagtttat

SEQ ID NO: 270027 - DNA, 19 bp, Homo sapiens
  siRNA target sequence for SEC23A (NM_006364.2,1966-1984).
gtttcatttaagaagatct

SEQ ID NO: 270028 - DNA, 19 bp, Homo sapiens
  siRNA target sequence for SEC23A (NM_006364.2,1990-2008).
cctgcaagtttttaacaat

SEQ ID NO: 270029 - DNA, 19 bp, Homo sapiens
  siRNA target sequence for SEC23A (NM_006364.2,2010-2028).
gtcctgatgagagttcata

SEQ ID NO: 270030 - DNA, 19 bp, Homo sapiens
  siRNA target sequence for SEC23A (NM_006364.2,2013-2031).
ctgatgagagttcatatta

SEQ ID NO: 270031 - DNA, 19 bp, Homo sapiens
  siRNA target sequence for SEC23A (NM_006364.2,2038-2056).
ccattttatgcgtcaagat

SEQ ID NO: 270032 - DNA, 19 bp, Homo sapiens
  siRNA target sequence for SEC23A (NM_006364.2,2054-2072).
gatctgacccagtctctaa

SEQ ID NO: 270033 - DNA, 19 bp, Homo sapiens
  siRNA target sequence for SEC23A (NM_006364.2,2057-2075).
ctgacccagtctctaatta

SEQ ID NO: 270034 - DNA, 19 bp, Homo sapiens
  siRNA target sequence for SEC23A (NM_006364.2,2120-2138).
gagccggttcttcttgata

SEQ ID NO: 270035 - DNA, 19 bp, Homo sapiens
  siRNA target sequence for SEC23A (NM_006364.2,2145-2163).
gcattcttgcagatcgtat

SEQ ID NO: 270036 - DNA, 19 bp, Homo sapiens
  siRNA target sequence for SEC23A (NM_006364.2,2146-2164).
cattcttgcagatcgtatt

SEQ ID NO: 270037 - DNA, 19 bp, Homo sapiens
  siRNA target sequence for SEC23A (NM_006364.2,2319-2337).
gatttccaatgccaagata

SEQ ID NO: 270038 - DNA, 19 bp, Homo sapiens
  siRNA target sequence for SEC23A (NM_006364.2,2392-2410).
cccttcacagactcataat

SEQ ID NO: 270039 - DNA, 19 bp, Homo sapiens
  siRNA target sequence for SEC23A (NM_006364.2,2393-2411).
ccttcacagactcataata

SEQ ID NO: 270040 - DNA, 19 bp, Homo sapiens
  siRNA target sequence for SEC23A (NM_006364.2,2401-2419).
gactcataataatatgtat

SEQ ID NO: 270041 - DNA, 19 bp, Homo sapiens
  siRNA target sequence for SEC23A (NM_006364.2,2431-2449).
ggagtctggagcacctatt

SEQ ID NO: 270042 - DNA, 19 bp, Homo sapiens
  siRNA target sequence for SEC23A (NM_006364.2,2439-2457).
gagcacctattcttacaga

SEQ ID NO: 270043 - DNA, 19 bp, Homo sapiens
  siRNA target sequence for SEC23A (NM_006364.2,2462-2480).
gttagtttacaagtgttta

SEQ ID NO: 270044 - DNA, 19 bp, Homo sapiens
  siRNA target sequence for SEC23B (NM_006363.3,110-128).
cgacatacctggagttcat

SEQ ID NO: 270045 - DNA, 19 bp, Homo sapiens
  siRNA target sequence for SEC23B (NM_006363.3,145-163).
cgggatggtgtgcgtttta

SEQ ID NO: 270046 - DNA, 19 bp, Homo sapiens
  siRNA target sequence for SEC23B (NM_006363.3,147-165).
ggatggtgtgcgttttagt

SEQ ID NO: 270047 - DNA, 19 bp, Homo sapiens
  siRNA target sequence for SEC23B (NM_006363.3,148-166).
gatggtgtgcgttttagtt

SEQ ID NO: 270048 - DNA, 19 bp, Homo sapiens
  siRNA target sequence for SEC23B (NM_006363.3,288-306).
cagcaggccaacttgtaaa

SEQ ID NO: 270049 - DNA, 19 bp, Homo sapiens
  siRNA target sequence for SEC23B (NM_006363.3,291-309).
caggccaacttgtaaagct

SEQ ID NO: 270050 - DNA, 19 bp, Homo sapiens
  siRNA target sequence for SEC23B (NM_006363.3,320-338).
cactttgtcaggttgatta

SEQ ID NO: 270051 - DNA, 19 bp, Homo sapiens
  siRNA target sequence for SEC23B (NM_006363.3,349-367).
ctttgggcctgtaatttct

SEQ ID NO: 270052 - DNA, 19 bp, Homo sapiens
  siRNA target sequence for SEC23B (NM_006363.3,672-690).
ccgagggaccaaggattta

SEQ ID NO: 270053 - DNA, 19 bp, Homo sapiens
  siRNA target sequence for SEC23B (NM_006363.3,673-691).
cgagggaccaaggatttaa

SEQ ID NO: 270054 - DNA, 19 bp, Homo sapiens
  siRNA target sequence for SEC23B (NM_006363.3,684-702).
ggatttaactgcaaagcaa

SEQ ID NO: 270055 - DNA, 19 bp, Homo sapiens
  siRNA target sequence for SEC23B (NM_006363.3,805-823).
cctgttcacaagattgata

SEQ ID NO: 270056 - DNA, 19 bp, Homo sapiens
  siRNA target sequence for SEC23B (NM_006363.3,806-824).
ctgttcacaagattgatat

SEQ ID NO: 270057 - DNA, 19 bp, Homo sapiens
  siRNA target sequence for SEC23B (NM_006363.3,808-826).
gttcacaagattgatatga

SEQ ID NO: 270058 - DNA, 19 bp, Homo sapiens
  siRNA target sequence for SEC23B (NM_006363.3,825-843).
gaacctcactgatcttctt

SEQ ID NO: 270059 - DNA, 19 bp, Homo sapiens
  siRNA target sequence for SEC23B (NM_006363.3,858-876).
ggacccatggccagtaact

SEQ ID NO: 270060 - DNA, 19 bp, Homo sapiens
  siRNA target sequence for SEC23B (NM_006363.3,934-952).
ctggagggcacttttccaa

SEQ ID NO: 270061 - DNA, 19 bp, Homo sapiens
  siRNA target sequence for SEC23B (NM_006363.3,1021-1039).
gatgaattaaagattccta

SEQ ID NO: 270062 - DNA, 19 bp, Homo sapiens
  siRNA target sequence for SEC23B (NM_006363.3,1066-1084).
gataatgcacgattcatga

SEQ ID NO: 270063 - DNA, 19 bp, Homo sapiens
  siRNA target sequence for SEC23B (NM_006363.3,1090-1108).
gcaaccaagcactatgaga

SEQ ID NO: 270064 - DNA, 19 bp, Homo sapiens
  siRNA target sequence for SEC23B (NM_006363.3,1091-1109).
caaccaagcactatgagat

SEQ ID NO: 270065 - DNA, 19 bp, Homo sapiens
  siRNA target sequence for SEC23B (NM_006363.3,1101-1119).
ctatgagatgcttgctaat

SEQ ID NO: 270066 - DNA, 19 bp, Homo sapiens
  siRNA target sequence for SEC23B (NM_006363.3,1135-1153).
ggtcactgcattgatattt

SEQ ID NO: 270067 - DNA, 19 bp, Homo sapiens
  siRNA target sequence for SEC23B (NM_006363.3,1194-1212).
gtgttgtgcaaatcttact

SEQ ID NO: 270068 - DNA, 19 bp, Homo sapiens
  siRNA target sequence for SEC23B (NM_006363.3,1319-1337).
gtgctactttggacgtaaa

SEQ ID NO: 270069 - DNA, 19 bp, Homo sapiens
  siRNA target sequence for SEC23B (NM_006363.3,1321-1339).
gctactttggacgtaaaga

SEQ ID NO: 270070 - DNA, 19 bp, Homo sapiens
  siRNA target sequence for SEC23B (NM_006363.3,1340-1358).
cctctcgggaactgaagat

SEQ ID NO: 270071 - DNA, 19 bp, Homo sapiens
  siRNA target sequence for SEC23B (NM_006363.3,1341-1359).
ctctcgggaactgaagatt

SEQ ID NO: 270072 - DNA, 19 bp, Homo sapiens
  siRNA target sequence for SEC23B (NM_006363.3,1376-1394).
catgcgtatctctgaatgt

SEQ ID NO: 270073 - DNA, 19 bp, Homo sapiens
  siRNA target sequence for SEC23B (NM_006363.3,1379-1397).
gcgtatctctgaatgtgaa

SEQ ID NO: 270074 - DNA, 19 bp, Homo sapiens
  siRNA target sequence for SEC23B (NM_006363.3,1435-1453).
ggcacgagtcagtggaaaa

SEQ ID NO: 270075 - DNA, 19 bp, Homo sapiens
  siRNA target sequence for SEC23B (NM_006363.3,1436-1454).
gcacgagtcagtggaaaat

SEQ ID NO: 270076 - DNA, 19 bp, Homo sapiens
  siRNA target sequence for SEC23B (NM_006363.3,1459-1477).
ggcctagatcctacatcta

SEQ ID NO: 270077 - DNA, 19 bp, Homo sapiens
  siRNA target sequence for SEC23B (NM_006363.3,1461-1479).
cctagatcctacatctaca

SEQ ID NO: 270078 - DNA, 19 bp, Homo sapiens
  siRNA target sequence for SEC23B (NM_006363.3,1475-1493).
ctacacttggcatctattt

SEQ ID NO: 270079 - DNA, 19 bp, Homo sapiens
  siRNA target sequence for SEC23B (NM_006363.3,1538-1556).
gaggagccatccagtttgt

SEQ ID NO: 270080 - DNA, 19 bp, Homo sapiens
  siRNA target sequence for SEC23B (NM_006363.3,1611-1629).
ccgaaattgggcagatgta

SEQ ID NO: 270081 - DNA, 19 bp, Homo sapiens
  siRNA target sequence for SEC23B (NM_006363.3,1613-1631).
gaaattgggcagatgtaca

SEQ ID NO: 270082 - DNA, 19 bp, Homo sapiens
  siRNA target sequence for SEC23B (NM_006363.3,1779-1797).
gtttggacagtataacaaa

SEQ ID NO: 270083 - DNA, 19 bp, Homo sapiens
  siRNA target sequence for SEC23B (NM_006363.3,1801-1819).
gaccccacttcttttaggt

SEQ ID NO: 270084 - DNA, 19 bp, Homo sapiens
  siRNA target sequence for SEC23B (NM_006363.3,1803-1821).
ccccacttcttttaggtta

SEQ ID NO: 270085 - DNA, 19 bp, Homo sapiens
  siRNA target sequence for SEC23B (NM_006363.3,1804-1822).
cccacttcttttaggttat

SEQ ID NO: 270086 - DNA, 19 bp, Homo sapiens
  siRNA target sequence for SEC23B (NM_006363.3,1808-1826).
cttcttttaggttatcaga

SEQ ID NO: 270087 - DNA, 19 bp, Homo sapiens
  siRNA target sequence for SEC23B (NM_006363.3,1835-1853).
ctctatatcctcagtttat

SEQ ID NO: 270088 - DNA, 19 bp, Homo sapiens
  siRNA target sequence for SEC23B (NM_006363.3,1868-1886).
gatctccatttcttcaagt

SEQ ID NO: 270089 - DNA, 19 bp, Homo sapiens
  siRNA target sequence for SEC23B (NM_006363.3,1900-1918).
cctgatgagtcgtcatatt

SEQ ID NO: 270090 - DNA, 19 bp, Homo sapiens
  siRNA target sequence for SEC23B (NM_006363.3,1901-1919).
ctgatgagtcgtcatatta

SEQ ID NO: 270091 - DNA, 19 bp, Homo sapiens
  siRNA target sequence for SEC23B (NM_006363.3,1903-1921).
gatgagtcgtcatattaca

SEQ ID NO: 270092 - DNA, 19 bp, Homo sapiens
  siRNA target sequence for SEC23B (NM_006363.3,2008-2026).
gagccagtactcttggata

SEQ ID NO: 270093 - DNA, 19 bp, Homo sapiens
  siRNA target sequence for SEC23B (NM_006363.3,2022-2040).
ggatagcagcagcattcta

SEQ ID NO: 270094 - DNA, 19 bp, Homo sapiens
  siRNA target sequence for SEC23B (NM_006363.3,2033-2051).
gcattctagctgacagaat

SEQ ID NO: 270095 - DNA, 19 bp, Homo sapiens
  siRNA target sequence for SEC23B (NM_006363.3,2034-2052).
cattctagctgacagaatt

SEQ ID NO: 270096 - DNA, 19 bp, Homo sapiens
  siRNA target sequence for SEC23B (NM_006363.3,2137-2155).
cccgagtatgaaaacttca

SEQ ID NO: 270097 - DNA, 19 bp, Homo sapiens
  siRNA target sequence for SEC23B (NM_006363.3,2212-2230).
ccgatgccacgttacatca

SEQ ID NO: 270098 - DNA, 19 bp, Homo sapiens
  siRNA target sequence for SEC23B (NM_006363.3,2213-2231).
cgatgccacgttacatcaa

SEQ ID NO: 270099 - DNA, 19 bp, Homo sapiens
  siRNA target sequence for SEC23B (NM_006363.3,2249-2267).
gtcaggctcgattcctttt

SEQ ID NO: 270100 - DNA, 19 bp, Homo sapiens
  siRNA target sequence for SEC23B (NM_006363.3,2281-2299).
ccatctcagacacacaata

SEQ ID NO: 270101 - DNA, 19 bp, Homo sapiens
  siRNA target sequence for SEC23B (NM_006363.3,2327-2345).
gagcacccatcctaactga

SEQ ID NO: 270102 - DNA, 19 bp, Homo sapiens
  siRNA target sequence for SEC23B (NM_006363.3,2333-2351).
ccatcctaactgatgatgt

SEQ ID NO: 270103 - DNA, 19 bp, Homo sapiens
  siRNA target sequence for SEC23B (NM_006363.3,2362-2380).
gtgttcatggaccatttga

SEQ ID NO: 270104 - DNA, 19 bp, Homo sapiens
  siRNA target sequence for SEC24B (NM_006323.1,308-326).
gcaggttccatctggatat

SEQ ID NO: 270105 - DNA, 19 bp, Homo sapiens
  siRNA target sequence for SEC24B (NM_006323.1,311-329).
ggttccatctggatatgga

SEQ ID NO: 270106 - DNA, 19 bp, Homo sapiens
  siRNA target sequence for SEC24B (NM_006323.1,312-330).
gttccatctggatatggat

SEQ ID NO: 270107 - DNA, 19 bp, Homo sapiens
  siRNA target sequence for SEC24B (NM_006323.1,322-340).
gatatggattgcatcatca

SEQ ID NO: 270108 - DNA, 19 bp, Homo sapiens
  siRNA target sequence for SEC24B (NM_006323.1,327-345).
ggattgcatcatcaaaact

SEQ ID NO: 270109 - DNA, 19 bp, Homo sapiens
  siRNA target sequence for SEC24B (NM_006323.1,328-346).
gattgcatcatcaaaacta

SEQ ID NO: 270110 - DNA, 19 bp, Homo sapiens
  siRNA target sequence for SEC24B (NM_006323.1,351-369).
gctccctcaggacattact

SEQ ID NO: 270111 - DNA, 19 bp, Homo sapiens
  siRNA target sequence for SEC24B (NM_006323.1,409-427).
cccagtgtggtgattacta

SEQ ID NO: 270112 - DNA, 19 bp, Homo sapiens
  siRNA target sequence for SEC24B (NM_006323.1,437-455).
ctatacagtaccaacacaa

SEQ ID NO: 270113 - DNA, 19 bp, Homo sapiens
  siRNA target sequence for SEC24B (NM_006323.1,489-507).
ggagcacagcagttgtaca

SEQ ID NO: 270114 - DNA, 19 bp, Homo sapiens
  siRNA target sequence for SEC24B (NM_006323.1,517-535).
ctcctgcccctcatattgt

SEQ ID NO: 270115 - DNA, 19 bp, Homo sapiens
  siRNA target sequence for SEC24B (NM_006323.1,571-589).
cgtcagcatcccatttgca

SEQ ID NO: 270116 - DNA, 19 bp, Homo sapiens
  siRNA target sequence for SEC24B (NM_006323.1,592-610).
cgagtgcctcccaaccata

SEQ ID NO: 270117 - DNA, 19 bp, Homo sapiens
  siRNA target sequence for SEC24B (NM_006323.1,677-695).
gggatttccctctacttgt

SEQ ID NO: 270118 - DNA, 19 bp, Homo sapiens
  siRNA target sequence for SEC24B (NM_006323.1,696-714).
ggtcattatgctatgtcaa

SEQ ID NO: 270119 - DNA, 19 bp, Homo sapiens
  siRNA target sequence for SEC24B (NM_006323.1,705-723).
gctatgtcaactgtttcta

SEQ ID NO: 270120 - DNA, 19 bp, Homo sapiens
  siRNA target sequence for SEC24B (NM_006323.1,726-744).
gccgcgtatcctagtgttt

SEQ ID NO: 270121 - DNA, 19 bp, Homo sapiens
  siRNA target sequence for SEC24B (NM_006323.1,728-746).
cgcgtatcctagtgtttca

SEQ ID NO: 270122 - DNA, 19 bp, Homo sapiens
  siRNA target sequence for SEC24B (NM_006323.1,729-747).
gcgtatcctagtgtttcat

SEQ ID NO: 270123 - DNA, 19 bp, Homo sapiens
  siRNA target sequence for SEC24B (NM_006323.1,730-748).
cgtatcctagtgtttcata

SEQ ID NO: 270124 - DNA, 19 bp, Homo sapiens
  siRNA target sequence for SEC24B (NM_006323.1,756-774).
ctgcctgctggtgatacat

SEQ ID NO: 270125 - DNA, 19 bp, Homo sapiens
  siRNA target sequence for SEC24B (NM_006323.1,768-786).
gatacatatgggcaaatgt

SEQ ID NO: 270126 - DNA, 19 bp, Homo sapiens
  siRNA target sequence for SEC24B (NM_006323.1,795-813).
cagaatgctccgactgtta

SEQ ID NO: 270127 - DNA, 19 bp, Homo sapiens
  siRNA target sequence for SEC24B (NM_006323.1,805-823).
cgactgttaggccagttaa

SEQ ID NO: 270128 - DNA, 19 bp, Homo sapiens
  siRNA target sequence for SEC24B (NM_006323.1,806-824).
gactgttaggccagttaaa

SEQ ID NO: 270129 - DNA, 19 bp, Homo sapiens
  siRNA target sequence for SEC24B (NM_006323.1,958-976).
catcgactcaagacaatct

SEQ ID NO: 270130 - DNA, 19 bp, Homo sapiens
  siRNA target sequence for SEC24B (NM_006323.1,961-979).
cgactcaagacaatctcat

SEQ ID NO: 270131 - DNA, 19 bp, Homo sapiens
  siRNA target sequence for SEC24B (NM_006323.1,999-1017).
ctggctgtagcgaacaaca

SEQ ID NO: 270132 - DNA, 19 bp, Homo sapiens
  siRNA target sequence for SEC24B (NM_006323.1,1013-1031).
caacaacccaaccattact

SEQ ID NO: 270133 - DNA, 19 bp, Homo sapiens
  siRNA target sequence for SEC24B (NM_006323.1,1048-1066).
cctgtcctgttatgcaaaa

SEQ ID NO: 270134 - DNA, 19 bp, Homo sapiens
  siRNA target sequence for SEC24B (NM_006323.1,1092-1110).
gtggtatccactgttttat

SEQ ID NO: 270135 - DNA, 19 bp, Homo sapiens
  siRNA target sequence for SEC24B (NM_006323.1,1186-1204).
cacagccatcagagctatt

SEQ ID NO: 270136 - DNA, 19 bp, Homo sapiens
  siRNA target sequence for SEC24B (NM_006323.1,1192-1210).
catcagagctattacaaca

SEQ ID NO: 270137 - DNA, 19 bp, Homo sapiens
  siRNA target sequence for SEC24B (NM_006323.1,1195-1213).
cagagctattacaacaaaa

SEQ ID NO: 270138 - DNA, 19 bp, Homo sapiens
  siRNA target sequence for SEC24B (NM_006323.1,1216-1234).
gcgtgcagtatggtgaata

SEQ ID NO: 270139 - DNA, 19 bp, Homo sapiens
  siRNA target sequence for SEC24B (NM_006323.1,1217-1235).
cgtgcagtatggtgaatat

SEQ ID NO: 270140 - DNA, 19 bp, Homo sapiens
  siRNA target sequence for SEC24B (NM_006323.1,1220-1238).
gcagtatggtgaatatgtt

SEQ ID NO: 270141 - DNA, 19 bp, Homo sapiens
  siRNA target sequence for SEC24B (NM_006323.1,1260-1278).
ccaactcccttgtcatcaa

SEQ ID NO: 270142 - DNA, 19 bp, Homo sapiens
  siRNA target sequence for SEC24B (NM_006323.1,1273-1291).
catcaacttccgatgatga

SEQ ID NO: 270143 - DNA, 19 bp, Homo sapiens
  siRNA target sequence for SEC24B (NM_006323.1,1390-1408).
gcagttacccagatatgct

SEQ ID NO: 270144 - DNA, 19 bp, Homo sapiens
  siRNA target sequence for SEC24B (NM_006323.1,1391-1409).
cagttacccagatatgctt

SEQ ID NO: 270145 - DNA, 19 bp, Homo sapiens
  siRNA target sequence for SEC24B (NM_006323.1,1398-1416).
ccagatatgctttcttcat

SEQ ID NO: 270146 - DNA, 19 bp, Homo sapiens
  siRNA target sequence for SEC24B (NM_006323.1,1499-1517).
cgtccctcagccttcaaaa

SEQ ID NO: 270147 - DNA, 19 bp, Homo sapiens
  siRNA target sequence for SEC24B (NM_006323.1,1534-1552).
ctatggctatccaacactt

SEQ ID NO: 270148 - DNA, 19 bp, Homo sapiens
  siRNA target sequence for SEC24B (NM_006323.1,1556-1574).
cctggttatcagaatgcta

SEQ ID NO: 270149 - DNA, 19 bp, Homo sapiens
  siRNA target sequence for SEC24B (NM_006323.1,1571-1589).
gctacagcaccacttattt

SEQ ID NO: 270150 - DNA, 19 bp, Homo sapiens
  siRNA target sequence for SEC24B (NM_006323.1,1602-1620).
cccagtaacccggtatatt

SEQ ID NO: 270151 - DNA, 19 bp, Homo sapiens
  siRNA target sequence for SEC24B (NM_006323.1,1604-1622).
cagtaacccggtatattct

SEQ ID NO: 270152 - DNA, 19 bp, Homo sapiens
  siRNA target sequence for SEC24B (NM_006323.1,1664-1682).
gctatcctccagtatagga

SEQ ID NO: 270153 - DNA, 19 bp, Homo sapiens
  siRNA target sequence for SEC24B (NM_006323.1,1673-1691).
cagtataggaggattgagt

SEQ ID NO: 270154 - DNA, 19 bp, Homo sapiens
  siRNA target sequence for SEC24B (NM_006323.1,1717-1735).
gcctgagacctgtaaacct

SEQ ID NO: 270155 - DNA, 19 bp, Homo sapiens
  siRNA target sequence for SEC24B (NM_006323.1,1719-1737).
ctgagacctgtaaacctta

SEQ ID NO: 270156 - DNA, 19 bp, Homo sapiens
  siRNA target sequence for SEC24B (NM_006323.1,1723-1741).
gacctgtaaaccttactca

SEQ ID NO: 270157 - DNA, 19 bp, Homo sapiens
  siRNA target sequence for SEC24B (NM_006323.1,1774-1792).
gggctcctgtacctaactt

SEQ ID NO: 270158 - DNA, 19 bp, Homo sapiens
  siRNA target sequence for SEC24B (NM_006323.1,1776-1794).
gctcctgtacctaacttga

SEQ ID NO: 270159 - DNA, 19 bp, Homo sapiens
  siRNA target sequence for SEC24B (NM_006323.1,1777-1795).
ctcctgtacctaacttgaa

SEQ ID NO: 270160 - DNA, 19 bp, Homo sapiens
  siRNA target sequence for SEC24B (NM_006323.1,1827-1845).
gattcatttcggtgtactt

SEQ ID NO: 270161 - DNA, 19 bp, Homo sapiens
  siRNA target sequence for SEC24B (NM_006323.1,1836-1854).
cggtgtactttgacaaata

SEQ ID NO: 270162 - DNA, 19 bp, Homo sapiens
  siRNA target sequence for SEC24B (NM_006323.1,1858-1876).
cacagacacaggctttact

SEQ ID NO: 270163 - DNA, 19 bp, Homo sapiens
  siRNA target sequence for SEC24B (NM_006323.1,1868-1886).
ggctttactgaataaagct

SEQ ID NO: 270164 - DNA, 19 bp, Homo sapiens
  siRNA target sequence for SEC24B (NM_006323.1,1884-1902).
gctaagcttcctttaggat

SEQ ID NO: 270165 - DNA, 19 bp, Homo sapiens
  siRNA target sequence for SEC24B (NM_006323.1,1919-1937).
cagagacctaacgcaatta

SEQ ID NO: 270166 - DNA, 19 bp, Homo sapiens
  siRNA target sequence for SEC24B (NM_006323.1,1931-1949).
gcaattaccagtgataaca

SEQ ID NO: 270167 - DNA, 19 bp, Homo sapiens
  siRNA target sequence for SEC24B (NM_006323.1,1941-1959).
gtgataacatcaaatacca

SEQ ID NO: 270168 - DNA, 19 bp, Homo sapiens
  siRNA target sequence for SEC24B (NM_006323.1,1943-1961).
gataacatcaaataccatt

SEQ ID NO: 270169 - DNA, 19 bp, Homo sapiens
  siRNA target sequence for SEC24B (NM_006323.1,1970-1988).
ccgatcctgtcgaacgtat

SEQ ID NO: 270170 - DNA, 19 bp, Homo sapiens
  siRNA target sequence for SEC24B (NM_006323.1,1971-1989).
cgatcctgtcgaacgtata

SEQ ID NO: 270171 - DNA, 19 bp, Homo sapiens
  siRNA target sequence for SEC24B (NM_006323.1,1972-1990).
gatcctgtcgaacgtatat

SEQ ID NO: 270172 - DNA, 19 bp, Homo sapiens
  siRNA target sequence for SEC24B (NM_006323.1,1997-2015).
ctttgtatccttcattgat

SEQ ID NO: 270173 - DNA, 19 bp, Homo sapiens
  siRNA target sequence for SEC24B (NM_006323.1,2019-2037).
cgtagatggaaatgcaatt

SEQ ID NO: 270174 - DNA, 19 bp, Homo sapiens
  siRNA target sequence for SEC24B (NM_006323.1,2039-2057).
gtgctatagagtaaacgat

SEQ ID NO: 270175 - DNA, 19 bp, Homo sapiens
  siRNA target sequence for SEC24B (NM_006323.1,2081-2099).
cccccttacccgatcttat

SEQ ID NO: 270176 - DNA, 19 bp, Homo sapiens
  siRNA target sequence for SEC24B (NM_006323.1,2084-2102).
ccttacccgatcttatgga

SEQ ID NO: 270177 - DNA, 19 bp, Homo sapiens
  siRNA target sequence for SEC24B (NM_006323.1,2289-2307).
ggagattcacgaacaagaa

SEQ ID NO: 270178 - DNA, 19 bp, Homo sapiens
  siRNA target sequence for SEC24B (NM_006323.1,2290-2308).
gagattcacgaacaagaat

SEQ ID NO: 270179 - DNA, 19 bp, Homo sapiens
  siRNA target sequence for SEC24B (NM_006323.1,2296-2314).
cacgaacaagaataggatt

SEQ ID NO: 270180 - DNA, 19 bp, Homo sapiens
  siRNA target sequence for SEC24B (NM_006323.1,2345-2363).
caatttacaagaaggatta

SEQ ID NO: 270181 - DNA, 19 bp, Homo sapiens
  siRNA target sequence for SEC24B (NM_006323.1,2359-2377).
gattatcacagcctcaaat

SEQ ID NO: 270182 - DNA, 19 bp, Homo sapiens
  siRNA target sequence for SEC24B (NM_006323.1,2378-2396).
gttgattgtgtctgatata

SEQ ID NO: 270183 - DNA, 19 bp, Homo sapiens
  siRNA target sequence for SEC24B (NM_006323.1,2389-2407).
ctgatatagatgatgtttt

SEQ ID NO: 270184 - DNA, 19 bp, Homo sapiens
  siRNA target sequence for SEC24B (NM_006323.1,2409-2427).
ctacctacaccggatagtt

SEQ ID NO: 270185 - DNA, 19 bp, Homo sapiens
  siRNA target sequence for SEC24B (NM_006323.1,2413-2431).
ctacaccggatagtttact

SEQ ID NO: 270186 - DNA, 19 bp, Homo sapiens
  siRNA target sequence for SEC24B (NM_006323.1,2433-2451).
gtgaatctatatgaaagta

SEQ ID NO: 270187 - DNA, 19 bp, Homo sapiens
  siRNA target sequence for SEC24B (NM_006323.1,2478-2496).
gcattaccaaacatgttca

SEQ ID NO: 270188 - DNA, 19 bp, Homo sapiens
  siRNA target sequence for SEC24B (NM_006323.1,2538-2556).
caggctgcctttaaattaa

SEQ ID NO: 270189 - DNA, 19 bp, Homo sapiens
  siRNA target sequence for SEC24B (NM_006323.1,2568-2586).
ggtggccgtgtgtctgtat

SEQ ID NO: 270190 - DNA, 19 bp, Homo sapiens
  siRNA target sequence for SEC24B (NM_006323.1,2572-2590).
gccgtgtgtctgtatttca

SEQ ID NO: 270191 - DNA, 19 bp, Homo sapiens
  siRNA target sequence for SEC24B (NM_006323.1,2574-2592).
cgtgtgtctgtatttcaga

SEQ ID NO: 270192 - DNA, 19 bp, Homo sapiens
  siRNA target sequence for SEC24B (NM_006323.1,2637-2655).
gatcctaatcagagatcaa

SEQ ID NO: 270193 - DNA, 19 bp, Homo sapiens
  siRNA target sequence for SEC24B (NM_006323.1,2656-2674).
gtacaaaggtggtacaaca

SEQ ID NO: 270194 - DNA, 19 bp, Homo sapiens
  siRNA target sequence for SEC24B (NM_006323.1,2659-2677).
caaaggtggtacaacatct

SEQ ID NO: 270195 - DNA, 19 bp, Homo sapiens
  siRNA target sequence for SEC24B (NM_006323.1,2682-2700).
cctgcaactgatttttata

SEQ ID NO: 270196 - DNA, 19 bp, Homo sapiens
  siRNA target sequence for SEC24B (NM_006323.1,2750-2768).
ccttttaagttcacagtat

SEQ ID NO: 270197 - DNA, 19 bp, Homo sapiens
  siRNA target sequence for SEC24B (NM_006323.1,2809-2827).
cagggtgcatctattatta

SEQ ID NO: 270198 - DNA, 19 bp, Homo sapiens
  siRNA target sequence for SEC24B (NM_006323.1,2813-2831).
gtgcatctattattatcca

SEQ ID NO: 270199 - DNA, 19 bp, Homo sapiens
  siRNA target sequence for SEC24B (NM_006323.1,2880-2898).
gacctaaaacggtatctca

SEQ ID NO: 270200 - DNA, 19 bp, Homo sapiens
  siRNA target sequence for SEC24B (NM_006323.1,2910-2928).
gggtttgaagctgttatga

SEQ ID NO: 270201 - DNA, 19 bp, Homo sapiens
  siRNA target sequence for SEC24B (NM_006323.1,2919-2937).
gctgttatgagaataaggt

SEQ ID NO: 270202 - DNA, 19 bp, Homo sapiens
  siRNA target sequence for SEC24B (NM_006323.1,2927-2945).
gagaataaggtgtactaaa

SEQ ID NO: 270203 - DNA, 19 bp, Homo sapiens
  siRNA target sequence for SEC24B (NM_006323.1,2962-2980).
cttttcacggtaacttctt

SEQ ID NO: 270204 - DNA, 19 bp, Homo sapiens
  siRNA target sequence for SEC24B (NM_006323.1,2975-2993).
cttctttgtccgttctact

SEQ ID NO: 270205 - DNA, 19 bp, Homo sapiens
  siRNA target sequence for SEC24B (NM_006323.1,2978-2996).
ctttgtccgttctactgat

SEQ ID NO: 270206 - DNA, 19 bp, Homo sapiens
  siRNA target sequence for SEC24B (NM_006323.1,2982-3000).
gtccgttctactgatttgt

SEQ ID NO: 270207 - DNA, 19 bp, Homo sapiens
  siRNA target sequence for SEC24B (NM_006323.1,3038-3056).
ggtgcagttgtcaattgaa

SEQ ID NO: 270208 - DNA, 19 bp, Homo sapiens
  siRNA target sequence for SEC24B (NM_006323.1,3069-3087).
gatacttccttagtatgtt

SEQ ID NO: 270209 - DNA, 19 bp, Homo sapiens
  siRNA target sequence for SEC24B (NM_006323.1,3073-3091).
cttccttagtatgttttca

SEQ ID NO: 270210 - DNA, 19 bp, Homo sapiens
  siRNA target sequence for SEC24B (NM_006323.1,3090-3108).
caaacagccctattatata

SEQ ID NO: 270211 - DNA, 19 bp, Homo sapiens
  siRNA target sequence for SEC24B (NM_006323.1,3096-3114).
gccctattatatacatcaa

SEQ ID NO: 270212 - DNA, 19 bp, Homo sapiens
  siRNA target sequence for SEC24B (NM_006323.1,3116-3134).
caaaggtgagcggagaatt

SEQ ID NO: 270213 - DNA, 19 bp, Homo sapiens
  siRNA target sequence for SEC24B (NM_006323.1,3121-3139).
gtgagcggagaattagagt

SEQ ID NO: 270214 - DNA, 19 bp, Homo sapiens
  siRNA target sequence for SEC24B (NM_006323.1,3128-3146).
gagaattagagtacataca

SEQ ID NO: 270215 - DNA, 19 bp, Homo sapiens
  siRNA target sequence for SEC24B (NM_006323.1,3130-3148).
gaattagagtacatacact

SEQ ID NO: 270216 - DNA, 19 bp, Homo sapiens
  siRNA target sequence for SEC24B (NM_006323.1,3155-3173).
gccagtggtaagttcacta

SEQ ID NO: 270217 - DNA, 19 bp, Homo sapiens
  siRNA target sequence for SEC24B (NM_006323.1,3166-3184).
gttcactagcagatgtata

SEQ ID NO: 270218 - DNA, 19 bp, Homo sapiens
  siRNA target sequence for SEC24B (NM_006323.1,3288-3306).
gctgtagtggactcattgt

SEQ ID NO: 270219 - DNA, 19 bp, Homo sapiens
  siRNA target sequence for SEC24B (NM_006323.1,3316-3334).
gctcaactgtctcaaattt

SEQ ID NO: 270220 - DNA, 19 bp, Homo sapiens
  siRNA target sequence for SEC24B (NM_006323.1,3317-3335).
ctcaactgtctcaaattta

SEQ ID NO: 270221 - DNA, 19 bp, Homo sapiens
  siRNA target sequence for SEC24B (NM_006323.1,3436-3454).
ggctggatgatcgtgtata

SEQ ID NO: 270222 - DNA, 19 bp, Homo sapiens
  siRNA target sequence for SEC24B (NM_006323.1,3437-3455).
gctggatgatcgtgtatat

SEQ ID NO: 270223 - DNA, 19 bp, Homo sapiens
  siRNA target sequence for SEC24B (NM_006323.1,3458-3476).
catgtgtcagataaagtct

SEQ ID NO: 270224 - DNA, 19 bp, Homo sapiens
  siRNA target sequence for SEC24B (NM_006323.1,3480-3498).
ccacttgttcatctaatga

SEQ ID NO: 270225 - DNA, 19 bp, Homo sapiens
  siRNA target sequence for SEC24B (NM_006323.1,3481-3499).
cacttgttcatctaatgaa

SEQ ID NO: 270226 - DNA, 19 bp, Homo sapiens
  siRNA target sequence for SEC24B (NM_006323.1,3545-3563).
gggtgcagtacatgttaat

SEQ ID NO: 270227 - DNA, 19 bp, Homo sapiens
  siRNA target sequence for SEC24B (NM_006323.1,3702-3720).
gtgcttggatatactaatt

SEQ ID NO: 270228 - DNA, 19 bp, Homo sapiens
  siRNA target sequence for SEC24B (NM_006323.1,3723-3741).
gcatcaataccacagaaaa

SEQ ID NO: 270229 - DNA, 19 bp, Homo sapiens
  siRNA target sequence for SEC24B (NM_006323.1,3762-3780).
gatacactttcatcagaaa

SEQ ID NO: 270230 - DNA, 19 bp, Homo sapiens
  siRNA target sequence for SEC24B (NM_006323.1,3856-3874).
gtcctgccaaagcagaatt

SEQ ID NO: 270231 - DNA, 19 bp, Homo sapiens
  siRNA target sequence for SEC24B (NM_006323.1,3897-3915).
cggacagaggctgcatttt

SEQ ID NO: 270232 - DNA, 19 bp, Homo sapiens
  siRNA target sequence for SEC24B (NM_006323.1,3899-3917).
gacagaggctgcattttct

SEQ ID NO: 270233 - DNA, 19 bp, Homo sapiens
  siRNA target sequence for SEC24B (NM_006323.1,3903-3921).
gaggctgcattttcttact

SEQ ID NO: 270234 - DNA, 19 bp, Homo sapiens
  siRNA target sequence for SEC24B (NM_006323.1,3907-3925).
ctgcattttcttactatga

SEQ ID NO: 270235 - DNA, 19 bp, Homo sapiens
  siRNA target sequence for SEC24B (NM_006323.1,3942-3960).
cagcagcagatttgtaagt

SEQ ID NO: 270236 - DNA, 19 bp, Homo sapiens
  siRNA target sequence for SEC24D (NM_014822.1,221-239).
ggctacacctccgtattct

SEQ ID NO: 270237 - DNA, 19 bp, Homo sapiens
  siRNA target sequence for SEC24D (NM_014822.1,223-241).
ctacacctccgtattctca

SEQ ID NO: 270238 - DNA, 19 bp, Homo sapiens
  siRNA target sequence for SEC24D (NM_014822.1,310-328).
ctccaacaggtatgatgaa

SEQ ID NO: 270239 - DNA, 19 bp, Homo sapiens
  siRNA target sequence for SEC24D (NM_014822.1,352-370).
ccgccactaggggaatgtt

SEQ ID NO: 270240 - DNA, 19 bp, Homo sapiens
  siRNA target sequence for SEC24D (NM_014822.1,458-476).
ccctccacctgtcaacaat

SEQ ID NO: 270241 - DNA, 19 bp, Homo sapiens
  siRNA target sequence for SEC24D (NM_014822.1,460-478).
ctccacctgtcaacaatgt

SEQ ID NO: 270242 - DNA, 19 bp, Homo sapiens
  siRNA target sequence for SEC24D (NM_014822.1,505-523).
cctctgcacaatcttctta

SEQ ID NO: 270243 - DNA, 19 bp, Homo sapiens
  siRNA target sequence for SEC24D (NM_014822.1,582-600).
caaatcaacagctatggtt

SEQ ID NO: 270244 - DNA, 19 bp, Homo sapiens
  siRNA target sequence for SEC24D (NM_014822.1,842-860).
gaccttgggtgctggatat

SEQ ID NO: 270245 - DNA, 19 bp, Homo sapiens
  siRNA target sequence for SEC24D (NM_014822.1,895-913).
caggcgcacaactgtctta

SEQ ID NO: 270246 - DNA, 19 bp, Homo sapiens
  siRNA target sequence for SEC24D (NM_014822.1,997-1015).
gcccaatccaggtgattga

SEQ ID NO: 270247 - DNA, 19 bp, Homo sapiens
  siRNA target sequence for SEC24D (NM_014822.1,999-1017).
ccaatccaggtgattgaga

SEQ ID NO: 270248 - DNA, 19 bp, Homo sapiens
  siRNA target sequence for SEC24D (NM_014822.1,1000-1018).
caatccaggtgattgagaa

SEQ ID NO: 270249 - DNA, 19 bp, Homo sapiens
  siRNA target sequence for SEC24D (NM_014822.1,1085-1103).
cactacagattgcatgata

SEQ ID NO: 270250 - DNA, 19 bp, Homo sapiens
  siRNA target sequence for SEC24D (NM_014822.1,1090-1108).
cagattgcatgatacaaga

SEQ ID NO: 270251 - DNA, 19 bp, Homo sapiens
  siRNA target sequence for SEC24D (NM_014822.1,1312-1330).
gcccatttatgcagttcat

SEQ ID NO: 270252 - DNA, 19 bp, Homo sapiens
  siRNA target sequence for SEC24D (NM_014822.1,1363-1381).
gcaactgtgtgaatgatgt

SEQ ID NO: 270253 - DNA, 19 bp, Homo sapiens
  siRNA target sequence for SEC24D (NM_014822.1,1377-1395).
gatgttccaccattctatt

SEQ ID NO: 270254 - DNA, 19 bp, Homo sapiens
  siRNA target sequence for SEC24D (NM_014822.1,1448-1466).
gttatctctaggatcttat

SEQ ID NO: 270255 - DNA, 19 bp, Homo sapiens
  siRNA target sequence for SEC24D (NM_014822.1,1453-1471).
ctctaggatcttatgaata

SEQ ID NO: 270256 - DNA, 19 bp, Homo sapiens
  siRNA target sequence for SEC24D (NM_014822.1,1473-1491).
gttgccactttggattatt

SEQ ID NO: 270257 - DNA, 19 bp, Homo sapiens
  siRNA target sequence for SEC24D (NM_014822.1,1532-1550).
catgattgatgtttcatat

SEQ ID NO: 270258 - DNA, 19 bp, Homo sapiens
  siRNA target sequence for SEC24D (NM_014822.1,1542-1560).
gtttcatatagtaacataa

SEQ ID NO: 270259 - DNA, 19 bp, Homo sapiens
  siRNA target sequence for SEC24D (NM_014822.1,1546-1564).
catatagtaacataaagaa

SEQ ID NO: 270260 - DNA, 19 bp, Homo sapiens
  siRNA target sequence for SEC24D (NM_014822.1,1645-1663).
caattcgagtgggttttat

SEQ ID NO: 270261 - DNA, 19 bp, Homo sapiens
  siRNA target sequence for SEC24D (NM_014822.1,1651-1669).
gagtgggttttatcacata

SEQ ID NO: 270262 - DNA, 19 bp, Homo sapiens
  siRNA target sequence for SEC24D (NM_014822.1,1656-1674).
ggttttatcacatataaca

SEQ ID NO: 270263 - DNA, 19 bp, Homo sapiens
  siRNA target sequence for SEC24D (NM_014822.1,1795-1813).
cccaatctgtgattcataa

SEQ ID NO: 270264 - DNA, 19 bp, Homo sapiens
  siRNA target sequence for SEC24D (NM_014822.1,1965-1983).
gcaccagggaagctcaaaa

SEQ ID NO: 270265 - DNA, 19 bp, Homo sapiens
  siRNA target sequence for SEC24D (NM_014822.1,2036-2054).
gccccaaacaaatgtctat

SEQ ID NO: 270266 - DNA, 19 bp, Homo sapiens
  siRNA target sequence for SEC24D (NM_014822.1,2164-2182).
gaggaaccctttacaaata

SEQ ID NO: 270267 - DNA, 19 bp, Homo sapiens
  siRNA target sequence for SEC24D (NM_014822.1,2166-2184).
ggaaccctttacaaataca

SEQ ID NO: 270268 - DNA, 19 bp, Homo sapiens
  siRNA target sequence for SEC24D (NM_014822.1,2167-2185).
gaaccctttacaaatacaa

SEQ ID NO: 270269 - DNA, 19 bp, Homo sapiens
  siRNA target sequence for SEC24D (NM_014822.1,2198-2216).
gcacttggatagacaacaa

SEQ ID NO: 270270 - DNA, 19 bp, Homo sapiens
  siRNA target sequence for SEC24D (NM_014822.1,2199-2217).
cacttggatagacaacaat

SEQ ID NO: 270271 - DNA, 19 bp, Homo sapiens
  siRNA target sequence for SEC24D (NM_014822.1,2201-2219).
cttggatagacaacaattt

SEQ ID NO: 270272 - DNA, 19 bp, Homo sapiens
  siRNA target sequence for SEC24D (NM_014822.1,2292-2310).
ggtttcagagccactgatt

SEQ ID NO: 270273 - DNA, 19 bp, Homo sapiens
  siRNA target sequence for SEC24D (NM_014822.1,2333-2351).
caacaccaccgatgtagaa

SEQ ID NO: 270274 - DNA, 19 bp, Homo sapiens
  siRNA target sequence for SEC24D (NM_014822.1,2349-2367).
gaaatggctgccatcgatt

SEQ ID NO: 270275 - DNA, 19 bp, Homo sapiens
  siRNA target sequence for SEC24D (NM_014822.1,2390-2408).
gttcaagcacgatgacaaa

SEQ ID NO: 270276 - DNA, 19 bp, Homo sapiens
  siRNA target sequence for SEC24D (NM_014822.1,2445-2463).
gtgctttacacgacaatca

SEQ ID NO: 270277 - DNA, 19 bp, Homo sapiens
  siRNA target sequence for SEC24D (NM_014822.1,2447-2465).
gctttacacgacaatcagt

SEQ ID NO: 270278 - DNA, 19 bp, Homo sapiens
  siRNA target sequence for SEC24D (NM_014822.1,2456-2474).
gacaatcagtggtcaaaga

SEQ ID NO: 270279 - DNA, 19 bp, Homo sapiens
  siRNA target sequence for SEC24D (NM_014822.1,2473-2491).
gaagacttcggattcacaa

SEQ ID NO: 270280 - DNA, 19 bp, Homo sapiens
  siRNA target sequence for SEC24D (NM_014822.1,2476-2494).
gacttcggattcacaatct

SEQ ID NO: 270281 - DNA, 19 bp, Homo sapiens
  siRNA target sequence for SEC24D (NM_014822.1,2512-2530).
ctcagctagctgatcttta

SEQ ID NO: 270282 - DNA, 19 bp, Homo sapiens
  siRNA target sequence for SEC24D (NM_014822.1,2539-2557).
gtgagacagatgctcttat

SEQ ID NO: 270283 - DNA, 19 bp, Homo sapiens
  siRNA target sequence for SEC24D (NM_014822.1,2541-2559).
gagacagatgctcttatca

SEQ ID NO: 270284 - DNA, 19 bp, Homo sapiens
  siRNA target sequence for SEC24D (NM_014822.1,2609-2627).
ggtcatccgggaaattcta

SEQ ID NO: 270285 - DNA, 19 bp, Homo sapiens
  siRNA target sequence for SEC24D (NM_014822.1,2612-2630).
catccgggaaattctagtt

SEQ ID NO: 270286 - DNA, 19 bp, Homo sapiens
  siRNA target sequence for SEC24D (NM_014822.1,2615-2633).
ccgggaaattctagttaat

SEQ ID NO: 270287 - DNA, 19 bp, Homo sapiens
  siRNA target sequence for SEC24D (NM_014822.1,2617-2635).
gggaaattctagttaatca

SEQ ID NO: 270288 - DNA, 19 bp, Homo sapiens
  siRNA target sequence for SEC24D (NM_014822.1,2651-2669).
ggcatgttaccggaagaat

SEQ ID NO: 270289 - DNA, 19 bp, Homo sapiens
  siRNA target sequence for SEC24D (NM_014822.1,2652-2670).
gcatgttaccggaagaatt

SEQ ID NO: 270290 - DNA, 19 bp, Homo sapiens
  siRNA target sequence for SEC24D (NM_014822.1,2706-2724).
ccagattccatgaaagtat

SEQ ID NO: 270291 - DNA, 19 bp, Homo sapiens
  siRNA target sequence for SEC24D (NM_014822.1,2727-2745).
ccagtgtacatgaattgct

SEQ ID NO: 270292 - DNA, 19 bp, Homo sapiens
  siRNA target sequence for SEC24D (NM_014822.1,2747-2765).
gttgaaaaactgtgtacta

SEQ ID NO: 270293 - DNA, 19 bp, Homo sapiens
  siRNA target sequence for SEC24D (NM_014822.1,2862-2880).
caacttctgcccatacaca

SEQ ID NO: 270294 - DNA, 19 bp, Homo sapiens
  siRNA target sequence for SEC24D (NM_014822.1,2930-2948).
gtcccgtctttcagaagaa

SEQ ID NO: 270295 - DNA, 19 bp, Homo sapiens
  siRNA target sequence for SEC24D (NM_014822.1,2965-2983).
ctaatggtctacacatgtt

SEQ ID NO: 270296 - DNA, 19 bp, Homo sapiens
  siRNA target sequence for SEC24D (NM_014822.1,3001-3019).
gcagcccaccagaactgat

SEQ ID NO: 270297 - DNA, 19 bp, Homo sapiens
  siRNA target sequence for SEC24D (NM_014822.1,3039-3057).
ccatcttttgcacatatca

SEQ ID NO: 270298 - DNA, 19 bp, Homo sapiens
  siRNA target sequence for SEC24D (NM_014822.1,3040-3058).
catcttttgcacatatcaa

SEQ ID NO: 270299 - DNA, 19 bp, Homo sapiens
  siRNA target sequence for SEC24D (NM_014822.1,3051-3069).
catatcaacacagatatga

SEQ ID NO: 270300 - DNA, 19 bp, Homo sapiens
  siRNA target sequence for SEC24D (NM_014822.1,3100-3118).
ctcaacaactcagaatgat

SEQ ID NO: 270301 - DNA, 19 bp, Homo sapiens
  siRNA target sequence for SEC3 (NM_018261.2,149-167).
cagcaatcaagcatgcatt

SEQ ID NO: 270302 - DNA, 19 bp, Homo sapiens
  siRNA target sequence for SEC3 (NM_018261.2,152-170).
caatcaagcatgcattaca

SEQ ID NO: 270303 - DNA, 19 bp, Homo sapiens
  siRNA target sequence for SEC3 (NM_018261.2,281-299).
gccctgtgcaggttaaggt

SEQ ID NO: 270304 - DNA, 19 bp, Homo sapiens
  siRNA target sequence for SEC3 (NM_018261.2,317-335).
ccgataagggagatttcta

SEQ ID NO: 270305 - DNA, 19 bp, Homo sapiens
  siRNA target sequence for SEC3 (NM_018261.2,400-418).
gaaaatcctgaatttgatt

SEQ ID NO: 270306 - DNA, 19 bp, Homo sapiens
  siRNA target sequence for SEC3 (NM_018261.2,504-522).
gcgatatctccggaagaaa

SEQ ID NO: 270307 - DNA, 19 bp, Homo sapiens
  siRNA target sequence for SEC3 (NM_018261.2,506-524).
gatatctccggaagaaaat

SEQ ID NO: 270308 - DNA, 19 bp, Homo sapiens
  siRNA target sequence for SEC3 (NM_018261.2,563-581).
ctgttccaagtggagaaaa

SEQ ID NO: 270309 - DNA, 19 bp, Homo sapiens
  siRNA target sequence for SEC3 (NM_018261.2,746-764).
gggctaacatccagtcaat

SEQ ID NO: 270310 - DNA, 19 bp, Homo sapiens
  siRNA target sequence for SEC3 (NM_018261.2,748-766).
gctaacatccagtcaatca

SEQ ID NO: 270311 - DNA, 19 bp, Homo sapiens
  siRNA target sequence for SEC3 (NM_018261.2,749-767).
ctaacatccagtcaatcat

SEQ ID NO: 270312 - DNA, 19 bp, Homo sapiens
  siRNA target sequence for SEC3 (NM_018261.2,759-777).
gtcaatcatggcatctgaa

SEQ ID NO: 270313 - DNA, 19 bp, Homo sapiens
  siRNA target sequence for SEC3 (NM_018261.2,823-841).
gaggtagatcagattgaat

SEQ ID NO: 270314 - DNA, 19 bp, Homo sapiens
  siRNA target sequence for SEC3 (NM_018261.2,826-844).
gtagatcagattgaattga

SEQ ID NO: 270315 - DNA, 19 bp, Homo sapiens
  siRNA target sequence for SEC3 (NM_018261.2,832-850).
cagattgaattgaaactga

SEQ ID NO: 270316 - DNA, 19 bp, Homo sapiens
  siRNA target sequence for SEC3 (NM_018261.2,875-893).
gtgtaaaagaacaaatgga

SEQ ID NO: 270317 - DNA, 19 bp, Homo sapiens
  siRNA target sequence for SEC3 (NM_018261.2,916-934).
ctaattcatcttagtaaca

SEQ ID NO: 270318 - DNA, 19 bp, Homo sapiens
  siRNA target sequence for SEC3 (NM_018261.2,922-940).
catcttagtaacactaata

SEQ ID NO: 270319 - DNA, 19 bp, Homo sapiens
  siRNA target sequence for SEC3 (NM_018261.2,1074-1092).
ccttctgcagtgcatgaat

SEQ ID NO: 270320 - DNA, 19 bp, Homo sapiens
  siRNA target sequence for SEC3 (NM_018261.2,1116-1134).
cttgcttctggcagtcaaa

SEQ ID NO: 270321 - DNA, 19 bp, Homo sapiens
  siRNA target sequence for SEC3 (NM_018261.2,1141-1159).
cagcagcgattcagtgatt

SEQ ID NO: 270322 - DNA, 19 bp, Homo sapiens
  siRNA target sequence for SEC3 (NM_018261.2,1263-1281).
gactttacccaatcatcat

SEQ ID NO: 270323 - DNA, 19 bp, Homo sapiens
  siRNA target sequence for SEC3 (NM_018261.2,1317-1335).
gatggagtggctaaagagt

SEQ ID NO: 270324 - DNA, 19 bp, Homo sapiens
  siRNA target sequence for SEC3 (NM_018261.2,1323-1341).
gtggctaaagagtacagat

SEQ ID NO: 270325 - DNA, 19 bp, Homo sapiens
  siRNA target sequence for SEC3 (NM_018261.2,1354-1372).
gaaggactaacaaagaatt

SEQ ID NO: 270326 - DNA, 19 bp, Homo sapiens
  siRNA target sequence for SEC3 (NM_018261.2,1388-1406).
cccgactatatgaaagaga

SEQ ID NO: 270327 - DNA, 19 bp, Homo sapiens
  siRNA target sequence for SEC3 (NM_018261.2,1389-1407).
ccgactatatgaaagagaa

SEQ ID NO: 270328 - DNA, 19 bp, Homo sapiens
  siRNA target sequence for SEC3 (NM_018261.2,1390-1408).
cgactatatgaaagagaaa

SEQ ID NO: 270329 - DNA, 19 bp, Homo sapiens
  siRNA target sequence for SEC3 (NM_018261.2,1475-1493).
ctacactgcctcgaaaaga

SEQ ID NO: 270330 - DNA, 19 bp, Homo sapiens
  siRNA target sequence for SEC3 (NM_018261.2,1539-1557).
gaaattaactggatctact

SEQ ID NO: 270331 - DNA, 19 bp, Homo sapiens
  siRNA target sequence for SEC3 (NM_018261.2,1556-1574).
cttctagtctaaataagct

SEQ ID NO: 270332 - DNA, 19 bp, Homo sapiens
  siRNA target sequence for SEC3 (NM_018261.2,1657-1675).
gttgctgacaggaccaaat

SEQ ID NO: 270333 - DNA, 19 bp, Homo sapiens
  siRNA target sequence for SEC3 (NM_018261.2,1726-1744).
gcagaacaggacttcataa

SEQ ID NO: 270334 - DNA, 19 bp, Homo sapiens
  siRNA target sequence for SEC3 (NM_018261.2,1729-1747).
gaacaggacttcataagta

SEQ ID NO: 270335 - DNA, 19 bp, Homo sapiens
  siRNA target sequence for SEC3 (NM_018261.2,1759-1777).
ctacagcaacatcaaagta

SEQ ID NO: 270336 - DNA, 19 bp, Homo sapiens
  siRNA target sequence for SEC3 (NM_018261.2,1820-1838).
cattatcacggcaacataa

SEQ ID NO: 270337 - DNA, 19 bp, Homo sapiens
  siRNA target sequence for SEC3 (NM_018261.2,1878-1896).
gatccgccaaatgatgatt

SEQ ID NO: 270338 - DNA, 19 bp, Homo sapiens
  siRNA target sequence for SEC3 (NM_018261.2,1881-1899).
ccgccaaatgatgattaaa

SEQ ID NO: 270339 - DNA, 19 bp, Homo sapiens
  siRNA target sequence for SEC3 (NM_018261.2,1882-1900).
cgccaaatgatgattaaaa

SEQ ID NO: 270340 - DNA, 19 bp, Homo sapiens
  siRNA target sequence for SEC3 (NM_018261.2,1923-1941).
gctgaacaacctaattgca

SEQ ID NO: 270341 - DNA, 19 bp, Homo sapiens
  siRNA target sequence for SEC3 (NM_018261.2,1924-1942).
ctgaacaacctaattgcat

SEQ ID NO: 270342 - DNA, 19 bp, Homo sapiens
  siRNA target sequence for SEC3 (NM_018261.2,1926-1944).
gaacaacctaattgcatta

SEQ ID NO: 270343 - DNA, 19 bp, Homo sapiens
  siRNA target sequence for SEC3 (NM_018261.2,2071-2089).
gtcaaaaggaactttgaca

SEQ ID NO: 270344 - DNA, 19 bp, Homo sapiens
  siRNA target sequence for SEC3 (NM_018261.2,2189-2207).
ctggacttgcagaatcaat

SEQ ID NO: 270345 - DNA, 19 bp, Homo sapiens
  siRNA target sequence for SEC3 (NM_018261.2,2192-2210).
gacttgcagaatcaatctt

SEQ ID NO: 270346 - DNA, 19 bp, Homo sapiens
  siRNA target sequence for SEC3 (NM_018261.2,2194-2212).
cttgcagaatcaatcttca

SEQ ID NO: 270347 - DNA, 19 bp, Homo sapiens
  siRNA target sequence for SEC3 (NM_018261.2,2225-2243).
gtcgtggagacctggataa

SEQ ID NO: 270348 - DNA, 19 bp, Homo sapiens
  siRNA target sequence for SEC3 (NM_018261.2,2231-2249).
gagacctggataaagcata

SEQ ID NO: 270349 - DNA, 19 bp, Homo sapiens
  siRNA target sequence for SEC3 (NM_018261.2,2245-2263).
gcatacaccaaacttatca

SEQ ID NO: 270350 - DNA, 19 bp, Homo sapiens
  siRNA target sequence for SEC3 (NM_018261.2,2323-2341).
gtggttatgatggaaaact

SEQ ID NO: 270351 - DNA, 19 bp, Homo sapiens
  siRNA target sequence for SEC3 (NM_018261.2,2334-2352).
ggaaaactttcaccatatt

SEQ ID NO: 270352 - DNA, 19 bp, Homo sapiens
  siRNA target sequence for SEC3 (NM_018261.2,2335-2353).
gaaaactttcaccatattt

SEQ ID NO: 270353 - DNA, 19 bp, Homo sapiens
  siRNA target sequence for SEC3 (NM_018261.2,2357-2375).
caactctttctcgattgaa

SEQ ID NO: 270354 - DNA, 19 bp, Homo sapiens
  siRNA target sequence for SEC3 (NM_018261.2,2459-2477).
gacaacctcttgaaaaact

SEQ ID NO: 270355 - DNA, 19 bp, Homo sapiens
  siRNA target sequence for SEC3 (NM_018261.2,2529-2547).
ggaggaagtaagttaccaa

SEQ ID NO: 270356 - DNA, 19 bp, Homo sapiens
  siRNA target sequence for SEC3 (NM_018261.2,2563-2581).
caagaacttcgtaaagtca

SEQ ID NO: 270357 - DNA, 19 bp, Homo sapiens
  siRNA target sequence for SEC3 (NM_018261.2,2566-2584).
gaacttcgtaaagtcatta

SEQ ID NO: 270358 - DNA, 19 bp, Homo sapiens
  siRNA target sequence for SEC3 (NM_018261.2,2617-2635).
ctagataacctctacaaga

SEQ ID NO: 270359 - DNA, 19 bp, Homo sapiens
  siRNA target sequence for SEC3 (NM_018261.2,2628-2646).
ctacaagaaagttgataaa

SEQ ID NO: 270360 - DNA, 19 bp, Homo sapiens
  siRNA target sequence for SEC3 (NM_018261.2,2634-2652).
gaaagttgataaacattta

SEQ ID NO: 270361 - DNA, 19 bp, Homo sapiens
  siRNA target sequence for SEC3 (NM_018261.2,2684-2702).
ggcactccatgcaagatga

SEQ ID NO: 270362 - DNA, 19 bp, Homo sapiens
  siRNA target sequence for SEC3 (NM_018261.2,2685-2703).
gcactccatgcaagatgaa

SEQ ID NO: 270363 - DNA, 19 bp, Homo sapiens
  siRNA target sequence for SEC3 (NM_018261.2,2701-2719).
gaatttatacgccagtata

SEQ ID NO: 270364 - DNA, 19 bp, Homo sapiens
  siRNA target sequence for SEC3 (NM_018261.2,2711-2729).
gccagtataagcactttga

SEQ ID NO: 270365 - DNA, 19 bp, Homo sapiens
  siRNA target sequence for SEC3 (NM_018261.2,2721-2739).
gcactttgaaggtttgata

SEQ ID NO: 270366 - DNA, 19 bp, Homo sapiens
  siRNA target sequence for SEC3 (NM_018261.2,2752-2770).
cctggatctggtgttacaa

SEQ ID NO: 270367 - DNA, 19 bp, Homo sapiens
  siRNA target sequence for SEC3 (NM_018261.2,2761-2779).
ggtgttacaatggaattca

SEQ ID NO: 270368 - DNA, 19 bp, Homo sapiens
  siRNA target sequence for SEC3 (NM_018261.2,2764-2782).
gttacaatggaattcacta

SEQ ID NO: 270369 - DNA, 19 bp, Homo sapiens
  siRNA target sequence for SEC3 (NM_018261.2,2768-2786).
caatggaattcactattca

SEQ ID NO: 270370 - DNA, 19 bp, Homo sapiens
  siRNA target sequence for SEC5 (NM_018303.4,164-182).
gaccggcatctctccaaat

SEQ ID NO: 270371 - DNA, 19 bp, Homo sapiens
  siRNA target sequence for SEC5 (NM_018303.4,166-184).
ccggcatctctccaaatga

SEQ ID NO: 270372 - DNA, 19 bp, Homo sapiens
  siRNA target sequence for SEC5 (NM_018303.4,167-185).
cggcatctctccaaatgaa

SEQ ID NO: 270373 - DNA, 19 bp, Homo sapiens
  siRNA target sequence for SEC5 (NM_018303.4,193-211).
catggacgaaggtcacaat

SEQ ID NO: 270374 - DNA, 19 bp, Homo sapiens
  siRNA target sequence for SEC5 (NM_018303.4,208-226).
caatcaggggagaaaatct

SEQ ID NO: 270375 - DNA, 19 bp, Homo sapiens
  siRNA target sequence for SEC5 (NM_018303.4,295-313).
ggatgtctgcaagtaaaat

SEQ ID NO: 270376 - DNA, 19 bp, Homo sapiens
  siRNA target sequence for SEC5 (NM_018303.4,296-314).
gatgtctgcaagtaaaata

SEQ ID NO: 270377 - DNA, 19 bp, Homo sapiens
  siRNA target sequence for SEC5 (NM_018303.4,408-426).
ctactcaaacctgagaaaa

SEQ ID NO: 270378 - DNA, 19 bp, Homo sapiens
  siRNA target sequence for SEC5 (NM_018303.4,448-466).
ctgtgtgggttgatgaaat

SEQ ID NO: 270379 - DNA, 19 bp, Homo sapiens
  siRNA target sequence for SEC5 (NM_018303.4,452-470).
gtgggttgatgaaatgaat

SEQ ID NO: 270380 - DNA, 19 bp, Homo sapiens
  siRNA target sequence for SEC5 (NM_018303.4,454-472).
gggttgatgaaatgaatta

SEQ ID NO: 270381 - DNA, 19 bp, Homo sapiens
  siRNA target sequence for SEC5 (NM_018303.4,455-473).
ggttgatgaaatgaattat

SEQ ID NO: 270382 - DNA, 19 bp, Homo sapiens
  siRNA target sequence for SEC5 (NM_018303.4,533-551).
cccgcttggcattgagatt

SEQ ID NO: 270383 - DNA, 19 bp, Homo sapiens
  siRNA target sequence for SEC5 (NM_018303.4,535-553).
cgcttggcattgagattga

SEQ ID NO: 270384 - DNA, 19 bp, Homo sapiens
  siRNA target sequence for SEC5 (NM_018303.4,572-590).
gaaggacttagaaatgcta

SEQ ID NO: 270385 - DNA, 19 bp, Homo sapiens
  siRNA target sequence for SEC5 (NM_018303.4,634-652).
cagcctggtatcttataga

SEQ ID NO: 270386 - DNA, 19 bp, Homo sapiens
  siRNA target sequence for SEC5 (NM_018303.4,638-656).
ctggtatcttatagagaat

SEQ ID NO: 270387 - DNA, 19 bp, Homo sapiens
  siRNA target sequence for SEC5 (NM_018303.4,640-658).
ggtatcttatagagaatca

SEQ ID NO: 270388 - DNA, 19 bp, Homo sapiens
  siRNA target sequence for SEC5 (NM_018303.4,690-708).
gcagtcaccaacctaaaga

SEQ ID NO: 270389 - DNA, 19 bp, Homo sapiens
  siRNA target sequence for SEC5 (NM_018303.4,754-772).
gcggtctcagtacattctt

SEQ ID NO: 270390 - DNA, 19 bp, Homo sapiens
  siRNA target sequence for SEC5 (NM_018303.4,793-811).
cagccatccatcaaaaact

SEQ ID NO: 270391 - DNA, 19 bp, Homo sapiens
  siRNA target sequence for SEC5 (NM_018303.4,870-888).
ctgaacagagcaagtaata

SEQ ID NO: 270392 - DNA, 19 bp, Homo sapiens
  siRNA target sequence for SEC5 (NM_018303.4,883-901).
gtaatactgcagacacatt

SEQ ID NO: 270393 - DNA, 19 bp, Homo sapiens
  siRNA target sequence for SEC5 (NM_018303.4,912-930).
gtattaggtcggaaagaca

SEQ ID NO: 270394 - DNA, 19 bp, Homo sapiens
  siRNA target sequence for SEC5 (NM_018303.4,960-978).
gtgcttcagcgatttaagt

SEQ ID NO: 270395 - DNA, 19 bp, Homo sapiens
  siRNA target sequence for SEC5 (NM_018303.4,962-980).
gcttcagcgatttaagttt

SEQ ID NO: 270396 - DNA, 19 bp, Homo sapiens
  siRNA target sequence for SEC5 (NM_018303.4,1083-1101).
gaggtgcaagttttcaaga

SEQ ID NO: 270397 - DNA, 19 bp, Homo sapiens
  siRNA target sequence for SEC5 (NM_018303.4,1086-1104).
gtgcaagttttcaagaaat

SEQ ID NO: 270398 - DNA, 19 bp, Homo sapiens
  siRNA target sequence for SEC5 (NM_018303.4,1171-1189).
caccatcaactttacatga

SEQ ID NO: 270399 - DNA, 19 bp, Homo sapiens
  siRNA target sequence for SEC5 (NM_018303.4,1188-1206).
gaccaaaaacgttacataa

SEQ ID NO: 270400 - DNA, 19 bp, Homo sapiens
  siRNA target sequence for SEC5 (NM_018303.4,1306-1324).
gctacgtgaaagatctgaa

SEQ ID NO: 270401 - DNA, 19 bp, Homo sapiens
  siRNA target sequence for SEC5 (NM_018303.4,1345-1363).
gtcccatgttggatcttga

SEQ ID NO: 270402 - DNA, 19 bp, Homo sapiens
  siRNA target sequence for SEC5 (NM_018303.4,1348-1366).
ccatgttggatcttgataa

SEQ ID NO: 270403 - DNA, 19 bp, Homo sapiens
  siRNA target sequence for SEC5 (NM_018303.4,1349-1367).
catgttggatcttgataat

SEQ ID NO: 270404 - DNA, 19 bp, Homo sapiens
  siRNA target sequence for SEC5 (NM_018303.4,1355-1373).
ggatcttgataatgataca

SEQ ID NO: 270405 - DNA, 19 bp, Homo sapiens
  siRNA target sequence for SEC5 (NM_018303.4,1448-1466).
cgacacgtggagatacaaa

SEQ ID NO: 270406 - DNA, 19 bp, Homo sapiens
  siRNA target sequence for SEC5 (NM_018303.4,1449-1467).
gacacgtggagatacaaaa

SEQ ID NO: 270407 - DNA, 19 bp, Homo sapiens
  siRNA target sequence for SEC5 (NM_018303.4,1451-1469).
cacgtggagatacaaaact

SEQ ID NO: 270408 - DNA, 19 bp, Homo sapiens
  siRNA target sequence for SEC5 (NM_018303.4,1472-1490).
ccacagggtggcctttgtt

SEQ ID NO: 270409 - DNA, 19 bp, Homo sapiens
  siRNA target sequence for SEC5 (NM_018303.4,1475-1493).
cagggtggcctttgttgaa

SEQ ID NO: 270410 - DNA, 19 bp, Homo sapiens
  siRNA target sequence for SEC5 (NM_018303.4,1593-1611).
ggccagattgaaagatcaa

SEQ ID NO: 270411 - DNA, 19 bp, Homo sapiens
  siRNA target sequence for SEC5 (NM_018303.4,1594-1612).
gccagattgaaagatcaaa

SEQ ID NO: 270412 - DNA, 19 bp, Homo sapiens
  siRNA target sequence for SEC5 (NM_018303.4,1596-1614).
cagattgaaagatcaaaga

SEQ ID NO: 270413 - DNA, 19 bp, Homo sapiens
  siRNA target sequence for SEC5 (NM_018303.4,1782-1800).
cacgccatccagactgtaa

SEQ ID NO: 270414 - DNA, 19 bp, Homo sapiens
  siRNA target sequence for SEC5 (NM_018303.4,1784-1802).
cgccatccagactgtaaga

SEQ ID NO: 270415 - DNA, 19 bp, Homo sapiens
  siRNA target sequence for SEC5 (NM_018303.4,1786-1804).
ccatccagactgtaagact

SEQ ID NO: 270416 - DNA, 19 bp, Homo sapiens
  siRNA target sequence for SEC5 (NM_018303.4,1787-1805).
catccagactgtaagactt

SEQ ID NO: 270417 - DNA, 19 bp, Homo sapiens
  siRNA target sequence for SEC5 (NM_018303.4,1793-1811).
gactgtaagacttactcat

SEQ ID NO: 270418 - DNA, 19 bp, Homo sapiens
  siRNA target sequence for SEC5 (NM_018303.4,1797-1815).
gtaagacttactcatgaat

SEQ ID NO: 270419 - DNA, 19 bp, Homo sapiens
  siRNA target sequence for SEC5 (NM_018303.4,1801-1819).
gacttactcatgaatcgtt

SEQ ID NO: 270420 - DNA, 19 bp, Homo sapiens
  siRNA target sequence for SEC5 (NM_018303.4,1820-1838).
gactgcccttgaaattcct

SEQ ID NO: 270421 - DNA, 19 bp, Homo sapiens
  siRNA target sequence for SEC5 (NM_018303.4,1952-1970).
ctggattgttgacaatgaa

SEQ ID NO: 270422 - DNA, 19 bp, Homo sapiens
  siRNA target sequence for SEC5 (NM_018303.4,1981-1999).
ctctaccatgtcagtttga

SEQ ID NO: 270423 - DNA, 19 bp, Homo sapiens
  siRNA target sequence for SEC5 (NM_018303.4,2067-2085).
gtcttccaacaacctaaaa

SEQ ID NO: 270424 - DNA, 19 bp, Homo sapiens
  siRNA target sequence for SEC5 (NM_018303.4,2069-2087).
cttccaacaacctaaaaca

SEQ ID NO: 270425 - DNA, 19 bp, Homo sapiens
  siRNA target sequence for SEC5 (NM_018303.4,2101-2119).
gccagctaagcatcaatat

SEQ ID NO: 270426 - DNA, 19 bp, Homo sapiens
  siRNA target sequence for SEC5 (NM_018303.4,2102-2120).
ccagctaagcatcaatata

SEQ ID NO: 270427 - DNA, 19 bp, Homo sapiens
  siRNA target sequence for SEC5 (NM_018303.4,2103-2121).
cagctaagcatcaatataa

SEQ ID NO: 270428 - DNA, 19 bp, Homo sapiens
  siRNA target sequence for SEC5 (NM_018303.4,2163-2181).
cctgatgcagatatagata

SEQ ID NO: 270429 - DNA, 19 bp, Homo sapiens
  siRNA target sequence for SEC5 (NM_018303.4,2185-2203).
cacatctctctgttgatgt

SEQ ID NO: 270430 - DNA, 19 bp, Homo sapiens
  siRNA target sequence for SEC5 (NM_018303.4,2216-2234).
cttgtttggaagtatccat

SEQ ID NO: 270431 - DNA, 19 bp, Homo sapiens
  siRNA target sequence for SEC5 (NM_018303.4,2224-2242).
gaagtatccatgaagactt

SEQ ID NO: 270432 - DNA, 19 bp, Homo sapiens
  siRNA target sequence for SEC5 (NM_018303.4,2281-2299).
gtaattgctgctatctaga

SEQ ID NO: 270433 - DNA, 19 bp, Homo sapiens
  siRNA target sequence for SEC5 (NM_018303.4,2381-2399).
ggcctcattgaaagaacta

SEQ ID NO: 270434 - DNA, 19 bp, Homo sapiens
  siRNA target sequence for SEC5 (NM_018303.4,2514-2532).
ggtgtcagaaactatttaa

SEQ ID NO: 270435 - DNA, 19 bp, Homo sapiens
  siRNA target sequence for SEC5 (NM_018303.4,2570-2588).
ggtgttcaccatttccaaa

SEQ ID NO: 270436 - DNA, 19 bp, Homo sapiens
  siRNA target sequence for SEC5 (NM_018303.4,2592-2610).
ctggtccctcgggtactat

SEQ ID NO: 270437 - DNA, 19 bp, Homo sapiens
  siRNA target sequence for SEC5 (NM_018303.4,2752-2770).
gcaagtcaagttttaagca

SEQ ID NO: 270438 - DNA, 19 bp, Homo sapiens
  siRNA target sequence for SEC6 (NM_007277.3,212-230).
ccgtggaggccagattgaa

SEQ ID NO: 270439 - DNA, 19 bp, Homo sapiens
  siRNA target sequence for SEC6 (NM_007277.3,290-308).
ccctgaatgacgtcaaaga

SEQ ID NO: 270440 - DNA, 19 bp, Homo sapiens
  siRNA target sequence for SEC6 (NM_007277.3,292-310).
ctgaatgacgtcaaagaca

SEQ ID NO: 270441 - DNA, 19 bp, Homo sapiens
  siRNA target sequence for SEC6 (NM_007277.3,371-389).
gcctcaaggacgtcaaaga

SEQ ID NO: 270442 - DNA, 19 bp, Homo sapiens
  siRNA target sequence for SEC6 (NM_007277.3,471-489).
gacccaggacctaattgaa

SEQ ID NO: 270443 - DNA, 19 bp, Homo sapiens
  siRNA target sequence for SEC6 (NM_007277.3,473-491).
cccaggacctaattgaaca

SEQ ID NO: 270444 - DNA, 19 bp, Homo sapiens
  siRNA target sequence for SEC6 (NM_007277.3,474-492).
ccaggacctaattgaacaa

SEQ ID NO: 270445 - DNA, 19 bp, Homo sapiens
  siRNA target sequence for SEC6 (NM_007277.3,719-737).
cagttgtcaggatcattga

SEQ ID NO: 270446 - DNA, 19 bp, Homo sapiens
  siRNA target sequence for SEC6 (NM_007277.3,761-779).
gcatacttgaccggaaaaa

SEQ ID NO: 270447 - DNA, 19 bp, Homo sapiens
  siRNA target sequence for SEC6 (NM_007277.3,849-867).
gactgtgaccaccagaatt

SEQ ID NO: 270448 - DNA, 19 bp, Homo sapiens
  siRNA target sequence for SEC6 (NM_007277.3,851-869).
ctgtgaccaccagaattga

SEQ ID NO: 270449 - DNA, 19 bp, Homo sapiens
  siRNA target sequence for SEC6 (NM_007277.3,915-933).
ccgccacctggaaattata

SEQ ID NO: 270450 - DNA, 19 bp, Homo sapiens
  siRNA target sequence for SEC6 (NM_007277.3,919-937).
cacctggaaattataagga

SEQ ID NO: 270451 - DNA, 19 bp, Homo sapiens
  siRNA target sequence for SEC6 (NM_007277.3,1102-1120).
ctcttgacgtgggtcttaa

SEQ ID NO: 270452 - DNA, 19 bp, Homo sapiens
  siRNA target sequence for SEC6 (NM_007277.3,1114-1132).
gtcttaaacacctacacaa

SEQ ID NO: 270453 - DNA, 19 bp, Homo sapiens
  siRNA target sequence for SEC6 (NM_007277.3,1222-1240).
ctgcttgacacgtacatgt

SEQ ID NO: 270454 - DNA, 19 bp, Homo sapiens
  siRNA target sequence for SEC6 (NM_007277.3,1241-1259).
ccacgctcacttcaaacat

SEQ ID NO: 270455 - DNA, 19 bp, Homo sapiens
  siRNA target sequence for SEC6 (NM_007277.3,1244-1262).
cgctcacttcaaacatcat

SEQ ID NO: 270456 - DNA, 19 bp, Homo sapiens
  siRNA target sequence for SEC6 (NM_007277.3,1380-1398).
gtttgaacagaatcttcaa

SEQ ID NO: 270457 - DNA, 19 bp, Homo sapiens
  siRNA target sequence for SEC6 (NM_007277.3,1405-1423).
gctcagataagtgaagatt

SEQ ID NO: 270458 - DNA, 19 bp, Homo sapiens
  siRNA target sequence for SEC6 (NM_007277.3,1434-1452).
ggtactagttttatgtctt

SEQ ID NO: 270459 - DNA, 19 bp, Homo sapiens
  siRNA target sequence for SEC6 (NM_007277.3,1486-1504).
gatgaagcgcagctgtata

SEQ ID NO: 270460 - DNA, 19 bp, Homo sapiens
  siRNA target sequence for SEC6 (NM_007277.3,1535-1553).
ctcactgctacgttcagta

SEQ ID NO: 270461 - DNA, 19 bp, Homo sapiens
  siRNA target sequence for SEC6 (NM_007277.3,1541-1559).
gctacgttcagtacatgat

SEQ ID NO: 270462 - DNA, 19 bp, Homo sapiens
  siRNA target sequence for SEC6 (NM_007277.3,1591-1609).
gaatccatagtcagtttaa

SEQ ID NO: 270463 - DNA, 19 bp, Homo sapiens
  siRNA target sequence for SEC6 (NM_007277.3,1761-1779).
gacgaagaagtggctatta

SEQ ID NO: 270464 - DNA, 19 bp, Homo sapiens
  siRNA target sequence for SEC6 (NM_007277.3,1781-1799).
ggtcaaacgctgtagacat

SEQ ID NO: 270465 - DNA, 19 bp, Homo sapiens
  siRNA target sequence for SEC6 (NM_007277.3,1782-1800).
gtcaaacgctgtagacatt

SEQ ID NO: 270466 - DNA, 19 bp, Homo sapiens
  siRNA target sequence for SEC6 (NM_007277.3,1788-1806).
cgctgtagacattatctgt

SEQ ID NO: 270467 - DNA, 19 bp, Homo sapiens
  siRNA target sequence for SEC6 (NM_007277.3,1807-1825).
gtcaccgtggaagactatt

SEQ ID NO: 270468 - DNA, 19 bp, Homo sapiens
  siRNA target sequence for SEC6 (NM_007277.3,1811-1829).
ccgtggaagactatttcaa

SEQ ID NO: 270469 - DNA, 19 bp, Homo sapiens
  siRNA target sequence for SEC6 (NM_007277.3,1827-1845).
caacgattttgccaaaatt

SEQ ID NO: 270470 - DNA, 19 bp, Homo sapiens
  siRNA target sequence for SEC6 (NM_007277.3,1830-1848).
cgattttgccaaaattaaa

SEQ ID NO: 270471 - DNA, 19 bp, Homo sapiens
  siRNA target sequence for SEC6 (NM_007277.3,1963-1981).
ggtgccgagaagatggtta

SEQ ID NO: 270472 - DNA, 19 bp, Homo sapiens
  siRNA target sequence for SEC63 (NM_007214.2,249-267).
gaatgccgagcaaattcga

SEQ ID NO: 270473 - DNA, 19 bp, Homo sapiens
  siRNA target sequence for SEC63 (NM_007214.2,253-271).
gccgagcaaattcgattaa

SEQ ID NO: 270474 - DNA, 19 bp, Homo sapiens
  siRNA target sequence for SEC63 (NM_007214.2,254-272).
ccgagcaaattcgattaaa

SEQ ID NO: 270475 - DNA, 19 bp, Homo sapiens
  siRNA target sequence for SEC63 (NM_007214.2,265-283).
cgattaaagaatatcagaa

SEQ ID NO: 270476 - DNA, 19 bp, Homo sapiens
  siRNA target sequence for SEC63 (NM_007214.2,286-304).
gtatatggaaggtgtatgt

SEQ ID NO: 270477 - DNA, 19 bp, Homo sapiens
  siRNA target sequence for SEC63 (NM_007214.2,297-315).
gtgtatgtggtatcgttta

SEQ ID NO: 270478 - DNA, 19 bp, Homo sapiens
  siRNA target sequence for SEC63 (NM_007214.2,305-323).
ggtatcgtttacggttatt

SEQ ID NO: 270479 - DNA, 19 bp, Homo sapiens
  siRNA target sequence for SEC63 (NM_007214.2,306-324).
gtatcgtttacggttatta

SEQ ID NO: 270480 - DNA, 19 bp, Homo sapiens
  siRNA target sequence for SEC63 (NM_007214.2,374-392).
caggatgggcattgttctt

SEQ ID NO: 270481 - DNA, 19 bp, Homo sapiens
  siRNA target sequence for SEC63 (NM_007214.2,413-431).
ccaaaacagaccgagaata

SEQ ID NO: 270482 - DNA, 19 bp, Homo sapiens
  siRNA target sequence for SEC63 (NM_007214.2,421-439).
gaccgagaataccaagaat

SEQ ID NO: 270483 - DNA, 19 bp, Homo sapiens
  siRNA target sequence for SEC63 (NM_007214.2,445-463).
ccttatgaagtattaaatt

SEQ ID NO: 270484 - DNA, 19 bp, Homo sapiens
  siRNA target sequence for SEC63 (NM_007214.2,473-491).
gagccacagtagcagaaat

SEQ ID NO: 270485 - DNA, 19 bp, Homo sapiens
  siRNA target sequence for SEC63 (NM_007214.2,505-523).
cgtttgctgtcacttaaat

SEQ ID NO: 270486 - DNA, 19 bp, Homo sapiens
  siRNA target sequence for SEC63 (NM_007214.2,555-573).
gttcatgaggatagcaaaa

SEQ ID NO: 270487 - DNA, 19 bp, Homo sapiens
  siRNA target sequence for SEC63 (NM_007214.2,561-579).
gaggatagcaaaagcttat

SEQ ID NO: 270488 - DNA, 19 bp, Homo sapiens
  siRNA target sequence for SEC63 (NM_007214.2,581-599).
ctgctttaacggatgaaga

SEQ ID NO: 270489 - DNA, 19 bp, Homo sapiens
  siRNA target sequence for SEC63 (NM_007214.2,639-657).
gcctcaagccacaagcttt

SEQ ID NO: 270490 - DNA, 19 bp, Homo sapiens
  siRNA target sequence for SEC63 (NM_007214.2,666-684).
cctgccagcttggatagtt

SEQ ID NO: 270491 - DNA, 19 bp, Homo sapiens
  siRNA target sequence for SEC63 (NM_007214.2,845-863).
cccgaaatatggatatgaa

SEQ ID NO: 270492 - DNA, 19 bp, Homo sapiens
  siRNA target sequence for SEC63 (NM_007214.2,856-874).
gatatgaaacgtcttatca

SEQ ID NO: 270493 - DNA, 19 bp, Homo sapiens
  siRNA target sequence for SEC63 (NM_007214.2,895-913).
gaatttgatcctcagtata

SEQ ID NO: 270494 - DNA, 19 bp, Homo sapiens
  siRNA target sequence for SEC63 (NM_007214.2,929-947).
gcagaccaacggataatat

SEQ ID NO: 270495 - DNA, 19 bp, Homo sapiens
  siRNA target sequence for SEC63 (NM_007214.2,930-948).
cagaccaacggataatatt

SEQ ID NO: 270496 - DNA, 19 bp, Homo sapiens
  siRNA target sequence for SEC63 (NM_007214.2,932-950).
gaccaacggataatattct

SEQ ID NO: 270497 - DNA, 19 bp, Homo sapiens
  siRNA target sequence for SEC63 (NM_007214.2,934-952).
ccaacggataatattctaa

SEQ ID NO: 270498 - DNA, 19 bp, Homo sapiens
  siRNA target sequence for SEC63 (NM_007214.2,935-953).
caacggataatattctaat

SEQ ID NO: 270499 - DNA, 19 bp, Homo sapiens
  siRNA target sequence for SEC63 (NM_007214.2,949-967).
ctaataccacagctaatca

SEQ ID NO: 270500 - DNA, 19 bp, Homo sapiens
  siRNA target sequence for SEC63 (NM_007214.2,955-973).
ccacagctaatcagagaaa

SEQ ID NO: 270501 - DNA, 19 bp, Homo sapiens
  siRNA target sequence for SEC63 (NM_007214.2,1006-1024).
ccacttacctgcccatata

SEQ ID NO: 270502 - DNA, 19 bp, Homo sapiens
  siRNA target sequence for SEC63 (NM_007214.2,1033-1051).
gccagagttcttttactgt

SEQ ID NO: 270503 - DNA, 19 bp, Homo sapiens
  siRNA target sequence for SEC63 (NM_007214.2,1093-1111).
gatcagcaattcatgctaa

SEQ ID NO: 270504 - DNA, 19 bp, Homo sapiens
  siRNA target sequence for SEC63 (NM_007214.2,1135-1153).
gaaatggttaatgtaatct

SEQ ID NO: 270505 - DNA, 19 bp, Homo sapiens
  siRNA target sequence for SEC63 (NM_007214.2,1255-1273).
cagggacttcagcaattta

SEQ ID NO: 270506 - DNA, 19 bp, Homo sapiens
  siRNA target sequence for SEC63 (NM_007214.2,1360-1378).
caggatttggtgagtttaa

SEQ ID NO: 270507 - DNA, 19 bp, Homo sapiens
  siRNA target sequence for SEC63 (NM_007214.2,2042-2060).
ctgtgtatagcctttactt

SEQ ID NO: 270508 - DNA, 19 bp, Homo sapiens
  siRNA target sequence for SEC63 (NM_007214.2,2142-2160).
gtgtacgctgaaagataca

SEQ ID NO: 270509 - DNA, 19 bp, Homo sapiens
  siRNA target sequence for SEC63 (NM_007214.2,2192-2210).
gcaagcctggaaattatca

SEQ ID NO: 270510 - DNA, 19 bp, Homo sapiens
  siRNA target sequence for SEC63 (NM_007214.2,2235-2253).
ctcctatatgggtttggat

SEQ ID NO: 270511 - DNA, 19 bp, Homo sapiens
  siRNA target sequence for SNAG1 (NM_052870.1,1366-1384).
caggtgaccggcttcaaaa

SEQ ID NO: 270512 - DNA, 19 bp, Homo sapiens
  siRNA target sequence for SNAG1 (NM_052870.1,1602-1620).
catcatccacgttcagaaa

SEQ ID NO: 270513 - DNA, 19 bp, Homo sapiens
  siRNA target sequence for SNAG1 (NM_052870.1,1642-1660).
caggtgatatggagtgtat

SEQ ID NO: 270514 - DNA, 19 bp, Homo sapiens
  siRNA target sequence for SNAG1 (NM_052870.1,1806-1824).
cctcgagtatcttgcatta

SEQ ID NO: 270515 - DNA, 19 bp, Homo sapiens
  siRNA target sequence for SNAG1 (NM_052870.1,1816-1834).
cttgcattagggaatgagt

SEQ ID NO: 270516 - DNA, 19 bp, Homo sapiens
  siRNA target sequence for SNAG1 (NM_052870.1,1825-1843).
gggaatgagtactctttct

SEQ ID NO: 270517 - DNA, 19 bp, Homo sapiens
  siRNA target sequence for SNAG1 (NM_052870.1,1842-1860).
ctcgaaggttcaaagagta

SEQ ID NO: 270518 - DNA, 19 bp, Homo sapiens
  siRNA target sequence for SNAG1 (NM_052870.1,1852-1870).
caaagagtacctttgatga

SEQ ID NO: 270519 - DNA, 19 bp, Homo sapiens
  siRNA target sequence for SNAP23 (NM_003825.2,124-142).
gagagctcaccagattact

SEQ ID NO: 270520 - DNA, 19 bp, Homo sapiens
  siRNA target sequence for SNAP23 (NM_003825.2,126-144).
gagctcaccagattactga

SEQ ID NO: 270521 - DNA, 19 bp, Homo sapiens
  siRNA target sequence for SNAP23 (NM_003825.2,371-389).
gagtctggcaaggcttata

SEQ ID NO: 270522 - DNA, 19 bp, Homo sapiens
  siRNA target sequence for SNAP23 (NM_003825.2,418-436).
ctcaccttgcaatgtagta

SEQ ID NO: 270523 - DNA, 19 bp, Homo sapiens
  siRNA target sequence for SNAP23 (NM_003825.2,423-441).
cttgcaatgtagtatctaa

SEQ ID NO: 270524 - DNA, 19 bp, Homo sapiens
  siRNA target sequence for SNAP23 (NM_003825.2,494-512).
gccagtggtggatacatta

SEQ ID NO: 270525 - DNA, 19 bp, Homo sapiens
  siRNA target sequence for SNAP23 (NM_003825.2,495-513).
ccagtggtggatacattaa

SEQ ID NO: 270526 - DNA, 19 bp, Homo sapiens
  siRNA target sequence for SNAP23 (NM_003825.2,508-526).
cattaaacgcataactaat

SEQ ID NO: 270527 - DNA, 19 bp, Homo sapiens
  siRNA target sequence for SNAP23 (NM_003825.2,570-588).
gcagtatcctgggaaatct

SEQ ID NO: 270528 - DNA, 19 bp, Homo sapiens
  siRNA target sequence for SNAP23 (NM_003825.2,669-687).
ccaacagagatcgtattga

SEQ ID NO: 270529 - DNA, 19 bp, Homo sapiens
  siRNA target sequence for SNAP23 (NM_003825.2,670-688).
caacagagatcgtattgat

SEQ ID NO: 270530 - DNA, 19 bp, Homo sapiens
  siRNA target sequence for SNAP23 (NM_003825.2,673-691).
cagagatcgtattgatatt

SEQ ID NO: 270531 - DNA, 19 bp, Homo sapiens
  siRNA target sequence for SNAP23 (NM_130798.1,346-364).
cccatgtaatagcataact

SEQ ID NO: 270532 - DNA, 19 bp, Homo sapiens
  siRNA target sequence for SNAP23 (NM_130798.1,347-365).
ccatgtaatagcataacta

SEQ ID NO: 270533 - DNA, 19 bp, Homo sapiens
  siRNA target sequence for SNAP23 (NM_130798.1,348-366).
catgtaatagcataactaa

SEQ ID NO: 270534 - DNA, 19 bp, Homo sapiens
  siRNA target sequence for SNAP23 (NM_130798.1,351-369).
gtaatagcataactaatga

SEQ ID NO: 270535 - DNA, 19 bp, Homo sapiens
  siRNA target sequence for SNAP29 (NM_004782.2,112-130).
cagcttaccctaaaagcta

SEQ ID NO: 270536 - DNA, 19 bp, Homo sapiens
  siRNA target sequence for SNAP29 (NM_004782.2,694-712).
gagcctatcaccagaagat

SEQ ID NO: 270537 - DNA, 19 bp, Homo sapiens
  siRNA target sequence for SNX1 (NM_003099.2,134-152).
ccgagggggaggacatttt

SEQ ID NO: 270538 - DNA, 19 bp, Homo sapiens
  siRNA target sequence for SNX1 (NM_003099.2,164-182).
cggtggtcagtaaacatca

SEQ ID NO: 270539 - DNA, 19 bp, Homo sapiens
  siRNA target sequence for SNX1 (NM_003099.2,287-305).
ccacagtggagctatcctt

SEQ ID NO: 270540 - DNA, 19 bp, Homo sapiens
  siRNA target sequence for SNX1 (NM_003099.2,367-385).
caggaagccacaaattctt

SEQ ID NO: 270541 - DNA, 19 bp, Homo sapiens
  siRNA target sequence for SNX1 (NM_003099.2,442-460).
gatttgacagtcggtataa

SEQ ID NO: 270542 - DNA, 19 bp, Homo sapiens
  siRNA target sequence for SNX1 (NM_003099.2,447-465).
gacagtcggtataactgat

SEQ ID NO: 270543 - DNA, 19 bp, Homo sapiens
  siRNA target sequence for SNX1 (NM_003099.2,474-492).
gataggggatggtatgaat

SEQ ID NO: 270544 - DNA, 19 bp, Homo sapiens
  siRNA target sequence for SNX1 (NM_003099.2,479-497).
gggatggtatgaatgcata

SEQ ID NO: 270545 - DNA, 19 bp, Homo sapiens
  siRNA target sequence for SNX1 (NM_003099.2,480-498).
ggatggtatgaatgcatat

SEQ ID NO: 270546 - DNA, 19 bp, Homo sapiens
  siRNA target sequence for SNX1 (NM_003099.2,494-512).
catatgtagcctacaaagt

SEQ ID NO: 270547 - DNA, 19 bp, Homo sapiens
  siRNA target sequence for SNX1 (NM_003099.2,499-517).
gtagcctacaaagttacaa

SEQ ID NO: 270548 - DNA, 19 bp, Homo sapiens
  siRNA target sequence for SNX1 (NM_003099.2,656-674).
gcctcatagggatgacaaa

SEQ ID NO: 270549 - DNA, 19 bp, Homo sapiens
  siRNA target sequence for SNX1 (NM_003099.2,657-675).
cctcatagggatgacaaaa

SEQ ID NO: 270550 - DNA, 19 bp, Homo sapiens
  siRNA target sequence for SNX1 (NM_003099.2,701-719).
cttctgcagaatttcttga

SEQ ID NO: 270551 - DNA, 19 bp, Homo sapiens
  siRNA target sequence for SNX1 (NM_003099.2,832-850).
gtgggtacccagacattga

SEQ ID NO: 270552 - DNA, 19 bp, Homo sapiens
  siRNA target sequence for SNX1 (NM_003099.2,856-874).
gctggtctcctcaagatgt

SEQ ID NO: 270553 - DNA, 19 bp, Homo sapiens
  siRNA target sequence for SNX1 (NM_003099.2,860-878).
gtctcctcaagatgttcaa

SEQ ID NO: 270554 - DNA, 19 bp, Homo sapiens
  siRNA target sequence for SNX1 (NM_003099.2,988-1006).
ctgcatgctgttgtagaaa

SEQ ID NO: 270555 - DNA, 19 bp, Homo sapiens
  siRNA target sequence for SNX1 (NM_003099.2,1003-1021).
gaaactctagtcaaccata

SEQ ID NO: 270556 - DNA, 19 bp, Homo sapiens
  siRNA target sequence for SNX1 (NM_003099.2,1086-1104).
ggacaacacggcattgtca

SEQ ID NO: 270557 - DNA, 19 bp, Homo sapiens
  siRNA target sequence for SNX1 (NM_003099.2,1159-1177).
gaacaggccaacaatgact

SEQ ID NO: 270558 - DNA, 19 bp, Homo sapiens
  siRNA target sequence for SNX1 (NM_003099.2,1243-1261).
gaccagcgcatgaagacat

SEQ ID NO: 270559 - DNA, 19 bp, Homo sapiens
  siRNA target sequence for SNX1 (NM_003099.2,1381-1399).
gagtctcgggtgactcaat

SEQ ID NO: 270560 - DNA, 19 bp, Homo sapiens
  siRNA target sequence for SNX1 (NM_003099.2,1383-1401).
gtctcgggtgactcaatat

SEQ ID NO: 270561 - DNA, 19 bp, Homo sapiens
  siRNA target sequence for SNX1 (NM_003099.2,1385-1403).
ctcgggtgactcaatatga

SEQ ID NO: 270562 - DNA, 19 bp, Homo sapiens
  siRNA target sequence for SNX1 (NM_003099.2,1410-1428).
cttcgagaggatttcaaca

SEQ ID NO: 270563 - DNA, 19 bp, Homo sapiens
  siRNA target sequence for SNX1 (NM_003099.2,1431-1449).
ggtccgaaaagaagtgata

SEQ ID NO: 270564 - DNA, 19 bp, Homo sapiens
  siRNA target sequence for SNX10 (NM_013322.2,218-236).
gtttccggaacaacagaaa

SEQ ID NO: 270565 - DNA, 19 bp, Homo sapiens
  siRNA target sequence for SNX10 (NM_013322.2,257-275).
ggttcgagatcctaggatt

SEQ ID NO: 270566 - DNA, 19 bp, Homo sapiens
  siRNA target sequence for SNX10 (NM_013322.2,261-279).
cgagatcctaggattcaga

SEQ ID NO: 270567 - DNA, 19 bp, Homo sapiens
  siRNA target sequence for SNX10 (NM_013322.2,292-310).
ggcattcttacattgacta

SEQ ID NO: 270568 - DNA, 19 bp, Homo sapiens
  siRNA target sequence for SNX10 (NM_013322.2,293-311).
gcattcttacattgactat

SEQ ID NO: 270569 - DNA, 19 bp, Homo sapiens
  siRNA target sequence for SNX10 (NM_013322.2,298-316).
cttacattgactatgagat

SEQ ID NO: 270570 - DNA, 19 bp, Homo sapiens
  siRNA target sequence for SNX10 (NM_013322.2,319-337).
gtattcatactaatagcat

SEQ ID NO: 270571 - DNA, 19 bp, Homo sapiens
  siRNA target sequence for SNX10 (NM_013322.2,398-416).
gcagagactccaaagtaat

SEQ ID NO: 270572 - DNA, 19 bp, Homo sapiens
  siRNA target sequence for SNX10 (NM_013322.2,615-633).
gtttctgggcagactaagt

SEQ ID NO: 270573 - DNA, 19 bp, Homo sapiens
  siRNA target sequence for SNX11 (NM_013323.2,409-427).
gcctttactgccaagactt

SEQ ID NO: 270574 - DNA, 19 bp, Homo sapiens
  siRNA target sequence for SNX11 (NM_013323.2,508-526).
gaacttcctgggaagtcaa

SEQ ID NO: 270575 - DNA, 19 bp, Homo sapiens
  siRNA target sequence for SNX11 (NM_013323.2,537-555).
cacctcagatgagttcatt

SEQ ID NO: 270576 - DNA, 19 bp, Homo sapiens
  siRNA target sequence for SNX11 (NM_013323.2,715-733).
gccattcttcgatatgcta

SEQ ID NO: 270577 - DNA, 19 bp, Homo sapiens
  siRNA target sequence for SNX11 (NM_013323.2,716-734).
ccattcttcgatatgctat

SEQ ID NO: 270578 - DNA, 19 bp, Homo sapiens
  siRNA target sequence for SNX11 (NM_013323.2,721-739).
cttcgatatgctatgtcaa

SEQ ID NO: 270579 - DNA, 19 bp, Homo sapiens
  siRNA target sequence for SNX11 (NM_013323.2,790-808).
ggagaccagcctaagagtt

SEQ ID NO: 270580 - DNA, 19 bp, Homo sapiens
  siRNA target sequence for SNX11 (NM_013323.2,850-868).
ccgcctcccagtgaagaaa

SEQ ID NO: 270581 - DNA, 19 bp, Homo sapiens
  siRNA target sequence for SNX11 (NM_013323.2,851-869).
cgcctcccagtgaagaaaa

SEQ ID NO: 270582 - DNA, 19 bp, Homo sapiens
  siRNA target sequence for SNX11 (NM_013323.2,1047-1065).
ccctggtcagttagaaaca

SEQ ID NO: 270583 - DNA, 19 bp, Homo sapiens
  siRNA target sequence for SNX11 (NM_013323.2,1049-1067).
ctggtcagttagaaacagt

SEQ ID NO: 270584 - DNA, 19 bp, Homo sapiens
  siRNA target sequence for SNX12 (NM_013346.2,168-186).
gatcgacatctttaatcct

SEQ ID NO: 270585 - DNA, 19 bp, Homo sapiens
  siRNA target sequence for SNX12 (NM_013346.2,247-265).
ctacctatcttcaagctaa

SEQ ID NO: 270586 - DNA, 19 bp, Homo sapiens
  siRNA target sequence for SNX12 (NM_013346.2,286-304).
cgctacagtgactttgagt

SEQ ID NO: 270587 - DNA, 19 bp, Homo sapiens
  siRNA target sequence for SNX12 (NM_013346.2,326-344).
gagatagcaagattgtagt

SEQ ID NO: 270588 - DNA, 19 bp, Homo sapiens
  siRNA target sequence for SNX12 (NM_013346.2,438-456).
gggcctcgagcagtttatt

SEQ ID NO: 270589 - DNA, 19 bp, Homo sapiens
  siRNA target sequence for SNX12 (NM_013346.2,514-532).
caagaggaggcaattgaca

SEQ ID NO: 270590 - DNA, 19 bp, Homo sapiens
  siRNA target sequence for SNX15 (NM_013306.2,657-675).
gggctacaccgagtacaaa

SEQ ID NO: 270591 - DNA, 19 bp, Homo sapiens
  siRNA target sequence for SNX15 (NM_013306.2,659-677).
gctacaccgagtacaaagt

SEQ ID NO: 270592 - DNA, 19 bp, Homo sapiens
  siRNA target sequence for SNX15 (NM_013306.2,660-678).
ctacaccgagtacaaagta

SEQ ID NO: 270593 - DNA, 19 bp, Homo sapiens
  siRNA target sequence for SNX15 (NM_013306.2,676-694).
gtaaccgcgcagttcatct

SEQ ID NO: 270594 - DNA, 19 bp, Homo sapiens
  siRNA target sequence for SNX15 (NM_013306.2,680-698).
ccgcgcagttcatctcaaa

SEQ ID NO: 270595 - DNA, 19 bp, Homo sapiens
  siRNA target sequence for SNX15 (NM_013306.2,938-956).
cccagctcaaggagttctt

SEQ ID NO: 270596 - DNA, 19 bp, Homo sapiens
  siRNA target sequence for SNX15 (NM_013306.2,1079-1097).
ggaggggcctcgaggaatt

SEQ ID NO: 270597 - DNA, 19 bp, Homo sapiens
  siRNA target sequence for SNX15 (NM_013306.2,1082-1100).
ggggcctcgaggaattgga

SEQ ID NO: 270598 - DNA, 19 bp, Homo sapiens
  siRNA target sequence for SNX15 (NM_013306.2,1141-1159).
gccctggatctcctcttta

SEQ ID NO: 270599 - DNA, 19 bp, Homo sapiens
  siRNA target sequence for SNX15 (NM_013306.2,1146-1164).
ggatctcctctttaactgt

SEQ ID NO: 270600 - DNA, 19 bp, Homo sapiens
  siRNA target sequence for SNX16 (NM_022133.2,439-457).
gtctcaacaagctcaaatt

SEQ ID NO: 270601 - DNA, 19 bp, Homo sapiens
  siRNA target sequence for SNX16 (NM_022133.2,458-476).
cttctaagggccagttaga

SEQ ID NO: 270602 - DNA, 19 bp, Homo sapiens
  siRNA target sequence for SNX16 (NM_022133.2,467-485).
gccagttagaagactcaaa

SEQ ID NO: 270603 - DNA, 19 bp, Homo sapiens
  siRNA target sequence for SNX16 (NM_022133.2,504-522).
gacaagtgttcctgatcaa

SEQ ID NO: 270604 - DNA, 19 bp, Homo sapiens
  siRNA target sequence for SNX16 (NM_022133.2,517-535).
gatcaaatggataatactt

SEQ ID NO: 270605 - DNA, 19 bp, Homo sapiens
  siRNA target sequence for SNX16 (NM_022133.2,553-571).
cccctcattaggactaaat

SEQ ID NO: 270606 - DNA, 19 bp, Homo sapiens
  siRNA target sequence for SNX16 (NM_022133.2,554-572).
ccctcattaggactaaatt

SEQ ID NO: 270607 - DNA, 19 bp, Homo sapiens
  siRNA target sequence for SNX16 (NM_022133.2,674-692).
ctatactgggttatgaagt

SEQ ID NO: 270608 - DNA, 19 bp, Homo sapiens
  siRNA target sequence for SNX16 (NM_022133.2,751-769).
gaaagctgggtagttttca

SEQ ID NO: 270609 - DNA, 19 bp, Homo sapiens
  siRNA target sequence for SNX16 (NM_022133.2,788-806).
ctaggcttaatgacaaatt

SEQ ID NO: 270610 - DNA, 19 bp, Homo sapiens
  siRNA target sequence for SNX16 (NM_022133.2,841-859).
cctccaaaacgctggttta

SEQ ID NO: 270611 - DNA, 19 bp, Homo sapiens
  siRNA target sequence for SNX16 (NM_022133.2,842-860).
ctccaaaacgctggtttaa

SEQ ID NO: 270612 - DNA, 19 bp, Homo sapiens
  siRNA target sequence for SNX16 (NM_022133.2,902-920).
gattacaagcgtttcttca

SEQ ID NO: 270613 - DNA, 19 bp, Homo sapiens
  siRNA target sequence for SNX16 (NM_022133.2,911-929).
cgtttcttcaaaatttagt

SEQ ID NO: 270614 - DNA, 19 bp, Homo sapiens
  siRNA target sequence for SNX16 (NM_022133.2,953-971).
gccttgcagtgagagaatt

SEQ ID NO: 270615 - DNA, 19 bp, Homo sapiens
  siRNA target sequence for SNX16 (NM_022133.2,954-972).
ccttgcagtgagagaattt

SEQ ID NO: 270616 - DNA, 19 bp, Homo sapiens
  siRNA target sequence for SNX16 (NM_022133.2,988-1006).
ccaccgggtccatttgata

SEQ ID NO: 270617 - DNA, 19 bp, Homo sapiens
  siRNA target sequence for SNX16 (NM_022133.2,1020-1038).
cagggcattctgtgaaact

SEQ ID NO: 270618 - DNA, 19 bp, Homo sapiens
  siRNA target sequence for SNX16 (NM_022133.2,1022-1040).
gggcattctgtgaaacttt

SEQ ID NO: 270619 - DNA, 19 bp, Homo sapiens
  siRNA target sequence for SNX16 (NM_022133.2,1023-1041).
ggcattctgtgaaacttta

SEQ ID NO: 270620 - DNA, 19 bp, Homo sapiens
  siRNA target sequence for SNX16 (NM_022133.2,1056-1074).
ccgcttacagaaagaacta

SEQ ID NO: 270621 - DNA, 19 bp, Homo sapiens
  siRNA target sequence for SNX16 (NM_022133.2,1058-1076).
gcttacagaaagaactact

SEQ ID NO: 270622 - DNA, 19 bp, Homo sapiens
  siRNA target sequence for SNX16 (NM_022133.2,1118-1136).
gtgagaagcaacttcatat

SEQ ID NO: 270623 - DNA, 19 bp, Homo sapiens
  siRNA target sequence for SNX16 (NM_022133.2,1238-1256).
ctgcacttgaggttgatca

SEQ ID NO: 270624 - DNA, 19 bp, Homo sapiens
  siRNA target sequence for SNX16 (NM_022133.2,1241-1259).
cacttgaggttgatcaaga

SEQ ID NO: 270625 - DNA, 19 bp, Homo sapiens
  siRNA target sequence for SNX16 (NM_022133.2,1285-1303).
gataataaaccatgcttaa

SEQ ID NO: 270626 - DNA, 19 bp, Homo sapiens
  siRNA target sequence for SNX16 (NM_022133.2,1295-1313).
catgcttaagttttagtga

SEQ ID NO: 270627 - DNA, 19 bp, Homo sapiens
  siRNA target sequence for SNX16 (NM_022133.2,1325-1343).
ctgtatcagagatagaagt

SEQ ID NO: 270628 - DNA, 19 bp, Homo sapiens
  siRNA target sequence for SNX19 (NM_014758.1,684-702).
ccttctgtcggcattgcta

SEQ ID NO: 270629 - DNA, 19 bp, Homo sapiens
  siRNA target sequence for SNX19 (NM_014758.1,837-855).
ccgcaccatccagatgatt

SEQ ID NO: 270630 - DNA, 19 bp, Homo sapiens
  siRNA target sequence for SNX19 (NM_014758.1,838-856).
cgcaccatccagatgatta

SEQ ID NO: 270631 - DNA, 19 bp, Homo sapiens
  siRNA target sequence for SNX19 (NM_014758.1,839-857).
gcaccatccagatgattat

SEQ ID NO: 270632 - DNA, 19 bp, Homo sapiens
  siRNA target sequence for SNX19 (NM_014758.1,840-858).
caccatccagatgattatt

SEQ ID NO: 270633 - DNA, 19 bp, Homo sapiens
  siRNA target sequence for SNX19 (NM_014758.1,843-861).
catccagatgattattcga

SEQ ID NO: 270634 - DNA, 19 bp, Homo sapiens
  siRNA target sequence for SNX19 (NM_014758.1,849-867).
gatgattattcgagatttt

SEQ ID NO: 270635 - DNA, 19 bp, Homo sapiens
  siRNA target sequence for SNX19 (NM_014758.1,901-919).
ccagcctttgaggaagaaa

SEQ ID NO: 270636 - DNA, 19 bp, Homo sapiens
  siRNA target sequence for SNX19 (NM_014758.1,1163-1181).
cgcgtggcgttgtgaattt

SEQ ID NO: 270637 - DNA, 19 bp, Homo sapiens
  siRNA target sequence for SNX19 (NM_014758.1,1165-1183).
cgtggcgttgtgaatttgt

SEQ ID NO: 270638 - DNA, 19 bp, Homo sapiens
  siRNA target sequence for SNX19 (NM_014758.1,1223-1241).
gtaccggacgccatgtagt

SEQ ID NO: 270639 - DNA, 19 bp, Homo sapiens
  siRNA target sequence for SNX19 (NM_014758.1,1245-1263).
cgaactcatcacatgcaat

SEQ ID NO: 270640 - DNA, 19 bp, Homo sapiens
  siRNA target sequence for SNX19 (NM_014758.1,1249-1267).
ctcatcacatgcaatgtaa

SEQ ID NO: 270641 - DNA, 19 bp, Homo sapiens
  siRNA target sequence for SNX19 (NM_014758.1,1315-1333).
gtactcgtgggtatctttt

SEQ ID NO: 270642 - DNA, 19 bp, Homo sapiens
  siRNA target sequence for SNX19 (NM_014758.1,1318-1336).
ctcgtgggtatcttttcca

SEQ ID NO: 270643 - DNA, 19 bp, Homo sapiens
  siRNA target sequence for SNX19 (NM_014758.1,1456-1474).
gccccagtattcctaagtt

SEQ ID NO: 270644 - DNA, 19 bp, Homo sapiens
  siRNA target sequence for SNX19 (NM_014758.1,1457-1475).
ccccagtattcctaagtta

SEQ ID NO: 270645 - DNA, 19 bp, Homo sapiens
  siRNA target sequence for SNX19 (NM_014758.1,1577-1595).
gaaacaactcatctcattt

SEQ ID NO: 270646 - DNA, 19 bp, Homo sapiens
  siRNA target sequence for SNX19 (NM_014758.1,1581-1599).
caactcatctcatttccta

SEQ ID NO: 270647 - DNA, 19 bp, Homo sapiens
  siRNA target sequence for SNX19 (NM_014758.1,1612-1630).
cgaggtcccctgttcttat

SEQ ID NO: 270648 - DNA, 19 bp, Homo sapiens
  siRNA target sequence for SNX19 (NM_014758.1,1616-1634).
gtcccctgttcttatgtga

SEQ ID NO: 270649 - DNA, 19 bp, Homo sapiens
  siRNA target sequence for SNX19 (NM_014758.1,1837-1855).
ccggtctccacactgaatt

SEQ ID NO: 270650 - DNA, 19 bp, Homo sapiens
  siRNA target sequence for SNX19 (NM_014758.1,1856-1874).
cctgcccagagatccatat

SEQ ID NO: 270651 - DNA, 19 bp, Homo sapiens
  siRNA target sequence for SNX19 (NM_014758.1,1859-1877).
gcccagagatccatattga

SEQ ID NO: 270652 - DNA, 19 bp, Homo sapiens
  siRNA target sequence for SNX19 (NM_014758.1,1959-1977).
ctcacggccgtcatgctta

SEQ ID NO: 270653 - DNA, 19 bp, Homo sapiens
  siRNA target sequence for SNX19 (NM_014758.1,1963-1981).
cggccgtcatgcttagaga

SEQ ID NO: 270654 - DNA, 19 bp, Homo sapiens
  siRNA target sequence for SNX19 (NM_014758.1,2118-2136).
ccagaaccttcgtatcact

SEQ ID NO: 270655 - DNA, 19 bp, Homo sapiens
  siRNA target sequence for SNX19 (NM_014758.1,2175-2193).
ccacccatacacactctat

SEQ ID NO: 270656 - DNA, 19 bp, Homo sapiens
  siRNA target sequence for SNX19 (NM_014758.1,2250-2268).
ggcctaccacactgtgaat

SEQ ID NO: 270657 - DNA, 19 bp, Homo sapiens
  siRNA target sequence for SNX19 (NM_014758.1,2270-2288).
gtcgctatcgggagttctt

SEQ ID NO: 270658 - DNA, 19 bp, Homo sapiens
  siRNA target sequence for SNX19 (NM_014758.1,2272-2290).
cgctatcgggagttcttga

SEQ ID NO: 270659 - DNA, 19 bp, Homo sapiens
  siRNA target sequence for SNX19 (NM_014758.1,2273-2291).
gctatcgggagttcttgaa

SEQ ID NO: 270660 - DNA, 19 bp, Homo sapiens
  siRNA target sequence for SNX19 (NM_014758.1,2274-2292).
ctatcgggagttcttgaat

SEQ ID NO: 270661 - DNA, 19 bp, Homo sapiens
  siRNA target sequence for SNX19 (NM_014758.1,2317-2335).
ccagatctacgaaagttca

SEQ ID NO: 270662 - DNA, 19 bp, Homo sapiens
  siRNA target sequence for SNX19 (NM_014758.1,2318-2336).
cagatctacgaaagttcat

SEQ ID NO: 270663 - DNA, 19 bp, Homo sapiens
  siRNA target sequence for SNX19 (NM_014758.1,2320-2338).
gatctacgaaagttcatca

SEQ ID NO: 270664 - DNA, 19 bp, Homo sapiens
  siRNA target sequence for SNX19 (NM_014758.1,2323-2341).
ctacgaaagttcatcaaaa

SEQ ID NO: 270665 - DNA, 19 bp, Homo sapiens
  siRNA target sequence for SNX19 (NM_014758.1,2413-2431).
cgtaagagcctcctagaat

SEQ ID NO: 270666 - DNA, 19 bp, Homo sapiens
  siRNA target sequence for SNX19 (NM_014758.1,2421-2439).
cctcctagaatcattccta

SEQ ID NO: 270667 - DNA, 19 bp, Homo sapiens
  siRNA target sequence for SNX19 (NM_014758.1,2422-2440).
ctcctagaatcattcctaa

SEQ ID NO: 270668 - DNA, 19 bp, Homo sapiens
  siRNA target sequence for SNX19 (NM_014758.1,2502-2520).
gaacacagatgctcgtatt

SEQ ID NO: 270669 - DNA, 19 bp, Homo sapiens
  siRNA target sequence for SNX19 (NM_014758.1,2709-2727).
ctcatccagtaaaatttct

SEQ ID NO: 270670 - DNA, 19 bp, Homo sapiens
  siRNA target sequence for SNX19 (NM_014758.1,2750-2768).
cacaagacaagattcttta

SEQ ID NO: 270671 - DNA, 19 bp, Homo sapiens
  siRNA target sequence for SNX19 (NM_014758.1,2788-2806).
gtggagtctgagactctat

SEQ ID NO: 270672 - DNA, 19 bp, Homo sapiens
  siRNA target sequence for SNX19 (NM_014758.1,3009-3027).
gctcctcttgctactaaca

SEQ ID NO: 270673 - DNA, 19 bp, Homo sapiens
  siRNA target sequence for SNX19 (NM_014758.1,3022-3040).
ctaacagaacagtggaaat

SEQ ID NO: 270674 - DNA, 19 bp, Homo sapiens
  siRNA target sequence for SNX19 (NM_014758.1,3041-3059).
ggctatgtaccgaaaacat

SEQ ID NO: 270675 - DNA, 19 bp, Homo sapiens
  siRNA target sequence for SNX19 (NM_014758.1,3081-3099).
ctttgggaccctagttcaa

SEQ ID NO: 270676 - DNA, 19 bp, Homo sapiens
  siRNA target sequence for SNX19 (NM_014758.1,3112-3130).
gtgcaggtagctaatttaa

SEQ ID NO: 270677 - DNA, 19 bp, Homo sapiens
  siRNA target sequence for SNX19 (NM_014758.1,3117-3135).
ggtagctaatttaacaagt

SEQ ID NO: 270678 - DNA, 19 bp, Homo sapiens
  siRNA target sequence for SNX19 (NM_014758.1,3282-3300).
cccagatctcgtagtagaa

SEQ ID NO: 270679 - DNA, 19 bp, Homo sapiens
  siRNA target sequence for SNX19 (NM_014758.1,3283-3301).
ccagatctcgtagtagaaa

SEQ ID NO: 270680 - DNA, 19 bp, Homo sapiens
  siRNA target sequence for SNX19 (NM_014758.1,3284-3302).
cagatctcgtagtagaaat

SEQ ID NO: 270681 - DNA, 19 bp, Homo sapiens
  siRNA target sequence for SNX2 (NM_003100.2,308-326).
gaaagggaacctatcctat

SEQ ID NO: 270682 - DNA, 19 bp, Homo sapiens
  siRNA target sequence for SNX2 (NM_003100.2,358-376).
cactcctactacactcatt

SEQ ID NO: 270683 - DNA, 19 bp, Homo sapiens
  siRNA target sequence for SNX2 (NM_003100.2,377-395).
gctcctagaattgaatcaa

SEQ ID NO: 270684 - DNA, 19 bp, Homo sapiens
  siRNA target sequence for SNX2 (NM_003100.2,380-398).
cctagaattgaatcaaaga

SEQ ID NO: 270685 - DNA, 19 bp, Homo sapiens
  siRNA target sequence for SNX2 (NM_003100.2,403-421).
gtctgctcccgtgatcttt

SEQ ID NO: 270686 - DNA, 19 bp, Homo sapiens
  siRNA target sequence for SNX2 (NM_003100.2,410-428).
cccgtgatctttgatagat

SEQ ID NO: 270687 - DNA, 19 bp, Homo sapiens
  siRNA target sequence for SNX2 (NM_003100.2,522-540).
cctatatggcatatagagt

SEQ ID NO: 270688 - DNA, 19 bp, Homo sapiens
  siRNA target sequence for SNX2 (NM_003100.2,672-690).
ctccagaaaagagtatagt

SEQ ID NO: 270689 - DNA, 19 bp, Homo sapiens
  siRNA target sequence for SNX2 (NM_003100.2,703-721).
ggtcaaagtgggtaaagaa

SEQ ID NO: 270690 - DNA, 19 bp, Homo sapiens
  siRNA target sequence for SNX2 (NM_003100.2,713-731).
ggtaaagaagactcatcat

SEQ ID NO: 270691 - DNA, 19 bp, Homo sapiens
  siRNA target sequence for SNX2 (NM_003100.2,724-742).
ctcatcatccactgagttt

SEQ ID NO: 270692 - DNA, 19 bp, Homo sapiens
  siRNA target sequence for SNX2 (NM_003100.2,752-770).
cggagagcagctcttgaaa

SEQ ID NO: 270693 - DNA, 19 bp, Homo sapiens
  siRNA target sequence for SNX2 (NM_003100.2,767-785).
gaaaggtatcttcaaagaa

SEQ ID NO: 270694 - DNA, 19 bp, Homo sapiens
  siRNA target sequence for SNX2 (NM_003100.2,850-868).
gcctagagcagttaataca

SEQ ID NO: 270695 - DNA, 19 bp, Homo sapiens
  siRNA target sequence for SNX2 (NM_003100.2,914-932).
gccgacgctgtcaacaaaa

SEQ ID NO: 270696 - DNA, 19 bp, Homo sapiens
  siRNA target sequence for SNX2 (NM_003100.2,915-933).
ccgacgctgtcaacaaaat

SEQ ID NO: 270697 - DNA, 19 bp, Homo sapiens
  siRNA target sequence for SNX2 (NM_003100.2,1031-1049).
gaagccttggtctgtcata

SEQ ID NO: 270698 - DNA, 19 bp, Homo sapiens
  siRNA target sequence for SNX2 (NM_003100.2,1034-1052).
gccttggtctgtcatagaa

SEQ ID NO: 270699 - DNA, 19 bp, Homo sapiens
  siRNA target sequence for SNX2 (NM_003100.2,1035-1053).
ccttggtctgtcatagaaa

SEQ ID NO: 270700 - DNA, 19 bp, Homo sapiens
  siRNA target sequence for SNX2 (NM_003100.2,1089-1107).
gtgctgccatgttaggtaa

SEQ ID NO: 270701 - DNA, 19 bp, Homo sapiens
  siRNA target sequence for SNX2 (NM_003100.2,1091-1109).
gctgccatgttaggtaatt

SEQ ID NO: 270702 - DNA, 19 bp, Homo sapiens
  siRNA target sequence for SNX2 (NM_003100.2,1114-1132).
ggatcatactgctttatct

SEQ ID NO: 270703 - DNA, 19 bp, Homo sapiens
  siRNA target sequence for SNX2 (NM_003100.2,1115-1133).
gatcatactgctttatcta

SEQ ID NO: 270704 - DNA, 19 bp, Homo sapiens
  siRNA target sequence for SNX2 (NM_003100.2,1165-1183).
gaagatagaccagttacat

SEQ ID NO: 270705 - DNA, 19 bp, Homo sapiens
  siRNA target sequence for SNX2 (NM_003100.2,1230-1248).
gtgactacattcgtcttat

SEQ ID NO: 270706 - DNA, 19 bp, Homo sapiens
  siRNA target sequence for SNX2 (NM_003100.2,1263-1281).
gtgtgtttgaccatcgaat

SEQ ID NO: 270707 - DNA, 19 bp, Homo sapiens
  siRNA target sequence for SNX2 (NM_003100.2,1442-1460).
gaacagatatctaaaacga

SEQ ID NO: 270708 - DNA, 19 bp, Homo sapiens
  siRNA target sequence for SNX2 (NM_003100.2,1502-1520).
gattttaaaaccgttatca

SEQ ID NO: 270709 - DNA, 19 bp, Homo sapiens
  siRNA target sequence for SNX2 (NM_003100.2,1522-1540).
caagtacttagaatcacta

SEQ ID NO: 270710 - DNA, 19 bp, Homo sapiens
  siRNA target sequence for SNX2 (NM_003100.2,1525-1543).
gtacttagaatcactagtt

SEQ ID NO: 270711 - DNA, 19 bp, Homo sapiens
  siRNA target sequence for SNX22 (NM_024798.1,352-370).
ccaaggagttactggaatt

SEQ ID NO: 270712 - DNA, 19 bp, Homo sapiens
  siRNA target sequence for SNX24 (NM_014035.1,75-93).
cgtcctttcgctatgaaga

SEQ ID NO: 270713 - DNA, 19 bp, Homo sapiens
  siRNA target sequence for SNX24 (NM_014035.1,107-125).
cggggatacacggtgttta

SEQ ID NO: 270714 - DNA, 19 bp, Homo sapiens
  siRNA target sequence for SNX24 (NM_014035.1,108-126).
ggggatacacggtgtttaa

SEQ ID NO: 270715 - DNA, 19 bp, Homo sapiens
  siRNA target sequence for SNX24 (NM_014035.1,117-135).
cggtgtttaagatagaagt

SEQ ID NO: 270716 - DNA, 19 bp, Homo sapiens
  siRNA target sequence for SNX24 (NM_014035.1,169-187).
gagatacagcgaatttcat

SEQ ID NO: 270717 - DNA, 19 bp, Homo sapiens
  siRNA target sequence for SNX24 (NM_014035.1,188-206).
gctttgcacaaaaagctta

SEQ ID NO: 270718 - DNA, 19 bp, Homo sapiens
  siRNA target sequence for SNX24 (NM_014035.1,234-252).
cttctaaacatgttaggaa

SEQ ID NO: 270719 - DNA, 19 bp, Homo sapiens
  siRNA target sequence for SNX24 (NM_014035.1,281-299).
cgacaaggcttggaaacat

SEQ ID NO: 270720 - DNA, 19 bp, Homo sapiens
  siRNA target sequence for SNX24 (NM_014035.1,421-439).
gtctgaagagtcaagcaaa

SEQ ID NO: 270721 - DNA, 19 bp, Homo sapiens
  siRNA target sequence for SNX24 (NM_014035.1,425-443).
gaagagtcaagcaaactgt

SEQ ID NO: 270722 - DNA, 19 bp, Homo sapiens
  siRNA target sequence for SNX24 (NM_014035.1,491-509).
gcagccagcgattttccaa

SEQ ID NO: 270723 - DNA, 19 bp, Homo sapiens
  siRNA target sequence for SNX24 (NM_014035.1,495-513).
ccagcgattttccaaatgt

SEQ ID NO: 270724 - DNA, 19 bp, Homo sapiens
  siRNA target sequence for SNX24 (NM_014035.1,525-543).
gagtcctccatgggatatt

SEQ ID NO: 270725 - DNA, 19 bp, Homo sapiens
  siRNA target sequence for SNX24 (NM_014035.1,538-556).
gatattttaccctcatcta

SEQ ID NO: 270726 - DNA, 19 bp, Homo sapiens
  siRNA target sequence for SNX26 (NM_052948.2,244-262).
ctacgagaacgttgacttt

SEQ ID NO: 270727 - DNA, 19 bp, Homo sapiens
  siRNA target sequence for SNX26 (NM_052948.2,370-388).
ggttctccggagttacgat

SEQ ID NO: 270728 - DNA, 19 bp, Homo sapiens
  siRNA target sequence for SNX26 (NM_052948.2,376-394).
ccggagttacgatgacttt

SEQ ID NO: 270729 - DNA, 19 bp, Homo sapiens
  siRNA target sequence for SNX26 (NM_052948.2,410-428).
cacctccaccggtgcatat

SEQ ID NO: 270730 - DNA, 19 bp, Homo sapiens
  siRNA target sequence for SNX26 (NM_052948.2,412-430).
cctccaccggtgcatattt

SEQ ID NO: 270731 - DNA, 19 bp, Homo sapiens
  siRNA target sequence for SNX26 (NM_052948.2,1086-1104).
gctgctccgagttcattga

SEQ ID NO: 270732 - DNA, 19 bp, Homo sapiens
  siRNA target sequence for SNX26 (NM_052948.2,1164-1182).
ggcttcggcacgagtttga

SEQ ID NO: 270733 - DNA, 19 bp, Homo sapiens
  siRNA target sequence for SNX26 (NM_052948.2,2196-2214).
gcccactcggtcctgatat

SEQ ID NO: 270734 - DNA, 19 bp, Homo sapiens
  siRNA target sequence for SNX26 (NM_052948.2,2498-2516).
cccccaccctacttaccaa

SEQ ID NO: 270735 - DNA, 19 bp, Homo sapiens
  siRNA target sequence for SNX26 (NM_052948.2,2844-2862).
ggggagagaacctgtacta

SEQ ID NO: 270736 - DNA, 19 bp, Homo sapiens
  siRNA target sequence for SNX26 (NM_052948.2,2845-2863).
gggagagaacctgtactat

SEQ ID NO: 270737 - DNA, 19 bp, Homo sapiens
  siRNA target sequence for SNX26 (NM_052948.2,3178-3196).
cccccgaagccgttcagat

SEQ ID NO: 270738 - DNA, 19 bp, Homo sapiens
  siRNA target sequence for SNX26 (NM_052948.2,3355-3373).
gtccttgtacagaaatgga

SEQ ID NO: 270739 - DNA, 19 bp, Homo sapiens
  siRNA target sequence for SNX27 (NM_030918.4,325-343).
ggtgaaccacgtgaatgtt

SEQ ID NO: 270740 - DNA, 19 bp, Homo sapiens
  siRNA target sequence for SNX27 (NM_030918.4,380-398).
cgagcaggcgagaaggaat

SEQ ID NO: 270741 - DNA, 19 bp, Homo sapiens
  siRNA target sequence for SNX27 (NM_030918.4,383-401).
gcaggcgagaaggaattga

SEQ ID NO: 270742 - DNA, 19 bp, Homo sapiens
  siRNA target sequence for SNX27 (NM_030918.4,384-402).
caggcgagaaggaattgat

SEQ ID NO: 270743 - DNA, 19 bp, Homo sapiens
  siRNA target sequence for SNX27 (NM_030918.4,386-404).
ggcgagaaggaattgatct

SEQ ID NO: 270744 - DNA, 19 bp, Homo sapiens
  siRNA target sequence for SNX27 (NM_030918.4,387-405).
gcgagaaggaattgatctt

SEQ ID NO: 270745 - DNA, 19 bp, Homo sapiens
  siRNA target sequence for SNX27 (NM_030918.4,457-475).
cgactcgttgggacaatca

SEQ ID NO: 270746 - DNA, 19 bp, Homo sapiens
  siRNA target sequence for SNX27 (NM_030918.4,458-476).
gactcgttgggacaatcat

SEQ ID NO: 270747 - DNA, 19 bp, Homo sapiens
  siRNA target sequence for SNX27 (NM_030918.4,460-478).
ctcgttgggacaatcattt

SEQ ID NO: 270748 - DNA, 19 bp, Homo sapiens
  siRNA target sequence for SNX27 (NM_030918.4,462-480).
cgttgggacaatcatttta

SEQ ID NO: 270749 - DNA, 19 bp, Homo sapiens
  siRNA target sequence for SNX27 (NM_030918.4,463-481).
gttgggacaatcattttat

SEQ ID NO: 270750 - DNA, 19 bp, Homo sapiens
  siRNA target sequence for SNX27 (NM_030918.4,581-599).
gggaggcagctgtgttcta

SEQ ID NO: 270751 - DNA, 19 bp, Homo sapiens
  siRNA target sequence for SNX27 (NM_030918.4,602-620).
cggtaccgggagtttgcta

SEQ ID NO: 270752 - DNA, 19 bp, Homo sapiens
  siRNA target sequence for SNX27 (NM_030918.4,603-621).
ggtaccgggagtttgctat

SEQ ID NO: 270753 - DNA, 19 bp, Homo sapiens
  siRNA target sequence for SNX27 (NM_030918.4,644-662).
gagtttgccaactttacat

SEQ ID NO: 270754 - DNA, 19 bp, Homo sapiens
  siRNA target sequence for SNX27 (NM_030918.4,674-692).
ccagggaagtggccatttt

SEQ ID NO: 270755 - DNA, 19 bp, Homo sapiens
  siRNA target sequence for SNX27 (NM_030918.4,693-711).
cattatcagaacaacaatt

SEQ ID NO: 270756 - DNA, 19 bp, Homo sapiens
  siRNA target sequence for SNX27 (NM_030918.4,718-736).
ccgacgtcggggattggaa

SEQ ID NO: 270757 - DNA, 19 bp, Homo sapiens
  siRNA target sequence for SNX27 (NM_030918.4,722-740).
cgtcggggattggaagaat

SEQ ID NO: 270758 - DNA, 19 bp, Homo sapiens
  siRNA target sequence for SNX27 (NM_030918.4,727-745).
gggattggaagaatatcta

SEQ ID NO: 270759 - DNA, 19 bp, Homo sapiens
  siRNA target sequence for SNX27 (NM_030918.4,729-747).
gattggaagaatatctaga

SEQ ID NO: 270760 - DNA, 19 bp, Homo sapiens
  siRNA target sequence for SNX27 (NM_030918.4,754-772).
gtgttcaatacgagtaatt

SEQ ID NO: 270761 - DNA, 19 bp, Homo sapiens
  siRNA target sequence for SNX27 (NM_030918.4,790-808).
gcaggaattcctatcagaa

SEQ ID NO: 270762 - DNA, 19 bp, Homo sapiens
  siRNA target sequence for SNX27 (NM_030918.4,791-809).
caggaattcctatcagaat

SEQ ID NO: 270763 - DNA, 19 bp, Homo sapiens
  siRNA target sequence for SNX27 (NM_030918.4,804-822).
cagaatccgatgagaacta

SEQ ID NO: 270764 - DNA, 19 bp, Homo sapiens
  siRNA target sequence for SNX27 (NM_030918.4,903-921).
ctacagaccaagtatatca

SEQ ID NO: 270765 - DNA, 19 bp, Homo sapiens
  siRNA target sequence for SNX27 (NM_030918.4,951-969).
gtacgacagtgaattactt

SEQ ID NO: 270766 - DNA, 19 bp, Homo sapiens
  siRNA target sequence for SNX27 (NM_030918.4,985-1003).
gatcagtcactcctttgta

SEQ ID NO: 270767 - DNA, 19 bp, Homo sapiens
  siRNA target sequence for SNX27 (NM_030918.4,990-1008).
gtcactcctttgtacgtaa

SEQ ID NO: 270768 - DNA, 19 bp, Homo sapiens
  siRNA target sequence for SNX27 (NM_030918.4,992-1010).
cactcctttgtacgtaaat

SEQ ID NO: 270769 - DNA, 19 bp, Homo sapiens
  siRNA target sequence for SNX27 (NM_030918.4,1005-1023).
gtaaattggcacctaatga

SEQ ID NO: 270770 - DNA, 19 bp, Homo sapiens
  siRNA target sequence for SNX27 (NM_030918.4,1022-1040).
gagtttcctcacaaactct

SEQ ID NO: 270771 - DNA, 19 bp, Homo sapiens
  siRNA target sequence for SNX27 (NM_030918.4,1074-1092).
cctgcttgaccattcgaaa

SEQ ID NO: 270772 - DNA, 19 bp, Homo sapiens
  siRNA target sequence for SNX27 (NM_030918.4,1084-1102).
cattcgaaagtggcttttt

SEQ ID NO: 270773 - DNA, 19 bp, Homo sapiens
  siRNA target sequence for SNX27 (NM_030918.4,1143-1161).
ctgttacctacttctttca

SEQ ID NO: 270774 - DNA, 19 bp, Homo sapiens
  siRNA target sequence for SNX27 (NM_030918.4,1229-1247).
ctatacgaacaaagaaaaa

SEQ ID NO: 270775 - DNA, 19 bp, Homo sapiens
  siRNA target sequence for SNX27 (NM_030918.4,1326-1344).
ggaggaaggggcacgttat

SEQ ID NO: 270776 - DNA, 19 bp, Homo sapiens
  siRNA target sequence for SNX27 (NM_030918.4,1356-1374).
gcatcacgcactttaaact

SEQ ID NO: 270777 - DNA, 19 bp, Homo sapiens
  siRNA target sequence for SNX27 (NM_030918.4,1402-1420).
ggagaaccaggtaattgca

SEQ ID NO: 270778 - DNA, 19 bp, Homo sapiens
  siRNA target sequence for SNX27 (NM_030918.4,1403-1421).
gagaaccaggtaattgcat

SEQ ID NO: 270779 - DNA, 19 bp, Homo sapiens
  siRNA target sequence for SNX27 (NM_030918.4,1465-1483).
gatggccttctgtttcgaa

SEQ ID NO: 270780 - DNA, 19 bp, Homo sapiens
  siRNA target sequence for SNX27 (NM_030918.4,1471-1489).
cttctgtttcgaatatgca

SEQ ID NO: 270781 - DNA, 19 bp, Homo sapiens
  siRNA target sequence for SNX27 (NM_030918.4,1501-1519).
gaagccccgatgggttaaa

SEQ ID NO: 270782 - DNA, 19 bp, Homo sapiens
  siRNA target sequence for SNX27 (NM_030918.4,1505-1523).
ccccgatgggttaaaatct

SEQ ID NO: 270783 - DNA, 19 bp, Homo sapiens
  siRNA target sequence for SNX27 (NM_030918.4,1506-1524).
cccgatgggttaaaatctt

SEQ ID NO: 270784 - DNA, 19 bp, Homo sapiens
  siRNA target sequence for SNX27 (NM_030918.4,1508-1526).
cgatgggttaaaatcttca

SEQ ID NO: 270785 - DNA, 19 bp, Homo sapiens
  siRNA target sequence for SNX27 (NM_030918.4,1522-1540).
cttcacgccatatttcaat

SEQ ID NO: 270786 - DNA, 19 bp, Homo sapiens
  siRNA target sequence for SNX3 (NM_003795.3,471-489).
cgcttcaccacttacgaaa

SEQ ID NO: 270787 - DNA, 19 bp, Homo sapiens
  siRNA target sequence for SNX3 (NM_003795.3,486-504).
gaaatcagggtcaagacaa

SEQ ID NO: 270788 - DNA, 19 bp, Homo sapiens
  siRNA target sequence for SNX3 (NM_003795.3,566-584).
gctgcgaagtgaattagaa

SEQ ID NO: 270789 - DNA, 19 bp, Homo sapiens
  siRNA target sequence for SNX3 (NM_003795.3,567-585).
ctgcgaagtgaattagaaa

SEQ ID NO: 270790 - DNA, 19 bp, Homo sapiens
  siRNA target sequence for SNX3 (NM_003795.3,569-587).
gcgaagtgaattagaaaga

SEQ ID NO: 270791 - DNA, 19 bp, Homo sapiens
  siRNA target sequence for SNX3 (NM_003795.3,632-650).
gcgtcagcttccttttaga

SEQ ID NO: 270792 - DNA, 19 bp, Homo sapiens
  siRNA target sequence for SNX3 (NM_003795.3,796-814).
gctatactccatctaaaat

SEQ ID NO: 270793 - DNA, 19 bp, Homo sapiens
  siRNA target sequence for SNX3 (NM_152828.2,640-658).
cgtggtgtgctcagaatga

SEQ ID NO: 270794 - DNA, 19 bp, Homo sapiens
  siRNA target sequence for SNX3 (NM_152828.2,641-659).
gtggtgtgctcagaatgat

SEQ ID NO: 270795 - DNA, 19 bp, Homo sapiens
  siRNA target sequence for SNX4 (NM_003794.2,177-195).
cgacacgatgacacacaat

SEQ ID NO: 270796 - DNA, 19 bp, Homo sapiens
  siRNA target sequence for SNX4 (NM_003794.2,178-196).
gacacgatgacacacaata

SEQ ID NO: 270797 - DNA, 19 bp, Homo sapiens
  siRNA target sequence for SNX4 (NM_003794.2,180-198).
cacgatgacacacaataat

SEQ ID NO: 270798 - DNA, 19 bp, Homo sapiens
  siRNA target sequence for SNX4 (NM_003794.2,182-200).
cgatgacacacaataattt

SEQ ID NO: 270799 - DNA, 19 bp, Homo sapiens
  siRNA target sequence for SNX4 (NM_003794.2,183-201).
gatgacacacaataatttt

SEQ ID NO: 270800 - DNA, 19 bp, Homo sapiens
  siRNA target sequence for SNX4 (NM_003794.2,213-231).
gatagaaatcagtgtttca

SEQ ID NO: 270801 - DNA, 19 bp, Homo sapiens
  siRNA target sequence for SNX4 (NM_003794.2,261-279).
catgaacatgcaagaaaca

SEQ ID NO: 270802 - DNA, 19 bp, Homo sapiens
  siRNA target sequence for SNX4 (NM_003794.2,356-374).
ggcgatatagtgaatttga

SEQ ID NO: 270803 - DNA, 19 bp, Homo sapiens
  siRNA target sequence for SNX4 (NM_003794.2,358-376).
cgatatagtgaatttgagt

SEQ ID NO: 270804 - DNA, 19 bp, Homo sapiens
  siRNA target sequence for SNX4 (NM_003794.2,359-377).
gatatagtgaatttgagtt

SEQ ID NO: 270805 - DNA, 19 bp, Homo sapiens
  siRNA target sequence for SNX4 (NM_003794.2,378-396).
gttgagaagctacctttta

SEQ ID NO: 270806 - DNA, 19 bp, Homo sapiens
  siRNA target sequence for SNX4 (NM_003794.2,381-399).
gagaagctaccttttagtt

SEQ ID NO: 270807 - DNA, 19 bp, Homo sapiens
  siRNA target sequence for SNX4 (NM_003794.2,383-401).
gaagctaccttttagttta

SEQ ID NO: 270808 - DNA, 19 bp, Homo sapiens
  siRNA target sequence for SNX4 (NM_003794.2,496-514).
gagaggcgacggattggtt

SEQ ID NO: 270809 - DNA, 19 bp, Homo sapiens
  siRNA target sequence for SNX4 (NM_003794.2,498-516).
gaggcgacggattggttta

SEQ ID NO: 270810 - DNA, 19 bp, Homo sapiens
  siRNA target sequence for SNX4 (NM_003794.2,500-518).
ggcgacggattggtttaga

SEQ ID NO: 270811 - DNA, 19 bp, Homo sapiens
  siRNA target sequence for SNX4 (NM_003794.2,528-546).
cttgaggattgcttcacat

SEQ ID NO: 270812 - DNA, 19 bp, Homo sapiens
  siRNA target sequence for SNX4 (NM_003794.2,549-567).
catcctttgtagagacaaa

SEQ ID NO: 270813 - DNA, 19 bp, Homo sapiens
  siRNA target sequence for SNX4 (NM_003794.2,639-657).
ggcagactccaggttaaaa

SEQ ID NO: 270814 - DNA, 19 bp, Homo sapiens
  siRNA target sequence for SNX4 (NM_003794.2,648-666).
caggttaaaagcgcttaat

SEQ ID NO: 270815 - DNA, 19 bp, Homo sapiens
  siRNA target sequence for SNX4 (NM_003794.2,651-669).
gttaaaagcgcttaatgca

SEQ ID NO: 270816 - DNA, 19 bp, Homo sapiens
  siRNA target sequence for SNX4 (NM_003794.2,660-678).
gcttaatgcaacattcaga

SEQ ID NO: 270817 - DNA, 19 bp, Homo sapiens
  siRNA target sequence for SNX4 (NM_003794.2,698-716).
gatttactgaccttaagca

SEQ ID NO: 270818 - DNA, 19 bp, Homo sapiens
  siRNA target sequence for SNX4 (NM_003794.2,817-835).
ggtcgagttttcagtgaat

SEQ ID NO: 270819 - DNA, 19 bp, Homo sapiens
  siRNA target sequence for SNX4 (NM_003794.2,832-850).
gaatggagtgccatagaaa

SEQ ID NO: 270820 - DNA, 19 bp, Homo sapiens
  siRNA target sequence for SNX4 (NM_003794.2,870-888).
gcagagtgctggtcatcat

SEQ ID NO: 270821 - DNA, 19 bp, Homo sapiens
  siRNA target sequence for SNX4 (NM_003794.2,871-889).
cagagtgctggtcatcata

SEQ ID NO: 270822 - DNA, 19 bp, Homo sapiens
  siRNA target sequence for SNX4 (NM_003794.2,901-919).
gcatcttctattgatgata

SEQ ID NO: 270823 - DNA, 19 bp, Homo sapiens
  siRNA target sequence for SNX4 (NM_003794.2,902-920).
catcttctattgatgatat

SEQ ID NO: 270824 - DNA, 19 bp, Homo sapiens
  siRNA target sequence for SNX4 (NM_003794.2,944-962).
cagatcagttaaaagagta

SEQ ID NO: 270825 - DNA, 19 bp, Homo sapiens
  siRNA target sequence for SNX4 (NM_003794.2,951-969).
gttaaaagagtatcttttt

SEQ ID NO: 270826 - DNA, 19 bp, Homo sapiens
  siRNA target sequence for SNX4 (NM_003794.2,995-1013).
gcaggaaacatgaacttat

SEQ ID NO: 270827 - DNA, 19 bp, Homo sapiens
  siRNA target sequence for SNX4 (NM_003794.2,1033-1051).
gctgctcaggacttagcat

SEQ ID NO: 270828 - DNA, 19 bp, Homo sapiens
  siRNA target sequence for SNX4 (NM_003794.2,1154-1172).
gagaagccagaataaaggt

SEQ ID NO: 270829 - DNA, 19 bp, Homo sapiens
  siRNA target sequence for SNX4 (NM_003794.2,1170-1188).
ggtgctagaagaacaaata

SEQ ID NO: 270830 - DNA, 19 bp, Homo sapiens
  siRNA target sequence for SNX4 (NM_003794.2,1248-1266).
cgcatgggctgatattgaa

SEQ ID NO: 270831 - DNA, 19 bp, Homo sapiens
  siRNA target sequence for SNX4 (NM_003794.2,1267-1285).
cgcttcaaagaacaaaaga

SEQ ID NO: 270832 - DNA, 19 bp, Homo sapiens
  siRNA target sequence for SNX4 (NM_003794.2,1299-1317).
ggaggccctcataagctat

SEQ ID NO: 270833 - DNA, 19 bp, Homo sapiens
  siRNA target sequence for SNX4 (NM_003794.2,1318-1336).
gcagtcatgcagatcagta

SEQ ID NO: 270834 - DNA, 19 bp, Homo sapiens
  siRNA target sequence for SNX4 (NM_003794.2,1321-1339).
gtcatgcagatcagtatgt

SEQ ID NO: 270835 - DNA, 19 bp, Homo sapiens
  siRNA target sequence for SNX4 (NM_003794.2,1338-1356).
gtgcaaaaagggaattcaa

SEQ ID NO: 270836 - DNA, 19 bp, Homo sapiens
  siRNA target sequence for SNX4 (NM_003794.2,1364-1382).
ccaatgctaaggaatgctt

SEQ ID NO: 270837 - DNA, 19 bp, Homo sapiens
  siRNA target sequence for SNX4 (NM_003794.2,1369-1387).
gctaaggaatgctttagca

SEQ ID NO: 270838 - DNA, 19 bp, Homo sapiens
  siRNA target sequence for SNX4 (NM_003794.2,1370-1388).
ctaaggaatgctttagcaa

SEQ ID NO: 270839 - DNA, 19 bp, Homo sapiens
  siRNA target sequence for SNX5 (NM_014426.2,151-169).
ctgtggacctgaatgttga

SEQ ID NO: 270840 - DNA, 19 bp, Homo sapiens
  siRNA target sequence for SNX5 (NM_014426.2,171-189).
ccctcgcttcagattgaca

SEQ ID NO: 270841 - DNA, 19 bp, Homo sapiens
  siRNA target sequence for SNX5 (NM_014426.2,172-190).
cctcgcttcagattgacat

SEQ ID NO: 270842 - DNA, 19 bp, Homo sapiens
  siRNA target sequence for SNX5 (NM_014426.2,173-191).
ctcgcttcagattgacata

SEQ ID NO: 270843 - DNA, 19 bp, Homo sapiens
  siRNA target sequence for SNX5 (NM_014426.2,277-295).
ctgttacaaggcaacatga

SEQ ID NO: 270844 - DNA, 19 bp, Homo sapiens
  siRNA target sequence for SNX5 (NM_014426.2,307-325).
ggctacatgacactcttat

SEQ ID NO: 270845 - DNA, 19 bp, Homo sapiens
  siRNA target sequence for SNX5 (NM_014426.2,308-326).
gctacatgacactcttatt

SEQ ID NO: 270846 - DNA, 19 bp, Homo sapiens
  siRNA target sequence for SNX5 (NM_014426.2,367-385).
ctacgaagcccgactttga

SEQ ID NO: 270847 - DNA, 19 bp, Homo sapiens
  siRNA target sequence for SNX5 (NM_014426.2,428-446).
gtctatgaccaaagaagaa

SEQ ID NO: 270848 - DNA, 19 bp, Homo sapiens
  siRNA target sequence for SNX5 (NM_014426.2,556-574).
gtaaagatcgcaactttca

SEQ ID NO: 270849 - DNA, 19 bp, Homo sapiens
  siRNA target sequence for SNX5 (NM_014426.2,561-579).
gatcgcaactttcatgttt

SEQ ID NO: 270850 - DNA, 19 bp, Homo sapiens
  siRNA target sequence for SNX5 (NM_014426.2,591-609).
gatcaggatctaagtgtta

SEQ ID NO: 270851 - DNA, 19 bp, Homo sapiens
  siRNA target sequence for SNX5 (NM_014426.2,606-624).
gttaggcggaaaaatacta

SEQ ID NO: 270852 - DNA, 19 bp, Homo sapiens
  siRNA target sequence for SNX5 (NM_014426.2,637-655).
gtggcttcttcaaaagtgt

SEQ ID NO: 270853 - DNA, 19 bp, Homo sapiens
  siRNA target sequence for SNX5 (NM_014426.2,656-674).
ggtgaaaagtgctgatgaa

SEQ ID NO: 270854 - DNA, 19 bp, Homo sapiens
  siRNA target sequence for SNX5 (NM_014426.2,725-743).
gaacttccttattaactat

SEQ ID NO: 270855 - DNA, 19 bp, Homo sapiens
  siRNA target sequence for SNX5 (NM_014426.2,740-758).
ctattacaataggatcaaa

SEQ ID NO: 270856 - DNA, 19 bp, Homo sapiens
  siRNA target sequence for SNX8 (NM_013321.1,358-376).
ggtatacagacggtacaat

SEQ ID NO: 270857 - DNA, 19 bp, Homo sapiens
  siRNA target sequence for SNX8 (NM_013321.1,459-477).
gagctgacagggagttcat

SEQ ID NO: 270858 - DNA, 19 bp, Homo sapiens
  siRNA target sequence for SNX8 (NM_013321.1,584-602).
gatgtgcagaacaagttaa

SEQ ID NO: 270859 - DNA, 19 bp, Homo sapiens
  siRNA target sequence for SNX8 (NM_013321.1,618-636).
gcgtcggggacgaattcct

SEQ ID NO: 270860 - DNA, 19 bp, Homo sapiens
  siRNA target sequence for SNX8 (NM_013321.1,713-731).
ctgatccggaacatctaca

SEQ ID NO: 270861 - DNA, 19 bp, Homo sapiens
  siRNA target sequence for SNX8 (NM_013321.1,719-737).
cggaacatctacaatagct

SEQ ID NO: 270862 - DNA, 19 bp, Homo sapiens
  siRNA target sequence for SNX8 (NM_013321.1,720-738).
ggaacatctacaatagctt

SEQ ID NO: 270863 - DNA, 19 bp, Homo sapiens
  siRNA target sequence for SNX8 (NM_013321.1,721-739).
gaacatctacaatagcttt

SEQ ID NO: 270864 - DNA, 19 bp, Homo sapiens
  siRNA target sequence for SNX8 (NM_013321.1,784-802).
cgacaatgcggcagatctt

SEQ ID NO: 270865 - DNA, 19 bp, Homo sapiens
  siRNA target sequence for SNX8 (NM_013321.1,791-809).
gcggcagatcttctcatat

SEQ ID NO: 270866 - DNA, 19 bp, Homo sapiens
  siRNA target sequence for SNX8 (NM_013321.1,792-810).
cggcagatcttctcatatt

SEQ ID NO: 270867 - DNA, 19 bp, Homo sapiens
  siRNA target sequence for SNX8 (NM_013321.1,814-832).
gaaggagctaagtgcaata

SEQ ID NO: 270868 - DNA, 19 bp, Homo sapiens
  siRNA target sequence for STX10 (NM_003765.1,5-23).
ctctcgaagaccccttttt

SEQ ID NO: 270869 - DNA, 19 bp, Homo sapiens
  siRNA target sequence for STX10 (NM_003765.1,9-27).
cgaagaccccttttttgta

SEQ ID NO: 270870 - DNA, 19 bp, Homo sapiens
  siRNA target sequence for STX10 (NM_003765.1,323-341).
gcccaacagccgtagcatt

SEQ ID NO: 270871 - DNA, 19 bp, Homo sapiens
  siRNA target sequence for STX10 (NM_003765.1,324-342).
cccaacagccgtagcattt

SEQ ID NO: 270872 - DNA, 19 bp, Homo sapiens
  siRNA target sequence for STX10 (NM_003765.1,325-343).
ccaacagccgtagcatttt

SEQ ID NO: 270873 - DNA, 19 bp, Homo sapiens
  siRNA target sequence for STX10 (NM_003765.1,326-344).
caacagccgtagcattttt

SEQ ID NO: 270874 - DNA, 19 bp, Homo sapiens
  siRNA target sequence for STX10 (NM_003765.1,329-347).
cagccgtagcatttttgga

SEQ ID NO: 270875 - DNA, 19 bp, Homo sapiens
  siRNA target sequence for STX10 (NM_003765.1,350-368).
ggaataacagagagatact

SEQ ID NO: 270876 - DNA, 19 bp, Homo sapiens
  siRNA target sequence for STX10 (NM_003765.1,721-739).
ctcgttctcatcttactat

SEQ ID NO: 270877 - DNA, 19 bp, Homo sapiens
  siRNA target sequence for STX11 (NM_003764.2,204-222).
ggacttgtccaagcaatat

SEQ ID NO: 270878 - DNA, 19 bp, Homo sapiens
  siRNA target sequence for STX11 (NM_003764.2,236-254).
cagacggggacgatgagtt

SEQ ID NO: 270879 - DNA, 19 bp, Homo sapiens
  siRNA target sequence for STX12 (NM_177424.1,223-241).
gcaagctacaggaaaatct

SEQ ID NO: 270880 - DNA, 19 bp, Homo sapiens
  siRNA target sequence for STX12 (NM_177424.1,248-266).
gttacaacactccacaaat

SEQ ID NO: 270881 - DNA, 19 bp, Homo sapiens
  siRNA target sequence for STX12 (NM_177424.1,269-287).
gctcgccaaggaaacaaat

SEQ ID NO: 270882 - DNA, 19 bp, Homo sapiens
  siRNA target sequence for STX12 (NM_177424.1,272-290).
cgccaaggaaacaaatgaa

SEQ ID NO: 270883 - DNA, 19 bp, Homo sapiens
  siRNA target sequence for STX12 (NM_177424.1,385-403).
ctgcagccttaaacaattt

SEQ ID NO: 270884 - DNA, 19 bp, Homo sapiens
  siRNA target sequence for STX12 (NM_177424.1,413-431).
gcagagaagggtatctgaa

SEQ ID NO: 270885 - DNA, 19 bp, Homo sapiens
  siRNA target sequence for STX12 (NM_177424.1,578-596).
gcaggatttggaacttatt

SEQ ID NO: 270886 - DNA, 19 bp, Homo sapiens
  siRNA target sequence for STX12 (NM_177424.1,579-597).
caggatttggaacttatta

SEQ ID NO: 270887 - DNA, 19 bp, Homo sapiens
  siRNA target sequence for STX12 (NM_177424.1,631-649).
ctgacattttggatgtcaa

SEQ ID NO: 270888 - DNA, 19 bp, Homo sapiens
  siRNA target sequence for STX12 (NM_177424.1,642-660).
gatgtcaatcagatattta

SEQ ID NO: 270889 - DNA, 19 bp, Homo sapiens
  siRNA target sequence for STX12 (NM_177424.1,687-705).
cagggtgatctgattgata

SEQ ID NO: 270890 - DNA, 19 bp, Homo sapiens
  siRNA target sequence for STX12 (NM_177424.1,691-709).
gtgatctgattgatagcat

SEQ ID NO: 270891 - DNA, 19 bp, Homo sapiens
  siRNA target sequence for STX12 (NM_177424.1,748-766).
gagccactgaacagttaca

SEQ ID NO: 270892 - DNA, 19 bp, Homo sapiens
  siRNA target sequence for STX12 (NM_177424.1,768-786).
cgagctgcttactatcaga

SEQ ID NO: 270893 - DNA, 19 bp, Homo sapiens
  siRNA target sequence for STX12 (NM_177424.1,772-790).
ctgcttactatcagaaaaa

SEQ ID NO: 270894 - DNA, 19 bp, Homo sapiens
  siRNA target sequence for STX12 (NM_177424.1,793-811).
ctcgcaagaagatgtgtat

SEQ ID NO: 270895 - DNA, 19 bp, Homo sapiens
  siRNA target sequence for STX12 (NM_177424.1,819-837).
cttgtcctgtcagtgatta

SEQ ID NO: 270896 - DNA, 19 bp, Homo sapiens
  siRNA target sequence for STX12 (NM_177424.1,824-842).
cctgtcagtgattattcta

SEQ ID NO: 270897 - DNA, 19 bp, Homo sapiens
  siRNA target sequence for STX12 (NM_177424.1,852-870).
cttattatctggctagttt

SEQ ID NO: 270898 - DNA, 19 bp, Homo sapiens
  siRNA target sequence for STX16 (NM_003763.2,249-267).
cggaataattccatccaaa

SEQ ID NO: 270899 - DNA, 19 bp, Homo sapiens
  siRNA target sequence for STX16 (NM_003763.2,343-361).
cagcgattggtgtgacaaa

SEQ ID NO: 270900 - DNA, 19 bp, Homo sapiens
  siRNA target sequence for STX16 (NM_003763.2,415-433).
gccggattaagcagaagat

SEQ ID NO: 270901 - DNA, 19 bp, Homo sapiens
  siRNA target sequence for STX16 (NM_003763.2,417-435).
cggattaagcagaagatga

SEQ ID NO: 270902 - DNA, 19 bp, Homo sapiens
  siRNA target sequence for STX16 (NM_003763.2,501-519).
gaacatgccattgagataa

SEQ ID NO: 270903 - DNA, 19 bp, Homo sapiens
  siRNA target sequence for STX16 (NM_003763.2,768-786).
ggagacgataacactcttt

SEQ ID NO: 270904 - DNA, 19 bp, Homo sapiens
  siRNA target sequence for STX16 (NM_003763.2,769-787).
gagacgataacactcttta

SEQ ID NO: 270905 - DNA, 19 bp, Homo sapiens
  siRNA target sequence for STX16 (NM_003763.2,773-791).
cgataacactctttaccat

SEQ ID NO: 270906 - DNA, 19 bp, Homo sapiens
  siRNA target sequence for STX16 (NM_003763.2,870-888).
cagattgtacagtccattt

SEQ ID NO: 270907 - DNA, 19 bp, Homo sapiens
  siRNA target sequence for STX16 (NM_003763.2,911-929).
ggacttaggggcgatgatt

SEQ ID NO: 270908 - DNA, 19 bp, Homo sapiens
  siRNA target sequence for STX16 (NM_003763.2,914-932).
cttaggggcgatgattgta

SEQ ID NO: 270909 - DNA, 19 bp, Homo sapiens
  siRNA target sequence for STX16 (NM_003763.2,919-937).
gggcgatgattgtagaaca

SEQ ID NO: 270910 - DNA, 19 bp, Homo sapiens
  siRNA target sequence for STX16 (NM_003763.2,940-958).
gtacagtccttgacagaat

SEQ ID NO: 270911 - DNA, 19 bp, Homo sapiens
  siRNA target sequence for STX16 (NM_003763.2,945-963).
gtccttgacagaattgact

SEQ ID NO: 270912 - DNA, 19 bp, Homo sapiens
  siRNA target sequence for STX16 (NM_003763.2,953-971).
cagaattgactataacgtt

SEQ ID NO: 270913 - DNA, 19 bp, Homo sapiens
  siRNA target sequence for STX16 (NM_003763.2,969-987).
gttgaacagtcctgtatca

SEQ ID NO: 270914 - DNA, 19 bp, Homo sapiens
  siRNA target sequence for STX16 (NM_003763.2,1044-1062).
cggaagatgcttgtgattt

SEQ ID NO: 270915 - DNA, 19 bp, Homo sapiens
  siRNA target sequence for STX16 (NM_003763.2,1052-1070).
gcttgtgattttaatatta

SEQ ID NO: 270916 - DNA, 19 bp, Homo sapiens
  siRNA target sequence for STX18 (NM_016930.2,320-338).
gccataccatgtctgaata

SEQ ID NO: 270917 - DNA, 19 bp, Homo sapiens
  siRNA target sequence for STX18 (NM_016930.2,379-397).
gatgcccagatattcatga

SEQ ID NO: 270918 - DNA, 19 bp, Homo sapiens
  siRNA target sequence for STX18 (NM_016930.2,474-492).
caggaccgctgttttggat

SEQ ID NO: 270919 - DNA, 19 bp, Homo sapiens
  siRNA target sequence for STX18 (NM_016930.2,476-494).
ggaccgctgttttggattt

SEQ ID NO: 270920 - DNA, 19 bp, Homo sapiens
  siRNA target sequence for STX18 (NM_016930.2,480-498).
cgctgttttggatttcatt

SEQ ID NO: 270921 - DNA, 19 bp, Homo sapiens
  siRNA target sequence for STX18 (NM_016930.2,502-520).
gattacttgaaaagagtat

SEQ ID NO: 270922 - DNA, 19 bp, Homo sapiens
  siRNA target sequence for STX18 (NM_016930.2,540-558).
gagagccatccgagttaaa

SEQ ID NO: 270923 - DNA, 19 bp, Homo sapiens
  siRNA target sequence for STX18 (NM_016930.2,564-582).
ggtggataagaaaagatta

SEQ ID NO: 270924 - DNA, 19 bp, Homo sapiens
  siRNA target sequence for STX18 (NM_016930.2,567-585).
ggataagaaaagattatct

SEQ ID NO: 270925 - DNA, 19 bp, Homo sapiens
  siRNA target sequence for STX18 (NM_016930.2,624-642).
cacatcttctgagaaagtt

SEQ ID NO: 270926 - DNA, 19 bp, Homo sapiens
  siRNA target sequence for STX18 (NM_016930.2,644-662).
cacagagtccttcaaaaga

SEQ ID NO: 270927 - DNA, 19 bp, Homo sapiens
  siRNA target sequence for STX18 (NM_016930.2,710-728).
ctgaaacacaacctgaatt

SEQ ID NO: 270928 - DNA, 19 bp, Homo sapiens
  siRNA target sequence for STX18 (NM_016930.2,746-764).
gcaaaggcgaagatgagtt

SEQ ID NO: 270929 - DNA, 19 bp, Homo sapiens
  siRNA target sequence for STX18 (NM_016930.2,747-765).
caaaggcgaagatgagtta

SEQ ID NO: 270930 - DNA, 19 bp, Homo sapiens
  siRNA target sequence for STX18 (NM_016930.2,888-906).
gatattcacggaaaaggtt

SEQ ID NO: 270931 - DNA, 19 bp, Homo sapiens
  siRNA target sequence for STX18 (NM_016930.2,932-950).
gcattcaccagttagttgt

SEQ ID NO: 270932 - DNA, 19 bp, Homo sapiens
  siRNA target sequence for STX18 (NM_016930.2,973-991).
gaaggcaacgaagacataa

SEQ ID NO: 270933 - DNA, 19 bp, Homo sapiens
  siRNA target sequence for STX18 (NM_016930.2,1022-1040).
gcgtgtggatcctcttctt

SEQ ID NO: 270934 - DNA, 19 bp, Homo sapiens
  siRNA target sequence for STX1A (NM_004603.1,115-133).
ggagattcgaggcttcatt

SEQ ID NO: 270935 - DNA, 19 bp, Homo sapiens
  siRNA target sequence for STX1A (NM_004603.1,230-248).
gaactcatgtccgacataa

SEQ ID NO: 270936 - DNA, 19 bp, Homo sapiens
  siRNA target sequence for STX1A (NM_004603.1,712-730).
ggaacacgcggtagactat

SEQ ID NO: 270937 - DNA, 19 bp, Homo sapiens
  siRNA target sequence for STX3A (NM_004177.3,248-266).
gatgcggttgagattgcta

SEQ ID NO: 270938 - DNA, 19 bp, Homo sapiens
  siRNA target sequence for STX3A (NM_004177.3,318-336).
ggcttaacattgacaagat

SEQ ID NO: 270939 - DNA, 19 bp, Homo sapiens
  siRNA target sequence for STX3A (NM_004177.3,320-338).
cttaacattgacaagatct

SEQ ID NO: 270940 - DNA, 19 bp, Homo sapiens
  siRNA target sequence for STX3A (NM_004177.3,331-349).
caagatctcagaacatgta

SEQ ID NO: 270941 - DNA, 19 bp, Homo sapiens
  siRNA target sequence for STX3A (NM_004177.3,425-443).
cagctcacgactgagatta

SEQ ID NO: 270942 - DNA, 19 bp, Homo sapiens
  siRNA target sequence for STX3A (NM_004177.3,428-446).
ctcacgactgagattaaga

SEQ ID NO: 270943 - DNA, 19 bp, Homo sapiens
  siRNA target sequence for STX3A (NM_004177.3,430-448).
cacgactgagattaagaaa

SEQ ID NO: 270944 - DNA, 19 bp, Homo sapiens
  siRNA target sequence for STX3A (NM_004177.3,454-472).
caacaacgtccggaacaaa

SEQ ID NO: 270945 - DNA, 19 bp, Homo sapiens
  siRNA target sequence for STX3A (NM_004177.3,580-598).
gatgaccaaatacaatgaa

SEQ ID NO: 270946 - DNA, 19 bp, Homo sapiens
  siRNA target sequence for STX3A (NM_004177.3,637-655).
ccagcggcagctcgaaatt

SEQ ID NO: 270947 - DNA, 19 bp, Homo sapiens
  siRNA target sequence for STX3A (NM_004177.3,638-656).
cagcggcagctcgaaatta

SEQ ID NO: 270948 - DNA, 19 bp, Homo sapiens
  siRNA target sequence for STX3A (NM_004177.3,640-658).
gcggcagctcgaaattact

SEQ ID NO: 270949 - DNA, 19 bp, Homo sapiens
  siRNA target sequence for STX3A (NM_004177.3,718-736).
cttcacttctgggatcatt

SEQ ID NO: 270950 - DNA, 19 bp, Homo sapiens
  siRNA target sequence for STX3A (NM_004177.3,817-835).
ggagcttcacgacatgttt

SEQ ID NO: 270951 - DNA, 19 bp, Homo sapiens
  siRNA target sequence for STX3A (NM_004177.3,859-877).
gaatcagggtgagatgtta

SEQ ID NO: 270952 - DNA, 19 bp, Homo sapiens
  siRNA target sequence for STX3A (NM_004177.3,866-884).
ggtgagatgttagataaca

SEQ ID NO: 270953 - DNA, 19 bp, Homo sapiens
  siRNA target sequence for STX3A (NM_004177.3,925-943).
ggcacgagatgaaacgaaa

SEQ ID NO: 270954 - DNA, 19 bp, Homo sapiens
  siRNA target sequence for STX3A (NM_004177.3,926-944).
gcacgagatgaaacgaaaa

SEQ ID NO: 270955 - DNA, 19 bp, Homo sapiens
  siRNA target sequence for STX3A (NM_004177.3,927-945).
cacgagatgaaacgaaaaa

SEQ ID NO: 270956 - DNA, 19 bp, Homo sapiens
  siRNA target sequence for STX3A (NM_004177.3,970-988).
ccggaagaaattgataatt

SEQ ID NO: 270957 - DNA, 19 bp, Homo sapiens
  siRNA target sequence for STX3A (NM_004177.3,1040-1058).
ctttccgttgggctgaatt

SEQ ID NO: 270958 - DNA, 19 bp, Homo sapiens
  siRNA target sequence for STX4A (NM_004604.3,331-349).
gcccggacgaggagttctt

SEQ ID NO: 270959 - DNA, 19 bp, Homo sapiens
  siRNA target sequence for STX4A (NM_004604.3,350-368).
ccacaaggtccggacaatt

SEQ ID NO: 270960 - DNA, 19 bp, Homo sapiens
  siRNA target sequence for STX4A (NM_004604.3,361-379).
ggacaattcggcagactat

SEQ ID NO: 270961 - DNA, 19 bp, Homo sapiens
  siRNA target sequence for STX4A (NM_004604.3,362-380).
gacaattcggcagactatt

SEQ ID NO: 270962 - DNA, 19 bp, Homo sapiens
  siRNA target sequence for STX4A (NM_004604.3,364-382).
caattcggcagactattgt

SEQ ID NO: 270963 - DNA, 19 bp, Homo sapiens
  siRNA target sequence for STX4A (NM_004604.3,370-388).
ggcagactattgtcaaact

SEQ ID NO: 270964 - DNA, 19 bp, Homo sapiens
  siRNA target sequence for STX4A (NM_004604.3,575-593).
cgtcaacacaagaatgaga

SEQ ID NO: 270965 - DNA, 19 bp, Homo sapiens
  siRNA target sequence for STX4A (NM_004604.3,576-594).
gtcaacacaagaatgagaa

SEQ ID NO: 270966 - DNA, 19 bp, Homo sapiens
  siRNA target sequence for STX4A (NM_004604.3,607-625).
gggtcctgtcccagcaatt

SEQ ID NO: 270967 - DNA, 19 bp, Homo sapiens
  siRNA target sequence for STX4A (NM_004604.3,765-783).
caaagcgaggtgtttgtgt

SEQ ID NO: 270968 - DNA, 19 bp, Homo sapiens
  siRNA target sequence for STX4A (NM_004604.3,813-831).
cgacaggccttaaatgaga

SEQ ID NO: 270969 - DNA, 19 bp, Homo sapiens
  siRNA target sequence for STX4A (NM_004604.3,857-875).
gcagcttgaacgcagtatt

SEQ ID NO: 270970 - DNA, 19 bp, Homo sapiens
  siRNA target sequence for STX4A (NM_004604.3,860-878).
gcttgaacgcagtattcgt

SEQ ID NO: 270971 - DNA, 19 bp, Homo sapiens
  siRNA target sequence for STX4A (NM_004604.3,881-899).
gctgcacgacatattcact

SEQ ID NO: 270972 - DNA, 19 bp, Homo sapiens
  siRNA target sequence for STX4A (NM_004604.3,882-900).
ctgcacgacatattcactt

SEQ ID NO: 270973 - DNA, 19 bp, Homo sapiens
  siRNA target sequence for STX4A (NM_004604.3,884-902).
gcacgacatattcactttt

SEQ ID NO: 270974 - DNA, 19 bp, Homo sapiens
  siRNA target sequence for STX5A (NM_003164.2,396-414).
gtccgacaacgcagtgaat

SEQ ID NO: 270975 - DNA, 19 bp, Homo sapiens
  siRNA target sequence for STX5A (NM_003164.2,399-417).
cgacaacgcagtgaattca

SEQ ID NO: 270976 - DNA, 19 bp, Homo sapiens
  siRNA target sequence for STX5A (NM_003164.2,494-512).
gcgcaagtccctctttgat

SEQ ID NO: 270977 - DNA, 19 bp, Homo sapiens
  siRNA target sequence for STX5A (NM_003164.2,497-515).
caagtccctctttgatgat

SEQ ID NO: 270978 - DNA, 19 bp, Homo sapiens
  siRNA target sequence for STX5A (NM_003164.2,500-518).
gtccctctttgatgataaa

SEQ ID NO: 270979 - DNA, 19 bp, Homo sapiens
  siRNA target sequence for STX5A (NM_003164.2,531-549).
gaagagctaacatatatca

SEQ ID NO: 270980 - DNA, 19 bp, Homo sapiens
  siRNA target sequence for STX5A (NM_003164.2,563-581).
caatagcctcaacaaacaa

SEQ ID NO: 270981 - DNA, 19 bp, Homo sapiens
  siRNA target sequence for STX5A (NM_003164.2,685-703).
cttctatgtccaatgactt

SEQ ID NO: 270982 - DNA, 19 bp, Homo sapiens
  siRNA target sequence for STX5A (NM_003164.2,688-706).
ctatgtccaatgacttcaa

SEQ ID NO: 270983 - DNA, 19 bp, Homo sapiens
  siRNA target sequence for STX5A (NM_003164.2,956-974).
gaacattgagtcgacaatt

SEQ ID NO: 270984 - DNA, 19 bp, Homo sapiens
  siRNA target sequence for STX5A (NM_003164.2,1004-1022).
ggcacacatggttaaggaa

SEQ ID NO: 270985 - DNA, 19 bp, Homo sapiens
  siRNA target sequence for STX7 (NM_003569.1,123-141).
cccagaggatctcttctaa

SEQ ID NO: 270986 - DNA, 19 bp, Homo sapiens
  siRNA target sequence for STX7 (NM_003569.1,206-224).
caagattcacctgaattga

SEQ ID NO: 270987 - DNA, 19 bp, Homo sapiens
  siRNA target sequence for STX7 (NM_003569.1,239-257).
cagaagcagcagtatacta

SEQ ID NO: 270988 - DNA, 19 bp, Homo sapiens
  siRNA target sequence for STX7 (NM_003569.1,321-339).
gtgaacagcgtcaaaggaa

SEQ ID NO: 270989 - DNA, 19 bp, Homo sapiens
  siRNA target sequence for STX7 (NM_003569.1,323-341).
gaacagcgtcaaaggaaaa

SEQ ID NO: 270990 - DNA, 19 bp, Homo sapiens
  siRNA target sequence for STX7 (NM_003569.1,430-448).
gtttgttgctcgagtaaga

SEQ ID NO: 270991 - DNA, 19 bp, Homo sapiens
  siRNA target sequence for STX7 (NM_003569.1,565-583).
ggatgacctccgtcttatt

SEQ ID NO: 270992 - DNA, 19 bp, Homo sapiens
  siRNA target sequence for STX7 (NM_003569.1,751-769).
gtcaagggcagcagattat

SEQ ID NO: 270993 - DNA, 19 bp, Homo sapiens
  siRNA target sequence for STX7 (NM_003569.1,770-788).
cagcgcaaatccagaaaaa

SEQ ID NO: 270994 - DNA, 19 bp, Homo sapiens
  siRNA target sequence for STXBP1 (NM_003165.1,143-161).
ctgttgtcggagagaagat

SEQ ID NO: 270995 - DNA, 19 bp, Homo sapiens
  siRNA target sequence for STXBP1 (NM_003165.1,145-163).
gttgtcggagagaagatta

SEQ ID NO: 270996 - DNA, 19 bp, Homo sapiens
  siRNA target sequence for STXBP1 (NM_003165.1,150-168).
cggagagaagattatgcat

SEQ ID NO: 270997 - DNA, 19 bp, Homo sapiens
  siRNA target sequence for STXBP1 (NM_003165.1,211-229).
ctggtggtggatcagttaa

SEQ ID NO: 270998 - DNA, 19 bp, Homo sapiens
  siRNA target sequence for STXBP1 (NM_003165.1,273-291).
gaccgagggcataacgatt

SEQ ID NO: 270999 - DNA, 19 bp, Homo sapiens
  siRNA target sequence for STXBP1 (NM_003165.1,331-349).
ctggaggctgtgtatctca

SEQ ID NO: 271000 - DNA, 19 bp, Homo sapiens
  siRNA target sequence for STXBP1 (NM_003165.1,485-503).
gagcagccaaagtcatcaa

SEQ ID NO: 271001 - DNA, 19 bp, Homo sapiens
  siRNA target sequence for STXBP1 (NM_003165.1,512-530).
cggaaatcaatattgcatt

SEQ ID NO: 271002 - DNA, 19 bp, Homo sapiens
  siRNA target sequence for STXBP1 (NM_003165.1,513-531).
ggaaatcaatattgcattt

SEQ ID NO: 271003 - DNA, 19 bp, Homo sapiens
  siRNA target sequence for STXBP1 (NM_003165.1,526-544).
gcatttctcccgtatgaat

SEQ ID NO: 271004 - DNA, 19 bp, Homo sapiens
  siRNA target sequence for STXBP1 (NM_003165.1,741-759).
caagctcgatgcctataaa

SEQ ID NO: 271005 - DNA, 19 bp, Homo sapiens
  siRNA target sequence for STXBP1 (NM_003165.1,744-762).
gctcgatgcctataaagct

SEQ ID NO: 271006 - DNA, 19 bp, Homo sapiens
  siRNA target sequence for STXBP1 (NM_003165.1,844-862).
cctgtgctccatgaattga

SEQ ID NO: 271007 - DNA, 19 bp, Homo sapiens
  siRNA target sequence for STXBP1 (NM_003165.1,847-865).
gtgctccatgaattgactt

SEQ ID NO: 271008 - DNA, 19 bp, Homo sapiens
  siRNA target sequence for STXBP1 (NM_003165.1,849-867).
gctccatgaattgactttt

SEQ ID NO: 271009 - DNA, 19 bp, Homo sapiens
  siRNA target sequence for STXBP1 (NM_003165.1,883-901).
gatctgctgcctatcgaaa

SEQ ID NO: 271010 - DNA, 19 bp, Homo sapiens
  siRNA target sequence for STXBP1 (NM_003165.1,1029-1047).
cacccggtctctgaaagat

SEQ ID NO: 271011 - DNA, 19 bp, Homo sapiens
  siRNA target sequence for STXBP1 (NM_003165.1,1031-1049).
cccggtctctgaaagattt

SEQ ID NO: 271012 - DNA, 19 bp, Homo sapiens
  siRNA target sequence for STXBP1 (NM_003165.1,1032-1050).
ccggtctctgaaagatttt

SEQ ID NO: 271013 - DNA, 19 bp, Homo sapiens
  siRNA target sequence for STXBP1 (NM_003165.1,1033-1051).
cggtctctgaaagattttt

SEQ ID NO: 271014 - DNA, 19 bp, Homo sapiens
  siRNA target sequence for STXBP1 (NM_003165.1,1174-1192).
gaggactgtatgaagcatt

SEQ ID NO: 271015 - DNA, 19 bp, Homo sapiens
  siRNA target sequence for STXBP1 (NM_003165.1,1179-1197).
ctgtatgaagcattaccaa

SEQ ID NO: 271016 - DNA, 19 bp, Homo sapiens
  siRNA target sequence for STXBP1 (NM_003165.1,1198-1216).
ggcaccgtagacaaactct

SEQ ID NO: 271017 - DNA, 19 bp, Homo sapiens
  siRNA target sequence for STXBP1 (NM_003165.1,1310-1328).
ccaatgtcagcacttatga

SEQ ID NO: 271018 - DNA, 19 bp, Homo sapiens
  siRNA target sequence for STXBP1 (NM_003165.1,1370-1388).
gcatcacggaggaaaacct

SEQ ID NO: 271019 - DNA, 19 bp, Homo sapiens
  siRNA target sequence for STXBP1 (NM_003165.1,1421-1439).
cggaggatagtgagatcat

SEQ ID NO: 271020 - DNA, 19 bp, Homo sapiens
  siRNA target sequence for STXBP1 (NM_003165.1,1547-1565).
cacggtggactccgattat

SEQ ID NO: 271021 - DNA, 19 bp, Homo sapiens
  siRNA target sequence for STXBP1 (NM_003165.1,1549-1567).
cggtggactccgattatca

SEQ ID NO: 271022 - DNA, 19 bp, Homo sapiens
  siRNA target sequence for STXBP1 (NM_003165.1,1550-1568).
ggtggactccgattatcaa

SEQ ID NO: 271023 - DNA, 19 bp, Homo sapiens
  siRNA target sequence for STXBP1 (NM_003165.1,1559-1577).
cgattatcaaggacatcat

SEQ ID NO: 271024 - DNA, 19 bp, Homo sapiens
  siRNA target sequence for STXBP1 (NM_003165.1,1607-1625).
ccaaacactacccttatat

SEQ ID NO: 271025 - DNA, 19 bp, Homo sapiens
  siRNA target sequence for STXBP1 (NM_003165.1,1612-1630).
cactacccttatatctcta

SEQ ID NO: 271026 - DNA, 19 bp, Homo sapiens
  siRNA target sequence for STXBP1 (NM_003165.1,1751-1769).
gtgtgagcctgaatgagat

SEQ ID NO: 271027 - DNA, 19 bp, Homo sapiens
  siRNA target sequence for STXBP1 (NM_003165.1,1812-1830).
ggtgctgataggttctact

SEQ ID NO: 271028 - DNA, 19 bp, Homo sapiens
  siRNA target sequence for STXBP1 (NM_003165.1,1818-1836).
gataggttctactcacatt

SEQ ID NO: 271029 - DNA, 19 bp, Homo sapiens
  siRNA target sequence for STXBP1 (NM_003165.1,1885-1903).
gagtcctctagggtatctt

SEQ ID NO: 271030 - DNA, 19 bp, Homo sapiens
  siRNA target sequence for STXBP1 (NM_003165.1,1889-1907).
cctctagggtatcttttga

SEQ ID NO: 271031 - DNA, 19 bp, Homo sapiens
  siRNA target sequence for STXBP3 (NM_007269.1,88-106).
gtcgtgtggcagaagataa

SEQ ID NO: 271032 - DNA, 19 bp, Homo sapiens
  siRNA target sequence for STXBP3 (NM_007269.1,141-159).
cgaatggaagataatgctt

SEQ ID NO: 271033 - DNA, 19 bp, Homo sapiens
  siRNA target sequence for STXBP3 (NM_007269.1,157-175).
cttttagatgaatttacca

SEQ ID NO: 271034 - DNA, 19 bp, Homo sapiens
  siRNA target sequence for STXBP3 (NM_007269.1,166-184).
gaatttaccactaagcttt

SEQ ID NO: 271035 - DNA, 19 bp, Homo sapiens
  siRNA target sequence for STXBP3 (NM_007269.1,197-215).
gcaaaatgacagatcttct

SEQ ID NO: 271036 - DNA, 19 bp, Homo sapiens
  siRNA target sequence for STXBP3 (NM_007269.1,224-242).
gtattactgttgtagagaa

SEQ ID NO: 271037 - DNA, 19 bp, Homo sapiens
  siRNA target sequence for STXBP3 (NM_007269.1,232-250).
gttgtagagaatatttata

SEQ ID NO: 271038 - DNA, 19 bp, Homo sapiens
  siRNA target sequence for STXBP3 (NM_007269.1,256-274).
cgtgaacctgtcagacaaa

SEQ ID NO: 271039 - DNA, 19 bp, Homo sapiens
  siRNA target sequence for STXBP3 (NM_007269.1,259-277).
gaacctgtcagacaaatga

SEQ ID NO: 271040 - DNA, 19 bp, Homo sapiens
  siRNA target sequence for STXBP3 (NM_007269.1,294-312).
cactccgacatcaaagtct

SEQ ID NO: 271041 - DNA, 19 bp, Homo sapiens
  siRNA target sequence for STXBP3 (NM_007269.1,300-318).
gacatcaaagtctgtagat

SEQ ID NO: 271042 - DNA, 19 bp, Homo sapiens
  siRNA target sequence for STXBP3 (NM_007269.1,309-327).
gtctgtagattgtttctta

SEQ ID NO: 271043 - DNA, 19 bp, Homo sapiens
  siRNA target sequence for STXBP3 (NM_007269.1,338-356).
caagtaaatcggagaacaa

SEQ ID NO: 271044 - DNA, 19 bp, Homo sapiens
  siRNA target sequence for STXBP3 (NM_007269.1,341-359).
gtaaatcggagaacaagta

SEQ ID NO: 271045 - DNA, 19 bp, Homo sapiens
  siRNA target sequence for STXBP3 (NM_007269.1,489-507).
ggtgtatactcttgatgta

SEQ ID NO: 271046 - DNA, 19 bp, Homo sapiens
  siRNA target sequence for STXBP3 (NM_007269.1,508-526).
ccagatgcattctattact

SEQ ID NO: 271047 - DNA, 19 bp, Homo sapiens
  siRNA target sequence for STXBP3 (NM_007269.1,562-580).
gatgccattatggaaacaa

SEQ ID NO: 271048 - DNA, 19 bp, Homo sapiens
  siRNA target sequence for STXBP3 (NM_007269.1,578-596).
caatggctgaccagatagt

SEQ ID NO: 271049 - DNA, 19 bp, Homo sapiens
  siRNA target sequence for STXBP3 (NM_007269.1,625-643).
cccggagtaagatataaaa

SEQ ID NO: 271050 - DNA, 19 bp, Homo sapiens
  siRNA target sequence for STXBP3 (NM_007269.1,627-645).
cggagtaagatataaaagt

SEQ ID NO: 271051 - DNA, 19 bp, Homo sapiens
  siRNA target sequence for STXBP3 (NM_007269.1,743-761).
ctcattcacagctcttaat

SEQ ID NO: 271052 - DNA, 19 bp, Homo sapiens
  siRNA target sequence for STXBP3 (NM_007269.1,745-763).
cattcacagctcttaataa

SEQ ID NO: 271053 - DNA, 19 bp, Homo sapiens
  siRNA target sequence for STXBP3 (NM_007269.1,749-767).
cacagctcttaataattga

SEQ ID NO: 271054 - DNA, 19 bp, Homo sapiens
  siRNA target sequence for STXBP3 (NM_007269.1,818-836).
caatggcatatgatctact

SEQ ID NO: 271055 - DNA, 19 bp, Homo sapiens
  siRNA target sequence for STXBP3 (NM_007269.1,824-842).
catatgatctactaccaat

SEQ ID NO: 271056 - DNA, 19 bp, Homo sapiens
  siRNA target sequence for STXBP3 (NM_007269.1,829-847).
gatctactaccaattgaga

SEQ ID NO: 271057 - DNA, 19 bp, Homo sapiens
  siRNA target sequence for STXBP3 (NM_007269.1,912-930).
cctctgggttagaattcga

SEQ ID NO: 271058 - DNA, 19 bp, Homo sapiens
  siRNA target sequence for STXBP3 (NM_007269.1,923-941).
gaattcgacatcgacatat

SEQ ID NO: 271059 - DNA, 19 bp, Homo sapiens
  siRNA target sequence for STXBP3 (NM_007269.1,935-953).
gacatattgcggttgtgtt

SEQ ID NO: 271060 - DNA, 19 bp, Homo sapiens
  siRNA target sequence for STXBP3 (NM_007269.1,944-962).
cggttgtgttagaggaaat

SEQ ID NO: 271061 - DNA, 19 bp, Homo sapiens
  siRNA target sequence for STXBP3 (NM_007269.1,945-963).
ggttgtgttagaggaaatt

SEQ ID NO: 271062 - DNA, 19 bp, Homo sapiens
  siRNA target sequence for STXBP3 (NM_007269.1,969-987).
gcttatgaaagaaatttca

SEQ ID NO: 271063 - DNA, 19 bp, Homo sapiens
  siRNA target sequence for STXBP3 (NM_007269.1,1093-1111).
cttaacttagcagaagatt

SEQ ID NO: 271064 - DNA, 19 bp, Homo sapiens
  siRNA target sequence for STXBP3 (NM_007269.1,1164-1182).
cctggcacttggaactgat

SEQ ID NO: 271065 - DNA, 19 bp, Homo sapiens
  siRNA target sequence for STXBP3 (NM_007269.1,1225-1243).
ccagttctactcaacaaaa

SEQ ID NO: 271066 - DNA, 19 bp, Homo sapiens
  siRNA target sequence for STXBP3 (NM_007269.1,1276-1294).
ctactttatatcttcagta

SEQ ID NO: 271067 - DNA, 19 bp, Homo sapiens
  siRNA target sequence for STXBP3 (NM_007269.1,1300-1318).
ggaactacggaagaaaatt

SEQ ID NO: 271068 - DNA, 19 bp, Homo sapiens
  siRNA target sequence for STXBP3 (NM_007269.1,1301-1319).
gaactacggaagaaaattt

SEQ ID NO: 271069 - DNA, 19 bp, Homo sapiens
  siRNA target sequence for STXBP3 (NM_007269.1,1323-1341).
caggttgatccagaatgta

SEQ ID NO: 271070 - DNA, 19 bp, Homo sapiens
  siRNA target sequence for STXBP3 (NM_007269.1,1354-1372).
gagagtgacatgattcgta

SEQ ID NO: 271071 - DNA, 19 bp, Homo sapiens
  siRNA target sequence for STXBP3 (NM_007269.1,1419-1437).
caaaccgttaagaaaggat

SEQ ID NO: 271072 - DNA, 19 bp, Homo sapiens
  siRNA target sequence for STXBP3 (NM_007269.1,1434-1452).
ggatcggtctgcagaagaa

SEQ ID NO: 271073 - DNA, 19 bp, Homo sapiens
  siRNA target sequence for STXBP3 (NM_007269.1,1464-1482).
ctctcggtggacacctttt

SEQ ID NO: 271074 - DNA, 19 bp, Homo sapiens
  siRNA target sequence for STXBP3 (NM_007269.1,1466-1484).
ctcggtggacaccttttat

SEQ ID NO: 271075 - DNA, 19 bp, Homo sapiens
  siRNA target sequence for STXBP3 (NM_007269.1,1468-1486).
cggtggacaccttttatca

SEQ ID NO: 271076 - DNA, 19 bp, Homo sapiens
  siRNA target sequence for STXBP3 (NM_007269.1,1469-1487).
ggtggacaccttttatcaa

SEQ ID NO: 271077 - DNA, 19 bp, Homo sapiens
  siRNA target sequence for STXBP3 (NM_007269.1,1475-1493).
caccttttatcaaagatat

SEQ ID NO: 271078 - DNA, 19 bp, Homo sapiens
  siRNA target sequence for STXBP3 (NM_007269.1,1500-1518).
ggatgctattgataataga

SEQ ID NO: 271079 - DNA, 19 bp, Homo sapiens
  siRNA target sequence for STXBP3 (NM_007269.1,1510-1528).
gataatagattagattcaa

SEQ ID NO: 271080 - DNA, 19 bp, Homo sapiens
  siRNA target sequence for STXBP3 (NM_007269.1,1551-1569).
gtgtccagcagtatggaat

SEQ ID NO: 271081 - DNA, 19 bp, Homo sapiens
  siRNA target sequence for STXBP3 (NM_007269.1,1593-1611).
ccagaaacccagagctaat

SEQ ID NO: 271082 - DNA, 19 bp, Homo sapiens
  siRNA target sequence for STXBP3 (NM_007269.1,1596-1614).
gaaacccagagctaattat

SEQ ID NO: 271083 - DNA, 19 bp, Homo sapiens
  siRNA target sequence for STXBP3 (NM_007269.1,1633-1651).
gggtcaaagctgattgttt

SEQ ID NO: 271084 - DNA, 19 bp, Homo sapiens
  siRNA target sequence for STXBP3 (NM_007269.1,1654-1672).
gtaattggagggatcacat

SEQ ID NO: 271085 - DNA, 19 bp, Homo sapiens
  siRNA target sequence for STXBP3 (NM_007269.1,1699-1717).
gtttctcaggcacataaat

SEQ ID NO: 271086 - DNA, 19 bp, Homo sapiens
  siRNA target sequence for STXBP3 (NM_007269.1,1711-1729).
cataaatcctgtgaagtta

SEQ ID NO: 271087 - DNA, 19 bp, Homo sapiens
  siRNA target sequence for STXBP3 (NM_007269.1,1735-1753).
ggttctacacatgttttaa

SEQ ID NO: 271088 - DNA, 19 bp, Homo sapiens
  siRNA target sequence for STXBP3 (NM_007269.1,1774-1792).
gatataaagatgctgaata

SEQ ID NO: 271089 - DNA, 19 bp, Homo sapiens
  siRNA target sequence for STXBP3 (NM_007269.1,1800-1818).
ggataaagtctccttaatt

SEQ ID NO: 271090 - DNA, 19 bp, Homo sapiens
  siRNA target sequence for STXBP3 (NM_007269.1,1801-1819).
gataaagtctccttaatta

SEQ ID NO: 271091 - DNA, 19 bp, Homo sapiens
  siRNA target sequence for SYBL1 (NM_005638.3,150-168).
cactatccttgccaaacat

SEQ ID NO: 271092 - DNA, 19 bp, Homo sapiens
  siRNA target sequence for SYBL1 (NM_005638.3,204-222).
gcagattctggctaagata

SEQ ID NO: 271093 - DNA, 19 bp, Homo sapiens
  siRNA target sequence for SYBL1 (NM_005638.3,213-231).
ggctaagataccttctgaa

SEQ ID NO: 271094 - DNA, 19 bp, Homo sapiens
  siRNA target sequence for SYBL1 (NM_005638.3,214-232).
gctaagataccttctgaaa

SEQ ID NO: 271095 - DNA, 19 bp, Homo sapiens
  siRNA target sequence for SYBL1 (NM_005638.3,245-263).
cgtactcacatggcaatta

SEQ ID NO: 271096 - DNA, 19 bp, Homo sapiens
  siRNA target sequence for SYBL1 (NM_005638.3,246-264).
gtactcacatggcaattat

SEQ ID NO: 271097 - DNA, 19 bp, Homo sapiens
  siRNA target sequence for SYBL1 (NM_005638.3,257-275).
gcaattatttgtttcatta

SEQ ID NO: 271098 - DNA, 19 bp, Homo sapiens
  siRNA target sequence for SYBL1 (NM_005638.3,279-297).
ctgccaagacaggattgta

SEQ ID NO: 271099 - DNA, 19 bp, Homo sapiens
  siRNA target sequence for SYBL1 (NM_005638.3,281-299).
gccaagacaggattgtata

SEQ ID NO: 271100 - DNA, 19 bp, Homo sapiens
  siRNA target sequence for SYBL1 (NM_005638.3,282-300).
ccaagacaggattgtatat

SEQ ID NO: 271101 - DNA, 19 bp, Homo sapiens
  siRNA target sequence for SYBL1 (NM_005638.3,286-304).
gacaggattgtatatcttt

SEQ ID NO: 271102 - DNA, 19 bp, Homo sapiens
  siRNA target sequence for SYBL1 (NM_005638.3,290-308).
ggattgtatatctttgtat

SEQ ID NO: 271103 - DNA, 19 bp, Homo sapiens
  siRNA target sequence for SYBL1 (NM_005638.3,328-346).
cgttcccgagcctttaatt

SEQ ID NO: 271104 - DNA, 19 bp, Homo sapiens
  siRNA target sequence for SYBL1 (NM_005638.3,332-350).
cccgagcctttaattttct

SEQ ID NO: 271105 - DNA, 19 bp, Homo sapiens
  siRNA target sequence for SYBL1 (NM_005638.3,426-444).
cgagttctcaagtgtctta

SEQ ID NO: 271106 - DNA, 19 bp, Homo sapiens
  siRNA target sequence for SYBL1 (NM_005638.3,531-549).
catggtcagaaacatagat

SEQ ID NO: 271107 - DNA, 19 bp, Homo sapiens
  siRNA target sequence for SYBL1 (NM_005638.3,557-575).
ctcagcgaggagaaagatt

SEQ ID NO: 271108 - DNA, 19 bp, Homo sapiens
  siRNA target sequence for SYBL1 (NM_005638.3,562-580).
cgaggagaaagattggaat

SEQ ID NO: 271109 - DNA, 19 bp, Homo sapiens
  siRNA target sequence for SYBL1 (NM_005638.3,572-590).
gattggaattattgattga

SEQ ID NO: 271110 - DNA, 19 bp, Homo sapiens
  siRNA target sequence for SYBL1 (NM_005638.3,646-664).
cttgctcgagccatgtgta

SEQ ID NO: 271111 - DNA, 19 bp, Homo sapiens
  siRNA target sequence for SYBL1 (NM_005638.3,650-668).
ctcgagccatgtgtatgaa

SEQ ID NO: 271112 - DNA, 19 bp, Homo sapiens
  siRNA target sequence for SYBL1 (NM_005638.3,652-670).
cgagccatgtgtatgaaga

SEQ ID NO: 271113 - DNA, 19 bp, Homo sapiens
  siRNA target sequence for SYBL1 (NM_005638.3,669-687).
gaacctcaagctcactatt

SEQ ID NO: 271114 - DNA, 19 bp, Homo sapiens
  siRNA target sequence for SYBL1 (NM_005638.3,690-708).
catcatcatcgtatcaatt

SEQ ID NO: 271115 - DNA, 19 bp, Homo sapiens
  siRNA target sequence for SYBL1 (NM_005638.3,700-718).
gtatcaattgtgttcatct

SEQ ID NO: 271116 - DNA, 19 bp, Homo sapiens
  siRNA target sequence for SYBL1 (NM_005638.3,733-751).
cctctctgtggtggattta

SEQ ID NO: 271117 - DNA, 19 bp, Homo sapiens
  siRNA target sequence for TLOC1 (NM_003262.2,656-674).
gtgaaccatctaaagaaga

SEQ ID NO: 271118 - DNA, 19 bp, Homo sapiens
  siRNA target sequence for TLOC1 (NM_003262.2,686-704).
ccaagtatcttcgattcaa

SEQ ID NO: 271119 - DNA, 19 bp, Homo sapiens
  siRNA target sequence for TLOC1 (NM_003262.2,698-716).
gattcaactgtccaacaaa

SEQ ID NO: 271120 - DNA, 19 bp, Homo sapiens
  siRNA target sequence for TLOC1 (NM_003262.2,732-750).
gggtcaccgggttgattat

SEQ ID NO: 271121 - DNA, 19 bp, Homo sapiens
  siRNA target sequence for TLOC1 (NM_003262.2,733-751).
ggtcaccgggttgattatt

SEQ ID NO: 271122 - DNA, 19 bp, Homo sapiens
  siRNA target sequence for TLOC1 (NM_003262.2,734-752).
gtcaccgggttgattattt

SEQ ID NO: 271123 - DNA, 19 bp, Homo sapiens
  siRNA target sequence for TLOC1 (NM_003262.2,736-754).
caccgggttgattatttta

SEQ ID NO: 271124 - DNA, 19 bp, Homo sapiens
  siRNA target sequence for TLOC1 (NM_003262.2,738-756).
ccgggttgattattttatt

SEQ ID NO: 271125 - DNA, 19 bp, Homo sapiens
  siRNA target sequence for TLOC1 (NM_003262.2,836-854).
gggagtctgtggttgacta

SEQ ID NO: 271126 - DNA, 19 bp, Homo sapiens
  siRNA target sequence for TLOC1 (NM_003262.2,852-870).
ctactgcaacaggctttta

SEQ ID NO: 271127 - DNA, 19 bp, Homo sapiens
  siRNA target sequence for TLOC1 (NM_003262.2,889-907).
cgagccctaaaagtaatga

SEQ ID NO: 271128 - DNA, 19 bp, Homo sapiens
  siRNA target sequence for TLOC1 (NM_003262.2,890-908).
gagccctaaaagtaatgaa

SEQ ID NO: 271129 - DNA, 19 bp, Homo sapiens
  siRNA target sequence for TLOC1 (NM_003262.2,892-910).
gccctaaaagtaatgaaaa

SEQ ID NO: 271130 - DNA, 19 bp, Homo sapiens
  siRNA target sequence for TLOC1 (NM_003262.2,1274-1292).
gagtaggtgtttattacct

SEQ ID NO: 271131 - DNA, 19 bp, Homo sapiens
  siRNA target sequence for TLOC1 (NM_003262.2,1299-1317).
gggtgcaggctgttttgta

SEQ ID NO: 271132 - DNA, 19 bp, Homo sapiens
  siRNA target sequence for TLOC1 (NM_003262.2,1349-1367).
gcattctatttctcatcat

SEQ ID NO: 271133 - DNA, 19 bp, Homo sapiens
  siRNA target sequence for TLOC1 (NM_003262.2,1360-1378).
ctcatcatttggctcataa

SEQ ID NO: 271134 - DNA, 19 bp, Homo sapiens
  siRNA target sequence for TLOC1 (NM_003262.2,1362-1380).
catcatttggctcataact

SEQ ID NO: 271135 - DNA, 19 bp, Homo sapiens
  siRNA target sequence for TLOC1 (NM_003262.2,1474-1492).
ggaccaaaagcagacttaa

SEQ ID NO: 271136 - DNA, 19 bp, Homo sapiens
  siRNA target sequence for TLOC1 (NM_003262.2,1475-1493).
gaccaaaagcagacttaaa

SEQ ID NO: 271137 - DNA, 19 bp, Homo sapiens
  siRNA target sequence for TLOC1 (NM_003262.2,1619-1637).
ggggagaacggcattcaga

SEQ ID NO: 271138 - DNA, 19 bp, Homo sapiens
  siRNA target sequence for TOM1 (NM_005488.1,209-227).
gccctccgagcagtaaaga

SEQ ID NO: 271139 - DNA, 19 bp, Homo sapiens
  siRNA target sequence for TOM1 (NM_005488.1,210-228).
ccctccgagcagtaaagaa

SEQ ID NO: 271140 - DNA, 19 bp, Homo sapiens
  siRNA target sequence for TOM1 (NM_005488.1,265-283).
gctggctctcacagtctta

SEQ ID NO: 271141 - DNA, 19 bp, Homo sapiens
  siRNA target sequence for TOM1 (NM_005488.1,284-302).
gaaacctgtgtcaagaact

SEQ ID NO: 271142 - DNA, 19 bp, Homo sapiens
  siRNA target sequence for TOM1 (NM_005488.1,555-573).
cccagaggaccgtgttcaa

SEQ ID NO: 271143 - DNA, 19 bp, Homo sapiens
  siRNA target sequence for TOM1 (NM_005488.1,557-575).
cagaggaccgtgttcaact

SEQ ID NO: 271144 - DNA, 19 bp, Homo sapiens
  siRNA target sequence for TOM1 (NM_005488.1,926-944).
gacaatctcaacaatgtgt

SEQ ID NO: 271145 - DNA, 19 bp, Homo sapiens
  siRNA target sequence for TOM1 (NM_005488.1,949-967).
gcgccatgaacggtttgaa

SEQ ID NO: 271146 - DNA, 19 bp, Homo sapiens
  siRNA target sequence for TOM1 (NM_005488.1,1137-1155).
ctggtcgactggaagatga

SEQ ID NO: 271147 - DNA, 19 bp, Homo sapiens
  siRNA target sequence for TOM1 (NM_005488.1,1140-1158).
gtcgactggaagatgagtt

SEQ ID NO: 271148 - DNA, 19 bp, Homo sapiens
  siRNA target sequence for TOM1 (NM_005488.1,1204-1222).
gaaagaggtaaaatacgaa

SEQ ID NO: 271149 - DNA, 19 bp, Homo sapiens
  siRNA target sequence for TOM1 (NM_005488.1,1335-1353).
ccactgacgtgggtaatga

SEQ ID NO: 271150 - DNA, 19 bp, Homo sapiens
  siRNA target sequence for TOM1 (NM_005488.1,1370-1388).
ggggtcaccagcgaagaat

SEQ ID NO: 271151 - DNA, 19 bp, Homo sapiens
  siRNA target sequence for TOM1 (NM_005488.1,1371-1389).
gggtcaccagcgaagaatt

SEQ ID NO: 271152 - DNA, 19 bp, Homo sapiens
  siRNA target sequence for TOM1 (NM_005488.1,1372-1390).
ggtcaccagcgaagaattt

SEQ ID NO: 271153 - DNA, 19 bp, Homo sapiens
  siRNA target sequence for TOM1 (NM_005488.1,1377-1395).
ccagcgaagaatttgacaa

SEQ ID NO: 271154 - DNA, 19 bp, Homo sapiens
  siRNA target sequence for TOM1 (NM_005488.1,1380-1398).
gcgaagaatttgacaaatt

SEQ ID NO: 271155 - DNA, 19 bp, Homo sapiens
  siRNA target sequence for TOM1L1 (NM_005486.1,72-90).
cgtgggccacctcatagaa

SEQ ID NO: 271156 - DNA, 19 bp, Homo sapiens
  siRNA target sequence for TOM1L1 (NM_005486.1,73-91).
gtgggccacctcatagaaa

SEQ ID NO: 271157 - DNA, 19 bp, Homo sapiens
  siRNA target sequence for TOM1L1 (NM_005486.1,207-225).
gatttccaaaaactacaat

SEQ ID NO: 271158 - DNA, 19 bp, Homo sapiens
  siRNA target sequence for TOM1L1 (NM_005486.1,245-263).
ccttgtcacttattgacat

SEQ ID NO: 271159 - DNA, 19 bp, Homo sapiens
  siRNA target sequence for TOM1L1 (NM_005486.1,340-358).
ctactgaatcccagataca

SEQ ID NO: 271160 - DNA, 19 bp, Homo sapiens
  siRNA target sequence for TOM1L1 (NM_005486.1,353-371).
gatacaacttgccattaga

SEQ ID NO: 271161 - DNA, 19 bp, Homo sapiens
  siRNA target sequence for TOM1L1 (NM_005486.1,357-375).
caacttgccattagacatt

SEQ ID NO: 271162 - DNA, 19 bp, Homo sapiens
  siRNA target sequence for TOM1L1 (NM_005486.1,363-381).
gccattagacattcagaat

SEQ ID NO: 271163 - DNA, 19 bp, Homo sapiens
  siRNA target sequence for TOM1L1 (NM_005486.1,364-382).
ccattagacattcagaata

SEQ ID NO: 271164 - DNA, 19 bp, Homo sapiens
  siRNA target sequence for TOM1L1 (NM_005486.1,459-477).
cctcgacctggttaagaaa

SEQ ID NO: 271165 - DNA, 19 bp, Homo sapiens
  siRNA target sequence for TOM1L1 (NM_005486.1,521-539).
gacaagagactgctcaaat

SEQ ID NO: 271166 - DNA, 19 bp, Homo sapiens
  siRNA target sequence for TOM1L1 (NM_005486.1,523-541).
caagagactgctcaaatct

SEQ ID NO: 271167 - DNA, 19 bp, Homo sapiens
  siRNA target sequence for TOM1L1 (NM_005486.1,526-544).
gagactgctcaaatctcat

SEQ ID NO: 271168 - DNA, 19 bp, Homo sapiens
  siRNA target sequence for TOM1L1 (NM_005486.1,530-548).
ctgctcaaatctcatcaaa

SEQ ID NO: 271169 - DNA, 19 bp, Homo sapiens
  siRNA target sequence for TOM1L1 (NM_005486.1,589-607).
gtaattgctccaaagaact

SEQ ID NO: 271170 - DNA, 19 bp, Homo sapiens
  siRNA target sequence for TOM1L1 (NM_005486.1,617-635).
cattggtcccagaacagat

SEQ ID NO: 271171 - DNA, 19 bp, Homo sapiens
  siRNA target sequence for TOM1L1 (NM_005486.1,624-642).
cccagaacagattggaaaa

SEQ ID NO: 271172 - DNA, 19 bp, Homo sapiens
  siRNA target sequence for TOM1L1 (NM_005486.1,657-675).
ggatatggtgaaaatgaat

SEQ ID NO: 271173 - DNA, 19 bp, Homo sapiens
  siRNA target sequence for TOM1L1 (NM_005486.1,680-698).
gagtgatgtccgccatatt

SEQ ID NO: 271174 - DNA, 19 bp, Homo sapiens
  siRNA target sequence for TOM1L1 (NM_005486.1,682-700).
gtgatgtccgccatattga

SEQ ID NO: 271175 - DNA, 19 bp, Homo sapiens
  siRNA target sequence for TOM1L1 (NM_005486.1,691-709).
gccatattgatggagaata

SEQ ID NO: 271176 - DNA, 19 bp, Homo sapiens
  siRNA target sequence for TOM1L1 (NM_005486.1,742-760).
cttctgcagaaactctata

SEQ ID NO: 271177 - DNA, 19 bp, Homo sapiens
  siRNA target sequence for TOM1L1 (NM_005486.1,810-828).
ggagaacgaagatgtaact

SEQ ID NO: 271178 - DNA, 19 bp, Homo sapiens
  siRNA target sequence for TOM1L1 (NM_005486.1,813-831).
gaacgaagatgtaactgtt

SEQ ID NO: 271179 - DNA, 19 bp, Homo sapiens
  siRNA target sequence for TOM1L1 (NM_005486.1,841-859).
caggtgaatgaggatttga

SEQ ID NO: 271180 - DNA, 19 bp, Homo sapiens
  siRNA target sequence for TOM1L1 (NM_005486.1,843-861).
ggtgaatgaggatttgaat

SEQ ID NO: 271181 - DNA, 19 bp, Homo sapiens
  siRNA target sequence for TOM1L1 (NM_005486.1,850-868).
gaggatttgaataatgcta

SEQ ID NO: 271182 - DNA, 19 bp, Homo sapiens
  siRNA target sequence for TOM1L1 (NM_005486.1,874-892).
ggatatgagaggtttacta

SEQ ID NO: 271183 - DNA, 19 bp, Homo sapiens
  siRNA target sequence for TOM1L1 (NM_005486.1,890-908).
ctagaaaccaacaaaggat

SEQ ID NO: 271184 - DNA, 19 bp, Homo sapiens
  siRNA target sequence for TOM1L1 (NM_005486.1,1027-1045).
gaactcaacaccatgaata

SEQ ID NO: 271185 - DNA, 19 bp, Homo sapiens
  siRNA target sequence for TOM1L1 (NM_005486.1,1035-1053).
caccatgaataatcaactt

SEQ ID NO: 271186 - DNA, 19 bp, Homo sapiens
  siRNA target sequence for TOM1L1 (NM_005486.1,1038-1056).
catgaataatcaactttca

SEQ ID NO: 271187 - DNA, 19 bp, Homo sapiens
  siRNA target sequence for TOM1L1 (NM_005486.1,1068-1086).
cagccttccaagttctgat

SEQ ID NO: 271188 - DNA, 19 bp, Homo sapiens
  siRNA target sequence for TOM1L1 (NM_005486.1,1072-1090).
cttccaagttctgatgtaa

SEQ ID NO: 271189 - DNA, 19 bp, Homo sapiens
  siRNA target sequence for TOM1L1 (NM_005486.1,1075-1093).
ccaagttctgatgtaacaa

SEQ ID NO: 271190 - DNA, 19 bp, Homo sapiens
  siRNA target sequence for TOM1L1 (NM_005486.1,1076-1094).
caagttctgatgtaacaaa

SEQ ID NO: 271191 - DNA, 19 bp, Homo sapiens
  siRNA target sequence for TOM1L1 (NM_005486.1,1082-1100).
ctgatgtaacaaacaactt

SEQ ID NO: 271192 - DNA, 19 bp, Homo sapiens
  siRNA target sequence for TOM1L1 (NM_005486.1,1131-1149).
gctagccttggagaataca

SEQ ID NO: 271193 - DNA, 19 bp, Homo sapiens
  siRNA target sequence for TOM1L1 (NM_005486.1,1190-1208).
cctcaagccacgcatatga

SEQ ID NO: 271194 - DNA, 19 bp, Homo sapiens
  siRNA target sequence for TOM1L1 (NM_005486.1,1193-1211).
caagccacgcatatgataa

SEQ ID NO: 271195 - DNA, 19 bp, Homo sapiens
  siRNA target sequence for TOM1L1 (NM_005486.1,1197-1215).
ccacgcatatgataatttt

SEQ ID NO: 271196 - DNA, 19 bp, Homo sapiens
  siRNA target sequence for TOM1L1 (NM_005486.1,1243-1261).
cagccagttagtctacaaa

SEQ ID NO: 271197 - DNA, 19 bp, Homo sapiens
  siRNA target sequence for TOM1L1 (NM_005486.1,1247-1265).
cagttagtctacaaaccat

SEQ ID NO: 271198 - DNA, 19 bp, Homo sapiens
  siRNA target sequence for TOM1L1 (NM_005486.1,1316-1334).
cagcgatgacaaaaagtga

SEQ ID NO: 271199 - DNA, 19 bp, Homo sapiens
  siRNA target sequence for TOM1L1 (NM_005486.1,1333-1351).
gatctccagccacctaatt

SEQ ID NO: 271200 - DNA, 19 bp, Homo sapiens
  siRNA target sequence for TOM1L1 (NM_005486.1,1336-1354).
ctccagccacctaattact

SEQ ID NO: 271201 - DNA, 19 bp, Homo sapiens
  siRNA target sequence for VDP (NM_003715.1,230-248).
gaagccgagacgattcaaa

SEQ ID NO: 271202 - DNA, 19 bp, Homo sapiens
  siRNA target sequence for VDP (NM_003715.1,234-252).
ccgagacgattcaaaagct

SEQ ID NO: 271203 - DNA, 19 bp, Homo sapiens
  siRNA target sequence for VDP (NM_003715.1,235-253).
cgagacgattcaaaagctt

SEQ ID NO: 271204 - DNA, 19 bp, Homo sapiens
  siRNA target sequence for VDP (NM_003715.1,261-279).
gagtagcttcatctacttt

SEQ ID NO: 271205 - DNA, 19 bp, Homo sapiens
  siRNA target sequence for VDP (NM_003715.1,263-281).
gtagcttcatctactttat

SEQ ID NO: 271206 - DNA, 19 bp, Homo sapiens
  siRNA target sequence for VDP (NM_003715.1,299-317).
gctgttcgtgctctcaaat

SEQ ID NO: 271207 - DNA, 19 bp, Homo sapiens
  siRNA target sequence for VDP (NM_003715.1,302-320).
gttcgtgctctcaaatcat

SEQ ID NO: 271208 - DNA, 19 bp, Homo sapiens
  siRNA target sequence for VDP (NM_003715.1,305-323).
cgtgctctcaaatcattat

SEQ ID NO: 271209 - DNA, 19 bp, Homo sapiens
  siRNA target sequence for VDP (NM_003715.1,336-354).
gcttggaagtgggtataca

SEQ ID NO: 271210 - DNA, 19 bp, Homo sapiens
  siRNA target sequence for VDP (NM_003715.1,337-355).
cttggaagtgggtatacaa

SEQ ID NO: 271211 - DNA, 19 bp, Homo sapiens
  siRNA target sequence for VDP (NM_003715.1,346-364).
gggtatacaagctatggaa

SEQ ID NO: 271212 - DNA, 19 bp, Homo sapiens
  siRNA target sequence for VDP (NM_003715.1,357-375).
ctatggaacatcttattca

SEQ ID NO: 271213 - DNA, 19 bp, Homo sapiens
  siRNA target sequence for VDP (NM_003715.1,383-401).
caaacagatcgttcagatt

SEQ ID NO: 271214 - DNA, 19 bp, Homo sapiens
  siRNA target sequence for VDP (NM_003715.1,398-416).
gattctgaaataataggtt

SEQ ID NO: 271215 - DNA, 19 bp, Homo sapiens
  siRNA target sequence for VDP (NM_003715.1,404-422).
gaaataataggttatgctt

SEQ ID NO: 271216 - DNA, 19 bp, Homo sapiens
  siRNA target sequence for VDP (NM_003715.1,568-586).
ggaggagtttgatttccat

SEQ ID NO: 271217 - DNA, 19 bp, Homo sapiens
  siRNA target sequence for VDP (NM_003715.1,599-617).
ggtgtgaagcttcttactt

SEQ ID NO: 271218 - DNA, 19 bp, Homo sapiens
  siRNA target sequence for VDP (NM_003715.1,635-653).
gggcctcaggtgcaacaaa

SEQ ID NO: 271219 - DNA, 19 bp, Homo sapiens
  siRNA target sequence for VDP (NM_003715.1,636-654).
ggcctcaggtgcaacaaat

SEQ ID NO: 271220 - DNA, 19 bp, Homo sapiens
  siRNA target sequence for VDP (NM_003715.1,638-656).
cctcaggtgcaacaaatta

SEQ ID NO: 271221 - DNA, 19 bp, Homo sapiens
  siRNA target sequence for VDP (NM_003715.1,668-686).
cctatgggtgtttcaagat

SEQ ID NO: 271222 - DNA, 19 bp, Homo sapiens
  siRNA target sequence for VDP (NM_003715.1,681-699).
caagattgatggacttact

SEQ ID NO: 271223 - DNA, 19 bp, Homo sapiens
  siRNA target sequence for VDP (NM_003715.1,701-719).
gcggattccagggaagtta

SEQ ID NO: 271224 - DNA, 19 bp, Homo sapiens
  siRNA target sequence for VDP (NM_003715.1,708-726).
ccagggaagttatacgtaa

SEQ ID NO: 271225 - DNA, 19 bp, Homo sapiens
  siRNA target sequence for VDP (NM_003715.1,709-727).
cagggaagttatacgtaat

SEQ ID NO: 271226 - DNA, 19 bp, Homo sapiens
  siRNA target sequence for VDP (NM_003715.1,711-729).
gggaagttatacgtaatga

SEQ ID NO: 271227 - DNA, 19 bp, Homo sapiens
  siRNA target sequence for VDP (NM_003715.1,712-730).
ggaagttatacgtaatgat

SEQ ID NO: 271228 - DNA, 19 bp, Homo sapiens
  siRNA target sequence for VDP (NM_003715.1,740-758).
ctactgcaggcactaacaa

SEQ ID NO: 271229 - DNA, 19 bp, Homo sapiens
  siRNA target sequence for VDP (NM_003715.1,743-761).
ctgcaggcactaacaagaa

SEQ ID NO: 271230 - DNA, 19 bp, Homo sapiens
  siRNA target sequence for VDP (NM_003715.1,748-766).
ggcactaacaagaagcaat

SEQ ID NO: 271231 - DNA, 19 bp, Homo sapiens
  siRNA target sequence for VDP (NM_003715.1,806-824).
gagagactactggacatta

SEQ ID NO: 271232 - DNA, 19 bp, Homo sapiens
  siRNA target sequence for VDP (NM_003715.1,808-826).
gagactactggacattatt

SEQ ID NO: 271233 - DNA, 19 bp, Homo sapiens
  siRNA target sequence for VDP (NM_003715.1,838-856).
gaacagtgatggaggtata

SEQ ID NO: 271234 - DNA, 19 bp, Homo sapiens
  siRNA target sequence for VDP (NM_003715.1,841-859).
cagtgatggaggtatagta

SEQ ID NO: 271235 - DNA, 19 bp, Homo sapiens
  siRNA target sequence for VDP (NM_003715.1,857-875).
gtagttgaagattgtttga

SEQ ID NO: 271236 - DNA, 19 bp, Homo sapiens
  siRNA target sequence for VDP (NM_003715.1,901-919).
caacaactccaatcaaaat

SEQ ID NO: 271237 - DNA, 19 bp, Homo sapiens
  siRNA target sequence for VDP (NM_003715.1,907-925).
ctccaatcaaaattttttt

SEQ ID NO: 271238 - DNA, 19 bp, Homo sapiens
  siRNA target sequence for VDP (NM_003715.1,933-951).
gctcatatattcaacgtat

SEQ ID NO: 271239 - DNA, 19 bp, Homo sapiens
  siRNA target sequence for VDP (NM_003715.1,1000-1018).
gaaagtgaccaatctacat

SEQ ID NO: 271240 - DNA, 19 bp, Homo sapiens
  siRNA target sequence for VDP (NM_003715.1,1004-1022).
gtgaccaatctacatctaa

SEQ ID NO: 271241 - DNA, 19 bp, Homo sapiens
  siRNA target sequence for VDP (NM_003715.1,1008-1026).
ccaatctacatctaatgct

SEQ ID NO: 271242 - DNA, 19 bp, Homo sapiens
  siRNA target sequence for VDP (NM_003715.1,1009-1027).
caatctacatctaatgcta

SEQ ID NO: 271243 - DNA, 19 bp, Homo sapiens
  siRNA target sequence for VDP (NM_003715.1,1030-1048).
gcttgttcgtgtattggta

SEQ ID NO: 271244 - DNA, 19 bp, Homo sapiens
  siRNA target sequence for VDP (NM_003715.1,1031-1049).
cttgttcgtgtattggtat

SEQ ID NO: 271245 - DNA, 19 bp, Homo sapiens
  siRNA target sequence for VDP (NM_003715.1,1117-1135).
gcagctttgtactatccta

SEQ ID NO: 271246 - DNA, 19 bp, Homo sapiens
  siRNA target sequence for VDP (NM_003715.1,1146-1164).
gggttcctgctgatatcct

SEQ ID NO: 271247 - DNA, 19 bp, Homo sapiens
  siRNA target sequence for VDP (NM_003715.1,1162-1180).
cctgactgagaccataaat

SEQ ID NO: 271248 - DNA, 19 bp, Homo sapiens
  siRNA target sequence for VDP (NM_003715.1,1163-1181).
ctgactgagaccataaata

SEQ ID NO: 271249 - DNA, 19 bp, Homo sapiens
  siRNA target sequence for VDP (NM_003715.1,1167-1185).
ctgagaccataaatactgt

SEQ ID NO: 271250 - DNA, 19 bp, Homo sapiens
  siRNA target sequence for VDP (NM_003715.1,1169-1187).
gagaccataaatactgtat

SEQ ID NO: 271251 - DNA, 19 bp, Homo sapiens
  siRNA target sequence for VDP (NM_003715.1,1171-1189).
gaccataaatactgtatca

SEQ ID NO: 271252 - DNA, 19 bp, Homo sapiens
  siRNA target sequence for VDP (NM_003715.1,1206-1224).
gccaagtaaaccaagacta

SEQ ID NO: 271253 - DNA, 19 bp, Homo sapiens
  siRNA target sequence for VDP (NM_003715.1,1233-1251).
ctgtaaatgcaccttcaaa

SEQ ID NO: 271254 - DNA, 19 bp, Homo sapiens
  siRNA target sequence for VDP (NM_003715.1,1254-1272).
caccaagaccggcaattgt

SEQ ID NO: 271255 - DNA, 19 bp, Homo sapiens
  siRNA target sequence for VDP (NM_003715.1,1257-1275).
caagaccggcaattgtagt

SEQ ID NO: 271256 - DNA, 19 bp, Homo sapiens
  siRNA target sequence for VDP (NM_003715.1,1260-1278).
gaccggcaattgtagtact

SEQ ID NO: 271257 - DNA, 19 bp, Homo sapiens
  siRNA target sequence for VDP (NM_003715.1,1263-1281).
cggcaattgtagtacttct

SEQ ID NO: 271258 - DNA, 19 bp, Homo sapiens
  siRNA target sequence for VDP (NM_003715.1,1266-1284).
caattgtagtacttctcat

SEQ ID NO: 271259 - DNA, 19 bp, Homo sapiens
  siRNA target sequence for VDP (NM_003715.1,1379-1397).
gaaatcgtgtcaacacttt

SEQ ID NO: 271260 - DNA, 19 bp, Homo sapiens
  siRNA target sequence for VDP (NM_003715.1,1546-1564).
gttgctcagggttcaactt

SEQ ID NO: 271261 - DNA, 19 bp, Homo sapiens
  siRNA target sequence for VDP (NM_003715.1,1555-1573).
ggttcaacttgctacaagt

SEQ ID NO: 271262 - DNA, 19 bp, Homo sapiens
  siRNA target sequence for VDP (NM_003715.1,1556-1574).
gttcaacttgctacaagta

SEQ ID NO: 271263 - DNA, 19 bp, Homo sapiens
  siRNA target sequence for VDP (NM_003715.1,1698-1716).
cagtaacgcattttcttca

SEQ ID NO: 271264 - DNA, 19 bp, Homo sapiens
  siRNA target sequence for VDP (NM_003715.1,1780-1798).
gttggtccaaggcttatgt

SEQ ID NO: 271265 - DNA, 19 bp, Homo sapiens
  siRNA target sequence for VDP (NM_003715.1,1790-1808).
ggcttatgtgcccttttgt

SEQ ID NO: 271266 - DNA, 19 bp, Homo sapiens
  siRNA target sequence for VDP (NM_003715.1,1802-1820).
cttttgttgggcatttcga

SEQ ID NO: 271267 - DNA, 19 bp, Homo sapiens
  siRNA target sequence for VDP (NM_003715.1,1807-1825).
gttgggcatttcgatttat

SEQ ID NO: 271268 - DNA, 19 bp, Homo sapiens
  siRNA target sequence for VDP (NM_003715.1,1818-1836).
cgatttatttcaatgataa

SEQ ID NO: 271269 - DNA, 19 bp, Homo sapiens
  siRNA target sequence for VDP (NM_003715.1,1885-1903).
gaggattggcaaagagaat

SEQ ID NO: 271270 - DNA, 19 bp, Homo sapiens
  siRNA target sequence for VDP (NM_003715.1,1979-1997).
cccagtccagaatacatga

SEQ ID NO: 271271 - DNA, 19 bp, Homo sapiens
  siRNA target sequence for VDP (NM_003715.1,1981-1999).
cagtccagaatacatgata

SEQ ID NO: 271272 - DNA, 19 bp, Homo sapiens
  siRNA target sequence for VDP (NM_003715.1,1996-2014).
gatatttgatcatgagttt

SEQ ID NO: 271273 - DNA, 19 bp, Homo sapiens
  siRNA target sequence for VDP (NM_003715.1,2011-2029).
gtttacgaagctggtaaaa

SEQ ID NO: 271274 - DNA, 19 bp, Homo sapiens
  siRNA target sequence for VDP (NM_003715.1,2030-2048).
gaacttgaaggtgttataa

SEQ ID NO: 271275 - DNA, 19 bp, Homo sapiens
  siRNA target sequence for VDP (NM_003715.1,2033-2051).
cttgaaggtgttataacta

SEQ ID NO: 271276 - DNA, 19 bp, Homo sapiens
  siRNA target sequence for VDP (NM_003715.1,2129-2147).
gtgactcactacaaaaata

SEQ ID NO: 271277 - DNA, 19 bp, Homo sapiens
  siRNA target sequence for VDP (NM_003715.1,2186-2204).
cagcaggtttctacattaa

SEQ ID NO: 271278 - DNA, 19 bp, Homo sapiens
  siRNA target sequence for VDP (NM_003715.1,2189-2207).
caggtttctacattaaaat

SEQ ID NO: 271279 - DNA, 19 bp, Homo sapiens
  siRNA target sequence for VDP (NM_003715.1,2261-2279).
cagcacaaagaccagtata

SEQ ID NO: 271280 - DNA, 19 bp, Homo sapiens
  siRNA target sequence for VDP (NM_003715.1,2263-2281).
gcacaaagaccagtataat

SEQ ID NO: 271281 - DNA, 19 bp, Homo sapiens
  siRNA target sequence for VDP (NM_003715.1,2266-2284).
caaagaccagtataatctt

SEQ ID NO: 271282 - DNA, 19 bp, Homo sapiens
  siRNA target sequence for VDP (NM_003715.1,2270-2288).
gaccagtataatcttctta

SEQ ID NO: 271283 - DNA, 19 bp, Homo sapiens
  siRNA target sequence for VDP (NM_003715.1,2312-2330).
cagcatcaaggttcttaca

SEQ ID NO: 271284 - DNA, 19 bp, Homo sapiens
  siRNA target sequence for VDP (NM_003715.1,2373-2391).
gtagattgcgagaagagat

SEQ ID NO: 271285 - DNA, 19 bp, Homo sapiens
  siRNA target sequence for VDP (NM_003715.1,2443-2461).
ggactctatgattgaaaat

SEQ ID NO: 271286 - DNA, 19 bp, Homo sapiens
  siRNA target sequence for VDP (NM_003715.1,2473-2491).
ccaaacatctggcacaaat

SEQ ID NO: 271287 - DNA, 19 bp, Homo sapiens
  siRNA target sequence for VDP (NM_003715.1,2672-2690).
ggagagaccgagactataa

SEQ ID NO: 271288 - DNA, 19 bp, Homo sapiens
  siRNA target sequence for VDP (NM_003715.1,2673-2691).
gagagaccgagactataat

SEQ ID NO: 271289 - DNA, 19 bp, Homo sapiens
  siRNA target sequence for VDP (NM_003715.1,2695-2713).
caccaaaactactgatgta

SEQ ID NO: 271290 - DNA, 19 bp, Homo sapiens
  siRNA target sequence for VDP (NM_003715.1,2717-2735).
ggaagactgtcagcattat

SEQ ID NO: 271291 - DNA, 19 bp, Homo sapiens
  siRNA target sequence for VDP (NM_003715.1,2721-2739).
gactgtcagcattattaca

SEQ ID NO: 271292 - DNA, 19 bp, Homo sapiens
  siRNA target sequence for VDP (NM_003715.1,2801-2819).
gagcagctggattcatcta

SEQ ID NO: 271293 - DNA, 19 bp, Homo sapiens
  siRNA target sequence for VDP (NM_003715.1,2803-2821).
gcagctggattcatctaat

SEQ ID NO: 271294 - DNA, 19 bp, Homo sapiens
  siRNA target sequence for VDP (NM_003715.1,2804-2822).
cagctggattcatctaata

SEQ ID NO: 271295 - DNA, 19 bp, Homo sapiens
  siRNA target sequence for VDP (NM_003715.1,2806-2824).
gctggattcatctaatagt

SEQ ID NO: 271296 - DNA, 19 bp, Homo sapiens
  siRNA target sequence for VDP (NM_003715.1,2807-2825).
ctggattcatctaatagta

SEQ ID NO: 271297 - DNA, 19 bp, Homo sapiens
  siRNA target sequence for VDP (NM_003715.1,2908-2926).
gctcttggccgatcaagat

SEQ ID NO: 271298 - DNA, 19 bp, Homo sapiens
  siRNA target sequence for VDP (NM_003715.1,3039-3057).
ctggcaaggatctagatca

SEQ ID NO: 271299 - DNA, 19 bp, Homo sapiens
  siRNA target sequence for VDP (NM_003715.1,3041-3059).
ggcaaggatctagatcata

SEQ ID NO: 271300 - DNA, 19 bp, Homo sapiens
  siRNA target sequence for VPS18 (NM_080432.1,396-414).
ccccactcggggtatgtga

SEQ ID NO: 271301 - DNA, 19 bp, Homo sapiens
  siRNA target sequence for VPS18 (NM_080432.1,397-415).
cccactcggggtatgtgaa

SEQ ID NO: 271302 - DNA, 19 bp, Homo sapiens
  siRNA target sequence for VPS18 (NM_080432.1,398-416).
ccactcggggtatgtgaat

SEQ ID NO: 271303 - DNA, 19 bp, Homo sapiens
  siRNA target sequence for VPS18 (NM_080432.1,432-450).
gaagtgcccatcttcacaa

SEQ ID NO: 271304 - DNA, 19 bp, Homo sapiens
  siRNA target sequence for VPS18 (NM_080432.1,448-466).
caaagcagcgcattgactt

SEQ ID NO: 271305 - DNA, 19 bp, Homo sapiens
  siRNA target sequence for VPS18 (NM_080432.1,471-489).
ccttccgagcgcattacca

SEQ ID NO: 271306 - DNA, 19 bp, Homo sapiens
  siRNA target sequence for VPS18 (NM_080432.1,523-541).
gcctgggcaaggatacact

SEQ ID NO: 271307 - DNA, 19 bp, Homo sapiens
  siRNA target sequence for VPS18 (NM_080432.1,538-556).
cactgctccgcattgactt

SEQ ID NO: 271308 - DNA, 19 bp, Homo sapiens
  siRNA target sequence for VPS18 (NM_080432.1,595-613).
gtaaggatgacgcaaaagt

SEQ ID NO: 271309 - DNA, 19 bp, Homo sapiens
  siRNA target sequence for VPS18 (NM_080432.1,808-826).
cccaaggccacatctttga

SEQ ID NO: 271310 - DNA, 19 bp, Homo sapiens
  siRNA target sequence for VPS18 (NM_080432.1,862-880).
gccctgctccggatctcta

SEQ ID NO: 271311 - DNA, 19 bp, Homo sapiens
  siRNA target sequence for VPS18 (NM_080432.1,886-904).
gcccattgtacgtgctaaa

SEQ ID NO: 271312 - DNA, 19 bp, Homo sapiens
  siRNA target sequence for VPS18 (NM_080432.1,893-911).
gtacgtgctaaatgaagaa

SEQ ID NO: 271313 - DNA, 19 bp, Homo sapiens
  siRNA target sequence for VPS18 (NM_080432.1,953-971).
ccctgatgggcgtagcttt

SEQ ID NO: 271314 - DNA, 19 bp, Homo sapiens
  siRNA target sequence for VPS18 (NM_080432.1,1513-1531).
gcacctatctggacatgaa

SEQ ID NO: 271315 - DNA, 19 bp, Homo sapiens
  siRNA target sequence for VPS18 (NM_080432.1,1538-1556).
cgatctggccaaagagtat

SEQ ID NO: 271316 - DNA, 19 bp, Homo sapiens
  siRNA target sequence for VPS18 (NM_080432.1,1539-1557).
gatctggccaaagagtatt

SEQ ID NO: 271317 - DNA, 19 bp, Homo sapiens
  siRNA target sequence for VPS18 (NM_080432.1,1737-1755).
cgaaaactggccagtttga

SEQ ID NO: 271318 - DNA, 19 bp, Homo sapiens
  siRNA target sequence for VPS18 (NM_080432.1,1738-1756).
gaaaactggccagtttgaa

SEQ ID NO: 271319 - DNA, 19 bp, Homo sapiens
  siRNA target sequence for VPS18 (NM_080432.1,1962-1980).
gagagagagcacctttctt

SEQ ID NO: 271320 - DNA, 19 bp, Homo sapiens
  siRNA target sequence for VPS33A (NM_022916.2,44-62).
gccgagtgaacctaaacgt

SEQ ID NO: 271321 - DNA, 19 bp, Homo sapiens
  siRNA target sequence for VPS33A (NM_022916.2,113-131).
caggaagcaaggcaatagt

SEQ ID NO: 271322 - DNA, 19 bp, Homo sapiens
  siRNA target sequence for VPS33A (NM_022916.2,125-143).
caatagtttgggatgaata

SEQ ID NO: 271323 - DNA, 19 bp, Homo sapiens
  siRNA target sequence for VPS33A (NM_022916.2,130-148).
gtttgggatgaatacctaa

SEQ ID NO: 271324 - DNA, 19 bp, Homo sapiens
  siRNA target sequence for VPS33A (NM_022916.2,160-178).
ggcctgattgcacagtatt

SEQ ID NO: 271325 - DNA, 19 bp, Homo sapiens
  siRNA target sequence for VPS33A (NM_022916.2,165-183).
gattgcacagtattcacta

SEQ ID NO: 271326 - DNA, 19 bp, Homo sapiens
  siRNA target sequence for VPS33A (NM_022916.2,169-187).
gcacagtattcactattga

SEQ ID NO: 271327 - DNA, 19 bp, Homo sapiens
  siRNA target sequence for VPS33A (NM_022916.2,170-188).
cacagtattcactattgaa

SEQ ID NO: 271328 - DNA, 19 bp, Homo sapiens
  siRNA target sequence for VPS33A (NM_022916.2,213-231).
cacacttaaaggaaatcgt

SEQ ID NO: 271329 - DNA, 19 bp, Homo sapiens
  siRNA target sequence for VPS33A (NM_022916.2,278-296).
ggctagagttgatggatat

SEQ ID NO: 271330 - DNA, 19 bp, Homo sapiens
  siRNA target sequence for VPS33A (NM_022916.2,328-346).
cgaggcccaacgagagatt

SEQ ID NO: 271331 - DNA, 19 bp, Homo sapiens
  siRNA target sequence for VPS33A (NM_022916.2,329-347).
gaggcccaacgagagattt

SEQ ID NO: 271332 - DNA, 19 bp, Homo sapiens
  siRNA target sequence for VPS33A (NM_022916.2,333-351).
cccaacgagagattttcat

SEQ ID NO: 271333 - DNA, 19 bp, Homo sapiens
  siRNA target sequence for VPS33A (NM_022916.2,334-352).
ccaacgagagattttcata

SEQ ID NO: 271334 - DNA, 19 bp, Homo sapiens
  siRNA target sequence for VPS33A (NM_022916.2,335-353).
caacgagagattttcatat

SEQ ID NO: 271335 - DNA, 19 bp, Homo sapiens
  siRNA target sequence for VPS33A (NM_022916.2,432-450).
ggaggagtacagcttagat

SEQ ID NO: 271336 - DNA, 19 bp, Homo sapiens
  siRNA target sequence for VPS33A (NM_022916.2,458-476).
cattcgatggggatctctt

SEQ ID NO: 271337 - DNA, 19 bp, Homo sapiens
  siRNA target sequence for VPS33A (NM_022916.2,463-481).
gatggggatctcttatcca

SEQ ID NO: 271338 - DNA, 19 bp, Homo sapiens
  siRNA target sequence for VPS33A (NM_022916.2,565-583).
ctgcaagctctgtatggaa

SEQ ID NO: 271339 - DNA, 19 bp, Homo sapiens
  siRNA target sequence for VPS33A (NM_022916.2,581-599).
gaacgatcccccagatctt

SEQ ID NO: 271340 - DNA, 19 bp, Homo sapiens
  siRNA target sequence for VPS33A (NM_022916.2,617-635).
ctcggcaagtggccaatat

SEQ ID NO: 271341 - DNA, 19 bp, Homo sapiens
  siRNA target sequence for VPS33A (NM_022916.2,619-637).
cggcaagtggccaatatga

SEQ ID NO: 271342 - DNA, 19 bp, Homo sapiens
  siRNA target sequence for VPS33A (NM_022916.2,625-643).
gtggccaatatgatgatca

SEQ ID NO: 271343 - DNA, 19 bp, Homo sapiens
  siRNA target sequence for VPS33A (NM_022916.2,662-680).
caggaagccagaattcaat

SEQ ID NO: 271344 - DNA, 19 bp, Homo sapiens
  siRNA target sequence for VPS33A (NM_022916.2,669-687).
ccagaattcaatatttcct

SEQ ID NO: 271345 - DNA, 19 bp, Homo sapiens
  siRNA target sequence for VPS33A (NM_022916.2,685-703).
cctgtttttgataatctct

SEQ ID NO: 271346 - DNA, 19 bp, Homo sapiens
  siRNA target sequence for VPS33A (NM_022916.2,712-730).
gatcggaatgtggatttat

SEQ ID NO: 271347 - DNA, 19 bp, Homo sapiens
  siRNA target sequence for VPS33A (NM_022916.2,743-761).
ccactcagctgacatatga

SEQ ID NO: 271348 - DNA, 19 bp, Homo sapiens
  siRNA target sequence for VPS33A (NM_022916.2,753-771).
gacatatgaaggactcatt

SEQ ID NO: 271349 - DNA, 19 bp, Homo sapiens
  siRNA target sequence for VPS33A (NM_022916.2,945-963).
ctctgtgctcagcaagaaa

SEQ ID NO: 271350 - DNA, 19 bp, Homo sapiens
  siRNA target sequence for VPS33A (NM_022916.2,949-967).
gtgctcagcaagaaagcaa

SEQ ID NO: 271351 - DNA, 19 bp, Homo sapiens
  siRNA target sequence for VPS33A (NM_022916.2,956-974).
gcaagaaagcaaagatcat

SEQ ID NO: 271352 - DNA, 19 bp, Homo sapiens
  siRNA target sequence for VPS33A (NM_022916.2,1017-1035).
ggagatcaagcagtttgtt

SEQ ID NO: 271353 - DNA, 19 bp, Homo sapiens
  siRNA target sequence for VPS33A (NM_022916.2,1066-1084).
ggctcgcttgcaaaccata

SEQ ID NO: 271354 - DNA, 19 bp, Homo sapiens
  siRNA target sequence for VPS33A (NM_022916.2,1166-1184).
ctggaatagacactgataa

SEQ ID NO: 271355 - DNA, 19 bp, Homo sapiens
  siRNA target sequence for VPS33A (NM_022916.2,1176-1194).
cactgataaggtcaacaat

SEQ ID NO: 271356 - DNA, 19 bp, Homo sapiens
  siRNA target sequence for VPS33A (NM_022916.2,1216-1234).
caaaagcactcgttgatca

SEQ ID NO: 271357 - DNA, 19 bp, Homo sapiens
  siRNA target sequence for VPS33A (NM_022916.2,1227-1245).
gttgatcaaggtgttaaga

SEQ ID NO: 271358 - DNA, 19 bp, Homo sapiens
  siRNA target sequence for VPS33A (NM_022916.2,1253-1271).
gcctccaatccgtgtgtaa

SEQ ID NO: 271359 - DNA, 19 bp, Homo sapiens
  siRNA target sequence for VPS33A (NM_022916.2,1254-1272).
cctccaatccgtgtgtaat

SEQ ID NO: 271360 - DNA, 19 bp, Homo sapiens
  siRNA target sequence for VPS33A (NM_022916.2,1255-1273).
ctccaatccgtgtgtaata

SEQ ID NO: 271361 - DNA, 19 bp, Homo sapiens
  siRNA target sequence for VPS33A (NM_022916.2,1257-1275).
ccaatccgtgtgtaatagt

SEQ ID NO: 271362 - DNA, 19 bp, Homo sapiens
  siRNA target sequence for VPS33A (NM_022916.2,1330-1348).
ggctatgagcacatattga

SEQ ID NO: 271363 - DNA, 19 bp, Homo sapiens
  siRNA target sequence for VPS33A (NM_022916.2,1339-1357).
cacatattgaccttacaca

SEQ ID NO: 271364 - DNA, 19 bp, Homo sapiens
  siRNA target sequence for VPS33A (NM_022916.2,1400-1418).
gaaacaattacccaactat

SEQ ID NO: 271365 - DNA, 19 bp, Homo sapiens
  siRNA target sequence for VPS33A (NM_022916.2,1412-1430).
caactatacggaaaacatt

SEQ ID NO: 271366 - DNA, 19 bp, Homo sapiens
  siRNA target sequence for VPS33A (NM_022916.2,1433-1451).
gcctctggatggatgatgt

SEQ ID NO: 271367 - DNA, 19 bp, Homo sapiens
  siRNA target sequence for VPS33A (NM_022916.2,1437-1455).
ctggatggatgatgttaat

SEQ ID NO: 271368 - DNA, 19 bp, Homo sapiens
  siRNA target sequence for VPS33A (NM_022916.2,1459-1477).
caaaaccccacggacatat

SEQ ID NO: 271369 - DNA, 19 bp, Homo sapiens
  siRNA target sequence for VPS33A (NM_022916.2,1464-1482).
ccccacggacatatcgtat

SEQ ID NO: 271370 - DNA, 19 bp, Homo sapiens
  siRNA target sequence for VPS33A (NM_022916.2,1469-1487).
cggacatatcgtatgtgta

SEQ ID NO: 271371 - DNA, 19 bp, Homo sapiens
  siRNA target sequence for VPS33A (NM_022916.2,1648-1666).
cgagtgactctgatatttt

SEQ ID NO: 271372 - DNA, 19 bp, Homo sapiens
  siRNA target sequence for VPS33A (NM_022916.2,1676-1694).
gcgtaaccttcgctgaaat

SEQ ID NO: 271373 - DNA, 19 bp, Homo sapiens
  siRNA target sequence for VPS33A (NM_022916.2,1677-1695).
cgtaaccttcgctgaaatt

SEQ ID NO: 271374 - DNA, 19 bp, Homo sapiens
  siRNA target sequence for VPS33A (NM_022916.2,1750-1768).
gccaccactaaactaatga

SEQ ID NO: 271375 - DNA, 19 bp, Homo sapiens
  siRNA target sequence for VPS33A (NM_022916.2,1751-1769).
ccaccactaaactaatgaa

SEQ ID NO: 271376 - DNA, 19 bp, Homo sapiens
  siRNA target sequence for VPS33A (NM_022916.2,1752-1770).
caccactaaactaatgaat

SEQ ID NO: 271377 - DNA, 19 bp, Homo sapiens
  siRNA target sequence for VPS33A (NM_022916.2,1790-1808).
ctctgatggaaaaaccttt

SEQ ID NO: 271378 - DNA, 19 bp, Homo sapiens
  siRNA target sequence for VPS33B (NM_018668.2,402-420).
gagaccagctcatctatct

SEQ ID NO: 271379 - DNA, 19 bp, Homo sapiens
  siRNA target sequence for VPS33B (NM_018668.2,472-490).
gagccctttggatcgaatt

SEQ ID NO: 271380 - DNA, 19 bp, Homo sapiens
  siRNA target sequence for VPS33B (NM_018668.2,482-500).
gatcgaattgccaatgtct

SEQ ID NO: 271381 - DNA, 19 bp, Homo sapiens
  siRNA target sequence for VPS33B (NM_018668.2,515-533).
cacgaagtagacaagctat

SEQ ID NO: 271382 - DNA, 19 bp, Homo sapiens
  siRNA target sequence for VPS33B (NM_018668.2,556-574).
cctcagctccaatgaacaa

SEQ ID NO: 271383 - DNA, 19 bp, Homo sapiens
  siRNA target sequence for VPS33B (NM_018668.2,587-605).
gtcagaccccgcatcaaga

SEQ ID NO: 271384 - DNA, 19 bp, Homo sapiens
  siRNA target sequence for VPS33B (NM_018668.2,589-607).
cagaccccgcatcaagaat

SEQ ID NO: 271385 - DNA, 19 bp, Homo sapiens
  siRNA target sequence for VPS33B (NM_018668.2,591-609).
gaccccgcatcaagaatat

SEQ ID NO: 271386 - DNA, 19 bp, Homo sapiens
  siRNA target sequence for VPS33B (NM_018668.2,601-619).
caagaatatgcgatacatt

SEQ ID NO: 271387 - DNA, 19 bp, Homo sapiens
  siRNA target sequence for VPS33B (NM_018668.2,648-666).
ctggccgaactcgcaaata

SEQ ID NO: 271388 - DNA, 19 bp, Homo sapiens
  siRNA target sequence for VPS33B (NM_018668.2,654-672).
gaactcgcaaatacaaagt

SEQ ID NO: 271389 - DNA, 19 bp, Homo sapiens
  siRNA target sequence for VPS33B (NM_018668.2,657-675).
ctcgcaaatacaaagtgat

SEQ ID NO: 271390 - DNA, 19 bp, Homo sapiens
  siRNA target sequence for VPS33B (NM_018668.2,749-767).
gatgaatgggccttctctt

SEQ ID NO: 271391 - DNA, 19 bp, Homo sapiens
  siRNA target sequence for VPS33B (NM_018668.2,839-857).
gatcagcgttggatcaaca

SEQ ID NO: 271392 - DNA, 19 bp, Homo sapiens
  siRNA target sequence for VPS33B (NM_018668.2,931-949).
cgccaagatggcatatgaa

SEQ ID NO: 271393 - DNA, 19 bp, Homo sapiens
  siRNA target sequence for VPS33B (NM_018668.2,932-950).
gccaagatggcatatgaat

SEQ ID NO: 271394 - DNA, 19 bp, Homo sapiens
  siRNA target sequence for VPS33B (NM_018668.2,1155-1173).
gcctgaaggtgctactcaa

SEQ ID NO: 271395 - DNA, 19 bp, Homo sapiens
  siRNA target sequence for VPS33B (NM_018668.2,1156-1174).
cctgaaggtgctactcaat

SEQ ID NO: 271396 - DNA, 19 bp, Homo sapiens
  siRNA target sequence for VPS33B (NM_018668.2,1175-1193).
gccgaggacaaggtgttta

SEQ ID NO: 271397 - DNA, 19 bp, Homo sapiens
  siRNA target sequence for VPS33B (NM_018668.2,1176-1194).
ccgaggacaaggtgtttaa

SEQ ID NO: 271398 - DNA, 19 bp, Homo sapiens
  siRNA target sequence for VPS33B (NM_018668.2,1255-1273).
cttgcaggcccagtatgat

SEQ ID NO: 271399 - DNA, 19 bp, Homo sapiens
  siRNA target sequence for VPS33B (NM_018668.2,1281-1299).
gaggcatggacattaagca

SEQ ID NO: 271400 - DNA, 19 bp, Homo sapiens
  siRNA target sequence for VPS33B (NM_018668.2,1373-1391).
gcctgtgaatccatcatga

SEQ ID NO: 271401 - DNA, 19 bp, Homo sapiens
  siRNA target sequence for VPS33B (NM_018668.2,1500-1518).
ggcaggtgtcgcctataga

SEQ ID NO: 271402 - DNA, 19 bp, Homo sapiens
  siRNA target sequence for VPS33B (NM_018668.2,1501-1519).
gcaggtgtcgcctatagaa

SEQ ID NO: 271403 - DNA, 19 bp, Homo sapiens
  siRNA target sequence for VPS33B (NM_018668.2,1502-1520).
caggtgtcgcctatagaaa

SEQ ID NO: 271404 - DNA, 19 bp, Homo sapiens
  siRNA target sequence for VPS33B (NM_018668.2,1560-1578).
gtttgatccccaaggatta

SEQ ID NO: 271405 - DNA, 19 bp, Homo sapiens
  siRNA target sequence for VPS33B (NM_018668.2,1573-1591).
ggattaccgatctctgaaa

SEQ ID NO: 271406 - DNA, 19 bp, Homo sapiens
  siRNA target sequence for VPS33B (NM_018668.2,1574-1592).
gattaccgatctctgaaaa

SEQ ID NO: 271407 - DNA, 19 bp, Homo sapiens
  siRNA target sequence for VPS33B (NM_018668.2,1692-1710).
cagccgtggagagtaaagt

SEQ ID NO: 271408 - DNA, 19 bp, Homo sapiens
  siRNA target sequence for VPS33B (NM_018668.2,1694-1712).
gccgtggagagtaaagtga

SEQ ID NO: 271409 - DNA, 19 bp, Homo sapiens
  siRNA target sequence for VPS33B (NM_018668.2,1771-1789).
caagaggagcaattttcgt

SEQ ID NO: 271410 - DNA, 19 bp, Homo sapiens
  siRNA target sequence for VPS33B (NM_018668.2,1788-1806).
gtgccatcagcaaaaagct

SEQ ID NO: 271411 - DNA, 19 bp, Homo sapiens
  siRNA target sequence for VPS33B (NM_018668.2,1828-1846).
cggcgagtatgatctgaaa

SEQ ID NO: 271412 - DNA, 19 bp, Homo sapiens
  siRNA target sequence for VPS33B (NM_018668.2,1830-1848).
gcgagtatgatctgaaagt

SEQ ID NO: 271413 - DNA, 19 bp, Homo sapiens
  siRNA target sequence for VPS33B (NM_018668.2,1891-1909).
cctgagctgccgaatcatt

SEQ ID NO: 271414 - DNA, 19 bp, Homo sapiens
  siRNA target sequence for VPS33B (NM_018668.2,1972-1990).
cagtgactttgcattcaca

SEQ ID NO: 271415 - DNA, 19 bp, Homo sapiens
  siRNA target sequence for VPS33B (NM_018668.2,1976-1994).
gactttgcattcacagata

SEQ ID NO: 271416 - DNA, 19 bp, Homo sapiens
  siRNA target sequence for VPS33B (NM_018668.2,2053-2071).
gggtggttgtacattctct

SEQ ID NO: 271417 - DNA, 19 bp, Homo sapiens
  siRNA target sequence for VPS33B (NM_018668.2,2104-2122).
gaaaggctacaggttcatt

SEQ ID NO: 271418 - DNA, 19 bp, Homo sapiens
  siRNA target sequence for VPS39 (NM_015289.1,171-189).
ccagtgccgatcctagaaa

SEQ ID NO: 271419 - DNA, 19 bp, Homo sapiens
  siRNA target sequence for VPS39 (NM_015289.1,172-190).
cagtgccgatcctagaaaa

SEQ ID NO: 271420 - DNA, 19 bp, Homo sapiens
  siRNA target sequence for VPS39 (NM_015289.1,285-303).
gacgttggttgcaacagat

SEQ ID NO: 271421 - DNA, 19 bp, Homo sapiens
  siRNA target sequence for VPS39 (NM_015289.1,292-310).
gttgcaacagatttgaagt

SEQ ID NO: 271422 - DNA, 19 bp, Homo sapiens
  siRNA target sequence for VPS39 (NM_015289.1,313-331).
cactagagaaatccaataa

SEQ ID NO: 271423 - DNA, 19 bp, Homo sapiens
  siRNA target sequence for VPS39 (NM_015289.1,363-381).
gtggtttcccagtttaaga

SEQ ID NO: 271424 - DNA, 19 bp, Homo sapiens
  siRNA target sequence for VPS39 (NM_015289.1,380-398).
gattctggtcagcttgtta

SEQ ID NO: 271425 - DNA, 19 bp, Homo sapiens
  siRNA target sequence for VPS39 (NM_015289.1,387-405).
gtcagcttgttagaaaata

SEQ ID NO: 271426 - DNA, 19 bp, Homo sapiens
  siRNA target sequence for VPS39 (NM_015289.1,414-432).
gtccatgacctattgacat

SEQ ID NO: 271427 - DNA, 19 bp, Homo sapiens
  siRNA target sequence for VPS39 (NM_015289.1,416-434).
ccatgacctattgacattt

SEQ ID NO: 271428 - DNA, 19 bp, Homo sapiens
  siRNA target sequence for VPS39 (NM_015289.1,422-440).
cctattgacatttcaacaa

SEQ ID NO: 271429 - DNA, 19 bp, Homo sapiens
  siRNA target sequence for VPS39 (NM_015289.1,438-456).
caaatcactacggtttcaa

SEQ ID NO: 271430 - DNA, 19 bp, Homo sapiens
  siRNA target sequence for VPS39 (NM_015289.1,570-588).
gacagggaatttcatgaat

SEQ ID NO: 271431 - DNA, 19 bp, Homo sapiens
  siRNA target sequence for VPS39 (NM_015289.1,585-603).
gaattgcagggggacttta

SEQ ID NO: 271432 - DNA, 19 bp, Homo sapiens
  siRNA target sequence for VPS39 (NM_015289.1,626-644).
catggcgtggtgtgaaaat

SEQ ID NO: 271433 - DNA, 19 bp, Homo sapiens
  siRNA target sequence for VPS39 (NM_015289.1,629-647).
ggcgtggtgtgaaaattct

SEQ ID NO: 271434 - DNA, 19 bp, Homo sapiens
  siRNA target sequence for VPS39 (NM_015289.1,630-648).
gcgtggtgtgaaaattcta

SEQ ID NO: 271435 - DNA, 19 bp, Homo sapiens
  siRNA target sequence for VPS39 (NM_015289.1,635-653).
gtgtgaaaattctatctgt

SEQ ID NO: 271436 - DNA, 19 bp, Homo sapiens
  siRNA target sequence for VPS39 (NM_015289.1,694-712).
gaaaggggtccatcaaaga

SEQ ID NO: 271437 - DNA, 19 bp, Homo sapiens
  siRNA target sequence for VPS39 (NM_015289.1,754-772).
ctctggcagatggaaaagt

SEQ ID NO: 271438 - DNA, 19 bp, Homo sapiens
  siRNA target sequence for VPS39 (NM_015289.1,895-913).
cagtgttgcctcgatatgt

SEQ ID NO: 271439 - DNA, 19 bp, Homo sapiens
  siRNA target sequence for VPS39 (NM_015289.1,942-960).
ctggtccaaagcattgaat

SEQ ID NO: 271440 - DNA, 19 bp, Homo sapiens
  siRNA target sequence for VPS39 (NM_015289.1,947-965).
ccaaagcattgaattgcaa

SEQ ID NO: 271441 - DNA, 19 bp, Homo sapiens
  siRNA target sequence for VPS39 (NM_015289.1,983-1001).
ctcaggaggatcaaacatt

SEQ ID NO: 271442 - DNA, 19 bp, Homo sapiens
  siRNA target sequence for VPS39 (NM_015289.1,1004-1022).
ctatgtggccagcaatcat

SEQ ID NO: 271443 - DNA, 19 bp, Homo sapiens
  siRNA target sequence for VPS39 (NM_015289.1,1048-1066).
ccatggcaacccaaatcca

SEQ ID NO: 271444 - DNA, 19 bp, Homo sapiens
  siRNA target sequence for VPS39 (NM_015289.1,1049-1067).
catggcaacccaaatccaa

SEQ ID NO: 271445 - DNA, 19 bp, Homo sapiens
  siRNA target sequence for VPS39 (NM_015289.1,1054-1072).
caacccaaatccaacaact

SEQ ID NO: 271446 - DNA, 19 bp, Homo sapiens
  siRNA target sequence for VPS39 (NM_015289.1,1057-1075).
cccaaatccaacaacttct

SEQ ID NO: 271447 - DNA, 19 bp, Homo sapiens
  siRNA target sequence for VPS39 (NM_015289.1,1101-1119).
ctgcagctcgcagaaatga

SEQ ID NO: 271448 - DNA, 19 bp, Homo sapiens
  siRNA target sequence for VPS39 (NM_015289.1,1190-1208).
ctgccagaagcgttttgat

SEQ ID NO: 271449 - DNA, 19 bp, Homo sapiens
  siRNA target sequence for VPS39 (NM_015289.1,1192-1210).
gccagaagcgttttgatga

SEQ ID NO: 271450 - DNA, 19 bp, Homo sapiens
  siRNA target sequence for VPS39 (NM_015289.1,1240-1258).
cagatcccacccatgtgat

SEQ ID NO: 271451 - DNA, 19 bp, Homo sapiens
  siRNA target sequence for VPS39 (NM_015289.1,1381-1399).
cacagaaacgaagtcaatt

SEQ ID NO: 271452 - DNA, 19 bp, Homo sapiens
  siRNA target sequence for VPS39 (NM_015289.1,1455-1473).
ggcactcccaccatcaaat

SEQ ID NO: 271453 - DNA, 19 bp, Homo sapiens
  siRNA target sequence for VPS39 (NM_015289.1,1519-1537).
gctatctccatacaaatgt

SEQ ID NO: 271454 - DNA, 19 bp, Homo sapiens
  siRNA target sequence for VPS39 (NM_015289.1,1594-1612).
gcgagcacgtgctaaagaa

SEQ ID NO: 271455 - DNA, 19 bp, Homo sapiens
  siRNA target sequence for VPS39 (NM_015289.1,1759-1777).
gcacagaaaacctgcattt

SEQ ID NO: 271456 - DNA, 19 bp, Homo sapiens
  siRNA target sequence for VPS39 (NM_015289.1,1821-1839).
gatggcctgaagatattta

SEQ ID NO: 271457 - DNA, 19 bp, Homo sapiens
  siRNA target sequence for VPS39 (NM_015289.1,1825-1843).
gcctgaagatatttactga

SEQ ID NO: 271458 - DNA, 19 bp, Homo sapiens
  siRNA target sequence for VPS39 (NM_015289.1,1878-1896).
cgagtcctcggcttcttaa

SEQ ID NO: 271459 - DNA, 19 bp, Homo sapiens
  siRNA target sequence for VPS39 (NM_015289.1,1884-1902).
ctcggcttcttaatagaga

SEQ ID NO: 271460 - DNA, 19 bp, Homo sapiens
  siRNA target sequence for VPS39 (NM_015289.1,1886-1904).
cggcttcttaatagagaat

SEQ ID NO: 271461 - DNA, 19 bp, Homo sapiens
  siRNA target sequence for VPS39 (NM_015289.1,2112-2130).
ctcatgttcttggagattt

SEQ ID NO: 271462 - DNA, 19 bp, Homo sapiens
  siRNA target sequence for VPS39 (NM_015289.1,2247-2265).
gtccacatcttgaaggata

SEQ ID NO: 271463 - DNA, 19 bp, Homo sapiens
  siRNA target sequence for VPS39 (NM_015289.1,2250-2268).
cacatcttgaaggatacaa

SEQ ID NO: 271464 - DNA, 19 bp, Homo sapiens
  siRNA target sequence for VPS39 (NM_015289.1,2280-2298).
gagtactgccacaaacact

SEQ ID NO: 271465 - DNA, 19 bp, Homo sapiens
  siRNA target sequence for VPS39 (NM_015289.1,2282-2300).
gtactgccacaaacactat

SEQ ID NO: 271466 - DNA, 19 bp, Homo sapiens
  siRNA target sequence for VPS39 (NM_015289.1,2386-2404).
caatcaagctggaactact

SEQ ID NO: 271467 - DNA, 19 bp, Homo sapiens
  siRNA target sequence for VPS39 (NM_015289.1,2497-2515).
caaacactcagatcaatga

SEQ ID NO: 271468 - DNA, 19 bp, Homo sapiens
  siRNA target sequence for VPS39 (NM_015289.1,2501-2519).
cactcagatcaatgacata

SEQ ID NO: 271469 - DNA, 19 bp, Homo sapiens
  siRNA target sequence for VPS39 (NM_015289.1,2678-2696).
ggtgtgtaagaagaagatt

SEQ ID NO: 271470 - DNA, 19 bp, Homo sapiens
  siRNA target sequence for VPS39 (NM_015289.1,2727-2745).
ggagtggtcgtccattact

SEQ ID NO: 271471 - DNA, 19 bp, Homo sapiens
  siRNA target sequence for VPS39 (NM_015289.1,2728-2746).
gagtggtcgtccattactt

SEQ ID NO: 271472 - DNA, 19 bp, Homo sapiens
  siRNA target sequence for VPS39 (NM_015289.1,2730-2748).
gtggtcgtccattacttct

SEQ ID NO: 271473 - DNA, 19 bp, Homo sapiens
  siRNA target sequence for VPS45A (NM_007259.2,140-158).
gagacgactggcatagtga

SEQ ID NO: 271474 - DNA, 19 bp, Homo sapiens
  siRNA target sequence for VPS45A (NM_007259.2,144-162).
cgactggcatagtgagtat

SEQ ID NO: 271475 - DNA, 19 bp, Homo sapiens
  siRNA target sequence for VPS45A (NM_007259.2,149-167).
ggcatagtgagtatggtat

SEQ ID NO: 271476 - DNA, 19 bp, Homo sapiens
  siRNA target sequence for VPS45A (NM_007259.2,169-187).
cacacaatcggagattcta

SEQ ID NO: 271477 - DNA, 19 bp, Homo sapiens
  siRNA target sequence for VPS45A (NM_007259.2,193-211).
ggaagtgtacctctttgaa

SEQ ID NO: 271478 - DNA, 19 bp, Homo sapiens
  siRNA target sequence for VPS45A (NM_007259.2,202-220).
cctctttgaacgcattgat

SEQ ID NO: 271479 - DNA, 19 bp, Homo sapiens
  siRNA target sequence for VPS45A (NM_007259.2,203-221).
ctctttgaacgcattgatt

SEQ ID NO: 271480 - DNA, 19 bp, Homo sapiens
  siRNA target sequence for VPS45A (NM_007259.2,205-223).
ctttgaacgcattgattct

SEQ ID NO: 271481 - DNA, 19 bp, Homo sapiens
  siRNA target sequence for VPS45A (NM_007259.2,222-240).
ctcaaaatcgagagatcat

SEQ ID NO: 271482 - DNA, 19 bp, Homo sapiens
  siRNA target sequence for VPS45A (NM_007259.2,245-263).
cacctgaaggcaatttgtt

SEQ ID NO: 271483 - DNA, 19 bp, Homo sapiens
  siRNA target sequence for VPS45A (NM_007259.2,261-279).
gttttcttcgacctacaaa

SEQ ID NO: 271484 - DNA, 19 bp, Homo sapiens
  siRNA target sequence for VPS45A (NM_007259.2,270-288).
gacctacaaaggagaatgt

SEQ ID NO: 271485 - DNA, 19 bp, Homo sapiens
  siRNA target sequence for VPS45A (NM_007259.2,308-326).
ctccgaagacccaaataca

SEQ ID NO: 271486 - DNA, 19 bp, Homo sapiens
  siRNA target sequence for VPS45A (NM_007259.2,310-328).
ccgaagacccaaatacact

SEQ ID NO: 271487 - DNA, 19 bp, Homo sapiens
  siRNA target sequence for VPS45A (NM_007259.2,415-433).
ggttcaggaattttatggt

SEQ ID NO: 271488 - DNA, 19 bp, Homo sapiens
  siRNA target sequence for VPS45A (NM_007259.2,503-521).
gatccagcccagctatcta

SEQ ID NO: 271489 - DNA, 19 bp, Homo sapiens
  siRNA target sequence for VPS45A (NM_007259.2,509-527).
gcccagctatctagaacaa

SEQ ID NO: 271490 - DNA, 19 bp, Homo sapiens
  siRNA target sequence for VPS45A (NM_007259.2,534-552).
ggcttacagctctcctttt

SEQ ID NO: 271491 - DNA, 19 bp, Homo sapiens
  siRNA target sequence for VPS45A (NM_007259.2,535-553).
gcttacagctctcctttta

SEQ ID NO: 271492 - DNA, 19 bp, Homo sapiens
  siRNA target sequence for VPS45A (NM_007259.2,536-554).
cttacagctctccttttat

SEQ ID NO: 271493 - DNA, 19 bp, Homo sapiens
  siRNA target sequence for VPS45A (NM_007259.2,567-585).
gtcccatgattcgttatca

SEQ ID NO: 271494 - DNA, 19 bp, Homo sapiens
  siRNA target sequence for VPS45A (NM_007259.2,619-637).
gtgcgttaagcaagtgata

SEQ ID NO: 271495 - DNA, 19 bp, Homo sapiens
  siRNA target sequence for VPS45A (NM_007259.2,622-640).
cgttaagcaagtgataact

SEQ ID NO: 271496 - DNA, 19 bp, Homo sapiens
  siRNA target sequence for VPS45A (NM_007259.2,623-641).
gttaagcaagtgataacta

SEQ ID NO: 271497 - DNA, 19 bp, Homo sapiens
  siRNA target sequence for VPS45A (NM_007259.2,644-662).
gaatatgaactgtttgaat

SEQ ID NO: 271498 - DNA, 19 bp, Homo sapiens
  siRNA target sequence for VPS45A (NM_007259.2,716-734).
gccatcaccccattgctaa

SEQ ID NO: 271499 - DNA, 19 bp, Homo sapiens
  siRNA target sequence for VPS45A (NM_007259.2,730-748).
gctaaaccagtggacatat

SEQ ID NO: 271500 - DNA, 19 bp, Homo sapiens
  siRNA target sequence for VPS45A (NM_007259.2,753-771).
ccatggtccacgaactact

SEQ ID NO: 271501 - DNA, 19 bp, Homo sapiens
  siRNA target sequence for VPS45A (NM_007259.2,754-772).
catggtccacgaactacta

SEQ ID NO: 271502 - DNA, 19 bp, Homo sapiens
  siRNA target sequence for VPS45A (NM_007259.2,764-782).
gaactactaggcataaaca

SEQ ID NO: 271503 - DNA, 19 bp, Homo sapiens
  siRNA target sequence for VPS45A (NM_007259.2,767-785).
ctactaggcataaacaaca

SEQ ID NO: 271504 - DNA, 19 bp, Homo sapiens
  siRNA target sequence for VPS45A (NM_007259.2,781-799).
caacaatcggattgatctt

SEQ ID NO: 271505 - DNA, 19 bp, Homo sapiens
  siRNA target sequence for VPS45A (NM_007259.2,802-820).
cagagtgccgggaatcagt

SEQ ID NO: 271506 - DNA, 19 bp, Homo sapiens
  siRNA target sequence for VPS45A (NM_007259.2,804-822).
gagtgccgggaatcagtaa

SEQ ID NO: 271507 - DNA, 19 bp, Homo sapiens
  siRNA target sequence for VPS45A (NM_007259.2,841-859).
cctatctgctgaaaatgat

SEQ ID NO: 271508 - DNA, 19 bp, Homo sapiens
  siRNA target sequence for VPS45A (NM_007259.2,893-911).
gctgagattggtagcaata

SEQ ID NO: 271509 - DNA, 19 bp, Homo sapiens
  siRNA target sequence for VPS45A (NM_007259.2,896-914).
gagattggtagcaatataa

SEQ ID NO: 271510 - DNA, 19 bp, Homo sapiens
  siRNA target sequence for VPS45A (NM_007259.2,916-934).
gaatctcatggaagatttt

SEQ ID NO: 271511 - DNA, 19 bp, Homo sapiens
  siRNA target sequence for VPS45A (NM_007259.2,1210-1228).
cctggtgatgctttatgct

SEQ ID NO: 271512 - DNA, 19 bp, Homo sapiens
  siRNA target sequence for VPS45A (NM_007259.2,1238-1256).
gagcgacacagcagcaata

SEQ ID NO: 271513 - DNA, 19 bp, Homo sapiens
  siRNA target sequence for VPS45A (NM_007259.2,1276-1294).
ggacctcaggaataaaggt

SEQ ID NO: 271514 - DNA, 19 bp, Homo sapiens
  siRNA target sequence for VPS45A (NM_007259.2,1318-1336).
cgtgtctgcagttgttgaa

SEQ ID NO: 271515 - DNA, 19 bp, Homo sapiens
  siRNA target sequence for VPS45A (NM_007259.2,1388-1406).
gtggctatcaccaaacaat

SEQ ID NO: 271516 - DNA, 19 bp, Homo sapiens
  siRNA target sequence for VPS45A (NM_007259.2,1502-1520).
gaaaacctatatccttatt

SEQ ID NO: 271517 - DNA, 19 bp, Homo sapiens
  siRNA target sequence for VPS45A (NM_007259.2,1541-1559).
gacagacctcaggatatca

SEQ ID NO: 271518 - DNA, 19 bp, Homo sapiens
  siRNA target sequence for VPS45A (NM_007259.2,1592-1610).
gaggctctaacagtttata

SEQ ID NO: 271519 - DNA, 19 bp, Homo sapiens
  siRNA target sequence for VPS45A (NM_007259.2,1661-1679).
gtgcacaacacgaaaagtt

SEQ ID NO: 271520 - DNA, 19 bp, Homo sapiens
  siRNA target sequence for VPS45A (NM_007259.2,1666-1684).
caacacgaaaagtttccta

SEQ ID NO: 271521 - DNA, 19 bp, Homo sapiens
  siRNA target sequence for VTI1A (NM_145206.1,121-139).
cgtccgacttcgaaggtta

SEQ ID NO: 271522 - DNA, 19 bp, Homo sapiens
  siRNA target sequence for VTI1A (NM_145206.1,198-216).
cgactcccgcctgatgaaa

SEQ ID NO: 271523 - DNA, 19 bp, Homo sapiens
  siRNA target sequence for VTI1A (NM_145206.1,203-221).
cccgcctgatgaaaagaaa

SEQ ID NO: 271524 - DNA, 19 bp, Homo sapiens
  siRNA target sequence for VTI1A (NM_145206.1,309-327).
caaagtcgagggatgtaca

SEQ ID NO: 271525 - DNA, 19 bp, Homo sapiens
  siRNA target sequence for VTI1A (NM_145206.1,334-352).
gaatgagaagctacaaaca

SEQ ID NO: 271526 - DNA, 19 bp, Homo sapiens
  siRNA target sequence for VTI1A (NM_145206.1,460-478).
gggcacatctgctcgataa

SEQ ID NO: 271527 - DNA, 19 bp, Homo sapiens
  siRNA target sequence for VTI1A (NM_145206.1,462-480).
gcacatctgctcgataaca

SEQ ID NO: 271528 - DNA, 19 bp, Homo sapiens
  siRNA target sequence for VTI1A (NM_145206.1,515-533).
ggctggataccaaatagca

SEQ ID NO: 271529 - DNA, 19 bp, Homo sapiens
  siRNA target sequence for VTI1A (NM_145206.1,536-554).
ggaaaccgagcaaattggt

SEQ ID NO: 271530 - DNA, 19 bp, Homo sapiens
  siRNA target sequence for VTI1A (NM_145206.1,553-571).
gtcaggagatgttggaaaa

SEQ ID NO: 271531 - DNA, 19 bp, Homo sapiens
  siRNA target sequence for VTI1A (NM_145206.1,558-576).
gagatgttggaaaacctta

SEQ ID NO: 271532 - DNA, 19 bp, Homo sapiens
  siRNA target sequence for VTI1A (NM_145206.1,563-581).
gttggaaaaccttagtcat

SEQ ID NO: 271533 - DNA, 19 bp, Homo sapiens
  siRNA target sequence for VTI1A (NM_145206.1,668-686).
gttgcgaaggggttgttct

SEQ ID NO: 271534 - DNA, 19 bp, Homo sapiens
  siRNA target sequence for XPO1 (NM_003400.2,43-61).
cagcaattatgacaatgtt

SEQ ID NO: 271535 - DNA, 19 bp, Homo sapiens
  siRNA target sequence for XPO1 (NM_003400.2,78-96).
cgtcagctgcttgatttca

SEQ ID NO: 271536 - DNA, 19 bp, Homo sapiens
  siRNA target sequence for XPO1 (NM_003400.2,86-104).
gcttgatttcagccaaaaa

SEQ ID NO: 271537 - DNA, 19 bp, Homo sapiens
  siRNA target sequence for XPO1 (NM_003400.2,131-149).
ggtgaattgcttataccat

SEQ ID NO: 271538 - DNA, 19 bp, Homo sapiens
  siRNA target sequence for XPO1 (NM_003400.2,218-236).
gacaagagtcgacacaatt

SEQ ID NO: 271539 - DNA, 19 bp, Homo sapiens
  siRNA target sequence for XPO1 (NM_003400.2,220-238).
caagagtcgacacaatttt

SEQ ID NO: 271540 - DNA, 19 bp, Homo sapiens
  siRNA target sequence for XPO1 (NM_003400.2,223-241).
gagtcgacacaattttgga

SEQ ID NO: 271541 - DNA, 19 bp, Homo sapiens
  siRNA target sequence for XPO1 (NM_003400.2,228-246).
gacacaattttggaatttt

SEQ ID NO: 271542 - DNA, 19 bp, Homo sapiens
  siRNA target sequence for XPO1 (NM_003400.2,247-265).
ctcagaatatgaatacgaa

SEQ ID NO: 271543 - DNA, 19 bp, Homo sapiens
  siRNA target sequence for XPO1 (NM_003400.2,263-281).
gaaatactatggactacaa

SEQ ID NO: 271544 - DNA, 19 bp, Homo sapiens
  siRNA target sequence for XPO1 (NM_003400.2,325-343).
ggaaccagtgcgaaggaat

SEQ ID NO: 271545 - DNA, 19 bp, Homo sapiens
  siRNA target sequence for XPO1 (NM_003400.2,326-344).
gaaccagtgcgaaggaata

SEQ ID NO: 271546 - DNA, 19 bp, Homo sapiens
  siRNA target sequence for XPO1 (NM_003400.2,329-347).
ccagtgcgaaggaataaaa

SEQ ID NO: 271547 - DNA, 19 bp, Homo sapiens
  siRNA target sequence for XPO1 (NM_003400.2,386-404).
cccaacttgtgtagagaaa

SEQ ID NO: 271548 - DNA, 19 bp, Homo sapiens
  siRNA target sequence for XPO1 (NM_003400.2,388-406).
caacttgtgtagagaaaga

SEQ ID NO: 271549 - DNA, 19 bp, Homo sapiens
  siRNA target sequence for XPO1 (NM_003400.2,410-428).
ggtgtatatcggaaaatta

SEQ ID NO: 271550 - DNA, 19 bp, Homo sapiens
  siRNA target sequence for XPO1 (NM_003400.2,411-429).
gtgtatatcggaaaattaa

SEQ ID NO: 271551 - DNA, 19 bp, Homo sapiens
  siRNA target sequence for XPO1 (NM_003400.2,413-431).
gtatatcggaaaattaaat

SEQ ID NO: 271552 - DNA, 19 bp, Homo sapiens
  siRNA target sequence for XPO1 (NM_003400.2,471-489).
cattggccaacttttatca

SEQ ID NO: 271553 - DNA, 19 bp, Homo sapiens
  siRNA target sequence for XPO1 (NM_003400.2,478-496).
caacttttatcagtgatat

SEQ ID NO: 271554 - DNA, 19 bp, Homo sapiens
  siRNA target sequence for XPO1 (NM_003400.2,518-536).
cgaaagtctctgtcaaaat

SEQ ID NO: 271555 - DNA, 19 bp, Homo sapiens
  siRNA target sequence for XPO1 (NM_003400.2,593-611).
gataacccaagtcaaatct

SEQ ID NO: 271556 - DNA, 19 bp, Homo sapiens
  siRNA target sequence for XPO1 (NM_003400.2,599-617).
ccaagtcaaatctaagcat

SEQ ID NO: 271557 - DNA, 19 bp, Homo sapiens
  siRNA target sequence for XPO1 (NM_003400.2,662-680).
gtgtcagtttgtaatggaa

SEQ ID NO: 271558 - DNA, 19 bp, Homo sapiens
  siRNA target sequence for XPO1 (NM_003400.2,702-720).
gtacatgcaaccttggaaa

SEQ ID NO: 271559 - DNA, 19 bp, Homo sapiens
  siRNA target sequence for XPO1 (NM_003400.2,705-723).
catgcaaccttggaaacat

SEQ ID NO: 271560 - DNA, 19 bp, Homo sapiens
  siRNA target sequence for XPO1 (NM_003400.2,800-818).
cctgaatgttccaatgttt

SEQ ID NO: 271561 - DNA, 19 bp, Homo sapiens
  siRNA target sequence for XPO1 (NM_003400.2,810-828).
ccaatgtttcgaaatgtct

SEQ ID NO: 271562 - DNA, 19 bp, Homo sapiens
  siRNA target sequence for XPO1 (NM_003400.2,868-886).
gccaatatgaagaacaatt

SEQ ID NO: 271563 - DNA, 19 bp, Homo sapiens
  siRNA target sequence for XPO1 (NM_003400.2,879-897).
gaacaatttgtaacactat

SEQ ID NO: 271564 - DNA, 19 bp, Homo sapiens
  siRNA target sequence for XPO1 (NM_003400.2,958-976).
cgtactcaaatggaaaaga

SEQ ID NO: 271565 - DNA, 19 bp, Homo sapiens
  siRNA target sequence for XPO1 (NM_003400.2,959-977).
gtactcaaatggaaaagat

SEQ ID NO: 271566 - DNA, 19 bp, Homo sapiens
  siRNA target sequence for XPO1 (NM_003400.2,1016-1034).
ctgcacctttcttaaggaa

SEQ ID NO: 271567 - DNA, 19 bp, Homo sapiens
  siRNA target sequence for XPO1 (NM_003400.2,1031-1049).
ggaacatgatcaacttata

SEQ ID NO: 271568 - DNA, 19 bp, Homo sapiens
  siRNA target sequence for XPO1 (NM_003400.2,1083-1101).
gaggcccttcattatatgt

SEQ ID NO: 271569 - DNA, 19 bp, Homo sapiens
  siRNA target sequence for XPO1 (NM_003400.2,1086-1104).
gcccttcattatatgttgt

SEQ ID NO: 271570 - DNA, 19 bp, Homo sapiens
  siRNA target sequence for XPO1 (NM_003400.2,1100-1118).
gttgttggtatctgaagta

SEQ ID NO: 271571 - DNA, 19 bp, Homo sapiens
  siRNA target sequence for XPO1 (NM_003400.2,1218-1236).
ctttctggaagtcaacatt

SEQ ID NO: 271572 - DNA, 19 bp, Homo sapiens
  siRNA target sequence for XPO1 (NM_003400.2,1259-1277).
gctatatttgcccatgtta

SEQ ID NO: 271573 - DNA, 19 bp, Homo sapiens
  siRNA target sequence for XPO1 (NM_003400.2,1283-1301).
ggtccgtttattaatggtt

SEQ ID NO: 271574 - DNA, 19 bp, Homo sapiens
  siRNA target sequence for XPO1 (NM_003400.2,1284-1302).
gtccgtttattaatggtta

SEQ ID NO: 271575 - DNA, 19 bp, Homo sapiens
  siRNA target sequence for XPO1 (NM_003400.2,1331-1349).
ggttgtagagaatgatcaa

SEQ ID NO: 271576 - DNA, 19 bp, Homo sapiens
  siRNA target sequence for XPO1 (NM_003400.2,1353-1371).
gaagttgtgagagaattca

SEQ ID NO: 271577 - DNA, 19 bp, Homo sapiens
  siRNA target sequence for XPO1 (NM_003400.2,1356-1374).
gttgtgagagaattcatga

SEQ ID NO: 271578 - DNA, 19 bp, Homo sapiens
  siRNA target sequence for XPO1 (NM_003400.2,1377-1395).
gatacagattccataaatt

SEQ ID NO: 271579 - DNA, 19 bp, Homo sapiens
  siRNA target sequence for XPO1 (NM_003400.2,1411-1429).
gggaaacattggtttatct

SEQ ID NO: 271580 - DNA, 19 bp, Homo sapiens
  siRNA target sequence for XPO1 (NM_003400.2,1432-1450).
ctcatctggattatgtaga

SEQ ID NO: 271581 - DNA, 19 bp, Homo sapiens
  siRNA target sequence for XPO1 (NM_003400.2,1434-1452).
catctggattatgtagata

SEQ ID NO: 271582 - DNA, 19 bp, Homo sapiens
  siRNA target sequence for XPO1 (NM_003400.2,1468-1486).
cagagaagcttcacaatca

SEQ ID NO: 271583 - DNA, 19 bp, Homo sapiens
  siRNA target sequence for XPO1 (NM_003400.2,1535-1553).
ggcaataggctccattagt

SEQ ID NO: 271584 - DNA, 19 bp, Homo sapiens
  siRNA target sequence for XPO1 (NM_003400.2,1552-1570).
gtggagcaatgcatgaaga

SEQ ID NO: 271585 - DNA, 19 bp, Homo sapiens
  siRNA target sequence for XPO1 (NM_003400.2,1571-1589).
ggacgaaaaacgatttctt

SEQ ID NO: 271586 - DNA, 19 bp, Homo sapiens
  siRNA target sequence for XPO1 (NM_003400.2,1574-1592).
cgaaaaacgatttcttgtt

SEQ ID NO: 271587 - DNA, 19 bp, Homo sapiens
  siRNA target sequence for XPO1 (NM_003400.2,1581-1599).
cgatttcttgttactgtta

SEQ ID NO: 271588 - DNA, 19 bp, Homo sapiens
  siRNA target sequence for XPO1 (NM_003400.2,1683-1701).
ggtcaatacccacgttttt

SEQ ID NO: 271589 - DNA, 19 bp, Homo sapiens
  siRNA target sequence for XPO1 (NM_003400.2,1684-1702).
gtcaatacccacgtttttt

SEQ ID NO: 271590 - DNA, 19 bp, Homo sapiens
  siRNA target sequence for XPO1 (NM_003400.2,1686-1704).
caatacccacgttttttga

SEQ ID NO: 271591 - DNA, 19 bp, Homo sapiens
  siRNA target sequence for XPO1 (NM_003400.2,1779-1797).
caggatatggcttgtgata

SEQ ID NO: 271592 - DNA, 19 bp, Homo sapiens
  siRNA target sequence for XPO1 (NM_003400.2,1781-1799).
ggatatggcttgtgatact

SEQ ID NO: 271593 - DNA, 19 bp, Homo sapiens
  siRNA target sequence for XPO1 (NM_003400.2,1782-1800).
gatatggcttgtgatactt

SEQ ID NO: 271594 - DNA, 19 bp, Homo sapiens
  siRNA target sequence for XPO1 (NM_003400.2,1787-1805).
ggcttgtgatactttcatt

SEQ ID NO: 271595 - DNA, 19 bp, Homo sapiens
  siRNA target sequence for XPO1 (NM_003400.2,1788-1806).
gcttgtgatactttcatta

SEQ ID NO: 271596 - DNA, 19 bp, Homo sapiens
  siRNA target sequence for XPO1 (NM_003400.2,1789-1807).
cttgtgatactttcattaa

SEQ ID NO: 271597 - DNA, 19 bp, Homo sapiens
  siRNA target sequence for XPO1 (NM_003400.2,1859-1877).
gatgccatttattgatgaa

SEQ ID NO: 271598 - DNA, 19 bp, Homo sapiens
  siRNA target sequence for XPO1 (NM_003400.2,1883-1901).
gaacaacattaacactatt

SEQ ID NO: 271599 - DNA, 19 bp, Homo sapiens
  siRNA target sequence for XPO1 (NM_003400.2,1918-1936).
ctcaacaggttcatacgtt

SEQ ID NO: 271600 - DNA, 19 bp, Homo sapiens
  siRNA target sequence for XPO1 (NM_003400.2,1920-1938).
caacaggttcatacgtttt

SEQ ID NO: 271601 - DNA, 19 bp, Homo sapiens
  siRNA target sequence for XPO1 (NM_003400.2,1955-1973).
catgattggtgcacaaaca

SEQ ID NO: 271602 - DNA, 19 bp, Homo sapiens
  siRNA target sequence for XPO1 (NM_003400.2,1958-1976).
gattggtgcacaaacagat

SEQ ID NO: 271603 - DNA, 19 bp, Homo sapiens
  siRNA target sequence for XPO1 (NM_003400.2,2009-2027).
catgttactccctaatcaa

SEQ ID NO: 271604 - DNA, 19 bp, Homo sapiens
  siRNA target sequence for XPO1 (NM_003400.2,2142-2160).
gttggacacccctttgtaa

SEQ ID NO: 271605 - DNA, 19 bp, Homo sapiens
  siRNA target sequence for XPO1 (NM_003400.2,2204-2222).
gtgcctcagtgaaaatatt

SEQ ID NO: 271606 - DNA, 19 bp, Homo sapiens
  siRNA target sequence for XPO1 (NM_003400.2,2224-2242).
ctgcagctatccaagctaa

SEQ ID NO: 271607 - DNA, 19 bp, Homo sapiens
  siRNA target sequence for XPO1 (NM_003400.2,2238-2256).
gctaatggtgaaatggtta

SEQ ID NO: 271608 - DNA, 19 bp, Homo sapiens
  siRNA target sequence for XPO1 (NM_003400.2,2275-2293).
gaagtatgcgaactgtaaa

SEQ ID NO: 271609 - DNA, 19 bp, Homo sapiens
  siRNA target sequence for XPO1 (NM_003400.2,2324-2342).
ggtgagccgatccaatgat

SEQ ID NO: 271610 - DNA, 19 bp, Homo sapiens
  siRNA target sequence for XPO1 (NM_003400.2,2344-2362).
cacagatggtcgctgaaaa

SEQ ID NO: 271611 - DNA, 19 bp, Homo sapiens
  siRNA target sequence for XPO1 (NM_003400.2,2346-2364).
cagatggtcgctgaaaatt

SEQ ID NO: 271612 - DNA, 19 bp, Homo sapiens
  siRNA target sequence for XPO1 (NM_003400.2,2348-2366).
gatggtcgctgaaaatttt

SEQ ID NO: 271613 - DNA, 19 bp, Homo sapiens
  siRNA target sequence for XPO1 (NM_003400.2,2351-2369).
ggtcgctgaaaattttgtt

SEQ ID NO: 271614 - DNA, 19 bp, Homo sapiens
  siRNA target sequence for XPO1 (NM_003400.2,2427-2445).
gaaccagaagtgcttagta

SEQ ID NO: 271615 - DNA, 19 bp, Homo sapiens
  siRNA target sequence for XPO1 (NM_003400.2,2430-2448).
ccagaagtgcttagtacta

SEQ ID NO: 271616 - DNA, 19 bp, Homo sapiens
  siRNA target sequence for XPO1 (NM_003400.2,2443-2461).
gtactatggccataattgt

SEQ ID NO: 271617 - DNA, 19 bp, Homo sapiens
  siRNA target sequence for XPO1 (NM_003400.2,2446-2464).
ctatggccataattgtcaa

SEQ ID NO: 271618 - DNA, 19 bp, Homo sapiens
  siRNA target sequence for XPO1 (NM_003400.2,2451-2469).
gccataattgtcaacaagt

SEQ ID NO: 271619 - DNA, 19 bp, Homo sapiens
  siRNA target sequence for XPO1 (NM_003400.2,2452-2470).
ccataattgtcaacaagtt

SEQ ID NO: 271620 - DNA, 19 bp, Homo sapiens
  siRNA target sequence for XPO1 (NM_003400.2,2453-2471).
cataattgtcaacaagtta

SEQ ID NO: 271621 - DNA, 19 bp, Homo sapiens
  siRNA target sequence for XPO1 (NM_003400.2,2465-2483).
caagttagggggacatata

SEQ ID NO: 271622 - DNA, 19 bp, Homo sapiens
  siRNA target sequence for XPO1 (NM_003400.2,2468-2486).
gttagggggacatataaca

SEQ ID NO: 271623 - DNA, 19 bp, Homo sapiens
  siRNA target sequence for XPO1 (NM_003400.2,2476-2494).
gacatataacagctgaaat

SEQ ID NO: 271624 - DNA, 19 bp, Homo sapiens
  siRNA target sequence for XPO1 (NM_003400.2,2488-2506).
ctgaaatacctcaaatatt

SEQ ID NO: 271625 - DNA, 19 bp, Homo sapiens
  siRNA target sequence for XPO1 (NM_003400.2,2520-2538).
gaatgcacattgaatatga

SEQ ID NO: 271626 - DNA, 19 bp, Homo sapiens
  siRNA target sequence for XPO1 (NM_003400.2,2553-2571).
gaagaatatcctgaacata

SEQ ID NO: 271627 - DNA, 19 bp, Homo sapiens
  siRNA target sequence for XPO1 (NM_003400.2,2556-2574).
gaatatcctgaacatagaa

SEQ ID NO: 271628 - DNA, 19 bp, Homo sapiens
  siRNA target sequence for XPO1 (NM_003400.2,2565-2583).
gaacatagaacgaactttt

SEQ ID NO: 271629 - DNA, 19 bp, Homo sapiens
  siRNA target sequence for XPO1 (NM_003400.2,2576-2594).
gaactttttcttactactt

SEQ ID NO: 271630 - DNA, 19 bp, Homo sapiens
  siRNA target sequence for XPO1 (NM_003400.2,2638-2656).
cacctacacagtttaaact

SEQ ID NO: 271631 - DNA, 19 bp, Homo sapiens
  siRNA target sequence for XPO1 (NM_003400.2,2658-2676).
gttttggattccatcattt

SEQ ID NO: 271632 - DNA, 19 bp, Homo sapiens
  siRNA target sequence for XPO1 (NM_003400.2,2677-2695).
gggctttcaaacatactat

SEQ ID NO: 271633 - DNA, 19 bp, Homo sapiens
  siRNA target sequence for XPO1 (NM_003400.2,2679-2697).
gctttcaaacatactatga

SEQ ID NO: 271634 - DNA, 19 bp, Homo sapiens
  siRNA target sequence for XPO1 (NM_003400.2,2706-2724).
gcagatacgggcttacaga

SEQ ID NO: 271635 - DNA, 19 bp, Homo sapiens
  siRNA target sequence for XPO1 (NM_003400.2,2707-2725).
cagatacgggcttacagat

SEQ ID NO: 271636 - DNA, 19 bp, Homo sapiens
  siRNA target sequence for XPO1 (NM_003400.2,2723-2741).
gatactttttacactctta

SEQ ID NO: 271637 - DNA, 19 bp, Homo sapiens
  siRNA target sequence for XPO1 (NM_003400.2,2769-2787).
gctcagagtttttatcaaa

SEQ ID NO: 271638 - DNA, 19 bp, Homo sapiens
  siRNA target sequence for XPO1 (NM_003400.2,2797-2815).
gtgatattctccagcatat

SEQ ID NO: 271639 - DNA, 19 bp, Homo sapiens
  siRNA target sequence for XPO1 (NM_003400.2,2799-2817).
gatattctccagcatatct

SEQ ID NO: 271640 - DNA, 19 bp, Homo sapiens
  siRNA target sequence for XPO1 (NM_003400.2,2828-2846).
gacagacacttcacatact

SEQ ID NO: 271641 - DNA, 19 bp, Homo sapiens
  siRNA target sequence for XPO1 (NM_003400.2,2841-2859).
catactgctggtttaacaa

SEQ ID NO: 271642 - DNA, 19 bp, Homo sapiens
  siRNA target sequence for XPO1 (NM_003400.2,2857-2875).
caatgcatgcatcaattct

SEQ ID NO: 271643 - DNA, 19 bp, Homo sapiens
  siRNA target sequence for XPO1 (NM_003400.2,2865-2883).
gcatcaattcttgcatata

SEQ ID NO: 271644 - DNA, 19 bp, Homo sapiens
  siRNA target sequence for XPO1 (NM_003400.2,2937-2955).
ccagttaacaaccaaatct

SEQ ID NO: 271645 - DNA, 19 bp, Homo sapiens
  siRNA target sequence for XPO1 (NM_003400.2,2938-2956).
cagttaacaaccaaatctt

SEQ ID NO: 271646 - DNA, 19 bp, Homo sapiens
  siRNA target sequence for XPO1 (NM_003400.2,2992-3010).
ccttccctcacctacaaga

SEQ ID NO: 271647 - DNA, 19 bp, Homo sapiens
  siRNA target sequence for XPO1 (NM_003400.2,3013-3031).
ctcaagtaaagctctttgt

SEQ ID NO: 271648 - DNA, 19 bp, Homo sapiens
  siRNA target sequence for XPO1 (NM_003400.2,3044-3062).
cagcttaaatcaagatatt

SEQ ID NO: 271649 - DNA, 19 bp, Homo sapiens
  siRNA target sequence for XPO1 (NM_003400.2,3161-3179).
cctacggcaggctgatgaa

SEQ ID NO: 271650 - DNA, 19 bp, Homo sapiens
  siRNA target sequence for XPO1 (NM_003400.2,3206-3224).
ccctggcatctttaatcca

SEQ ID NO: 271651 - DNA, 19 bp, Homo sapiens
  siRNA target sequence for XPO4 (NM_022459.3,37-55).
catgcagagcacatattct

SEQ ID NO: 271652 - DNA, 19 bp, Homo sapiens
  siRNA target sequence for XPO4 (NM_022459.3,40-58).
gcagagcacatattcttat

SEQ ID NO: 271653 - DNA, 19 bp, Homo sapiens
  siRNA target sequence for XPO4 (NM_022459.3,43-61).
gagcacatattcttatcat

SEQ ID NO: 271654 - DNA, 19 bp, Homo sapiens
  siRNA target sequence for XPO4 (NM_022459.3,54-72).
cttatcatttaggaaatca

SEQ ID NO: 271655 - DNA, 19 bp, Homo sapiens
  siRNA target sequence for XPO4 (NM_022459.3,110-128).
ctagtaaagtggactatgt

SEQ ID NO: 271656 - DNA, 19 bp, Homo sapiens
  siRNA target sequence for XPO4 (NM_022459.3,166-184).
gtccgagagtggattctct

SEQ ID NO: 271657 - DNA, 19 bp, Homo sapiens
  siRNA target sequence for XPO4 (NM_022459.3,172-190).
gagtggattctcttggaaa

SEQ ID NO: 271658 - DNA, 19 bp, Homo sapiens
  siRNA target sequence for XPO4 (NM_022459.3,206-224).
ctctgcgaacattcctttt

SEQ ID NO: 271659 - DNA, 19 bp, Homo sapiens
  siRNA target sequence for XPO4 (NM_022459.3,208-226).
ctgcgaacattccttttaa

SEQ ID NO: 271660 - DNA, 19 bp, Homo sapiens
  siRNA target sequence for XPO4 (NM_022459.3,211-229).
cgaacattccttttaacct

SEQ ID NO: 271661 - DNA, 19 bp, Homo sapiens
  siRNA target sequence for XPO4 (NM_022459.3,219-237).
ccttttaacctatgtctta

SEQ ID NO: 271662 - DNA, 19 bp, Homo sapiens
  siRNA target sequence for XPO4 (NM_022459.3,246-264).
caaccttcaaaagtatgtt

SEQ ID NO: 271663 - DNA, 19 bp, Homo sapiens
  siRNA target sequence for XPO4 (NM_022459.3,258-276).
gtatgttcgggaacagatt

SEQ ID NO: 271664 - DNA, 19 bp, Homo sapiens
  siRNA target sequence for XPO4 (NM_022459.3,349-367).
gaagtcagccagttgatta

SEQ ID NO: 271665 - DNA, 19 bp, Homo sapiens
  siRNA target sequence for XPO4 (NM_022459.3,352-370).
gtcagccagttgattagta

SEQ ID NO: 271666 - DNA, 19 bp, Homo sapiens
  siRNA target sequence for XPO4 (NM_022459.3,354-372).
cagccagttgattagtagt

SEQ ID NO: 271667 - DNA, 19 bp, Homo sapiens
  siRNA target sequence for XPO4 (NM_022459.3,388-406).
caaactctggcctgttcta

SEQ ID NO: 271668 - DNA, 19 bp, Homo sapiens
  siRNA target sequence for XPO4 (NM_022459.3,394-412).
ctggcctgttctattctga

SEQ ID NO: 271669 - DNA, 19 bp, Homo sapiens
  siRNA target sequence for XPO4 (NM_022459.3,413-431).
ctgcgctattgagtgaatt

SEQ ID NO: 271670 - DNA, 19 bp, Homo sapiens
  siRNA target sequence for XPO4 (NM_022459.3,415-433).
gcgctattgagtgaatttt

SEQ ID NO: 271671 - DNA, 19 bp, Homo sapiens
  siRNA target sequence for XPO4 (NM_022459.3,511-529).
gaccttcgtcagatcttca

SEQ ID NO: 271672 - DNA, 19 bp, Homo sapiens
  siRNA target sequence for XPO4 (NM_022459.3,514-532).
cttcgtcagatcttcatgt

SEQ ID NO: 271673 - DNA, 19 bp, Homo sapiens
  siRNA target sequence for XPO4 (NM_022459.3,525-543).
cttcatgttaactgttgaa

SEQ ID NO: 271674 - DNA, 19 bp, Homo sapiens
  siRNA target sequence for XPO4 (NM_022459.3,528-546).
catgttaactgttgaagtt

SEQ ID NO: 271675 - DNA, 19 bp, Homo sapiens
  siRNA target sequence for XPO4 (NM_022459.3,574-592).
ctcaatgctcagatgtctt

SEQ ID NO: 271676 - DNA, 19 bp, Homo sapiens
  siRNA target sequence for XPO4 (NM_022459.3,580-598).
gctcagatgtcttcagtat

SEQ ID NO: 271677 - DNA, 19 bp, Homo sapiens
  siRNA target sequence for XPO4 (NM_022459.3,609-627).
ccttgcactcgccaatcaa

SEQ ID NO: 271678 - DNA, 19 bp, Homo sapiens
  siRNA target sequence for XPO4 (NM_022459.3,652-670).
ccaaatttgggcagacatt

SEQ ID NO: 271679 - DNA, 19 bp, Homo sapiens
  siRNA target sequence for XPO4 (NM_022459.3,661-679).
ggcagacattatatagcta

SEQ ID NO: 271680 - DNA, 19 bp, Homo sapiens
  siRNA target sequence for XPO4 (NM_022459.3,662-680).
gcagacattatatagctat

SEQ ID NO: 271681 - DNA, 19 bp, Homo sapiens
  siRNA target sequence for XPO4 (NM_022459.3,665-683).
gacattatatagctatgtt

SEQ ID NO: 271682 - DNA, 19 bp, Homo sapiens
  siRNA target sequence for XPO4 (NM_022459.3,746-764).
gcagagttatggagctttt

SEQ ID NO: 271683 - DNA, 19 bp, Homo sapiens
  siRNA target sequence for XPO4 (NM_022459.3,861-879).
cccagatgaaggatcacaa

SEQ ID NO: 271684 - DNA, 19 bp, Homo sapiens
  siRNA target sequence for XPO4 (NM_022459.3,868-886).
gaaggatcacaagttgatt

SEQ ID NO: 271685 - DNA, 19 bp, Homo sapiens
  siRNA target sequence for XPO4 (NM_022459.3,872-890).
gatcacaagttgattatct

SEQ ID NO: 271686 - DNA, 19 bp, Homo sapiens
  siRNA target sequence for XPO4 (NM_022459.3,904-922).
gagggattactgaatacta

SEQ ID NO: 271687 - DNA, 19 bp, Homo sapiens
  siRNA target sequence for XPO4 (NM_022459.3,920-938).
ctatcaatggaattgaaat

SEQ ID NO: 271688 - DNA, 19 bp, Homo sapiens
  siRNA target sequence for XPO4 (NM_022459.3,989-1007).
ccgtgttcccacgaaatgt

SEQ ID NO: 271689 - DNA, 19 bp, Homo sapiens
  siRNA target sequence for XPO4 (NM_022459.3,990-1008).
cgtgttcccacgaaatgtt

SEQ ID NO: 271690 - DNA, 19 bp, Homo sapiens
  siRNA target sequence for XPO4 (NM_022459.3,991-1009).
gtgttcccacgaaatgttt

SEQ ID NO: 271691 - DNA, 19 bp, Homo sapiens
  siRNA target sequence for XPO4 (NM_022459.3,1006-1024).
gttttaactgccattccaa

SEQ ID NO: 271692 - DNA, 19 bp, Homo sapiens
  siRNA target sequence for XPO4 (NM_022459.3,1149-1167).
gttggagtcctggttaact

SEQ ID NO: 271693 - DNA, 19 bp, Homo sapiens
  siRNA target sequence for XPO4 (NM_022459.3,1160-1178).
ggttaactttggttcaaga

SEQ ID NO: 271694 - DNA, 19 bp, Homo sapiens
  siRNA target sequence for XPO4 (NM_022459.3,1170-1188).
ggttcaagatgacaaacat

SEQ ID NO: 271695 - DNA, 19 bp, Homo sapiens
  siRNA target sequence for XPO4 (NM_022459.3,1171-1189).
gttcaagatgacaaacatt

SEQ ID NO: 271696 - DNA, 19 bp, Homo sapiens
  siRNA target sequence for XPO4 (NM_022459.3,1208-1226).
cccaacatgcagttcaagt

SEQ ID NO: 271697 - DNA, 19 bp, Homo sapiens
  siRNA target sequence for XPO4 (NM_022459.3,1209-1227).
ccaacatgcagttcaagtt

SEQ ID NO: 271698 - DNA, 19 bp, Homo sapiens
  siRNA target sequence for XPO4 (NM_022459.3,1216-1234).
gcagttcaagttttcaatt

SEQ ID NO: 271699 - DNA, 19 bp, Homo sapiens
  siRNA target sequence for XPO4 (NM_022459.3,1301-1319).
ctcgtgaggaggaagaaat

SEQ ID NO: 271700 - DNA, 19 bp, Homo sapiens
  siRNA target sequence for XPO4 (NM_022459.3,1365-1383).
ggccagtgtaggaatgcta

SEQ ID NO: 271701 - DNA, 19 bp, Homo sapiens
  siRNA target sequence for XPO4 (NM_022459.3,1502-1520).
caagcactgttgacaacaa

SEQ ID NO: 271702 - DNA, 19 bp, Homo sapiens
  siRNA target sequence for XPO4 (NM_022459.3,1505-1523).
gcactgttgacaacaaaat

SEQ ID NO: 271703 - DNA, 19 bp, Homo sapiens
  siRNA target sequence for XPO4 (NM_022459.3,1575-1593).
cctcttagctgatgatact

SEQ ID NO: 271704 - DNA, 19 bp, Homo sapiens
  siRNA target sequence for XPO4 (NM_022459.3,1607-1625).
cgctaatacctccagaaat

SEQ ID NO: 271705 - DNA, 19 bp, Homo sapiens
  siRNA target sequence for XPO4 (NM_022459.3,1608-1626).
gctaatacctccagaaata

SEQ ID NO: 271706 - DNA, 19 bp, Homo sapiens
  siRNA target sequence for XPO4 (NM_022459.3,1654-1672).
gaagttgacattaatacaa

SEQ ID NO: 271707 - DNA, 19 bp, Homo sapiens
  siRNA target sequence for XPO4 (NM_022459.3,1780-1798).
gttgaatctcgagcaataa

SEQ ID NO: 271708 - DNA, 19 bp, Homo sapiens
  siRNA target sequence for XPO4 (NM_022459.3,1804-1822).
gatctcactcatctactaa

SEQ ID NO: 271709 - DNA, 19 bp, Homo sapiens
  siRNA target sequence for XPO4 (NM_022459.3,1825-1843).
ccccagatgggcaaagata

SEQ ID NO: 271710 - DNA, 19 bp, Homo sapiens
  siRNA target sequence for XPO4 (NM_022459.3,1826-1844).
cccagatgggcaaagatat

SEQ ID NO: 271711 - DNA, 19 bp, Homo sapiens
  siRNA target sequence for XPO4 (NM_022459.3,1827-1845).
ccagatgggcaaagatatt

SEQ ID NO: 271712 - DNA, 19 bp, Homo sapiens
  siRNA target sequence for XPO4 (NM_022459.3,1862-1880).
gctgggcaaagacttatct

SEQ ID NO: 271713 - DNA, 19 bp, Homo sapiens
  siRNA target sequence for XPO4 (NM_022459.3,1948-1966).
gagggttctcagtggataa

SEQ ID NO: 271714 - DNA, 19 bp, Homo sapiens
  siRNA target sequence for XPO4 (NM_022459.3,2072-2090).
gagaaagggcaaacttagt

SEQ ID NO: 271715 - DNA, 19 bp, Homo sapiens
  siRNA target sequence for XPO4 (NM_022459.3,2074-2092).
gaaagggcaaacttagtaa

SEQ ID NO: 271716 - DNA, 19 bp, Homo sapiens
  siRNA target sequence for XPO4 (NM_022459.3,2099-2117).
gtgagaactggtggaattt

SEQ ID NO: 271717 - DNA, 19 bp, Homo sapiens
  siRNA target sequence for XPO4 (NM_022459.3,2103-2121).
gaactggtggaatttagct

SEQ ID NO: 271718 - DNA, 19 bp, Homo sapiens
  siRNA target sequence for XPO4 (NM_022459.3,2137-2155).
cgaagcccacctcttaatt

SEQ ID NO: 271719 - DNA, 19 bp, Homo sapiens
  siRNA target sequence for XPO4 (NM_022459.3,2138-2156).
gaagcccacctcttaattt

SEQ ID NO: 271720 - DNA, 19 bp, Homo sapiens
  siRNA target sequence for XPO4 (NM_022459.3,2266-2284).
cttcagcagcgattcttaa

SEQ ID NO: 271721 - DNA, 19 bp, Homo sapiens
  siRNA target sequence for XPO4 (NM_022459.3,2274-2292).
gcgattcttaagagtgata

SEQ ID NO: 271722 - DNA, 19 bp, Homo sapiens
  siRNA target sequence for XPO4 (NM_022459.3,2275-2293).
cgattcttaagagtgataa

SEQ ID NO: 271723 - DNA, 19 bp, Homo sapiens
  siRNA target sequence for XPO4 (NM_022459.3,2378-2396).
ctgaggctacccagattga

SEQ ID NO: 271724 - DNA, 19 bp, Homo sapiens
  siRNA target sequence for XPO4 (NM_022459.3,2430-2448).
cttccttaccaattgcatt

SEQ ID NO: 271725 - DNA, 19 bp, Homo sapiens
  siRNA target sequence for XPO4 (NM_022459.3,2434-2452).
cttaccaattgcattggat

SEQ ID NO: 271726 - DNA, 19 bp, Homo sapiens
  siRNA target sequence for XPO4 (NM_022459.3,2449-2467).
ggattgatggaagtttaca

SEQ ID NO: 271727 - DNA, 19 bp, Homo sapiens
  siRNA target sequence for XPO4 (NM_022459.3,2481-2499).
gactgtcaatctcattata

SEQ ID NO: 271728 - DNA, 19 bp, Homo sapiens
  siRNA target sequence for XPO4 (NM_022459.3,2512-2530).
gaagttgcacataaacaga

SEQ ID NO: 271729 - DNA, 19 bp, Homo sapiens
  siRNA target sequence for XPO4 (NM_022459.3,2515-2533).
gttgcacataaacagatat

SEQ ID NO: 271730 - DNA, 19 bp, Homo sapiens
  siRNA target sequence for XPO4 (NM_022459.3,2539-2557).
cttggagagtccaaagcta

SEQ ID NO: 271731 - DNA, 19 bp, Homo sapiens
  siRNA target sequence for XPO4 (NM_022459.3,2545-2563).
gagtccaaagctatgaact

SEQ ID NO: 271732 - DNA, 19 bp, Homo sapiens
  siRNA target sequence for XPO4 (NM_022459.3,2549-2567).
ccaaagctatgaacttata

SEQ ID NO: 271733 - DNA, 19 bp, Homo sapiens
  siRNA target sequence for XPO4 (NM_022459.3,2569-2587).
gaagcctgccttactttgt

SEQ ID NO: 271734 - DNA, 19 bp, Homo sapiens
  siRNA target sequence for XPO4 (NM_022459.3,2656-2674).
caagacctgcttctcatta

SEQ ID NO: 271735 - DNA, 19 bp, Homo sapiens
  siRNA target sequence for XPO4 (NM_022459.3,2670-2688).
cattatggaacttcttact

SEQ ID NO: 271736 - DNA, 19 bp, Homo sapiens
  siRNA target sequence for XPO4 (NM_022459.3,2709-2727).
catagatttcagtgataca

SEQ ID NO: 271737 - DNA, 19 bp, Homo sapiens
  siRNA target sequence for XPO4 (NM_022459.3,2755-2773).
ggtcaagcagcaaacagat

SEQ ID NO: 271738 - DNA, 19 bp, Homo sapiens
  siRNA target sequence for XPO4 (NM_022459.3,2796-2814).
gttgtatggagtaaaccta

SEQ ID NO: 271739 - DNA, 19 bp, Homo sapiens
  siRNA target sequence for XPO4 (NM_022459.3,2799-2817).
gtatggagtaaacctaatt

SEQ ID NO: 271740 - DNA, 19 bp, Homo sapiens
  siRNA target sequence for XPO4 (NM_022459.3,2812-2830).
ctaattctgcccttgatgt

SEQ ID NO: 271741 - DNA, 19 bp, Homo sapiens
  siRNA target sequence for XPO4 (NM_022459.3,2851-2869).
ccaaccctttgtaatcagt

SEQ ID NO: 271742 - DNA, 19 bp, Homo sapiens
  siRNA target sequence for XPO4 (NM_022459.3,2852-2870).
caaccctttgtaatcagta

SEQ ID NO: 271743 - DNA, 19 bp, Homo sapiens
  siRNA target sequence for XPO4 (NM_022459.3,2861-2879).
gtaatcagtactacaaatt

SEQ ID NO: 271744 - DNA, 19 bp, Homo sapiens
  siRNA target sequence for XPO4 (NM_022459.3,2866-2884).
cagtactacaaattaatca

SEQ ID NO: 271745 - DNA, 19 bp, Homo sapiens
  siRNA target sequence for XPO4 (NM_022459.3,2922-2940).
gcttcctgaggatctgttt

SEQ ID NO: 271746 - DNA, 19 bp, Homo sapiens
  siRNA target sequence for XPO4 (NM_022459.3,2923-2941).
cttcctgaggatctgttta

SEQ ID NO: 271747 - DNA, 19 bp, Homo sapiens
  siRNA target sequence for XPO4 (NM_022459.3,2947-2965).
ctgatgtactccctagaat

SEQ ID NO: 271748 - DNA, 19 bp, Homo sapiens
  siRNA target sequence for XPO4 (NM_022459.3,2949-2967).
gatgtactccctagaatta

SEQ ID NO: 271749 - DNA, 19 bp, Homo sapiens
  siRNA target sequence for XPO4 (NM_022459.3,2952-2970).
gtactccctagaattagga

SEQ ID NO: 271750 - DNA, 19 bp, Homo sapiens
  siRNA target sequence for XPO4 (NM_022459.3,2958-2976).
cctagaattaggaatgaca

SEQ ID NO: 271751 - DNA, 19 bp, Homo sapiens
  siRNA target sequence for XPO4 (NM_022459.3,2959-2977).
ctagaattaggaatgacat

SEQ ID NO: 271752 - DNA, 19 bp, Homo sapiens
  siRNA target sequence for XPO4 (NM_022459.3,3076-3094).
gcaacacggcactttctta

SEQ ID NO: 271753 - DNA, 19 bp, Homo sapiens
  siRNA target sequence for XPO4 (NM_022459.3,3077-3095).
caacacggcactttcttaa

SEQ ID NO: 271754 - DNA, 19 bp, Homo sapiens
  siRNA target sequence for XPO4 (NM_022459.3,3087-3105).
ctttcttaagctggttttt

SEQ ID NO: 271755 - DNA, 19 bp, Homo sapiens
  siRNA target sequence for XPO4 (NM_022459.3,3149-3167).
cggctggcgaagctttcta

SEQ ID NO: 271756 - DNA, 19 bp, Homo sapiens
  siRNA target sequence for XPO4 (NM_022459.3,3151-3169).
gctggcgaagctttctaca

SEQ ID NO: 271757 - DNA, 19 bp, Homo sapiens
  siRNA target sequence for XPO4 (NM_022459.3,3179-3197).
gtttgcaccaggctgaata

SEQ ID NO: 271758 - DNA, 19 bp, Homo sapiens
  siRNA target sequence for XPO4 (NM_022459.3,3200-3218).
ctgaactggtcgaaacatt

SEQ ID NO: 271759 - DNA, 19 bp, Homo sapiens
  siRNA target sequence for XPO4 (NM_022459.3,3205-3223).
ctggtcgaaacattactat

SEQ ID NO: 271760 - DNA, 19 bp, Homo sapiens
  siRNA target sequence for XPO4 (NM_022459.3,3207-3225).
ggtcgaaacattactatca

SEQ ID NO: 271761 - DNA, 19 bp, Homo sapiens
  siRNA target sequence for XPO4 (NM_022459.3,3210-3228).
cgaaacattactatcaagt

SEQ ID NO: 271762 - DNA, 19 bp, Homo sapiens
  siRNA target sequence for XPO4 (NM_022459.3,3227-3245).
gtcagcaagacccagttat

SEQ ID NO: 271763 - DNA, 19 bp, Homo sapiens
  siRNA target sequence for XPO4 (NM_022459.3,3229-3247).
cagcaagacccagttattt

SEQ ID NO: 271764 - DNA, 19 bp, Homo sapiens
  siRNA target sequence for XPO4 (NM_022459.3,3316-3334).
cagaagatggccttcttaa

SEQ ID NO: 271765 - DNA, 19 bp, Homo sapiens
  siRNA target sequence for XPO4 (NM_022459.3,3321-3339).
gatggccttcttaaagagt

SEQ ID NO: 271766 - DNA, 19 bp, Homo sapiens
  siRNA target sequence for XPO4 (NM_022459.3,3324-3342).
ggccttcttaaagagttta

SEQ ID NO: 271767 - DNA, 19 bp, Homo sapiens
  siRNA target sequence for XPO4 (NM_022459.3,3364-3382).
ggtggtctcctttgtgtaa

SEQ ID NO: 271768 - DNA, 19 bp, Homo sapiens
  siRNA target sequence for XPO4 (NM_022459.3,3365-3383).
gtggtctcctttgtgtaaa

SEQ ID NO: 271769 - DNA, 19 bp, Homo sapiens
  siRNA target sequence for CTNS (NM_004937.1,347-365).
ggaattggctgactatttt

SEQ ID NO: 271770 - DNA, 19 bp, Homo sapiens
  siRNA target sequence for CTNS (NM_004937.1,354-372).
gctgactatttttatcctt

SEQ ID NO: 271771 - DNA, 19 bp, Homo sapiens
  siRNA target sequence for CTNS (NM_004937.1,377-395).
ccctgaagctcgtagagaa

SEQ ID NO: 271772 - DNA, 19 bp, Homo sapiens
  siRNA target sequence for CTNS (NM_004937.1,381-399).
gaagctcgtagagaaatgt

SEQ ID NO: 271773 - DNA, 19 bp, Homo sapiens
  siRNA target sequence for CTNS (NM_004937.1,474-492).
cctgcggccaccattaaat

SEQ ID NO: 271774 - DNA, 19 bp, Homo sapiens
  siRNA target sequence for CTNS (NM_004937.1,477-495).
gcggccaccattaaatgca

SEQ ID NO: 271775 - DNA, 19 bp, Homo sapiens
  siRNA target sequence for CTNS (NM_004937.1,478-496).
cggccaccattaaatgcaa

SEQ ID NO: 271776 - DNA, 19 bp, Homo sapiens
  siRNA target sequence for CTNS (NM_004937.1,493-511).
gcaaccctggtgatcactt

SEQ ID NO: 271777 - DNA, 19 bp, Homo sapiens
  siRNA target sequence for CTNS (NM_004937.1,497-515).
ccctggtgatcacttttga

SEQ ID NO: 271778 - DNA, 19 bp, Homo sapiens
  siRNA target sequence for CTNS (NM_004937.1,498-516).
cctggtgatcacttttgaa

SEQ ID NO: 271779 - DNA, 19 bp, Homo sapiens
  siRNA target sequence for CTNS (NM_004937.1,527-545).
gttccaaaaatattactat

SEQ ID NO: 271780 - DNA, 19 bp, Homo sapiens
  siRNA target sequence for CTNS (NM_004937.1,669-687).
cccgaggatacgctttctt

SEQ ID NO: 271781 - DNA, 19 bp, Homo sapiens
  siRNA target sequence for CTNS (NM_004937.1,671-689).
cgaggatacgctttcttgt

SEQ ID NO: 271782 - DNA, 19 bp, Homo sapiens
  siRNA target sequence for CTNS (NM_004937.1,674-692).
ggatacgctttcttgtgat

SEQ ID NO: 271783 - DNA, 19 bp, Homo sapiens
  siRNA target sequence for CTNS (NM_004937.1,699-717).
cagcgccattagcatcata

SEQ ID NO: 271784 - DNA, 19 bp, Homo sapiens
  siRNA target sequence for CTNS (NM_004937.1,701-719).
gcgccattagcatcataaa

SEQ ID NO: 271785 - DNA, 19 bp, Homo sapiens
  siRNA target sequence for CTNS (NM_004937.1,704-722).
ccattagcatcataaacca

SEQ ID NO: 271786 - DNA, 19 bp, Homo sapiens
  siRNA target sequence for CTNS (NM_004937.1,724-742).
gtgattggctggatctact

SEQ ID NO: 271787 - DNA, 19 bp, Homo sapiens
  siRNA target sequence for CTNS (NM_004937.1,853-871).
gcctacagtgtattcaaca

SEQ ID NO: 271788 - DNA, 19 bp, Homo sapiens
  siRNA target sequence for CTNS (NM_004937.1,880-898).
ctctgggtgccctacatca

SEQ ID NO: 271789 - DNA, 19 bp, Homo sapiens
  siRNA target sequence for CTNS (NM_004937.1,979-997).
gtcctcacgctgatcatca

SEQ ID NO: 271790 - DNA, 19 bp, Homo sapiens
  siRNA target sequence for CTNS (NM_004937.1,1070-1088).
cgtggctcttcgcatttgt

SEQ ID NO: 271791 - DNA, 19 bp, Homo sapiens
  siRNA target sequence for CTNS (NM_004937.1,1165-1183).
gtcacgctggtcaagtatt

SEQ ID NO: 271792 - DNA, 19 bp, Homo sapiens
  siRNA target sequence for CTNS (NM_004937.1,1167-1185).
cacgctggtcaagtatttt

SEQ ID NO: 271793 - DNA, 19 bp, Homo sapiens
  siRNA target sequence for CTNS (NM_004937.1,1170-1188).
gctggtcaagtattttcca

SEQ ID NO: 271794 - DNA, 19 bp, Homo sapiens
  siRNA target sequence for CTNS (NM_004937.1,1186-1204).
ccacaggcctacatgaact

SEQ ID NO: 271795 - DNA, 19 bp, Homo sapiens
  siRNA target sequence for CTNS (NM_004937.1,1193-1211).
cctacatgaacttttacta

SEQ ID NO: 271796 - DNA, 19 bp, Homo sapiens
  siRNA target sequence for XK (NM_021083.2,194-212).
gcgctgacgttgcttttct

SEQ ID NO: 271797 - DNA, 19 bp, Homo sapiens
  siRNA target sequence for XK (NM_021083.2,538-556).
gaccctacagctgtacata

SEQ ID NO: 271798 - DNA, 19 bp, Homo sapiens
  siRNA target sequence for XK (NM_021083.2,541-559).
cctacagctgtacataagt

SEQ ID NO: 271799 - DNA, 19 bp, Homo sapiens
  siRNA target sequence for XK (NM_021083.2,610-628).
cctgttgtccattgtgtat

SEQ ID NO: 271800 - DNA, 19 bp, Homo sapiens
  siRNA target sequence for XK (NM_021083.2,670-688).
cgatgagtatgaagtcaaa

SEQ ID NO: 271801 - DNA, 19 bp, Homo sapiens
  siRNA target sequence for XK (NM_021083.2,696-714).
ctctggcctatgtctgtat

SEQ ID NO: 271802 - DNA, 19 bp, Homo sapiens
  siRNA target sequence for XK (NM_021083.2,736-754).
gattgccactcgagttgta

SEQ ID NO: 271803 - DNA, 19 bp, Homo sapiens
  siRNA target sequence for XK (NM_021083.2,752-770).
gtagtcctggtcctcttta

SEQ ID NO: 271804 - DNA, 19 bp, Homo sapiens
  siRNA target sequence for XK (NM_021083.2,787-805).
ctgggtggtggttataata

SEQ ID NO: 271805 - DNA, 19 bp, Homo sapiens
  siRNA target sequence for XK (NM_021083.2,865-883).
cccattccctgagaacata

SEQ ID NO: 271806 - DNA, 19 bp, Homo sapiens
  siRNA target sequence for XK (NM_021083.2,904-922).
gggcaccaccattgtacta

SEQ ID NO: 271807 - DNA, 19 bp, Homo sapiens
  siRNA target sequence for XK (NM_021083.2,917-935).
gtactatgctttctaactt

SEQ ID NO: 271808 - DNA, 19 bp, Homo sapiens
  siRNA target sequence for XK (NM_021083.2,925-943).
ctttctaactttactctat

SEQ ID NO: 271809 - DNA, 19 bp, Homo sapiens
  siRNA target sequence for XK (NM_021083.2,1003-1021).
catcagcaagtcccataat

SEQ ID NO: 271810 - DNA, 19 bp, Homo sapiens
  siRNA target sequence for XK (NM_021083.2,1028-1046).
cagctactggtgtattaca

SEQ ID NO: 271811 - DNA, 19 bp, Homo sapiens
  siRNA target sequence for XK (NM_021083.2,1031-1049).
ctactggtgtattacatga

SEQ ID NO: 271812 - DNA, 19 bp, Homo sapiens
  siRNA target sequence for XK (NM_021083.2,1034-1052).
ctggtgtattacatgataa

SEQ ID NO: 271813 - DNA, 19 bp, Homo sapiens
  siRNA target sequence for XK (NM_021083.2,1036-1054).
ggtgtattacatgataaga

SEQ ID NO: 271814 - DNA, 19 bp, Homo sapiens
  siRNA target sequence for XK (NM_021083.2,1037-1055).
gtgtattacatgataagat

SEQ ID NO: 271815 - DNA, 19 bp, Homo sapiens
  siRNA target sequence for XK (NM_021083.2,1174-1192).
cttcatgcttgtattctat

SEQ ID NO: 271816 - DNA, 19 bp, Homo sapiens
  siRNA target sequence for XK (NM_021083.2,1205-1223).
ccttgcaaaaagctctttt

SEQ ID NO: 271817 - DNA, 19 bp, Homo sapiens
  siRNA target sequence for XK (NM_021083.2,1293-1311).
cctgtgagccgataggaaa

SEQ ID NO: 271818 - DNA, 19 bp, Homo sapiens
  siRNA target sequence for XK (NM_021083.2,1319-1337).
ctacagtcatccagagata

SEQ ID NO: 271819 - DNA, 19 bp, Homo sapiens
  siRNA target sequence for XK (NM_021083.2,1345-1363).
gacaccttctagcagtaaa

SEQ ID NO: 271820 - DNA, 19 bp, Homo sapiens
  siRNA target sequence for PITPNC1 (NM_012417.2,383-401).
caccgtagacgagtacaaa

SEQ ID NO: 271821 - DNA, 19 bp, Homo sapiens
  siRNA target sequence for PITPNC1 (NM_012417.2,385-403).
ccgtagacgagtacaaaat

SEQ ID NO: 271822 - DNA, 19 bp, Homo sapiens
  siRNA target sequence for PITPNC1 (NM_012417.2,386-404).
cgtagacgagtacaaaatt

SEQ ID NO: 271823 - DNA, 19 bp, Homo sapiens
  siRNA target sequence for PITPNC1 (NM_012417.2,405-423).
ggacagctgtacatgatca

SEQ ID NO: 271824 - DNA, 19 bp, Homo sapiens
  siRNA target sequence for PITPNC1 (NM_012417.2,565-583).
gagctgttgtccccaaaat

SEQ ID NO: 271825 - DNA, 19 bp, Homo sapiens
  siRNA target sequence for PITPNC1 (NM_012417.2,597-615).
gagaaggcttggaactatt

SEQ ID NO: 271826 - DNA, 19 bp, Homo sapiens
  siRNA target sequence for PITPNC1 (NM_012417.2,611-629).
ctattatccctacacaatt

SEQ ID NO: 271827 - DNA, 19 bp, Homo sapiens
  siRNA target sequence for PITPNC1 (NM_012417.2,643-661).
gttcctttctgccgaaatt

SEQ ID NO: 271828 - DNA, 19 bp, Homo sapiens
  siRNA target sequence for PITPNC1 (NM_012417.2,653-671).
gccgaaattctccattcat

SEQ ID NO: 271829 - DNA, 19 bp, Homo sapiens
  siRNA target sequence for PITPNC1 (NM_012417.2,735-753).
gacgtggagagagaagttt

SEQ ID NO: 271830 - DNA, 19 bp, Homo sapiens
  siRNA target sequence for PITPNC1 (NM_012417.2,745-763).
gagaagtttgctttattga

SEQ ID NO: 271831 - DNA, 19 bp, Homo sapiens
  siRNA target sequence for PITPNC1 (NM_012417.2,786-804).
gagcgctactacaaagaat

SEQ ID NO: 271832 - DNA, 19 bp, Homo sapiens
  siRNA target sequence for PITPNC1 (NM_012417.2,788-806).
gcgctactacaaagaatct

SEQ ID NO: 271833 - DNA, 19 bp, Homo sapiens
  siRNA target sequence for PITPNC1 (NM_012417.2,857-875).
ggaaggctggagagatagt

SEQ ID NO: 271834 - DNA, 19 bp, Homo sapiens
  siRNA target sequence for PITPNC1 (NM_012417.2,943-961).
gagtggaacaatttgtaca

SEQ ID NO: 271835 - DNA, 19 bp, Homo sapiens
  siRNA target sequence for PITPNC1 (NM_012417.2,1003-1021).
cttttgcatgggttgatga

SEQ ID NO: 271836 - DNA, 19 bp, Homo sapiens
  siRNA target sequence for PITPNC1 (NM_012417.2,1151-1169).
ccgcagtgcgccttctagt

SEQ ID NO: 271837 - DNA, 19 bp, Homo sapiens
  siRNA target sequence for PITPNC1 (NM_012417.2,1190-1208).
cacagacgcacccgaattt

SEQ ID NO: 271838 - DNA, 19 bp, Homo sapiens
  siRNA target sequence for PITPNC1 (NM_012417.2,1192-1210).
cagacgcacccgaatttct

SEQ ID NO: 271839 - DNA, 19 bp, Homo sapiens
  siRNA target sequence for PITPNC1 (NM_012417.2,1194-1212).
gacgcacccgaatttctgt

SEQ ID NO: 271840 - DNA, 19 bp, Homo sapiens
  siRNA target sequence for PITPNC1 (NM_012417.2,1301-1319).
cggcatgcactcttcagat

SEQ ID NO: 271841 - DNA, 19 bp, Homo sapiens
  siRNA target sequence for PITPNC1 (NM_012417.2,1322-1340).
gccatgtcggcccaaatct

SEQ ID NO: 271842 - DNA, 19 bp, Homo sapiens
  siRNA target sequence for PITPNC1 (NM_012417.2,1324-1342).
catgtcggcccaaatctga

SEQ ID NO: 271843 - DNA, 19 bp, Homo sapiens
  siRNA target sequence for PITPNC1 (NM_181671.1,1050-1068).
cgggaatacgagaaaaaca

SEQ ID NO: 271844 - DNA, 19 bp, Homo sapiens
  siRNA target sequence for PITPNC1 (NM_181671.1,1051-1069).
gggaatacgagaaaaacat

SEQ ID NO: 271845 - DNA, 19 bp, Homo sapiens
  siRNA target sequence for PITPNC1 (NM_181671.1,1070-1088).
gcatgaacaaaccaacata

SEQ ID NO: 271846 - DNA, 19 bp, Homo sapiens
  siRNA target sequence for PITPNC1 (NM_181671.1,1071-1089).
catgaacaaaccaacataa

SEQ ID NO: 271847 - DNA, 19 bp, Homo sapiens
  siRNA target sequence for PITPNC1 (NM_181671.1,1128-1146).
gagagtcatgcccaaacaa

SEQ ID NO: 271848 - DNA, 19 bp, Homo sapiens
  siRNA target sequence for APOA2 (NM_001643.1,233-251).
gccgaggccaagtcttact

SEQ ID NO: 271849 - DNA, 19 bp, Homo sapiens
  siRNA target sequence for APOA2 (NM_001643.1,234-252).
ccgaggccaagtcttactt

SEQ ID NO: 271850 - DNA, 19 bp, Homo sapiens
  siRNA target sequence for APOA2 (NM_001643.1,235-253).
cgaggccaagtcttacttt

SEQ ID NO: 271851 - DNA, 19 bp, Homo sapiens
  siRNA target sequence for APOA2 (NM_001643.1,294-312).
ctggaacggaactggttaa

SEQ ID NO: 271852 - DNA, 19 bp, Homo sapiens
  siRNA target sequence for APOA2 (NM_001643.1,296-314).
ggaacggaactggttaact

SEQ ID NO: 271853 - DNA, 19 bp, Homo sapiens
  siRNA target sequence for APOA2 (NM_001643.1,297-315).
gaacggaactggttaactt

SEQ ID NO: 271854 - DNA, 19 bp, Homo sapiens
  siRNA target sequence for APOA2 (NM_001643.1,300-318).
cggaactggttaacttctt

SEQ ID NO: 271855 - DNA, 19 bp, Homo sapiens
  siRNA target sequence for APOC1 (NM_001645.2,243-261).
gatgcgggagtggttttca

SEQ ID NO: 271856 - DNA, 19 bp, Homo sapiens
  siRNA target sequence for APOC3 (NM_000040.1,135-153).
gcttcatgcagggttacat

SEQ ID NO: 271857 - DNA, 19 bp, Homo sapiens
  siRNA target sequence for APOC3 (NM_000040.1,270-288).
gcaccgttaaggacaagtt

SEQ ID NO: 271858 - DNA, 19 bp, Homo sapiens
  siRNA target sequence for APOC4 (NM_001646.1,155-173).
ccaccaaagctaaagatga

SEQ ID NO: 271859 - DNA, 19 bp, Homo sapiens
  siRNA target sequence for APOC4 (NM_001646.1,237-255).
gagacgggtggcaatggtt

SEQ ID NO: 271860 - DNA, 19 bp, Homo sapiens
  siRNA target sequence for APOC4 (NM_001646.1,280-298).
cttcatgcagacctactat

SEQ ID NO: 271861 - DNA, 19 bp, Homo sapiens
  siRNA target sequence for APOC4 (NM_001646.1,336-354).
cctggttcctcgaatccaa

SEQ ID NO: 271862 - DNA, 19 bp, Homo sapiens
  siRNA target sequence for APOL1 (NM_003661.2,252-270).
ggagcgagggtgcaacaaa

SEQ ID NO: 271863 - DNA, 19 bp, Homo sapiens
  siRNA target sequence for APOL1 (NM_003661.2,253-271).
gagcgagggtgcaacaaaa

SEQ ID NO: 271864 - DNA, 19 bp, Homo sapiens
  siRNA target sequence for APOL1 (NM_003661.2,256-274).
cgagggtgcaacaaaacgt

SEQ ID NO: 271865 - DNA, 19 bp, Homo sapiens
  siRNA target sequence for APOL1 (NM_003661.2,366-384).
gaggatgccattaagtatt

SEQ ID NO: 271866 - DNA, 19 bp, Homo sapiens
  siRNA target sequence for APOL1 (NM_003661.2,414-432).
ctactcctgctgactgata

SEQ ID NO: 271867 - DNA, 19 bp, Homo sapiens
  siRNA target sequence for APOL1 (NM_003661.2,506-524).
ggacaaccttgcaagacaa

SEQ ID NO: 271868 - DNA, 19 bp, Homo sapiens
  siRNA target sequence for APOL1 (NM_003661.2,507-525).
gacaaccttgcaagacaaa

SEQ ID NO: 271869 - DNA, 19 bp, Homo sapiens
  siRNA target sequence for APOL1 (NM_003661.2,513-531).
cttgcaagacaaatgatca

SEQ ID NO: 271870 - DNA, 19 bp, Homo sapiens
  siRNA target sequence for APOL1 (NM_003661.2,516-534).
gcaagacaaatgatcatga

SEQ ID NO: 271871 - DNA, 19 bp, Homo sapiens
  siRNA target sequence for APOL1 (NM_003661.2,766-784).
gaggcagccttgtactctt

SEQ ID NO: 271872 - DNA, 19 bp, Homo sapiens
  siRNA target sequence for APOL1 (NM_003661.2,794-812).
gatggagttgggaatcaca

SEQ ID NO: 271873 - DNA, 19 bp, Homo sapiens
  siRNA target sequence for APOL1 (NM_003661.2,816-834).
gctttgaccgggattacca

SEQ ID NO: 271874 - DNA, 19 bp, Homo sapiens
  siRNA target sequence for APOL1 (NM_003661.2,841-859).
ccatggactacggaaagaa

SEQ ID NO: 271875 - DNA, 19 bp, Homo sapiens
  siRNA target sequence for APOL1 (NM_003661.2,929-947).
gtttttgggtgagaacata

SEQ ID NO: 271876 - DNA, 19 bp, Homo sapiens
  siRNA target sequence for APOL1 (NM_003661.2,961-979).
ccttagctggcaatactta

SEQ ID NO: 271877 - DNA, 19 bp, Homo sapiens
  siRNA target sequence for APOL1 (NM_003661.2,1076-1094).
ggtcactgagccaatctca

SEQ ID NO: 271878 - DNA, 19 bp, Homo sapiens
  siRNA target sequence for APOL1 (NM_003661.2,1180-1198).
ctgtaagcttctttcttgt

SEQ ID NO: 271879 - DNA, 19 bp, Homo sapiens
  siRNA target sequence for APOL1 (NM_003661.2,1209-1227).
gtctacctcgtgtacgaat

SEQ ID NO: 271880 - DNA, 19 bp, Homo sapiens
  siRNA target sequence for APOL1 (NM_003661.2,1314-1332).
ctcaacaataattataaga

SEQ ID NO: 271881 - DNA, 19 bp, Homo sapiens
  siRNA target sequence for APOL3 (NM_014349.2,748-766).
gaagcttagaacatatgca

SEQ ID NO: 271882 - DNA, 19 bp, Homo sapiens
  siRNA target sequence for APOL3 (NM_014349.2,768-786).
ctattgaggacgaatatgt

SEQ ID NO: 271883 - DNA, 19 bp, Homo sapiens
  siRNA target sequence for APOL3 (NM_014349.2,875-893).
cgtgcccttgcaaatggta

SEQ ID NO: 271884 - DNA, 19 bp, Homo sapiens
  siRNA target sequence for APOL3 (NM_014349.2,879-897).
cccttgcaaatggtattga

SEQ ID NO: 271885 - DNA, 19 bp, Homo sapiens
  siRNA target sequence for APOL3 (NM_014349.2,1082-1100).
gtggagcactcatacacat

SEQ ID NO: 271886 - DNA, 19 bp, Homo sapiens
  siRNA target sequence for APOL3 (NM_014349.2,1085-1103).
gagcactcatacacatcat

SEQ ID NO: 271887 - DNA, 19 bp, Homo sapiens
  siRNA target sequence for APOL3 (NM_014349.2,1087-1105).
gcactcatacacatcatca

SEQ ID NO: 271888 - DNA, 19 bp, Homo sapiens
  siRNA target sequence for APOL3 (NM_014349.2,1137-1155).
ccagcattgaccgattgaa

SEQ ID NO: 271889 - DNA, 19 bp, Homo sapiens
  siRNA target sequence for APOL3 (NM_014349.2,1145-1163).
gaccgattgaaggtattta

SEQ ID NO: 271890 - DNA, 19 bp, Homo sapiens
  siRNA target sequence for APOL3 (NM_014349.2,1219-1237).
cgaagccacacaaaccatt

SEQ ID NO: 271891 - DNA, 19 bp, Homo sapiens
  siRNA target sequence for APOL3 (NM_014349.2,1525-1543).
ggagctcactcagatctat

SEQ ID NO: 271892 - DNA, 19 bp, Homo sapiens
  siRNA target sequence for APOL6 (NM_030641.2,320-338).
gtgaggctggtgttggttt

SEQ ID NO: 271893 - DNA, 19 bp, Homo sapiens
  siRNA target sequence for APOL6 (NM_030641.2,394-412).
gatctgtcccccgaagaaa

SEQ ID NO: 271894 - DNA, 19 bp, Homo sapiens
  siRNA target sequence for APOL6 (NM_030641.2,476-494).
gtgccctcgcagacgatat

SEQ ID NO: 271895 - DNA, 19 bp, Homo sapiens
  siRNA target sequence for APOL6 (NM_030641.2,483-501).
cgcagacgatattgacaaa

SEQ ID NO: 271896 - DNA, 19 bp, Homo sapiens
  siRNA target sequence for APOL6 (NM_030641.2,496-514).
gacaaaacccacaagaaat

SEQ ID NO: 271897 - DNA, 19 bp, Homo sapiens
  siRNA target sequence for APOL6 (NM_030641.2,680-698).
cgttggaacgctccaaaaa

SEQ ID NO: 271898 - DNA, 19 bp, Homo sapiens
  siRNA target sequence for APOL6 (NM_030641.2,814-832).
cttagaaacaccttgaagt

SEQ ID NO: 271899 - DNA, 19 bp, Homo sapiens
  siRNA target sequence for APOL6 (NM_030641.2,846-864).
cgtccgtgcattttggaaa

SEQ ID NO: 271900 - DNA, 19 bp, Homo sapiens
  siRNA target sequence for APOL6 (NM_030641.2,850-868).
cgtgcattttggaaactca

SEQ ID NO: 271901 - DNA, 19 bp, Homo sapiens
  siRNA target sequence for APOL6 (NM_030641.2,877-895).
ccacgcttggccaatgcta

SEQ ID NO: 271902 - DNA, 19 bp, Homo sapiens
  siRNA target sequence for APOL6 (NM_030641.2,935-953).
gccgcgtgcaggtgcaaaa

SEQ ID NO: 271903 - DNA, 19 bp, Homo sapiens
  siRNA target sequence for APOL6 (NM_030641.2,975-993).
ggcgatgaccaaaaatgct

SEQ ID NO: 271904 - DNA, 19 bp, Homo sapiens
  siRNA target sequence for APOL6 (NM_030641.2,1147-1165).
ctcacccagctctacaaga

SEQ ID NO: 271905 - DNA, 19 bp, Homo sapiens
  siRNA target sequence for APOL6 (NM_030641.2,1200-1218).
ggtggggaaggatttaact

SEQ ID NO: 271906 - DNA, 19 bp, Homo sapiens
  siRNA target sequence for APOM (NM_019101.2,93-111).
cagctctgctctacttcta

SEQ ID NO: 271907 - DNA, 19 bp, Homo sapiens
  siRNA target sequence for APOM (NM_019101.2,101-119).
ctctacttctatggtatta

SEQ ID NO: 271908 - DNA, 19 bp, Homo sapiens
  siRNA target sequence for APOM (NM_019101.2,106-124).
cttctatggtattatcctt

SEQ ID NO: 271909 - DNA, 19 bp, Homo sapiens
  siRNA target sequence for APOM (NM_019101.2,453-471).
catgcccaggtggaatcat

SEQ ID NO: 271910 - DNA, 19 bp, Homo sapiens
  siRNA target sequence for APOM (NM_019101.2,499-517).
gcgctttctcctctacaat

SEQ ID NO: 271911 - DNA, 19 bp, Homo sapiens
  siRNA target sequence for APOM (NM_019101.2,524-542).
ccacatcctcccgaaaagt

SEQ ID NO: 271912 - DNA, 19 bp, Homo sapiens
  siRNA target sequence for APOM (NM_019101.2,583-601).
caaagccttcttattgact

SEQ ID NO: 271913 - DNA, 19 bp, Homo sapiens
  siRNA target sequence for APOM (NM_019101.2,618-636).
cctgtgagctgtccaataa

SEQ ID NO: 271914 - DNA, 19 bp, Homo sapiens
  siRNA target sequence for FHR-4 (NM_006684.1,182-200).
ggtctatattataagagtt

SEQ ID NO: 271915 - DNA, 19 bp, Homo sapiens
  siRNA target sequence for FHR-4 (NM_006684.1,227-245).
gcaggacaatcttattcct

SEQ ID NO: 271916 - DNA, 19 bp, Homo sapiens
  siRNA target sequence for FHR-4 (NM_006684.1,228-246).
caggacaatcttattccta

SEQ ID NO: 271917 - DNA, 19 bp, Homo sapiens
  siRNA target sequence for FHR-4 (NM_006684.1,531-549).
gtgatatgcctgtttttga

SEQ ID NO: 271918 - DNA, 19 bp, Homo sapiens
  siRNA target sequence for FHR-4 (NM_006684.1,567-585).
gtaatggcatgcggtttaa

SEQ ID NO: 271919 - DNA, 19 bp, Homo sapiens
  siRNA target sequence for FHR-4 (NM_006684.1,612-630).
gctacgatggatatgaaat

SEQ ID NO: 271920 - DNA, 19 bp, Homo sapiens
  siRNA target sequence for FHR-4 (NM_006684.1,616-634).
cgatggatatgaaatcagt

SEQ ID NO: 271921 - DNA, 19 bp, Homo sapiens
  siRNA target sequence for SAA4 (NM_006512.1,81-99).
gcttttcacaggcattgtt

SEQ ID NO: 271922 - DNA, 19 bp, Homo sapiens
  siRNA target sequence for SAA4 (NM_006512.1,185-203).
gagcctattgggacataat

SEQ ID NO: 271923 - DNA, 19 bp, Homo sapiens
  siRNA target sequence for SAA4 (NM_006512.1,187-205).
gcctattgggacataatga

SEQ ID NO: 271924 - DNA, 19 bp, Homo sapiens
  siRNA target sequence for SAA4 (NM_006512.1,188-206).
cctattgggacataatgat

SEQ ID NO: 271925 - DNA, 19 bp, Homo sapiens
  siRNA target sequence for SAA4 (NM_006512.1,189-207).
ctattgggacataatgata

SEQ ID NO: 271926 - DNA, 19 bp, Homo sapiens
  siRNA target sequence for SAA4 (NM_006512.1,194-212).
gggacataatgatatccaa

SEQ ID NO: 271927 - DNA, 19 bp, Homo sapiens
  siRNA target sequence for SAA4 (NM_006512.1,195-213).
ggacataatgatatccaat

SEQ ID NO: 271928 - DNA, 19 bp, Homo sapiens
  siRNA target sequence for SAA4 (NM_006512.1,283-301).
gtctgggctgctaaactca

SEQ ID NO: 271929 - DNA, 19 bp, Homo sapiens
  siRNA target sequence for SAA4 (NM_006512.1,305-323).
gccgttccagggtctatct

SEQ ID NO: 271930 - DNA, 19 bp, Homo sapiens
  siRNA target sequence for SAA4 (NM_006512.1,306-324).
ccgttccagggtctatctt

SEQ ID NO: 271931 - DNA, 19 bp, Homo sapiens
  siRNA target sequence for SAA4 (NM_006512.1,308-326).
gttccagggtctatcttca

SEQ ID NO: 271932 - DNA, 19 bp, Homo sapiens
  siRNA target sequence for SAA4 (NM_006512.1,316-334).
gtctatcttcagggattaa

SEQ ID NO: 271933 - DNA, 19 bp, Homo sapiens
  siRNA target sequence for SAA4 (NM_006512.1,318-336).
ctatcttcagggattaata

SEQ ID NO: 271934 - DNA, 19 bp, Homo sapiens
  siRNA target sequence for SAA4 (NM_006512.1,443-461).
ctgacggcctgcctaagaa

SEQ ID NO: 271935 - DNA, 19 bp, Homo sapiens
  siRNA target sequence for SAA4 (NM_006512.1,445-463).
gacggcctgcctaagaaat

SEQ ID NO: 271936 - DNA, 19 bp, Homo sapiens
  siRNA target sequence for SLCO2A1 (NM_005630.1,117-135).
ggcagcgacacctctacta

SEQ ID NO: 271937 - DNA, 19 bp, Homo sapiens
  siRNA target sequence for SLCO2A1 (NM_005630.1,158-176).
ctcggtcttcggcaacatt

SEQ ID NO: 271938 - DNA, 19 bp, Homo sapiens
  siRNA target sequence for SLCO2A1 (NM_005630.1,160-178).
cggtcttcggcaacattaa

SEQ ID NO: 271939 - DNA, 19 bp, Homo sapiens
  siRNA target sequence for SLCO2A1 (NM_005630.1,222-240).
ctgtacagcgcctacttca

SEQ ID NO: 271940 - DNA, 19 bp, Homo sapiens
  siRNA target sequence for SLCO2A1 (NM_005630.1,273-291).
gggctctccagttcttcat

SEQ ID NO: 271941 - DNA, 19 bp, Homo sapiens
  siRNA target sequence for SLCO2A1 (NM_005630.1,368-386).
gcaccgtccacgtctgatt

SEQ ID NO: 271942 - DNA, 19 bp, Homo sapiens
  siRNA target sequence for SLCO2A1 (NM_005630.1,1041-1059).
ctgaggctcctgatgaact

SEQ ID NO: 271943 - DNA, 19 bp, Homo sapiens
  siRNA target sequence for SLCO2A1 (NM_005630.1,1238-1256).
cctcatgaagcgctttgtt

SEQ ID NO: 271944 - DNA, 19 bp, Homo sapiens
  siRNA target sequence for SLCO2A1 (NM_005630.1,1239-1257).
ctcatgaagcgctttgttt

SEQ ID NO: 271945 - DNA, 19 bp, Homo sapiens
  siRNA target sequence for SLCO2A1 (NM_005630.1,1351-1369).
caactgtggccgaagtcta

SEQ ID NO: 271946 - DNA, 19 bp, Homo sapiens
  siRNA target sequence for SLCO2A1 (NM_005630.1,1373-1391).
ccctagcacatcaagttct

SEQ ID NO: 271947 - DNA, 19 bp, Homo sapiens
  siRNA target sequence for SLCO2A1 (NM_005630.1,1374-1392).
cctagcacatcaagttcta

SEQ ID NO: 271948 - DNA, 19 bp, Homo sapiens
  siRNA target sequence for SLCO2A1 (NM_005630.1,1375-1393).
ctagcacatcaagttctat

SEQ ID NO: 271949 - DNA, 19 bp, Homo sapiens
  siRNA target sequence for SLCO2A1 (NM_005630.1,1378-1396).
gcacatcaagttctataca

SEQ ID NO: 271950 - DNA, 19 bp, Homo sapiens
  siRNA target sequence for SLCO2A1 (NM_005630.1,1379-1397).
cacatcaagttctatacat

SEQ ID NO: 271951 - DNA, 19 bp, Homo sapiens
  siRNA target sequence for SLCO2A1 (NM_005630.1,1426-1444).
gctcgtgcccagattctat

SEQ ID NO: 271952 - DNA, 19 bp, Homo sapiens
  siRNA target sequence for SLCO2A1 (NM_005630.1,1451-1469).
cccggtctgtggagacaat

SEQ ID NO: 271953 - DNA, 19 bp, Homo sapiens
  siRNA target sequence for SLCO2A1 (NM_005630.1,1528-1546).
caacctccaagcaactgat

SEQ ID NO: 271954 - DNA, 19 bp, Homo sapiens
  siRNA target sequence for SLCO2A1 (NM_005630.1,1531-1549).
cctccaagcaactgatcta

SEQ ID NO: 271955 - DNA, 19 bp, Homo sapiens
  siRNA target sequence for SLCO2A1 (NM_005630.1,1532-1550).
ctccaagcaactgatctat

SEQ ID NO: 271956 - DNA, 19 bp, Homo sapiens
  siRNA target sequence for SLCO2A1 (NM_005630.1,1534-1552).
ccaagcaactgatctattt

SEQ ID NO: 271957 - DNA, 19 bp, Homo sapiens
  siRNA target sequence for SLCO2A1 (NM_005630.1,1680-1698).
cacaaccccctctacatga

SEQ ID NO: 271958 - DNA, 19 bp, Homo sapiens
  siRNA target sequence for SLCO2A1 (NM_005630.1,1713-1731).
gtgaaccaggaggaaaagt

SEQ ID NO: 271959 - DNA, 19 bp, Homo sapiens
  siRNA target sequence for SLCO2A1 (NM_005630.1,1743-1761).
ggggtgcagttcttgttga

SEQ ID NO: 271960 - DNA, 19 bp, Homo sapiens
  siRNA target sequence for SLCO2A1 (NM_005630.1,1744-1762).
gggtgcagttcttgttgat

SEQ ID NO: 271961 - DNA, 19 bp, Homo sapiens
  siRNA target sequence for SLCO2A1 (NM_005630.1,1858-1876).
gggcctgcgcctactatga

SEQ ID NO: 271962 - DNA, 19 bp, Homo sapiens
  siRNA target sequence for SLCO2A1 (NM_005630.1,1860-1878).
gcctgcgcctactatgaca

SEQ ID NO: 271963 - DNA, 19 bp, Homo sapiens
  siRNA target sequence for SLC18A1 (NM_003053.1,552-570).
cgtacctagtggaatagca

SEQ ID NO: 271964 - DNA, 19 bp, Homo sapiens
  siRNA target sequence for SLC18A1 (NM_003053.1,563-581).
gaatagcatggatgaatga

SEQ ID NO: 271965 - DNA, 19 bp, Homo sapiens
  siRNA target sequence for SLC18A1 (NM_003053.1,616-634).
gccatctcagctcataaaa

SEQ ID NO: 271966 - DNA, 19 bp, Homo sapiens
  siRNA target sequence for SLC18A1 (NM_003053.1,677-695).
cccgggtcggggttctgtt

SEQ ID NO: 271967 - DNA, 19 bp, Homo sapiens
  siRNA target sequence for SLC18A1 (NM_003053.1,678-696).
ccgggtcggggttctgttt

SEQ ID NO: 271968 - DNA, 19 bp, Homo sapiens
  siRNA target sequence for SLC18A1 (NM_003053.1,750-768).
caacaggattggatatcat

SEQ ID NO: 271969 - DNA, 19 bp, Homo sapiens
  siRNA target sequence for SLC18A1 (NM_003053.1,781-799).
gctggctttgttatcatgt

SEQ ID NO: 271970 - DNA, 19 bp, Homo sapiens
  siRNA target sequence for SLC18A1 (NM_003053.1,782-800).
ctggctttgttatcatgtt

SEQ ID NO: 271971 - DNA, 19 bp, Homo sapiens
  siRNA target sequence for SLC18A1 (NM_003053.1,820-838).
gctttttctgggacctata

SEQ ID NO: 271972 - DNA, 19 bp, Homo sapiens
  siRNA target sequence for SLC18A1 (NM_003053.1,830-848).
ggacctatactctactctt

SEQ ID NO: 271973 - DNA, 19 bp, Homo sapiens
  siRNA target sequence for SLC18A1 (NM_003053.1,870-888).
cattggatcttcattttca

SEQ ID NO: 271974 - DNA, 19 bp, Homo sapiens
  siRNA target sequence for SLC18A1 (NM_003053.1,1136-1154).
ggactcccctctttatgct

SEQ ID NO: 271975 - DNA, 19 bp, Homo sapiens
  siRNA target sequence for SLC18A1 (NM_003053.1,1137-1155).
gactcccctctttatgctt

SEQ ID NO: 271976 - DNA, 19 bp, Homo sapiens
  siRNA target sequence for SLC18A1 (NM_003053.1,1336-1354).
ggtgtgttggccaacaaga

SEQ ID NO: 271977 - DNA, 19 bp, Homo sapiens
  siRNA target sequence for SLC18A1 (NM_003053.1,1564-1582).
gctgatgtggctttttgca

SEQ ID NO: 271978 - DNA, 19 bp, Homo sapiens
  siRNA target sequence for SLC18A1 (NM_003053.1,1581-1599).
catgggctttgctataggt

SEQ ID NO: 271979 - DNA, 19 bp, Homo sapiens
  siRNA target sequence for SLC18A1 (NM_003053.1,1605-1623).
caccggtggtgccattgta

SEQ ID NO: 271980 - DNA, 19 bp, Homo sapiens
  siRNA target sequence for SLC18A1 (NM_003053.1,1607-1625).
ccggtggtgccattgtaaa

SEQ ID NO: 271981 - DNA, 19 bp, Homo sapiens
  siRNA target sequence for SLC18A1 (NM_003053.1,1785-1803).
gcccacgaaggaatttcct

SEQ ID NO: 271982 - DNA, 19 bp, Homo sapiens
  siRNA target sequence for SLC18A2 (NM_003054.1,119-137).
ggaagctcatcctgttcat

SEQ ID NO: 271983 - DNA, 19 bp, Homo sapiens
  siRNA target sequence for SLC18A2 (NM_003054.1,291-309).
gagcatcttctcctattat

SEQ ID NO: 271984 - DNA, 19 bp, Homo sapiens
  siRNA target sequence for SLC18A2 (NM_003054.1,293-311).
gcatcttctcctattatga

SEQ ID NO: 271985 - DNA, 19 bp, Homo sapiens
  siRNA target sequence for SLC18A2 (NM_003054.1,450-468).
gcaagttggtctgttgttt

SEQ ID NO: 271986 - DNA, 19 bp, Homo sapiens
  siRNA target sequence for SLC18A2 (NM_003054.1,525-543).
cagaattggctatccaatt

SEQ ID NO: 271987 - DNA, 19 bp, Homo sapiens
  siRNA target sequence for SLC18A2 (NM_003054.1,533-551).
gctatccaattcccatatt

SEQ ID NO: 271988 - DNA, 19 bp, Homo sapiens
  siRNA target sequence for SLC18A2 (NM_003054.1,534-552).
ctatccaattcccatattt

SEQ ID NO: 271989 - DNA, 19 bp, Homo sapiens
  siRNA target sequence for SLC18A2 (NM_003054.1,553-571).
gcgggattctgcatcatgt

SEQ ID NO: 271990 - DNA, 19 bp, Homo sapiens
  siRNA target sequence for SLC18A2 (NM_003054.1,554-572).
cgggattctgcatcatgtt

SEQ ID NO: 271991 - DNA, 19 bp, Homo sapiens
  siRNA target sequence for SLC18A2 (NM_003054.1,555-573).
gggattctgcatcatgttt

SEQ ID NO: 271992 - DNA, 19 bp, Homo sapiens
  siRNA target sequence for SLC18A2 (NM_003054.1,567-585).
catgtttgtctcaacaatt

SEQ ID NO: 271993 - DNA, 19 bp, Homo sapiens
  siRNA target sequence for SLC18A2 (NM_003054.1,778-796).
gggagtgtgctctatgagt

SEQ ID NO: 271994 - DNA, 19 bp, Homo sapiens
  siRNA target sequence for SLC18A2 (NM_003054.1,1065-1083).
cttgccagctagtatctct

SEQ ID NO: 271995 - DNA, 19 bp, Homo sapiens
  siRNA target sequence for SLC18A2 (NM_003054.1,1068-1086).
gccagctagtatctcttat

SEQ ID NO: 271996 - DNA, 19 bp, Homo sapiens
  siRNA target sequence for SLC18A2 (NM_003054.1,1109-1127).
ggatacttgcacacaaaat

SEQ ID NO: 271997 - DNA, 19 bp, Homo sapiens
  siRNA target sequence for SLC18A2 (NM_003054.1,1169-1187).
gagtcagcattttatgtat

SEQ ID NO: 271998 - DNA, 19 bp, Homo sapiens
  siRNA target sequence for SLC18A2 (NM_003054.1,1173-1191).
cagcattttatgtattcca

SEQ ID NO: 271999 - DNA, 19 bp, Homo sapiens
  siRNA target sequence for SLC18A2 (NM_003054.1,1223-1241).
cgaactttggagttggttt

SEQ ID NO: 272000 - DNA, 19 bp, Homo sapiens
  siRNA target sequence for SLC18A2 (NM_003054.1,1262-1280).
cgtcaatgatgcctatcat

SEQ ID NO: 272001 - DNA, 19 bp, Homo sapiens
  siRNA target sequence for SLC18A2 (NM_003054.1,1337-1355).
cggatgtggcattttgtat

SEQ ID NO: 272002 - DNA, 19 bp, Homo sapiens
  siRNA target sequence for SLC18A2 (NM_003054.1,1378-1396).
gctggtggtgctattgcaa

SEQ ID NO: 272003 - DNA, 19 bp, Homo sapiens
  siRNA target sequence for SLC18A2 (NM_003054.1,1379-1397).
ctggtggtgctattgcaaa

SEQ ID NO: 272004 - DNA, 19 bp, Homo sapiens
  siRNA target sequence for SLC18A2 (NM_003054.1,1411-1429).
ccatggctcatgacaatta

SEQ ID NO: 272005 - DNA, 19 bp, Homo sapiens
  siRNA target sequence for SLC18A2 (NM_003054.1,1422-1440).
gacaattattgggataatt

SEQ ID NO: 272006 - DNA, 19 bp, Homo sapiens
  siRNA target sequence for SLC18A2 (NM_003054.1,1424-1442).
caattattgggataattga

SEQ ID NO: 272007 - DNA, 19 bp, Homo sapiens
  siRNA target sequence for SLC18A2 (NM_003054.1,1505-1523).
ctattctcatggatcacaa

SEQ ID NO: 272008 - DNA, 19 bp, Homo sapiens
  siRNA target sequence for SLC18A2 (NM_003054.1,1516-1534).
gatcacaactgccctatta

SEQ ID NO: 272009 - DNA, 19 bp, Homo sapiens
  siRNA target sequence for SLC18A2 (NM_003054.1,1519-1537).
cacaactgccctattaaaa

SEQ ID NO: 272010 - DNA, 19 bp, Homo sapiens
  siRNA target sequence for SLC18A2 (NM_003054.1,1554-1572).
gaataatatccagtcatat

SEQ ID NO: 272011 - DNA, 19 bp, Homo sapiens
  siRNA target sequence for CTL1 (NM_022109.2,69-87).
ccgtagctgcacagacata

SEQ ID NO: 272012 - DNA, 19 bp, Homo sapiens
  siRNA target sequence for CTL1 (NM_022109.2,116-134).
gcattgggatgggatttat

SEQ ID NO: 272013 - DNA, 19 bp, Homo sapiens
  siRNA target sequence for CTL1 (NM_022109.2,117-135).
cattgggatgggatttatt

SEQ ID NO: 272014 - DNA, 19 bp, Homo sapiens
  siRNA target sequence for CTL1 (NM_022109.2,181-199).
ggatacgacagctatggaa

SEQ ID NO: 272015 - DNA, 19 bp, Homo sapiens
  siRNA target sequence for CTL1 (NM_022109.2,182-200).
gatacgacagctatggaaa

SEQ ID NO: 272016 - DNA, 19 bp, Homo sapiens
  siRNA target sequence for CTL1 (NM_022109.2,262-280).
cagcggaagtatgtattct

SEQ ID NO: 272017 - DNA, 19 bp, Homo sapiens
  siRNA target sequence for CTL1 (NM_022109.2,265-283).
cggaagtatgtattctttt

SEQ ID NO: 272018 - DNA, 19 bp, Homo sapiens
  siRNA target sequence for CTL1 (NM_022109.2,290-308).
catgcaacctggacttgat

SEQ ID NO: 272019 - DNA, 19 bp, Homo sapiens
  siRNA target sequence for CTL1 (NM_022109.2,303-321).
cttgataaaccggaagatt

SEQ ID NO: 272020 - DNA, 19 bp, Homo sapiens
  siRNA target sequence for CTL1 (NM_022109.2,347-365).
cgtgtccaaggcaagaact

SEQ ID NO: 272021 - DNA, 19 bp, Homo sapiens
  siRNA target sequence for CTL1 (NM_022109.2,350-368).
gtccaaggcaagaactgaa

SEQ ID NO: 272022 - DNA, 19 bp, Homo sapiens
  siRNA target sequence for CTL1 (NM_022109.2,385-403).
cagaagtttgcagagataa

SEQ ID NO: 272023 - DNA, 19 bp, Homo sapiens
  siRNA target sequence for CTL1 (NM_022109.2,415-433).
ctatgtagctacaacctaa

SEQ ID NO: 272024 - DNA, 19 bp, Homo sapiens
  siRNA target sequence for CTL1 (NM_022109.2,496-514).
gcgagtgcacctattccat

SEQ ID NO: 272025 - DNA, 19 bp, Homo sapiens
  siRNA target sequence for CTL1 (NM_022109.2,497-515).
cgagtgcacctattccatt

SEQ ID NO: 272026 - DNA, 19 bp, Homo sapiens
  siRNA target sequence for CTL1 (NM_022109.2,500-518).
gtgcacctattccattctt

SEQ ID NO: 272027 - DNA, 19 bp, Homo sapiens
  siRNA target sequence for CTL1 (NM_022109.2,524-542).
gctgtgctcctgtgaacat

SEQ ID NO: 272028 - DNA, 19 bp, Homo sapiens
  siRNA target sequence for CTL1 (NM_022109.2,576-594).
cacctttgtcagtgacaat

SEQ ID NO: 272029 - DNA, 19 bp, Homo sapiens
  siRNA target sequence for CTL1 (NM_022109.2,598-616).
gtcttacacaggctgatta

SEQ ID NO: 272030 - DNA, 19 bp, Homo sapiens
  siRNA target sequence for CTL1 (NM_022109.2,608-626).
ggctgattagtggagtaat

SEQ ID NO: 272031 - DNA, 19 bp, Homo sapiens
  siRNA target sequence for CTL1 (NM_022109.2,610-628).
ctgattagtggagtaatga

SEQ ID NO: 272032 - DNA, 19 bp, Homo sapiens
  siRNA target sequence for CTL1 (NM_022109.2,622-640).
gtaatgaccagcaaagaaa

SEQ ID NO: 272033 - DNA, 19 bp, Homo sapiens
  siRNA target sequence for CTL1 (NM_022109.2,648-666).
gggactttgcttgttatca

SEQ ID NO: 272034 - DNA, 19 bp, Homo sapiens
  siRNA target sequence for CTL1 (NM_022109.2,650-668).
gactttgcttgttatcact

SEQ ID NO: 272035 - DNA, 19 bp, Homo sapiens
  siRNA target sequence for CTL1 (NM_022109.2,715-733).
gtacttgtgtggatcttaa

SEQ ID NO: 272036 - DNA, 19 bp, Homo sapiens
  siRNA target sequence for CTL1 (NM_022109.2,718-736).
cttgtgtggatcttaacga

SEQ ID NO: 272037 - DNA, 19 bp, Homo sapiens
  siRNA target sequence for CTL1 (NM_022109.2,741-759).
ggtcatactcggttcactt

SEQ ID NO: 272038 - DNA, 19 bp, Homo sapiens
  siRNA target sequence for CTL1 (NM_022109.2,760-778).
ggaggcacaggtgtactat

SEQ ID NO: 272039 - DNA, 19 bp, Homo sapiens
  siRNA target sequence for CTL1 (NM_022109.2,803-821).
ggtctcccaaagaaactgt

SEQ ID NO: 272040 - DNA, 19 bp, Homo sapiens
  siRNA target sequence for CTL1 (NM_022109.2,1056-1074).
gatcatgacacttcttttt

SEQ ID NO: 272041 - DNA, 19 bp, Homo sapiens
  siRNA target sequence for CTL1 (NM_022109.2,1085-1103).
ccggcagtcctgttcagaa

SEQ ID NO: 272042 - DNA, 19 bp, Homo sapiens
  siRNA target sequence for CTL1 (NM_022109.2,1086-1104).
cggcagtcctgttcagaat

SEQ ID NO: 272043 - DNA, 19 bp, Homo sapiens
  siRNA target sequence for CTL1 (NM_022109.2,1174-1192).
ctgatttggatcagtgaat

SEQ ID NO: 272044 - DNA, 19 bp, Homo sapiens
  siRNA target sequence for CTL1 (NM_022109.2,1176-1194).
gatttggatcagtgaattt

SEQ ID NO: 272045 - DNA, 19 bp, Homo sapiens
  siRNA target sequence for CTL1 (NM_022109.2,1226-1244).
gagctgtggtaacatacta

SEQ ID NO: 272046 - DNA, 19 bp, Homo sapiens
  siRNA target sequence for CTL1 (NM_022109.2,1228-1246).
gctgtggtaacatactatt

SEQ ID NO: 272047 - DNA, 19 bp, Homo sapiens
  siRNA target sequence for CTL1 (NM_022109.2,1229-1247).
ctgtggtaacatactattt

SEQ ID NO: 272048 - DNA, 19 bp, Homo sapiens
  siRNA target sequence for CTL1 (NM_022109.2,1231-1249).
gtggtaacatactatttta

SEQ ID NO: 272049 - DNA, 19 bp, Homo sapiens
  siRNA target sequence for CTL1 (NM_022109.2,1233-1251).
ggtaacatactattttact

SEQ ID NO: 272050 - DNA, 19 bp, Homo sapiens
  siRNA target sequence for CTL1 (NM_022109.2,1250-1268).
ctagggataaaaggaattt

SEQ ID NO: 272051 - DNA, 19 bp, Homo sapiens
  siRNA target sequence for CTL1 (NM_022109.2,1294-1312).
gtaaatcgccttattcgtt

SEQ ID NO: 272052 - DNA, 19 bp, Homo sapiens
  siRNA target sequence for CTL1 (NM_022109.2,1329-1347).
ggcaaaaggatctttcatt

SEQ ID NO: 272053 - DNA, 19 bp, Homo sapiens
  siRNA target sequence for CTL1 (NM_022109.2,1337-1355).
gatctttcattatcacatt

SEQ ID NO: 272054 - DNA, 19 bp, Homo sapiens
  siRNA target sequence for CTL1 (NM_022109.2,1344-1362).
cattatcacattagtcaaa

SEQ ID NO: 272055 - DNA, 19 bp, Homo sapiens
  siRNA target sequence for CTL1 (NM_022109.2,1367-1385).
cgcgaatgatccttatgta

SEQ ID NO: 272056 - DNA, 19 bp, Homo sapiens
  siRNA target sequence for CTL1 (NM_022109.2,1368-1386).
gcgaatgatccttatgtat

SEQ ID NO: 272057 - DNA, 19 bp, Homo sapiens
  siRNA target sequence for CTL1 (NM_022109.2,1423-1441).
gcacgatgtgtgctgaaat

SEQ ID NO: 272058 - DNA, 19 bp, Homo sapiens
  siRNA target sequence for CTL1 (NM_022109.2,1426-1444).
cgatgtgtgctgaaatctt

SEQ ID NO: 272059 - DNA, 19 bp, Homo sapiens
  siRNA target sequence for CTL1 (NM_022109.2,1582-1600).
cgagtggctaccatcaaca

SEQ ID NO: 272060 - DNA, 19 bp, Homo sapiens
  siRNA target sequence for CTL1 (NM_022109.2,1601-1619).
cagtaggagattttatgtt

SEQ ID NO: 272061 - DNA, 19 bp, Homo sapiens
  siRNA target sequence for CTL1 (NM_022109.2,1652-1670).
caggtttagctgggattat

SEQ ID NO: 272062 - DNA, 19 bp, Homo sapiens
  siRNA target sequence for CTL1 (NM_022109.2,1655-1673).
gtttagctgggattatgct

SEQ ID NO: 272063 - DNA, 19 bp, Homo sapiens
  siRNA target sequence for CTL1 (NM_022109.2,1664-1682).
ggattatgctgctcaacta

SEQ ID NO: 272064 - DNA, 19 bp, Homo sapiens
  siRNA target sequence for CTL1 (NM_022109.2,1703-1721).
gggtgctgcctctgatcat

SEQ ID NO: 272065 - DNA, 19 bp, Homo sapiens
  siRNA target sequence for CTL1 (NM_022109.2,1755-1773).
cttcctgtctatttatgaa

SEQ ID NO: 272066 - DNA, 19 bp, Homo sapiens
  siRNA target sequence for CTL1 (NM_022109.2,1780-1798).
gtggatgtattattcttgt

SEQ ID NO: 272067 - DNA, 19 bp, Homo sapiens
  siRNA target sequence for CTL1 (NM_022109.2,1804-1822).
gccattgatacaaaataca

SEQ ID NO: 272068 - DNA, 19 bp, Homo sapiens
  siRNA target sequence for CTL1 (NM_022109.2,1834-1852).
cctggcagagaattctata

SEQ ID NO: 272069 - DNA, 19 bp, Homo sapiens
  siRNA target sequence for CTL1 (NM_022109.2,1835-1853).
ctggcagagaattctatat

SEQ ID NO: 272070 - DNA, 19 bp, Homo sapiens
  siRNA target sequence for CTL1 (NM_022109.2,1886-1904).
gtaggaaagcaatgaaaga

SEQ ID NO: 272071 - DNA, 19 bp, Homo sapiens
  siRNA target sequence for SLC5A7 (NM_021815.2,285-303).
ccatgtggaaggactgata

SEQ ID NO: 272072 - DNA, 19 bp, Homo sapiens
  siRNA target sequence for SLC5A7 (NM_021815.2,312-330).
cgtgttctaccttctaatt

SEQ ID NO: 272073 - DNA, 19 bp, Homo sapiens
  siRNA target sequence for SLC5A7 (NM_021815.2,352-370).
gcctggagaaccaaaaaca

SEQ ID NO: 272074 - DNA, 19 bp, Homo sapiens
  siRNA target sequence for SLC5A7 (NM_021815.2,387-405).
gcgcagcgaagccatcata

SEQ ID NO: 272075 - DNA, 19 bp, Homo sapiens
  siRNA target sequence for SLC5A7 (NM_021815.2,409-427).
ggtggccgagatattggtt

SEQ ID NO: 272076 - DNA, 19 bp, Homo sapiens
  siRNA target sequence for SLC5A7 (NM_021815.2,410-428).
gtggccgagatattggttt

SEQ ID NO: 272077 - DNA, 19 bp, Homo sapiens
  siRNA target sequence for SLC5A7 (NM_021815.2,413-431).
gccgagatattggtttatt

SEQ ID NO: 272078 - DNA, 19 bp, Homo sapiens
  siRNA target sequence for SLC5A7 (NM_021815.2,461-479).
gggtcggaggagggtatat

SEQ ID NO: 272079 - DNA, 19 bp, Homo sapiens
  siRNA target sequence for SLC5A7 (NM_021815.2,463-481).
gtcggaggagggtatatca

SEQ ID NO: 272080 - DNA, 19 bp, Homo sapiens
  siRNA target sequence for SLC5A7 (NM_021815.2,465-483).
cggaggagggtatatcaat

SEQ ID NO: 272081 - DNA, 19 bp, Homo sapiens
  siRNA target sequence for SLC5A7 (NM_021815.2,528-546).
ggctcaggcaccaattgga

SEQ ID NO: 272082 - DNA, 19 bp, Homo sapiens
  siRNA target sequence for SLC5A7 (NM_021815.2,530-548).
ctcaggcaccaattggata

SEQ ID NO: 272083 - DNA, 19 bp, Homo sapiens
  siRNA target sequence for SLC5A7 (NM_021815.2,569-587).
gtggcctgttctttgcaaa

SEQ ID NO: 272084 - DNA, 19 bp, Homo sapiens
  siRNA target sequence for SLC5A7 (NM_021815.2,584-602).
caaaacctatgcgttcaaa

SEQ ID NO: 272085 - DNA, 19 bp, Homo sapiens
  siRNA target sequence for SLC5A7 (NM_021815.2,595-613).
cgttcaaaggggtatgtga

SEQ ID NO: 272086 - DNA, 19 bp, Homo sapiens
  siRNA target sequence for SLC5A7 (NM_021815.2,605-623).
ggtatgtgaccatgttaga

SEQ ID NO: 272087 - DNA, 19 bp, Homo sapiens
  siRNA target sequence for SLC5A7 (NM_021815.2,624-642).
cccgtttcagcaaatctat

SEQ ID NO: 272088 - DNA, 19 bp, Homo sapiens
  siRNA target sequence for SLC5A7 (NM_021815.2,654-672).
gggcggactcctgtttatt

SEQ ID NO: 272089 - DNA, 19 bp, Homo sapiens
  siRNA target sequence for SLC5A7 (NM_021815.2,657-675).
cggactcctgtttattcct

SEQ ID NO: 272090 - DNA, 19 bp, Homo sapiens
  siRNA target sequence for SLC5A7 (NM_021815.2,679-697).
ctgatgggagaaatgttct

SEQ ID NO: 272091 - DNA, 19 bp, Homo sapiens
  siRNA target sequence for SLC5A7 (NM_021815.2,699-717).
ggctgcagcaattttctct

SEQ ID NO: 272092 - DNA, 19 bp, Homo sapiens
  siRNA target sequence for SLC5A7 (NM_021815.2,807-825).
ggtgggagggctctattct

SEQ ID NO: 272093 - DNA, 19 bp, Homo sapiens
  siRNA target sequence for SLC5A7 (NM_021815.2,838-856).
gatgtcgttcagctctttt

SEQ ID NO: 272094 - DNA, 19 bp, Homo sapiens
  siRNA target sequence for SLC5A7 (NM_021815.2,841-859).
gtcgttcagctcttttgca

SEQ ID NO: 272095 - DNA, 19 bp, Homo sapiens
  siRNA target sequence for SLC5A7 (NM_021815.2,843-861).
cgttcagctcttttgcatt

SEQ ID NO: 272096 - DNA, 19 bp, Homo sapiens
  siRNA target sequence for SLC5A7 (NM_021815.2,882-900).
cgtcccctttgcattgtca

SEQ ID NO: 272097 - DNA, 19 bp, Homo sapiens
  siRNA target sequence for SLC5A7 (NM_021815.2,954-972).
gccgtggctgggaactgtt

SEQ ID NO: 272098 - DNA, 19 bp, Homo sapiens
  siRNA target sequence for SLC5A7 (NM_021815.2,985-1003).
gtctactcttggcttgata

SEQ ID NO: 272099 - DNA, 19 bp, Homo sapiens
  siRNA target sequence for SLC5A7 (NM_021815.2,990-1008).
ctcttggcttgatagtttt

SEQ ID NO: 272100 - DNA, 19 bp, Homo sapiens
  siRNA target sequence for SLC5A7 (NM_021815.2,1028-1046).
gaatcccatggcaagcata

SEQ ID NO: 272101 - DNA, 19 bp, Homo sapiens
  siRNA target sequence for SLC5A7 (NM_021815.2,1051-1069).
cagagggttctctcttctt

SEQ ID NO: 272102 - DNA, 19 bp, Homo sapiens
  siRNA target sequence for SLC5A7 (NM_021815.2,1152-1170).
ggccattggagcatcaaca

SEQ ID NO: 272103 - DNA, 19 bp, Homo sapiens
  siRNA target sequence for SLC5A7 (NM_021815.2,1420-1438).
cgaatcacagtgtttgtgt

SEQ ID NO: 272104 - DNA, 19 bp, Homo sapiens
  siRNA target sequence for SLC5A7 (NM_021815.2,1461-1479).
ggccttgctgacgaaaact

SEQ ID NO: 272105 - DNA, 19 bp, Homo sapiens
  siRNA target sequence for SLC5A7 (NM_021815.2,1467-1485).
gctgacgaaaactgtgtat

SEQ ID NO: 272106 - DNA, 19 bp, Homo sapiens
  siRNA target sequence for SLC5A7 (NM_021815.2,1507-1525).
gaccttgtttacatcgtta

SEQ ID NO: 272107 - DNA, 19 bp, Homo sapiens
  siRNA target sequence for SLC5A7 (NM_021815.2,1579-1597).
gccgtggcaggttatgttt

SEQ ID NO: 272108 - DNA, 19 bp, Homo sapiens
  siRNA target sequence for SLC5A7 (NM_021815.2,1581-1599).
cgtggcaggttatgtttct

SEQ ID NO: 272109 - DNA, 19 bp, Homo sapiens
  siRNA target sequence for SLC5A7 (NM_021815.2,1621-1639).
ggaggggagccatatctgt

SEQ ID NO: 272110 - DNA, 19 bp, Homo sapiens
  siRNA target sequence for SLC5A7 (NM_021815.2,1625-1643).
gggagccatatctgtatct

SEQ ID NO: 272111 - DNA, 19 bp, Homo sapiens
  siRNA target sequence for SLC5A7 (NM_021815.2,1626-1644).
ggagccatatctgtatctt

SEQ ID NO: 272112 - DNA, 19 bp, Homo sapiens
  siRNA target sequence for SLC5A7 (NM_021815.2,1678-1696).
gatgataatggtatatata

SEQ ID NO: 272113 - DNA, 19 bp, Homo sapiens
  siRNA target sequence for SLC5A7 (NM_021815.2,1720-1738).
cttgccatggttacatcat

SEQ ID NO: 272114 - DNA, 19 bp, Homo sapiens
  siRNA target sequence for SLC5A7 (NM_021815.2,1723-1741).
gccatggttacatcattct

SEQ ID NO: 272115 - DNA, 19 bp, Homo sapiens
  siRNA target sequence for SLC5A7 (NM_021815.2,1724-1742).
ccatggttacatcattctt

SEQ ID NO: 272116 - DNA, 19 bp, Homo sapiens
  siRNA target sequence for SLC5A7 (NM_021815.2,1758-1776).
ctcctatctagccaagtat

SEQ ID NO: 272117 - DNA, 19 bp, Homo sapiens
  siRNA target sequence for SLC5A7 (NM_021815.2,1760-1778).
cctatctagccaagtatct

SEQ ID NO: 272118 - DNA, 19 bp, Homo sapiens
  siRNA target sequence for SLC5A7 (NM_021815.2,1761-1779).
ctatctagccaagtatcta

SEQ ID NO: 272119 - DNA, 19 bp, Homo sapiens
  siRNA target sequence for SLC5A7 (NM_021815.2,1790-1808).
gaaccttgccacctaaatt

SEQ ID NO: 272120 - DNA, 19 bp, Homo sapiens
  siRNA target sequence for SLC5A7 (NM_021815.2,1794-1812).
cttgccacctaaattagat

SEQ ID NO: 272121 - DNA, 19 bp, Homo sapiens
  siRNA target sequence for SLC5A7 (NM_021815.2,1797-1815).
gccacctaaattagatgta

SEQ ID NO: 272122 - DNA, 19 bp, Homo sapiens
  siRNA target sequence for SLC5A7 (NM_021815.2,1798-1816).
ccacctaaattagatgtat

SEQ ID NO: 272123 - DNA, 19 bp, Homo sapiens
  siRNA target sequence for SLC5A7 (NM_021815.2,1860-1878).
gacaattcttgtcaaaaat

SEQ ID NO: 272124 - DNA, 19 bp, Homo sapiens
  siRNA target sequence for SLC5A7 (NM_021815.2,1937-1955).
gctcaactttcaccaataa

SEQ ID NO: 272125 - DNA, 19 bp, Homo sapiens
  siRNA target sequence for SLC5A7 (NM_021815.2,1997-2015).
ggactgaagataatttaca

SEQ ID NO: 272126 - DNA, 19 bp, Homo sapiens
  siRNA target sequence for SLC35B1 (NM_005827.1,174-192).
gatcctgcaggaaaagata

SEQ ID NO: 272127 - DNA, 19 bp, Homo sapiens
  siRNA target sequence for SLC35B1 (NM_005827.1,280-298).
gtgtttgccaagatcttga

SEQ ID NO: 272128 - DNA, 19 bp, Homo sapiens
  siRNA target sequence for SLC35B1 (NM_005827.1,389-407).
gcaattcagcactacagtt

SEQ ID NO: 272129 - DNA, 19 bp, Homo sapiens
  siRNA target sequence for SLC35B1 (NM_005827.1,390-408).
caattcagcactacagttt

SEQ ID NO: 272130 - DNA, 19 bp, Homo sapiens
  siRNA target sequence for SLC35B1 (NM_005827.1,395-413).
cagcactacagtttgtcaa

SEQ ID NO: 272131 - DNA, 19 bp, Homo sapiens
  siRNA target sequence for SLC35B1 (NM_005827.1,398-416).
cactacagtttgtcaacta

SEQ ID NO: 272132 - DNA, 19 bp, Homo sapiens
  siRNA target sequence for SLC35B1 (NM_005827.1,596-614).
gctatggagagctactctt

SEQ ID NO: 272133 - DNA, 19 bp, Homo sapiens
  siRNA target sequence for SLC35B1 (NM_005827.1,683-701).
caggctccaaccacatgat

SEQ ID NO: 272134 - DNA, 19 bp, Homo sapiens
  siRNA target sequence for SLC35B1 (NM_005827.1,760-778).
gagctctgggagttcttga

SEQ ID NO: 272135 - DNA, 19 bp, Homo sapiens
  siRNA target sequence for SLC35B1 (NM_005827.1,791-809).
ggtaccctgccatcatcta

SEQ ID NO: 272136 - DNA, 19 bp, Homo sapiens
  siRNA target sequence for SLC35B1 (NM_005827.1,841-859).
ctgggtcagagcttcatct

SEQ ID NO: 272137 - DNA, 19 bp, Homo sapiens
  siRNA target sequence for SLC35B1 (NM_005827.1,843-861).
gggtcagagcttcatcttt

SEQ ID NO: 272138 - DNA, 19 bp, Homo sapiens
  siRNA target sequence for SLC35B1 (NM_005827.1,845-863).
gtcagagcttcatctttat

SEQ ID NO: 272139 - DNA, 19 bp, Homo sapiens
  siRNA target sequence for SLC35B1 (NM_005827.1,858-876).
ctttatgacggttgtgtat

SEQ ID NO: 272140 - DNA, 19 bp, Homo sapiens
  siRNA target sequence for SLC35B1 (NM_005827.1,905-923).
ctacaactcgaaagttctt

SEQ ID NO: 272141 - DNA, 19 bp, Homo sapiens
  siRNA target sequence for SLC35B1 (NM_005827.1,999-1017).
cctgggtcttggtcttgat

SEQ ID NO: 272142 - DNA, 19 bp, Homo sapiens
  siRNA target sequence for SLC35A5 (NM_017945.2,259-277).
gctgtagtcatcctgtaat

SEQ ID NO: 272143 - DNA, 19 bp, Homo sapiens
  siRNA target sequence for SLC35A5 (NM_017945.2,260-278).
ctgtagtcatcctgtaata

SEQ ID NO: 272144 - DNA, 19 bp, Homo sapiens
  siRNA target sequence for SLC35A5 (NM_017945.2,273-291).
gtaatatgctccttgtcaa

SEQ ID NO: 272145 - DNA, 19 bp, Homo sapiens
  siRNA target sequence for SLC35A5 (NM_017945.2,308-326).
gctaggtgccatattcatt

SEQ ID NO: 272146 - DNA, 19 bp, Homo sapiens
  siRNA target sequence for SLC35A5 (NM_017945.2,334-352).
gctcaagtcgcatcttact

SEQ ID NO: 272147 - DNA, 19 bp, Homo sapiens
  siRNA target sequence for SLC35A5 (NM_017945.2,335-353).
ctcaagtcgcatcttacta

SEQ ID NO: 272148 - DNA, 19 bp, Homo sapiens
  siRNA target sequence for SLC35A5 (NM_017945.2,337-355).
caagtcgcatcttactagt

SEQ ID NO: 272149 - DNA, 19 bp, Homo sapiens
  siRNA target sequence for SLC35A5 (NM_017945.2,343-361).
gcatcttactagtgaagta

SEQ ID NO: 272150 - DNA, 19 bp, Homo sapiens
  siRNA target sequence for SLC35A5 (NM_017945.2,344-362).
catcttactagtgaagtat

SEQ ID NO: 272151 - DNA, 19 bp, Homo sapiens
  siRNA target sequence for SLC35A5 (NM_017945.2,347-365).
cttactagtgaagtattct

SEQ ID NO: 272152 - DNA, 19 bp, Homo sapiens
  siRNA target sequence for SLC35A5 (NM_017945.2,420-438).
gaactggtgaagctagttt

SEQ ID NO: 272153 - DNA, 19 bp, Homo sapiens
  siRNA target sequence for SLC35A5 (NM_017945.2,501-519).
gcttcctggaaggaattct

SEQ ID NO: 272154 - DNA, 19 bp, Homo sapiens
  siRNA target sequence for SLC35A5 (NM_017945.2,699-717).
gcttccctcctgactttat

SEQ ID NO: 272155 - DNA, 19 bp, Homo sapiens
  siRNA target sequence for SLC35A5 (NM_017945.2,734-752).
cttgactgccgggactaaa

SEQ ID NO: 272156 - DNA, 19 bp, Homo sapiens
  siRNA target sequence for SLC35A5 (NM_017945.2,737-755).
gactgccgggactaaaact

SEQ ID NO: 272157 - DNA, 19 bp, Homo sapiens
  siRNA target sequence for SLC35A5 (NM_017945.2,739-757).
ctgccgggactaaaacttt

SEQ ID NO: 272158 - DNA, 19 bp, Homo sapiens
  siRNA target sequence for SLC35A5 (NM_017945.2,742-760).
ccgggactaaaactttaca

SEQ ID NO: 272159 - DNA, 19 bp, Homo sapiens
  siRNA target sequence for SLC35A5 (NM_017945.2,837-855).
gagtgtcccagaaaagaca

SEQ ID NO: 272160 - DNA, 19 bp, Homo sapiens
  siRNA target sequence for SLC35A5 (NM_017945.2,843-861).
cccagaaaagacaattgta

SEQ ID NO: 272161 - DNA, 19 bp, Homo sapiens
  siRNA target sequence for SLC35A5 (NM_017945.2,934-952).
gcatgggccatgttcttat

SEQ ID NO: 272162 - DNA, 19 bp, Homo sapiens
  siRNA target sequence for SLC35A5 (NM_017945.2,973-991).
cttcaatggctaatatcta

SEQ ID NO: 272163 - DNA, 19 bp, Homo sapiens
  siRNA target sequence for SLC35A5 (NM_017945.2,980-998).
ggctaatatctataatgaa

SEQ ID NO: 272164 - DNA, 19 bp, Homo sapiens
  siRNA target sequence for SLC35A5 (NM_017945.2,1027-1045).
ctgaaagcatcttcataca

SEQ ID NO: 272165 - DNA, 19 bp, Homo sapiens
  siRNA target sequence for SLC35A5 (NM_017945.2,1064-1082).
ctttggcattctgtttaat

SEQ ID NO: 272166 - DNA, 19 bp, Homo sapiens
  siRNA target sequence for SLC35A5 (NM_017945.2,1105-1123).
ggagtaaccgtgatcagat

SEQ ID NO: 272167 - DNA, 19 bp, Homo sapiens
  siRNA target sequence for SLC35A5 (NM_017945.2,1106-1124).
gagtaaccgtgatcagatt

SEQ ID NO: 272168 - DNA, 19 bp, Homo sapiens
  siRNA target sequence for SLC35A5 (NM_017945.2,1341-1359).
gtccttctctctatattta

SEQ ID NO: 272169 - DNA, 19 bp, Homo sapiens
  siRNA target sequence for SLC35A5 (NM_017945.2,1407-1425).
gaaaggatccgagatctaa

SEQ ID NO: 272170 - DNA, 19 bp, Homo sapiens
  siRNA target sequence for SLC35A5 (NM_017945.2,1419-1437).
gatctaagtggcaatcttt

SEQ ID NO: 272171 - DNA, 19 bp, Homo sapiens
  siRNA target sequence for SLC35B4 (NM_032826.2,388-406).
ggatgtgggaacattgtga

SEQ ID NO: 272172 - DNA, 19 bp, Homo sapiens
  siRNA target sequence for SLC35B4 (NM_032826.2,472-490).
ccaccagctatcccaataa

SEQ ID NO: 272173 - DNA, 19 bp, Homo sapiens
  siRNA target sequence for SLC35B4 (NM_032826.2,475-493).
ccagctatcccaataaggt

SEQ ID NO: 272174 - DNA, 19 bp, Homo sapiens
  siRNA target sequence for SLC35B4 (NM_032826.2,476-494).
cagctatcccaataaggta

SEQ ID NO: 272175 - DNA, 19 bp, Homo sapiens
  siRNA target sequence for SLC35B4 (NM_032826.2,491-509).
ggtactatgccataatggt

SEQ ID NO: 272176 - DNA, 19 bp, Homo sapiens
  siRNA target sequence for SLC35B4 (NM_032826.2,528-546).
gagcgtggtgaacaactat

SEQ ID NO: 272177 - DNA, 19 bp, Homo sapiens
  siRNA target sequence for SLC35B4 (NM_032826.2,570-588).
gcccctgcatatgatattt

SEQ ID NO: 272178 - DNA, 19 bp, Homo sapiens
  siRNA target sequence for SLC35B4 (NM_032826.2,571-589).
cccctgcatatgatattta

SEQ ID NO: 272179 - DNA, 19 bp, Homo sapiens
  siRNA target sequence for SLC35B4 (NM_032826.2,599-617).
ctctaattgccaacatgat

SEQ ID NO: 272180 - DNA, 19 bp, Homo sapiens
  siRNA target sequence for SLC35B4 (NM_032826.2,679-697).
gtgtctgtggggatattta

SEQ ID NO: 272181 - DNA, 19 bp, Homo sapiens
  siRNA target sequence for SLC35B4 (NM_032826.2,787-805).
ggtattggggcattgactt

SEQ ID NO: 272182 - DNA, 19 bp, Homo sapiens
  siRNA target sequence for SLC35B4 (NM_032826.2,821-839).
cagcaaggatggggatatt

SEQ ID NO: 272183 - DNA, 19 bp, Homo sapiens
  siRNA target sequence for SLC35B4 (NM_032826.2,840-858).
ccaagagactctctacaaa

SEQ ID NO: 272184 - DNA, 19 bp, Homo sapiens
  siRNA target sequence for SLC35B4 (NM_032826.2,844-862).
gagactctctacaaacgat

SEQ ID NO: 272185 - DNA, 19 bp, Homo sapiens
  siRNA target sequence for SLC35B4 (NM_032826.2,846-864).
gactctctacaaacgattt

SEQ ID NO: 272186 - DNA, 19 bp, Homo sapiens
  siRNA target sequence for SLC35B4 (NM_032826.2,946-964).
gaccatgcagttctattca

SEQ ID NO: 272187 - DNA, 19 bp, Homo sapiens
  siRNA target sequence for SLC35B4 (NM_032826.2,952-970).
gcagttctattcaataagt

SEQ ID NO: 272188 - DNA, 19 bp, Homo sapiens
  siRNA target sequence for SLC35B4 (NM_032826.2,963-981).
caataagtctgagttatat

SEQ ID NO: 272189 - DNA, 19 bp, Homo sapiens
  siRNA target sequence for SLC35B4 (NM_032826.2,1019-1037).
ggttctacctcctcatgaa

SEQ ID NO: 272190 - DNA, 19 bp, Homo sapiens
  siRNA target sequence for SLC35B4 (NM_032826.2,1056-1074).
gtgcatccggggtgtgttt

SEQ ID NO: 272191 - DNA, 19 bp, Homo sapiens
  siRNA target sequence for SLC35B4 (NM_032826.2,1058-1076).
gcatccggggtgtgtttat

SEQ ID NO: 272192 - DNA, 19 bp, Homo sapiens
  siRNA target sequence for SLC35B4 (NM_032826.2,1116-1134).
cgtgaccctacgcaaattt

SEQ ID NO: 272193 - DNA, 19 bp, Homo sapiens
  siRNA target sequence for NUP107 (NM_020401.1,176-194).
cggactgcacggaaacaga

SEQ ID NO: 272194 - DNA, 19 bp, Homo sapiens
  siRNA target sequence for NUP107 (NM_020401.1,221-239).
gcatctcaagatgaaaatt

SEQ ID NO: 272195 - DNA, 19 bp, Homo sapiens
  siRNA target sequence for NUP107 (NM_020401.1,243-261).
gtaatactacaccaagaaa

SEQ ID NO: 272196 - DNA, 19 bp, Homo sapiens
  siRNA target sequence for NUP107 (NM_020401.1,307-325).
cccaacaagccgaagctta

SEQ ID NO: 272197 - DNA, 19 bp, Homo sapiens
  siRNA target sequence for NUP107 (NM_020401.1,442-460).
ctgggcagctgcattttca

SEQ ID NO: 272198 - DNA, 19 bp, Homo sapiens
  siRNA target sequence for NUP107 (NM_020401.1,519-537).
ctatcagtgctgttatgtt

SEQ ID NO: 272199 - DNA, 19 bp, Homo sapiens
  siRNA target sequence for NUP107 (NM_020401.1,557-575).
gaagctgcatccatgagta

SEQ ID NO: 272200 - DNA, 19 bp, Homo sapiens
  siRNA target sequence for NUP107 (NM_020401.1,560-578).
gctgcatccatgagtatgt

SEQ ID NO: 272201 - DNA, 19 bp, Homo sapiens
  siRNA target sequence for NUP107 (NM_020401.1,608-626).
cactcttcgagtacagttt

SEQ ID NO: 272202 - DNA, 19 bp, Homo sapiens
  siRNA target sequence for NUP107 (NM_020401.1,610-628).
ctcttcgagtacagttttt

SEQ ID NO: 272203 - DNA, 19 bp, Homo sapiens
  siRNA target sequence for NUP107 (NM_020401.1,612-630).
cttcgagtacagtttttga

SEQ ID NO: 272204 - DNA, 19 bp, Homo sapiens
  siRNA target sequence for NUP107 (NM_020401.1,615-633).
cgagtacagtttttgatct

SEQ ID NO: 272205 - DNA, 19 bp, Homo sapiens
  siRNA target sequence for NUP107 (NM_020401.1,618-636).
gtacagtttttgatcttgt

SEQ ID NO: 272206 - DNA, 19 bp, Homo sapiens
  siRNA target sequence for NUP107 (NM_020401.1,632-650).
cttgtggaagagtatgaaa

SEQ ID NO: 272207 - DNA, 19 bp, Homo sapiens
  siRNA target sequence for NUP107 (NM_020401.1,657-675).
gtggtagtcaggtgaatat

SEQ ID NO: 272208 - DNA, 19 bp, Homo sapiens
  siRNA target sequence for NUP107 (NM_020401.1,774-792).
ggctgctggcttctttgta

SEQ ID NO: 272209 - DNA, 19 bp, Homo sapiens
  siRNA target sequence for NUP107 (NM_020401.1,776-794).
ctgctggcttctttgtata

SEQ ID NO: 272210 - DNA, 19 bp, Homo sapiens
  siRNA target sequence for NUP107 (NM_020401.1,778-796).
gctggcttctttgtataga

SEQ ID NO: 272211 - DNA, 19 bp, Homo sapiens
  siRNA target sequence for NUP107 (NM_020401.1,835-853).
cgcagttactgctgttaat

SEQ ID NO: 272212 - DNA, 19 bp, Homo sapiens
  siRNA target sequence for NUP107 (NM_020401.1,867-885).
cagttgtggaagcgttatt

SEQ ID NO: 272213 - DNA, 19 bp, Homo sapiens
  siRNA target sequence for NUP107 (NM_020401.1,872-890).
gtggaagcgttatttcaga

SEQ ID NO: 272214 - DNA, 19 bp, Homo sapiens
  siRNA target sequence for NUP107 (NM_020401.1,897-915).
cacttgttcgacaaagtca

SEQ ID NO: 272215 - DNA, 19 bp, Homo sapiens
  siRNA target sequence for NUP107 (NM_020401.1,916-934).
gctggtggtagattggtta

SEQ ID NO: 272216 - DNA, 19 bp, Homo sapiens
  siRNA target sequence for NUP107 (NM_020401.1,1031-1049).
caacggcagctgacttctt

SEQ ID NO: 272217 - DNA, 19 bp, Homo sapiens
  siRNA target sequence for NUP107 (NM_020401.1,1036-1054).
gcagctgacttcttacgtt

SEQ ID NO: 272218 - DNA, 19 bp, Homo sapiens
  siRNA target sequence for NUP107 (NM_020401.1,1064-1082).
cgtccgcttgtcactgaat

SEQ ID NO: 272219 - DNA, 19 bp, Homo sapiens
  siRNA target sequence for NUP107 (NM_020401.1,1065-1083).
gtccgcttgtcactgaatt

SEQ ID NO: 272220 - DNA, 19 bp, Homo sapiens
  siRNA target sequence for NUP107 (NM_020401.1,1087-1105).
ccctgatgctcccataaga

SEQ ID NO: 272221 - DNA, 19 bp, Homo sapiens
  siRNA target sequence for NUP107 (NM_020401.1,1089-1107).
ctgatgctcccataagaca

SEQ ID NO: 272222 - DNA, 19 bp, Homo sapiens
  siRNA target sequence for NUP107 (NM_020401.1,1139-1157).
gatgaagttagattactca

SEQ ID NO: 272223 - DNA, 19 bp, Homo sapiens
  siRNA target sequence for NUP107 (NM_020401.1,1142-1160).
gaagttagattactcaaat

SEQ ID NO: 272224 - DNA, 19 bp, Homo sapiens
  siRNA target sequence for NUP107 (NM_020401.1,1156-1174).
caaatatctctttactcta

SEQ ID NO: 272225 - DNA, 19 bp, Homo sapiens
  siRNA target sequence for NUP107 (NM_020401.1,1264-1282).
gtaccatgaccctaatgtt

SEQ ID NO: 272226 - DNA, 19 bp, Homo sapiens
  siRNA target sequence for NUP107 (NM_020401.1,1267-1285).
ccatgaccctaatgttaat

SEQ ID NO: 272227 - DNA, 19 bp, Homo sapiens
  siRNA target sequence for NUP107 (NM_020401.1,1319-1337).
ccatatagacgcatttgga

SEQ ID NO: 272228 - DNA, 19 bp, Homo sapiens
  siRNA target sequence for NUP107 (NM_020401.1,1320-1338).
catatagacgcatttggaa

SEQ ID NO: 272229 - DNA, 19 bp, Homo sapiens
  siRNA target sequence for NUP107 (NM_020401.1,1328-1346).
cgcatttggaaaataagtt

SEQ ID NO: 272230 - DNA, 19 bp, Homo sapiens
  siRNA target sequence for NUP107 (NM_020401.1,1357-1375).
ggcagaagatgagcttttt

SEQ ID NO: 272231 - DNA, 19 bp, Homo sapiens
  siRNA target sequence for NUP107 (NM_020401.1,1358-1376).
gcagaagatgagcttttta

SEQ ID NO: 272232 - DNA, 19 bp, Homo sapiens
  siRNA target sequence for NUP107 (NM_020401.1,1364-1382).
gatgagctttttaatagat

SEQ ID NO: 272233 - DNA, 19 bp, Homo sapiens
  siRNA target sequence for NUP107 (NM_020401.1,1380-1398).
gatacgagagagcaattta

SEQ ID NO: 272234 - DNA, 19 bp, Homo sapiens
  siRNA target sequence for NUP107 (NM_020401.1,1384-1402).
cgagagagcaatttatgca

SEQ ID NO: 272235 - DNA, 19 bp, Homo sapiens
  siRNA target sequence for NUP107 (NM_020401.1,1403-1421).
gctttaagtgggaatctta

SEQ ID NO: 272236 - DNA, 19 bp, Homo sapiens
  siRNA target sequence for NUP107 (NM_020401.1,1404-1422).
ctttaagtgggaatcttaa

SEQ ID NO: 272237 - DNA, 19 bp, Homo sapiens
  siRNA target sequence for NUP107 (NM_020401.1,1573-1591).
ctggacgttagaaaaggtt

SEQ ID NO: 272238 - DNA, 19 bp, Homo sapiens
  siRNA target sequence for NUP107 (NM_020401.1,1575-1593).
ggacgttagaaaaggtttt

SEQ ID NO: 272239 - DNA, 19 bp, Homo sapiens
  siRNA target sequence for NUP107 (NM_020401.1,1578-1596).
cgttagaaaaggtttttga

SEQ ID NO: 272240 - DNA, 19 bp, Homo sapiens
  siRNA target sequence for NUP107 (NM_020401.1,1636-1654).
gaatcaagaacattatcat

SEQ ID NO: 272241 - DNA, 19 bp, Homo sapiens
  siRNA target sequence for NUP107 (NM_020401.1,1646-1664).
cattatcatatagttcaaa

SEQ ID NO: 272242 - DNA, 19 bp, Homo sapiens
  siRNA target sequence for NUP107 (NM_020401.1,1750-1768).
cctgcttcgctttatgact

SEQ ID NO: 272243 - DNA, 19 bp, Homo sapiens
  siRNA target sequence for NUP107 (NM_020401.1,1837-1855).
gacatacatacagctttta

SEQ ID NO: 272244 - DNA, 19 bp, Homo sapiens
  siRNA target sequence for NUP107 (NM_020401.1,1843-1861).
catacagcttttaataaga

SEQ ID NO: 272245 - DNA, 19 bp, Homo sapiens
  siRNA target sequence for NUP107 (NM_020401.1,1868-1886).
catacaaatcttatagcat

SEQ ID NO: 272246 - DNA, 19 bp, Homo sapiens
  siRNA target sequence for NUP107 (NM_020401.1,1877-1895).
cttatagcattttatacct

SEQ ID NO: 272247 - DNA, 19 bp, Homo sapiens
  siRNA target sequence for NUP107 (NM_020401.1,1916-1934).
gctgttgcccagtatgcat

SEQ ID NO: 272248 - DNA, 19 bp, Homo sapiens
  siRNA target sequence for NUP107 (NM_020401.1,1932-1950).
cattatttttggaaagtgt

SEQ ID NO: 272249 - DNA, 19 bp, Homo sapiens
  siRNA target sequence for NUP107 (NM_020401.1,2030-2048).
gtagttgagaatattcgaa

SEQ ID NO: 272250 - DNA, 19 bp, Homo sapiens
  siRNA target sequence for NUP107 (NM_020401.1,2061-2079).
gtgaatttagtcatcatga

SEQ ID NO: 272251 - DNA, 19 bp, Homo sapiens
  siRNA target sequence for NUP107 (NM_020401.1,2109-2127).
ctgaggaggatcgtttaaa

SEQ ID NO: 272252 - DNA, 19 bp, Homo sapiens
  siRNA target sequence for NUP107 (NM_020401.1,2135-2153).
gtaattgactggttggtat

SEQ ID NO: 272253 - DNA, 19 bp, Homo sapiens
  siRNA target sequence for NUP107 (NM_020401.1,2276-2294).
gcagaaatctataatcagt

SEQ ID NO: 272254 - DNA, 19 bp, Homo sapiens
  siRNA target sequence for NUP107 (NM_020401.1,2342-2360).
gctatccgagaacatttgt

SEQ ID NO: 272255 - DNA, 19 bp, Homo sapiens
  siRNA target sequence for NUP107 (NM_020401.1,2361-2379).
gcatcagagcttatttgga

SEQ ID NO: 272256 - DNA, 19 bp, Homo sapiens
  siRNA target sequence for NUP107 (NM_020401.1,2377-2395).
ggaagcccatgaaaccttt

SEQ ID NO: 272257 - DNA, 19 bp, Homo sapiens
  siRNA target sequence for NUP107 (NM_020401.1,2378-2396).
gaagcccatgaaaccttta

SEQ ID NO: 272258 - DNA, 19 bp, Homo sapiens
  siRNA target sequence for NUP107 (NM_020401.1,2382-2400).
cccatgaaacctttaatga

SEQ ID NO: 272259 - DNA, 19 bp, Homo sapiens
  siRNA target sequence for NUP107 (NM_020401.1,2384-2402).
catgaaacctttaatgagt

SEQ ID NO: 272260 - DNA, 19 bp, Homo sapiens
  siRNA target sequence for NUP107 (NM_020401.1,2399-2417).
gagtggtttaagcatatga

SEQ ID NO: 272261 - DNA, 19 bp, Homo sapiens
  siRNA target sequence for NUP107 (NM_020401.1,2443-2461).
gatacctcaaccaactttt

SEQ ID NO: 272262 - DNA, 19 bp, Homo sapiens
  siRNA target sequence for NUP107 (NM_020401.1,2566-2584).
gtataacgtcttgttgttt

SEQ ID NO: 272263 - DNA, 19 bp, Homo sapiens
  siRNA target sequence for NUP107 (NM_020401.1,2572-2590).
cgtcttgttgtttgttgat

SEQ ID NO: 272264 - DNA, 19 bp, Homo sapiens
  siRNA target sequence for NUP107 (NM_020401.1,2643-2661).
cacatcaaatggtcttact

SEQ ID NO: 272265 - DNA, 19 bp, Homo sapiens
  siRNA target sequence for NUP107 (NM_020401.1,2645-2663).
catcaaatggtcttactga

SEQ ID NO: 272266 - DNA, 19 bp, Homo sapiens
  siRNA target sequence for NUP107 (NM_020401.1,2673-2691).
gtctgccaatgttgtgttt

SEQ ID NO: 272267 - DNA, 19 bp, Homo sapiens
  siRNA target sequence for NUP107 (NM_020401.1,2741-2759).
cagttagcagatatggtat

SEQ ID NO: 272268 - DNA, 19 bp, Homo sapiens
  siRNA target sequence for NUP107 (NM_020401.1,2760-2778).
cctctgagcgccacaaact

SEQ ID NO: 272269 - DNA, 19 bp, Homo sapiens
  siRNA target sequence for NUP107 (NM_020401.1,2782-2800).
cctggtattttctaaggaa

SEQ ID NO: 272270 - DNA, 19 bp, Homo sapiens
  siRNA target sequence for NUP107 (NM_020401.1,2829-2847).
gagagtcctctctaatgct

SEQ ID NO: 272271 - DNA, 19 bp, Homo sapiens
  siRNA target sequence for NUP107 (NM_020401.1,2864-2882).
gacccattagggtatgaaa

SEQ ID NO: 272272 - DNA, 19 bp, Homo sapiens
  siRNA target sequence for NUP155 (NM_004298.2,258-276).
catatgcagtgtaattgca

SEQ ID NO: 272273 - DNA, 19 bp, Homo sapiens
  siRNA target sequence for NUP155 (NM_004298.2,304-322).
gagcttggctcacaattga

SEQ ID NO: 272274 - DNA, 19 bp, Homo sapiens
  siRNA target sequence for NUP155 (NM_004298.2,312-330).
ctcacaattgacagtgata

SEQ ID NO: 272275 - DNA, 19 bp, Homo sapiens
  siRNA target sequence for NUP155 (NM_004298.2,314-332).
cacaattgacagtgatata

SEQ ID NO: 272276 - DNA, 19 bp, Homo sapiens
  siRNA target sequence for NUP155 (NM_004298.2,418-436).
caaaagcaggcatctttca

SEQ ID NO: 272277 - DNA, 19 bp, Homo sapiens
  siRNA target sequence for NUP155 (NM_004298.2,464-482).
ggcgacccctgtagacata

SEQ ID NO: 272278 - DNA, 19 bp, Homo sapiens
  siRNA target sequence for NUP155 (NM_004298.2,466-484).
cgacccctgtagacatagt

SEQ ID NO: 272279 - DNA, 19 bp, Homo sapiens
  siRNA target sequence for NUP155 (NM_004298.2,469-487).
cccctgtagacatagtaat

SEQ ID NO: 272280 - DNA, 19 bp, Homo sapiens
  siRNA target sequence for NUP155 (NM_004298.2,470-488).
ccctgtagacatagtaatt

SEQ ID NO: 272281 - DNA, 19 bp, Homo sapiens
  siRNA target sequence for NUP155 (NM_004298.2,492-510).
ggactcagctatgctaatt

SEQ ID NO: 272282 - DNA, 19 bp, Homo sapiens
  siRNA target sequence for NUP155 (NM_004298.2,497-515).
cagctatgctaatttgcaa

SEQ ID NO: 272283 - DNA, 19 bp, Homo sapiens
  siRNA target sequence for NUP155 (NM_004298.2,613-631).
caataacttccactgataa

SEQ ID NO: 272284 - DNA, 19 bp, Homo sapiens
  siRNA target sequence for NUP155 (NM_004298.2,696-714).
gggtggtttagccaaagat

SEQ ID NO: 272285 - DNA, 19 bp, Homo sapiens
  siRNA target sequence for NUP155 (NM_004298.2,729-747).
cactcaaagagctcacttt

SEQ ID NO: 272286 - DNA, 19 bp, Homo sapiens
  siRNA target sequence for NUP155 (NM_004298.2,759-777).
ccttccttgctacaattca

SEQ ID NO: 272287 - DNA, 19 bp, Homo sapiens
  siRNA target sequence for NUP155 (NM_004298.2,795-813).
cctattcttcaaattgcaa

SEQ ID NO: 272288 - DNA, 19 bp, Homo sapiens
  siRNA target sequence for NUP155 (NM_004298.2,796-814).
ctattcttcaaattgcaat

SEQ ID NO: 272289 - DNA, 19 bp, Homo sapiens
  siRNA target sequence for NUP155 (NM_004298.2,801-819).
cttcaaattgcaattgata

SEQ ID NO: 272290 - DNA, 19 bp, Homo sapiens
  siRNA target sequence for NUP155 (NM_004298.2,844-862).
gatctgagaaaggagtaat

SEQ ID NO: 272291 - DNA, 19 bp, Homo sapiens
  siRNA target sequence for NUP155 (NM_004298.2,856-874).
gagtaatacaggtgtatga

SEQ ID NO: 272292 - DNA, 19 bp, Homo sapiens
  siRNA target sequence for NUP155 (NM_004298.2,858-876).
gtaatacaggtgtatgatt

SEQ ID NO: 272293 - DNA, 19 bp, Homo sapiens
  siRNA target sequence for NUP155 (NM_004298.2,965-983).
cgatcgttctgtttttaaa

SEQ ID NO: 272294 - DNA, 19 bp, Homo sapiens
  siRNA target sequence for NUP155 (NM_004298.2,1021-1039).
cactggactgtcagttatt

SEQ ID NO: 272295 - DNA, 19 bp, Homo sapiens
  siRNA target sequence for NUP155 (NM_004298.2,1048-1066).
cacatgcaggtgttaggtt

SEQ ID NO: 272296 - DNA, 19 bp, Homo sapiens
  siRNA target sequence for NUP155 (NM_004298.2,1050-1068).
catgcaggtgttaggttat

SEQ ID NO: 272297 - DNA, 19 bp, Homo sapiens
  siRNA target sequence for NUP155 (NM_004298.2,1095-1113).
ccattagcacggcctaata

SEQ ID NO: 272298 - DNA, 19 bp, Homo sapiens
  siRNA target sequence for NUP155 (NM_004298.2,1114-1132).
cactgacgctggttcatgt

SEQ ID NO: 272299 - DNA, 19 bp, Homo sapiens
  siRNA target sequence for NUP155 (NM_004298.2,1175-1193).
gccttcaaaagtacataga

SEQ ID NO: 272300 - DNA, 19 bp, Homo sapiens
  siRNA target sequence for NUP155 (NM_004298.2,1259-1277).
gtgtgtcaaccatgatact

SEQ ID NO: 272301 - DNA, 19 bp, Homo sapiens
  siRNA target sequence for NUP155 (NM_004298.2,1261-1279).
gtgtcaaccatgatacttt

SEQ ID NO: 272302 - DNA, 19 bp, Homo sapiens
  siRNA target sequence for NUP155 (NM_004298.2,1265-1283).
caaccatgatacttttcct

SEQ ID NO: 272303 - DNA, 19 bp, Homo sapiens
  siRNA target sequence for NUP155 (NM_004298.2,1282-1300).
ctttccaaaagccaatgat

SEQ ID NO: 272304 - DNA, 19 bp, Homo sapiens
  siRNA target sequence for NUP155 (NM_004298.2,1352-1370).
gatagatgaattgaaagta

SEQ ID NO: 272305 - DNA, 19 bp, Homo sapiens
  siRNA target sequence for NUP155 (NM_004298.2,1394-1412).
caaggatcatattccaata

SEQ ID NO: 272306 - DNA, 19 bp, Homo sapiens
  siRNA target sequence for NUP155 (NM_004298.2,1397-1415).
ggatcatattccaataact

SEQ ID NO: 272307 - DNA, 19 bp, Homo sapiens
  siRNA target sequence for NUP155 (NM_004298.2,1442-1460).
catgttacctccgaagaaa

SEQ ID NO: 272308 - DNA, 19 bp, Homo sapiens
  siRNA target sequence for NUP155 (NM_004298.2,1445-1463).
gttacctccgaagaaattt

SEQ ID NO: 272309 - DNA, 19 bp, Homo sapiens
  siRNA target sequence for NUP155 (NM_004298.2,1450-1468).
ctccgaagaaatttgttct

SEQ ID NO: 272310 - DNA, 19 bp, Homo sapiens
  siRNA target sequence for NUP155 (NM_004298.2,1482-1500).
gggagccttatgtttcata

SEQ ID NO: 272311 - DNA, 19 bp, Homo sapiens
  siRNA target sequence for NUP155 (NM_004298.2,1641-1659).
gcctgtgatagagaagtat

SEQ ID NO: 272312 - DNA, 19 bp, Homo sapiens
  siRNA target sequence for NUP155 (NM_004298.2,1643-1661).
ctgtgatagagaagtatct

SEQ ID NO: 272313 - DNA, 19 bp, Homo sapiens
  siRNA target sequence for NUP155 (NM_004298.2,1666-1684).
gggctactcgggctttctt

SEQ ID NO: 272314 - DNA, 19 bp, Homo sapiens
  siRNA target sequence for NUP155 (NM_004298.2,1667-1685).
ggctactcgggctttcttt

SEQ ID NO: 272315 - DNA, 19 bp, Homo sapiens
  siRNA target sequence for NUP155 (NM_004298.2,1668-1686).
gctactcgggctttcttta

SEQ ID NO: 272316 - DNA, 19 bp, Homo sapiens
  siRNA target sequence for NUP155 (NM_004298.2,1672-1690).
ctcgggctttctttaggta

SEQ ID NO: 272317 - DNA, 19 bp, Homo sapiens
  siRNA target sequence for NUP155 (NM_004298.2,1723-1741).
ctcttccgcctccaagtaa

SEQ ID NO: 272318 - DNA, 19 bp, Homo sapiens
  siRNA target sequence for NUP155 (NM_004298.2,1828-1846).
caccgtctcatggtataca

SEQ ID NO: 272319 - DNA, 19 bp, Homo sapiens
  siRNA target sequence for NUP155 (NM_004298.2,1891-1909).
caactcaggccacaaatat

SEQ ID NO: 272320 - DNA, 19 bp, Homo sapiens
  siRNA target sequence for NUP155 (NM_004298.2,1896-1914).
caggccacaaatatgagtt

SEQ ID NO: 272321 - DNA, 19 bp, Homo sapiens
  siRNA target sequence for NUP155 (NM_004298.2,1942-1960).
ctggaaaacacaatggtat

SEQ ID NO: 272322 - DNA, 19 bp, Homo sapiens
  siRNA target sequence for NUP155 (NM_004298.2,1977-1995).
cggatcatgggaaacattt

SEQ ID NO: 272323 - DNA, 19 bp, Homo sapiens
  siRNA target sequence for NUP155 (NM_004298.2,1991-2009).
catttgggatgcaagctta

SEQ ID NO: 272324 - DNA, 19 bp, Homo sapiens
  siRNA target sequence for NUP155 (NM_004298.2,2048-2066).
cactgcaattgaaagtagt

SEQ ID NO: 272325 - DNA, 19 bp, Homo sapiens
  siRNA target sequence for NUP155 (NM_004298.2,2108-2126).
gggtttgcaggaatttcta

SEQ ID NO: 272326 - DNA, 19 bp, Homo sapiens
  siRNA target sequence for NUP155 (NM_004298.2,2141-2159).
gtttgcaggaggaccatta

SEQ ID NO: 272327 - DNA, 19 bp, Homo sapiens
  siRNA target sequence for NUP155 (NM_004298.2,2151-2169).
ggaccattaggaaatccaa

SEQ ID NO: 272328 - DNA, 19 bp, Homo sapiens
  siRNA target sequence for NUP155 (NM_004298.2,2203-2221).
gattcatgcgtcctgaaaa

SEQ ID NO: 272329 - DNA, 19 bp, Homo sapiens
  siRNA target sequence for NUP155 (NM_004298.2,2246-2264).
ggaactgcagaggaagttt

SEQ ID NO: 272330 - DNA, 19 bp, Homo sapiens
  siRNA target sequence for NUP155 (NM_004298.2,2272-2290).
ctcaactaagtgaaaagat

SEQ ID NO: 272331 - DNA, 19 bp, Homo sapiens
  siRNA target sequence for NUP155 (NM_004298.2,2307-2325).
cagcagttggttcgaaaat

SEQ ID NO: 272332 - DNA, 19 bp, Homo sapiens
  siRNA target sequence for NUP155 (NM_004298.2,2331-2349).
caggctctggctttatgga

SEQ ID NO: 272333 - DNA, 19 bp, Homo sapiens
  siRNA target sequence for NUP155 (NM_004298.2,2359-2377).
gtgaacatcaattcactat

SEQ ID NO: 272334 - DNA, 19 bp, Homo sapiens
  siRNA target sequence for NUP155 (NM_004298.2,2361-2379).
gaacatcaattcactatca

SEQ ID NO: 272335 - DNA, 19 bp, Homo sapiens
  siRNA target sequence for NUP155 (NM_004298.2,2417-2435).
gaagatcaccacctttaaa

SEQ ID NO: 272336 - DNA, 19 bp, Homo sapiens
  siRNA target sequence for NUP155 (NM_004298.2,2425-2443).
ccacctttaaagatcttgt

SEQ ID NO: 272337 - DNA, 19 bp, Homo sapiens
  siRNA target sequence for NUP155 (NM_004298.2,2426-2444).
cacctttaaagatcttgta

SEQ ID NO: 272338 - DNA, 19 bp, Homo sapiens
  siRNA target sequence for NUP155 (NM_004298.2,2462-2480).
cacaggggcattaattgct

SEQ ID NO: 272339 - DNA, 19 bp, Homo sapiens
  siRNA target sequence for NUP155 (NM_004298.2,2468-2486).
ggcattaattgcttctctt

SEQ ID NO: 272340 - DNA, 19 bp, Homo sapiens
  siRNA target sequence for NUP155 (NM_004298.2,2492-2510).
ctgctacatcagagataat

SEQ ID NO: 272341 - DNA, 19 bp, Homo sapiens
  siRNA target sequence for NUP155 (NM_004298.2,2513-2531).
cgctgttgatggcattagt

SEQ ID NO: 272342 - DNA, 19 bp, Homo sapiens
  siRNA target sequence for NUP155 (NM_004298.2,2515-2533).
ctgttgatggcattagttt

SEQ ID NO: 272343 - DNA, 19 bp, Homo sapiens
  siRNA target sequence for NUP155 (NM_004298.2,2571-2589).
gatgatgcaatttgttcta

SEQ ID NO: 272344 - DNA, 19 bp, Homo sapiens
  siRNA target sequence for NUP155 (NM_004298.2,2606-2624).
ccagcgttcccgacaagtt

SEQ ID NO: 272345 - DNA, 19 bp, Homo sapiens
  siRNA target sequence for NUP155 (NM_004298.2,2609-2627).
gcgttcccgacaagttcaa

SEQ ID NO: 272346 - DNA, 19 bp, Homo sapiens
  siRNA target sequence for NUP155 (NM_004298.2,2611-2629).
gttcccgacaagttcaaaa

SEQ ID NO: 272347 - DNA, 19 bp, Homo sapiens
  siRNA target sequence for NUP155 (NM_004298.2,2616-2634).
cgacaagttcaaaataaga

SEQ ID NO: 272348 - DNA, 19 bp, Homo sapiens
  siRNA target sequence for NUP155 (NM_004298.2,2696-2714).
ggacctttccaatgtttgt

SEQ ID NO: 272349 - DNA, 19 bp, Homo sapiens
  siRNA target sequence for NUP155 (NM_004298.2,2720-2738).
gtatagacaagtgagattt

SEQ ID NO: 272350 - DNA, 19 bp, Homo sapiens
  siRNA target sequence for NUP155 (NM_004298.2,2725-2743).
gacaagtgagattttatga

SEQ ID NO: 272351 - DNA, 19 bp, Homo sapiens
  siRNA target sequence for NUP155 (NM_004298.2,2763-2781).
cttacggctgcagagaaaa

SEQ ID NO: 272352 - DNA, 19 bp, Homo sapiens
  siRNA target sequence for NUP155 (NM_004298.2,2890-2908).
cagacacacttcaagaact

SEQ ID NO: 272353 - DNA, 19 bp, Homo sapiens
  siRNA target sequence for NUP155 (NM_004298.2,2938-2956).
ctcccagtgtacccaaaaa

SEQ ID NO: 272354 - DNA, 19 bp, Homo sapiens
  siRNA target sequence for NUP155 (NM_004298.2,2942-2960).
cagtgtacccaaaaaacct

SEQ ID NO: 272355 - DNA, 19 bp, Homo sapiens
  siRNA target sequence for NUP155 (NM_004298.2,3056-3074).
ggatgagctctttagtatt

SEQ ID NO: 272356 - DNA, 19 bp, Homo sapiens
  siRNA target sequence for NUP155 (NM_004298.2,3158-3176).
ccgaatggccaaagttgat

SEQ ID NO: 272357 - DNA, 19 bp, Homo sapiens
  siRNA target sequence for NUP155 (NM_004298.2,3160-3178).
gaatggccaaagttgatca

SEQ ID NO: 272358 - DNA, 19 bp, Homo sapiens
  siRNA target sequence for NUP155 (NM_004298.2,3177-3195).
caaaacagagttcgttata

SEQ ID NO: 272359 - DNA, 19 bp, Homo sapiens
  siRNA target sequence for NUP155 (NM_004298.2,3182-3200).
cagagttcgttatatggat

SEQ ID NO: 272360 - DNA, 19 bp, Homo sapiens
  siRNA target sequence for NUP155 (NM_004298.2,3189-3207).
cgttatatggatttactct

SEQ ID NO: 272361 - DNA, 19 bp, Homo sapiens
  siRNA target sequence for NUP155 (NM_004298.2,3210-3228).
cggtattacgagaagaaca

SEQ ID NO: 272362 - DNA, 19 bp, Homo sapiens
  siRNA target sequence for NUP155 (NM_004298.2,3299-3317).
gcagcgactagagtacatt

SEQ ID NO: 272363 - DNA, 19 bp, Homo sapiens
  siRNA target sequence for NUP155 (NM_004298.2,3346-3364).
ccactgccatttcatcaat

SEQ ID NO: 272364 - DNA, 19 bp, Homo sapiens
  siRNA target sequence for NUP155 (NM_004298.2,3347-3365).
cactgccatttcatcaata

SEQ ID NO: 272365 - DNA, 19 bp, Homo sapiens
  siRNA target sequence for NUP155 (NM_004298.2,3371-3389).
cgatggtgaatttcttcat

SEQ ID NO: 272366 - DNA, 19 bp, Homo sapiens
  siRNA target sequence for NUP155 (NM_004298.2,3415-3433).
ctaggatccaacttcagat

SEQ ID NO: 272367 - DNA, 19 bp, Homo sapiens
  siRNA target sequence for NUP155 (NM_004298.2,3431-3449).
gatacaggagacactacaa

SEQ ID NO: 272368 - DNA, 19 bp, Homo sapiens
  siRNA target sequence for NUP155 (NM_004298.2,3452-3470).
gcagtattcccatcattct

SEQ ID NO: 272369 - DNA, 19 bp, Homo sapiens
  siRNA target sequence for NUP155 (NM_004298.2,3512-3530).
ggacataactaagctttat

SEQ ID NO: 272370 - DNA, 19 bp, Homo sapiens
  siRNA target sequence for NUP155 (NM_004298.2,3559-3577).
cagagtgcaaacttgcaat

SEQ ID NO: 272371 - DNA, 19 bp, Homo sapiens
  siRNA target sequence for NUP155 (NM_004298.2,3561-3579).
gagtgcaaacttgcaataa

SEQ ID NO: 272372 - DNA, 19 bp, Homo sapiens
  siRNA target sequence for NUP155 (NM_004298.2,3563-3581).
gtgcaaacttgcaataatt

SEQ ID NO: 272373 - DNA, 19 bp, Homo sapiens
  siRNA target sequence for NUP155 (NM_004298.2,3566-3584).
caaacttgcaataattcat

SEQ ID NO: 272374 - DNA, 19 bp, Homo sapiens
  siRNA target sequence for NUP155 (NM_004298.2,3591-3609).
ggttattcagaccctatat

SEQ ID NO: 272375 - DNA, 19 bp, Homo sapiens
  siRNA target sequence for NUP155 (NM_004298.2,3671-3689).
ctcctcggatagaatgcat

SEQ ID NO: 272376 - DNA, 19 bp, Homo sapiens
  siRNA target sequence for NUP155 (NM_004298.2,3682-3700).
gaatgcatgctcttagtct

SEQ ID NO: 272377 - DNA, 19 bp, Homo sapiens
  siRNA target sequence for NUP155 (NM_004298.2,3741-3759).
cgcttctttcctttagatt

SEQ ID NO: 272378 - DNA, 19 bp, Homo sapiens
  siRNA target sequence for NUP155 (NM_004298.2,3777-3795).
gaacagcaggtttgtactt

SEQ ID NO: 272379 - DNA, 19 bp, Homo sapiens
  siRNA target sequence for NUP155 (NM_004298.2,3802-3820).
gggatgtgggcttcgtaat

SEQ ID NO: 272380 - DNA, 19 bp, Homo sapiens
  siRNA target sequence for NUP155 (NM_004298.2,3803-3821).
ggatgtgggcttcgtaata

SEQ ID NO: 272381 - DNA, 19 bp, Homo sapiens
  siRNA target sequence for NUP155 (NM_004298.2,3807-3825).
gtgggcttcgtaatacaga

SEQ ID NO: 272382 - DNA, 19 bp, Homo sapiens
  siRNA target sequence for NUP155 (NM_004298.2,3811-3829).
gcttcgtaatacagacaat

SEQ ID NO: 272383 - DNA, 19 bp, Homo sapiens
  siRNA target sequence for NUP155 (NM_004298.2,3815-3833).
cgtaatacagacaatgaat

SEQ ID NO: 272384 - DNA, 19 bp, Homo sapiens
  siRNA target sequence for NUP155 (NM_004298.2,3847-3865).
cattacctagactactaga

SEQ ID NO: 272385 - DNA, 19 bp, Homo sapiens
  siRNA target sequence for NUP155 (NM_004298.2,3852-3870).
cctagactactagaagttt

SEQ ID NO: 272386 - DNA, 19 bp, Homo sapiens
  siRNA target sequence for NUP155 (NM_004298.2,3853-3871).
ctagactactagaagttta

SEQ ID NO: 272387 - DNA, 19 bp, Homo sapiens
  siRNA target sequence for NUP155 (NM_004298.2,3856-3874).
gactactagaagtttatga

SEQ ID NO: 272388 - DNA, 19 bp, Homo sapiens
  siRNA target sequence for NUP155 (NM_004298.2,3894-3912).
gatccattctggaacagaa

SEQ ID NO: 272389 - DNA, 19 bp, Homo sapiens
  siRNA target sequence for NUP155 (NM_004298.2,3897-3915).
ccattctggaacagaatga

SEQ ID NO: 272390 - DNA, 19 bp, Homo sapiens
  siRNA target sequence for NUP155 (NM_004298.2,3898-3916).
cattctggaacagaatgaa

SEQ ID NO: 272391 - DNA, 19 bp, Homo sapiens
  siRNA target sequence for NUP155 (NM_004298.2,3920-3938).
gccactgcaccttttggat

SEQ ID NO: 272392 - DNA, 19 bp, Homo sapiens
  siRNA target sequence for NUP155 (NM_004298.2,3940-3958).
gtatacatgtattattgat

SEQ ID NO: 272393 - DNA, 19 bp, Homo sapiens
  siRNA target sequence for NUP155 (NM_004298.2,4047-4065).
gttgagctccagtctatga

SEQ ID NO: 272394 - DNA, 19 bp, Homo sapiens
  siRNA target sequence for NUP155 (NM_004298.2,4067-4085).
ctcgtcagtagcagtacaa

SEQ ID NO: 272395 - DNA, 19 bp, Homo sapiens
  siRNA target sequence for NUP155 (NM_004298.2,4086-4104).
gccatcactgggaatttta

SEQ ID NO: 272396 - DNA, 19 bp, Homo sapiens
  siRNA target sequence for NUP155 (NM_153485.1,291-309).
ctggcatgtcagatatgga

SEQ ID NO: 272397 - DNA, 19 bp, Homo sapiens
  siRNA target sequence for NUP155 (NM_153485.1,293-311).
ggcatgtcagatatggatt

SEQ ID NO: 272398 - DNA, 19 bp, Homo sapiens
  siRNA target sequence for NUP155 (NM_153485.1,294-312).
gcatgtcagatatggatta

SEQ ID NO: 272399 - DNA, 19 bp, Homo sapiens
  siRNA target sequence for NUP155 (NM_153485.1,295-313).
catgtcagatatggattat

SEQ ID NO: 272400 - DNA, 19 bp, Homo sapiens
  siRNA target sequence for UPF3A (NM_023011.2,343-361).
cgacctgagtctttatcct

SEQ ID NO: 272401 - DNA, 19 bp, Homo sapiens
  siRNA target sequence for UPF3A (NM_023011.2,367-385).
ctactcaagagcatacatt

SEQ ID NO: 272402 - DNA, 19 bp, Homo sapiens
  siRNA target sequence for UPF3A (NM_023011.2,377-395).
gcatacattaattttagga

SEQ ID NO: 272403 - DNA, 19 bp, Homo sapiens
  siRNA target sequence for UPF3A (NM_023011.2,399-417).
ctgatgacatccttctttt

SEQ ID NO: 272404 - DNA, 19 bp, Homo sapiens
  siRNA target sequence for UPF3A (NM_023011.2,420-438).
gagatcgttttgatggata

SEQ ID NO: 272405 - DNA, 19 bp, Homo sapiens
  siRNA target sequence for UPF3A (NM_023011.2,422-440).
gatcgttttgatggatata

SEQ ID NO: 272406 - DNA, 19 bp, Homo sapiens
  siRNA target sequence for UPF3A (NM_023011.2,425-443).
cgttttgatggatatatct

SEQ ID NO: 272407 - DNA, 19 bp, Homo sapiens
  siRNA target sequence for UPF3A (NM_023011.2,426-444).
gttttgatggatatatctt

SEQ ID NO: 272408 - DNA, 19 bp, Homo sapiens
  siRNA target sequence for UPF3A (NM_023011.2,451-469).
cagcaaaggcctagaatat

SEQ ID NO: 272409 - DNA, 19 bp, Homo sapiens
  siRNA target sequence for UPF3A (NM_023011.2,638-656).
gagatggaggcgaagacaa

SEQ ID NO: 272410 - DNA, 19 bp, Homo sapiens
  siRNA target sequence for UPF3A (NM_023011.2,678-696).
ccacacctcttttggaata

SEQ ID NO: 272411 - DNA, 19 bp, Homo sapiens
  siRNA target sequence for UPF3A (NM_023011.2,679-697).
cacacctcttttggaatat

SEQ ID NO: 272412 - DNA, 19 bp, Homo sapiens
  siRNA target sequence for UPF3A (NM_023011.2,872-890).
gtaaggattaagcttctta

SEQ ID NO: 272413 - DNA, 19 bp, Homo sapiens
  siRNA target sequence for UPF3A (NM_023011.2,1075-1093).
ggatgtggagagatctcaa

SEQ ID NO: 272414 - DNA, 19 bp, Homo sapiens
  siRNA target sequence for UPF3A (NM_080687.1,453-471).
gcaaagatccagaatataa

SEQ ID NO: 272415 - DNA, 19 bp, Homo sapiens
  siRNA target sequence for UPF3B (NM_023010.2,175-193).
gctccaagggggaagataa

SEQ ID NO: 272416 - DNA, 19 bp, Homo sapiens
  siRNA target sequence for UPF3B (NM_023010.2,178-196).
ccaagggggaagataagca

SEQ ID NO: 272417 - DNA, 19 bp, Homo sapiens
  siRNA target sequence for UPF3B (NM_023010.2,227-245).
gagcaaggtggtaattcga

SEQ ID NO: 272418 - DNA, 19 bp, Homo sapiens
  siRNA target sequence for UPF3B (NM_023010.2,233-251).
ggtggtaattcgaagatta

SEQ ID NO: 272419 - DNA, 19 bp, Homo sapiens
  siRNA target sequence for UPF3B (NM_023010.2,236-254).
ggtaattcgaagattacct

SEQ ID NO: 272420 - DNA, 19 bp, Homo sapiens
  siRNA target sequence for UPF3B (NM_023010.2,294-312).
cctatgcctgagcatgatt

SEQ ID NO: 272421 - DNA, 19 bp, Homo sapiens
  siRNA target sequence for UPF3B (NM_023010.2,295-313).
ctatgcctgagcatgatta

SEQ ID NO: 272422 - DNA, 19 bp, Homo sapiens
  siRNA target sequence for UPF3B (NM_023010.2,328-346).
ctaatgatacgagtttgta

SEQ ID NO: 272423 - DNA, 19 bp, Homo sapiens
  siRNA target sequence for UPF3B (NM_023010.2,337-355).
cgagtttgtatcctcatat

SEQ ID NO: 272424 - DNA, 19 bp, Homo sapiens
  siRNA target sequence for UPF3B (NM_023010.2,360-378).
gccagagcatacatcaact

SEQ ID NO: 272425 - DNA, 19 bp, Homo sapiens
  siRNA target sequence for UPF3B (NM_023010.2,404-422).
gttcagggatcgctttgat

SEQ ID NO: 272426 - DNA, 19 bp, Homo sapiens
  siRNA target sequence for UPF3B (NM_023010.2,410-428).
ggatcgctttgatggttat

SEQ ID NO: 272427 - DNA, 19 bp, Homo sapiens
  siRNA target sequence for UPF3B (NM_023010.2,414-432).
cgctttgatggttatgtat

SEQ ID NO: 272428 - DNA, 19 bp, Homo sapiens
  siRNA target sequence for UPF3B (NM_023010.2,415-433).
gctttgatggttatgtatt

SEQ ID NO: 272429 - DNA, 19 bp, Homo sapiens
  siRNA target sequence for UPF3B (NM_023010.2,424-442).
gttatgtattccttgacaa

SEQ ID NO: 272430 - DNA, 19 bp, Homo sapiens
  siRNA target sequence for UPF3B (NM_023010.2,524-542).
caaagtcgggactatcgat

SEQ ID NO: 272431 - DNA, 19 bp, Homo sapiens
  siRNA target sequence for UPF3B (NM_023010.2,570-588).
gaaagttatgccacagata

SEQ ID NO: 272432 - DNA, 19 bp, Homo sapiens
  siRNA target sequence for UPF3B (NM_023010.2,574-592).
gttatgccacagataatga

SEQ ID NO: 272433 - DNA, 19 bp, Homo sapiens
  siRNA target sequence for UPF3B (NM_023010.2,809-827).
gaaagatatagaaaagcta

SEQ ID NO: 272434 - DNA, 19 bp, Homo sapiens
  siRNA target sequence for UPF3B (NM_023010.2,980-998).
cagtgggcaaagttgtaca

SEQ ID NO: 272435 - DNA, 19 bp, Homo sapiens
  siRNA target sequence for UPF3B (NM_023010.2,982-1000).
gtgggcaaagttgtacatt

SEQ ID NO: 272436 - DNA, 19 bp, Homo sapiens
  siRNA target sequence for UPF3B (NM_023010.2,1008-1026).
cgttctgatagcgaactta

SEQ ID NO: 272437 - DNA, 19 bp, Homo sapiens
  siRNA target sequence for UPF3B (NM_023010.2,1009-1027).
gttctgatagcgaacttaa

SEQ ID NO: 272438 - DNA, 19 bp, Homo sapiens
  siRNA target sequence for UPF3B (NM_023010.2,1012-1030).
ctgatagcgaacttaaaga

SEQ ID NO: 272439 - DNA, 19 bp, Homo sapiens
  siRNA target sequence for UPF3B (NM_023010.2,1018-1036).
gcgaacttaaagatgaaaa

SEQ ID NO: 272440 - DNA, 19 bp, Homo sapiens
  siRNA target sequence for UPF3B (NM_023010.2,1019-1037).
cgaacttaaagatgaaaaa

SEQ ID NO: 272441 - DNA, 19 bp, Homo sapiens
  siRNA target sequence for UPF3B (NM_023010.2,1079-1097).
gagggaacgggaatatgaa

SEQ ID NO: 272442 - DNA, 19 bp, Homo sapiens
  siRNA target sequence for UPF3B (NM_023010.2,1109-1127).
gcgcatacttcgagaaaga

SEQ ID NO: 272443 - DNA, 19 bp, Homo sapiens
  siRNA target sequence for UPF3B (NM_023010.2,1111-1129).
gcatacttcgagaaagaga

SEQ ID NO: 272444 - DNA, 19 bp, Homo sapiens
  siRNA target sequence for UPF3B (NM_023010.2,1232-1250).
cacacttcgggataaagga

SEQ ID NO: 272445 - DNA, 19 bp, Homo sapiens
  siRNA target sequence for UPF3B (NM_023010.2,1313-1331).
ggtcaagagagatcgaata

SEQ ID NO: 272446 - DNA, 19 bp, Homo sapiens
  siRNA target sequence for UPF3B (NM_023010.2,1345-1363).
gtccagcgatgcagcttta

SEQ ID NO: 272447 - DNA, 19 bp, Homo sapiens
  siRNA target sequence for UPF3B (NM_023010.2,1453-1471).
gtggtattagccatagaaa

SEQ ID NO: 272448 - DNA, 19 bp, Homo sapiens
  siRNA target sequence for UPF3B (NM_023010.2,1456-1474).
gtattagccatagaaaaga

SEQ ID NO: 272449 - DNA, 19 bp, Homo sapiens
  siRNA target sequence for CHAC (NM_015186.1,361-379).
gagctgtggccctcaagaa

SEQ ID NO: 272450 - DNA, 19 bp, Homo sapiens
  siRNA target sequence for CHAC (NM_015186.1,370-388).
ccctcaagaatcttcaaat

SEQ ID NO: 272451 - DNA, 19 bp, Homo sapiens
  siRNA target sequence for CHAC (NM_015186.1,371-389).
cctcaagaatcttcaaatt

SEQ ID NO: 272452 - DNA, 19 bp, Homo sapiens
  siRNA target sequence for CHAC (NM_015186.1,372-390).
ctcaagaatcttcaaatta

SEQ ID NO: 272453 - DNA, 19 bp, Homo sapiens
  siRNA target sequence for CHAC (NM_015186.1,413-431).
ggatgtaccatttaaagtt

SEQ ID NO: 272454 - DNA, 19 bp, Homo sapiens
  siRNA target sequence for CHAC (NM_015186.1,438-456).
ggtcacataggtaatctta

SEQ ID NO: 272455 - DNA, 19 bp, Homo sapiens
  siRNA target sequence for CHAC (NM_015186.1,443-461).
cataggtaatcttaaactt

SEQ ID NO: 272456 - DNA, 19 bp, Homo sapiens
  siRNA target sequence for CHAC (NM_015186.1,468-486).
ccatggaaaaacctttata

SEQ ID NO: 272457 - DNA, 19 bp, Homo sapiens
  siRNA target sequence for CHAC (NM_015186.1,493-511).
ctgttgaagccgtattgga

SEQ ID NO: 272458 - DNA, 19 bp, Homo sapiens
  siRNA target sequence for CHAC (NM_015186.1,503-521).
cgtattggaagaaatttat

SEQ ID NO: 272459 - DNA, 19 bp, Homo sapiens
  siRNA target sequence for CHAC (NM_015186.1,525-543).
cttatagtgccttcttcta

SEQ ID NO: 272460 - DNA, 19 bp, Homo sapiens
  siRNA target sequence for CHAC (NM_015186.1,531-549).
gtgccttcttctagaataa

SEQ ID NO: 272461 - DNA, 19 bp, Homo sapiens
  siRNA target sequence for CHAC (NM_015186.1,727-745).
ccagtatccatattcgtta

SEQ ID NO: 272462 - DNA, 19 bp, Homo sapiens
  siRNA target sequence for CHAC (NM_015186.1,730-748).
gtatccatattcgttatga

SEQ ID NO: 272463 - DNA, 19 bp, Homo sapiens
  siRNA target sequence for CHAC (NM_015186.1,741-759).
cgttatgaagatgatatca

SEQ ID NO: 272464 - DNA, 19 bp, Homo sapiens
  siRNA target sequence for CHAC (NM_015186.1,767-785).
ggacaaaccgctgtcattt

SEQ ID NO: 272465 - DNA, 19 bp, Homo sapiens
  siRNA target sequence for CHAC (NM_015186.1,770-788).
caaaccgctgtcatttggt

SEQ ID NO: 272466 - DNA, 19 bp, Homo sapiens
  siRNA target sequence for CHAC (NM_015186.1,809-827).
catgcagacaactgatcaa

SEQ ID NO: 272467 - DNA, 19 bp, Homo sapiens
  siRNA target sequence for CHAC (NM_015186.1,813-831).
cagacaactgatcaatact

SEQ ID NO: 272468 - DNA, 19 bp, Homo sapiens
  siRNA target sequence for CHAC (NM_015186.1,832-850).
gggttccatgtttacatga

SEQ ID NO: 272469 - DNA, 19 bp, Homo sapiens
  siRNA target sequence for CHAC (NM_015186.1,833-851).
ggttccatgtttacatgat

SEQ ID NO: 272470 - DNA, 19 bp, Homo sapiens
  siRNA target sequence for CHAC (NM_015186.1,860-878).
gaaactggttcgtaagtta

SEQ ID NO: 272471 - DNA, 19 bp, Homo sapiens
  siRNA target sequence for CHAC (NM_015186.1,923-941).
gatgttttatcttagtgat

SEQ ID NO: 272472 - DNA, 19 bp, Homo sapiens
  siRNA target sequence for CHAC (NM_015186.1,972-990).
ggcattgtcaatgaaaata

SEQ ID NO: 272473 - DNA, 19 bp, Homo sapiens
  siRNA target sequence for CHAC (NM_015186.1,993-1011).
gttccagaaggttatgatt

SEQ ID NO: 272474 - DNA, 19 bp, Homo sapiens
  siRNA target sequence for CHAC (NM_015186.1,1033-1051).
ctaatgccaaacttgtgat

SEQ ID NO: 272475 - DNA, 19 bp, Homo sapiens
  siRNA target sequence for CHAC (NM_015186.1,1049-1067).
gatgaatcgccgatctgat

SEQ ID NO: 272476 - DNA, 19 bp, Homo sapiens
  siRNA target sequence for CHAC (NM_015186.1,1052-1070).
gaatcgccgatctgatttt

SEQ ID NO: 272477 - DNA, 19 bp, Homo sapiens
  siRNA target sequence for CHAC (NM_015186.1,1056-1074).
cgccgatctgattttgact

SEQ ID NO: 272478 - DNA, 19 bp, Homo sapiens
  siRNA target sequence for CHAC (NM_015186.1,1057-1075).
gccgatctgattttgactt

SEQ ID NO: 272479 - DNA, 19 bp, Homo sapiens
  siRNA target sequence for CHAC (NM_015186.1,1058-1076).
ccgatctgattttgacttt

SEQ ID NO: 272480 - DNA, 19 bp, Homo sapiens
  siRNA target sequence for CHAC (NM_015186.1,1094-1112).
cttggaaattgagttacat

SEQ ID NO: 272481 - DNA, 19 bp, Homo sapiens
  siRNA target sequence for CHAC (NM_015186.1,1115-1133).
catagcaattgaatttaat

SEQ ID NO: 272482 - DNA, 19 bp, Homo sapiens
  siRNA target sequence for CHAC (NM_015186.1,1150-1168).
gtattatggagcttcttga

SEQ ID NO: 272483 - DNA, 19 bp, Homo sapiens
  siRNA target sequence for CHAC (NM_015186.1,1164-1182).
cttgaatcagttgatatga

SEQ ID NO: 272484 - DNA, 19 bp, Homo sapiens
  siRNA target sequence for CHAC (NM_015186.1,1188-1206).
caaaatctgccatatagga

SEQ ID NO: 272485 - DNA, 19 bp, Homo sapiens
  siRNA target sequence for CHAC (NM_015186.1,1194-1212).
ctgccatataggaagttca

SEQ ID NO: 272486 - DNA, 19 bp, Homo sapiens
  siRNA target sequence for CHAC (NM_015186.1,1196-1214).
gccatataggaagttcaaa

SEQ ID NO: 272487 - DNA, 19 bp, Homo sapiens
  siRNA target sequence for CHAC (NM_015186.1,1245-1263).
gaatggtgggcttatgcta

SEQ ID NO: 272488 - DNA, 19 bp, Homo sapiens
  siRNA target sequence for CHAC (NM_015186.1,1250-1268).
gtgggcttatgctatacat

SEQ ID NO: 272489 - DNA, 19 bp, Homo sapiens
  siRNA target sequence for CHAC (NM_015186.1,1261-1279).
ctatacatggcgttcttga

SEQ ID NO: 272490 - DNA, 19 bp, Homo sapiens
  siRNA target sequence for CHAC (NM_015186.1,1266-1284).
catggcgttcttgaagtaa

SEQ ID NO: 272491 - DNA, 19 bp, Homo sapiens
  siRNA target sequence for CHAC (NM_015186.1,1364-1382).
gtataaaaaaaagttaaca

SEQ ID NO: 272492 - DNA, 19 bp, Homo sapiens
  siRNA target sequence for CHAC (NM_015186.1,1388-1406).
gaagccacctggtgaactt

SEQ ID NO: 272493 - DNA, 19 bp, Homo sapiens
  siRNA target sequence for CHAC (NM_015186.1,1399-1417).
gtgaacttctcgtgtcttt

SEQ ID NO: 272494 - DNA, 19 bp, Homo sapiens
  siRNA target sequence for CHAC (NM_015186.1,1471-1489).
cggcagaagttgaggtaaa

SEQ ID NO: 272495 - DNA, 19 bp, Homo sapiens
  siRNA target sequence for CHAC (NM_015186.1,1473-1491).
gcagaagttgaggtaaaga

SEQ ID NO: 272496 - DNA, 19 bp, Homo sapiens
  siRNA target sequence for CHAC (NM_015186.1,1474-1492).
cagaagttgaggtaaagaa

SEQ ID NO: 272497 - DNA, 19 bp, Homo sapiens
  siRNA target sequence for CHAC (NM_015186.1,1494-1512).
gctggatacaaaatttaca

SEQ ID NO: 272498 - DNA, 19 bp, Homo sapiens
  siRNA target sequence for CHAC (NM_015186.1,1495-1513).
ctggatacaaaatttacaa

SEQ ID NO: 272499 - DNA, 19 bp, Homo sapiens
  siRNA target sequence for CHAC (NM_015186.1,1571-1589).
gtcagaacaaaatactaat

SEQ ID NO: 272500 - DNA, 19 bp, Homo sapiens
  siRNA target sequence for CHAC (NM_015186.1,1687-1705).
cagttgatccaactttact

SEQ ID NO: 272501 - DNA, 19 bp, Homo sapiens
  siRNA target sequence for CHAC (NM_015186.1,1689-1707).
gttgatccaactttactaa

SEQ ID NO: 272502 - DNA, 19 bp, Homo sapiens
  siRNA target sequence for CHAC (NM_015186.1,1711-1729).
catttgaagccttgaagtt

SEQ ID NO: 272503 - DNA, 19 bp, Homo sapiens
  siRNA target sequence for CHAC (NM_015186.1,1800-1818).
gtaatagaagaatttagca

SEQ ID NO: 272504 - DNA, 19 bp, Homo sapiens
  siRNA target sequence for CHAC (NM_015186.1,1843-1861).
cacaagcaataaaatttga

SEQ ID NO: 272505 - DNA, 19 bp, Homo sapiens
  siRNA target sequence for CHAC (NM_015186.1,1891-1909).
gcttaccagataattcaga

SEQ ID NO: 272506 - DNA, 19 bp, Homo sapiens
  siRNA target sequence for CHAC (NM_015186.1,1892-1910).
cttaccagataattcagaa

SEQ ID NO: 272507 - DNA, 19 bp, Homo sapiens
  siRNA target sequence for CHAC (NM_015186.1,1927-1945).
cttcattggatgatgcaat

SEQ ID NO: 272508 - DNA, 19 bp, Homo sapiens
  siRNA target sequence for CHAC (NM_015186.1,1935-1953).
gatgatgcaatgtcacttt

SEQ ID NO: 272509 - DNA, 19 bp, Homo sapiens
  siRNA target sequence for CHAC (NM_015186.1,1992-2010).
gtttctcagaggtgtatca

SEQ ID NO: 272510 - DNA, 19 bp, Homo sapiens
  siRNA target sequence for CHAC (NM_015186.1,1996-2014).
ctcagaggtgtatcataga

SEQ ID NO: 272511 - DNA, 19 bp, Homo sapiens
  siRNA target sequence for CHAC (NM_015186.1,2009-2027).
catagaagctgaaccttta

SEQ ID NO: 272512 - DNA, 19 bp, Homo sapiens
  siRNA target sequence for CHAC (NM_015186.1,2017-2035).
ctgaacctttagaaatcat

SEQ ID NO: 272513 - DNA, 19 bp, Homo sapiens
  siRNA target sequence for CHAC (NM_015186.1,2019-2037).
gaacctttagaaatcatat

SEQ ID NO: 272514 - DNA, 19 bp, Homo sapiens
  siRNA target sequence for CHAC (NM_015186.1,2044-2062).
caaggacagtgaatagtat

SEQ ID NO: 272515 - DNA, 19 bp, Homo sapiens
  siRNA target sequence for CHAC (NM_015186.1,2047-2065).
ggacagtgaatagtatagt

SEQ ID NO: 272516 - DNA, 19 bp, Homo sapiens
  siRNA target sequence for CHAC (NM_015186.1,2080-2098).
ctccaaaagaggtacatct

SEQ ID NO: 272517 - DNA, 19 bp, Homo sapiens
  siRNA target sequence for CHAC (NM_015186.1,2113-2131).
cagcaactttgacaaaact

SEQ ID NO: 272518 - DNA, 19 bp, Homo sapiens
  siRNA target sequence for CHAC (NM_015186.1,2152-2170).
cagcaacaggtctactgta

SEQ ID NO: 272519 - DNA, 19 bp, Homo sapiens
  siRNA target sequence for CHAC (NM_015186.1,2154-2172).
gcaacaggtctactgtata

SEQ ID NO: 272520 - DNA, 19 bp, Homo sapiens
  siRNA target sequence for CHAC (NM_015186.1,2190-2208).
gttcttgatctcaaaatta

SEQ ID NO: 272521 - DNA, 19 bp, Homo sapiens
  siRNA target sequence for CHAC (NM_015186.1,2193-2211).
cttgatctcaaaattaatt

SEQ ID NO: 272522 - DNA, 19 bp, Homo sapiens
  siRNA target sequence for CHAC (NM_015186.1,2232-2250).
gtcccacaagatggaattt

SEQ ID NO: 272523 - DNA, 19 bp, Homo sapiens
  siRNA target sequence for CHAC (NM_015186.1,2263-2281).
caaatctgcttcttttgga

SEQ ID NO: 272524 - DNA, 19 bp, Homo sapiens
  siRNA target sequence for CHAC (NM_015186.1,2292-2310).
ctaaaggtgacgagtaaaa

SEQ ID NO: 272525 - DNA, 19 bp, Homo sapiens
  siRNA target sequence for CHAC (NM_015186.1,2305-2323).
gtaaaagtcgttctgaatt

SEQ ID NO: 272526 - DNA, 19 bp, Homo sapiens
  siRNA target sequence for CHAC (NM_015186.1,2337-2355).
caaggtgaggccaatctta

SEQ ID NO: 272527 - DNA, 19 bp, Homo sapiens
  siRNA target sequence for CHAC (NM_015186.1,2341-2359).
gtgaggccaatcttaaaga

SEQ ID NO: 272528 - DNA, 19 bp, Homo sapiens
  siRNA target sequence for CHAC (NM_015186.1,2345-2363).
ggccaatcttaaagagata

SEQ ID NO: 272529 - DNA, 19 bp, Homo sapiens
  siRNA target sequence for CHAC (NM_015186.1,2346-2364).
gccaatcttaaagagataa

SEQ ID NO: 272530 - DNA, 19 bp, Homo sapiens
  siRNA target sequence for CHAC (NM_015186.1,2360-2378).
gataatggatagagcttat

SEQ ID NO: 272531 - DNA, 19 bp, Homo sapiens
  siRNA target sequence for CHAC (NM_015186.1,2371-2389).
gagcttatgattcatttga

SEQ ID NO: 272532 - DNA, 19 bp, Homo sapiens
  siRNA target sequence for CHAC (NM_015186.1,2373-2391).
gcttatgattcatttgata

SEQ ID NO: 272533 - DNA, 19 bp, Homo sapiens
  siRNA target sequence for CHAC (NM_015186.1,2374-2392).
cttatgattcatttgatat

SEQ ID NO: 272534 - DNA, 19 bp, Homo sapiens
  siRNA target sequence for CHAC (NM_015186.1,2406-2424).
gtacagctgctttacagta

SEQ ID NO: 272535 - DNA, 19 bp, Homo sapiens
  siRNA target sequence for CHAC (NM_015186.1,2411-2429).
gctgctttacagtagagtt

SEQ ID NO: 272536 - DNA, 19 bp, Homo sapiens
  siRNA target sequence for CHAC (NM_015186.1,2448-2466).
gcacgaaaactcagtgtat

SEQ ID NO: 272537 - DNA, 19 bp, Homo sapiens
  siRNA target sequence for CHAC (NM_015186.1,2451-2469).
cgaaaactcagtgtatcta

SEQ ID NO: 272538 - DNA, 19 bp, Homo sapiens
  siRNA target sequence for CHAC (NM_015186.1,2483-2501).
ggtacccatgcacttcaat

SEQ ID NO: 272539 - DNA, 19 bp, Homo sapiens
  siRNA target sequence for CHAC (NM_015186.1,2508-2526).
ctgtctaaggccatggttt

SEQ ID NO: 272540 - DNA, 19 bp, Homo sapiens
  siRNA target sequence for CHAC (NM_015186.1,2512-2530).
ctaaggccatggttttcat

SEQ ID NO: 272541 - DNA, 19 bp, Homo sapiens
  siRNA target sequence for CHAC (NM_015186.1,2604-2622).
ctacaagggattatggaat

SEQ ID NO: 272542 - DNA, 19 bp, Homo sapiens
  siRNA target sequence for CHAC (NM_015186.1,2665-2683).
ctgcccctgtcaaatcatt

SEQ ID NO: 272543 - DNA, 19 bp, Homo sapiens
  siRNA target sequence for CHAC (NM_015186.1,2685-2703).
cagattcaaacatctactt

SEQ ID NO: 272544 - DNA, 19 bp, Homo sapiens
  siRNA target sequence for CHAC (NM_015186.1,2848-2866).
gtattcgaaccagaaagtt

SEQ ID NO: 272545 - DNA, 19 bp, Homo sapiens
  siRNA target sequence for CHAC (NM_015186.1,2853-2871).
cgaaccagaaagttacaaa

SEQ ID NO: 272546 - DNA, 19 bp, Homo sapiens
  siRNA target sequence for CHAC (NM_015186.1,2956-2974).
gagattgtgaactatctgt

SEQ ID NO: 272547 - DNA, 19 bp, Homo sapiens
  siRNA target sequence for CHAC (NM_015186.1,3012-3030).
gagattagaacatacgatt

SEQ ID NO: 272548 - DNA, 19 bp, Homo sapiens
  siRNA target sequence for CHAC (NM_015186.1,3111-3129).
gttacaaccctggataaca

SEQ ID NO: 272549 - DNA, 19 bp, Homo sapiens
  siRNA target sequence for CHAC (NM_015186.1,3143-3161).
gttaacgctggaatatgta

SEQ ID NO: 272550 - DNA, 19 bp, Homo sapiens
  siRNA target sequence for CHAC (NM_015186.1,3177-3195).
gtacccgacttgaaaagta

SEQ ID NO: 272551 - DNA, 19 bp, Homo sapiens
  siRNA target sequence for CHAC (NM_015186.1,3182-3200).
cgacttgaaaagtacctat

SEQ ID NO: 272552 - DNA, 19 bp, Homo sapiens
  siRNA target sequence for CHAC (NM_015186.1,3188-3206).
gaaaagtacctataacaat

SEQ ID NO: 272553 - DNA, 19 bp, Homo sapiens
  siRNA target sequence for CHAC (NM_015186.1,3196-3214).
cctataacaatgttttaca

SEQ ID NO: 272554 - DNA, 19 bp, Homo sapiens
  siRNA target sequence for CHAC (NM_015186.1,3416-3434).
gcagattttagcagaatta

SEQ ID NO: 272555 - DNA, 19 bp, Homo sapiens
  siRNA target sequence for CHAC (NM_015186.1,3427-3445).
cagaattatcgtgtttaca

SEQ ID NO: 272556 - DNA, 19 bp, Homo sapiens
  siRNA target sequence for CHAC (NM_015186.1,3429-3447).
gaattatcgtgtttacaga

SEQ ID NO: 272557 - DNA, 19 bp, Homo sapiens
  siRNA target sequence for CHAC (NM_015186.1,3436-3454).
cgtgtttacagatctttat

SEQ ID NO: 272558 - DNA, 19 bp, Homo sapiens
  siRNA target sequence for CHAC (NM_015186.1,3439-3457).
gtttacagatctttattca

SEQ ID NO: 272559 - DNA, 19 bp, Homo sapiens
  siRNA target sequence for CHAC (NM_015186.1,3488-3506).
gattgaagggcttgattct

SEQ ID NO: 272560 - DNA, 19 bp, Homo sapiens
  siRNA target sequence for CHAC (NM_015186.1,3512-3530).
gattatgaggccttcagaa

SEQ ID NO: 272561 - DNA, 19 bp, Homo sapiens
  siRNA target sequence for CHAC (NM_015186.1,3667-3685).
gttctgcatacacagatat

SEQ ID NO: 272562 - DNA, 19 bp, Homo sapiens
  siRNA target sequence for CHAC (NM_015186.1,3692-3710).
ggttgacattcaggttaat

SEQ ID NO: 272563 - DNA, 19 bp, Homo sapiens
  siRNA target sequence for CHAC (NM_015186.1,3693-3711).
gttgacattcaggttaatt

SEQ ID NO: 272564 - DNA, 19 bp, Homo sapiens
  siRNA target sequence for CHAC (NM_015186.1,3720-3738).
ggttgcattgaagtagttt

SEQ ID NO: 272565 - DNA, 19 bp, Homo sapiens
  siRNA target sequence for CHAC (NM_015186.1,3724-3742).
gcattgaagtagtttttgt

SEQ ID NO: 272566 - DNA, 19 bp, Homo sapiens
  siRNA target sequence for CHAC (NM_015186.1,3741-3759).
gtcacgaaatttctatatt

SEQ ID NO: 272567 - DNA, 19 bp, Homo sapiens
  siRNA target sequence for CHAC (NM_015186.1,3743-3761).
cacgaaatttctatattct

SEQ ID NO: 272568 - DNA, 19 bp, Homo sapiens
  siRNA target sequence for CHAC (NM_015186.1,3838-3856).
ctgctactggtgtaaaaga

SEQ ID NO: 272569 - DNA, 19 bp, Homo sapiens
  siRNA target sequence for CHAC (NM_015186.1,3841-3859).
ctactggtgtaaaagaact

SEQ ID NO: 272570 - DNA, 19 bp, Homo sapiens
  siRNA target sequence for CHAC (NM_015186.1,3877-3895).
gaatggcactggatattaa

SEQ ID NO: 272571 - DNA, 19 bp, Homo sapiens
  siRNA target sequence for CHAC (NM_015186.1,3979-3997).
caaatacctttcatatgat

SEQ ID NO: 272572 - DNA, 19 bp, Homo sapiens
  siRNA target sequence for CHAC (NM_015186.1,3985-4003).
cctttcatatgataacaga

SEQ ID NO: 272573 - DNA, 19 bp, Homo sapiens
  siRNA target sequence for CHAC (NM_015186.1,4017-4035).
cccccacctgttattgatt

SEQ ID NO: 272574 - DNA, 19 bp, Homo sapiens
  siRNA target sequence for CHAC (NM_015186.1,4020-4038).
ccacctgttattgatttga

SEQ ID NO: 272575 - DNA, 19 bp, Homo sapiens
  siRNA target sequence for CHAC (NM_015186.1,4021-4039).
cacctgttattgatttgat

SEQ ID NO: 272576 - DNA, 19 bp, Homo sapiens
  siRNA target sequence for CHAC (NM_015186.1,4056-4074).
gaaatgcgactatacagat

SEQ ID NO: 272577 - DNA, 19 bp, Homo sapiens
  siRNA target sequence for CHAC (NM_015186.1,4065-4083).
ctatacagatctcgattta

SEQ ID NO: 272578 - DNA, 19 bp, Homo sapiens
  siRNA target sequence for CHAC (NM_015186.1,4070-4088).
cagatctcgatttattaat

SEQ ID NO: 272579 - DNA, 19 bp, Homo sapiens
  siRNA target sequence for CHAC (NM_015186.1,4072-4090).
gatctcgatttattaatga

SEQ ID NO: 272580 - DNA, 19 bp, Homo sapiens
  siRNA target sequence for CHAC (NM_015186.1,4110-4128).
gatctactcctgccattaa

SEQ ID NO: 272581 - DNA, 19 bp, Homo sapiens
  siRNA target sequence for CHAC (NM_015186.1,4140-4158).
gtggttgaacgaaatttat

SEQ ID NO: 272582 - DNA, 19 bp, Homo sapiens
  siRNA target sequence for CHAC (NM_015186.1,4143-4161).
gttgaacgaaatttatgct

SEQ ID NO: 272583 - DNA, 19 bp, Homo sapiens
  siRNA target sequence for CHAC (NM_015186.1,4175-4193).
ggaagttccttgttttaat

SEQ ID NO: 272584 - DNA, 19 bp, Homo sapiens
  siRNA target sequence for CHAC (NM_015186.1,4212-4230).
ccaatggagttcattctta

SEQ ID NO: 272585 - DNA, 19 bp, Homo sapiens
  siRNA target sequence for CHAC (NM_015186.1,4220-4238).
gttcattcttagtcaagaa

SEQ ID NO: 272586 - DNA, 19 bp, Homo sapiens
  siRNA target sequence for CHAC (NM_015186.1,4270-4288).
gcaatatatggtatgaaaa

SEQ ID NO: 272587 - DNA, 19 bp, Homo sapiens
  siRNA target sequence for CHAC (NM_015186.1,4311-4329).
gtaacaaaagaccaataca

SEQ ID NO: 272588 - DNA, 19 bp, Homo sapiens
  siRNA target sequence for CHAC (NM_015186.1,4332-4350).
gccactagtggagttacta

SEQ ID NO: 272589 - DNA, 19 bp, Homo sapiens
  siRNA target sequence for CHAC (NM_015186.1,4334-4352).
cactagtggagttactact

SEQ ID NO: 272590 - DNA, 19 bp, Homo sapiens
  siRNA target sequence for CHAC (NM_015186.1,4336-4354).
ctagtggagttactactaa

SEQ ID NO: 272591 - DNA, 19 bp, Homo sapiens
  siRNA target sequence for CHAC (NM_015186.1,4414-4432).
cacgtgccttactagttaa

SEQ ID NO: 272592 - DNA, 19 bp, Homo sapiens
  siRNA target sequence for CHAC (NM_015186.1,4419-4437).
gccttactagttaagacaa

SEQ ID NO: 272593 - DNA, 19 bp, Homo sapiens
  siRNA target sequence for CHAC (NM_015186.1,4428-4446).
gttaagacaacactaaaca

SEQ ID NO: 272594 - DNA, 19 bp, Homo sapiens
  siRNA target sequence for CHAC (NM_015186.1,4445-4463).
cataagcttcaaaactgat

SEQ ID NO: 272595 - DNA, 19 bp, Homo sapiens
  siRNA target sequence for CHAC (NM_015186.1,4467-4485).
ctcaccatggtgctgtata

SEQ ID NO: 272596 - DNA, 19 bp, Homo sapiens
  siRNA target sequence for CHAC (NM_015186.1,4469-4487).
caccatggtgctgtatagt

SEQ ID NO: 272597 - DNA, 19 bp, Homo sapiens
  siRNA target sequence for CHAC (NM_015186.1,4481-4499).
gtatagtccaggtcctaaa

SEQ ID NO: 272598 - DNA, 19 bp, Homo sapiens
  siRNA target sequence for CHAC (NM_015186.1,4556-4574).
ggagaatattataagtact

SEQ ID NO: 272599 - DNA, 19 bp, Homo sapiens
  siRNA target sequence for CHAC (NM_015186.1,4683-4701).
ctgacagttggttttgaca

SEQ ID NO: 272600 - DNA, 19 bp, Homo sapiens
  siRNA target sequence for CHAC (NM_015186.1,4687-4705).
cagttggttttgacaaaaa

SEQ ID NO: 272601 - DNA, 19 bp, Homo sapiens
  siRNA target sequence for CHAC (NM_015186.1,4751-4769).
gactgatgcggtctttcaa

SEQ ID NO: 272602 - DNA, 19 bp, Homo sapiens
  siRNA target sequence for CHAC (NM_015186.1,4854-4872).
gaaaccagtgtgcaaacat

SEQ ID NO: 272603 - DNA, 19 bp, Homo sapiens
  siRNA target sequence for CHAC (NM_015186.1,5002-5020).
cacaatgtgaaatttgcta

SEQ ID NO: 272604 - DNA, 19 bp, Homo sapiens
  siRNA target sequence for CHAC (NM_015186.1,5004-5022).
caatgtgaaatttgctata

SEQ ID NO: 272605 - DNA, 19 bp, Homo sapiens
  siRNA target sequence for CHAC (NM_015186.1,5132-5150).
gccctgtgacttgttttat

SEQ ID NO: 272606 - DNA, 19 bp, Homo sapiens
  siRNA target sequence for CHAC (NM_015186.1,5141-5159).
cttgttttatcaaactact

SEQ ID NO: 272607 - DNA, 19 bp, Homo sapiens
  siRNA target sequence for CHAC (NM_015186.1,5167-5185).
gtacagatccacaagtgat

SEQ ID NO: 272608 - DNA, 19 bp, Homo sapiens
  siRNA target sequence for CHAC (NM_015186.1,5172-5190).
gatccacaagtgatcgata

SEQ ID NO: 272609 - DNA, 19 bp, Homo sapiens
  siRNA target sequence for CHAC (NM_015186.1,5175-5193).
ccacaagtgatcgatatgt

SEQ ID NO: 272610 - DNA, 19 bp, Homo sapiens
  siRNA target sequence for CHAC (NM_015186.1,5181-5199).
gtgatcgatatgtcagtaa

SEQ ID NO: 272611 - DNA, 19 bp, Homo sapiens
  siRNA target sequence for CHAC (NM_015186.1,5183-5201).
gatcgatatgtcagtaaaa

SEQ ID NO: 272612 - DNA, 19 bp, Homo sapiens
  siRNA target sequence for CHAC (NM_015186.1,5196-5214).
gtaaaatccctgacactaa

SEQ ID NO: 272613 - DNA, 19 bp, Homo sapiens
  siRNA target sequence for CHAC (NM_015186.1,5216-5234).
ggtttcaccagttattata

SEQ ID NO: 272614 - DNA, 19 bp, Homo sapiens
  siRNA target sequence for CHAC (NM_015186.1,5217-5235).
gtttcaccagttattataa

SEQ ID NO: 272615 - DNA, 19 bp, Homo sapiens
  siRNA target sequence for CHAC (NM_015186.1,5249-5267).
cataacttcagcactgtat

SEQ ID NO: 272616 - DNA, 19 bp, Homo sapiens
  siRNA target sequence for CHAC (NM_015186.1,5257-5275).
cagcactgtatacaactaa

SEQ ID NO: 272617 - DNA, 19 bp, Homo sapiens
  siRNA target sequence for CHAC (NM_015186.1,5289-5307).
gaagaaacggcttcttcta

SEQ ID NO: 272618 - DNA, 19 bp, Homo sapiens
  siRNA target sequence for CHAC (NM_015186.1,5409-5427).
cccaaaggcgagatgataa

SEQ ID NO: 272619 - DNA, 19 bp, Homo sapiens
  siRNA target sequence for CHAC (NM_015186.1,5410-5428).
ccaaaggcgagatgataaa

SEQ ID NO: 272620 - DNA, 19 bp, Homo sapiens
  siRNA target sequence for CHAC (NM_015186.1,5411-5429).
caaaggcgagatgataaaa

SEQ ID NO: 272621 - DNA, 19 bp, Homo sapiens
  siRNA target sequence for CHAC (NM_015186.1,5462-5480).
ggctggaattggtcataga

SEQ ID NO: 272622 - DNA, 19 bp, Homo sapiens
  siRNA target sequence for CHAC (NM_015186.1,5496-5514).
ctggcaaagtcacgttttt

SEQ ID NO: 272623 - DNA, 19 bp, Homo sapiens
  siRNA target sequence for CHAC (NM_015186.1,5498-5516).
ggcaaagtcacgtttttca

SEQ ID NO: 272624 - DNA, 19 bp, Homo sapiens
  siRNA target sequence for CHAC (NM_015186.1,5615-5633).
gcttgaacccttagaaatt

SEQ ID NO: 272625 - DNA, 19 bp, Homo sapiens
  siRNA target sequence for CHAC (NM_015186.1,5645-5663).
ggattttagaccatggaat

SEQ ID NO: 272626 - DNA, 19 bp, Homo sapiens
  siRNA target sequence for CHAC (NM_015186.1,5653-5671).
gaccatggaatcttggtat

SEQ ID NO: 272627 - DNA, 19 bp, Homo sapiens
  siRNA target sequence for CHAC (NM_015186.1,5775-5793).
gaccaattaaacattacat

SEQ ID NO: 272628 - DNA, 19 bp, Homo sapiens
  siRNA target sequence for CHAC (NM_015186.1,5803-5821).
gtggtcttgtaatgttaaa

SEQ ID NO: 272629 - DNA, 19 bp, Homo sapiens
  siRNA target sequence for CHAC (NM_015186.1,5805-5823).
ggtcttgtaatgttaaaca

SEQ ID NO: 272630 - DNA, 19 bp, Homo sapiens
  siRNA target sequence for CHAC (NM_015186.1,5928-5946).
gtttcgccaagtgattctt

SEQ ID NO: 272631 - DNA, 19 bp, Homo sapiens
  siRNA target sequence for CHAC (NM_015186.1,5950-5968).
gtgtactcaacattcctat

SEQ ID NO: 272632 - DNA, 19 bp, Homo sapiens
  siRNA target sequence for CHAC (NM_015186.1,5960-5978).
cattcctatggcaaaatca

SEQ ID NO: 272633 - DNA, 19 bp, Homo sapiens
  siRNA target sequence for CHAC (NM_015186.1,5970-5988).
gcaaaatcatatgtattga

SEQ ID NO: 272634 - DNA, 19 bp, Homo sapiens
  siRNA target sequence for CHAC (NM_015186.1,5971-5989).
caaaatcatatgtattgaa

SEQ ID NO: 272635 - DNA, 19 bp, Homo sapiens
  siRNA target sequence for CHAC (NM_015186.1,5997-6015).
gaaagtttaagtatggatt

SEQ ID NO: 272636 - DNA, 19 bp, Homo sapiens
  siRNA target sequence for CHAC (NM_015186.1,6029-6047).
ggacaatgatcatttcaat

SEQ ID NO: 272637 - DNA, 19 bp, Homo sapiens
  siRNA target sequence for CHAC (NM_015186.1,6058-6076).
gcctaagcagcaaactctt

SEQ ID NO: 272638 - DNA, 19 bp, Homo sapiens
  siRNA target sequence for CHAC (NM_015186.1,6087-6105).
cttacacctgttaaccatt

SEQ ID NO: 272639 - DNA, 19 bp, Homo sapiens
  siRNA target sequence for CHAC (NM_015186.1,6111-6129).
gctgataagattcctttaa

SEQ ID NO: 272640 - DNA, 19 bp, Homo sapiens
  siRNA target sequence for CHAC (NM_015186.1,6141-6159).
cgacgtctgtacactgtaa

SEQ ID NO: 272641 - DNA, 19 bp, Homo sapiens
  siRNA target sequence for CHAC (NM_015186.1,6145-6163).
gtctgtacactgtaagaca

SEQ ID NO: 272642 - DNA, 19 bp, Homo sapiens
  siRNA target sequence for CHAC (NM_015186.1,6175-6193).
gcgttgaaagatctattgt

SEQ ID NO: 272643 - DNA, 19 bp, Homo sapiens
  siRNA target sequence for CHAC (NM_015186.1,6176-6194).
cgttgaaagatctattgtt

SEQ ID NO: 272644 - DNA, 19 bp, Homo sapiens
  siRNA target sequence for CHAC (NM_015186.1,6187-6205).
ctattgtttgtcaaattga

SEQ ID NO: 272645 - DNA, 19 bp, Homo sapiens
  siRNA target sequence for CHAC (NM_015186.1,6237-6255).
cgctccccagtgcagataa

SEQ ID NO: 272646 - DNA, 19 bp, Homo sapiens
  siRNA target sequence for CHAC (NM_015186.1,6239-6257).
ctccccagtgcagataaga

SEQ ID NO: 272647 - DNA, 19 bp, Homo sapiens
  siRNA target sequence for CHAC (NM_015186.1,6246-6264).
gtgcagataagaaatcatt

SEQ ID NO: 272648 - DNA, 19 bp, Homo sapiens
  siRNA target sequence for CHAC (NM_015186.1,6268-6286).
cagtcccactgtctgttta

SEQ ID NO: 272649 - DNA, 19 bp, Homo sapiens
  siRNA target sequence for CHAC (NM_015186.1,6345-6363).
ggatcttaccgatcattca

SEQ ID NO: 272650 - DNA, 19 bp, Homo sapiens
  siRNA target sequence for CHAC (NM_015186.1,6346-6364).
gatcttaccgatcattcat

SEQ ID NO: 272651 - DNA, 19 bp, Homo sapiens
  siRNA target sequence for CHAC (NM_015186.1,6354-6372).
cgatcattcatttttctga

SEQ ID NO: 272652 - DNA, 19 bp, Homo sapiens
  siRNA target sequence for CHAC (NM_015186.1,6381-6399).
gatgagaactatcaaatgt

SEQ ID NO: 272653 - DNA, 19 bp, Homo sapiens
  siRNA target sequence for CHAC (NM_015186.1,6549-6567).
gatggttgggatttaccat

SEQ ID NO: 272654 - DNA, 19 bp, Homo sapiens
  siRNA target sequence for CHAC (NM_015186.1,6553-6571).
gttgggatttaccatacat

SEQ ID NO: 272655 - DNA, 19 bp, Homo sapiens
  siRNA target sequence for CHAC (NM_015186.1,6593-6611).
cctgctccgaaatcttctt

SEQ ID NO: 272656 - DNA, 19 bp, Homo sapiens
  siRNA target sequence for CHAC (NM_015186.1,6672-6690).
ggacattcagcccagattt

SEQ ID NO: 272657 - DNA, 19 bp, Homo sapiens
  siRNA target sequence for CHAC (NM_015186.1,6741-6759).
ctcaatcacgattggaaaa

SEQ ID NO: 272658 - DNA, 19 bp, Homo sapiens
  siRNA target sequence for CHAC (NM_015186.1,6743-6761).
caatcacgattggaaaagt

SEQ ID NO: 272659 - DNA, 19 bp, Homo sapiens
  siRNA target sequence for CHAC (NM_015186.1,6747-6765).
cacgattggaaaagtgaat

SEQ ID NO: 272660 - DNA, 19 bp, Homo sapiens
  siRNA target sequence for CHAC (NM_015186.1,6776-6794).
gcctaatcagcaagacatt

SEQ ID NO: 272661 - DNA, 19 bp, Homo sapiens
  siRNA target sequence for CHAC (NM_015186.1,6786-6804).
caagacattagttttgtca

SEQ ID NO: 272662 - DNA, 19 bp, Homo sapiens
  siRNA target sequence for CHAC (NM_015186.1,6801-6819).
gtcagttttacttgtgtta

SEQ ID NO: 272663 - DNA, 19 bp, Homo sapiens
  siRNA target sequence for CHAC (NM_015186.1,6852-6870).
gtccatatgacttacaata

SEQ ID NO: 272664 - DNA, 19 bp, Homo sapiens
  siRNA target sequence for CHAC (NM_015186.1,6854-6872).
ccatatgacttacaatact

SEQ ID NO: 272665 - DNA, 19 bp, Homo sapiens
  siRNA target sequence for CHAC (NM_015186.1,6900-6918).
ccttattggatggtcaata

SEQ ID NO: 272666 - DNA, 19 bp, Homo sapiens
  siRNA target sequence for CHAC (NM_015186.1,6901-6919).
cttattggatggtcaataa

SEQ ID NO: 272667 - DNA, 19 bp, Homo sapiens
  siRNA target sequence for CHAC (NM_015186.1,6922-6940).
ctggccgcatgttacagta

SEQ ID NO: 272668 - DNA, 19 bp, Homo sapiens
  siRNA target sequence for CHAC (NM_015186.1,6925-6943).
gccgcatgttacagtacaa

SEQ ID NO: 272669 - DNA, 19 bp, Homo sapiens
  siRNA target sequence for CHAC (NM_015186.1,6926-6944).
ccgcatgttacagtacaaa

SEQ ID NO: 272670 - DNA, 19 bp, Homo sapiens
  siRNA target sequence for CHAC (NM_015186.1,6946-6964).
cagacggaattcatcgaaa

SEQ ID NO: 272671 - DNA, 19 bp, Homo sapiens
  siRNA target sequence for CHAC (NM_015186.1,6950-6968).
cggaattcatcgaaagcat

SEQ ID NO: 272672 - DNA, 19 bp, Homo sapiens
  siRNA target sequence for CHAC (NM_015186.1,6965-6983).
gcatccacctaattataaa

SEQ ID NO: 272673 - DNA, 19 bp, Homo sapiens
  siRNA target sequence for CHAC (NM_015186.1,7059-7077).
gagttgtccaatcagtttt

SEQ ID NO: 272674 - DNA, 19 bp, Homo sapiens
  siRNA target sequence for CHAC (NM_015186.1,7073-7091).
gttttcaattgatactgtt

SEQ ID NO: 272675 - DNA, 19 bp, Homo sapiens
  siRNA target sequence for CHAC (NM_015186.1,7093-7111).
gtagtcatggagctgttaa

SEQ ID NO: 272676 - DNA, 19 bp, Homo sapiens
  siRNA target sequence for CHAC (NM_015186.1,7185-7203).
gtgacatttaccccttttt

SEQ ID NO: 272677 - DNA, 19 bp, Homo sapiens
  siRNA target sequence for CHAC (NM_015186.1,7222-7240).
gcaaataccatatatcagt

SEQ ID NO: 272678 - DNA, 19 bp, Homo sapiens
  siRNA target sequence for CHAC (NM_015186.1,7264-7282).
ggctctctcttgatttgga

SEQ ID NO: 272679 - DNA, 19 bp, Homo sapiens
  siRNA target sequence for CHAC (NM_015186.1,7292-7310).
ccccttttggcctgagtat

SEQ ID NO: 272680 - DNA, 19 bp, Homo sapiens
  siRNA target sequence for CHAC (NM_015186.1,7301-7319).
gcctgagtatgcttctagt

SEQ ID NO: 272681 - DNA, 19 bp, Homo sapiens
  siRNA target sequence for CHAC (NM_015186.1,7318-7336).
gtaaacttcttattcaagt

SEQ ID NO: 272682 - DNA, 19 bp, Homo sapiens
  siRNA target sequence for CHAC (NM_015186.1,7412-7430).
cgagcttggaggtattata

SEQ ID NO: 272683 - DNA, 19 bp, Homo sapiens
  siRNA target sequence for CHAC (NM_015186.1,7415-7433).
gcttggaggtattatagca

SEQ ID NO: 272684 - DNA, 19 bp, Homo sapiens
  siRNA target sequence for CHAC (NM_015186.1,7423-7441).
gtattatagcagaagtgaa

SEQ ID NO: 272685 - DNA, 19 bp, Homo sapiens
  siRNA target sequence for CHAC (NM_015186.1,7446-7464).
gccgagcattctacagtta

SEQ ID NO: 272686 - DNA, 19 bp, Homo sapiens
  siRNA target sequence for CHAC (NM_015186.1,7492-7510).
cagctacattcctcttaat

SEQ ID NO: 272687 - DNA, 19 bp, Homo sapiens
  siRNA target sequence for CHAC (NM_015186.1,7494-7512).
gctacattcctcttaataa

SEQ ID NO: 272688 - DNA, 19 bp, Homo sapiens
  siRNA target sequence for CHAC (NM_015186.1,7495-7513).
ctacattcctcttaataaa

SEQ ID NO: 272689 - DNA, 19 bp, Homo sapiens
  siRNA target sequence for CHAC (NM_015186.1,7498-7516).
cattcctcttaataaatca

SEQ ID NO: 272690 - DNA, 19 bp, Homo sapiens
  siRNA target sequence for CHAC (NM_015186.1,7533-7551).
gttcaatacaatcaaagtt

SEQ ID NO: 272691 - DNA, 19 bp, Homo sapiens
  siRNA target sequence for CHAC (NM_015186.1,7584-7602).
ggtaaagccgtgttttata

SEQ ID NO: 272692 - DNA, 19 bp, Homo sapiens
  siRNA target sequence for CHAC (NM_015186.1,7611-7629).
gatccggtgggctctagaa

SEQ ID NO: 272693 - DNA, 19 bp, Homo sapiens
  siRNA target sequence for CHAC (NM_015186.1,7654-7672).
gccatggtgaagtaacaca

SEQ ID NO: 272694 - DNA, 19 bp, Homo sapiens
  siRNA target sequence for CHAC (NM_015186.1,7712-7730).
gacaatatatttagtttca

SEQ ID NO: 272695 - DNA, 19 bp, Homo sapiens
  siRNA target sequence for CHAC (NM_015186.1,7746-7764).
caacgcattattttattca

SEQ ID NO: 272696 - DNA, 19 bp, Homo sapiens
  siRNA target sequence for CHAC (NM_015186.1,7767-7785).
gaagatccaagggtattta

SEQ ID NO: 272697 - DNA, 19 bp, Homo sapiens
  siRNA target sequence for CHAC (NM_015186.1,7840-7858).
cattacaagatgttggaat

SEQ ID NO: 272698 - DNA, 19 bp, Homo sapiens
  siRNA target sequence for CHAC (NM_015186.1,7893-7911).
gcctatataggcattacaa

SEQ ID NO: 272699 - DNA, 19 bp, Homo sapiens
  siRNA target sequence for CHAC (NM_015186.1,7895-7913).
ctatataggcattacaagt

SEQ ID NO: 272700 - DNA, 19 bp, Homo sapiens
  siRNA target sequence for CHAC (NM_015186.1,8006-8024).
ggaatatactgaatcttct

SEQ ID NO: 272701 - DNA, 19 bp, Homo sapiens
  siRNA target sequence for CHAC (NM_015186.1,8026-8044).
cttcagaagataaggttat

SEQ ID NO: 272702 - DNA, 19 bp, Homo sapiens
  siRNA target sequence for CHAC (NM_015186.1,8077-8095).
cccctactggtcataacat

SEQ ID NO: 272703 - DNA, 19 bp, Homo sapiens
  siRNA target sequence for CHAC (NM_015186.1,8079-8097).
cctactggtcataacatga

SEQ ID NO: 272704 - DNA, 19 bp, Homo sapiens
  siRNA target sequence for CHAC (NM_015186.1,8080-8098).
ctactggtcataacatgaa

SEQ ID NO: 272705 - DNA, 19 bp, Homo sapiens
  siRNA target sequence for CHAC (NM_015186.1,8105-8123).
gcagccgcatgtaatagct

SEQ ID NO: 272706 - DNA, 19 bp, Homo sapiens
  siRNA target sequence for CHAC (NM_015186.1,8122-8140).
ctctacgaagaaattatct

SEQ ID NO: 272707 - DNA, 19 bp, Homo sapiens
  siRNA target sequence for CHAC (NM_015186.1,8170-8188).
ctgcacatcaatcatcatt

SEQ ID NO: 272708 - DNA, 19 bp, Homo sapiens
  siRNA target sequence for CHAC (NM_015186.1,8172-8190).
gcacatcaatcatcattta

SEQ ID NO: 272709 - DNA, 19 bp, Homo sapiens
  siRNA target sequence for CHAC (NM_015186.1,8213-8231).
gatccaaaatcagatacat

SEQ ID NO: 272710 - DNA, 19 bp, Homo sapiens
  siRNA target sequence for CHAC (NM_015186.1,8337-8355).
gcaggacattcccagatat

SEQ ID NO: 272711 - DNA, 19 bp, Homo sapiens
  siRNA target sequence for CHAC (NM_015186.1,8349-8367).
cagatatcacgtattaagt

SEQ ID NO: 272712 - DNA, 19 bp, Homo sapiens
  siRNA target sequence for CHAC (NM_015186.1,8351-8369).
gatatcacgtattaagtat

SEQ ID NO: 272713 - DNA, 19 bp, Homo sapiens
  siRNA target sequence for CHAC (NM_015186.1,8356-8374).
cacgtattaagtatttcaa

SEQ ID NO: 272714 - DNA, 19 bp, Homo sapiens
  siRNA target sequence for CHAC (NM_015186.1,8525-8543).
ctcattagtagatcaatca

SEQ ID NO: 272715 - DNA, 19 bp, Homo sapiens
  siRNA target sequence for CHAC (NM_015186.1,8527-8545).
cattagtagatcaatcaca

SEQ ID NO: 272716 - DNA, 19 bp, Homo sapiens
  siRNA target sequence for CHAC (NM_015186.1,8547-8565).
gtcagcctctatgaatatt

SEQ ID NO: 272717 - DNA, 19 bp, Homo sapiens
  siRNA target sequence for CHAC (NM_015186.1,8606-8624).
gagttccggcagagaagaa

SEQ ID NO: 272718 - DNA, 19 bp, Homo sapiens
  siRNA target sequence for CHAC (NM_015186.1,8654-8672).
gattccagttcattcttta

SEQ ID NO: 272719 - DNA, 19 bp, Homo sapiens
  siRNA target sequence for CHAC (NM_015186.1,8661-8679).
gttcattctttaaatcttt

SEQ ID NO: 272720 - DNA, 19 bp, Homo sapiens
  siRNA target sequence for CHAC (NM_015186.1,8699-8717).
cacactgacagatgtacaa

SEQ ID NO: 272721 - DNA, 19 bp, Homo sapiens
  siRNA target sequence for CHAC (NM_015186.1,8701-8719).
cactgacagatgtacaaga

SEQ ID NO: 272722 - DNA, 19 bp, Homo sapiens
  siRNA target sequence for CHAC (NM_015186.1,8748-8766).
ctcaactatcagttccata

SEQ ID NO: 272723 - DNA, 19 bp, Homo sapiens
  siRNA target sequence for CHAC (NM_015186.1,8778-8796).
ctacagtctgaagtcataa

SEQ ID NO: 272724 - DNA, 19 bp, Homo sapiens
  siRNA target sequence for CHAC (NM_015186.1,8787-8805).
gaagtcataagacactatt

SEQ ID NO: 272725 - DNA, 19 bp, Homo sapiens
  siRNA target sequence for CHAC (NM_015186.1,8790-8808).
gtcataagacactattcaa

SEQ ID NO: 272726 - DNA, 19 bp, Homo sapiens
  siRNA target sequence for CHAC (NM_015186.1,8806-8824).
caaaacaggccattaagca

SEQ ID NO: 272727 - DNA, 19 bp, Homo sapiens
  siRNA target sequence for CHAC (NM_015186.1,8822-8840).
gcagatgtatgtactcatt

SEQ ID NO: 272728 - DNA, 19 bp, Homo sapiens
  siRNA target sequence for CHAC (NM_015186.1,8825-8843).
gatgtatgtactcattctt

SEQ ID NO: 272729 - DNA, 19 bp, Homo sapiens
  siRNA target sequence for CHAC (NM_015186.1,8962-8980).
gaatggcactaggacttaa

SEQ ID NO: 272730 - DNA, 19 bp, Homo sapiens
  siRNA target sequence for CHAC (NM_015186.1,9180-9198).
ggcataacaggaattgtta

SEQ ID NO: 272731 - DNA, 19 bp, Homo sapiens
  siRNA target sequence for CHAC (NM_015186.1,9286-9304).
caactggaggcatcataga

SEQ ID NO: 272732 - DNA, 19 bp, Homo sapiens
  siRNA target sequence for CHAC (NM_015186.1,9369-9387).
cgacctcctcggttcttca

SEQ ID NO: 272733 - DNA, 19 bp, Homo sapiens
  siRNA target sequence for CHAC (NM_015186.1,9528-9546).
gagtcagatctaaaccatt

SEQ ID NO: 272734 - DNA, 19 bp, Homo sapiens
  siRNA target sequence for CHAC (NM_033305.1,9490-9508).
cccatgtcatgatcaataa

SEQ ID NO: 272735 - DNA, 19 bp, Homo sapiens
  siRNA target sequence for CHAC (NM_033305.1,9509-9527).
gacagatatgctaatgata

SEQ ID NO: 272736 - DNA, 19 bp, Homo sapiens
  siRNA target sequence for CHAC (NM_033305.1,9513-9531).
gatatgctaatgataacca

SEQ ID NO: 272737 - DNA, 19 bp, Homo sapiens
  siRNA target sequence for CHAC (NM_033305.1,9529-9547).
ccagacgtggtgtattgtt

SEQ ID NO: 272738 - DNA, 19 bp, Homo sapiens
  siRNA target sequence for CHAC (NM_033305.1,9530-9548).
cagacgtggtgtattgttt

SEQ ID NO: 272739 - DNA, 19 bp, Homo sapiens
  siRNA target sequence for CHAC (NM_033305.1,9532-9550).
gacgtggtgtattgtttgt

SEQ ID NO: 272740 - DNA, 19 bp, Homo sapiens
  siRNA target sequence for CHAC (NM_033305.1,9534-9552).
cgtggtgtattgtttgtaa

SEQ ID NO: 272741 - DNA, 19 bp, Homo sapiens
  siRNA target sequence for CHAC (NM_033305.1,9584-9602).
gtggcagtatagttttgat

SEQ ID NO: 272742 - DNA, 19 bp, Homo sapiens
  siRNA target sequence for CHAC (NM_033305.1,9635-9653).
gagaagattgcgcattgaa

SEQ ID NO: 272743 - DNA, 19 bp, Homo sapiens
  siRNA target sequence for CHAC (NM_033305.1,9660-9678).
gaacgagtgaagtctgtat

SEQ ID NO: 272744 - DNA, 19 bp, Homo sapiens
  siRNA target sequence for CHAC (NM_033305.1,9664-9682).
gagtgaagtctgtatttca

SEQ ID NO: 272745 - DNA, 19 bp, Homo sapiens
  siRNA target sequence for KIAA1012 (NM_014939.1,60-78).
ggcccagtgtgtacaatca

SEQ ID NO: 272746 - DNA, 19 bp, Homo sapiens
  siRNA target sequence for KIAA1012 (NM_014939.1,62-80).
cccagtgtgtacaatcagt

SEQ ID NO: 272747 - DNA, 19 bp, Homo sapiens
  siRNA target sequence for KIAA1012 (NM_014939.1,144-162).
gcggctcactcgtctcaat

SEQ ID NO: 272748 - DNA, 19 bp, Homo sapiens
  siRNA target sequence for KIAA1012 (NM_014939.1,146-164).
ggctcactcgtctcaatca

SEQ ID NO: 272749 - DNA, 19 bp, Homo sapiens
  siRNA target sequence for KIAA1012 (NM_014939.1,170-188).
gcttcgcggagctgcttaa

SEQ ID NO: 272750 - DNA, 19 bp, Homo sapiens
  siRNA target sequence for KIAA1012 (NM_014939.1,217-235).
cacatgagagatcctaata

SEQ ID NO: 272751 - DNA, 19 bp, Homo sapiens
  siRNA target sequence for KIAA1012 (NM_014939.1,222-240).
gagagatcctaataatcaa

SEQ ID NO: 272752 - DNA, 19 bp, Homo sapiens
  siRNA target sequence for KIAA1012 (NM_014939.1,264-282).
gatagcagtaagcaacatt

SEQ ID NO: 272753 - DNA, 19 bp, Homo sapiens
  siRNA target sequence for KIAA1012 (NM_014939.1,307-325).
gccatccggaagcttttga

SEQ ID NO: 272754 - DNA, 19 bp, Homo sapiens
  siRNA target sequence for KIAA1012 (NM_014939.1,308-326).
ccatccggaagcttttgaa

SEQ ID NO: 272755 - DNA, 19 bp, Homo sapiens
  siRNA target sequence for KIAA1012 (NM_014939.1,353-371).
cagaaggattagtagctaa

SEQ ID NO: 272756 - DNA, 19 bp, Homo sapiens
  siRNA target sequence for KIAA1012 (NM_014939.1,358-376).
ggattagtagctaatgtga

SEQ ID NO: 272757 - DNA, 19 bp, Homo sapiens
  siRNA target sequence for KIAA1012 (NM_014939.1,359-377).
gattagtagctaatgtgat

SEQ ID NO: 272758 - DNA, 19 bp, Homo sapiens
  siRNA target sequence for KIAA1012 (NM_014939.1,375-393).
gattacagcaggagattat

SEQ ID NO: 272759 - DNA, 19 bp, Homo sapiens
  siRNA target sequence for KIAA1012 (NM_014939.1,383-401).
caggagattatgaccttaa

SEQ ID NO: 272760 - DNA, 19 bp, Homo sapiens
  siRNA target sequence for KIAA1012 (NM_014939.1,418-436).
ccatggtttgagtcttaca

SEQ ID NO: 272761 - DNA, 19 bp, Homo sapiens
  siRNA target sequence for KIAA1012 (NM_014939.1,481-499).
ctgaaccactatttagcat

SEQ ID NO: 272762 - DNA, 19 bp, Homo sapiens
  siRNA target sequence for KIAA1012 (NM_014939.1,504-522).
gttggtagcgtcatctagt

SEQ ID NO: 272763 - DNA, 19 bp, Homo sapiens
  siRNA target sequence for KIAA1012 (NM_014939.1,507-525).
ggtagcgtcatctagtgaa

SEQ ID NO: 272764 - DNA, 19 bp, Homo sapiens
  siRNA target sequence for KIAA1012 (NM_014939.1,535-553).
gtggaacagttttcaaagt

SEQ ID NO: 272765 - DNA, 19 bp, Homo sapiens
  siRNA target sequence for KIAA1012 (NM_014939.1,548-566).
caaagttgtcacaagaaca

SEQ ID NO: 272766 - DNA, 19 bp, Homo sapiens
  siRNA target sequence for KIAA1012 (NM_014939.1,577-595).
cagcacaacagtgattatt

SEQ ID NO: 272767 - DNA, 19 bp, Homo sapiens
  siRNA target sequence for KIAA1012 (NM_014939.1,596-614).
cctaccccaagtggtttat

SEQ ID NO: 272768 - DNA, 19 bp, Homo sapiens
  siRNA target sequence for KIAA1012 (NM_014939.1,597-615).
ctaccccaagtggtttata

SEQ ID NO: 272769 - DNA, 19 bp, Homo sapiens
  siRNA target sequence for KIAA1012 (NM_014939.1,603-621).
caagtggtttataccaaat

SEQ ID NO: 272770 - DNA, 19 bp, Homo sapiens
  siRNA target sequence for KIAA1012 (NM_014939.1,667-685).
gaacagagagctgaatcaa

SEQ ID NO: 272771 - DNA, 19 bp, Homo sapiens
  siRNA target sequence for KIAA1012 (NM_014939.1,674-692).
gagctgaatcaatttatga

SEQ ID NO: 272772 - DNA, 19 bp, Homo sapiens
  siRNA target sequence for KIAA1012 (NM_014939.1,716-734).
ctcagggttgctatttact

SEQ ID NO: 272773 - DNA, 19 bp, Homo sapiens
  siRNA target sequence for KIAA1012 (NM_014939.1,720-738).
gggttgctatttacttaaa

SEQ ID NO: 272774 - DNA, 19 bp, Homo sapiens
  siRNA target sequence for KIAA1012 (NM_014939.1,794-812).
gtcagtatctccagaaaaa

SEQ ID NO: 272775 - DNA, 19 bp, Homo sapiens
  siRNA target sequence for KIAA1012 (NM_014939.1,838-856).
gaagatggcccttgtacta

SEQ ID NO: 272776 - DNA, 19 bp, Homo sapiens
  siRNA target sequence for KIAA1012 (NM_014939.1,841-859).
gatggcccttgtactataa

SEQ ID NO: 272777 - DNA, 19 bp, Homo sapiens
  siRNA target sequence for KIAA1012 (NM_014939.1,844-862).
ggcccttgtactataactt

SEQ ID NO: 272778 - DNA, 19 bp, Homo sapiens
  siRNA target sequence for KIAA1012 (NM_014939.1,848-866).
cttgtactataacttcaaa

SEQ ID NO: 272779 - DNA, 19 bp, Homo sapiens
  siRNA target sequence for KIAA1012 (NM_014939.1,854-872).
ctataacttcaaataagaa

SEQ ID NO: 272780 - DNA, 19 bp, Homo sapiens
  siRNA target sequence for KIAA1012 (NM_014939.1,877-895).
gataataacttgctttcat

SEQ ID NO: 272781 - DNA, 19 bp, Homo sapiens
  siRNA target sequence for KIAA1012 (NM_014939.1,897-915).
ggatggattagataacgaa

SEQ ID NO: 272782 - DNA, 19 bp, Homo sapiens
  siRNA target sequence for KIAA1012 (NM_014939.1,902-920).
gattagataacgaagtcaa

SEQ ID NO: 272783 - DNA, 19 bp, Homo sapiens
  siRNA target sequence for KIAA1012 (NM_014939.1,922-940).
gatggcttaccaaataact

SEQ ID NO: 272784 - DNA, 19 bp, Homo sapiens
  siRNA target sequence for KIAA1012 (NM_014939.1,944-962).
gagctcacccacttcagtt

SEQ ID NO: 272785 - DNA, 19 bp, Homo sapiens
  siRNA target sequence for KIAA1012 (NM_014939.1,974-992).
gtgacccttctaacagtat

SEQ ID NO: 272786 - DNA, 19 bp, Homo sapiens
  siRNA target sequence for KIAA1012 (NM_014939.1,999-1017).
cccagatcatctaagatct

SEQ ID NO: 272787 - DNA, 19 bp, Homo sapiens
  siRNA target sequence for KIAA1012 (NM_014939.1,1022-1040).
catcgttacatgaaacaaa

SEQ ID NO: 272788 - DNA, 19 bp, Homo sapiens
  siRNA target sequence for KIAA1012 (NM_014939.1,1066-1084).
ggtgcatgtttaacactta

SEQ ID NO: 272789 - DNA, 19 bp, Homo sapiens
  siRNA target sequence for KIAA1012 (NM_014939.1,1157-1175).
caattaggcaattaaacga

SEQ ID NO: 272790 - DNA, 19 bp, Homo sapiens
  siRNA target sequence for KIAA1012 (NM_014939.1,1179-1197).
gctaatatcaagaaaaggt

SEQ ID NO: 272791 - DNA, 19 bp, Homo sapiens
  siRNA target sequence for KIAA1012 (NM_014939.1,1195-1213).
ggtttgagtcgatctctat

SEQ ID NO: 272792 - DNA, 19 bp, Homo sapiens
  siRNA target sequence for KIAA1012 (NM_014939.1,1232-1250).
ggtttagtggcagtaaagt

SEQ ID NO: 272793 - DNA, 19 bp, Homo sapiens
  siRNA target sequence for KIAA1012 (NM_014939.1,1249-1267).
gttccagaaaagagcatta

SEQ ID NO: 272794 - DNA, 19 bp, Homo sapiens
  siRNA target sequence for KIAA1012 (NM_014939.1,1304-1322).
cggaagcaccagaacttca

SEQ ID NO: 272795 - DNA, 19 bp, Homo sapiens
  siRNA target sequence for KIAA1012 (NM_014939.1,1346-1364).
gttttttggtgcagcatta

SEQ ID NO: 272796 - DNA, 19 bp, Homo sapiens
  siRNA target sequence for KIAA1012 (NM_014939.1,1371-1389).
ggcttacagttgctatcat

SEQ ID NO: 272797 - DNA, 19 bp, Homo sapiens
  siRNA target sequence for KIAA1012 (NM_014939.1,1372-1390).
gcttacagttgctatcata

SEQ ID NO: 272798 - DNA, 19 bp, Homo sapiens
  siRNA target sequence for KIAA1012 (NM_014939.1,1382-1400).
gctatcatactgcaaagaa

SEQ ID NO: 272799 - DNA, 19 bp, Homo sapiens
  siRNA target sequence for KIAA1012 (NM_014939.1,1490-1508).
ggccatatcctgctcatta

SEQ ID NO: 272800 - DNA, 19 bp, Homo sapiens
  siRNA target sequence for KIAA1012 (NM_014939.1,1533-1551).
cagagatatctgcaagaat

SEQ ID NO: 272801 - DNA, 19 bp, Homo sapiens
  siRNA target sequence for KIAA1012 (NM_014939.1,1575-1593).
gttgcttagtgctgaactt

SEQ ID NO: 272802 - DNA, 19 bp, Homo sapiens
  siRNA target sequence for KIAA1012 (NM_014939.1,1578-1596).
gcttagtgctgaactttta

SEQ ID NO: 272803 - DNA, 19 bp, Homo sapiens
  siRNA target sequence for KIAA1012 (NM_014939.1,1601-1619).
gccaaagcaaatattcaga

SEQ ID NO: 272804 - DNA, 19 bp, Homo sapiens
  siRNA target sequence for KIAA1012 (NM_014939.1,1620-1638).
ggctgcagctctcctaata

SEQ ID NO: 272805 - DNA, 19 bp, Homo sapiens
  siRNA target sequence for KIAA1012 (NM_014939.1,1663-1681).
cttcgaagtgcacttcttt

SEQ ID NO: 272806 - DNA, 19 bp, Homo sapiens
  siRNA target sequence for KIAA1012 (NM_014939.1,1755-1773).
ggcaggccatcgatttagt

SEQ ID NO: 272807 - DNA, 19 bp, Homo sapiens
  siRNA target sequence for KIAA1012 (NM_014939.1,1756-1774).
gcaggccatcgatttagta

SEQ ID NO: 272808 - DNA, 19 bp, Homo sapiens
  siRNA target sequence for KIAA1012 (NM_014939.1,1791-1809).
gcatgctttacgctgttat

SEQ ID NO: 272809 - DNA, 19 bp, Homo sapiens
  siRNA target sequence for KIAA1012 (NM_014939.1,1792-1810).
catgctttacgctgttatt

SEQ ID NO: 272810 - DNA, 19 bp, Homo sapiens
  siRNA target sequence for KIAA1012 (NM_014939.1,1796-1814).
ctttacgctgttattgtca

SEQ ID NO: 272811 - DNA, 19 bp, Homo sapiens
  siRNA target sequence for KIAA1012 (NM_014939.1,1811-1829).
gtcaagccatgcaagttta

SEQ ID NO: 272812 - DNA, 19 bp, Homo sapiens
  siRNA target sequence for KIAA1012 (NM_014939.1,1849-1867).
cttgcagaggatcacatta

SEQ ID NO: 272813 - DNA, 19 bp, Homo sapiens
  siRNA target sequence for KIAA1012 (NM_014939.1,1858-1876).
gatcacattaatttcacta

SEQ ID NO: 272814 - DNA, 19 bp, Homo sapiens
  siRNA target sequence for KIAA1012 (NM_014939.1,1882-1900).
cgccagtcctatactctta

SEQ ID NO: 272815 - DNA, 19 bp, Homo sapiens
  siRNA target sequence for KIAA1012 (NM_014939.1,1922-1940).
ctgcttttaggcatattct

SEQ ID NO: 272816 - DNA, 19 bp, Homo sapiens
  siRNA target sequence for KIAA1012 (NM_014939.1,1924-1942).
gcttttaggcatattctaa

SEQ ID NO: 272817 - DNA, 19 bp, Homo sapiens
  siRNA target sequence for KIAA1012 (NM_014939.1,1988-2006).
gagaatatctttatgttta

SEQ ID NO: 272818 - DNA, 19 bp, Homo sapiens
  siRNA target sequence for KIAA1012 (NM_014939.1,2049-2067).
gcttcctttaccgtatatt

SEQ ID NO: 272819 - DNA, 19 bp, Homo sapiens
  siRNA target sequence for KIAA1012 (NM_014939.1,2050-2068).
cttcctttaccgtatatta

SEQ ID NO: 272820 - DNA, 19 bp, Homo sapiens
  siRNA target sequence for KIAA1012 (NM_014939.1,2053-2071).
cctttaccgtatattaaca

SEQ ID NO: 272821 - DNA, 19 bp, Homo sapiens
  siRNA target sequence for KIAA1012 (NM_014939.1,2128-2146).
caagcagctactcatgtaa

SEQ ID NO: 272822 - DNA, 19 bp, Homo sapiens
  siRNA target sequence for KIAA1012 (NM_014939.1,2132-2150).
cagctactcatgtaagtct

SEQ ID NO: 272823 - DNA, 19 bp, Homo sapiens
  siRNA target sequence for KIAA1012 (NM_014939.1,2248-2266).
catcccacacaatactgtt

SEQ ID NO: 272824 - DNA, 19 bp, Homo sapiens
  siRNA target sequence for KIAA1012 (NM_014939.1,2381-2399).
cattgctttggaagtttca

SEQ ID NO: 272825 - DNA, 19 bp, Homo sapiens
  siRNA target sequence for KIAA1012 (NM_014939.1,2390-2408).
ggaagtttcatcctaaaga

SEQ ID NO: 272826 - DNA, 19 bp, Homo sapiens
  siRNA target sequence for KIAA1012 (NM_014939.1,2391-2409).
gaagtttcatcctaaagat

SEQ ID NO: 272827 - DNA, 19 bp, Homo sapiens
  siRNA target sequence for KIAA1012 (NM_014939.1,2434-2452).
gttaaacaactagttacaa

SEQ ID NO: 272828 - DNA, 19 bp, Homo sapiens
  siRNA target sequence for KIAA1012 (NM_014939.1,2532-2550).
gctctttccccatcacata

SEQ ID NO: 272829 - DNA, 19 bp, Homo sapiens
  siRNA target sequence for KIAA1012 (NM_014939.1,2598-2616).
gggctctatgacagtagat

SEQ ID NO: 272830 - DNA, 19 bp, Homo sapiens
  siRNA target sequence for KIAA1012 (NM_014939.1,2634-2652).
cggatgtcacacaggaaaa

SEQ ID NO: 272831 - DNA, 19 bp, Homo sapiens
  siRNA target sequence for KIAA1012 (NM_014939.1,2635-2653).
ggatgtcacacaggaaaat

SEQ ID NO: 272832 - DNA, 19 bp, Homo sapiens
  siRNA target sequence for KIAA1012 (NM_014939.1,2673-2691).
ccgagggaagcaggattta

SEQ ID NO: 272833 - DNA, 19 bp, Homo sapiens
  siRNA target sequence for KIAA1012 (NM_014939.1,2698-2716).
caaggtcctcgacttaaca

SEQ ID NO: 272834 - DNA, 19 bp, Homo sapiens
  siRNA target sequence for KIAA1012 (NM_014939.1,2701-2719).
ggtcctcgacttaacaaca

SEQ ID NO: 272835 - DNA, 19 bp, Homo sapiens
  siRNA target sequence for KIAA1012 (NM_014939.1,2708-2726).
gacttaacaacacaaaaga

SEQ ID NO: 272836 - DNA, 19 bp, Homo sapiens
  siRNA target sequence for KIAA1012 (NM_014939.1,2750-2768).
gccctgatcgacgtttaga

SEQ ID NO: 272837 - DNA, 19 bp, Homo sapiens
  siRNA target sequence for KIAA1012 (NM_014939.1,2751-2769).
ccctgatcgacgtttagat

SEQ ID NO: 272838 - DNA, 19 bp, Homo sapiens
  siRNA target sequence for KIAA1012 (NM_014939.1,2759-2777).
gacgtttagatcccataat

SEQ ID NO: 272839 - DNA, 19 bp, Homo sapiens
  siRNA target sequence for KIAA1012 (NM_014939.1,2761-2779).
cgtttagatcccataatca

SEQ ID NO: 272840 - DNA, 19 bp, Homo sapiens
  siRNA target sequence for KIAA1012 (NM_014939.1,2839-2857).
ggagaaatccgaaaagcat

SEQ ID NO: 272841 - DNA, 19 bp, Homo sapiens
  siRNA target sequence for KIAA1012 (NM_014939.1,2840-2858).
gagaaatccgaaaagcata

SEQ ID NO: 272842 - DNA, 19 bp, Homo sapiens
  siRNA target sequence for KIAA1012 (NM_014939.1,2847-2865).
ccgaaaagcatatgtagaa

SEQ ID NO: 272843 - DNA, 19 bp, Homo sapiens
  siRNA target sequence for KIAA1012 (NM_014939.1,2848-2866).
cgaaaagcatatgtagaat

SEQ ID NO: 272844 - DNA, 19 bp, Homo sapiens
  siRNA target sequence for KIAA1012 (NM_014939.1,2849-2867).
gaaaagcatatgtagaatt

SEQ ID NO: 272845 - DNA, 19 bp, Homo sapiens
  siRNA target sequence for KIAA1012 (NM_014939.1,2896-2914).
ggattgaaggttgtttcta

SEQ ID NO: 272846 - DNA, 19 bp, Homo sapiens
  siRNA target sequence for KIAA1012 (NM_014939.1,2901-2919).
gaaggttgtttctaaacgt

SEQ ID NO: 272847 - DNA, 19 bp, Homo sapiens
  siRNA target sequence for KIAA1012 (NM_014939.1,2912-2930).
ctaaacgtccagagttctt

SEQ ID NO: 272848 - DNA, 19 bp, Homo sapiens
  siRNA target sequence for KIAA1012 (NM_014939.1,2928-2946).
ctttactttcggtggtaat

SEQ ID NO: 272849 - DNA, 19 bp, Homo sapiens
  siRNA target sequence for KIAA1012 (NM_014939.1,2941-2959).
ggtaatactgctgttctaa

SEQ ID NO: 272850 - DNA, 19 bp, Homo sapiens
  siRNA target sequence for KIAA1012 (NM_014939.1,3028-3046).
gtgtgtacagcactcatat

SEQ ID NO: 272851 - DNA, 19 bp, Homo sapiens
  siRNA target sequence for KIAA1012 (NM_014939.1,3184-3202).
ggtgtccatgaaattaact

SEQ ID NO: 272852 - DNA, 19 bp, Homo sapiens
  siRNA target sequence for KIAA1012 (NM_014939.1,3236-3254).
caaaaatacggcacagaat

SEQ ID NO: 272853 - DNA, 19 bp, Homo sapiens
  siRNA target sequence for KIAA1012 (NM_014939.1,3245-3263).
ggcacagaatattaagaca

SEQ ID NO: 272854 - DNA, 19 bp, Homo sapiens
  siRNA target sequence for KIAA1012 (NM_014939.1,3278-3296).
gtaccagtcggtctttaaa

SEQ ID NO: 272855 - DNA, 19 bp, Homo sapiens
  siRNA target sequence for KIAA1012 (NM_014939.1,3281-3299).
ccagtcggtctttaaatgt

SEQ ID NO: 272856 - DNA, 19 bp, Homo sapiens
  siRNA target sequence for KIAA1012 (NM_014939.1,3344-3362).
gcagaggaggcaatatgct

SEQ ID NO: 272857 - DNA, 19 bp, Homo sapiens
  siRNA target sequence for KIAA1012 (NM_014939.1,3345-3363).
cagaggaggcaatatgcta

SEQ ID NO: 272858 - DNA, 19 bp, Homo sapiens
  siRNA target sequence for KIAA1012 (NM_014939.1,3370-3388).
gtggatgtggaaaatacca

SEQ ID NO: 272859 - DNA, 19 bp, Homo sapiens
  siRNA target sequence for KIAA1012 (NM_014939.1,3401-3419).
caggcgttaaggaattcca

SEQ ID NO: 272860 - DNA, 19 bp, Homo sapiens
  siRNA target sequence for KIAA1012 (NM_014939.1,3420-3438).
catagtgcaagtatcaagt

SEQ ID NO: 272861 - DNA, 19 bp, Homo sapiens
  siRNA target sequence for KIAA1012 (NM_014939.1,3568-3586).
cagtcctctgaaaaatata

SEQ ID NO: 272862 - DNA, 19 bp, Homo sapiens
  siRNA target sequence for KIAA1012 (NM_014939.1,3636-3654).
cccatgtgcagacttcttt

SEQ ID NO: 272863 - DNA, 19 bp, Homo sapiens
  siRNA target sequence for KIAA1012 (NM_014939.1,3643-3661).
gcagacttcttttatcgaa

SEQ ID NO: 272864 - DNA, 19 bp, Homo sapiens
  siRNA target sequence for KIAA1012 (NM_014939.1,3658-3676).
cgaagtttatcttctgaat

SEQ ID NO: 272865 - DNA, 19 bp, Homo sapiens
  siRNA target sequence for KIAA1012 (NM_014939.1,3734-3752).
ctgtgagattgattcaaaa

SEQ ID NO: 272866 - DNA, 19 bp, Homo sapiens
  siRNA target sequence for KIAA1012 (NM_014939.1,3808-3826).
gacagtaaacagcttattt

SEQ ID NO: 272867 - DNA, 19 bp, Homo sapiens
  siRNA target sequence for KIAA1012 (NM_014939.1,3927-3945).
caggccagaaaacattaca

SEQ ID NO: 272868 - DNA, 19 bp, Homo sapiens
  siRNA target sequence for KIAA1012 (NM_014939.1,4063-4081).
cttttactttccaattgtt

SEQ ID NO: 272869 - DNA, 19 bp, Homo sapiens
  siRNA target sequence for KIAA1012 (NM_014939.1,4086-4104).
ggctgatgtagatgtcata

SEQ ID NO: 272870 - DNA, 19 bp, Homo sapiens
  siRNA target sequence for KIAA1012 (NM_014939.1,4105-4123).
gttgatcttcggcataaaa

SEQ ID NO: 272871 - DNA, 19 bp, Homo sapiens
  siRNA target sequence for KIAA1012 (NM_014939.1,4108-4126).
gatcttcggcataaaacaa

SEQ ID NO: 272872 - DNA, 19 bp, Homo sapiens
  siRNA target sequence for KIAA1012 (NM_014939.1,4111-4129).
cttcggcataaaacaacaa

SEQ ID NO: 272873 - DNA, 19 bp, Homo sapiens
  siRNA target sequence for KIAA1012 (NM_014939.1,4144-4162).
gaaatccatggatcattca

SEQ ID NO: 272874 - DNA, 19 bp, Homo sapiens
  siRNA target sequence for KIAA1012 (NM_014939.1,4172-4190).
gacaaacacagtataaact

SEQ ID NO: 272875 - DNA, 19 bp, Homo sapiens
  siRNA target sequence for KIAA1012 (NM_014939.1,4178-4196).
cacagtataaacttcaact

SEQ ID NO: 272876 - DNA, 19 bp, Homo sapiens
  siRNA target sequence for KIAA1012 (NM_014939.1,4180-4198).
cagtataaacttcaactta

SEQ ID NO: 272877 - DNA, 19 bp, Homo sapiens
  siRNA target sequence for KIAA1012 (NM_014939.1,4240-4258).
gttcatacaggtgtttata

SEQ ID NO: 272878 - DNA, 19 bp, Homo sapiens
  siRNA target sequence for KIAA1012 (NM_014939.1,4287-4305).
gttatcggaccaagttaca

SEQ ID NO: 272879 - DNA, 19 bp, Homo sapiens
  siRNA target sequence for KIAA1012 (NM_014939.1,4293-4311).
ggaccaagttacagtgttt

SEQ ID NO: 272880 - DNA, 19 bp, Homo sapiens
  siRNA target sequence for SEDL (NM_014563.2,467-485).
cgatcaagtgcatttgaca

SEQ ID NO: 272881 - DNA, 19 bp, Homo sapiens
  siRNA target sequence for VPS41 (NM_014396.2,56-74).
gtcccttgaagaatctaca

SEQ ID NO: 272882 - DNA, 19 bp, Homo sapiens
  siRNA target sequence for VPS41 (NM_014396.2,59-77).
ccttgaagaatctacagat

SEQ ID NO: 272883 - DNA, 19 bp, Homo sapiens
  siRNA target sequence for VPS41 (NM_014396.2,119-137).
gtatgaaaggctttccaat

SEQ ID NO: 272884 - DNA, 19 bp, Homo sapiens
  siRNA target sequence for VPS41 (NM_014396.2,139-157).
gggtaactgaaatacttca

SEQ ID NO: 272885 - DNA, 19 bp, Homo sapiens
  siRNA target sequence for VPS41 (NM_014396.2,175-193).
gcatgacagtccatgacaa

SEQ ID NO: 272886 - DNA, 19 bp, Homo sapiens
  siRNA target sequence for VPS41 (NM_014396.2,211-229).
cacattatggcaaggttta

SEQ ID NO: 272887 - DNA, 19 bp, Homo sapiens
  siRNA target sequence for VPS41 (NM_014396.2,220-238).
gcaaggtttatttacttga

SEQ ID NO: 272888 - DNA, 19 bp, Homo sapiens
  siRNA target sequence for VPS41 (NM_014396.2,221-239).
caaggtttatttacttgat

SEQ ID NO: 272889 - DNA, 19 bp, Homo sapiens
  siRNA target sequence for VPS41 (NM_014396.2,237-255).
gatgtccaggggaacatca

SEQ ID NO: 272890 - DNA, 19 bp, Homo sapiens
  siRNA target sequence for VPS41 (NM_014396.2,254-272).
cactcagaagtttgatgta

SEQ ID NO: 272891 - DNA, 19 bp, Homo sapiens
  siRNA target sequence for VPS41 (NM_014396.2,350-368).
gcaggtatttggactgtat

SEQ ID NO: 272892 - DNA, 19 bp, Homo sapiens
  siRNA target sequence for VPS41 (NM_014396.2,351-369).
caggtatttggactgtatt

SEQ ID NO: 272893 - DNA, 19 bp, Homo sapiens
  siRNA target sequence for VPS41 (NM_014396.2,418-436).
ctgtgcacccacatttcgt

SEQ ID NO: 272894 - DNA, 19 bp, Homo sapiens
  siRNA target sequence for VPS41 (NM_014396.2,489-507).
gaacggtcttggatgaaca

SEQ ID NO: 272895 - DNA, 19 bp, Homo sapiens
  siRNA target sequence for VPS41 (NM_014396.2,575-593).
gattgcttgggccaataat

SEQ ID NO: 272896 - DNA, 19 bp, Homo sapiens
  siRNA target sequence for VPS41 (NM_014396.2,661-679).
gtcttcgcccagacatgta

SEQ ID NO: 272897 - DNA, 19 bp, Homo sapiens
  siRNA target sequence for VPS41 (NM_014396.2,782-800).
ggatttgccaagtcgatat

SEQ ID NO: 272898 - DNA, 19 bp, Homo sapiens
  siRNA target sequence for VPS41 (NM_014396.2,789-807).
ccaagtcgatatgttgaaa

SEQ ID NO: 272899 - DNA, 19 bp, Homo sapiens
  siRNA target sequence for VPS41 (NM_014396.2,790-808).
caagtcgatatgttgaaat

SEQ ID NO: 272900 - DNA, 19 bp, Homo sapiens
  siRNA target sequence for VPS41 (NM_014396.2,870-888).
gttgtactttcgtatgtaa

SEQ ID NO: 272901 - DNA, 19 bp, Homo sapiens
  siRNA target sequence for VPS41 (NM_014396.2,941-959).
catcatccagccactttct

SEQ ID NO: 272902 - DNA, 19 bp, Homo sapiens
  siRNA target sequence for VPS41 (NM_014396.2,1017-1035).
gaatgtagagattatcatt

SEQ ID NO: 272903 - DNA, 19 bp, Homo sapiens
  siRNA target sequence for VPS41 (NM_014396.2,1024-1042).
gagattatcatttagaata

SEQ ID NO: 272904 - DNA, 19 bp, Homo sapiens
  siRNA target sequence for VPS41 (NM_014396.2,1050-1068).
ggggaatcacttttttaca

SEQ ID NO: 272905 - DNA, 19 bp, Homo sapiens
  siRNA target sequence for VPS41 (NM_014396.2,1070-1088).
cgtgagtccgagagatgtt

SEQ ID NO: 272906 - DNA, 19 bp, Homo sapiens
  siRNA target sequence for VPS41 (NM_014396.2,1073-1091).
gagtccgagagatgttgta

SEQ ID NO: 272907 - DNA, 19 bp, Homo sapiens
  siRNA target sequence for VPS41 (NM_014396.2,1100-1118).
ggaacgagaccaagatgat

SEQ ID NO: 272908 - DNA, 19 bp, Homo sapiens
  siRNA target sequence for VPS41 (NM_014396.2,1110-1128).
caagatgatcacattgact

SEQ ID NO: 272909 - DNA, 19 bp, Homo sapiens
  siRNA target sequence for VPS41 (NM_014396.2,1212-1230).
gatattggcttggcatata

SEQ ID NO: 272910 - DNA, 19 bp, Homo sapiens
  siRNA target sequence for VPS41 (NM_014396.2,1312-1330).
gggaatatgaagtttataa

SEQ ID NO: 272911 - DNA, 19 bp, Homo sapiens
  siRNA target sequence for VPS41 (NM_014396.2,1398-1416).
ccactcatctatgaaatga

SEQ ID NO: 272912 - DNA, 19 bp, Homo sapiens
  siRNA target sequence for VPS41 (NM_014396.2,1399-1417).
cactcatctatgaaatgat

SEQ ID NO: 272913 - DNA, 19 bp, Homo sapiens
  siRNA target sequence for VPS41 (NM_014396.2,1474-1492).
ggcctggagatctgtataa

SEQ ID NO: 272914 - DNA, 19 bp, Homo sapiens
  siRNA target sequence for VPS41 (NM_014396.2,1476-1494).
cctggagatctgtataata

SEQ ID NO: 272915 - DNA, 19 bp, Homo sapiens
  siRNA target sequence for VPS41 (NM_014396.2,1509-1527).
caagcagttcgggatcatt

SEQ ID NO: 272916 - DNA, 19 bp, Homo sapiens
  siRNA target sequence for VPS41 (NM_014396.2,1515-1533).
gttcgggatcatttgaaga

SEQ ID NO: 272917 - DNA, 19 bp, Homo sapiens
  siRNA target sequence for VPS41 (NM_014396.2,1536-1554).
gatagtcagaacaagactt

SEQ ID NO: 272918 - DNA, 19 bp, Homo sapiens
  siRNA target sequence for VPS41 (NM_014396.2,1540-1558).
gtcagaacaagactttact

SEQ ID NO: 272919 - DNA, 19 bp, Homo sapiens
  siRNA target sequence for VPS41 (NM_014396.2,1652-1670).
gatccacaagcataatctt

SEQ ID NO: 272920 - DNA, 19 bp, Homo sapiens
  siRNA target sequence for VPS41 (NM_014396.2,1806-1824).
cagcatgtgtatttgcata

SEQ ID NO: 272921 - DNA, 19 bp, Homo sapiens
  siRNA target sequence for VPS41 (NM_014396.2,1812-1830).
gtgtatttgcataagcttt

SEQ ID NO: 272922 - DNA, 19 bp, Homo sapiens
  siRNA target sequence for VPS41 (NM_014396.2,1851-1869).
gggcagcgttaccatgaaa

SEQ ID NO: 272923 - DNA, 19 bp, Homo sapiens
  siRNA target sequence for VPS41 (NM_014396.2,1852-1870).
ggcagcgttaccatgaaaa

SEQ ID NO: 272924 - DNA, 19 bp, Homo sapiens
  siRNA target sequence for VPS41 (NM_014396.2,1853-1871).
gcagcgttaccatgaaaaa

SEQ ID NO: 272925 - DNA, 19 bp, Homo sapiens
  siRNA target sequence for VPS41 (NM_014396.2,1857-1875).
cgttaccatgaaaaacaga

SEQ ID NO: 272926 - DNA, 19 bp, Homo sapiens
  siRNA target sequence for VPS41 (NM_014396.2,1966-1984).
gtcaacagagaaactttgt

SEQ ID NO: 272927 - DNA, 19 bp, Homo sapiens
  siRNA target sequence for VPS41 (NM_014396.2,2004-2022).
ctgagccgaatgggtaata

SEQ ID NO: 272928 - DNA, 19 bp, Homo sapiens
  siRNA target sequence for VPS41 (NM_014396.2,2023-2041).
gccgaagtgccctgaagat

SEQ ID NO: 272929 - DNA, 19 bp, Homo sapiens
  siRNA target sequence for VPS41 (NM_014396.2,2025-2043).
cgaagtgccctgaagatga

SEQ ID NO: 272930 - DNA, 19 bp, Homo sapiens
  siRNA target sequence for VPS41 (NM_014396.2,2029-2047).
gtgccctgaagatgattat

SEQ ID NO: 272931 - DNA, 19 bp, Homo sapiens
  siRNA target sequence for VPS41 (NM_014396.2,2048-2066).
ggaggaattacatgatgtt

SEQ ID NO: 272932 - DNA, 19 bp, Homo sapiens
  siRNA target sequence for VPS41 (NM_014396.2,2113-2131).
gggaagatttgattttata

SEQ ID NO: 272933 - DNA, 19 bp, Homo sapiens
  siRNA target sequence for VPS41 (NM_014396.2,2204-2222).
gattcaccgtattaaggaa

SEQ ID NO: 272934 - DNA, 19 bp, Homo sapiens
  siRNA target sequence for VPS41 (NM_014396.2,2267-2285).
gcaagactacaatttgcaa

SEQ ID NO: 272935 - DNA, 19 bp, Homo sapiens
  siRNA target sequence for VPS41 (NM_014396.2,2316-2334).
ctcgtagctgactctttgt

SEQ ID NO: 272936 - DNA, 19 bp, Homo sapiens
  siRNA target sequence for VPS41 (NM_014396.2,2351-2369).
gcaccgaactcaaatgaaa

SEQ ID NO: 272937 - DNA, 19 bp, Homo sapiens
  siRNA target sequence for DEFA4 (NM_001925.1,160-178).
ccagaagaccaggacatat

SEQ ID NO: 272938 - DNA, 19 bp, Homo sapiens
  siRNA target sequence for DEFA4 (NM_001925.1,163-181).
gaagaccaggacatatcta

SEQ ID NO: 272939 - DNA, 19 bp, Homo sapiens
  siRNA target sequence for DEFA4 (NM_001925.1,243-261).
ctgctcttgcagattagta

SEQ ID NO: 272940 - DNA, 19 bp, Homo sapiens
  siRNA target sequence for DEFA4 (NM_001925.1,307-325).
ggtgtgagtttcacatact

SEQ ID NO: 272941 - DNA, 19 bp, Homo sapiens
  siRNA target sequence for PLN (NM_002667.2,200-218).
ctcactcgctcagctataa

SEQ ID NO: 272942 - DNA, 19 bp, Homo sapiens
  siRNA target sequence for PLN (NM_002667.2,202-220).
cactcgctcagctataaga

SEQ ID NO: 272943 - DNA, 19 bp, Homo sapiens
  siRNA target sequence for PLN (NM_002667.2,252-270).
cacgtcaaaagctacagaa

SEQ ID NO: 272944 - DNA, 19 bp, Homo sapiens
  siRNA target sequence for PLN (NM_002667.2,288-306).
gtctcatcttaatatgtct

SEQ ID NO: 272945 - DNA, 19 bp, Homo sapiens
  siRNA target sequence for PLN (NM_002667.2,303-321).
gtctcttgctgatctgtat

SEQ ID NO: 272946 - DNA, 19 bp, Homo sapiens
  siRNA target sequence for CLNS1A (NM_001293.1,254-272).
ctggaataccccaccatta

SEQ ID NO: 272947 - DNA, 19 bp, Homo sapiens
  siRNA target sequence for CLNS1A (NM_001293.1,256-274).
ggaataccccaccattagt

SEQ ID NO: 272948 - DNA, 19 bp, Homo sapiens
  siRNA target sequence for CLNS1A (NM_001293.1,257-275).
gaataccccaccattagtt

SEQ ID NO: 272949 - DNA, 19 bp, Homo sapiens
  siRNA target sequence for CLNS1A (NM_001293.1,306-324).
gtctaggagagcatttgta

SEQ ID NO: 272950 - DNA, 19 bp, Homo sapiens
  siRNA target sequence for CLNS1A (NM_001293.1,571-589).
gggggacatccctacattt

SEQ ID NO: 272951 - DNA, 19 bp, Homo sapiens
  siRNA target sequence for CLNS1A (NM_001293.1,572-590).
ggggacatccctacatttt

SEQ ID NO: 272952 - DNA, 19 bp, Homo sapiens
  siRNA target sequence for CLNS1A (NM_001293.1,706-724).
gacagaagattcaataaga

SEQ ID NO: 272953 - DNA, 19 bp, Homo sapiens
  siRNA target sequence for CLNS1A (NM_001293.1,748-766).
ggataccacaccaacagtt

SEQ ID NO: 272954 - DNA, 19 bp, Homo sapiens
  siRNA target sequence for NNAT (NM_005386.2,150-168).
cggctgaactgctcatcat

SEQ ID NO: 272955 - DNA, 19 bp, Homo sapiens
  siRNA target sequence for NNAT (NM_005386.2,206-224).
ctggaatgctgcatttact

SEQ ID NO: 272956 - DNA, 19 bp, Homo sapiens
  siRNA target sequence for NNAT (NM_005386.2,216-234).
gcatttactgggtaggatt

SEQ ID NO: 272957 - DNA, 19 bp, Homo sapiens
  siRNA target sequence for NNAT (NM_005386.2,226-244).
ggtaggattcgcttttcga

SEQ ID NO: 272958 - DNA, 19 bp, Homo sapiens
  siRNA target sequence for NNAT (NM_005386.2,227-245).
gtaggattcgcttttcgaa

SEQ ID NO: 272959 - DNA, 19 bp, Homo sapiens
  siRNA target sequence for CYGB (NM_134268.3,290-308).
catcctggtgaggttcttt

SEQ ID NO: 272960 - DNA, 19 bp, Homo sapiens
  siRNA target sequence for CYGB (NM_134268.3,294-312).
ctggtgaggttctttgtga

SEQ ID NO: 272961 - DNA, 19 bp, Homo sapiens
  siRNA target sequence for CYGB (NM_134268.3,513-531).
gtggaaccggtgtacttca

SEQ ID NO: 272962 - DNA, 19 bp, Homo sapiens
  siRNA target sequence for CYGB (NM_134268.3,516-534).
gaaccggtgtacttcaaga

SEQ ID NO: 272963 - DNA, 19 bp, Homo sapiens
  siRNA target sequence for CYGB (NM_134268.3,557-575).
ggtggtcgccgaggaattt

SEQ ID NO: 272964 - DNA, 19 bp, Homo sapiens
  siRNA target sequence for HBB (NM_000518.4,388-406).
gtgtgctggcccatcactt

SEQ ID NO: 272965 - DNA, 19 bp, Homo sapiens
  siRNA target sequence for HBB (NM_000518.4,398-416).
ccatcactttggcaaagaa

SEQ ID NO: 272966 - DNA, 19 bp, Homo sapiens
  siRNA target sequence for HBB (NM_000518.4,399-417).
catcactttggcaaagaat

SEQ ID NO: 272967 - DNA, 19 bp, Homo sapiens
  siRNA target sequence for HBD (NM_000519.2,474-492).
ctggctcacaagtaccatt

SEQ ID NO: 272968 - DNA, 19 bp, Homo sapiens
  siRNA target sequence for HBE1 (NM_005330.3,465-483).
cctttggagatgctattaa

SEQ ID NO: 272969 - DNA, 19 bp, Homo sapiens
  siRNA target sequence for HBE1 (NM_005330.3,575-593).
ggtaacgtgatggtgatta

SEQ ID NO: 272970 - DNA, 19 bp, Homo sapiens
  siRNA target sequence for HBE1 (NM_005330.3,576-594).
gtaacgtgatggtgattat

SEQ ID NO: 272971 - DNA, 19 bp, Homo sapiens
  siRNA target sequence for HBQ1 (NM_005331.3,266-284).
gccacgaagacctacttct

SEQ ID NO: 272972 - DNA, 19 bp, Homo sapiens
  siRNA target sequence for HBZ (NM_005332.2,70-88).
gactgagaggaccatcatt

SEQ ID NO: 272973 - DNA, 19 bp, Homo sapiens
  siRNA target sequence for NGB (NM_021257.2,576-594).
ggtgatgctcgtgattgat

SEQ ID NO: 272974 - DNA, 19 bp, Homo sapiens
  siRNA target sequence for NGB (NM_021257.2,704-722).
gtgagtctctgctctacat

SEQ ID NO: 272975 - DNA, 19 bp, Homo sapiens
  siRNA target sequence for SORT1 (NM_002959.3,359-377).
cgcaccagcatgtgtttga

SEQ ID NO: 272976 - DNA, 19 bp, Homo sapiens
  siRNA target sequence for SORT1 (NM_002959.3,419-437).
gcactggggtcattctagt

SEQ ID NO: 272977 - DNA, 19 bp, Homo sapiens
  siRNA target sequence for SORT1 (NM_002959.3,450-468).
ccatgtaccactggtaatt

SEQ ID NO: 272978 - DNA, 19 bp, Homo sapiens
  siRNA target sequence for SORT1 (NM_002959.3,454-472).
gtaccactggtaattatga

SEQ ID NO: 272979 - DNA, 19 bp, Homo sapiens
  siRNA target sequence for SORT1 (NM_002959.3,538-556).
ctcatcaataacaccttta

SEQ ID NO: 272980 - DNA, 19 bp, Homo sapiens
  siRNA target sequence for SORT1 (NM_002959.3,540-558).
catcaataacacctttatt

SEQ ID NO: 272981 - DNA, 19 bp, Homo sapiens
  siRNA target sequence for SORT1 (NM_002959.3,551-569).
cctttattcggactgaatt

SEQ ID NO: 272982 - DNA, 19 bp, Homo sapiens
  siRNA target sequence for SORT1 (NM_002959.3,552-570).
ctttattcggactgaattt

SEQ ID NO: 272983 - DNA, 19 bp, Homo sapiens
  siRNA target sequence for SORT1 (NM_002959.3,632-650).
gaagtcgtggaggaagaat

SEQ ID NO: 272984 - DNA, 19 bp, Homo sapiens
  siRNA target sequence for SORT1 (NM_002959.3,635-653).
gtcgtggaggaagaatctt

SEQ ID NO: 272985 - DNA, 19 bp, Homo sapiens
  siRNA target sequence for SORT1 (NM_002959.3,706-724).
cctctcactcagatgatgt

SEQ ID NO: 272986 - DNA, 19 bp, Homo sapiens
  siRNA target sequence for SORT1 (NM_002959.3,707-725).
ctctcactcagatgatgta

SEQ ID NO: 272987 - DNA, 19 bp, Homo sapiens
  siRNA target sequence for SORT1 (NM_002959.3,723-741).
gtatagccctcagaattct

SEQ ID NO: 272988 - DNA, 19 bp, Homo sapiens
  siRNA target sequence for SORT1 (NM_002959.3,731-749).
ctcagaattctgattatct

SEQ ID NO: 272989 - DNA, 19 bp, Homo sapiens
  siRNA target sequence for SORT1 (NM_002959.3,775-793).
ctgtgggtgtccaagaatt

SEQ ID NO: 272990 - DNA, 19 bp, Homo sapiens
  siRNA target sequence for SORT1 (NM_002959.3,858-876).
catcttctttacaacctat

SEQ ID NO: 272991 - DNA, 19 bp, Homo sapiens
  siRNA target sequence for SORT1 (NM_002959.3,900-918).
ccttggggctctggaatta

SEQ ID NO: 272992 - DNA, 19 bp, Homo sapiens
  siRNA target sequence for SORT1 (NM_002959.3,901-919).
cttggggctctggaattat

SEQ ID NO: 272993 - DNA, 19 bp, Homo sapiens
  siRNA target sequence for SORT1 (NM_002959.3,958-976).
ggtgtgaaaatctactcat

SEQ ID NO: 272994 - DNA, 19 bp, Homo sapiens
  siRNA target sequence for SORT1 (NM_002959.3,1004-1022).
cctctgtgatggctgataa

SEQ ID NO: 272995 - DNA, 19 bp, Homo sapiens
  siRNA target sequence for SORT1 (NM_002959.3,1091-1109).
ccgtgggacaggaacagtt

SEQ ID NO: 272996 - DNA, 19 bp, Homo sapiens
  siRNA target sequence for SORT1 (NM_002959.3,1101-1119).
ggaacagttctattctatt

SEQ ID NO: 272997 - DNA, 19 bp, Homo sapiens
  siRNA target sequence for SORT1 (NM_002959.3,1115-1133).
ctattctggcagcaaatga

SEQ ID NO: 272998 - DNA, 19 bp, Homo sapiens
  siRNA target sequence for SORT1 (NM_002959.3,1126-1144).
gcaaatgatgacatggtat

SEQ ID NO: 272999 - DNA, 19 bp, Homo sapiens
  siRNA target sequence for SORT1 (NM_002959.3,1172-1190).
ctgggtttggcacaatctt

SEQ ID NO: 273000 - DNA, 19 bp, Homo sapiens
  siRNA target sequence for SORT1 (NM_002959.3,1174-1192).
gggtttggcacaatcttta

SEQ ID NO: 273001 - DNA, 19 bp, Homo sapiens
  siRNA target sequence for SORT1 (NM_002959.3,1198-1216).
gatgatcgaggcattgtct

SEQ ID NO: 273002 - DNA, 19 bp, Homo sapiens
  siRNA target sequence for SORT1 (NM_002959.3,1201-1219).
gatcgaggcattgtctatt

SEQ ID NO: 273003 - DNA, 19 bp, Homo sapiens
  siRNA target sequence for SORT1 (NM_002959.3,1205-1223).
gaggcattgtctattccaa

SEQ ID NO: 273004 - DNA, 19 bp, Homo sapiens
  siRNA target sequence for SORT1 (NM_002959.3,1226-1244).
ctttggaccgacatctcta

SEQ ID NO: 273005 - DNA, 19 bp, Homo sapiens
  siRNA target sequence for SORT1 (NM_002959.3,1231-1249).
gaccgacatctctacacta

SEQ ID NO: 273006 - DNA, 19 bp, Homo sapiens
  siRNA target sequence for SORT1 (NM_002959.3,1259-1277).
gagagacggactttaccaa

SEQ ID NO: 273007 - DNA, 19 bp, Homo sapiens
  siRNA target sequence for SORT1 (NM_002959.3,1310-1328).
gcgtgctctccgaagataa

SEQ ID NO: 273008 - DNA, 19 bp, Homo sapiens
  siRNA target sequence for SORT1 (NM_002959.3,1311-1329).
cgtgctctccgaagataat

SEQ ID NO: 273009 - DNA, 19 bp, Homo sapiens
  siRNA target sequence for SORT1 (NM_002959.3,1312-1330).
gtgctctccgaagataatt

SEQ ID NO: 273010 - DNA, 19 bp, Homo sapiens
  siRNA target sequence for SORT1 (NM_002959.3,1314-1332).
gctctccgaagataattct

SEQ ID NO: 273011 - DNA, 19 bp, Homo sapiens
  siRNA target sequence for SORT1 (NM_002959.3,1315-1333).
ctctccgaagataattcta

SEQ ID NO: 273012 - DNA, 19 bp, Homo sapiens
  siRNA target sequence for SORT1 (NM_002959.3,1615-1633).
ctggaaggaccccactatt

SEQ ID NO: 273013 - DNA, 19 bp, Homo sapiens
  siRNA target sequence for SORT1 (NM_002959.3,1677-1695).
cagcagccgtcctatcaat

SEQ ID NO: 273014 - DNA, 19 bp, Homo sapiens
  siRNA target sequence for SORT1 (NM_002959.3,1679-1697).
gcagccgtcctatcaatgt

SEQ ID NO: 273015 - DNA, 19 bp, Homo sapiens
  siRNA target sequence for SORT1 (NM_002959.3,1682-1700).
gccgtcctatcaatgtgat

SEQ ID NO: 273016 - DNA, 19 bp, Homo sapiens
  siRNA target sequence for SORT1 (NM_002959.3,1683-1701).
ccgtcctatcaatgtgatt

SEQ ID NO: 273017 - DNA, 19 bp, Homo sapiens
  siRNA target sequence for SORT1 (NM_002959.3,1684-1702).
cgtcctatcaatgtgatta

SEQ ID NO: 273018 - DNA, 19 bp, Homo sapiens
  siRNA target sequence for SORT1 (NM_002959.3,1721-1739).
gtcaatgctggcaaaccta

SEQ ID NO: 273019 - DNA, 19 bp, Homo sapiens
  siRNA target sequence for SORT1 (NM_002959.3,1752-1770).
ggaccccatctatttcact

SEQ ID NO: 273020 - DNA, 19 bp, Homo sapiens
  siRNA target sequence for SORT1 (NM_002959.3,1962-1980).
cattttgggctacaaagaa

SEQ ID NO: 273021 - DNA, 19 bp, Homo sapiens
  siRNA target sequence for SORT1 (NM_002959.3,1987-2005).
ctgcggctacgcaagtcat

SEQ ID NO: 273022 - DNA, 19 bp, Homo sapiens
  siRNA target sequence for SORT1 (NM_002959.3,2016-2034).
gaatggtcgagactatgtt

SEQ ID NO: 273023 - DNA, 19 bp, Homo sapiens
  siRNA target sequence for SORT1 (NM_002959.3,2093-2111).
gctactaccgtccagaaaa

SEQ ID NO: 273024 - DNA, 19 bp, Homo sapiens
  siRNA target sequence for SORT1 (NM_002959.3,2094-2112).
ctactaccgtccagaaaat

SEQ ID NO: 273025 - DNA, 19 bp, Homo sapiens
  siRNA target sequence for SORT1 (NM_002959.3,2146-2164).
ggccacgacctggagtttt

SEQ ID NO: 273026 - DNA, 19 bp, Homo sapiens
  siRNA target sequence for SORT1 (NM_002959.3,2148-2166).
ccacgacctggagttttgt

SEQ ID NO: 273027 - DNA, 19 bp, Homo sapiens
  siRNA target sequence for SORT1 (NM_002959.3,2195-2213).
caaatgggtaccggaaaat

SEQ ID NO: 273028 - DNA, 19 bp, Homo sapiens
  siRNA target sequence for SORT1 (NM_002959.3,2229-2247).
ccagggtggggtaaatcca

SEQ ID NO: 273029 - DNA, 19 bp, Homo sapiens
  siRNA target sequence for SORT1 (NM_002959.3,2252-2270).
gagaagtaaaagacttgaa

SEQ ID NO: 273030 - DNA, 19 bp, Homo sapiens
  siRNA target sequence for SORT1 (NM_002959.3,2295-2313).
gagtccggaaaaacagaat

SEQ ID NO: 273031 - DNA, 19 bp, Homo sapiens
  siRNA target sequence for SORT1 (NM_002959.3,2319-2337).
gtcaaattctgttccaatt

SEQ ID NO: 273032 - DNA, 19 bp, Homo sapiens
  siRNA target sequence for SORT1 (NM_002959.3,2377-2395).
gcaggagtgctcattgtga

SEQ ID NO: 273033 - DNA, 19 bp, Homo sapiens
  siRNA target sequence for SORT1 (NM_002959.3,2378-2396).
caggagtgctcattgtgaa

SEQ ID NO: 273034 - DNA, 19 bp, Homo sapiens
  siRNA target sequence for SORT1 (NM_002959.3,2417-2435).
ggttcctggtgcatcgata

SEQ ID NO: 273035 - DNA, 19 bp, Homo sapiens
  siRNA target sequence for SORT1 (NM_002959.3,2421-2439).
cctggtgcatcgatactct

SEQ ID NO: 273036 - DNA, 19 bp, Homo sapiens
  siRNA target sequence for SORT1 (NM_002959.3,2499-2517).
ctcccacactaataaaagt

SEQ ID NO: 273037 - DNA, 19 bp, Homo sapiens
  siRNA target sequence for SORT1 (NM_002959.3,2536-2554).
gatgaggacctcttggaat

SEQ ID NO: 273038 - DNA, 19 bp, Homo sapiens
  siRNA target sequence for TETRAN (NM_001120.2,355-373).
gtggagaagaggtacaaca

SEQ ID NO: 273039 - DNA, 19 bp, Homo sapiens
  siRNA target sequence for TETRAN (NM_001120.2,495-513).
gggtgtggccacctcatat

SEQ ID NO: 273040 - DNA, 19 bp, Homo sapiens
  siRNA target sequence for TETRAN (NM_001120.2,1409-1427).
cgtggtccgggctcttttt

SEQ ID NO: 273041 - DNA, 19 bp, Homo sapiens
  siRNA target sequence for SLC29A1 (NM_004955.1,194-212).
cagcctcaggacagataca

SEQ ID NO: 273042 - DNA, 19 bp, Homo sapiens
  siRNA target sequence for SLC29A1 (NM_004955.1,253-271).
gctgctcccgtggaatttt

SEQ ID NO: 273043 - DNA, 19 bp, Homo sapiens
  siRNA target sequence for SLC29A1 (NM_004955.1,254-272).
ctgctcccgtggaattttt

SEQ ID NO: 273044 - DNA, 19 bp, Homo sapiens
  siRNA target sequence for SLC29A1 (NM_004955.1,260-278).
ccgtggaattttttcatga

SEQ ID NO: 273045 - DNA, 19 bp, Homo sapiens
  siRNA target sequence for SLC29A1 (NM_004955.1,308-326).
gacatgtcccagaatgtgt

SEQ ID NO: 273046 - DNA, 19 bp, Homo sapiens
  siRNA target sequence for SLC29A1 (NM_004955.1,404-422).
ctcagtgccatcttcaaca

SEQ ID NO: 273047 - DNA, 19 bp, Homo sapiens
  siRNA target sequence for SLC29A1 (NM_004955.1,613-631).
caagatcgtgctcattaat

SEQ ID NO: 273048 - DNA, 19 bp, Homo sapiens
  siRNA target sequence for SLC29A1 (NM_004955.1,616-634).
gatcgtgctcattaattca

SEQ ID NO: 273049 - DNA, 19 bp, Homo sapiens
  siRNA target sequence for SLC29A1 (NM_004955.1,718-736).
gggcctagcaggcttcttt

SEQ ID NO: 273050 - DNA, 19 bp, Homo sapiens
  siRNA target sequence for SLC29A1 (NM_004955.1,789-807).
gtgccttcggctactttat

SEQ ID NO: 273051 - DNA, 19 bp, Homo sapiens
  siRNA target sequence for SLC29A1 (NM_004955.1,791-809).
gccttcggctactttatca

SEQ ID NO: 273052 - DNA, 19 bp, Homo sapiens
  siRNA target sequence for SLC29A1 (NM_004955.1,1146-1164).
cctgggaacgttacttcat

SEQ ID NO: 273053 - DNA, 19 bp, Homo sapiens
  siRNA target sequence for SLC29A1 (NM_004955.1,1147-1165).
ctgggaacgttacttcatt

SEQ ID NO: 273054 - DNA, 19 bp, Homo sapiens
  siRNA target sequence for SLC29A1 (NM_004955.1,1301-1319).
ctgctgctgtgcaacatta

SEQ ID NO: 273055 - DNA, 19 bp, Homo sapiens
  siRNA target sequence for SLC29A2 (NM_001532.2,623-641).
gcctccgtctgcttcatca

SEQ ID NO: 273056 - DNA, 19 bp, Homo sapiens
  siRNA target sequence for SLC29A2 (NM_001532.2,803-821).
gccctggggtactttatca

SEQ ID NO: 273057 - DNA, 19 bp, Homo sapiens
  siRNA target sequence for SLC29A2 (NM_001532.2,864-882).
gcctgcctcacctgaagtt

SEQ ID NO: 273058 - DNA, 19 bp, Homo sapiens
  siRNA target sequence for SLC29A2 (NM_001532.2,889-907).
ctactacctggccaataaa

SEQ ID NO: 273059 - DNA, 19 bp, Homo sapiens
  siRNA target sequence for SLC29A2 (NM_001532.2,1107-1125).
cagcgctgtgccttgtgtt

SEQ ID NO: 273060 - DNA, 19 bp, Homo sapiens
  siRNA target sequence for SLC29A2 (NM_001532.2,1262-1280).
cggagcctgacctcttact

SEQ ID NO: 273061 - DNA, 19 bp, Homo sapiens
  siRNA target sequence for SLC29A2 (NM_001532.2,1432-1450).
gctctttgccgtttctaat

SEQ ID NO: 273062 - DNA, 19 bp, Homo sapiens
  siRNA target sequence for SLC33A1 (NM_004733.2,657-675).
gggaagcatcccactcatt

SEQ ID NO: 273063 - DNA, 19 bp, Homo sapiens
  siRNA target sequence for SLC33A1 (NM_004733.2,658-676).
ggaagcatcccactcattt

SEQ ID NO: 273064 - DNA, 19 bp, Homo sapiens
  siRNA target sequence for SLC33A1 (NM_004733.2,659-677).
gaagcatcccactcatttt

SEQ ID NO: 273065 - DNA, 19 bp, Homo sapiens
  siRNA target sequence for SLC33A1 (NM_004733.2,731-749).
ggcccttcagtctcaaatt

SEQ ID NO: 273066 - DNA, 19 bp, Homo sapiens
  siRNA target sequence for SLC33A1 (NM_004733.2,766-784).
gttgatgcggtctacgtta

SEQ ID NO: 273067 - DNA, 19 bp, Homo sapiens
  siRNA target sequence for SLC33A1 (NM_004733.2,769-787).
gatgcggtctacgttaaga

SEQ ID NO: 273068 - DNA, 19 bp, Homo sapiens
  siRNA target sequence for SLC33A1 (NM_004733.2,772-790).
gcggtctacgttaagaact

SEQ ID NO: 273069 - DNA, 19 bp, Homo sapiens
  siRNA target sequence for SLC33A1 (NM_004733.2,773-791).
cggtctacgttaagaactt

SEQ ID NO: 273070 - DNA, 19 bp, Homo sapiens
  siRNA target sequence for SLC33A1 (NM_004733.2,789-807).
cttcggtcgtcgcaaatct

SEQ ID NO: 273071 - DNA, 19 bp, Homo sapiens
  siRNA target sequence for SLC33A1 (NM_004733.2,810-828).
gcttgtcccgacacagtat

SEQ ID NO: 273072 - DNA, 19 bp, Homo sapiens
  siRNA target sequence for SLC33A1 (NM_004733.2,816-834).
cccgacacagtatatacta

SEQ ID NO: 273073 - DNA, 19 bp, Homo sapiens
  siRNA target sequence for SLC33A1 (NM_004733.2,832-850).
ctaggactcttcatgatct

SEQ ID NO: 273074 - DNA, 19 bp, Homo sapiens
  siRNA target sequence for SLC33A1 (NM_004733.2,835-853).
ggactcttcatgatctatt

SEQ ID NO: 273075 - DNA, 19 bp, Homo sapiens
  siRNA target sequence for SLC33A1 (NM_004733.2,836-854).
gactcttcatgatctattt

SEQ ID NO: 273076 - DNA, 19 bp, Homo sapiens
  siRNA target sequence for SLC33A1 (NM_004733.2,916-934).
ctcactgtggcgttctttt

SEQ ID NO: 273077 - DNA, 19 bp, Homo sapiens
  siRNA target sequence for SLC33A1 (NM_004733.2,972-990).
cgatggttgggcgttaact

SEQ ID NO: 273078 - DNA, 19 bp, Homo sapiens
  siRNA target sequence for SLC33A1 (NM_004733.2,973-991).
gatggttgggcgttaacta

SEQ ID NO: 273079 - DNA, 19 bp, Homo sapiens
  siRNA target sequence for SLC33A1 (NM_004733.2,976-994).
ggttgggcgttaactatgt

SEQ ID NO: 273080 - DNA, 19 bp, Homo sapiens
  siRNA target sequence for SLC33A1 (NM_004733.2,977-995).
gttgggcgttaactatgtt

SEQ ID NO: 273081 - DNA, 19 bp, Homo sapiens
  siRNA target sequence for SLC33A1 (NM_004733.2,982-1000).
gcgttaactatgttatcca

SEQ ID NO: 273082 - DNA, 19 bp, Homo sapiens
  siRNA target sequence for SLC33A1 (NM_004733.2,1093-1111).
gccgacttttgtaacaaat

SEQ ID NO: 273083 - DNA, 19 bp, Homo sapiens
  siRNA target sequence for SLC33A1 (NM_004733.2,1129-1147).
caacccagaggaatcgtta

SEQ ID NO: 273084 - DNA, 19 bp, Homo sapiens
  siRNA target sequence for SLC33A1 (NM_004733.2,1133-1151).
ccagaggaatcgttactct

SEQ ID NO: 273085 - DNA, 19 bp, Homo sapiens
  siRNA target sequence for SLC33A1 (NM_004733.2,1139-1157).
gaatcgttactctttcaga

SEQ ID NO: 273086 - DNA, 19 bp, Homo sapiens
  siRNA target sequence for SLC33A1 (NM_004733.2,1199-1217).
cattggttgcccttctgaa

SEQ ID NO: 273087 - DNA, 19 bp, Homo sapiens
  siRNA target sequence for SLC33A1 (NM_004733.2,1255-1273).
caagggatcacagatactt

SEQ ID NO: 273088 - DNA, 19 bp, Homo sapiens
  siRNA target sequence for SLC33A1 (NM_004733.2,1275-1293).
caagctgctttttgcaatt

SEQ ID NO: 273089 - DNA, 19 bp, Homo sapiens
  siRNA target sequence for SLC33A1 (NM_004733.2,1278-1296).
gctgctttttgcaattata

SEQ ID NO: 273090 - DNA, 19 bp, Homo sapiens
  siRNA target sequence for SLC33A1 (NM_004733.2,1376-1394).
gactgaaattggtagaaga

SEQ ID NO: 273091 - DNA, 19 bp, Homo sapiens
  siRNA target sequence for SLC33A1 (NM_004733.2,1396-1414).
ggagtacccaaagaacatt

SEQ ID NO: 273092 - DNA, 19 bp, Homo sapiens
  siRNA target sequence for SLC33A1 (NM_004733.2,1418-1436).
ccttattggcagttccaat

SEQ ID NO: 273093 - DNA, 19 bp, Homo sapiens
  siRNA target sequence for SLC33A1 (NM_004733.2,1483-1501).
gcaggtccccagccattaa

SEQ ID NO: 273094 - DNA, 19 bp, Homo sapiens
  siRNA target sequence for SLC33A1 (NM_004733.2,1486-1504).
ggtccccagccattaaaca

SEQ ID NO: 273095 - DNA, 19 bp, Homo sapiens
  siRNA target sequence for SLC33A1 (NM_004733.2,1490-1508).
cccagccattaaacacatt

SEQ ID NO: 273096 - DNA, 19 bp, Homo sapiens
  siRNA target sequence for SLC33A1 (NM_004733.2,1517-1535).
ccatgccctacagattatt

SEQ ID NO: 273097 - DNA, 19 bp, Homo sapiens
  siRNA target sequence for SLC33A1 (NM_004733.2,1521-1539).
gccctacagattattgctt

SEQ ID NO: 273098 - DNA, 19 bp, Homo sapiens
  siRNA target sequence for SLC33A1 (NM_004733.2,1565-1583).
ggtggactcctaaagtaga

SEQ ID NO: 273099 - DNA, 19 bp, Homo sapiens
  siRNA target sequence for SLC33A1 (NM_004733.2,1566-1584).
gtggactcctaaagtagaa

SEQ ID NO: 273100 - DNA, 19 bp, Homo sapiens
  siRNA target sequence for SLC33A1 (NM_004733.2,1568-1586).
ggactcctaaagtagaaca

SEQ ID NO: 273101 - DNA, 19 bp, Homo sapiens
  siRNA target sequence for SLC33A1 (NM_004733.2,1588-1606).
caagggggattccctatat

SEQ ID NO: 273102 - DNA, 19 bp, Homo sapiens
  siRNA target sequence for SLC33A1 (NM_004733.2,1591-1609).
gggggattccctatatatt

SEQ ID NO: 273103 - DNA, 19 bp, Homo sapiens
  siRNA target sequence for SLC33A1 (NM_004733.2,1592-1610).
ggggattccctatatatta

SEQ ID NO: 273104 - DNA, 19 bp, Homo sapiens
  siRNA target sequence for SLC33A1 (NM_004733.2,1594-1612).
ggattccctatatattact

SEQ ID NO: 273105 - DNA, 19 bp, Homo sapiens
  siRNA target sequence for SLC33A1 (NM_004733.2,1595-1613).
gattccctatatattacta

SEQ ID NO: 273106 - DNA, 19 bp, Homo sapiens
  siRNA target sequence for SLC33A1 (NM_004733.2,1617-1635).
cgtagtcctgctgagttat

SEQ ID NO: 273107 - DNA, 19 bp, Homo sapiens
  siRNA target sequence for SLC33A1 (NM_004733.2,1626-1644).
gctgagttatgctttacat

SEQ ID NO: 273108 - DNA, 19 bp, Homo sapiens
  siRNA target sequence for SLC33A1 (NM_004733.2,1637-1655).
ctttacatcaggttacagt

SEQ ID NO: 273109 - DNA, 19 bp, Homo sapiens
  siRNA target sequence for SLC33A1 (NM_004733.2,1680-1698).
ggctttcaatgcaaaggtt

SEQ ID NO: 273110 - DNA, 19 bp, Homo sapiens
  siRNA target sequence for SLC33A1 (NM_004733.2,1695-1713).
ggttagtgatccacttatt

SEQ ID NO: 273111 - DNA, 19 bp, Homo sapiens
  siRNA target sequence for SLC33A1 (NM_004733.2,1721-1739).
catacatgacccttttaaa

SEQ ID NO: 273112 - DNA, 19 bp, Homo sapiens
  siRNA target sequence for SLC33A1 (NM_004733.2,1822-1840).
ggagcatcaaaccagaatt

SEQ ID NO: 273113 - DNA, 19 bp, Homo sapiens
  siRNA target sequence for AP2B1 (NM_001282.1,676-694).
gatctcatagcagattcaa

SEQ ID NO: 273114 - DNA, 19 bp, Homo sapiens
  siRNA target sequence for AP2B1 (NM_001282.1,681-699).
catagcagattcaaatcca

SEQ ID NO: 273115 - DNA, 19 bp, Homo sapiens
  siRNA target sequence for AP2B1 (NM_001282.1,716-734).
ccgtagcggcattatctga

SEQ ID NO: 273116 - DNA, 19 bp, Homo sapiens
  siRNA target sequence for AP2B1 (NM_001282.1,717-735).
cgtagcggcattatctgaa

SEQ ID NO: 273117 - DNA, 19 bp, Homo sapiens
  siRNA target sequence for AP2B1 (NM_001282.1,718-736).
gtagcggcattatctgaaa

SEQ ID NO: 273118 - DNA, 19 bp, Homo sapiens
  siRNA target sequence for AP2B1 (NM_001282.1,721-739).
gcggcattatctgaaatca

SEQ ID NO: 273119 - DNA, 19 bp, Homo sapiens
  siRNA target sequence for AP2B1 (NM_001282.1,723-741).
ggcattatctgaaatcagt

SEQ ID NO: 273120 - DNA, 19 bp, Homo sapiens
  siRNA target sequence for AP2B1 (NM_001282.1,750-768).
cccaaacagcaacttactt

SEQ ID NO: 273121 - DNA, 19 bp, Homo sapiens
  siRNA target sequence for AP2B1 (NM_001282.1,1588-1606).
gagggttttcacgatgaaa

SEQ ID NO: 273122 - DNA, 19 bp, Homo sapiens
  siRNA target sequence for AP2B1 (NM_001282.1,1648-1666).
ctgtttctcaagaaaccat

SEQ ID NO: 273123 - DNA, 19 bp, Homo sapiens
  siRNA target sequence for AP2B1 (NM_001282.1,1684-1702).
gtccagcaggtcttgagtt

SEQ ID NO: 273124 - DNA, 19 bp, Homo sapiens
  siRNA target sequence for AP2B1 (NM_001282.1,1767-1785).
ctcaactgaccctgttaca

SEQ ID NO: 273125 - DNA, 19 bp, Homo sapiens
  siRNA target sequence for AP2B1 (NM_001282.1,1778-1796).
ctgttacagctaaagaagt

SEQ ID NO: 273126 - DNA, 19 bp, Homo sapiens
  siRNA target sequence for AP2B1 (NM_001282.1,1852-1870).
ctgctggatgagctaatct

SEQ ID NO: 273127 - DNA, 19 bp, Homo sapiens
  siRNA target sequence for AP2B1 (NM_001282.1,2043-2061).
ctctcaaggtgatcttcta

SEQ ID NO: 273128 - DNA, 19 bp, Homo sapiens
  siRNA target sequence for AP2B1 (NM_001282.1,2346-2364).
ggagatttccggaacattt

SEQ ID NO: 273129 - DNA, 19 bp, Homo sapiens
  siRNA target sequence for AP2B1 (NM_001282.1,2370-2388).
ccgccaagggcacatctat

SEQ ID NO: 273130 - DNA, 19 bp, Homo sapiens
  siRNA target sequence for AP2B1 (NM_001282.1,2371-2389).
cgccaagggcacatctata

SEQ ID NO: 273131 - DNA, 19 bp, Homo sapiens
  siRNA target sequence for AP2B1 (NM_001282.1,2397-2415).
gaacttcaccaataaagct

SEQ ID NO: 273132 - DNA, 19 bp, Homo sapiens
  siRNA target sequence for AP2B1 (NM_001282.1,2421-2439).
gcacatgacagattttgca

SEQ ID NO: 273133 - DNA, 19 bp, Homo sapiens
  siRNA target sequence for AP2B1 (NM_001282.1,2437-2455).
gcaatccagtttaacaaaa

SEQ ID NO: 273134 - DNA, 19 bp, Homo sapiens
  siRNA target sequence for AP2B1 (NM_001282.1,2438-2456).
caatccagtttaacaaaaa

SEQ ID NO: 273135 - DNA, 19 bp, Homo sapiens
  siRNA target sequence for AP2M1 (NM_004068.2,142-160).
ggaggcttattcatctata

SEQ ID NO: 273136 - DNA, 19 bp, Homo sapiens
  siRNA target sequence for AP2M1 (NM_004068.2,146-164).
gcttattcatctataatca

SEQ ID NO: 273137 - DNA, 19 bp, Homo sapiens
  siRNA target sequence for AP2M1 (NM_004068.2,188-206).
gagtctaccgagatgacat

SEQ ID NO: 273138 - DNA, 19 bp, Homo sapiens
  siRNA target sequence for AP2M1 (NM_004068.2,226-244).
gcctttcgggtcaatgtta

SEQ ID NO: 273139 - DNA, 19 bp, Homo sapiens
  siRNA target sequence for AP2M1 (NM_004068.2,267-285).
cagccccgtcaccaacatt

SEQ ID NO: 273140 - DNA, 19 bp, Homo sapiens
  siRNA target sequence for AP2M1 (NM_004068.2,293-311).
ccagcttcttccacgttaa

SEQ ID NO: 273141 - DNA, 19 bp, Homo sapiens
  siRNA target sequence for AP2M1 (NM_004068.2,306-324).
cgttaagcggtccaacatt

SEQ ID NO: 273142 - DNA, 19 bp, Homo sapiens
  siRNA target sequence for AP2M1 (NM_004068.2,307-325).
gttaagcggtccaacattt

SEQ ID NO: 273143 - DNA, 19 bp, Homo sapiens
  siRNA target sequence for AP2M1 (NM_004068.2,358-376).
gctgccatggtcttcgaat

SEQ ID NO: 273144 - DNA, 19 bp, Homo sapiens
  siRNA target sequence for AP2M1 (NM_004068.2,359-377).
ctgccatggtcttcgaatt

SEQ ID NO: 273145 - DNA, 19 bp, Homo sapiens
  siRNA target sequence for AP2M1 (NM_004068.2,367-385).
gtcttcgaattcctctata

SEQ ID NO: 273146 - DNA, 19 bp, Homo sapiens
  siRNA target sequence for AP2M1 (NM_004068.2,373-391).
gaattcctctataagatgt

SEQ ID NO: 273147 - DNA, 19 bp, Homo sapiens
  siRNA target sequence for AP2M1 (NM_004068.2,396-414).
cgtgatggctgcctacttt

SEQ ID NO: 273148 - DNA, 19 bp, Homo sapiens
  siRNA target sequence for AP2M1 (NM_004068.2,620-638).
ggcgagagggtatcaagta

SEQ ID NO: 273149 - DNA, 19 bp, Homo sapiens
  siRNA target sequence for AP2M1 (NM_004068.2,621-639).
gcgagagggtatcaagtat

SEQ ID NO: 273150 - DNA, 19 bp, Homo sapiens
  siRNA target sequence for AP2M1 (NM_004068.2,759-777).
catgcctgaatgcaagttt

SEQ ID NO: 273151 - DNA, 19 bp, Homo sapiens
  siRNA target sequence for AP2M1 (NM_004068.2,770-788).
gcaagtttgggatgaatga

SEQ ID NO: 273152 - DNA, 19 bp, Homo sapiens
  siRNA target sequence for AP2M1 (NM_004068.2,817-835).
ggcacagctgatgaaacaa

SEQ ID NO: 273153 - DNA, 19 bp, Homo sapiens
  siRNA target sequence for AP2M1 (NM_004068.2,840-858).
gagcgggaagcaatcaatt

SEQ ID NO: 273154 - DNA, 19 bp, Homo sapiens
  siRNA target sequence for AP2M1 (NM_004068.2,892-910).
cgactcagcaagtttgact

SEQ ID NO: 273155 - DNA, 19 bp, Homo sapiens
  siRNA target sequence for AP2M1 (NM_004068.2,913-931).
gaacgcagcatcagcttta

SEQ ID NO: 273156 - DNA, 19 bp, Homo sapiens
  siRNA target sequence for AP2M1 (NM_004068.2,935-953).
cgccagatggagagtttga

SEQ ID NO: 273157 - DNA, 19 bp, Homo sapiens
  siRNA target sequence for AP2M1 (NM_004068.2,943-961).
ggagagtttgagcttatga

SEQ ID NO: 273158 - DNA, 19 bp, Homo sapiens
  siRNA target sequence for AP2M1 (NM_004068.2,1051-1069).
gtcatcaagtccaacttta

SEQ ID NO: 273159 - DNA, 19 bp, Homo sapiens
  siRNA target sequence for AP2M1 (NM_004068.2,1227-1245).
gcagatcagcgcagagatt

SEQ ID NO: 273160 - DNA, 19 bp, Homo sapiens
  siRNA target sequence for AP2S1 (NM_004069.2,126-144).
ggtacatgcagtttgatga

SEQ ID NO: 273161 - DNA, 19 bp, Homo sapiens
  siRNA target sequence for AP2S1 (NM_004069.2,127-145).
gtacatgcagtttgatgat

SEQ ID NO: 273162 - DNA, 19 bp, Homo sapiens
  siRNA target sequence for AP2S1 (NM_004069.2,191-209).
gtccgagacgccaaacaca

SEQ ID NO: 273163 - DNA, 19 bp, Homo sapiens
  siRNA target sequence for AP2S1 (NM_004069.2,199-217).
cgccaaacacaccaacttt

SEQ ID NO: 273164 - DNA, 19 bp, Homo sapiens
  siRNA target sequence for AP2S1 (NM_004069.2,218-236).
gtggagttccggaacttta

SEQ ID NO: 273165 - DNA, 19 bp, Homo sapiens
  siRNA target sequence for AP2S1 (NM_004069.2,221-239).
gagttccggaactttaaga

SEQ ID NO: 273166 - DNA, 19 bp, Homo sapiens
  siRNA target sequence for AP4B1 (NM_006594.1,254-272).
gtgcaatcctcacattcaa

SEQ ID NO: 273167 - DNA, 19 bp, Homo sapiens
  siRNA target sequence for AP4B1 (NM_006594.1,282-300).
ctgcgctaccggaatgtca

SEQ ID NO: 273168 - DNA, 19 bp, Homo sapiens
  siRNA target sequence for AP4B1 (NM_006594.1,297-315).
gtcatccagcgagtgatta

SEQ ID NO: 273169 - DNA, 19 bp, Homo sapiens
  siRNA target sequence for AP4B1 (NM_006594.1,306-324).
cgagtgattaggtacatga

SEQ ID NO: 273170 - DNA, 19 bp, Homo sapiens
  siRNA target sequence for AP4B1 (NM_006594.1,335-353).
ggacatgtctggtgttttt

SEQ ID NO: 273171 - DNA, 19 bp, Homo sapiens
  siRNA target sequence for AP4B1 (NM_006594.1,336-354).
gacatgtctggtgttttta

SEQ ID NO: 273172 - DNA, 19 bp, Homo sapiens
  siRNA target sequence for AP4B1 (NM_006594.1,370-388).
ccagtgccactgtagatat

SEQ ID NO: 273173 - DNA, 19 bp, Homo sapiens
  siRNA target sequence for AP4B1 (NM_006594.1,371-389).
cagtgccactgtagatatt

SEQ ID NO: 273174 - DNA, 19 bp, Homo sapiens
  siRNA target sequence for AP4B1 (NM_006594.1,373-391).
gtgccactgtagatattgt

SEQ ID NO: 273175 - DNA, 19 bp, Homo sapiens
  siRNA target sequence for AP4B1 (NM_006594.1,390-408).
gtccagaagaagttggttt

SEQ ID NO: 273176 - DNA, 19 bp, Homo sapiens
  siRNA target sequence for AP4B1 (NM_006594.1,392-410).
ccagaagaagttggtttat

SEQ ID NO: 273177 - DNA, 19 bp, Homo sapiens
  siRNA target sequence for AP4B1 (NM_006594.1,484-502).
gctcagaccccaatccaat

SEQ ID NO: 273178 - DNA, 19 bp, Homo sapiens
  siRNA target sequence for AP4B1 (NM_006594.1,516-534).
gcgttacggagcatgtgta

SEQ ID NO: 273179 - DNA, 19 bp, Homo sapiens
  siRNA target sequence for AP4B1 (NM_006594.1,546-564).
cctggtgtgcaggagtata

SEQ ID NO: 273180 - DNA, 19 bp, Homo sapiens
  siRNA target sequence for AP4B1 (NM_006594.1,590-608).
gcgggataaggcttcatat

SEQ ID NO: 273181 - DNA, 19 bp, Homo sapiens
  siRNA target sequence for AP4B1 (NM_006594.1,592-610).
gggataaggcttcatatgt

SEQ ID NO: 273182 - DNA, 19 bp, Homo sapiens
  siRNA target sequence for AP4B1 (NM_006594.1,675-693).
ggtgccctggtaaatgaat

SEQ ID NO: 273183 - DNA, 19 bp, Homo sapiens
  siRNA target sequence for AP4B1 (NM_006594.1,707-725).
gcgtgaccaggatccaatt

SEQ ID NO: 273184 - DNA, 19 bp, Homo sapiens
  siRNA target sequence for AP4B1 (NM_006594.1,709-727).
gtgaccaggatccaattgt

SEQ ID NO: 273185 - DNA, 19 bp, Homo sapiens
  siRNA target sequence for AP4B1 (NM_006594.1,804-822).
caccatctcttaaatcgaa

SEQ ID NO: 273186 - DNA, 19 bp, Homo sapiens
  siRNA target sequence for AP4B1 (NM_006594.1,810-828).
ctcttaaatcgaatgtcaa

SEQ ID NO: 273187 - DNA, 19 bp, Homo sapiens
  siRNA target sequence for AP4B1 (NM_006594.1,812-830).
cttaaatcgaatgtcaaaa

SEQ ID NO: 273188 - DNA, 19 bp, Homo sapiens
  siRNA target sequence for AP4B1 (NM_006594.1,841-859).
ggggccaggctgaagtatt

SEQ ID NO: 273189 - DNA, 19 bp, Homo sapiens
  siRNA target sequence for AP4B1 (NM_006594.1,843-861).
ggccaggctgaagtattga

SEQ ID NO: 273190 - DNA, 19 bp, Homo sapiens
  siRNA target sequence for AP4B1 (NM_006594.1,846-864).
caggctgaagtattgaact

SEQ ID NO: 273191 - DNA, 19 bp, Homo sapiens
  siRNA target sequence for AP4B1 (NM_006594.1,887-905).
cagtgaggaagaactattt

SEQ ID NO: 273192 - DNA, 19 bp, Homo sapiens
  siRNA target sequence for AP4B1 (NM_006594.1,893-911).
ggaagaactatttgacatt

SEQ ID NO: 273193 - DNA, 19 bp, Homo sapiens
  siRNA target sequence for AP4B1 (NM_006594.1,959-977).
gatgggagctaccaaactt

SEQ ID NO: 273194 - DNA, 19 bp, Homo sapiens
  siRNA target sequence for AP4B1 (NM_006594.1,1031-1049).
ggtcaagggacctttgcta

SEQ ID NO: 273195 - DNA, 19 bp, Homo sapiens
  siRNA target sequence for AP4B1 (NM_006594.1,1067-1085).
gagccgtgagctctgtttt

SEQ ID NO: 273196 - DNA, 19 bp, Homo sapiens
  siRNA target sequence for AP4B1 (NM_006594.1,1070-1088).
ccgtgagctctgttttgtt

SEQ ID NO: 273197 - DNA, 19 bp, Homo sapiens
  siRNA target sequence for AP4B1 (NM_006594.1,1096-1114).
gtcatgtacgccagatctt

SEQ ID NO: 273198 - DNA, 19 bp, Homo sapiens
  siRNA target sequence for AP4B1 (NM_006594.1,1101-1119).
gtacgccagatcttgcata

SEQ ID NO: 273199 - DNA, 19 bp, Homo sapiens
  siRNA target sequence for AP4B1 (NM_006594.1,1104-1122).
cgccagatcttgcatagtt

SEQ ID NO: 273200 - DNA, 19 bp, Homo sapiens
  siRNA target sequence for AP4B1 (NM_006594.1,1105-1123).
gccagatcttgcatagttt

SEQ ID NO: 273201 - DNA, 19 bp, Homo sapiens
  siRNA target sequence for AP4B1 (NM_006594.1,1106-1124).
ccagatcttgcatagttta

SEQ ID NO: 273202 - DNA, 19 bp, Homo sapiens
  siRNA target sequence for AP4B1 (NM_006594.1,1171-1189).
cggagccccactacatcaa

SEQ ID NO: 273203 - DNA, 19 bp, Homo sapiens
  siRNA target sequence for AP4B1 (NM_006594.1,1172-1190).
ggagccccactacatcaaa

SEQ ID NO: 273204 - DNA, 19 bp, Homo sapiens
  siRNA target sequence for AP4B1 (NM_006594.1,1175-1193).
gccccactacatcaaacta

SEQ ID NO: 273205 - DNA, 19 bp, Homo sapiens
  siRNA target sequence for AP4B1 (NM_006594.1,1328-1346).
caggacttacacagatcaa

SEQ ID NO: 273206 - DNA, 19 bp, Homo sapiens
  siRNA target sequence for AP4B1 (NM_006594.1,1339-1357).
cagatcaatgtgttcagat

SEQ ID NO: 273207 - DNA, 19 bp, Homo sapiens
  siRNA target sequence for AP4B1 (NM_006594.1,1436-1454).
gtgtcctcagtgtactgaa

SEQ ID NO: 273208 - DNA, 19 bp, Homo sapiens
  siRNA target sequence for AP4B1 (NM_006594.1,1445-1463).
gtgtactgaagctgtatgt

SEQ ID NO: 273209 - DNA, 19 bp, Homo sapiens
  siRNA target sequence for AP4B1 (NM_006594.1,1447-1465).
gtactgaagctgtatgtca

SEQ ID NO: 273210 - DNA, 19 bp, Homo sapiens
  siRNA target sequence for AP4B1 (NM_006594.1,1544-1562).
ggaaagaattcctaatgct

SEQ ID NO: 273211 - DNA, 19 bp, Homo sapiens
  siRNA target sequence for AP4B1 (NM_006594.1,1554-1572).
cctaatgctccttatgtgt

SEQ ID NO: 273212 - DNA, 19 bp, Homo sapiens
  siRNA target sequence for AP4B1 (NM_006594.1,1555-1573).
ctaatgctccttatgtgtt

SEQ ID NO: 273213 - DNA, 19 bp, Homo sapiens
  siRNA target sequence for AP4B1 (NM_006594.1,1685-1703).
gctaggacgtttgttgtat

SEQ ID NO: 273214 - DNA, 19 bp, Homo sapiens
  siRNA target sequence for AP4B1 (NM_006594.1,1738-1756).
gggaccgaggtctcttcta

SEQ ID NO: 273215 - DNA, 19 bp, Homo sapiens
  siRNA target sequence for AP4B1 (NM_006594.1,1739-1757).
ggaccgaggtctcttctat

SEQ ID NO: 273216 - DNA, 19 bp, Homo sapiens
  siRNA target sequence for AP4B1 (NM_006594.1,1740-1758).
gaccgaggtctcttctatt

SEQ ID NO: 273217 - DNA, 19 bp, Homo sapiens
  siRNA target sequence for AP4B1 (NM_006594.1,1742-1760).
ccgaggtctcttctattat

SEQ ID NO: 273218 - DNA, 19 bp, Homo sapiens
  siRNA target sequence for AP4B1 (NM_006594.1,1766-1784).
cctcttagttggcattgat

SEQ ID NO: 273219 - DNA, 19 bp, Homo sapiens
  siRNA target sequence for AP4B1 (NM_006594.1,1769-1787).
cttagttggcattgatgaa

SEQ ID NO: 273220 - DNA, 19 bp, Homo sapiens
  siRNA target sequence for AP4B1 (NM_006594.1,1773-1791).
gttggcattgatgaagtta

SEQ ID NO: 273221 - DNA, 19 bp, Homo sapiens
  siRNA target sequence for AP4B1 (NM_006594.1,1785-1803).
gaagttaagcggattctgt

SEQ ID NO: 273222 - DNA, 19 bp, Homo sapiens
  siRNA target sequence for AP4B1 (NM_006594.1,1911-1929).
gcccactgggcaactatct

SEQ ID NO: 273223 - DNA, 19 bp, Homo sapiens
  siRNA target sequence for AP4B1 (NM_006594.1,1914-1932).
cactgggcaactatctcta

SEQ ID NO: 273224 - DNA, 19 bp, Homo sapiens
  siRNA target sequence for AP4B1 (NM_006594.1,1916-1934).
ctgggcaactatctctaaa

SEQ ID NO: 273225 - DNA, 19 bp, Homo sapiens
  siRNA target sequence for AP4B1 (NM_006594.1,1988-2006).
cgcatcaggacccttgatt

SEQ ID NO: 273226 - DNA, 19 bp, Homo sapiens
  siRNA target sequence for AP4B1 (NM_006594.1,2075-2093).
ccagcttactgctgattat

SEQ ID NO: 273227 - DNA, 19 bp, Homo sapiens
  siRNA target sequence for AP4B1 (NM_006594.1,2104-2122).
cttggcttagccttaaagt

SEQ ID NO: 273228 - DNA, 19 bp, Homo sapiens
  siRNA target sequence for AP4B1 (NM_006594.1,2182-2200).
ctcttcaagtagtgaacat

SEQ ID NO: 273229 - DNA, 19 bp, Homo sapiens
  siRNA target sequence for AP4B1 (NM_006594.1,2230-2248).
ctcggccatggaaagcata

SEQ ID NO: 273230 - DNA, 19 bp, Homo sapiens
  siRNA target sequence for AP4B1 (NM_006594.1,2353-2371).
cggagacgctgaatagttt

SEQ ID NO: 273231 - DNA, 19 bp, Homo sapiens
  siRNA target sequence for AP4B1 (NM_006594.1,2354-2372).
ggagacgctgaatagtttt

SEQ ID NO: 273232 - DNA, 19 bp, Homo sapiens
  siRNA target sequence for AP4B1 (NM_006594.1,2355-2373).
gagacgctgaatagtttta

SEQ ID NO: 273233 - DNA, 19 bp, Homo sapiens
  siRNA target sequence for AP4M1 (NM_004722.2,194-212).
gggacccgctcatctacaa

SEQ ID NO: 273234 - DNA, 19 bp, Homo sapiens
  siRNA target sequence for AP4M1 (NM_004722.2,195-213).
ggacccgctcatctacaaa

SEQ ID NO: 273235 - DNA, 19 bp, Homo sapiens
  siRNA target sequence for AP4M1 (NM_004722.2,200-218).
cgctcatctacaaagactt

SEQ ID NO: 273236 - DNA, 19 bp, Homo sapiens
  siRNA target sequence for AP4M1 (NM_004722.2,312-330).
ccatggccgtcatttcatt

SEQ ID NO: 273237 - DNA, 19 bp, Homo sapiens
  siRNA target sequence for AP4M1 (NM_004722.2,317-335).
gccgtcatttcattcacat

SEQ ID NO: 273238 - DNA, 19 bp, Homo sapiens
  siRNA target sequence for AP4M1 (NM_004722.2,338-356).
gacacagcggcctctattt

SEQ ID NO: 273239 - DNA, 19 bp, Homo sapiens
  siRNA target sequence for AP4M1 (NM_004722.2,357-375).
ggtggtcacaacttcagaa

SEQ ID NO: 273240 - DNA, 19 bp, Homo sapiens
  siRNA target sequence for AP4M1 (NM_004722.2,363-381).
cacaacttcagaaaacgtt

SEQ ID NO: 273241 - DNA, 19 bp, Homo sapiens
  siRNA target sequence for AP4M1 (NM_004722.2,470-488).
gcaatgtggctctggtata

SEQ ID NO: 273242 - DNA, 19 bp, Homo sapiens
  siRNA target sequence for AP4M1 (NM_004722.2,727-745).
gatgtggtcgagagattgt

SEQ ID NO: 273243 - DNA, 19 bp, Homo sapiens
  siRNA target sequence for AP4M1 (NM_004722.2,746-764).
ctgtactgatagcatctaa

SEQ ID NO: 273244 - DNA, 19 bp, Homo sapiens
  siRNA target sequence for AP4M1 (NM_004722.2,751-769).
ctgatagcatctaatggat

SEQ ID NO: 273245 - DNA, 19 bp, Homo sapiens
  siRNA target sequence for AP4M1 (NM_004722.2,844-862).
ggcttgacggaagagtttt

SEQ ID NO: 273246 - DNA, 19 bp, Homo sapiens
  siRNA target sequence for AP4M1 (NM_004722.2,846-864).
cttgacggaagagttttgt

SEQ ID NO: 273247 - DNA, 19 bp, Homo sapiens
  siRNA target sequence for AP4M1 (NM_004722.2,899-917).
gaatccgggtcgatgaagt

SEQ ID NO: 273248 - DNA, 19 bp, Homo sapiens
  siRNA target sequence for AP4M1 (NM_004722.2,910-928).
gatgaagtctcgtttcaca

SEQ ID NO: 273249 - DNA, 19 bp, Homo sapiens
  siRNA target sequence for AP4M1 (NM_004722.2,932-950).
ctgtgaatctggacgaatt

SEQ ID NO: 273250 - DNA, 19 bp, Homo sapiens
  siRNA target sequence for AP4M1 (NM_004722.2,1087-1105).
cggctccaggtttatctaa

SEQ ID NO: 273251 - DNA, 19 bp, Homo sapiens
  siRNA target sequence for AP4M1 (NM_004722.2,1090-1108).
ctccaggtttatctaaagt

SEQ ID NO: 273252 - DNA, 19 bp, Homo sapiens
  siRNA target sequence for AP4M1 (NM_004722.2,1494-1512).
cagcgacgcctatgtcatt

SEQ ID NO: 273253 - DNA, 19 bp, Homo sapiens
  siRNA target sequence for AP4S1 (NM_007077.2,206-224).
gggcagactcgactttcta

SEQ ID NO: 273254 - DNA, 19 bp, Homo sapiens
  siRNA target sequence for AP4S1 (NM_007077.2,207-225).
ggcagactcgactttctaa

SEQ ID NO: 273255 - DNA, 19 bp, Homo sapiens
  siRNA target sequence for AP4S1 (NM_007077.2,209-227).
cagactcgactttctaagt

SEQ ID NO: 273256 - DNA, 19 bp, Homo sapiens
  siRNA target sequence for AP4S1 (NM_007077.2,213-231).
ctcgactttctaagtacta

SEQ ID NO: 273257 - DNA, 19 bp, Homo sapiens
  siRNA target sequence for AP4S1 (NM_007077.2,222-240).
ctaagtactatgaacatgt

SEQ ID NO: 273258 - DNA, 19 bp, Homo sapiens
  siRNA target sequence for AP4S1 (NM_007077.2,255-273).
gtacacttctggaaacaga

SEQ ID NO: 273259 - DNA, 19 bp, Homo sapiens
  siRNA target sequence for AP4S1 (NM_007077.2,286-304).
ctgtctctctcgatccaat

SEQ ID NO: 273260 - DNA, 19 bp, Homo sapiens
  siRNA target sequence for AP4S1 (NM_007077.2,292-310).
ctctcgatccaatgaacaa

SEQ ID NO: 273261 - DNA, 19 bp, Homo sapiens
  siRNA target sequence for AP4S1 (NM_007077.2,315-333).
ctttcattgaatataagga

SEQ ID NO: 273262 - DNA, 19 bp, Homo sapiens
  siRNA target sequence for AP4S1 (NM_007077.2,331-349).
ggattttaagctgatatat

SEQ ID NO: 273263 - DNA, 19 bp, Homo sapiens
  siRNA target sequence for AP4S1 (NM_007077.2,395-413).
gagaacgagatggctattt

SEQ ID NO: 273264 - DNA, 19 bp, Homo sapiens
  siRNA target sequence for AP4S1 (NM_007077.2,400-418).
cgagatggctatttatgaa

SEQ ID NO: 273265 - DNA, 19 bp, Homo sapiens
  siRNA target sequence for AP4S1 (NM_007077.2,436-454).
ggaagttttagatgagtat

SEQ ID NO: 273266 - DNA, 19 bp, Homo sapiens
  siRNA target sequence for AP4S1 (NM_007077.2,457-475).
cagccgagtgagtgaatta

SEQ ID NO: 273267 - DNA, 19 bp, Homo sapiens
  siRNA target sequence for AP4S1 (NM_007077.2,459-477).
gccgagtgagtgaattaga

SEQ ID NO: 273268 - DNA, 19 bp, Homo sapiens
  siRNA target sequence for AP4S1 (NM_007077.2,460-478).
ccgagtgagtgaattagat

SEQ ID NO: 273269 - DNA, 19 bp, Homo sapiens
  siRNA target sequence for AP4S1 (NM_007077.2,528-546).
gtccttatcaggaaccaat

SEQ ID NO: 273270 - DNA, 19 bp, Homo sapiens
  siRNA target sequence for AP4S1 (NM_007077.2,581-599).
ccccagcagacttgctttt

SEQ ID NO: 273271 - DNA, 19 bp, Homo sapiens
  siRNA target sequence for AP4S1 (NM_007077.2,600-618).
ctccagacagttcatcatt

SEQ ID NO: 273272 - DNA, 19 bp, Homo sapiens
  siRNA target sequence for AQP3 (NM_004925.3,401-419).
cttgggtgctggaatagtt

SEQ ID NO: 273273 - DNA, 19 bp, Homo sapiens
  siRNA target sequence for AQP3 (NM_004925.3,452-470).
cgccgacaaccagcttttt

SEQ ID NO: 273274 - DNA, 19 bp, Homo sapiens
  siRNA target sequence for AQP3 (NM_004925.3,454-472).
ccgacaaccagctttttgt

SEQ ID NO: 273275 - DNA, 19 bp, Homo sapiens
  siRNA target sequence for AQP3 (NM_004925.3,455-473).
cgacaaccagctttttgtt

SEQ ID NO: 273276 - DNA, 19 bp, Homo sapiens
  siRNA target sequence for AQP3 (NM_004925.3,513-531).
ccctctggacacttggata

SEQ ID NO: 273277 - DNA, 19 bp, Homo sapiens
  siRNA target sequence for AQP3 (NM_004925.3,517-535).
ctggacacttggatatgat

SEQ ID NO: 273278 - DNA, 19 bp, Homo sapiens
  siRNA target sequence for AQP3 (NM_004925.3,519-537).
ggacacttggatatgatca

SEQ ID NO: 273279 - DNA, 19 bp, Homo sapiens
  siRNA target sequence for AQP3 (NM_004925.3,520-538).
gacacttggatatgatcaa

SEQ ID NO: 273280 - DNA, 19 bp, Homo sapiens
  siRNA target sequence for AQP3 (NM_004925.3,562-580).
gcacagcctcccttatcgt

SEQ ID NO: 273281 - DNA, 19 bp, Homo sapiens
  siRNA target sequence for AQP3 (NM_004925.3,581-599).
gtgtgtgctggccattgtt

SEQ ID NO: 273282 - DNA, 19 bp, Homo sapiens
  siRNA target sequence for C16orf7 (NM_004913.1,141-159).
gggtgtatctcagagataa

SEQ ID NO: 273283 - DNA, 19 bp, Homo sapiens
  siRNA target sequence for C16orf7 (NM_004913.1,193-211).
ggcacctggccggaataat

SEQ ID NO: 273284 - DNA, 19 bp, Homo sapiens
  siRNA target sequence for C16orf7 (NM_004913.1,424-442).
cgccaagcttgggaaaaca

SEQ ID NO: 273285 - DNA, 19 bp, Homo sapiens
  siRNA target sequence for C16orf7 (NM_004913.1,494-512).
cgacaccgccgtgtatact

SEQ ID NO: 273286 - DNA, 19 bp, Homo sapiens
  siRNA target sequence for C16orf7 (NM_004913.1,525-543).
gaaagctctctccttttct

SEQ ID NO: 273287 - DNA, 19 bp, Homo sapiens
  siRNA target sequence for C20orf121 (NM_024331.2,376-394).
cctccgagcccgcaagttt

SEQ ID NO: 273288 - DNA, 19 bp, Homo sapiens
  siRNA target sequence for C20orf121 (NM_024331.2,380-398).
cgagcccgcaagtttgatt

SEQ ID NO: 273289 - DNA, 19 bp, Homo sapiens
  siRNA target sequence for C20orf121 (NM_024331.2,381-399).
gagcccgcaagtttgatta

SEQ ID NO: 273290 - DNA, 19 bp, Homo sapiens
  siRNA target sequence for C20orf121 (NM_024331.2,447-465).
gctggcccgaagtcttcaa

SEQ ID NO: 273291 - DNA, 19 bp, Homo sapiens
  siRNA target sequence for C20orf121 (NM_024331.2,448-466).
ctggcccgaagtcttcaat

SEQ ID NO: 273292 - DNA, 19 bp, Homo sapiens
  siRNA target sequence for C20orf121 (NM_024331.2,450-468).
ggcccgaagtcttcaataa

SEQ ID NO: 273293 - DNA, 19 bp, Homo sapiens
  siRNA target sequence for C20orf121 (NM_024331.2,452-470).
cccgaagtcttcaataact

SEQ ID NO: 273294 - DNA, 19 bp, Homo sapiens
  siRNA target sequence for C20orf121 (NM_024331.2,453-471).
ccgaagtcttcaataactt

SEQ ID NO: 273295 - DNA, 19 bp, Homo sapiens
  siRNA target sequence for C20orf121 (NM_024331.2,472-490).
gaagccatcagccttaaaa

SEQ ID NO: 273296 - DNA, 19 bp, Homo sapiens
  siRNA target sequence for C20orf121 (NM_024331.2,566-584).
ccagacagatggataccaa

SEQ ID NO: 273297 - DNA, 19 bp, Homo sapiens
  siRNA target sequence for C20orf121 (NM_024331.2,581-599).
ccaagcaactatccaatta

SEQ ID NO: 273298 - DNA, 19 bp, Homo sapiens
  siRNA target sequence for C20orf121 (NM_024331.2,585-603).
gcaactatccaattactga

SEQ ID NO: 273299 - DNA, 19 bp, Homo sapiens
  siRNA target sequence for C20orf121 (NM_024331.2,616-634).
catatacttgaccttagaa

SEQ ID NO: 273300 - DNA, 19 bp, Homo sapiens
  siRNA target sequence for C20orf121 (NM_024331.2,625-643).
gaccttagaaaaactcatt

SEQ ID NO: 273301 - DNA, 19 bp, Homo sapiens
  siRNA target sequence for C20orf121 (NM_024331.2,653-671).
gaaacccaggtgaatggaa

SEQ ID NO: 273302 - DNA, 19 bp, Homo sapiens
  siRNA target sequence for C20orf121 (NM_024331.2,657-675).
cccaggtgaatggaattgt

SEQ ID NO: 273303 - DNA, 19 bp, Homo sapiens
  siRNA target sequence for C20orf121 (NM_024331.2,658-676).
ccaggtgaatggaattgta

SEQ ID NO: 273304 - DNA, 19 bp, Homo sapiens
  siRNA target sequence for C20orf121 (NM_024331.2,729-747).
cttttatagccaaaaaggt

SEQ ID NO: 273305 - DNA, 19 bp, Homo sapiens
  siRNA target sequence for C20orf121 (NM_024331.2,768-786).
gtttccccattcggataaa

SEQ ID NO: 273306 - DNA, 19 bp, Homo sapiens
  siRNA target sequence for C20orf121 (NM_024331.2,772-790).
ccccattcggataaaagca

SEQ ID NO: 273307 - DNA, 19 bp, Homo sapiens
  siRNA target sequence for C20orf121 (NM_024331.2,800-818).
gtgaatgaacctcgaatat

SEQ ID NO: 273308 - DNA, 19 bp, Homo sapiens
  siRNA target sequence for C20orf121 (NM_024331.2,802-820).
gaatgaacctcgaatattt

SEQ ID NO: 273309 - DNA, 19 bp, Homo sapiens
  siRNA target sequence for C20orf121 (NM_024331.2,825-843).
gcatttttgccatcataaa

SEQ ID NO: 273310 - DNA, 19 bp, Homo sapiens
  siRNA target sequence for C20orf26 (NM_015585.2,123-141).
gccgaagaacagaatcaca

SEQ ID NO: 273311 - DNA, 19 bp, Homo sapiens
  siRNA target sequence for C20orf26 (NM_015585.2,134-152).
gaatcacaggatgtttatt

SEQ ID NO: 273312 - DNA, 19 bp, Homo sapiens
  siRNA target sequence for C20orf26 (NM_015585.2,164-182).
cttattagaaaatttacct

SEQ ID NO: 273313 - DNA, 19 bp, Homo sapiens
  siRNA target sequence for C20orf26 (NM_015585.2,196-214).
gaagctaaatatcatctat

SEQ ID NO: 273314 - DNA, 19 bp, Homo sapiens
  siRNA target sequence for C20orf26 (NM_015585.2,366-384).
gcacacccctgaatacgtt

SEQ ID NO: 273315 - DNA, 19 bp, Homo sapiens
  siRNA target sequence for C20orf26 (NM_015585.2,371-389).
cccctgaatacgttgttca

SEQ ID NO: 273316 - DNA, 19 bp, Homo sapiens
  siRNA target sequence for C20orf26 (NM_015585.2,372-390).
ccctgaatacgttgttcat

SEQ ID NO: 273317 - DNA, 19 bp, Homo sapiens
  siRNA target sequence for C20orf26 (NM_015585.2,403-421).
ggccgtggatgagtattct

SEQ ID NO: 273318 - DNA, 19 bp, Homo sapiens
  siRNA target sequence for C20orf26 (NM_015585.2,422-440).
gttggctgttgcaaagaga

SEQ ID NO: 273319 - DNA, 19 bp, Homo sapiens
  siRNA target sequence for C20orf26 (NM_015585.2,468-486).
cagagctgcacttcatatt

SEQ ID NO: 273320 - DNA, 19 bp, Homo sapiens
  siRNA target sequence for C20orf26 (NM_015585.2,473-491).
ctgcacttcatatttctca

SEQ ID NO: 273321 - DNA, 19 bp, Homo sapiens
  siRNA target sequence for C20orf26 (NM_015585.2,522-540).
ctctcataactgtttttga

SEQ ID NO: 273322 - DNA, 19 bp, Homo sapiens
  siRNA target sequence for C20orf26 (NM_015585.2,656-674).
gacgatctcatgccaatat

SEQ ID NO: 273323 - DNA, 19 bp, Homo sapiens
  siRNA target sequence for C20orf26 (NM_015585.2,659-677).
gatctcatgccaatattta

SEQ ID NO: 273324 - DNA, 19 bp, Homo sapiens
  siRNA target sequence for C20orf26 (NM_015585.2,680-698).
cgctatgacacaattctga

SEQ ID NO: 273325 - DNA, 19 bp, Homo sapiens
  siRNA target sequence for C20orf26 (NM_015585.2,681-699).
gctatgacacaattctgaa

SEQ ID NO: 273326 - DNA, 19 bp, Homo sapiens
  siRNA target sequence for C20orf26 (NM_015585.2,913-931).
cctaagtgtccgaagaagt

SEQ ID NO: 273327 - DNA, 19 bp, Homo sapiens
  siRNA target sequence for C20orf26 (NM_015585.2,1047-1065).
ctgcatccgaggaagcttt

SEQ ID NO: 273328 - DNA, 19 bp, Homo sapiens
  siRNA target sequence for C20orf26 (NM_015585.2,1073-1091).
gtccaaagtggaaatgtta

SEQ ID NO: 273329 - DNA, 19 bp, Homo sapiens
  siRNA target sequence for C20orf26 (NM_015585.2,1094-1112).
gaaccggaggacatagaaa

SEQ ID NO: 273330 - DNA, 19 bp, Homo sapiens
  siRNA target sequence for C20orf26 (NM_015585.2,1123-1141).
catctccactggatatgca

SEQ ID NO: 273331 - DNA, 19 bp, Homo sapiens
  siRNA target sequence for C20orf26 (NM_015585.2,1226-1244).
gcctcagctgctttttgta

SEQ ID NO: 273332 - DNA, 19 bp, Homo sapiens
  siRNA target sequence for C20orf26 (NM_015585.2,1282-1300).
gtcgctggattttatgaat

SEQ ID NO: 273333 - DNA, 19 bp, Homo sapiens
  siRNA target sequence for C20orf26 (NM_015585.2,1284-1302).
cgctggattttatgaattt

SEQ ID NO: 273334 - DNA, 19 bp, Homo sapiens
  siRNA target sequence for C20orf26 (NM_015585.2,1322-1340).
gataagaacttctgtgtaa

SEQ ID NO: 273335 - DNA, 19 bp, Homo sapiens
  siRNA target sequence for C20orf26 (NM_015585.2,1451-1469).
ggattgctcaagtccatta

SEQ ID NO: 273336 - DNA, 19 bp, Homo sapiens
  siRNA target sequence for C20orf26 (NM_015585.2,1457-1475).
ctcaagtccattaatataa

SEQ ID NO: 273337 - DNA, 19 bp, Homo sapiens
  siRNA target sequence for C20orf26 (NM_015585.2,1519-1537).
cagcaccctcatgttgaat

SEQ ID NO: 273338 - DNA, 19 bp, Homo sapiens
  siRNA target sequence for C20orf26 (NM_015585.2,1521-1539).
gcaccctcatgttgaataa

SEQ ID NO: 273339 - DNA, 19 bp, Homo sapiens
  siRNA target sequence for C20orf26 (NM_015585.2,1522-1540).
caccctcatgttgaataaa

SEQ ID NO: 273340 - DNA, 19 bp, Homo sapiens
  siRNA target sequence for C20orf26 (NM_015585.2,1553-1571).
gacttagaccgttacaaca

SEQ ID NO: 273341 - DNA, 19 bp, Homo sapiens
  siRNA target sequence for C20orf26 (NM_015585.2,1626-1644).
cagaacaaatagttggtat

SEQ ID NO: 273342 - DNA, 19 bp, Homo sapiens
  siRNA target sequence for C20orf26 (NM_015585.2,1810-1828).
cctgcgtttaggctttaaa

SEQ ID NO: 273343 - DNA, 19 bp, Homo sapiens
  siRNA target sequence for C20orf26 (NM_015585.2,1811-1829).
ctgcgtttaggctttaaat

SEQ ID NO: 273344 - DNA, 19 bp, Homo sapiens
  siRNA target sequence for C20orf26 (NM_015585.2,1814-1832).
cgtttaggctttaaatcct

SEQ ID NO: 273345 - DNA, 19 bp, Homo sapiens
  siRNA target sequence for C20orf26 (NM_015585.2,1833-1851).
gtctctactaccgtgttta

SEQ ID NO: 273346 - DNA, 19 bp, Homo sapiens
  siRNA target sequence for C20orf26 (NM_015585.2,1844-1862).
cgtgtttacccaaaatcca

SEQ ID NO: 273347 - DNA, 19 bp, Homo sapiens
  siRNA target sequence for C20orf26 (NM_015585.2,1898-1916).
ctgacatctgcccttcatt

SEQ ID NO: 273348 - DNA, 19 bp, Homo sapiens
  siRNA target sequence for C20orf26 (NM_015585.2,1930-1948).
gcgaccacgacgacagatt

SEQ ID NO: 273349 - DNA, 19 bp, Homo sapiens
  siRNA target sequence for C20orf26 (NM_015585.2,1932-1950).
gaccacgacgacagattgt

SEQ ID NO: 273350 - DNA, 19 bp, Homo sapiens
  siRNA target sequence for C20orf26 (NM_015585.2,1934-1952).
ccacgacgacagattgtct

SEQ ID NO: 273351 - DNA, 19 bp, Homo sapiens
  siRNA target sequence for C20orf26 (NM_015585.2,1935-1953).
cacgacgacagattgtcta

SEQ ID NO: 273352 - DNA, 19 bp, Homo sapiens
  siRNA target sequence for C20orf26 (NM_015585.2,1971-1989).
gcataaacgctccatcaaa

SEQ ID NO: 273353 - DNA, 19 bp, Homo sapiens
  siRNA target sequence for C20orf26 (NM_015585.2,1998-2016).
ccaaggatccgatgagtta

SEQ ID NO: 273354 - DNA, 19 bp, Homo sapiens
  siRNA target sequence for C20orf26 (NM_015585.2,1999-2017).
caaggatccgatgagttat

SEQ ID NO: 273355 - DNA, 19 bp, Homo sapiens
  siRNA target sequence for C20orf26 (NM_015585.2,2002-2020).
ggatccgatgagttatgct

SEQ ID NO: 273356 - DNA, 19 bp, Homo sapiens
  siRNA target sequence for C20orf26 (NM_015585.2,2003-2021).
gatccgatgagttatgctt

SEQ ID NO: 273357 - DNA, 19 bp, Homo sapiens
  siRNA target sequence for C20orf26 (NM_015585.2,2007-2025).
cgatgagttatgctttaaa

SEQ ID NO: 273358 - DNA, 19 bp, Homo sapiens
  siRNA target sequence for C20orf26 (NM_015585.2,2042-2060).
ctaacattggaacctaaaa

SEQ ID NO: 273359 - DNA, 19 bp, Homo sapiens
  siRNA target sequence for C20orf26 (NM_015585.2,2113-2131).
cttcctagagacattggta

SEQ ID NO: 273360 - DNA, 19 bp, Homo sapiens
  siRNA target sequence for C20orf26 (NM_015585.2,2229-2247).
ccagcgaccactgttttaa

SEQ ID NO: 273361 - DNA, 19 bp, Homo sapiens
  siRNA target sequence for C20orf26 (NM_015585.2,2232-2250).
gcgaccactgttttaatga

SEQ ID NO: 273362 - DNA, 19 bp, Homo sapiens
  siRNA target sequence for C20orf26 (NM_015585.2,2291-2309).
gtcgtggtgggtagaatga

SEQ ID NO: 273363 - DNA, 19 bp, Homo sapiens
  siRNA target sequence for C20orf26 (NM_015585.2,2418-2436).
cagaggctgatattagtca

SEQ ID NO: 273364 - DNA, 19 bp, Homo sapiens
  siRNA target sequence for C20orf26 (NM_015585.2,2476-2494).
gcggtacacggggaaagtt

SEQ ID NO: 273365 - DNA, 19 bp, Homo sapiens
  siRNA target sequence for C20orf26 (NM_015585.2,2593-2611).
ctatgggaatacaattgat

SEQ ID NO: 273366 - DNA, 19 bp, Homo sapiens
  siRNA target sequence for C20orf26 (NM_015585.2,2622-2640).
ccgtggagacgctcttaaa

SEQ ID NO: 273367 - DNA, 19 bp, Homo sapiens
  siRNA target sequence for C20orf26 (NM_015585.2,2626-2644).
ggagacgctcttaaacctt

SEQ ID NO: 273368 - DNA, 19 bp, Homo sapiens
  siRNA target sequence for C20orf26 (NM_015585.2,2864-2882).
cagtgctctatgttcttca

SEQ ID NO: 273369 - DNA, 19 bp, Homo sapiens
  siRNA target sequence for C20orf26 (NM_015585.2,2900-2918).
gtggattatgaaacgttta

SEQ ID NO: 273370 - DNA, 19 bp, Homo sapiens
  siRNA target sequence for C20orf26 (NM_015585.2,2913-2931).
cgtttaaagccctcaatga

SEQ ID NO: 273371 - DNA, 19 bp, Homo sapiens
  siRNA target sequence for C20orf26 (NM_015585.2,2914-2932).
gtttaaagccctcaatgat

SEQ ID NO: 273372 - DNA, 19 bp, Homo sapiens
  siRNA target sequence for C20orf26 (NM_015585.2,2933-2951).
gcatgtcttgtgtatgaca

SEQ ID NO: 273373 - DNA, 19 bp, Homo sapiens
  siRNA target sequence for C20orf26 (NM_015585.2,2950-2968).
cagtcgacttgtgattgat

SEQ ID NO: 273374 - DNA, 19 bp, Homo sapiens
  siRNA target sequence for C20orf26 (NM_015585.2,3027-3045).
ccaatagatactactcaaa

SEQ ID NO: 273375 - DNA, 19 bp, Homo sapiens
  siRNA target sequence for C20orf26 (NM_015585.2,3028-3046).
caatagatactactcaaat

SEQ ID NO: 273376 - DNA, 19 bp, Homo sapiens
  siRNA target sequence for C20orf26 (NM_015585.2,3096-3114).
cagcagctatgctacatct

SEQ ID NO: 273377 - DNA, 19 bp, Homo sapiens
  siRNA target sequence for C20orf26 (NM_015585.2,3099-3117).
cagctatgctacatctctt

SEQ ID NO: 273378 - DNA, 19 bp, Homo sapiens
  siRNA target sequence for C20orf26 (NM_015585.2,3102-3120).
ctatgctacatctctttga

SEQ ID NO: 273379 - DNA, 19 bp, Homo sapiens
  siRNA target sequence for C20orf26 (NM_015585.2,3139-3157).
gaccgagccaccagctaat

SEQ ID NO: 273380 - DNA, 19 bp, Homo sapiens
  siRNA target sequence for C20orf26 (NM_015585.2,3142-3160).
cgagccaccagctaatctt

SEQ ID NO: 273381 - DNA, 19 bp, Homo sapiens
  siRNA target sequence for C20orf26 (NM_015585.2,3193-3211).
gattcaagggggcattctt

SEQ ID NO: 273382 - DNA, 19 bp, Homo sapiens
  siRNA target sequence for C20orf26 (NM_015585.2,3213-3231).
ctgggtcttaccattatct

SEQ ID NO: 273383 - DNA, 19 bp, Homo sapiens
  siRNA target sequence for C20orf26 (NM_015585.2,3277-3295).
ggcacagcctaattatggt

SEQ ID NO: 273384 - DNA, 19 bp, Homo sapiens
  siRNA target sequence for C20orf26 (NM_015585.2,3278-3296).
gcacagcctaattatggtt

SEQ ID NO: 273385 - DNA, 19 bp, Homo sapiens
  siRNA target sequence for C20orf26 (NM_015585.2,3317-3335).
gcgaaaaatgggacttact

SEQ ID NO: 273386 - DNA, 19 bp, Homo sapiens
  siRNA target sequence for C20orf26 (NM_015585.2,3327-3345).
ggacttacttccgaattca

SEQ ID NO: 273387 - DNA, 19 bp, Homo sapiens
  siRNA target sequence for C20orf26 (NM_015585.2,3409-3427).
caactacatccgcttgttt

SEQ ID NO: 273388 - DNA, 19 bp, Homo sapiens
  siRNA target sequence for C20orf26 (NM_015585.2,3478-3496).
cctgatcacagatctctat

SEQ ID NO: 273389 - DNA, 19 bp, Homo sapiens
  siRNA target sequence for C20orf26 (NM_015585.2,3525-3543).
ccctgttccacgatcgttt

SEQ ID NO: 273390 - DNA, 19 bp, Homo sapiens
  siRNA target sequence for C20orf26 (NM_015585.2,3526-3544).
cctgttccacgatcgtttt

SEQ ID NO: 273391 - DNA, 19 bp, Homo sapiens
  siRNA target sequence for C20orf26 (NM_015585.2,3527-3545).
ctgttccacgatcgtttta

SEQ ID NO: 273392 - DNA, 19 bp, Homo sapiens
  siRNA target sequence for C20orf26 (NM_015585.2,3529-3547).
gttccacgatcgttttatt

SEQ ID NO: 273393 - DNA, 19 bp, Homo sapiens
  siRNA target sequence for C20orf26 (NM_015585.2,3532-3550).
ccacgatcgttttattgat

SEQ ID NO: 273394 - DNA, 19 bp, Homo sapiens
  siRNA target sequence for C20orf26 (NM_015585.2,3613-3631).
gcagttagcccatcaaata

SEQ ID NO: 273395 - DNA, 19 bp, Homo sapiens
  siRNA target sequence for C20orf26 (NM_015585.2,3616-3634).
gttagcccatcaaatagaa

SEQ ID NO: 273396 - DNA, 19 bp, Homo sapiens
  siRNA target sequence for C20orf26 (NM_015585.2,3621-3639).
cccatcaaatagaagatga

SEQ ID NO: 273397 - DNA, 19 bp, Homo sapiens
  siRNA target sequence for C20orf26 (NM_015585.2,3664-3682).
caggcaatacctcaaaaga

SEQ ID NO: 273398 - DNA, 19 bp, Homo sapiens
  siRNA target sequence for C20orf26 (NM_015585.2,3666-3684).
ggcaatacctcaaaagagt

SEQ ID NO: 273399 - DNA, 19 bp, Homo sapiens
  siRNA target sequence for C20orf26 (NM_015585.2,3728-3746).
cttgactacctgcactata

SEQ ID NO: 273400 - DNA, 19 bp, Homo sapiens
  siRNA target sequence for C20orf59 (NM_022082.2,346-364).
gacttcggctggaacaaga

SEQ ID NO: 273401 - DNA, 19 bp, Homo sapiens
  siRNA target sequence for C20orf59 (NM_022082.2,798-816).
cctgctgagtgaaaaagat

SEQ ID NO: 273402 - DNA, 19 bp, Homo sapiens
  siRNA target sequence for C20orf59 (NM_022082.2,1042-1060).
gcgattccggccagtctat

SEQ ID NO: 273403 - DNA, 19 bp, Homo sapiens
  siRNA target sequence for C20orf59 (NM_022082.2,1043-1061).
cgattccggccagtctatt

SEQ ID NO: 273404 - DNA, 19 bp, Homo sapiens
  siRNA target sequence for C20orf59 (NM_022082.2,1057-1075).
ctattcagcgggtttctct

SEQ ID NO: 273405 - DNA, 19 bp, Homo sapiens
  siRNA target sequence for C20orf59 (NM_022082.2,1065-1083).
cgggtttctctctgatcat

SEQ ID NO: 273406 - DNA, 19 bp, Homo sapiens
  siRNA target sequence for C20orf59 (NM_022082.2,1074-1092).
ctctgatcatctcatcaat

SEQ ID NO: 273407 - DNA, 19 bp, Homo sapiens
  siRNA target sequence for C20orf59 (NM_022082.2,1086-1104).
catcaatcagggttacaga

SEQ ID NO: 273408 - DNA, 19 bp, Homo sapiens
  siRNA target sequence for C20orf59 (NM_022082.2,1349-1367).
gtctaggcggctacttgat

SEQ ID NO: 273409 - DNA, 19 bp, Homo sapiens
  siRNA target sequence for CLCA3 (NM_004921.1,58-76).
cttctctcgcctgtattga

SEQ ID NO: 273410 - DNA, 19 bp, Homo sapiens
  siRNA target sequence for CLCA3 (NM_004921.1,61-79).
ctctcgcctgtattgaaaa

SEQ ID NO: 273411 - DNA, 19 bp, Homo sapiens
  siRNA target sequence for CLCA3 (NM_004921.1,80-98).
gctcactggtaactttgaa

SEQ ID NO: 273412 - DNA, 19 bp, Homo sapiens
  siRNA target sequence for CLCA3 (NM_004921.1,81-99).
ctcactggtaactttgaat

SEQ ID NO: 273413 - DNA, 19 bp, Homo sapiens
  siRNA target sequence for CLCA3 (NM_004921.1,85-103).
ctggtaactttgaataaca

SEQ ID NO: 273414 - DNA, 19 bp, Homo sapiens
  siRNA target sequence for CLCA3 (NM_004921.1,87-105).
ggtaactttgaataacaat

SEQ ID NO: 273415 - DNA, 19 bp, Homo sapiens
  siRNA target sequence for CLCA3 (NM_004921.1,96-114).
gaataacaatggatatgat

SEQ ID NO: 273416 - DNA, 19 bp, Homo sapiens
  siRNA target sequence for CLCA3 (NM_004921.1,216-234).
caccaaacaaagagcttat

SEQ ID NO: 273417 - DNA, 19 bp, Homo sapiens
  siRNA target sequence for CLCA3 (NM_004921.1,244-262).
gtaagcattttaattccaa

SEQ ID NO: 273418 - DNA, 19 bp, Homo sapiens
  siRNA target sequence for CLCA3 (NM_004921.1,259-277).
ccaatgacctacaaatcaa

SEQ ID NO: 273419 - DNA, 19 bp, Homo sapiens
  siRNA target sequence for CLCA3 (NM_004921.1,260-278).
caatgacctacaaatcaaa

SEQ ID NO: 273420 - DNA, 19 bp, Homo sapiens
  siRNA target sequence for CLCA3 (NM_004921.1,264-282).
gacctacaaatcaaaatct

SEQ ID NO: 273421 - DNA, 19 bp, Homo sapiens
  siRNA target sequence for CLCA3 (NM_004921.1,354-372).
cggagatgatccctataca

SEQ ID NO: 273422 - DNA, 19 bp, Homo sapiens
  siRNA target sequence for CLCA3 (NM_004921.1,361-379).
gatccctatacacttcaat

SEQ ID NO: 273423 - DNA, 19 bp, Homo sapiens
  siRNA target sequence for CLCA3 (NM_004921.1,389-407).
gtggagataaaggacaata

SEQ ID NO: 273424 - DNA, 19 bp, Homo sapiens
  siRNA target sequence for CLCA3 (NM_004921.1,421-439).
ccaaacttcttgttgacta

SEQ ID NO: 273425 - DNA, 19 bp, Homo sapiens
  siRNA target sequence for CLCA3 (NM_004921.1,422-440).
caaacttcttgttgactaa

SEQ ID NO: 273426 - DNA, 19 bp, Homo sapiens
  siRNA target sequence for CLCA3 (NM_004921.1,526-544).
gtggaccagccattctata

SEQ ID NO: 273427 - DNA, 19 bp, Homo sapiens
  siRNA target sequence for CLCA3 (NM_004921.1,529-547).
gaccagccattctatattt

SEQ ID NO: 273428 - DNA, 19 bp, Homo sapiens
  siRNA target sequence for CLCA3 (NM_004921.1,578-596).
gttccactcgtattactgt

SEQ ID NO: 273429 - DNA, 19 bp, Homo sapiens
  siRNA target sequence for CLCA3 (NM_004921.1,581-599).
ccactcgtattactgttta

SEQ ID NO: 273430 - DNA, 19 bp, Homo sapiens
  siRNA target sequence for CLCA3 (NM_004921.1,584-602).
ctcgtattactgtttacat

SEQ ID NO: 273431 - DNA, 19 bp, Homo sapiens
  siRNA target sequence for CLCA3 (NM_004921.1,665-683).
cagggctgtatgaagcaaa

SEQ ID NO: 273432 - DNA, 19 bp, Homo sapiens
  siRNA target sequence for CLCA3 (NM_004921.1,667-685).
gggctgtatgaagcaaaat

SEQ ID NO: 273433 - DNA, 19 bp, Homo sapiens
  siRNA target sequence for CLCA3 (NM_004921.1,715-733).
gccaaggaatccattgtgt

SEQ ID NO: 273434 - DNA, 19 bp, Homo sapiens
  siRNA target sequence for CLCA3 (NM_004921.1,756-774).
gactgaattttgtactgaa

SEQ ID NO: 273435 - DNA, 19 bp, Homo sapiens
  siRNA target sequence for CPNE7 (NM_014427.3,441-459).
gtcaggaggacgatttcct

SEQ ID NO: 273436 - DNA, 19 bp, Homo sapiens
  siRNA target sequence for CPNE7 (NM_014427.3,600-618).
ccaggacgggtccttcttt

SEQ ID NO: 273437 - DNA, 19 bp, Homo sapiens
  siRNA target sequence for CPNE7 (NM_014427.3,601-619).
caggacgggtccttctttt

SEQ ID NO: 273438 - DNA, 19 bp, Homo sapiens
  siRNA target sequence for CPNE7 (NM_014427.3,1169-1187).
cagaagagacgcagttata

SEQ ID NO: 273439 - DNA, 19 bp, Homo sapiens
  siRNA target sequence for CPNE7 (NM_014427.3,1644-1662).
ccgggaaagcctctcaata

SEQ ID NO: 273440 - DNA, 19 bp, Homo sapiens
  siRNA target sequence for DAZAP2 (NM_014764.1,249-267).
catgtcagccgcatttcct

SEQ ID NO: 273441 - DNA, 19 bp, Homo sapiens
  siRNA target sequence for EPB41L4B (NM_018424.1,584-602).
cgtggacctgccgaaacat

SEQ ID NO: 273442 - DNA, 19 bp, Homo sapiens
  siRNA target sequence for EPB41L4B (NM_018424.1,648-666).
cttgtggaaacagattact

SEQ ID NO: 273443 - DNA, 19 bp, Homo sapiens
  siRNA target sequence for EPB41L4B (NM_018424.1,750-768).
cctgcttatgctttacact

SEQ ID NO: 273444 - DNA, 19 bp, Homo sapiens
  siRNA target sequence for EPB41L4B (NM_018424.1,751-769).
ctgcttatgctttacactt

SEQ ID NO: 273445 - DNA, 19 bp, Homo sapiens
  siRNA target sequence for EPB41L4B (NM_018424.1,765-783).
cactttcgagttaaatact

SEQ ID NO: 273446 - DNA, 19 bp, Homo sapiens
  siRNA target sequence for EPB41L4B (NM_018424.1,803-821).
ccttcgtgaggagtttaca

SEQ ID NO: 273447 - DNA, 19 bp, Homo sapiens
  siRNA target sequence for EPB41L4B (NM_018424.1,804-822).
cttcgtgaggagtttacaa

SEQ ID NO: 273448 - DNA, 19 bp, Homo sapiens
  siRNA target sequence for EPB41L4B (NM_018424.1,968-986).
gtctgagtttcggttcatt

SEQ ID NO: 273449 - DNA, 19 bp, Homo sapiens
  siRNA target sequence for EPB41L4B (NM_018424.1,978-996).
cggttcattccaaatcaga

SEQ ID NO: 273450 - DNA, 19 bp, Homo sapiens
  siRNA target sequence for EPB41L4B (NM_018424.1,1002-1020).
gcaatggaatttgatatct

SEQ ID NO: 273451 - DNA, 19 bp, Homo sapiens
  siRNA target sequence for EPB41L4B (NM_018424.1,1003-1021).
caatggaatttgatatctt

SEQ ID NO: 273452 - DNA, 19 bp, Homo sapiens
  siRNA target sequence for EPB41L4B (NM_018424.1,1121-1139).
cgttgtcaggggaagagat

SEQ ID NO: 273453 - DNA, 19 bp, Homo sapiens
  siRNA target sequence for EPB41L4B (NM_018424.1,1163-1181).
gaccccgacaggcatatta

SEQ ID NO: 273454 - DNA, 19 bp, Homo sapiens
  siRNA target sequence for EPB41L4B (NM_018424.1,1165-1183).
ccccgacaggcatattaat

SEQ ID NO: 273455 - DNA, 19 bp, Homo sapiens
  siRNA target sequence for EPB41L4B (NM_018424.1,1167-1185).
ccgacaggcatattaatct

SEQ ID NO: 273456 - DNA, 19 bp, Homo sapiens
  siRNA target sequence for EPB41L4B (NM_018424.1,1168-1186).
cgacaggcatattaatctt

SEQ ID NO: 273457 - DNA, 19 bp, Homo sapiens
  siRNA target sequence for EPB41L4B (NM_018424.1,1169-1187).
gacaggcatattaatcttt

SEQ ID NO: 273458 - DNA, 19 bp, Homo sapiens
  siRNA target sequence for EPB41L4B (NM_018424.1,1184-1202).
ctttgaaggagctaacaaa

SEQ ID NO: 273459 - DNA, 19 bp, Homo sapiens
  siRNA target sequence for EPB41L4B (NM_018424.1,1219-1237).
ggcctaaaattaccaaaat

SEQ ID NO: 273460 - DNA, 19 bp, Homo sapiens
  siRNA target sequence for EPB41L4B (NM_018424.1,1299-1317).
caagagcacacgtttgtgt

SEQ ID NO: 273461 - DNA, 19 bp, Homo sapiens
  siRNA target sequence for EPB41L4B (NM_018424.1,1414-1432).
ccaatagatccgactttat

SEQ ID NO: 273462 - DNA, 19 bp, Homo sapiens
  siRNA target sequence for EPB41L4B (NM_018424.1,1437-1455).
ctgggctctcgcttcagat

SEQ ID NO: 273463 - DNA, 19 bp, Homo sapiens
  siRNA target sequence for EPB41L4B (NM_018424.1,1442-1460).
ctctcgcttcagattcagt

SEQ ID NO: 273464 - DNA, 19 bp, Homo sapiens
  siRNA target sequence for EPB41L4B (NM_018424.1,1459-1477).
gtgggcggacagaatatca

SEQ ID NO: 273465 - DNA, 19 bp, Homo sapiens
  siRNA target sequence for EPB41L4B (NM_018424.1,1485-1503).
catggctccaggttacgaa

SEQ ID NO: 273466 - DNA, 19 bp, Homo sapiens
  siRNA target sequence for EPB41L4B (NM_018424.1,1520-1538).
gaggaagcctagtaaacgt

SEQ ID NO: 273467 - DNA, 19 bp, Homo sapiens
  siRNA target sequence for EPB41L4B (NM_018424.1,1522-1540).
ggaagcctagtaaacgtta

SEQ ID NO: 273468 - DNA, 19 bp, Homo sapiens
  siRNA target sequence for EPB41L4B (NM_018424.1,1523-1541).
gaagcctagtaaacgttat

SEQ ID NO: 273469 - DNA, 19 bp, Homo sapiens
  siRNA target sequence for EPB41L4B (NM_018424.1,1542-1560).
ccatcccggagacattcaa

SEQ ID NO: 273470 - DNA, 19 bp, Homo sapiens
  siRNA target sequence for EPB41L4B (NM_018424.1,1550-1568).
gagacattcaacgttcaaa

SEQ ID NO: 273471 - DNA, 19 bp, Homo sapiens
  siRNA target sequence for EPB41L4B (NM_018424.1,1800-1818).
gggatgcaaagtatgatgt

SEQ ID NO: 273472 - DNA, 19 bp, Homo sapiens
  siRNA target sequence for EPB41L4B (NM_018424.1,1801-1819).
ggatgcaaagtatgatgta

SEQ ID NO: 273473 - DNA, 19 bp, Homo sapiens
  siRNA target sequence for EPB41L4B (NM_018424.1,1802-1820).
gatgcaaagtatgatgtat

SEQ ID NO: 273474 - DNA, 19 bp, Homo sapiens
  siRNA target sequence for EPB41L4B (NM_018424.1,1810-1828).
gtatgatgtatcgagataa

SEQ ID NO: 273475 - DNA, 19 bp, Homo sapiens
  siRNA target sequence for EPB41L4B (NM_019114.2,1833-1851).
cagcaccactcaaactaca

SEQ ID NO: 273476 - DNA, 19 bp, Homo sapiens
  siRNA target sequence for EPB41L4B (NM_019114.2,1906-1924).
gcagcaagtcccttacaaa

SEQ ID NO: 273477 - DNA, 19 bp, Homo sapiens
  siRNA target sequence for EPB41L4B (NM_019114.2,1960-1978).
ccgctgcccatctaaagaa

SEQ ID NO: 273478 - DNA, 19 bp, Homo sapiens
  siRNA target sequence for EPB41L4B (NM_019114.2,2098-2116).
ctgttgcggatcatgtgaa

SEQ ID NO: 273479 - DNA, 19 bp, Homo sapiens
  siRNA target sequence for EPB41L4B (NM_019114.2,2103-2121).
gcggatcatgtgaagtgta

SEQ ID NO: 273480 - DNA, 19 bp, Homo sapiens
  siRNA target sequence for EPB41L4B (NM_019114.2,2104-2122).
cggatcatgtgaagtgtaa

SEQ ID NO: 273481 - DNA, 19 bp, Homo sapiens
  siRNA target sequence for EPB41L4B (NM_019114.2,2177-2195).
ggaggaatcaccgtttgta

SEQ ID NO: 273482 - DNA, 19 bp, Homo sapiens
  siRNA target sequence for EPB41L4B (NM_019114.2,2178-2196).
gaggaatcaccgtttgtaa

SEQ ID NO: 273483 - DNA, 19 bp, Homo sapiens
  siRNA target sequence for EPB41L4B (NM_019114.2,2180-2198).
ggaatcaccgtttgtaaat

SEQ ID NO: 273484 - DNA, 19 bp, Homo sapiens
  siRNA target sequence for EPB41L4B (NM_019114.2,2217-2235).
cttcaggacgctagtgtaa

SEQ ID NO: 273485 - DNA, 19 bp, Homo sapiens
  siRNA target sequence for EPB41L4B (NM_019114.2,2222-2240).
ggacgctagtgtaagaagt

SEQ ID NO: 273486 - DNA, 19 bp, Homo sapiens
  siRNA target sequence for EPB41L4B (NM_019114.2,2266-2284).
cccagccagctgtggaaaa

SEQ ID NO: 273487 - DNA, 19 bp, Homo sapiens
  siRNA target sequence for EPB41L4B (NM_019114.2,2301-2319).
ccccgagtgaggaagttaa

SEQ ID NO: 273488 - DNA, 19 bp, Homo sapiens
  siRNA target sequence for EPB41L4B (NM_019114.2,2303-2321).
ccgagtgaggaagttaaca

SEQ ID NO: 273489 - DNA, 19 bp, Homo sapiens
  siRNA target sequence for EPB41L4B (NM_019114.2,2304-2322).
cgagtgaggaagttaacaa

SEQ ID NO: 273490 - DNA, 19 bp, Homo sapiens
  siRNA target sequence for EPB41L4B (NM_019114.2,2315-2333).
gttaacaagacagtatagt

SEQ ID NO: 273491 - DNA, 19 bp, Homo sapiens
  siRNA target sequence for EPB41L4B (NM_019114.2,2543-2561).
cctggagccgggtgatctt

SEQ ID NO: 273492 - DNA, 19 bp, Homo sapiens
  siRNA target sequence for EPB41L4B (NM_019114.2,2716-2734).
cattcccggttgatacaat

SEQ ID NO: 273493 - DNA, 19 bp, Homo sapiens
  siRNA target sequence for EPB41L4B (NM_019114.2,2739-2757).
ccgtttcctgatactttca

SEQ ID NO: 273494 - DNA, 19 bp, Homo sapiens
  siRNA target sequence for EPB41L4B (NM_019114.2,2781-2799).
gacttcagagacagtaaat

SEQ ID NO: 273495 - DNA, 19 bp, Homo sapiens
  siRNA target sequence for EPB41L4B (NM_019114.2,2872-2890).
ccacagtgcagaccattta

SEQ ID NO: 273496 - DNA, 19 bp, Homo sapiens
  siRNA target sequence for EVER1 (NM_007267.5,485-503).
ccctgctcgggaactttgt

SEQ ID NO: 273497 - DNA, 19 bp, Homo sapiens
  siRNA target sequence for EVER1 (NM_007267.5,1335-1353).
cctccagcaggacaatatt

SEQ ID NO: 273498 - DNA, 19 bp, Homo sapiens
  siRNA target sequence for EVER1 (NM_007267.5,1755-1773).
ccagtgctgggaggatttt

SEQ ID NO: 273499 - DNA, 19 bp, Homo sapiens
  siRNA target sequence for EVER1 (NM_007267.5,1821-1839).
gttgctggacacgcttttt

SEQ ID NO: 273500 - DNA, 19 bp, Homo sapiens
  siRNA target sequence for EVER1 (NM_007267.5,1843-1861).
gaactggtgtggaggatta

SEQ ID NO: 273501 - DNA, 19 bp, Homo sapiens
  siRNA target sequence for EVER1 (NM_007267.5,1846-1864).
ctggtgtggaggattatct

SEQ ID NO: 273502 - DNA, 19 bp, Homo sapiens
  siRNA target sequence for EVER1 (NM_007267.5,1886-1904).
ggcggaagccggagtttga

SEQ ID NO: 273503 - DNA, 19 bp, Homo sapiens
  siRNA target sequence for EVER1 (NM_007267.5,2342-2360).
ccgtgatctacctcaacat

SEQ ID NO: 273504 - DNA, 19 bp, Homo sapiens
  siRNA target sequence for EVER1 (NM_007267.5,2531-2549).
ccctgctcacagatgaaca

SEQ ID NO: 273505 - DNA, 19 bp, Homo sapiens
  siRNA target sequence for FLJ14153 (NM_022736.1,195-213).
cagctatttttgctatgat

SEQ ID NO: 273506 - DNA, 19 bp, Homo sapiens
  siRNA target sequence for FLJ14153 (NM_022736.1,224-242).
cccttcagactcaagttaa

SEQ ID NO: 273507 - DNA, 19 bp, Homo sapiens
  siRNA target sequence for FLJ14153 (NM_022736.1,233-251).
ctcaagttaaacgagatat

SEQ ID NO: 273508 - DNA, 19 bp, Homo sapiens
  siRNA target sequence for FLJ14153 (NM_022736.1,244-262).
cgagatatgcaagtgaata

SEQ ID NO: 273509 - DNA, 19 bp, Homo sapiens
  siRNA target sequence for FLJ14153 (NM_022736.1,253-271).
caagtgaataccacgaaat

SEQ ID NO: 273510 - DNA, 19 bp, Homo sapiens
  siRNA target sequence for FLJ14153 (NM_022736.1,279-297).
gctgtatgcctggtattct

SEQ ID NO: 273511 - DNA, 19 bp, Homo sapiens
  siRNA target sequence for FLJ14153 (NM_022736.1,296-314).
cttggcccaatgtagtttt

SEQ ID NO: 273512 - DNA, 19 bp, Homo sapiens
  siRNA target sequence for FLJ14153 (NM_022736.1,302-320).
ccaatgtagttttgtgttt

SEQ ID NO: 273513 - DNA, 19 bp, Homo sapiens
  siRNA target sequence for FLJ14153 (NM_022736.1,342-360).
ccgagtatttggaatacga

SEQ ID NO: 273514 - DNA, 19 bp, Homo sapiens
  siRNA target sequence for FLJ14153 (NM_022736.1,343-361).
cgagtatttggaatacgat

SEQ ID NO: 273515 - DNA, 19 bp, Homo sapiens
  siRNA target sequence for FLJ14153 (NM_022736.1,358-376).
cgatggggcacaatcattt

SEQ ID NO: 273516 - DNA, 19 bp, Homo sapiens
  siRNA target sequence for FLJ14153 (NM_022736.1,359-377).
gatggggcacaatcatttt

SEQ ID NO: 273517 - DNA, 19 bp, Homo sapiens
  siRNA target sequence for FLJ14153 (NM_022736.1,364-382).
ggcacaatcatttttagct

SEQ ID NO: 273518 - DNA, 19 bp, Homo sapiens
  siRNA target sequence for FLJ14153 (NM_022736.1,413-431).
ccctgggtggaatatttaa

SEQ ID NO: 273519 - DNA, 19 bp, Homo sapiens
  siRNA target sequence for FLJ14153 (NM_022736.1,414-432).
cctgggtggaatatttaat

SEQ ID NO: 273520 - DNA, 19 bp, Homo sapiens
  siRNA target sequence for FLJ14153 (NM_022736.1,519-537).
ctggtttaaaggcaaagaa

SEQ ID NO: 273521 - DNA, 19 bp, Homo sapiens
  siRNA target sequence for FLJ14153 (NM_022736.1,547-565).
gtgtttggacttcaactta

SEQ ID NO: 273522 - DNA, 19 bp, Homo sapiens
  siRNA target sequence for FLJ14153 (NM_022736.1,607-625).
ggatggctgtattctaaga

SEQ ID NO: 273523 - DNA, 19 bp, Homo sapiens
  siRNA target sequence for FLJ14153 (NM_022736.1,611-629).
ggctgtattctaagattga

SEQ ID NO: 273524 - DNA, 19 bp, Homo sapiens
  siRNA target sequence for FLJ14153 (NM_022736.1,620-638).
ctaagattgaagctttgtt

SEQ ID NO: 273525 - DNA, 19 bp, Homo sapiens
  siRNA target sequence for FLJ14153 (NM_022736.1,659-677).
ccctcgggatcacacttat

SEQ ID NO: 273526 - DNA, 19 bp, Homo sapiens
  siRNA target sequence for FLJ14153 (NM_022736.1,745-763).
gcagagagaatccttcata

SEQ ID NO: 273527 - DNA, 19 bp, Homo sapiens
  siRNA target sequence for FLJ14153 (NM_022736.1,746-764).
cagagagaatccttcataa

SEQ ID NO: 273528 - DNA, 19 bp, Homo sapiens
  siRNA target sequence for FLJ14153 (NM_022736.1,819-837).
cttacccctgtggcttata

SEQ ID NO: 273529 - DNA, 19 bp, Homo sapiens
  siRNA target sequence for FLJ14153 (NM_022736.1,991-1009).
gggctcctggtggataaaa

SEQ ID NO: 273530 - DNA, 19 bp, Homo sapiens
  siRNA target sequence for FLJ14153 (NM_022736.1,1088-1106).
ggaacccttggattgctat

SEQ ID NO: 273531 - DNA, 19 bp, Homo sapiens
  siRNA target sequence for FLJ14153 (NM_022736.1,1092-1110).
cccttggattgctatgtgt

SEQ ID NO: 273532 - DNA, 19 bp, Homo sapiens
  siRNA target sequence for FLJ14153 (NM_022736.1,1151-1169).
ggccaatggtggcatttgt

SEQ ID NO: 273533 - DNA, 19 bp, Homo sapiens
  siRNA target sequence for FLJ14153 (NM_022736.1,1228-1246).
gggttggccatcatttcca

SEQ ID NO: 273534 - DNA, 19 bp, Homo sapiens
  siRNA target sequence for FLJ14153 (NM_022736.1,1331-1349).
ctgtggtcttactctattt

SEQ ID NO: 273535 - DNA, 19 bp, Homo sapiens
  siRNA target sequence for FLJ25217 (NM_152351.2,443-461).
caccttacctgagtacatt

SEQ ID NO: 273536 - DNA, 19 bp, Homo sapiens
  siRNA target sequence for FLJ25217 (NM_152351.2,445-463).
ccttacctgagtacattca

SEQ ID NO: 273537 - DNA, 19 bp, Homo sapiens
  siRNA target sequence for FLJ25217 (NM_152351.2,748-766).
cagacgccatgcacatgtt

SEQ ID NO: 273538 - DNA, 19 bp, Homo sapiens
  siRNA target sequence for FLJ25217 (NM_152351.2,1022-1040).
gtccgtctctcgaacagat

SEQ ID NO: 273539 - DNA, 19 bp, Homo sapiens
  siRNA target sequence for FLJ25217 (NM_152351.2,1025-1043).
cgtctctcgaacagatgat

SEQ ID NO: 273540 - DNA, 19 bp, Homo sapiens
  siRNA target sequence for FLJ25217 (NM_152351.2,1525-1543).
cagtgactgcagtctttgt

SEQ ID NO: 273541 - DNA, 19 bp, Homo sapiens
  siRNA target sequence for FLJ25217 (NM_152351.2,1782-1800).
cagagtgtccagattgaga

SEQ ID NO: 273542 - DNA, 19 bp, Homo sapiens
  siRNA target sequence for FLJ25217 (NM_152351.2,1832-1850).
gcccttgggaactaaagca

SEQ ID NO: 273543 - DNA, 19 bp, Homo sapiens
  siRNA target sequence for FLJ25217 (NM_152351.2,1858-1876).
gccaaacaccccagaaaca

SEQ ID NO: 273544 - DNA, 19 bp, Homo sapiens
  siRNA target sequence for FLJ40121 (NM_175904.2,139-157).
ggtcaagacaaataaacct

SEQ ID NO: 273545 - DNA, 19 bp, Homo sapiens
  siRNA target sequence for FLJ40121 (NM_175904.2,188-206).
gggtctgaggttactacta

SEQ ID NO: 273546 - DNA, 19 bp, Homo sapiens
  siRNA target sequence for FLJ40121 (NM_175904.2,189-207).
ggtctgaggttactactaa

SEQ ID NO: 273547 - DNA, 19 bp, Homo sapiens
  siRNA target sequence for FLJ40121 (NM_175904.2,194-212).
gaggttactactaacacat

SEQ ID NO: 273548 - DNA, 19 bp, Homo sapiens
  siRNA target sequence for FLJ40121 (NM_175904.2,277-295).
cccttcccaccgaagatca

SEQ ID NO: 273549 - DNA, 19 bp, Homo sapiens
  siRNA target sequence for FLJ40121 (NM_175904.2,400-418).
cgagactggaccaagaaca

SEQ ID NO: 273550 - DNA, 19 bp, Homo sapiens
  siRNA target sequence for FLJ40121 (NM_175904.2,565-583).
cggccatcatgcttcatca

SEQ ID NO: 273551 - DNA, 19 bp, Homo sapiens
  siRNA target sequence for FLJ40121 (NM_175904.2,567-585).
gccatcatgcttcatcaat

SEQ ID NO: 273552 - DNA, 19 bp, Homo sapiens
  siRNA target sequence for FLJ40121 (NM_175904.2,603-621).
ctcatcagttgagttttca

SEQ ID NO: 273553 - DNA, 19 bp, Homo sapiens
  siRNA target sequence for FLJ40121 (NM_175904.2,704-722).
ccccgtaggattttgtctt

SEQ ID NO: 273554 - DNA, 19 bp, Homo sapiens
  siRNA target sequence for FLJ40121 (NM_175904.2,705-723).
cccgtaggattttgtctta

SEQ ID NO: 273555 - DNA, 19 bp, Homo sapiens
  siRNA target sequence for FLJ40121 (NM_175904.2,747-765).
ctgagcccatccaaagaat

SEQ ID NO: 273556 - DNA, 19 bp, Homo sapiens
  siRNA target sequence for FLJ40121 (NM_175904.2,749-767).
gagcccatccaaagaatta

SEQ ID NO: 273557 - DNA, 19 bp, Homo sapiens
  siRNA target sequence for FLJ40121 (NM_175904.2,752-770).
cccatccaaagaattacga

SEQ ID NO: 273558 - DNA, 19 bp, Homo sapiens
  siRNA target sequence for FLJ40121 (NM_175904.2,758-776).
caaagaattacgactacta

SEQ ID NO: 273559 - DNA, 19 bp, Homo sapiens
  siRNA target sequence for FLJ40121 (NM_175904.2,828-846).
gtgtctctgcagactatca

SEQ ID NO: 273560 - DNA, 19 bp, Homo sapiens
  siRNA target sequence for FLJ40121 (NM_175904.2,830-848).
gtctctgcagactatcaga

SEQ ID NO: 273561 - DNA, 19 bp, Homo sapiens
  siRNA target sequence for FLJ40121 (NM_175904.2,856-874).
gagaagggtccctgtagaa

SEQ ID NO: 273562 - DNA, 19 bp, Homo sapiens
  siRNA target sequence for FLJ40121 (NM_175904.2,895-913).
cggtccaattccttcaaaa

SEQ ID NO: 273563 - DNA, 19 bp, Homo sapiens
  siRNA target sequence for FLJ40121 (NM_175904.2,915-933).
ccaaggccttgtataggaa

SEQ ID NO: 273564 - DNA, 19 bp, Homo sapiens
  siRNA target sequence for FLJ40121 (NM_175904.2,920-938).
gccttgtataggaatatga

SEQ ID NO: 273565 - DNA, 19 bp, Homo sapiens
  siRNA target sequence for FLJ40121 (NM_175904.2,921-939).
ccttgtataggaatatgaa

SEQ ID NO: 273566 - DNA, 19 bp, Homo sapiens
  siRNA target sequence for FLJ40121 (NM_175904.2,944-962).
gactcattgctcaaactct

SEQ ID NO: 273567 - DNA, 19 bp, Homo sapiens
  siRNA target sequence for FLJ40121 (NM_175904.2,1010-1028).
gaccctgagtctcttcata

SEQ ID NO: 273568 - DNA, 19 bp, Homo sapiens
  siRNA target sequence for FLJ40121 (NM_175904.2,1013-1031).
cctgagtctcttcataagt

SEQ ID NO: 273569 - DNA, 19 bp, Homo sapiens
  siRNA target sequence for FLJ40121 (NM_175904.2,1056-1074).
cctccgcaaaggtcttagt

SEQ ID NO: 273570 - DNA, 19 bp, Homo sapiens
  siRNA target sequence for FLJ40121 (NM_175904.2,1057-1075).
ctccgcaaaggtcttagta

SEQ ID NO: 273571 - DNA, 19 bp, Homo sapiens
  siRNA target sequence for FLJ40121 (NM_175904.2,1060-1078).
cgcaaaggtcttagtatca

SEQ ID NO: 273572 - DNA, 19 bp, Homo sapiens
  siRNA target sequence for FLJ40121 (NM_175904.2,1061-1079).
gcaaaggtcttagtatcat

SEQ ID NO: 273573 - DNA, 19 bp, Homo sapiens
  siRNA target sequence for FLJ40121 (NM_175904.2,1205-1223).
gagggctcccacaagtcat

SEQ ID NO: 273574 - DNA, 19 bp, Homo sapiens
  siRNA target sequence for FLJ40121 (NM_175904.2,1376-1394).
cctcctcggtccttaccta

SEQ ID NO: 273575 - DNA, 19 bp, Homo sapiens
  siRNA target sequence for FLJ40121 (NM_175904.2,1459-1477).
gctgacaacaccggatttt

SEQ ID NO: 273576 - DNA, 19 bp, Homo sapiens
  siRNA target sequence for FLJ40121 (NM_175904.2,1505-1523).
cttttattgtccggtttta

SEQ ID NO: 273577 - DNA, 19 bp, Homo sapiens
  siRNA target sequence for FLJ40121 (NM_175904.2,1664-1682).
caacccattcaaaggttta

SEQ ID NO: 273578 - DNA, 19 bp, Homo sapiens
  siRNA target sequence for FLJ40121 (NM_175904.2,1700-1718).
gtctctgaggaaatgtaca

SEQ ID NO: 273579 - DNA, 19 bp, Homo sapiens
  siRNA target sequence for FLJ40121 (NM_175904.2,1799-1817).
ggtgaggagtggcatctat

SEQ ID NO: 273580 - DNA, 19 bp, Homo sapiens
  siRNA target sequence for FLJ40121 (NM_175904.2,1802-1820).
gaggagtggcatctatgta

SEQ ID NO: 273581 - DNA, 19 bp, Homo sapiens
  siRNA target sequence for FLJ40121 (NM_175904.2,1805-1823).
gagtggcatctatgtatct

SEQ ID NO: 273582 - DNA, 19 bp, Homo sapiens
  siRNA target sequence for GASP (NM_014710.1,870-888).
ggggcacgccctaagagta

SEQ ID NO: 273583 - DNA, 19 bp, Homo sapiens
  siRNA target sequence for GASP (NM_014710.1,871-889).
gggcacgccctaagagtaa

SEQ ID NO: 273584 - DNA, 19 bp, Homo sapiens
  siRNA target sequence for GASP (NM_014710.1,954-972).
ggtgctgaaagattgtcta

SEQ ID NO: 273585 - DNA, 19 bp, Homo sapiens
  siRNA target sequence for GASP (NM_014710.1,955-973).
gtgctgaaagattgtctaa

SEQ ID NO: 273586 - DNA, 19 bp, Homo sapiens
  siRNA target sequence for GASP (NM_014710.1,957-975).
gctgaaagattgtctaaga

SEQ ID NO: 273587 - DNA, 19 bp, Homo sapiens
  siRNA target sequence for GASP (NM_014710.1,986-1004).
ctcccagaccaatatcata

SEQ ID NO: 273588 - DNA, 19 bp, Homo sapiens
  siRNA target sequence for GASP (NM_014710.1,1011-1029).
ccacttgtcagtactgatt

SEQ ID NO: 273589 - DNA, 19 bp, Homo sapiens
  siRNA target sequence for GASP (NM_014710.1,1032-1050).
gtcttggttgctaaaacaa

SEQ ID NO: 273590 - DNA, 19 bp, Homo sapiens
  siRNA target sequence for GASP (NM_014710.1,1065-1083).
gatagagaactggttaata

SEQ ID NO: 273591 - DNA, 19 bp, Homo sapiens
  siRNA target sequence for GASP (NM_014710.1,1213-1231).
ctcctaattctgatttcaa

SEQ ID NO: 273592 - DNA, 19 bp, Homo sapiens
  siRNA target sequence for GASP (NM_014710.1,1229-1247).
caaatgggtagacaaatct

SEQ ID NO: 273593 - DNA, 19 bp, Homo sapiens
  siRNA target sequence for GASP (NM_014710.1,1277-1295).
ggtcactgcaaaatttcat

SEQ ID NO: 273594 - DNA, 19 bp, Homo sapiens
  siRNA target sequence for GASP (NM_014710.1,1328-1346).
catgcacatggccaatcaa

SEQ ID NO: 273595 - DNA, 19 bp, Homo sapiens
  siRNA target sequence for GASP (NM_014710.1,1347-1365).
gaggctaataccatgtcta

SEQ ID NO: 273596 - DNA, 19 bp, Homo sapiens
  siRNA target sequence for GASP (NM_014710.1,1380-1398).
caggagctctatattgcat

SEQ ID NO: 273597 - DNA, 19 bp, Homo sapiens
  siRNA target sequence for GASP (NM_014710.1,1388-1406).
ctatattgcatctagttct

SEQ ID NO: 273598 - DNA, 19 bp, Homo sapiens
  siRNA target sequence for GASP (NM_014710.1,1445-1463).
ggccagagataaaaccaat

SEQ ID NO: 273599 - DNA, 19 bp, Homo sapiens
  siRNA target sequence for GASP (NM_014710.1,1501-1519).
ccaggtttaggtctaagaa

SEQ ID NO: 273600 - DNA, 19 bp, Homo sapiens
  siRNA target sequence for GASP (NM_014710.1,1502-1520).
caggtttaggtctaagaaa

SEQ ID NO: 273601 - DNA, 19 bp, Homo sapiens
  siRNA target sequence for GASP (NM_014710.1,1504-1522).
ggtttaggtctaagaaaga

SEQ ID NO: 273602 - DNA, 19 bp, Homo sapiens
  siRNA target sequence for GASP (NM_014710.1,1505-1523).
gtttaggtctaagaaagaa

SEQ ID NO: 273603 - DNA, 19 bp, Homo sapiens
  siRNA target sequence for GASP (NM_014710.1,1510-1528).
ggtctaagaaagaagtcta

SEQ ID NO: 273604 - DNA, 19 bp, Homo sapiens
  siRNA target sequence for GASP (NM_014710.1,1521-1539).
gaagtctatgttgaatcaa

SEQ ID NO: 273605 - DNA, 19 bp, Homo sapiens
  siRNA target sequence for GASP (NM_014710.1,1524-1542).
gtctatgttgaatcaagtt

SEQ ID NO: 273606 - DNA, 19 bp, Homo sapiens
  siRNA target sequence for GASP (NM_014710.1,1658-1676).
caagcgagaagcttgcatt

SEQ ID NO: 273607 - DNA, 19 bp, Homo sapiens
  siRNA target sequence for GASP (NM_014710.1,1661-1679).
gcgagaagcttgcattgat

SEQ ID NO: 273608 - DNA, 19 bp, Homo sapiens
  siRNA target sequence for GASP (NM_014710.1,1662-1680).
cgagaagcttgcattgatt

SEQ ID NO: 273609 - DNA, 19 bp, Homo sapiens
  siRNA target sequence for GASP (NM_014710.1,1665-1683).
gaagcttgcattgatttca

SEQ ID NO: 273610 - DNA, 19 bp, Homo sapiens
  siRNA target sequence for GASP (NM_014710.1,1682-1700).
catgcctgggtctatagat

SEQ ID NO: 273611 - DNA, 19 bp, Homo sapiens
  siRNA target sequence for GASP (NM_014710.1,1685-1703).
gcctgggtctatagatgta

SEQ ID NO: 273612 - DNA, 19 bp, Homo sapiens
  siRNA target sequence for GASP (NM_014710.1,1686-1704).
cctgggtctatagatgtaa

SEQ ID NO: 273613 - DNA, 19 bp, Homo sapiens
  siRNA target sequence for GASP (NM_014710.1,1689-1707).
gggtctatagatgtaatta

SEQ ID NO: 273614 - DNA, 19 bp, Homo sapiens
  siRNA target sequence for GASP (NM_014710.1,1690-1708).
ggtctatagatgtaattaa

SEQ ID NO: 273615 - DNA, 19 bp, Homo sapiens
  siRNA target sequence for GASP (NM_014710.1,1691-1709).
gtctatagatgtaattaaa

SEQ ID NO: 273616 - DNA, 19 bp, Homo sapiens
  siRNA target sequence for GASP (NM_014710.1,1693-1711).
ctatagatgtaattaaaaa

SEQ ID NO: 273617 - DNA, 19 bp, Homo sapiens
  siRNA target sequence for GASP (NM_014710.1,1940-1958).
ggaggatgagtccataatt

SEQ ID NO: 273618 - DNA, 19 bp, Homo sapiens
  siRNA target sequence for GASP (NM_014710.1,2001-2019).
ggggctagcagtaaatcca

SEQ ID NO: 273619 - DNA, 19 bp, Homo sapiens
  siRNA target sequence for GASP (NM_014710.1,2039-2057).
gcgtattggtgattcctta

SEQ ID NO: 273620 - DNA, 19 bp, Homo sapiens
  siRNA target sequence for GASP (NM_014710.1,2040-2058).
cgtattggtgattccttat

SEQ ID NO: 273621 - DNA, 19 bp, Homo sapiens
  siRNA target sequence for GASP (NM_014710.1,2041-2059).
gtattggtgattccttatt

SEQ ID NO: 273622 - DNA, 19 bp, Homo sapiens
  siRNA target sequence for GASP (NM_014710.1,2068-2086).
gggaaaagaccagtatgaa

SEQ ID NO: 273623 - DNA, 19 bp, Homo sapiens
  siRNA target sequence for GASP (NM_014710.1,2101-2119).
ccacctctgaatctatact

SEQ ID NO: 273624 - DNA, 19 bp, Homo sapiens
  siRNA target sequence for GASP (NM_014710.1,2102-2120).
cacctctgaatctatacta

SEQ ID NO: 273625 - DNA, 19 bp, Homo sapiens
  siRNA target sequence for GASP (NM_014710.1,2212-2230).
cgtggttctgggtcattga

SEQ ID NO: 273626 - DNA, 19 bp, Homo sapiens
  siRNA target sequence for GASP (NM_014710.1,2312-2330).
gttttggtctggagaacaa

SEQ ID NO: 273627 - DNA, 19 bp, Homo sapiens
  siRNA target sequence for GASP (NM_014710.1,2429-2447).
ggattgtagggctgaaact

SEQ ID NO: 273628 - DNA, 19 bp, Homo sapiens
  siRNA target sequence for GASP (NM_014710.1,2430-2448).
gattgtagggctgaaacta

SEQ ID NO: 273629 - DNA, 19 bp, Homo sapiens
  siRNA target sequence for GASP (NM_014710.1,2628-2646).
ggtgtcagatgcagattta

SEQ ID NO: 273630 - DNA, 19 bp, Homo sapiens
  siRNA target sequence for GASP (NM_014710.1,2629-2647).
gtgtcagatgcagatttat

SEQ ID NO: 273631 - DNA, 19 bp, Homo sapiens
  siRNA target sequence for GASP (NM_014710.1,2721-2739).
ggaggaagttggaagtcta

SEQ ID NO: 273632 - DNA, 19 bp, Homo sapiens
  siRNA target sequence for GASP (NM_014710.1,2827-2845).
gggctacagaagagagtaa

SEQ ID NO: 273633 - DNA, 19 bp, Homo sapiens
  siRNA target sequence for GASP (NM_014710.1,2828-2846).
ggctacagaagagagtaat

SEQ ID NO: 273634 - DNA, 19 bp, Homo sapiens
  siRNA target sequence for GASP (NM_014710.1,2862-2880).
gaaaaggccaagttactga

SEQ ID NO: 273635 - DNA, 19 bp, Homo sapiens
  siRNA target sequence for GASP (NM_014710.1,2889-2907).
gagaccataatcaattcct

SEQ ID NO: 273636 - DNA, 19 bp, Homo sapiens
  siRNA target sequence for GASP (NM_014710.1,3067-3085).
ctgagaaagaaggtattgt

SEQ ID NO: 273637 - DNA, 19 bp, Homo sapiens
  siRNA target sequence for GASP (NM_014710.1,3129-3147).
gctgggtcttgcagcaaat

SEQ ID NO: 273638 - DNA, 19 bp, Homo sapiens
  siRNA target sequence for GASP (NM_014710.1,3140-3158).
cagcaaatccagtcctaaa

SEQ ID NO: 273639 - DNA, 19 bp, Homo sapiens
  siRNA target sequence for GASP (NM_014710.1,3229-3247).
gagtcggctttgagtcaaa

SEQ ID NO: 273640 - DNA, 19 bp, Homo sapiens
  siRNA target sequence for GASP (NM_014710.1,3617-3635).
ctgtgggtccaggacatta

SEQ ID NO: 273641 - DNA, 19 bp, Homo sapiens
  siRNA target sequence for GASP (NM_014710.1,3626-3644).
caggacattagctgatgaa

SEQ ID NO: 273642 - DNA, 19 bp, Homo sapiens
  siRNA target sequence for GASP (NM_014710.1,3679-3697).
gagatgaggcccattttga

SEQ ID NO: 273643 - DNA, 19 bp, Homo sapiens
  siRNA target sequence for GASP (NM_014710.1,3736-3754).
ccacgtgttcagttgaaca

SEQ ID NO: 273644 - DNA, 19 bp, Homo sapiens
  siRNA target sequence for GASP (NM_014710.1,3830-3848).
ggtcggcttcccatctata

SEQ ID NO: 273645 - DNA, 19 bp, Homo sapiens
  siRNA target sequence for GASP (NM_014710.1,3831-3849).
gtcggcttcccatctataa

SEQ ID NO: 273646 - DNA, 19 bp, Homo sapiens
  siRNA target sequence for GASP (NM_014710.1,3844-3862).
ctataagcccctttagatt

SEQ ID NO: 273647 - DNA, 19 bp, Homo sapiens
  siRNA target sequence for GASP (NM_014710.1,3909-3927).
cccaggaacatggtactta

SEQ ID NO: 273648 - DNA, 19 bp, Homo sapiens
  siRNA target sequence for GASP (NM_014710.1,4275-4293).
ccgtcctcccgagttagaa

SEQ ID NO: 273649 - DNA, 19 bp, Homo sapiens
  siRNA target sequence for GASP (NM_014710.1,4280-4298).
ctcccgagttagaacaagt

SEQ ID NO: 273650 - DNA, 19 bp, Homo sapiens
  siRNA target sequence for GASP (NM_014710.1,4282-4300).
cccgagttagaacaagttt

SEQ ID NO: 273651 - DNA, 19 bp, Homo sapiens
  siRNA target sequence for GASP (NM_014710.1,4283-4301).
ccgagttagaacaagtttt

SEQ ID NO: 273652 - DNA, 19 bp, Homo sapiens
  siRNA target sequence for GOLGA3 (NM_005895.2,689-707).
cagtgtgccgaggtaaaca

SEQ ID NO: 273653 - DNA, 19 bp, Homo sapiens
  siRNA target sequence for GOLGA3 (NM_005895.2,691-709).
gtgtgccgaggtaaacaga

SEQ ID NO: 273654 - DNA, 19 bp, Homo sapiens
  siRNA target sequence for GOLGA3 (NM_005895.2,874-892).
gaagtctcagggaactagt

SEQ ID NO: 273655 - DNA, 19 bp, Homo sapiens
  siRNA target sequence for GOLGA3 (NM_005895.2,1081-1099).
cagtcaacctgcaaccaaa

SEQ ID NO: 273656 - DNA, 19 bp, Homo sapiens
  siRNA target sequence for GOLGA3 (NM_005895.2,1085-1103).
caacctgcaaccaaaacga

SEQ ID NO: 273657 - DNA, 19 bp, Homo sapiens
  siRNA target sequence for GOLGA3 (NM_005895.2,1091-1109).
gcaaccaaaacgagacttt

SEQ ID NO: 273658 - DNA, 19 bp, Homo sapiens
  siRNA target sequence for GOLGA3 (NM_005895.2,1121-1139).
gatcctgagctcatgttaa

SEQ ID NO: 273659 - DNA, 19 bp, Homo sapiens
  siRNA target sequence for GOLGA3 (NM_005895.2,1135-1153).
gttaaacccagaaaactta

SEQ ID NO: 273660 - DNA, 19 bp, Homo sapiens
  siRNA target sequence for GOLGA3 (NM_005895.2,1164-1182).
gtaccctggctatgacaaa

SEQ ID NO: 273661 - DNA, 19 bp, Homo sapiens
  siRNA target sequence for GOLGA3 (NM_005895.2,1167-1185).
ccctggctatgacaaaaga

SEQ ID NO: 273662 - DNA, 19 bp, Homo sapiens
  siRNA target sequence for GOLGA3 (NM_005895.2,1289-1307).
cggtctctggccgattaca

SEQ ID NO: 273663 - DNA, 19 bp, Homo sapiens
  siRNA target sequence for GOLGA3 (NM_005895.2,1291-1309).
gtctctggccgattacaga

SEQ ID NO: 273664 - DNA, 19 bp, Homo sapiens
  siRNA target sequence for GOLGA3 (NM_005895.2,1297-1315).
ggccgattacagaactgaa

SEQ ID NO: 273665 - DNA, 19 bp, Homo sapiens
  siRNA target sequence for GOLGA3 (NM_005895.2,1300-1318).
cgattacagaactgaagat

SEQ ID NO: 273666 - DNA, 19 bp, Homo sapiens
  siRNA target sequence for GOLGA3 (NM_005895.2,1346-1364).
gtcccggctcccgattcta

SEQ ID NO: 273667 - DNA, 19 bp, Homo sapiens
  siRNA target sequence for GOLGA3 (NM_005895.2,1572-1590).
cgcaggacaccccctatat

SEQ ID NO: 273668 - DNA, 19 bp, Homo sapiens
  siRNA target sequence for GOLGA3 (NM_005895.2,1752-1770).
gctctgcagcagaaacaca

SEQ ID NO: 273669 - DNA, 19 bp, Homo sapiens
  siRNA target sequence for GOLGA3 (NM_005895.2,1842-1860).
cgagtcaggcacttaaaga

SEQ ID NO: 273670 - DNA, 19 bp, Homo sapiens
  siRNA target sequence for GOLGA3 (NM_005895.2,2026-2044).
catgctggaggcaaaaaat

SEQ ID NO: 273671 - DNA, 19 bp, Homo sapiens
  siRNA target sequence for GOLGA3 (NM_005895.2,2969-2987).
gaggaaacgtcggaaactt

SEQ ID NO: 273672 - DNA, 19 bp, Homo sapiens
  siRNA target sequence for GOLGA3 (NM_005895.2,2976-2994).
cgtcggaaactttagagaa

SEQ ID NO: 273673 - DNA, 19 bp, Homo sapiens
  siRNA target sequence for GOLGA3 (NM_005895.2,2979-2997).
cggaaactttagagaagtt

SEQ ID NO: 273674 - DNA, 19 bp, Homo sapiens
  siRNA target sequence for GOLGA3 (NM_005895.2,3368-3386).
cagtcgttgcagttcgata

SEQ ID NO: 273675 - DNA, 19 bp, Homo sapiens
  siRNA target sequence for GOLGA3 (NM_005895.2,3372-3390).
cgttgcagttcgataagga

SEQ ID NO: 273676 - DNA, 19 bp, Homo sapiens
  siRNA target sequence for GOLGA3 (NM_005895.2,3419-3437).
gaggcgctgaagaaacaaa

SEQ ID NO: 273677 - DNA, 19 bp, Homo sapiens
  siRNA target sequence for GOLGA3 (NM_005895.2,3424-3442).
gctgaagaaacaaatcgaa

SEQ ID NO: 273678 - DNA, 19 bp, Homo sapiens
  siRNA target sequence for GOLGA3 (NM_005895.2,3863-3881).
cgccttgaggagtcaaaca

SEQ ID NO: 273679 - DNA, 19 bp, Homo sapiens
  siRNA target sequence for GOLGA3 (NM_005895.2,3864-3882).
gccttgaggagtcaaacaa

SEQ ID NO: 273680 - DNA, 19 bp, Homo sapiens
  siRNA target sequence for GOLGA3 (NM_005895.2,3883-3901).
gaagttggctcttgaatta

SEQ ID NO: 273681 - DNA, 19 bp, Homo sapiens
  siRNA target sequence for GOLGA3 (NM_005895.2,3999-4017).
cagacctagtccagttgaa

SEQ ID NO: 273682 - DNA, 19 bp, Homo sapiens
  siRNA target sequence for GOLGA3 (NM_005895.2,4267-4285).
ggccgacgaccttcagatt

SEQ ID NO: 273683 - DNA, 19 bp, Homo sapiens
  siRNA target sequence for GOLGA3 (NM_005895.2,4282-4300).
gattcgggaggggaaacat

SEQ ID NO: 273684 - DNA, 19 bp, Homo sapiens
  siRNA target sequence for GOLGA3 (NM_005895.2,4398-4416).
ccgtgggaaaccaagagat

SEQ ID NO: 273685 - DNA, 19 bp, Homo sapiens
  siRNA target sequence for GOLGA3 (NM_005895.2,4582-4600).
gacccagaaggataaattt

SEQ ID NO: 273686 - DNA, 19 bp, Homo sapiens
  siRNA target sequence for GOLGA3 (NM_005895.2,4584-4602).
cccagaaggataaatttat

SEQ ID NO: 273687 - DNA, 19 bp, Homo sapiens
  siRNA target sequence for GOLGA3 (NM_005895.2,4740-4758).
ctgccacgcccatcaagat

SEQ ID NO: 273688 - DNA, 19 bp, Homo sapiens
  siRNA target sequence for GOLGA3 (NM_005895.2,5023-5041).
gagcagggcttccaaagaa

SEQ ID NO: 273689 - DNA, 19 bp, Homo sapiens
  siRNA target sequence for HIATL2 (NM_032318.1,412-430).
gttgactgttctacatgaa

SEQ ID NO: 273690 - DNA, 19 bp, Homo sapiens
  siRNA target sequence for HIATL2 (NM_032318.1,451-469).
cctcatgaatggtctcatt

SEQ ID NO: 273691 - DNA, 19 bp, Homo sapiens
  siRNA target sequence for HIATL2 (NM_032318.1,462-480).
gtctcattcaaggtgtaaa

SEQ ID NO: 273692 - DNA, 19 bp, Homo sapiens
  siRNA target sequence for HIATL2 (NM_032318.1,484-502).
cctgctctcttttttgagt

SEQ ID NO: 273693 - DNA, 19 bp, Homo sapiens
  siRNA target sequence for HIATL2 (NM_032318.1,557-575).
ggcactgtattctttacct

SEQ ID NO: 273694 - DNA, 19 bp, Homo sapiens
  siRNA target sequence for JUB (NM_032876.4,425-443).
cgcagaaagggtgaatcta

SEQ ID NO: 273695 - DNA, 19 bp, Homo sapiens
  siRNA target sequence for JUB (NM_032876.4,1210-1228).
cgagctaacagctttgctt

SEQ ID NO: 273696 - DNA, 19 bp, Homo sapiens
  siRNA target sequence for JUB (NM_032876.4,1476-1494).
gctcttgtgggcgaacttt

SEQ ID NO: 273697 - DNA, 19 bp, Homo sapiens
  siRNA target sequence for JUB (NM_032876.4,1651-1669).
ctgtttccgatgcattgtt

SEQ ID NO: 273698 - DNA, 19 bp, Homo sapiens
  siRNA target sequence for JUB (NM_032876.4,1734-1752).
ccgactaccacaaaaatta

SEQ ID NO: 273699 - DNA, 19 bp, Homo sapiens
  siRNA target sequence for JUB (NM_032876.4,1735-1753).
cgactaccacaaaaattat

SEQ ID NO: 273700 - DNA, 19 bp, Homo sapiens
  siRNA target sequence for JUB (NM_032876.4,1738-1756).
ctaccacaaaaattatgct

SEQ ID NO: 273701 - DNA, 19 bp, Homo sapiens
  siRNA target sequence for JUB (NM_032876.4,1808-1826).
gacatcgtgagggtgatat

SEQ ID NO: 273702 - DNA, 19 bp, Homo sapiens
  siRNA target sequence for JUB (NM_032876.4,1827-1845).
ccatggaccgggattatca

SEQ ID NO: 273703 - DNA, 19 bp, Homo sapiens
  siRNA target sequence for JUB (NM_032876.4,1831-1849).
ggaccgggattatcacttt

SEQ ID NO: 273704 - DNA, 19 bp, Homo sapiens
  siRNA target sequence for JUB (NM_032876.4,1970-1988).
caaccccctgccaactata

SEQ ID NO: 273705 - DNA, 19 bp, Homo sapiens
  siRNA target sequence for LCN2 (NM_005564.2,256-274).
gcagggaatgcaattctca

SEQ ID NO: 273706 - DNA, 19 bp, Homo sapiens
  siRNA target sequence for LCN2 (NM_005564.2,280-298).
gacaaagacccgcaaaaga

SEQ ID NO: 273707 - DNA, 19 bp, Homo sapiens
  siRNA target sequence for LCN2 (NM_005564.2,347-365).
cctccgtcctgtttaggaa

SEQ ID NO: 273708 - DNA, 19 bp, Homo sapiens
  siRNA target sequence for LCN2 (NM_005564.2,348-366).
ctccgtcctgtttaggaaa

SEQ ID NO: 273709 - DNA, 19 bp, Homo sapiens
  siRNA target sequence for LCN2 (NM_005564.2,350-368).
ccgtcctgtttaggaaaaa

SEQ ID NO: 273710 - DNA, 19 bp, Homo sapiens
  siRNA target sequence for LCN2 (NM_005564.2,420-438).
gttcacgctgggcaacatt

SEQ ID NO: 273711 - DNA, 19 bp, Homo sapiens
  siRNA target sequence for LCN2 (NM_005564.2,426-444).
gctgggcaacattaagagt

SEQ ID NO: 273712 - DNA, 19 bp, Homo sapiens
  siRNA target sequence for LCN2 (NM_005564.2,427-445).
ctgggcaacattaagagtt

SEQ ID NO: 273713 - DNA, 19 bp, Homo sapiens
  siRNA target sequence for LCN2 (NM_005564.2,475-493).
gtggtgagcaccaactaca

SEQ ID NO: 273714 - DNA, 19 bp, Homo sapiens
  siRNA target sequence for LCN2 (NM_005564.2,499-517).
catgctatggtgttcttca

SEQ ID NO: 273715 - DNA, 19 bp, Homo sapiens
  siRNA target sequence for LCN2 (NM_005564.2,503-521).
ctatggtgttcttcaagaa

SEQ ID NO: 273716 - DNA, 19 bp, Homo sapiens
  siRNA target sequence for LCN2 (NM_005564.2,529-547).
caaaacagggagtacttca

SEQ ID NO: 273717 - DNA, 19 bp, Homo sapiens
  siRNA target sequence for LCN2 (NM_005564.2,574-592).
gagctgacttcggaactaa

SEQ ID NO: 273718 - DNA, 19 bp, Homo sapiens
  siRNA target sequence for LCN2 (NM_005564.2,603-621).
catccgcttctccaaatct

SEQ ID NO: 273719 - DNA, 19 bp, Homo sapiens
  siRNA target sequence for LGI3 (NM_139278.1,681-699).
ccgctgctgcagttcttgt

SEQ ID NO: 273720 - DNA, 19 bp, Homo sapiens
  siRNA target sequence for LGI3 (NM_139278.1,683-701).
gctgctgcagttcttgtta

SEQ ID NO: 273721 - DNA, 19 bp, Homo sapiens
  siRNA target sequence for LGI3 (NM_139278.1,702-720).
ctcaactccaacaagttta

SEQ ID NO: 273722 - DNA, 19 bp, Homo sapiens
  siRNA target sequence for LGI3 (NM_139278.1,1053-1071).
ccgctgcgggagttcgatt

SEQ ID NO: 273723 - DNA, 19 bp, Homo sapiens
  siRNA target sequence for LGI3 (NM_139278.1,1068-1086).
gattgcatcaccacagatt

SEQ ID NO: 273724 - DNA, 19 bp, Homo sapiens
  siRNA target sequence for LGI3 (NM_139278.1,1220-1238).
gcagcttcgagactatgat

SEQ ID NO: 273725 - DNA, 19 bp, Homo sapiens
  siRNA target sequence for LGI3 (NM_139278.1,1221-1239).
cagcttcgagactatgata

SEQ ID NO: 273726 - DNA, 19 bp, Homo sapiens
  siRNA target sequence for LGI3 (NM_139278.1,1224-1242).
cttcgagactatgatagaa

SEQ ID NO: 273727 - DNA, 19 bp, Homo sapiens
  siRNA target sequence for LGI3 (NM_139278.1,1316-1334).
gtttggcggctcttacatt

SEQ ID NO: 273728 - DNA, 19 bp, Homo sapiens
  siRNA target sequence for LGI3 (NM_139278.1,1321-1339).
gcggctcttacatttacca

SEQ ID NO: 273729 - DNA, 19 bp, Homo sapiens
  siRNA target sequence for LGI3 (NM_139278.1,1366-1384).
ccaggctgcaagacattga

SEQ ID NO: 273730 - DNA, 19 bp, Homo sapiens
  siRNA target sequence for LGI3 (NM_139278.1,1576-1594).
gcaagccacggctgattgt

SEQ ID NO: 273731 - DNA, 19 bp, Homo sapiens
  siRNA target sequence for LGI3 (NM_139278.1,1611-1629).
gcacccgtcatctatcagt

SEQ ID NO: 273732 - DNA, 19 bp, Homo sapiens
  siRNA target sequence for LGI3 (NM_139278.1,1860-1878).
ctggcactgggcagtgatt

SEQ ID NO: 273733 - DNA, 19 bp, Homo sapiens
  siRNA target sequence for LGI3 (NM_139278.1,1910-1928).
gggacgacagaagtttgta

SEQ ID NO: 273734 - DNA, 19 bp, Homo sapiens
  siRNA target sequence for LGI3 (NM_139278.1,2019-2037).
ggacagacgctggtgtata

SEQ ID NO: 273735 - DNA, 19 bp, Homo sapiens
  siRNA target sequence for LGI3 (NM_139278.1,2027-2045).
gctggtgtatagacacatt

SEQ ID NO: 273736 - DNA, 19 bp, Homo sapiens
  siRNA target sequence for LOC127262 (NM_182752.2,365-383).
ggtggatcactggaacaat

SEQ ID NO: 273737 - DNA, 19 bp, Homo sapiens
  siRNA target sequence for LOC127262 (NM_182752.2,496-514).
ccatttcctacggagaatt

SEQ ID NO: 273738 - DNA, 19 bp, Homo sapiens
  siRNA target sequence for LOC127262 (NM_182752.2,523-541).
cccctaaatcgctcaacaa

SEQ ID NO: 273739 - DNA, 19 bp, Homo sapiens
  siRNA target sequence for LOC127262 (NM_182752.2,546-564).
gaaggttttgggattcgaa

SEQ ID NO: 273740 - DNA, 19 bp, Homo sapiens
  siRNA target sequence for LOC127262 (NM_182752.2,583-601).
gtcgtccttccttcataaa

SEQ ID NO: 273741 - DNA, 19 bp, Homo sapiens
  siRNA target sequence for LOC127262 (NM_182752.2,629-647).
gccctatgccactttcaca

SEQ ID NO: 273742 - DNA, 19 bp, Homo sapiens
  siRNA target sequence for LOC127262 (NM_182752.2,703-721).
gcttcaaggctctgttaat

SEQ ID NO: 273743 - DNA, 19 bp, Homo sapiens
  siRNA target sequence for LOC136306 (NM_174959.1,78-96).
ccgctggaaggttaatcat

SEQ ID NO: 273744 - DNA, 19 bp, Homo sapiens
  siRNA target sequence for LOC136306 (NM_174959.1,79-97).
cgctggaaggttaatcata

SEQ ID NO: 273745 - DNA, 19 bp, Homo sapiens
  siRNA target sequence for LOC136306 (NM_174959.1,80-98).
gctggaaggttaatcataa

SEQ ID NO: 273746 - DNA, 19 bp, Homo sapiens
  siRNA target sequence for LOC136306 (NM_174959.1,83-101).
ggaaggttaatcataaaga

SEQ ID NO: 273747 - DNA, 19 bp, Homo sapiens
  siRNA target sequence for LOC136306 (NM_174959.1,117-135).
cgaaataccgaggctatat

SEQ ID NO: 273748 - DNA, 19 bp, Homo sapiens
  siRNA target sequence for LOC136306 (NM_174959.1,186-204).
gcttggcctctgtgatcat

SEQ ID NO: 273749 - DNA, 19 bp, Homo sapiens
  siRNA target sequence for LOC136306 (NM_174959.1,265-283).
cgtggccttcaagtttatt

SEQ ID NO: 273750 - DNA, 19 bp, Homo sapiens
  siRNA target sequence for LOC136306 (NM_174959.1,268-286).
ggccttcaagtttattcct

SEQ ID NO: 273751 - DNA, 19 bp, Homo sapiens
  siRNA target sequence for LOC136306 (NM_174959.1,344-362).
gagcgcgttgccaagatga

SEQ ID NO: 273752 - DNA, 19 bp, Homo sapiens
  siRNA target sequence for LOC136306 (NM_174959.1,395-413).
gagcccgtcctggaaaaaa

SEQ ID NO: 273753 - DNA, 19 bp, Homo sapiens
  siRNA target sequence for LOC136306 (NM_174959.1,397-415).
gcccgtcctggaaaaaaga

SEQ ID NO: 273754 - DNA, 19 bp, Homo sapiens
  siRNA target sequence for LOC136306 (NM_174959.1,430-448).
cctattggatgctaaatat

SEQ ID NO: 273755 - DNA, 19 bp, Homo sapiens
  siRNA target sequence for LOC136306 (NM_174959.1,475-493).
catatggcttggaatctct

SEQ ID NO: 273756 - DNA, 19 bp, Homo sapiens
  siRNA target sequence for LOC136306 (NM_174959.1,631-649).
gtttgcaccctctgactat

SEQ ID NO: 273757 - DNA, 19 bp, Homo sapiens
  siRNA target sequence for LOC136306 (NM_174959.1,644-662).
gactatcggaccatgatca

SEQ ID NO: 273758 - DNA, 19 bp, Homo sapiens
  siRNA target sequence for LOC136306 (NM_174959.1,667-685).
caccatcggtgaaattgct

SEQ ID NO: 273759 - DNA, 19 bp, Homo sapiens
  siRNA target sequence for LOC136306 (NM_174959.1,726-744).
gacggctgagcctttctat

SEQ ID NO: 273760 - DNA, 19 bp, Homo sapiens
  siRNA target sequence for LOC136306 (NM_174959.1,728-746).
cggctgagcctttctatta

SEQ ID NO: 273761 - DNA, 19 bp, Homo sapiens
  siRNA target sequence for LOC136306 (NM_174959.1,731-749).
ctgagcctttctattacca

SEQ ID NO: 273762 - DNA, 19 bp, Homo sapiens
  siRNA target sequence for LOC136306 (NM_174959.1,752-770).
ggatgcacggctttattct

SEQ ID NO: 273763 - DNA, 19 bp, Homo sapiens
  siRNA target sequence for LOC136306 (NM_174959.1,753-771).
gatgcacggctttattctt

SEQ ID NO: 273764 - DNA, 19 bp, Homo sapiens
  siRNA target sequence for LOC136306 (NM_174959.1,781-799).
caacatttgcacttcaagt

SEQ ID NO: 273765 - DNA, 19 bp, Homo sapiens
  siRNA target sequence for LOC136306 (NM_174959.1,839-857).
gtagctgcaaacttcaaca

SEQ ID NO: 273766 - DNA, 19 bp, Homo sapiens
  siRNA target sequence for LOC136306 (NM_174959.1,856-874).
caccgtctacatttacaca

SEQ ID NO: 273767 - DNA, 19 bp, Homo sapiens
  siRNA target sequence for LOC136306 (NM_174959.1,1050-1068).
ctctccccatcgaaaccaa

SEQ ID NO: 273768 - DNA, 19 bp, Homo sapiens
  siRNA target sequence for LOC136306 (NM_174959.1,1076-1094).
gccctccagcaaattaaat

SEQ ID NO: 273769 - DNA, 19 bp, Homo sapiens
  siRNA target sequence for LOC138307 (NM_178469.2,407-425).
ggtgtggcctccgatcaaa

SEQ ID NO: 273770 - DNA, 19 bp, Homo sapiens
  siRNA target sequence for LOC138307 (NM_178469.2,492-510).
ccgtgaaggttgcatataa

SEQ ID NO: 273771 - DNA, 19 bp, Homo sapiens
  siRNA target sequence for LOC138307 (NM_178469.2,494-512).
gtgaaggttgcatataaca

SEQ ID NO: 273772 - DNA, 19 bp, Homo sapiens
  siRNA target sequence for LOC138307 (NM_178469.2,538-556).
gatcgtgggctcagaaata

SEQ ID NO: 273773 - DNA, 19 bp, Homo sapiens
  siRNA target sequence for LOC138307 (NM_178469.2,628-646).
cacacagctaggccttatt

SEQ ID NO: 273774 - DNA, 19 bp, Homo sapiens
  siRNA target sequence for LOC138307 (NM_178469.2,630-648).
cacagctaggccttattgt

SEQ ID NO: 273775 - DNA, 19 bp, Homo sapiens
  siRNA target sequence for LOC143425 (NM_175733.2,368-386).
ggctccgcgacccagatat

SEQ ID NO: 273776 - DNA, 19 bp, Homo sapiens
  siRNA target sequence for LOC143425 (NM_175733.2,370-388).
ctccgcgacccagatatct

SEQ ID NO: 273777 - DNA, 19 bp, Homo sapiens
  siRNA target sequence for LOC143425 (NM_175733.2,372-390).
ccgcgacccagatatctca

SEQ ID NO: 273778 - DNA, 19 bp, Homo sapiens
  siRNA target sequence for LOC143425 (NM_175733.2,439-457).
ggcgtgtctctcttcgtat

SEQ ID NO: 273779 - DNA, 19 bp, Homo sapiens
  siRNA target sequence for LOC143425 (NM_175733.2,495-513).
cctgccctctggtagcaaa

SEQ ID NO: 273780 - DNA, 19 bp, Homo sapiens
  siRNA target sequence for LOC143425 (NM_175733.2,499-517).
ccctctggtagcaaagaca

SEQ ID NO: 273781 - DNA, 19 bp, Homo sapiens
  siRNA target sequence for LOC143425 (NM_175733.2,503-521).
ctggtagcaaagacaacaa

SEQ ID NO: 273782 - DNA, 19 bp, Homo sapiens
  siRNA target sequence for LOC143425 (NM_175733.2,743-761).
caatccgaagacaactcaa

SEQ ID NO: 273783 - DNA, 19 bp, Homo sapiens
  siRNA target sequence for LOC143425 (NM_175733.2,748-766).
cgaagacaactcaacttgt

SEQ ID NO: 273784 - DNA, 19 bp, Homo sapiens
  siRNA target sequence for LOC143425 (NM_175733.2,752-770).
gacaactcaacttgtcaaa

SEQ ID NO: 273785 - DNA, 19 bp, Homo sapiens
  siRNA target sequence for LOC143425 (NM_175733.2,765-783).
gtcaaacccggacttcaat

SEQ ID NO: 273786 - DNA, 19 bp, Homo sapiens
  siRNA target sequence for LOC143425 (NM_175733.2,804-822).
ggaacagttgactggaatt

SEQ ID NO: 273787 - DNA, 19 bp, Homo sapiens
  siRNA target sequence for LOC143425 (NM_175733.2,852-870).
gaggtcattggataatgat

SEQ ID NO: 273788 - DNA, 19 bp, Homo sapiens
  siRNA target sequence for LOC143425 (NM_175733.2,871-889).
gacgggagacggagtaaca

SEQ ID NO: 273789 - DNA, 19 bp, Homo sapiens
  siRNA target sequence for LOC143425 (NM_175733.2,942-960).
gcagctcatagtgaagatt

SEQ ID NO: 273790 - DNA, 19 bp, Homo sapiens
  siRNA target sequence for LOC143425 (NM_175733.2,946-964).
ctcatagtgaagattcaca

SEQ ID NO: 273791 - DNA, 19 bp, Homo sapiens
  siRNA target sequence for LOC143425 (NM_175733.2,957-975).
gattcacaaagctgtcaat

SEQ ID NO: 273792 - DNA, 19 bp, Homo sapiens
  siRNA target sequence for LOC143425 (NM_175733.2,1089-1107).
gtttgatgaagtgttttta

SEQ ID NO: 273793 - DNA, 19 bp, Homo sapiens
  siRNA target sequence for LOC143425 (NM_175733.2,1172-1190).
ggttctctcgtcatgactt

SEQ ID NO: 273794 - DNA, 19 bp, Homo sapiens
  siRNA target sequence for LOC143425 (NM_175733.2,1173-1191).
gttctctcgtcatgactta

SEQ ID NO: 273795 - DNA, 19 bp, Homo sapiens
  siRNA target sequence for LOC143425 (NM_175733.2,1267-1285).
gaatatgtcaccaatgaca

SEQ ID NO: 273796 - DNA, 19 bp, Homo sapiens
  siRNA target sequence for LOC143425 (NM_175733.2,1333-1351).
gctggcaggctgaccatta

SEQ ID NO: 273797 - DNA, 19 bp, Homo sapiens
  siRNA target sequence for LOC143425 (NM_175733.2,1336-1354).
ggcaggctgaccattacca

SEQ ID NO: 273798 - DNA, 19 bp, Homo sapiens
  siRNA target sequence for LOC143425 (NM_175733.2,1337-1355).
gcaggctgaccattaccat

SEQ ID NO: 273799 - DNA, 19 bp, Homo sapiens
  siRNA target sequence for LOC143425 (NM_175733.2,1341-1359).
gctgaccattaccattata

SEQ ID NO: 273800 - DNA, 19 bp, Homo sapiens
  siRNA target sequence for LOC143425 (NM_175733.2,1344-1362).
gaccattaccattataaaa

SEQ ID NO: 273801 - DNA, 19 bp, Homo sapiens
  siRNA target sequence for LOC143425 (NM_175733.2,1347-1365).
cattaccattataaaagca

SEQ ID NO: 273802 - DNA, 19 bp, Homo sapiens
  siRNA target sequence for LOC143425 (NM_175733.2,1467-1485).
caagaggaacaccttgaat

SEQ ID NO: 273803 - DNA, 19 bp, Homo sapiens
  siRNA target sequence for LOC143425 (NM_175733.2,1494-1512).
caacgaagccatagtcttt

SEQ ID NO: 273804 - DNA, 19 bp, Homo sapiens
  siRNA target sequence for LOC143425 (NM_175733.2,1573-1591).
cgtgtaggtcacaatgaga

SEQ ID NO: 273805 - DNA, 19 bp, Homo sapiens
  siRNA target sequence for LOC143425 (NM_175733.2,1574-1592).
gtgtaggtcacaatgagat

SEQ ID NO: 273806 - DNA, 19 bp, Homo sapiens
  siRNA target sequence for LOC143425 (NM_175733.2,1593-1611).
catcggcgtgtgtcaagta

SEQ ID NO: 273807 - DNA, 19 bp, Homo sapiens
  siRNA target sequence for LOC143425 (NM_175733.2,1642-1660).
cactggagtgaaatgttgt

SEQ ID NO: 273808 - DNA, 19 bp, Homo sapiens
  siRNA target sequence for LOC143425 (NM_175733.2,1646-1664).
ggagtgaaatgttgtcata

SEQ ID NO: 273809 - DNA, 19 bp, Homo sapiens
  siRNA target sequence for MGC11308 (NM_032889.2,203-221).
ctgcctaccttgcttttgt

SEQ ID NO: 273810 - DNA, 19 bp, Homo sapiens
  siRNA target sequence for MGC11308 (NM_032889.2,311-329).
ggtttcaactggacttcta

SEQ ID NO: 273811 - DNA, 19 bp, Homo sapiens
  siRNA target sequence for MGC11308 (NM_032889.2,373-391).
ccctacctctataaactct

SEQ ID NO: 273812 - DNA, 19 bp, Homo sapiens
  siRNA target sequence for MGC11308 (NM_032889.2,495-513).
gctgggtcgcaagaattct

SEQ ID NO: 273813 - DNA, 19 bp, Homo sapiens
  siRNA target sequence for MGC11308 (NM_032889.2,496-514).
ctgggtcgcaagaattctt

SEQ ID NO: 273814 - DNA, 19 bp, Homo sapiens
  siRNA target sequence for MGC11308 (NM_032889.2,498-516).
gggtcgcaagaattcttgt

SEQ ID NO: 273815 - DNA, 19 bp, Homo sapiens
  siRNA target sequence for MGC11308 (NM_032889.2,631-649).
gccttcgaggcctggtata

SEQ ID NO: 273816 - DNA, 19 bp, Homo sapiens
  siRNA target sequence for MGC11308 (NM_032889.2,632-650).
ccttcgaggcctggtatat

SEQ ID NO: 273817 - DNA, 19 bp, Homo sapiens
  siRNA target sequence for MGC11308 (NM_032889.2,636-654).
cgaggcctggtatatccat

SEQ ID NO: 273818 - DNA, 19 bp, Homo sapiens
  siRNA target sequence for MGC11308 (NM_032889.2,874-892).
cggcagcgtgccttctcaa

SEQ ID NO: 273819 - DNA, 19 bp, Homo sapiens
  siRNA target sequence for MGC11308 (NM_032889.2,951-969).
caccatacaagctctattt

SEQ ID NO: 273820 - DNA, 19 bp, Homo sapiens
  siRNA target sequence for MGC11308 (NM_032889.2,953-971).
ccatacaagctctatttga

SEQ ID NO: 273821 - DNA, 19 bp, Homo sapiens
  siRNA target sequence for MGC11308 (NM_032889.2,970-988).
gagagtgtcatcttcatct

SEQ ID NO: 273822 - DNA, 19 bp, Homo sapiens
  siRNA target sequence for MGC11308 (NM_032889.2,1028-1046).
cccctctgggcattatctt

SEQ ID NO: 273823 - DNA, 19 bp, Homo sapiens
  siRNA target sequence for MGC11308 (NM_032889.2,1030-1048).
cctctgggcattatcttct

SEQ ID NO: 273824 - DNA, 19 bp, Homo sapiens
  siRNA target sequence for MGC11308 (NM_032889.2,1218-1236).
gtccttcatagcctttcta

SEQ ID NO: 273825 - DNA, 19 bp, Homo sapiens
  siRNA target sequence for MGC11308 (NM_032889.2,1228-1246).
gcctttctacttattgagt

SEQ ID NO: 273826 - DNA, 19 bp, Homo sapiens
  siRNA target sequence for MGC11308 (NM_032889.2,1248-1266).
ggcttgtggattatacttt

SEQ ID NO: 273827 - DNA, 19 bp, Homo sapiens
  siRNA target sequence for MGC11308 (NM_032889.2,1381-1399).
catgacagtgatcgaaaaa

SEQ ID NO: 273828 - DNA, 19 bp, Homo sapiens
  siRNA target sequence for MGC11308 (NM_032889.2,1402-1420).
ggcactcggaatatgttca

SEQ ID NO: 273829 - DNA, 19 bp, Homo sapiens
  siRNA target sequence for MGC33302 (NM_152778.1,137-155).
cctgcggaacgaaagtgaa

SEQ ID NO: 273830 - DNA, 19 bp, Homo sapiens
  siRNA target sequence for MGC33302 (NM_152778.1,231-249).
cgatggagatctattagga

SEQ ID NO: 273831 - DNA, 19 bp, Homo sapiens
  siRNA target sequence for MGC33302 (NM_152778.1,235-253).
ggagatctattaggatttt

SEQ ID NO: 273832 - DNA, 19 bp, Homo sapiens
  siRNA target sequence for MGC33302 (NM_152778.1,236-254).
gagatctattaggatttta

SEQ ID NO: 273833 - DNA, 19 bp, Homo sapiens
  siRNA target sequence for MGC33302 (NM_152778.1,291-309).
gtagtgatgatgtccatat

SEQ ID NO: 273834 - DNA, 19 bp, Homo sapiens
  siRNA target sequence for MGC33302 (NM_152778.1,313-331).
catatctccaaaagattga

SEQ ID NO: 273835 - DNA, 19 bp, Homo sapiens
  siRNA target sequence for MGC33302 (NM_152778.1,330-348).
gatccgacagctgatacaa

SEQ ID NO: 273836 - DNA, 19 bp, Homo sapiens
  siRNA target sequence for MGC33302 (NM_152778.1,333-351).
ccgacagctgatacaagtt

SEQ ID NO: 273837 - DNA, 19 bp, Homo sapiens
  siRNA target sequence for MGC33302 (NM_152778.1,334-352).
cgacagctgatacaagttt

SEQ ID NO: 273838 - DNA, 19 bp, Homo sapiens
  siRNA target sequence for MGC33302 (NM_152778.1,335-353).
gacagctgatacaagtttt

SEQ ID NO: 273839 - DNA, 19 bp, Homo sapiens
  siRNA target sequence for MGC33302 (NM_152778.1,362-380).
ggttattgcttcatatagt

SEQ ID NO: 273840 - DNA, 19 bp, Homo sapiens
  siRNA target sequence for MGC33302 (NM_152778.1,402-420).
cctatatttggtttatggt

SEQ ID NO: 273841 - DNA, 19 bp, Homo sapiens
  siRNA target sequence for MGC33302 (NM_152778.1,411-429).
ggtttatggtctaattata

SEQ ID NO: 273842 - DNA, 19 bp, Homo sapiens
  siRNA target sequence for MGC33302 (NM_152778.1,477-495).
gccaactgcctctatgcat

SEQ ID NO: 273843 - DNA, 19 bp, Homo sapiens
  siRNA target sequence for MGC33302 (NM_152778.1,478-496).
ccaactgcctctatgcata

SEQ ID NO: 273844 - DNA, 19 bp, Homo sapiens
  siRNA target sequence for MGC33302 (NM_152778.1,479-497).
caactgcctctatgcatat

SEQ ID NO: 273845 - DNA, 19 bp, Homo sapiens
  siRNA target sequence for MGC33302 (NM_152778.1,503-521).
catcccagcttctcataat

SEQ ID NO: 273846 - DNA, 19 bp, Homo sapiens
  siRNA target sequence for MGC33302 (NM_152778.1,506-524).
cccagcttctcataataaa

SEQ ID NO: 273847 - DNA, 19 bp, Homo sapiens
  siRNA target sequence for MGC33302 (NM_152778.1,573-591).
gtagcagttgttagatcat

SEQ ID NO: 273848 - DNA, 19 bp, Homo sapiens
  siRNA target sequence for MGC33302 (NM_152778.1,576-594).
gcagttgttagatcatata

SEQ ID NO: 273849 - DNA, 19 bp, Homo sapiens
  siRNA target sequence for MGC33302 (NM_152778.1,611-629).
ccttcaggaaagaacaagt

SEQ ID NO: 273850 - DNA, 19 bp, Homo sapiens
  siRNA target sequence for MGC33302 (NM_152778.1,631-649).
ccatggcaaacataagcat

SEQ ID NO: 273851 - DNA, 19 bp, Homo sapiens
  siRNA target sequence for MGC33302 (NM_152778.1,647-665).
catgtgtcaagcattaggt

SEQ ID NO: 273852 - DNA, 19 bp, Homo sapiens
  siRNA target sequence for MGC33302 (NM_152778.1,672-690).
ctaggtccagtttttcaga

SEQ ID NO: 273853 - DNA, 19 bp, Homo sapiens
  siRNA target sequence for MGC33302 (NM_152778.1,681-699).
gtttttcagacttgtttta

SEQ ID NO: 273854 - DNA, 19 bp, Homo sapiens
  siRNA target sequence for MGC33302 (NM_152778.1,732-750).
gtgattaaactgcagataa

SEQ ID NO: 273855 - DNA, 19 bp, Homo sapiens
  siRNA target sequence for MGC33302 (NM_152778.1,807-825).
ctgatccttgccatactaa

SEQ ID NO: 273856 - DNA, 19 bp, Homo sapiens
  siRNA target sequence for MGC33302 (NM_152778.1,809-827).
gatccttgccatactaaga

SEQ ID NO: 273857 - DNA, 19 bp, Homo sapiens
  siRNA target sequence for MGC33302 (NM_152778.1,853-871).
gacagtgtaaaagtattaa

SEQ ID NO: 273858 - DNA, 19 bp, Homo sapiens
  siRNA target sequence for MGC33302 (NM_152778.1,1035-1053).
gaacaagctgtgttatata

SEQ ID NO: 273859 - DNA, 19 bp, Homo sapiens
  siRNA target sequence for MGC33302 (NM_152778.1,1077-1095).
ggggttgaagccgttgtta

SEQ ID NO: 273860 - DNA, 19 bp, Homo sapiens
  siRNA target sequence for MGC33302 (NM_152778.1,1078-1096).
gggttgaagccgttgttat

SEQ ID NO: 273861 - DNA, 19 bp, Homo sapiens
  siRNA target sequence for MGC33302 (NM_152778.1,1105-1123).
gagttaagttgctttccaa

SEQ ID NO: 273862 - DNA, 19 bp, Homo sapiens
  siRNA target sequence for MGC33302 (NM_152778.1,1107-1125).
gttaagttgctttccaaaa

SEQ ID NO: 273863 - DNA, 19 bp, Homo sapiens
  siRNA target sequence for MGC33302 (NM_152778.1,1127-1145).
gattggcgagcgtgctatt

SEQ ID NO: 273864 - DNA, 19 bp, Homo sapiens
  siRNA target sequence for MGC33302 (NM_152778.1,1132-1150).
gcgagcgtgctattctact

SEQ ID NO: 273865 - DNA, 19 bp, Homo sapiens
  siRNA target sequence for MGC33302 (NM_152778.1,1294-1312).
ctccaatggaagatgacaa

SEQ ID NO: 273866 - DNA, 19 bp, Homo sapiens
  siRNA target sequence for MGC33302 (NM_152778.1,1324-1342).
ctggttgctcgattgaaca

SEQ ID NO: 273867 - DNA, 19 bp, Homo sapiens
  siRNA target sequence for MGC33302 (NM_152778.1,1355-1373).
ctacaccccggtgattcat

SEQ ID NO: 273868 - DNA, 19 bp, Homo sapiens
  siRNA target sequence for MGC33302 (NM_152778.1,1374-1392).
ctggcccagttccttacat

SEQ ID NO: 273869 - DNA, 19 bp, Homo sapiens
  siRNA target sequence for MGC33302 (NM_152778.1,1393-1411).
cagctgtgctaataggatt

SEQ ID NO: 273870 - DNA, 19 bp, Homo sapiens
  siRNA target sequence for MGC33302 (NM_152778.1,1431-1449).
cttatgtcctatactctat

SEQ ID NO: 273871 - DNA, 19 bp, Homo sapiens
  siRNA target sequence for MGC33302 (NM_152778.1,1436-1454).
gtcctatactctatattca

SEQ ID NO: 273872 - DNA, 19 bp, Homo sapiens
  siRNA target sequence for MGC33302 (NM_152778.1,1468-1486).
caaaacctcagggtgtata

SEQ ID NO: 273873 - DNA, 19 bp, Homo sapiens
  siRNA target sequence for MGC33302 (NM_152778.1,1482-1500).
gtatacatgggctggttaa

SEQ ID NO: 273874 - DNA, 19 bp, Homo sapiens
  siRNA target sequence for MGC33302 (NM_152778.1,1522-1540).
ggattcttgggcctatgtt

SEQ ID NO: 273875 - DNA, 19 bp, Homo sapiens
  siRNA target sequence for MGC33302 (NM_152778.1,1583-1601).
cagcctggtgtgtggaata

SEQ ID NO: 273876 - DNA, 19 bp, Homo sapiens
  siRNA target sequence for MGC33302 (NM_152778.1,1585-1603).
gcctggtgtgtggaataat

SEQ ID NO: 273877 - DNA, 19 bp, Homo sapiens
  siRNA target sequence for MGC34646 (NM_173519.1,462-480).
caagtcagggacatgatca

SEQ ID NO: 273878 - DNA, 19 bp, Homo sapiens
  siRNA target sequence for MGC34646 (NM_173519.1,465-483).
gtcagggacatgatcatca

SEQ ID NO: 273879 - DNA, 19 bp, Homo sapiens
  siRNA target sequence for MGC34646 (NM_173519.1,492-510).
gacattggatttttacgta

SEQ ID NO: 273880 - DNA, 19 bp, Homo sapiens
  siRNA target sequence for MGC34646 (NM_173519.1,520-538).
ccttcatcctgagatttct

SEQ ID NO: 273881 - DNA, 19 bp, Homo sapiens
  siRNA target sequence for MGC34646 (NM_173519.1,574-592).
gactcctggctcagtattt

SEQ ID NO: 273882 - DNA, 19 bp, Homo sapiens
  siRNA target sequence for MGC34646 (NM_173519.1,639-657).
gatgatcccggcattaaga

SEQ ID NO: 273883 - DNA, 19 bp, Homo sapiens
  siRNA target sequence for MGC34646 (NM_173519.1,793-811).
cattggaagtcctaatcga

SEQ ID NO: 273884 - DNA, 19 bp, Homo sapiens
  siRNA target sequence for MGC34646 (NM_173519.1,813-831).
gatccggagcttcagataa

SEQ ID NO: 273885 - DNA, 19 bp, Homo sapiens
  siRNA target sequence for MGC34646 (NM_173519.1,883-901).
ccaaactgacaccttcaat

SEQ ID NO: 273886 - DNA, 19 bp, Homo sapiens
  siRNA target sequence for MGC34646 (NM_173519.1,888-906).
ctgacaccttcaatcctta

SEQ ID NO: 273887 - DNA, 19 bp, Homo sapiens
  siRNA target sequence for MGC34646 (NM_173519.1,890-908).
gacaccttcaatccttaaa

SEQ ID NO: 273888 - DNA, 19 bp, Homo sapiens
  siRNA target sequence for MGC34646 (NM_173519.1,968-986).
caaccagccctggtacatt

SEQ ID NO: 273889 - DNA, 19 bp, Homo sapiens
  siRNA target sequence for MGC34646 (NM_173519.1,1000-1018).
cactcatcaagccatttct

SEQ ID NO: 273890 - DNA, 19 bp, Homo sapiens
  siRNA target sequence for MGC34646 (NM_173519.1,1047-1065).
ctgcatggaaacaatttaa

SEQ ID NO: 273891 - DNA, 19 bp, Homo sapiens
  siRNA target sequence for MGC34646 (NM_173519.1,1167-1185).
cccgactacagcgatgaaa

SEQ ID NO: 273892 - DNA, 19 bp, Homo sapiens
  siRNA target sequence for MGC34646 (NM_173519.1,1168-1186).
ccgactacagcgatgaaaa

SEQ ID NO: 273893 - DNA, 19 bp, Homo sapiens
  siRNA target sequence for MGC34646 (NM_173519.1,1169-1187).
cgactacagcgatgaaaat

SEQ ID NO: 273894 - DNA, 19 bp, Homo sapiens
  siRNA target sequence for MGC34646 (NM_173519.1,1197-1215).
cacacatcctataatgcaa

SEQ ID NO: 273895 - DNA, 19 bp, Homo sapiens
  siRNA target sequence for MGC34646 (NM_173519.1,1212-1230).
gcaatgcacgtgaagcata

SEQ ID NO: 273896 - DNA, 19 bp, Homo sapiens
  siRNA target sequence for MGC34646 (NM_173519.1,1260-1278).
cccaagctgatgaaaagat

SEQ ID NO: 273897 - DNA, 19 bp, Homo sapiens
  siRNA target sequence for MGC34646 (NM_173519.1,1262-1280).
caagctgatgaaaagatct

SEQ ID NO: 273898 - DNA, 19 bp, Homo sapiens
  siRNA target sequence for MGC34821 (NM_173586.1,481-499).
ggggagattccagatttgt

SEQ ID NO: 273899 - DNA, 19 bp, Homo sapiens
  siRNA target sequence for MGC34821 (NM_173586.1,483-501).
ggagattccagatttgtct

SEQ ID NO: 273900 - DNA, 19 bp, Homo sapiens
  siRNA target sequence for MGC34821 (NM_173586.1,529-547).
cctactgttccctaatatt

SEQ ID NO: 273901 - DNA, 19 bp, Homo sapiens
  siRNA target sequence for MGC34821 (NM_173586.1,533-551).
ctgttccctaatattgtgt

SEQ ID NO: 273902 - DNA, 19 bp, Homo sapiens
  siRNA target sequence for MGC34821 (NM_173586.1,703-721).
gtgtcagcgctttatccat

SEQ ID NO: 273903 - DNA, 19 bp, Homo sapiens
  siRNA target sequence for MGC34821 (NM_173586.1,923-941).
ctaatatatggccatcttt

SEQ ID NO: 273904 - DNA, 19 bp, Homo sapiens
  siRNA target sequence for MGC34821 (NM_173586.1,948-966).
gggttggacggaagatcat

SEQ ID NO: 273905 - DNA, 19 bp, Homo sapiens
  siRNA target sequence for MGC34821 (NM_173586.1,949-967).
ggttggacggaagatcata

SEQ ID NO: 273906 - DNA, 19 bp, Homo sapiens
  siRNA target sequence for MGC34821 (NM_173586.1,950-968).
gttggacggaagatcatat

SEQ ID NO: 273907 - DNA, 19 bp, Homo sapiens
  siRNA target sequence for MGC34821 (NM_173586.1,961-979).
gatcatatgcaaattgtgt

SEQ ID NO: 273908 - DNA, 19 bp, Homo sapiens
  siRNA target sequence for MGC34821 (NM_173586.1,986-1004).
cagctggccatctctaaca

SEQ ID NO: 273909 - DNA, 19 bp, Homo sapiens
  siRNA target sequence for MGC34821 (NM_173586.1,1123-1141).
ccggtcacgatctatgaca

SEQ ID NO: 273910 - DNA, 19 bp, Homo sapiens
  siRNA target sequence for MGC34821 (NM_173586.1,1124-1142).
cggtcacgatctatgacaa

SEQ ID NO: 273911 - DNA, 19 bp, Homo sapiens
  siRNA target sequence for MGC34821 (NM_173586.1,1125-1143).
ggtcacgatctatgacaat

SEQ ID NO: 273912 - DNA, 19 bp, Homo sapiens
  siRNA target sequence for MGC34821 (NM_173586.1,1128-1146).
cacgatctatgacaataat

SEQ ID NO: 273913 - DNA, 19 bp, Homo sapiens
  siRNA target sequence for MGC34821 (NM_173586.1,1138-1156).
gacaataatggtgctatta

SEQ ID NO: 273914 - DNA, 19 bp, Homo sapiens
  siRNA target sequence for MGC34821 (NM_173586.1,1277-1295).
gaacaatctccacattctt

SEQ ID NO: 273915 - DNA, 19 bp, Homo sapiens
  siRNA target sequence for MGC34821 (NM_173586.1,1306-1324).
cgaggctatggtagacata

SEQ ID NO: 273916 - DNA, 19 bp, Homo sapiens
  siRNA target sequence for MGC34821 (NM_173586.1,1315-1333).
ggtagacatagaaaggaaa

SEQ ID NO: 273917 - DNA, 19 bp, Homo sapiens
  siRNA target sequence for MGC34821 (NM_173586.1,1382-1400).
gatgtccatagtacctatt

SEQ ID NO: 273918 - DNA, 19 bp, Homo sapiens
  siRNA target sequence for MGC52019 (NM_178498.2,518-536).
gggcatccttcctagtctt

SEQ ID NO: 273919 - DNA, 19 bp, Homo sapiens
  siRNA target sequence for MGC52019 (NM_178498.2,529-547).
ctagtcttcttcattgctt

SEQ ID NO: 273920 - DNA, 19 bp, Homo sapiens
  siRNA target sequence for MGC52019 (NM_178498.2,534-552).
cttcttcattgcttaccta

SEQ ID NO: 273921 - DNA, 19 bp, Homo sapiens
  siRNA target sequence for MGC52019 (NM_178498.2,583-601).
ctccctgtgttctacagat

SEQ ID NO: 273922 - DNA, 19 bp, Homo sapiens
  siRNA target sequence for MGC52019 (NM_178498.2,612-630).
cagcacttatgagtactta

SEQ ID NO: 273923 - DNA, 19 bp, Homo sapiens
  siRNA target sequence for MGC52019 (NM_178498.2,614-632).
gcacttatgagtacttaca

SEQ ID NO: 273924 - DNA, 19 bp, Homo sapiens
  siRNA target sequence for MGC52019 (NM_178498.2,781-799).
ggaattgtttgcacattct

SEQ ID NO: 273925 - DNA, 19 bp, Homo sapiens
  siRNA target sequence for MGC52019 (NM_178498.2,782-800).
gaattgtttgcacattcta

SEQ ID NO: 273926 - DNA, 19 bp, Homo sapiens
  siRNA target sequence for MGC52019 (NM_178498.2,801-819).
ctgtaccctgggaggatta

SEQ ID NO: 273927 - DNA, 19 bp, Homo sapiens
  siRNA target sequence for MGC52019 (NM_178498.2,842-860).
catttcagatggttgtcat

SEQ ID NO: 273928 - DNA, 19 bp, Homo sapiens
  siRNA target sequence for MGC52019 (NM_178498.2,858-876).
catgattgtgggcttctta

SEQ ID NO: 273929 - DNA, 19 bp, Homo sapiens
  siRNA target sequence for MGC52019 (NM_178498.2,869-887).
gcttcttaacggttctcat

SEQ ID NO: 273930 - DNA, 19 bp, Homo sapiens
  siRNA target sequence for MGC52019 (NM_178498.2,870-888).
cttcttaacggttctcatt

SEQ ID NO: 273931 - DNA, 19 bp, Homo sapiens
  siRNA target sequence for MGC52019 (NM_178498.2,873-891).
cttaacggttctcattcaa

SEQ ID NO: 273932 - DNA, 19 bp, Homo sapiens
  siRNA target sequence for MGC52019 (NM_178498.2,885-903).
cattcaaggatcaactcat

SEQ ID NO: 273933 - DNA, 19 bp, Homo sapiens
  siRNA target sequence for MGC52019 (NM_178498.2,905-923).
ctgggggattccacaatgt

SEQ ID NO: 273934 - DNA, 19 bp, Homo sapiens
  siRNA target sequence for MGC52019 (NM_178498.2,922-940).
gtattagagcaatcaacaa

SEQ ID NO: 273935 - DNA, 19 bp, Homo sapiens
  siRNA target sequence for MGC52019 (NM_178498.2,928-946).
gagcaatcaacaaatggat

SEQ ID NO: 273936 - DNA, 19 bp, Homo sapiens
  siRNA target sequence for MGC52019 (NM_178498.2,943-961).
ggatctcgactacatatat

SEQ ID NO: 273937 - DNA, 19 bp, Homo sapiens
  siRNA target sequence for MGC52019 (NM_178498.2,944-962).
gatctcgactacatatatt

SEQ ID NO: 273938 - DNA, 19 bp, Homo sapiens
  siRNA target sequence for MGC52019 (NM_178498.2,947-965).
ctcgactacatatatttga

SEQ ID NO: 273939 - DNA, 19 bp, Homo sapiens
  siRNA target sequence for MGC52019 (NM_178498.2,980-998).
ctctcaggcgacacacttt

SEQ ID NO: 273940 - DNA, 19 bp, Homo sapiens
  siRNA target sequence for MGC52019 (NM_178498.2,991-1009).
cacactttttggactatca

SEQ ID NO: 273941 - DNA, 19 bp, Homo sapiens
  siRNA target sequence for MGC52019 (NM_178498.2,1037-1055).
gaatctatggggtcaatca

SEQ ID NO: 273942 - DNA, 19 bp, Homo sapiens
  siRNA target sequence for MGC52019 (NM_178498.2,1041-1059).
ctatggggtcaatcaatca

SEQ ID NO: 273943 - DNA, 19 bp, Homo sapiens
  siRNA target sequence for MGC52019 (NM_178498.2,1045-1063).
ggggtcaatcaatcaacta

SEQ ID NO: 273944 - DNA, 19 bp, Homo sapiens
  siRNA target sequence for MGC52019 (NM_178498.2,1047-1065).
ggtcaatcaatcaactatt

SEQ ID NO: 273945 - DNA, 19 bp, Homo sapiens
  siRNA target sequence for MGC52019 (NM_178498.2,1068-1086).
gcgatgcatctcttgcaaa

SEQ ID NO: 273946 - DNA, 19 bp, Homo sapiens
  siRNA target sequence for MGC52019 (NM_178498.2,1099-1117).
gctaagcttgccttgtatt

SEQ ID NO: 273947 - DNA, 19 bp, Homo sapiens
  siRNA target sequence for MGC52019 (NM_178498.2,1100-1118).
ctaagcttgccttgtattt

SEQ ID NO: 273948 - DNA, 19 bp, Homo sapiens
  siRNA target sequence for MGC52019 (NM_178498.2,1233-1251).
ccagctgatgccgtacttt

SEQ ID NO: 273949 - DNA, 19 bp, Homo sapiens
  siRNA target sequence for MGC52019 (NM_178498.2,1413-1431).
gagcacctggatcagtaaa

SEQ ID NO: 273950 - DNA, 19 bp, Homo sapiens
  siRNA target sequence for MGC52019 (NM_178498.2,1446-1464).
cagctggtggactttctat

SEQ ID NO: 273951 - DNA, 19 bp, Homo sapiens
  siRNA target sequence for MGC9564 (NM_080669.2,218-236).
cgctcaccacgcagtatct

SEQ ID NO: 273952 - DNA, 19 bp, Homo sapiens
  siRNA target sequence for MGC9564 (NM_080669.2,220-238).
ctcaccacgcagtatctgt

SEQ ID NO: 273953 - DNA, 19 bp, Homo sapiens
  siRNA target sequence for MGC9564 (NM_080669.2,252-270).
cgccgacctcggctacaat

SEQ ID NO: 273954 - DNA, 19 bp, Homo sapiens
  siRNA target sequence for MGC9564 (NM_080669.2,346-364).
cactggaccctctacatga

SEQ ID NO: 273955 - DNA, 19 bp, Homo sapiens
  siRNA target sequence for MGC9564 (NM_080669.2,477-495).
ggccctagtgtccgttttt

SEQ ID NO: 273956 - DNA, 19 bp, Homo sapiens
  siRNA target sequence for MGC9564 (NM_080669.2,479-497).
ccctagtgtccgtttttgt

SEQ ID NO: 273957 - DNA, 19 bp, Homo sapiens
  siRNA target sequence for MGC9564 (NM_080669.2,753-771).
gatagccatgactctctat

SEQ ID NO: 273958 - DNA, 19 bp, Homo sapiens
  siRNA target sequence for MGC9564 (NM_080669.2,831-849).
ccgtcaccaccgatccatt

SEQ ID NO: 273959 - DNA, 19 bp, Homo sapiens
  siRNA target sequence for MGC9564 (NM_080669.2,845-863).
ccattgtccagctctatgt

SEQ ID NO: 273960 - DNA, 19 bp, Homo sapiens
  siRNA target sequence for MGC9564 (NM_080669.2,879-897).
gaagtccaggaaacattta

SEQ ID NO: 273961 - DNA, 19 bp, Homo sapiens
  siRNA target sequence for MGC9564 (NM_080669.2,951-969).
ggacatcttaaccctttat

SEQ ID NO: 273962 - DNA, 19 bp, Homo sapiens
  siRNA target sequence for MGC9564 (NM_080669.2,987-1005).
ctgctgggactccaaacta

SEQ ID NO: 273963 - DNA, 19 bp, Homo sapiens
  siRNA target sequence for MGC9564 (NM_080669.2,989-1007).
gctgggactccaaactaat

SEQ ID NO: 273964 - DNA, 19 bp, Homo sapiens
  siRNA target sequence for MGC9564 (NM_080669.2,1175-1193).
caggatatgggttgctttt

SEQ ID NO: 273965 - DNA, 19 bp, Homo sapiens
  siRNA target sequence for MGC9564 (NM_080669.2,1255-1273).
gagcagggtgctctctttt

SEQ ID NO: 273966 - DNA, 19 bp, Homo sapiens
  siRNA target sequence for MGC9564 (NM_080669.2,1342-1360).
gccactctgaactttatga

SEQ ID NO: 273967 - DNA, 19 bp, Homo sapiens
  siRNA target sequence for MGC9564 (NM_080669.2,1398-1416).
catcccggctgttctgatt

SEQ ID NO: 273968 - DNA, 19 bp, Homo sapiens
  siRNA target sequence for MIP (NM_012064.1,558-576).
gcacctctttgggatgtat

SEQ ID NO: 273969 - DNA, 19 bp, Homo sapiens
  siRNA target sequence for MIP (NM_012064.1,562-580).
ctctttgggatgtattata

SEQ ID NO: 273970 - DNA, 19 bp, Homo sapiens
  siRNA target sequence for MIP (NM_012064.1,722-740).
ggctcaagagtatttctga

SEQ ID NO: 273971 - DNA, 19 bp, Homo sapiens
  siRNA target sequence for MIP (NM_012064.1,800-818).
caggggaacctgttgaact

SEQ ID NO: 273972 - DNA, 19 bp, Homo sapiens
  siRNA target sequence for MIP (NM_012064.1,803-821).
gggaacctgttgaactgaa

SEQ ID NO: 273973 - DNA, 19 bp, Homo sapiens
  siRNA target sequence for MTAC2D1 (NM_152332.2,240-258).
ctgtggaggatgtttctat

SEQ ID NO: 273974 - DNA, 19 bp, Homo sapiens
  siRNA target sequence for MTAC2D1 (NM_152332.2,305-323).
cagcagtcccaaatagtca

SEQ ID NO: 273975 - DNA, 19 bp, Homo sapiens
  siRNA target sequence for MTAC2D1 (NM_152332.2,307-325).
gcagtcccaaatagtcaaa

SEQ ID NO: 273976 - DNA, 19 bp, Homo sapiens
  siRNA target sequence for MTAC2D1 (NM_152332.2,312-330).
cccaaatagtcaaaatgct

SEQ ID NO: 273977 - DNA, 19 bp, Homo sapiens
  siRNA target sequence for MTAC2D1 (NM_152332.2,379-397).
ggctgtactgaggattatt

SEQ ID NO: 273978 - DNA, 19 bp, Homo sapiens
  siRNA target sequence for MTAC2D1 (NM_152332.2,413-431).
catctgatggcaaagaagt

SEQ ID NO: 273979 - DNA, 19 bp, Homo sapiens
  siRNA target sequence for MTAC2D1 (NM_152332.2,439-457).
gtggtgcccaagtttaagt

SEQ ID NO: 273980 - DNA, 19 bp, Homo sapiens
  siRNA target sequence for MTAC2D1 (NM_152332.2,441-459).
ggtgcccaagtttaagtta

SEQ ID NO: 273981 - DNA, 19 bp, Homo sapiens
  siRNA target sequence for MTAC2D1 (NM_152332.2,442-460).
gtgcccaagtttaagttat

SEQ ID NO: 273982 - DNA, 19 bp, Homo sapiens
  siRNA target sequence for MTAC2D1 (NM_152332.2,444-462).
gcccaagtttaagttatct

SEQ ID NO: 273983 - DNA, 19 bp, Homo sapiens
  siRNA target sequence for MTAC2D1 (NM_152332.2,536-554).
gagatcgaaaggtagaact

SEQ ID NO: 273984 - DNA, 19 bp, Homo sapiens
  siRNA target sequence for MTAC2D1 (NM_152332.2,538-556).
gatcgaaaggtagaacttt

SEQ ID NO: 273985 - DNA, 19 bp, Homo sapiens
  siRNA target sequence for MTAC2D1 (NM_152332.2,567-585).
ccagcacggacctagctat

SEQ ID NO: 273986 - DNA, 19 bp, Homo sapiens
  siRNA target sequence for MTAC2D1 (NM_152332.2,570-588).
gcacggacctagctatgat

SEQ ID NO: 273987 - DNA, 19 bp, Homo sapiens
  siRNA target sequence for MTAC2D1 (NM_152332.2,577-595).
cctagctatgatgtgtata

SEQ ID NO: 273988 - DNA, 19 bp, Homo sapiens
  siRNA target sequence for MTAC2D1 (NM_152332.2,578-596).
ctagctatgatgtgtataa

SEQ ID NO: 273989 - DNA, 19 bp, Homo sapiens
  siRNA target sequence for MTAC2D1 (NM_152332.2,589-607).
gtgtataacccattctata

SEQ ID NO: 273990 - DNA, 19 bp, Homo sapiens
  siRNA target sequence for MTAC2D1 (NM_152332.2,618-636).
catttcacctgatttgagt

SEQ ID NO: 273991 - DNA, 19 bp, Homo sapiens
  siRNA target sequence for MTAC2D1 (NM_152332.2,672-690).
gtatggatcggtttgtgat

SEQ ID NO: 273992 - DNA, 19 bp, Homo sapiens
  siRNA target sequence for MTAC2D1 (NM_152332.2,713-731).
gttcccctgggctaagcaa

SEQ ID NO: 273993 - DNA, 19 bp, Homo sapiens
  siRNA target sequence for MTAC2D1 (NM_152332.2,717-735).
ccctgggctaagcaaatct

SEQ ID NO: 273994 - DNA, 19 bp, Homo sapiens
  siRNA target sequence for MTAC2D1 (NM_152332.2,718-736).
cctgggctaagcaaatcta

SEQ ID NO: 273995 - DNA, 19 bp, Homo sapiens
  siRNA target sequence for MTAC2D1 (NM_152332.2,721-739).
gggctaagcaaatctatgt

SEQ ID NO: 273996 - DNA, 19 bp, Homo sapiens
  siRNA target sequence for MTAC2D1 (NM_152332.2,722-740).
ggctaagcaaatctatgtt

SEQ ID NO: 273997 - DNA, 19 bp, Homo sapiens
  siRNA target sequence for MTAC2D1 (NM_152332.2,723-741).
gctaagcaaatctatgttt

SEQ ID NO: 273998 - DNA, 19 bp, Homo sapiens
  siRNA target sequence for MTAC2D1 (NM_152332.2,792-810).
cagtgtacccagtagttct

SEQ ID NO: 273999 - DNA, 19 bp, Homo sapiens
  siRNA target sequence for MTAC2D1 (NM_152332.2,799-817).
cccagtagttcttcttcaa

SEQ ID NO: 274000 - DNA, 19 bp, Homo sapiens
  siRNA target sequence for MTAC2D1 (NM_152332.2,849-867).
ggatacaattactctatca

SEQ ID NO: 274001 - DNA, 19 bp, Homo sapiens
  siRNA target sequence for MTAC2D1 (NM_152332.2,982-1000).
ggagacactcctactgttt

SEQ ID NO: 274002 - DNA, 19 bp, Homo sapiens
  siRNA target sequence for MTAC2D1 (NM_152332.2,1060-1078).
ggttccaacgctattgaat

SEQ ID NO: 274003 - DNA, 19 bp, Homo sapiens
  siRNA target sequence for MTAC2D1 (NM_152332.2,1061-1079).
gttccaacgctattgaatt

SEQ ID NO: 274004 - DNA, 19 bp, Homo sapiens
  siRNA target sequence for MTAC2D1 (NM_152332.2,1064-1082).
ccaacgctattgaatttat

SEQ ID NO: 274005 - DNA, 19 bp, Homo sapiens
  siRNA target sequence for MTAC2D1 (NM_152332.2,1083-1101).
ggaaacgtttgtatttgct

SEQ ID NO: 274006 - DNA, 19 bp, Homo sapiens
  siRNA target sequence for MTAC2D1 (NM_152332.2,1084-1102).
gaaacgtttgtatttgcta

SEQ ID NO: 274007 - DNA, 19 bp, Homo sapiens
  siRNA target sequence for MTAC2D1 (NM_152332.2,1100-1118).
ctattaaacttcaaaatct

SEQ ID NO: 274008 - DNA, 19 bp, Homo sapiens
  siRNA target sequence for MTAC2D1 (NM_152332.2,1130-1148).
gacttgtatttaagattca

SEQ ID NO: 274009 - DNA, 19 bp, Homo sapiens
  siRNA target sequence for MTAC2D1 (NM_152332.2,1403-1421).
gctcgggagagttgattta

SEQ ID NO: 274010 - DNA, 19 bp, Homo sapiens
  siRNA target sequence for MTAC2D1 (NM_152332.2,1404-1422).
ctcgggagagttgatttat

SEQ ID NO: 274011 - DNA, 19 bp, Homo sapiens
  siRNA target sequence for MTAC2D1 (NM_152332.2,1408-1426).
ggagagttgatttataaga

SEQ ID NO: 274012 - DNA, 19 bp, Homo sapiens
  siRNA target sequence for MTAC2D1 (NM_152332.2,1441-1459).
ctgaaggcctccaatggaa

SEQ ID NO: 274013 - DNA, 19 bp, Homo sapiens
  siRNA target sequence for MTAC2D1 (NM_152332.2,1470-1488).
gggagagactatgattttt

SEQ ID NO: 274014 - DNA, 19 bp, Homo sapiens
  siRNA target sequence for MTAC2D1 (NM_152332.2,1489-1507).
ccacttatacagagtgaaa

SEQ ID NO: 274015 - DNA, 19 bp, Homo sapiens
  siRNA target sequence for MTAC2D1 (NM_152332.2,1490-1508).
cacttatacagagtgaaaa

SEQ ID NO: 274016 - DNA, 19 bp, Homo sapiens
  siRNA target sequence for MTAC2D1 (NM_152332.2,1586-1604).
gtgaagacagtaataacat

SEQ ID NO: 274017 - DNA, 19 bp, Homo sapiens
  siRNA target sequence for NOD3 (NM_178844.1,920-938).
cctgcacggacccaaagaa

SEQ ID NO: 274018 - DNA, 19 bp, Homo sapiens
  siRNA target sequence for NOD3 (NM_178844.1,1294-1312).
ctgtgcgagctctactcat

SEQ ID NO: 274019 - DNA, 19 bp, Homo sapiens
  siRNA target sequence for NOD3 (NM_178844.1,1302-1320).
gctctactcatggtacttt

SEQ ID NO: 274020 - DNA, 19 bp, Homo sapiens
  siRNA target sequence for NOD3 (NM_178844.1,1303-1321).
ctctactcatggtacttta

SEQ ID NO: 274021 - DNA, 19 bp, Homo sapiens
  siRNA target sequence for NOD3 (NM_178844.1,1600-1618).
gtggcagccgcgtattact

SEQ ID NO: 274022 - DNA, 19 bp, Homo sapiens
  siRNA target sequence for NOD3 (NM_178844.1,1602-1620).
ggcagccgcgtattactat

SEQ ID NO: 274023 - DNA, 19 bp, Homo sapiens
  siRNA target sequence for NOD3 (NM_178844.1,2571-2589).
ctccagtaatagtattggt

SEQ ID NO: 274024 - DNA, 19 bp, Homo sapiens
  siRNA target sequence for NOD3 (NM_178844.1,2731-2749).
ctcagccttcgagaaaact

SEQ ID NO: 274025 - DNA, 19 bp, Homo sapiens
  siRNA target sequence for NOD3 (NM_178844.1,2972-2990).
gcctcaccagcttagattt

SEQ ID NO: 274026 - DNA, 19 bp, Homo sapiens
  siRNA target sequence for NOD3 (NM_178844.1,3144-3162).
ggagattctcgacttaaga

SEQ ID NO: 274027 - DNA, 19 bp, Homo sapiens
  siRNA target sequence for NOD3 (NM_178844.1,3224-3242).
gtctccggagactcaatct

SEQ ID NO: 274028 - DNA, 19 bp, Homo sapiens
  siRNA target sequence for NOD3 (NM_178844.1,3228-3246).
ccggagactcaatcttcaa

SEQ ID NO: 274029 - DNA, 19 bp, Homo sapiens
  siRNA target sequence for NOD3 (NM_178844.1,3233-3251).
gactcaatcttcaagagaa

SEQ ID NO: 274030 - DNA, 19 bp, Homo sapiens
  siRNA target sequence for NOD3 (NM_178844.1,3235-3253).
ctcaatcttcaagagaatt

SEQ ID NO: 274031 - DNA, 19 bp, Homo sapiens
  siRNA target sequence for NOD3 (NM_178844.1,3306-3324).
caggctccagcatatcaat

SEQ ID NO: 274032 - DNA, 19 bp, Homo sapiens
  siRNA target sequence for NUP88 (NM_002532.3,82-100).
ctaaccacgtcgtgttctt

SEQ ID NO: 274033 - DNA, 19 bp, Homo sapiens
  siRNA target sequence for NUP88 (NM_002532.3,104-122).
gctccgggagggactgaaa

SEQ ID NO: 274034 - DNA, 19 bp, Homo sapiens
  siRNA target sequence for NUP88 (NM_002532.3,343-361).
cacccctgtttgaaatcta

SEQ ID NO: 274035 - DNA, 19 bp, Homo sapiens
  siRNA target sequence for NUP88 (NM_002532.3,347-365).
cctgtttgaaatctatcaa

SEQ ID NO: 274036 - DNA, 19 bp, Homo sapiens
  siRNA target sequence for NUP88 (NM_002532.3,368-386).
cttgttaagcccaacacaa

SEQ ID NO: 274037 - DNA, 19 bp, Homo sapiens
  siRNA target sequence for NUP88 (NM_002532.3,371-389).
gttaagcccaacacaacat

SEQ ID NO: 274038 - DNA, 19 bp, Homo sapiens
  siRNA target sequence for NUP88 (NM_002532.3,376-394).
gcccaacacaacatcatgt

SEQ ID NO: 274039 - DNA, 19 bp, Homo sapiens
  siRNA target sequence for NUP88 (NM_002532.3,393-411).
gtagcacttataggaataa

SEQ ID NO: 274040 - DNA, 19 bp, Homo sapiens
  siRNA target sequence for NUP88 (NM_002532.3,406-424).
gaataaaaggacttatggt

SEQ ID NO: 274041 - DNA, 19 bp, Homo sapiens
  siRNA target sequence for NUP88 (NM_002532.3,414-432).
ggacttatggtattagaat

SEQ ID NO: 274042 - DNA, 19 bp, Homo sapiens
  siRNA target sequence for NUP88 (NM_002532.3,415-433).
gacttatggtattagaatt

SEQ ID NO: 274043 - DNA, 19 bp, Homo sapiens
  siRNA target sequence for NUP88 (NM_002532.3,422-440).
ggtattagaattacctaaa

SEQ ID NO: 274044 - DNA, 19 bp, Homo sapiens
  siRNA target sequence for NUP88 (NM_002532.3,442-460).
gatgggggaagaattctga

SEQ ID NO: 274045 - DNA, 19 bp, Homo sapiens
  siRNA target sequence for NUP88 (NM_002532.3,499-517).
ctccagttgcggagagatt

SEQ ID NO: 274046 - DNA, 19 bp, Homo sapiens
  siRNA target sequence for NUP88 (NM_002532.3,504-522).
gttgcggagagatttttca

SEQ ID NO: 274047 - DNA, 19 bp, Homo sapiens
  siRNA target sequence for NUP88 (NM_002532.3,555-573).
gcatggtatccaagtgaaa

SEQ ID NO: 274048 - DNA, 19 bp, Homo sapiens
  siRNA target sequence for NUP88 (NM_002532.3,582-600).
ccccacgtagtgctgttaa

SEQ ID NO: 274049 - DNA, 19 bp, Homo sapiens
  siRNA target sequence for NUP88 (NM_002532.3,584-602).
ccacgtagtgctgttaaca

SEQ ID NO: 274050 - DNA, 19 bp, Homo sapiens
  siRNA target sequence for NUP88 (NM_002532.3,585-603).
cacgtagtgctgttaacat

SEQ ID NO: 274051 - DNA, 19 bp, Homo sapiens
  siRNA target sequence for NUP88 (NM_002532.3,587-605).
cgtagtgctgttaacatca

SEQ ID NO: 274052 - DNA, 19 bp, Homo sapiens
  siRNA target sequence for NUP88 (NM_002532.3,606-624).
gacaacgtaatcagaattt

SEQ ID NO: 274053 - DNA, 19 bp, Homo sapiens
  siRNA target sequence for NUP88 (NM_002532.3,646-664).
cacccactaacgtgataat

SEQ ID NO: 274054 - DNA, 19 bp, Homo sapiens
  siRNA target sequence for NUP88 (NM_002532.3,649-667).
ccactaacgtgataatact

SEQ ID NO: 274055 - DNA, 19 bp, Homo sapiens
  siRNA target sequence for NUP88 (NM_002532.3,650-668).
cactaacgtgataatactt

SEQ ID NO: 274056 - DNA, 19 bp, Homo sapiens
  siRNA target sequence for NUP88 (NM_002532.3,656-674).
cgtgataatactttcagaa

SEQ ID NO: 274057 - DNA, 19 bp, Homo sapiens
  siRNA target sequence for NUP88 (NM_002532.3,677-695).
cgaagaggaaagtctagta

SEQ ID NO: 274058 - DNA, 19 bp, Homo sapiens
  siRNA target sequence for NUP88 (NM_002532.3,710-728).
ggcgtataccgcatctcta

SEQ ID NO: 274059 - DNA, 19 bp, Homo sapiens
  siRNA target sequence for NUP88 (NM_002532.3,736-754).
cagcagttgcatttgactt

SEQ ID NO: 274060 - DNA, 19 bp, Homo sapiens
  siRNA target sequence for NUP88 (NM_002532.3,768-786).
gcagtcccaaagactctat

SEQ ID NO: 274061 - DNA, 19 bp, Homo sapiens
  siRNA target sequence for NUP88 (NM_002532.3,769-787).
cagtcccaaagactctatt

SEQ ID NO: 274062 - DNA, 19 bp, Homo sapiens
  siRNA target sequence for NUP88 (NM_002532.3,790-808).
gacaaaacggcaaagatga

SEQ ID NO: 274063 - DNA, 19 bp, Homo sapiens
  siRNA target sequence for NUP88 (NM_002532.3,816-834).
gcatacccactgtacatct

SEQ ID NO: 274064 - DNA, 19 bp, Homo sapiens
  siRNA target sequence for NUP88 (NM_002532.3,817-835).
catacccactgtacatctt

SEQ ID NO: 274065 - DNA, 19 bp, Homo sapiens
  siRNA target sequence for NUP88 (NM_002532.3,821-839).
cccactgtacatcttatat

SEQ ID NO: 274066 - DNA, 19 bp, Homo sapiens
  siRNA target sequence for NUP88 (NM_002532.3,847-865).
gagagactttcctgacata

SEQ ID NO: 274067 - DNA, 19 bp, Homo sapiens
  siRNA target sequence for NUP88 (NM_002532.3,862-880).
catacatcagtctgttaca

SEQ ID NO: 274068 - DNA, 19 bp, Homo sapiens
  siRNA target sequence for NUP88 (NM_002532.3,995-1013).
cttagtgatcgctactgaa

SEQ ID NO: 274069 - DNA, 19 bp, Homo sapiens
  siRNA target sequence for NUP88 (NM_002532.3,1136-1154).
gttggagcttgctttgaaa

SEQ ID NO: 274070 - DNA, 19 bp, Homo sapiens
  siRNA target sequence for NUP88 (NM_002532.3,1190-1208).
cttttcttgtccagtcaaa

SEQ ID NO: 274071 - DNA, 19 bp, Homo sapiens
  siRNA target sequence for NUP88 (NM_002532.3,1201-1219).
cagtcaaacttcatagaga

SEQ ID NO: 274072 - DNA, 19 bp, Homo sapiens
  siRNA target sequence for NUP88 (NM_002532.3,1221-1239).
cccaagtgtccttcaagat

SEQ ID NO: 274073 - DNA, 19 bp, Homo sapiens
  siRNA target sequence for NUP88 (NM_002532.3,1275-1293).
gggctaacttggattcata

SEQ ID NO: 274074 - DNA, 19 bp, Homo sapiens
  siRNA target sequence for NUP88 (NM_002532.3,1285-1303).
ggattcataaacttcacaa

SEQ ID NO: 274075 - DNA, 19 bp, Homo sapiens
  siRNA target sequence for NUP88 (NM_002532.3,1347-1365).
ctctctacagaacagaaat

SEQ ID NO: 274076 - DNA, 19 bp, Homo sapiens
  siRNA target sequence for NUP88 (NM_002532.3,1416-1434).
gctccaattcgaggatttt

SEQ ID NO: 274077 - DNA, 19 bp, Homo sapiens
  siRNA target sequence for NUP88 (NM_002532.3,1452-1470).
ctgggacccacgatgatct

SEQ ID NO: 274078 - DNA, 19 bp, Homo sapiens
  siRNA target sequence for NUP88 (NM_002532.3,1492-1510).
gcctcatatggccgttatt

SEQ ID NO: 274079 - DNA, 19 bp, Homo sapiens
  siRNA target sequence for NUP88 (NM_002532.3,1493-1511).
cctcatatggccgttatta

SEQ ID NO: 274080 - DNA, 19 bp, Homo sapiens
  siRNA target sequence for NUP88 (NM_002532.3,1546-1564).
gtactcgagaagatgttga

SEQ ID NO: 274081 - DNA, 19 bp, Homo sapiens
  siRNA target sequence for NUP88 (NM_002532.3,1549-1567).
ctcgagaagatgttgaagt

SEQ ID NO: 274082 - DNA, 19 bp, Homo sapiens
  siRNA target sequence for NUP88 (NM_002532.3,1631-1649).
cattttgcaacgtagtgtt

SEQ ID NO: 274083 - DNA, 19 bp, Homo sapiens
  siRNA target sequence for NUP88 (NM_002532.3,1647-1665).
gttgccaatccagcatttt

SEQ ID NO: 274084 - DNA, 19 bp, Homo sapiens
  siRNA target sequence for NUP88 (NM_002532.3,1788-1806).
cagcggagggtcaaattat

SEQ ID NO: 274085 - DNA, 19 bp, Homo sapiens
  siRNA target sequence for NUP88 (NM_002532.3,1790-1808).
gcggagggtcaaattatta

SEQ ID NO: 274086 - DNA, 19 bp, Homo sapiens
  siRNA target sequence for NUP88 (NM_002532.3,1791-1809).
cggagggtcaaattattat

SEQ ID NO: 274087 - DNA, 19 bp, Homo sapiens
  siRNA target sequence for NUP88 (NM_002532.3,1793-1811).
gagggtcaaattattatgt

SEQ ID NO: 274088 - DNA, 19 bp, Homo sapiens
  siRNA target sequence for NUP88 (NM_002532.3,1795-1813).
gggtcaaattattatgtga

SEQ ID NO: 274089 - DNA, 19 bp, Homo sapiens
  siRNA target sequence for NUP88 (NM_002532.3,1886-1904).
gcgtttagctgacaaatat

SEQ ID NO: 274090 - DNA, 19 bp, Homo sapiens
  siRNA target sequence for NUP88 (NM_002532.3,2032-2050).
ctgatcaacttcgacattt

SEQ ID NO: 274091 - DNA, 19 bp, Homo sapiens
  siRNA target sequence for NUP88 (NM_002532.3,2058-2076).
gccatcaaacaggttacta

SEQ ID NO: 274092 - DNA, 19 bp, Homo sapiens
  siRNA target sequence for NUP88 (NM_002532.3,2069-2087).
ggttactatgaaaaaggat

SEQ ID NO: 274093 - DNA, 19 bp, Homo sapiens
  siRNA target sequence for NUP88 (NM_002532.3,2121-2139).
cttccaaaacccaccatta

SEQ ID NO: 274094 - DNA, 19 bp, Homo sapiens
  siRNA target sequence for NUP88 (NM_002532.3,2154-2172).
cagcgaaagtgcattcagt

SEQ ID NO: 274095 - DNA, 19 bp, Homo sapiens
  siRNA target sequence for NUP88 (NM_002532.3,2205-2223).
gaaatggtgaagcaaatca

SEQ ID NO: 274096 - DNA, 19 bp, Homo sapiens
  siRNA target sequence for NUP88 (NM_002532.3,2226-2244).
gatatccgcaatcatgtaa

SEQ ID NO: 274097 - DNA, 19 bp, Homo sapiens
  siRNA target sequence for NUP88 (NM_002532.3,2232-2250).
cgcaatcatgtaaacttct

SEQ ID NO: 274098 - DNA, 19 bp, Homo sapiens
  siRNA target sequence for ORM1 (NM_000607.1,340-358).
gaccagtgcatctataaca

SEQ ID NO: 274099 - DNA, 19 bp, Homo sapiens
  siRNA target sequence for PACSIN2 (NM_007229.1,1228-1246).
gcccagcagcacccttaat

SEQ ID NO: 274100 - DNA, 19 bp, Homo sapiens
  siRNA target sequence for PACSIN2 (NM_007229.1,1230-1248).
ccagcagcacccttaatgt

SEQ ID NO: 274101 - DNA, 19 bp, Homo sapiens
  siRNA target sequence for PACSIN2 (NM_007229.1,1401-1419).
ggtcagacgatgagtctaa

SEQ ID NO: 274102 - DNA, 19 bp, Homo sapiens
  siRNA target sequence for PDZK1 (NM_002614.3,109-127).
cttcaacccccgagaatgt

SEQ ID NO: 274103 - DNA, 19 bp, Homo sapiens
  siRNA target sequence for PDZK1 (NM_002614.3,116-134).
ccccgagaatgtaaactgt

SEQ ID NO: 274104 - DNA, 19 bp, Homo sapiens
  siRNA target sequence for PDZK1 (NM_002614.3,159-177).
gcttcttcctgcgaattga

SEQ ID NO: 274105 - DNA, 19 bp, Homo sapiens
  siRNA target sequence for PDZK1 (NM_002614.3,203-221).
cgggtggttgagaagtgta

SEQ ID NO: 274106 - DNA, 19 bp, Homo sapiens
  siRNA target sequence for PDZK1 (NM_002614.3,232-250).
gaaggctggccttcaagat

SEQ ID NO: 274107 - DNA, 19 bp, Homo sapiens
  siRNA target sequence for PDZK1 (NM_002614.3,252-270).
gagacagagttcttaggat

SEQ ID NO: 274108 - DNA, 19 bp, Homo sapiens
  siRNA target sequence for PDZK1 (NM_002614.3,256-274).
cagagttcttaggatcaat

SEQ ID NO: 274109 - DNA, 19 bp, Homo sapiens
  siRNA target sequence for PDZK1 (NM_002614.3,267-285).
ggatcaatggtgtctttgt

SEQ ID NO: 274110 - DNA, 19 bp, Homo sapiens
  siRNA target sequence for PDZK1 (NM_002614.3,1256-1274).
ggctatggctttcacttaa

SEQ ID NO: 274111 - DNA, 19 bp, Homo sapiens
  siRNA target sequence for PPP1R9B (NM_032595.1,156-174).
caacgtccaccgcatcaaa

SEQ ID NO: 274112 - DNA, 19 bp, Homo sapiens
  siRNA target sequence for PPP1R9B (NM_032595.1,159-177).
cgtccaccgcatcaaaagt

SEQ ID NO: 274113 - DNA, 19 bp, Homo sapiens
  siRNA target sequence for PPP1R9B (NM_032595.1,160-178).
gtccaccgcatcaaaagta

SEQ ID NO: 274114 - DNA, 19 bp, Homo sapiens
  siRNA target sequence for PPP1R9B (NM_032595.1,163-181).
caccgcatcaaaagtatgt

SEQ ID NO: 274115 - DNA, 19 bp, Homo sapiens
  siRNA target sequence for PPP1R9B (NM_032595.1,1327-1345).
ccgagccggaagatccatt

SEQ ID NO: 274116 - DNA, 19 bp, Homo sapiens
  siRNA target sequence for PPP1R9B (NM_032595.1,1328-1346).
cgagccggaagatccattt

SEQ ID NO: 274117 - DNA, 19 bp, Homo sapiens
  siRNA target sequence for PPP1R9B (NM_032595.1,1376-1394).
cttactccaacgaggatta

SEQ ID NO: 274118 - DNA, 19 bp, Homo sapiens
  siRNA target sequence for PPP1R9B (NM_032595.1,1380-1398).
ctccaacgaggattacgat

SEQ ID NO: 274119 - DNA, 19 bp, Homo sapiens
  siRNA target sequence for PPP1R9B (NM_032595.1,1617-1635).
caggatccaggtgaatgat

SEQ ID NO: 274120 - DNA, 19 bp, Homo sapiens
  siRNA target sequence for PPP1R9B (NM_032595.1,1619-1637).
ggatccaggtgaatgatct

SEQ ID NO: 274121 - DNA, 19 bp, Homo sapiens
  siRNA target sequence for PPP1R9B (NM_032595.1,1644-1662).
ggaggtggatggaacaagt

SEQ ID NO: 274122 - DNA, 19 bp, Homo sapiens
  siRNA target sequence for PPP1R9B (NM_032595.1,1717-1735).
cgagtgcggtgcaggttta

SEQ ID NO: 274123 - DNA, 19 bp, Homo sapiens
  siRNA target sequence for PPP1R9B (NM_032595.1,1718-1736).
gagtgcggtgcaggtttat

SEQ ID NO: 274124 - DNA, 19 bp, Homo sapiens
  siRNA target sequence for PPP1R9B (NM_032595.1,1720-1738).
gtgcggtgcaggtttatga

SEQ ID NO: 274125 - DNA, 19 bp, Homo sapiens
  siRNA target sequence for PPP1R9B (NM_032595.1,1722-1740).
gcggtgcaggtttatgatt

SEQ ID NO: 274126 - DNA, 19 bp, Homo sapiens
  siRNA target sequence for PPP1R9B (NM_032595.1,1766-1784).
gcgaagtggcccagctaat

SEQ ID NO: 274127 - DNA, 19 bp, Homo sapiens
  siRNA target sequence for PPP1R9B (NM_032595.1,2431-2449).
ctgaggaattccaattcta

SEQ ID NO: 274128 - DNA, 19 bp, Homo sapiens
  siRNA target sequence for PPP1R9B (NM_032595.1,2433-2451).
gaggaattccaattctact

SEQ ID NO: 274129 - DNA, 19 bp, Homo sapiens
  siRNA target sequence for SEC22L2 (NM_012430.2,120-138).
cttctactgattatgaaca

SEQ ID NO: 274130 - DNA, 19 bp, Homo sapiens
  siRNA target sequence for SEC22L2 (NM_012430.2,194-212).
gctcaacttcctgatagat

SEQ ID NO: 274131 - DNA, 19 bp, Homo sapiens
  siRNA target sequence for SEC22L2 (NM_012430.2,197-215).
caacttcctgatagatgta

SEQ ID NO: 274132 - DNA, 19 bp, Homo sapiens
  siRNA target sequence for SEC22L2 (NM_012430.2,227-245).
ggacattataacattaatt

SEQ ID NO: 274133 - DNA, 19 bp, Homo sapiens
  siRNA target sequence for SEC22L2 (NM_012430.2,329-347).
cttcagaaggagttcatta

SEQ ID NO: 274134 - DNA, 19 bp, Homo sapiens
  siRNA target sequence for SEC22L2 (NM_012430.2,332-350).
cagaaggagttcattacta

SEQ ID NO: 274135 - DNA, 19 bp, Homo sapiens
  siRNA target sequence for SEC22L2 (NM_012430.2,337-355).
ggagttcattactacttat

SEQ ID NO: 274136 - DNA, 19 bp, Homo sapiens
  siRNA target sequence for SEC22L2 (NM_012430.2,377-395).
gctgtcagaccatactgtt

SEQ ID NO: 274137 - DNA, 19 bp, Homo sapiens
  siRNA target sequence for SEC22L2 (NM_012430.2,380-398).
gtcagaccatactgtttca

SEQ ID NO: 274138 - DNA, 19 bp, Homo sapiens
  siRNA target sequence for SEC22L2 (NM_012430.2,384-402).
gaccatactgtttcattga

SEQ ID NO: 274139 - DNA, 19 bp, Homo sapiens
  siRNA target sequence for SEC22L2 (NM_012430.2,423-441).
ggaccaagcagcgatataa

SEQ ID NO: 274140 - DNA, 19 bp, Homo sapiens
  siRNA target sequence for SEC22L2 (NM_012430.2,424-442).
gaccaagcagcgatataat

SEQ ID NO: 274141 - DNA, 19 bp, Homo sapiens
  siRNA target sequence for SEC22L2 (NM_012430.2,426-444).
ccaagcagcgatataataa

SEQ ID NO: 274142 - DNA, 19 bp, Homo sapiens
  siRNA target sequence for SEC22L2 (NM_012430.2,496-514).
caagctgaggcctccttat

SEQ ID NO: 274143 - DNA, 19 bp, Homo sapiens
  siRNA target sequence for SEC22L2 (NM_012430.2,502-520).
gaggcctccttatcaaatt

SEQ ID NO: 274144 - DNA, 19 bp, Homo sapiens
  siRNA target sequence for SEC22L2 (NM_012430.2,507-525).
ctccttatcaaatttccat

SEQ ID NO: 274145 - DNA, 19 bp, Homo sapiens
  siRNA target sequence for SEC22L2 (NM_012430.2,548-566).
ggagtcacatcagcatttt

SEQ ID NO: 274146 - DNA, 19 bp, Homo sapiens
  siRNA target sequence for SEC22L2 (NM_012430.2,631-649).
gtcagggattgtaggattt

SEQ ID NO: 274147 - DNA, 19 bp, Homo sapiens
  siRNA target sequence for SEC22L2 (NM_012430.2,633-651).
cagggattgtaggatttat

SEQ ID NO: 274148 - DNA, 19 bp, Homo sapiens
  siRNA target sequence for SEC22L2 (NM_012430.2,644-662).
ggatttatccttagtcttt

SEQ ID NO: 274149 - DNA, 19 bp, Homo sapiens
  siRNA target sequence for SEC22L2 (NM_012430.2,645-663).
gatttatccttagtctttt

SEQ ID NO: 274150 - DNA, 19 bp, Homo sapiens
  siRNA target sequence for SEC22L2 (NM_012430.2,716-734).
cagagtgatggtgatgatt

SEQ ID NO: 274151 - DNA, 19 bp, Homo sapiens
  siRNA target sequence for SEC22L2 (NM_012430.2,775-793).
cctttaccagtgttattta

SEQ ID NO: 274152 - DNA, 19 bp, Homo sapiens
  siRNA target sequence for SEC22L2 (NM_012430.2,786-804).
gttatttacttgtctacta

SEQ ID NO: 274153 - DNA, 19 bp, Homo sapiens
  siRNA target sequence for SEC22L2 (NM_012430.2,809-827).
ggctggcggaatgtcaaat

SEQ ID NO: 274154 - DNA, 19 bp, Homo sapiens
  siRNA target sequence for SEC22L2 (NM_012430.2,811-829).
ctggcggaatgtcaaatct

SEQ ID NO: 274155 - DNA, 19 bp, Homo sapiens
  siRNA target sequence for SEC22L2 (NM_012430.2,813-831).
ggcggaatgtcaaatcttt

SEQ ID NO: 274156 - DNA, 19 bp, Homo sapiens
  siRNA target sequence for SEC22L2 (NM_012430.2,814-832).
gcggaatgtcaaatctttt

SEQ ID NO: 274157 - DNA, 19 bp, Homo sapiens
  siRNA target sequence for SEC22L2 (NM_012430.2,816-834).
ggaatgtcaaatctttttt

SEQ ID NO: 274158 - DNA, 19 bp, Homo sapiens
  siRNA target sequence for SEC22L2 (NM_012430.2,843-861).
gcttaatctgtctatgcaa

SEQ ID NO: 274159 - DNA, 19 bp, Homo sapiens
  siRNA target sequence for SEC22L2 (NM_012430.2,852-870).
gtctatgcaacatgtatct

SEQ ID NO: 274160 - DNA, 19 bp, Homo sapiens
  siRNA target sequence for SEC22L2 (NM_012430.2,916-934).
gggagcatttgttacacta

SEQ ID NO: 274161 - DNA, 19 bp, Homo sapiens
  siRNA target sequence for SEC22L2 (NM_012430.2,958-976).
gggcaaggctcccgattat

SEQ ID NO: 274162 - DNA, 19 bp, Homo sapiens
  siRNA target sequence for SEC22L2 (NM_012430.2,960-978).
gcaaggctcccgattatga

SEQ ID NO: 274163 - DNA, 19 bp, Homo sapiens
  siRNA target sequence for SEC22L2 (NM_012430.2,961-979).
caaggctcccgattatgat

SEQ ID NO: 274164 - DNA, 19 bp, Homo sapiens
  siRNA target sequence for SLC13A5 (NM_177550.2,461-479).
ccatcgtggaggccatatt

SEQ ID NO: 274165 - DNA, 19 bp, Homo sapiens
  siRNA target sequence for SLC13A5 (NM_177550.2,555-573).
gccagggagtcaagtgatt

SEQ ID NO: 274166 - DNA, 19 bp, Homo sapiens
  siRNA target sequence for SLC13A5 (NM_177550.2,610-628).
gagcggaagaggttgtgta

SEQ ID NO: 274167 - DNA, 19 bp, Homo sapiens
  siRNA target sequence for SLC13A5 (NM_177550.2,743-761).
gcaaggacctcgtgaactt

SEQ ID NO: 274168 - DNA, 19 bp, Homo sapiens
  siRNA target sequence for SLC13A5 (NM_177550.2,748-766).
gacctcgtgaactttgctt

SEQ ID NO: 274169 - DNA, 19 bp, Homo sapiens
  siRNA target sequence for SLC13A5 (NM_177550.2,1051-1069).
gtggagggtgagacaaagt

SEQ ID NO: 274170 - DNA, 19 bp, Homo sapiens
  siRNA target sequence for SLC13A5 (NM_177550.2,1053-1071).
ggagggtgagacaaagtat

SEQ ID NO: 274171 - DNA, 19 bp, Homo sapiens
  siRNA target sequence for SLC13A5 (NM_177550.2,1057-1075).
ggtgagacaaagtatgtct

SEQ ID NO: 274172 - DNA, 19 bp, Homo sapiens
  siRNA target sequence for SLC13A5 (NM_177550.2,1127-1145).
cacagaagcccaagtttaa

SEQ ID NO: 274173 - DNA, 19 bp, Homo sapiens
  siRNA target sequence for SLC13A5 (NM_177550.2,1129-1147).
cagaagcccaagtttaact

SEQ ID NO: 274174 - DNA, 19 bp, Homo sapiens
  siRNA target sequence for SLC13A5 (NM_177550.2,1463-1481).
gcctcaatccgctgtacat

SEQ ID NO: 274175 - DNA, 19 bp, Homo sapiens
  siRNA target sequence for SLC13A5 (NM_177550.2,1465-1483).
ctcaatccgctgtacatca

SEQ ID NO: 274176 - DNA, 19 bp, Homo sapiens
  siRNA target sequence for SLC13A5 (NM_177550.2,1597-1615).
ggagtcataatgaacataa

SEQ ID NO: 274177 - DNA, 19 bp, Homo sapiens
  siRNA target sequence for SLC13A5 (NM_177550.2,1598-1616).
gagtcataatgaacataat

SEQ ID NO: 274178 - DNA, 19 bp, Homo sapiens
  siRNA target sequence for SLC13A5 (NM_177550.2,1652-1670).
ggggacgggccatatttga

SEQ ID NO: 274179 - DNA, 19 bp, Homo sapiens
  siRNA target sequence for SLC13A5 (NM_177550.2,1654-1672).
ggacgggccatatttgact

SEQ ID NO: 274180 - DNA, 19 bp, Homo sapiens
  siRNA target sequence for SLC13A5 (NM_177550.2,1655-1673).
gacgggccatatttgactt

SEQ ID NO: 274181 - DNA, 19 bp, Homo sapiens
  siRNA target sequence for SLC15A3 (NM_016582.1,876-894).
gctggtggtggcgtttatt

SEQ ID NO: 274182 - DNA, 19 bp, Homo sapiens
  siRNA target sequence for SLC15A3 (NM_016582.1,1263-1281).
cctccacatcccaaacatt

SEQ ID NO: 274183 - DNA, 19 bp, Homo sapiens
  siRNA target sequence for SLC15A3 (NM_016582.1,1409-1427).
gcttgatcgaccctttact

SEQ ID NO: 274184 - DNA, 19 bp, Homo sapiens
  siRNA target sequence for SLC15A3 (NM_016582.1,1487-1505).
gttttacctccgtcattgt

SEQ ID NO: 274185 - DNA, 19 bp, Homo sapiens
  siRNA target sequence for SLC15A3 (NM_016582.1,1841-1859).
gccggatggacctctactt

SEQ ID NO: 274186 - DNA, 19 bp, Homo sapiens
  siRNA target sequence for SLC15A3 (NM_016582.1,1843-1861).
cggatggacctctacttct

SEQ ID NO: 274187 - DNA, 19 bp, Homo sapiens
  siRNA target sequence for SLC15A3 (NM_016582.1,1844-1862).
ggatggacctctacttctt

SEQ ID NO: 274188 - DNA, 19 bp, Homo sapiens
  siRNA target sequence for SLC15A3 (NM_016582.1,1883-1901).
ccgtcacggctctcctatt

SEQ ID NO: 274189 - DNA, 19 bp, Homo sapiens
  siRNA target sequence for SLC15A3 (NM_016582.1,1884-1902).
cgtcacggctctcctattt

SEQ ID NO: 274190 - DNA, 19 bp, Homo sapiens
  siRNA target sequence for SLC17A6 (NM_020346.1,455-473).
ggggctaaagaattttgct

SEQ ID NO: 274191 - DNA, 19 bp, Homo sapiens
  siRNA target sequence for SLC17A6 (NM_020346.1,791-809).
gatccacggttccttcttt

SEQ ID NO: 274192 - DNA, 19 bp, Homo sapiens
  siRNA target sequence for SLC17A6 (NM_020346.1,879-897).
ggagctgccatacttctta

SEQ ID NO: 274193 - DNA, 19 bp, Homo sapiens
  siRNA target sequence for SLC17A6 (NM_020346.1,894-912).
cttacctctaccctaaata

SEQ ID NO: 274194 - DNA, 19 bp, Homo sapiens
  siRNA target sequence for SLC17A6 (NM_020346.1,898-916).
cctctaccctaaatatgct

SEQ ID NO: 274195 - DNA, 19 bp, Homo sapiens
  siRNA target sequence for SLC17A6 (NM_020346.1,899-917).
ctctaccctaaatatgcta

SEQ ID NO: 274196 - DNA, 19 bp, Homo sapiens
  siRNA target sequence for SLC17A6 (NM_020346.1,1055-1073).
ggcaaccacctccttttgt

SEQ ID NO: 274197 - DNA, 19 bp, Homo sapiens
  siRNA target sequence for SLC17A6 (NM_020346.1,1079-1097).
ctatgccggagctgtgatt

SEQ ID NO: 274198 - DNA, 19 bp, Homo sapiens
  siRNA target sequence for SLC17A6 (NM_020346.1,1084-1102).
ccggagctgtgattgcaat

SEQ ID NO: 274199 - DNA, 19 bp, Homo sapiens
  siRNA target sequence for SLC17A6 (NM_020346.1,1094-1112).
gattgcaatgcctttagct

SEQ ID NO: 274200 - DNA, 19 bp, Homo sapiens
  siRNA target sequence for SLC17A6 (NM_020346.1,1103-1121).
gcctttagctggcattctt

SEQ ID NO: 274201 - DNA, 19 bp, Homo sapiens
  siRNA target sequence for SLC17A6 (NM_020346.1,1155-1173).
gtctacggaagctttggaa

SEQ ID NO: 274202 - DNA, 19 bp, Homo sapiens
  siRNA target sequence for SLC17A6 (NM_020346.1,1170-1188).
ggaatggtctggtacatgt

SEQ ID NO: 274203 - DNA, 19 bp, Homo sapiens
  siRNA target sequence for SLC17A6 (NM_020346.1,1171-1189).
gaatggtctggtacatgtt

SEQ ID NO: 274204 - DNA, 19 bp, Homo sapiens
  siRNA target sequence for SLC17A6 (NM_020346.1,1218-1236).
gcaaagcatcctactatta

SEQ ID NO: 274205 - DNA, 19 bp, Homo sapiens
  siRNA target sequence for SLC17A6 (NM_020346.1,1223-1241).
gcatcctactattacagat

SEQ ID NO: 274206 - DNA, 19 bp, Homo sapiens
  siRNA target sequence for SLC17A6 (NM_020346.1,1252-1270).
ggtacatagaagaaagcat

SEQ ID NO: 274207 - DNA, 19 bp, Homo sapiens
  siRNA target sequence for SLC17A6 (NM_020346.1,1268-1286).
cattggagagagtgcaaat

SEQ ID NO: 274208 - DNA, 19 bp, Homo sapiens
  siRNA target sequence for SLC17A6 (NM_020346.1,1287-1305).
cttttaggtgcaatggaaa

SEQ ID NO: 274209 - DNA, 19 bp, Homo sapiens
  siRNA target sequence for SLC17A6 (NM_020346.1,1343-1361).
gccagtctatgcaataatt

SEQ ID NO: 274210 - DNA, 19 bp, Homo sapiens
  siRNA target sequence for SLC17A6 (NM_020346.1,1468-1486).
ctgctgtgccacacttagt

SEQ ID NO: 274211 - DNA, 19 bp, Homo sapiens
  siRNA target sequence for SLC17A6 (NM_020346.1,1471-1489).
ctgtgccacacttagtaat

SEQ ID NO: 274212 - DNA, 19 bp, Homo sapiens
  siRNA target sequence for SLC17A6 (NM_020346.1,1473-1491).
gtgccacacttagtaatga

SEQ ID NO: 274213 - DNA, 19 bp, Homo sapiens
  siRNA target sequence for SLC17A6 (NM_020346.1,1476-1494).
ccacacttagtaatgacaa

SEQ ID NO: 274214 - DNA, 19 bp, Homo sapiens
  siRNA target sequence for SLC17A6 (NM_020346.1,1477-1495).
cacacttagtaatgacaat

SEQ ID NO: 274215 - DNA, 19 bp, Homo sapiens
  siRNA target sequence for SLC17A6 (NM_020346.1,1479-1497).
cacttagtaatgacaatta

SEQ ID NO: 274216 - DNA, 19 bp, Homo sapiens
  siRNA target sequence for SLC17A6 (NM_020346.1,1613-1631).
cctggtcgttggctattct

SEQ ID NO: 274217 - DNA, 19 bp, Homo sapiens
  siRNA target sequence for SLC17A6 (NM_020346.1,1616-1634).
ggtcgttggctattctcat

SEQ ID NO: 274218 - DNA, 19 bp, Homo sapiens
  siRNA target sequence for SLC17A6 (NM_020346.1,1617-1635).
gtcgttggctattctcata

SEQ ID NO: 274219 - DNA, 19 bp, Homo sapiens
  siRNA target sequence for SLC17A6 (NM_020346.1,1641-1659).
ggggtagcaatctcattct

SEQ ID NO: 274220 - DNA, 19 bp, Homo sapiens
  siRNA target sequence for SLC17A6 (NM_020346.1,1642-1660).
gggtagcaatctcattctt

SEQ ID NO: 274221 - DNA, 19 bp, Homo sapiens
  siRNA target sequence for SLC17A6 (NM_020346.1,1673-1691).
gggattcagtggatttgct

SEQ ID NO: 274222 - DNA, 19 bp, Homo sapiens
  siRNA target sequence for SLC17A6 (NM_020346.1,1679-1697).
cagtggatttgctatatct

SEQ ID NO: 274223 - DNA, 19 bp, Homo sapiens
  siRNA target sequence for SLC17A6 (NM_020346.1,1728-1746).
ccaagatatgccagtatct

SEQ ID NO: 274224 - DNA, 19 bp, Homo sapiens
  siRNA target sequence for SLC17A6 (NM_020346.1,1745-1763).
cttaatgggcatttcgaat

SEQ ID NO: 274225 - DNA, 19 bp, Homo sapiens
  siRNA target sequence for SLC17A6 (NM_020346.1,1783-1801).
gaatggtttgtcctatcat

SEQ ID NO: 274226 - DNA, 19 bp, Homo sapiens
  siRNA target sequence for SLC17A6 (NM_020346.1,1787-1805).
ggtttgtcctatcattgtt

SEQ ID NO: 274227 - DNA, 19 bp, Homo sapiens
  siRNA target sequence for SLC17A6 (NM_020346.1,1833-1851).
gaagagtggcagtatgtct

SEQ ID NO: 274228 - DNA, 19 bp, Homo sapiens
  siRNA target sequence for SLC17A6 (NM_020346.1,1871-1889).
ccactatggtggagttata

SEQ ID NO: 274229 - DNA, 19 bp, Homo sapiens
  siRNA target sequence for SLC17A6 (NM_020346.1,1872-1890).
cactatggtggagttatat

SEQ ID NO: 274230 - DNA, 19 bp, Homo sapiens
  siRNA target sequence for SLC17A6 (NM_020346.1,1874-1892).
ctatggtggagttatattt

SEQ ID NO: 274231 - DNA, 19 bp, Homo sapiens
  siRNA target sequence for SLC17A6 (NM_020346.1,1960-1978).
gtggatttattcatgaaga

SEQ ID NO: 274232 - DNA, 19 bp, Homo sapiens
  siRNA target sequence for SLC17A6 (NM_020346.1,1989-2007).
gaagaaacaggggacatta

SEQ ID NO: 274233 - DNA, 19 bp, Homo sapiens
  siRNA target sequence for SLC17A6 (NM_020346.1,2115-2133).
gaagtacaagactcacata

SEQ ID NO: 274234 - DNA, 19 bp, Homo sapiens
  siRNA target sequence for SLC17A6 (NM_020346.1,2121-2139).
caagactcacatagctata

SEQ ID NO: 274235 - DNA, 19 bp, Homo sapiens
  siRNA target sequence for SLC17A6 (NM_020346.1,2135-2153).
ctataaggaccgagttgat

SEQ ID NO: 274236 - DNA, 19 bp, Homo sapiens
  siRNA target sequence for SLC17A8 (NM_139319.1,242-260).
gaacgccgtgggagattct

SEQ ID NO: 274237 - DNA, 19 bp, Homo sapiens
  siRNA target sequence for SLC17A8 (NM_139319.1,390-408).
ctccccaagcgttacatca

SEQ ID NO: 274238 - DNA, 19 bp, Homo sapiens
  siRNA target sequence for SLC17A8 (NM_139319.1,392-410).
ccccaagcgttacatcatt

SEQ ID NO: 274239 - DNA, 19 bp, Homo sapiens
  siRNA target sequence for SLC17A8 (NM_139319.1,488-506).
caacaatagcaccgtatat

SEQ ID NO: 274240 - DNA, 19 bp, Homo sapiens
  siRNA target sequence for SLC17A8 (NM_139319.1,491-509).
caatagcaccgtatatgtt

SEQ ID NO: 274241 - DNA, 19 bp, Homo sapiens
  siRNA target sequence for SLC17A8 (NM_139319.1,499-517).
ccgtatatgttgatggaaa

SEQ ID NO: 274242 - DNA, 19 bp, Homo sapiens
  siRNA target sequence for SLC17A8 (NM_139319.1,528-546).
cagacagcacagtttaact

SEQ ID NO: 274243 - DNA, 19 bp, Homo sapiens
  siRNA target sequence for SLC17A8 (NM_139319.1,566-584).
ccttatccatggatctttt

SEQ ID NO: 274244 - DNA, 19 bp, Homo sapiens
  siRNA target sequence for SLC17A8 (NM_139319.1,591-609).
ggctatattatgacacaaa

SEQ ID NO: 274245 - DNA, 19 bp, Homo sapiens
  siRNA target sequence for SLC17A8 (NM_139319.1,727-745).
gcgtcatgtgtgtcagaat

SEQ ID NO: 274246 - DNA, 19 bp, Homo sapiens
  siRNA target sequence for SLC17A8 (NM_139319.1,728-746).
cgtcatgtgtgtcagaatt

SEQ ID NO: 274247 - DNA, 19 bp, Homo sapiens
  siRNA target sequence for SLC17A8 (NM_139319.1,892-910).
gggtgttggtgcagtacat

SEQ ID NO: 274248 - DNA, 19 bp, Homo sapiens
  siRNA target sequence for SLC17A8 (NM_139319.1,893-911).
ggtgttggtgcagtacatt

SEQ ID NO: 274249 - DNA, 19 bp, Homo sapiens
  siRNA target sequence for SLC17A8 (NM_139319.1,912-930).
ggatggtcctctgtctttt

SEQ ID NO: 274250 - DNA, 19 bp, Homo sapiens
  siRNA target sequence for SLC17A8 (NM_139319.1,916-934).
ggtcctctgtcttttatat

SEQ ID NO: 274251 - DNA, 19 bp, Homo sapiens
  siRNA target sequence for SLC17A8 (NM_139319.1,949-967).
ggattatttggtacatgtt

SEQ ID NO: 274252 - DNA, 19 bp, Homo sapiens
  siRNA target sequence for SLC17A8 (NM_139319.1,996-1014).
gcagctcatccaacaatat

SEQ ID NO: 274253 - DNA, 19 bp, Homo sapiens
  siRNA target sequence for SLC17A8 (NM_139319.1,999-1017).
gctcatccaacaatatcca

SEQ ID NO: 274254 - DNA, 19 bp, Homo sapiens
  siRNA target sequence for SLC17A8 (NM_139319.1,1058-1076).
ggccaacgtggttagtcta

SEQ ID NO: 274255 - DNA, 19 bp, Homo sapiens
  siRNA target sequence for SLC17A8 (NM_139319.1,1059-1077).
gccaacgtggttagtctaa

SEQ ID NO: 274256 - DNA, 19 bp, Homo sapiens
  siRNA target sequence for SLC17A8 (NM_139319.1,1061-1079).
caacgtggttagtctaagt

SEQ ID NO: 274257 - DNA, 19 bp, Homo sapiens
  siRNA target sequence for SLC17A8 (NM_139319.1,1064-1082).
cgtggttagtctaagtaaa

SEQ ID NO: 274258 - DNA, 19 bp, Homo sapiens
  siRNA target sequence for SLC17A8 (NM_139319.1,1065-1083).
gtggttagtctaagtaaat

SEQ ID NO: 274259 - DNA, 19 bp, Homo sapiens
  siRNA target sequence for SLC17A8 (NM_139319.1,1156-1174).
gctggaccttttatttgct

SEQ ID NO: 274260 - DNA, 19 bp, Homo sapiens
  siRNA target sequence for SLC17A8 (NM_139319.1,1245-1263).
gcagtcccacacatggtta

SEQ ID NO: 274261 - DNA, 19 bp, Homo sapiens
  siRNA target sequence for SLC17A8 (NM_139319.1,1246-1264).
cagtcccacacatggttat

SEQ ID NO: 274262 - DNA, 19 bp, Homo sapiens
  siRNA target sequence for SLC17A8 (NM_139319.1,1248-1266).
gtcccacacatggttatga

SEQ ID NO: 274263 - DNA, 19 bp, Homo sapiens
  siRNA target sequence for SLC17A8 (NM_139319.1,1250-1268).
cccacacatggttatgaca

SEQ ID NO: 274264 - DNA, 19 bp, Homo sapiens
  siRNA target sequence for SLC17A8 (NM_139319.1,1256-1274).
catggttatgacaatcgtt

SEQ ID NO: 274265 - DNA, 19 bp, Homo sapiens
  siRNA target sequence for SLC17A8 (NM_139319.1,1265-1283).
gacaatcgttgtacctatt

SEQ ID NO: 274266 - DNA, 19 bp, Homo sapiens
  siRNA target sequence for SLC17A8 (NM_139319.1,1285-1303).
gaggacaattggctgatta

SEQ ID NO: 274267 - DNA, 19 bp, Homo sapiens
  siRNA target sequence for SLC17A8 (NM_139319.1,1460-1478).
cttcgctatttcaggtttt

SEQ ID NO: 274268 - DNA, 19 bp, Homo sapiens
  siRNA target sequence for SLC17A8 (NM_139319.1,1463-1481).
cgctatttcaggttttaat

SEQ ID NO: 274269 - DNA, 19 bp, Homo sapiens
  siRNA target sequence for SLC17A8 (NM_139319.1,1635-1653).
gctgccctggtgcattaca

SEQ ID NO: 274270 - DNA, 19 bp, Homo sapiens
  siRNA target sequence for SLC17A8 (NM_139319.1,1702-1720).
gggctgacccagagaatct

SEQ ID NO: 274271 - DNA, 19 bp, Homo sapiens
  siRNA target sequence for SLC17A8 (NM_139319.1,1727-1745).
ggagaaatgtggaatcatt

SEQ ID NO: 274272 - DNA, 19 bp, Homo sapiens
  siRNA target sequence for SLC17A8 (NM_139319.1,1742-1760).
cattgaccaggacgaatta

SEQ ID NO: 274273 - DNA, 19 bp, Homo sapiens
  siRNA target sequence for SLC17A8 (NM_139319.1,1789-1807).
gttttgcgagtcccaaaaa

SEQ ID NO: 274274 - DNA, 19 bp, Homo sapiens
  siRNA target sequence for SLC17A8 (NM_139319.1,1873-1891).
gaggagcgacccttgatga

SEQ ID NO: 274275 - DNA, 19 bp, Homo sapiens
  siRNA target sequence for SLC17A8 (NM_139319.1,1901-1919).
gacatcctaccagaatgaa

SEQ ID NO: 274276 - DNA, 19 bp, Homo sapiens
  siRNA target sequence for SLC22A12 (NM_144585.2,955-973).
gaggccctcctggctattt

SEQ ID NO: 274277 - DNA, 19 bp, Homo sapiens
  siRNA target sequence for SLC22A12 (NM_144585.2,1378-1396).
gcaggcgtcatgatgaaca

SEQ ID NO: 274278 - DNA, 19 bp, Homo sapiens
  siRNA target sequence for SLC22A12 (NM_144585.2,2018-2036).
cgctggtgccccacgaaat

SEQ ID NO: 274279 - DNA, 19 bp, Homo sapiens
  siRNA target sequence for SLC22A15 (NM_018420.1,169-187).
ggcatctaccagatgtact

SEQ ID NO: 274280 - DNA, 19 bp, Homo sapiens
  siRNA target sequence for SLC22A15 (NM_018420.1,170-188).
gcatctaccagatgtactt

SEQ ID NO: 274281 - DNA, 19 bp, Homo sapiens
  siRNA target sequence for SLC22A15 (NM_018420.1,371-389).
gcagtgagatccataagca

SEQ ID NO: 274282 - DNA, 19 bp, Homo sapiens
  siRNA target sequence for SLC22A15 (NM_018420.1,420-438).
cgcctcggagtggttttta

SEQ ID NO: 274283 - DNA, 19 bp, Homo sapiens
  siRNA target sequence for SLC22A15 (NM_018420.1,422-440).
cctcggagtggtttttaat

SEQ ID NO: 274284 - DNA, 19 bp, Homo sapiens
  siRNA target sequence for SLC22A15 (NM_018420.1,423-441).
ctcggagtggtttttaatt

SEQ ID NO: 274285 - DNA, 19 bp, Homo sapiens
  siRNA target sequence for SLC22A15 (NM_018420.1,529-547).
gatcgcttcggaaggaaaa

SEQ ID NO: 274286 - DNA, 19 bp, Homo sapiens
  siRNA target sequence for SLC22A15 (NM_018420.1,537-555).
cggaaggaaaaaagtctat

SEQ ID NO: 274287 - DNA, 19 bp, Homo sapiens
  siRNA target sequence for SLC22A15 (NM_018420.1,586-604).
gcaattgcaaatggatttt

SEQ ID NO: 274288 - DNA, 19 bp, Homo sapiens
  siRNA target sequence for SLC22A15 (NM_018420.1,605-623).
ccccctcatatgagttctt

SEQ ID NO: 274289 - DNA, 19 bp, Homo sapiens
  siRNA target sequence for SLC22A15 (NM_018420.1,606-624).
cccctcatatgagttcttt

SEQ ID NO: 274290 - DNA, 19 bp, Homo sapiens
  siRNA target sequence for SLC22A15 (NM_018420.1,668-686).
cgctggtggcctttgtctt

SEQ ID NO: 274291 - DNA, 19 bp, Homo sapiens
  siRNA target sequence for SLC22A15 (NM_018420.1,673-691).
gtggcctttgtcttgctta

SEQ ID NO: 274292 - DNA, 19 bp, Homo sapiens
  siRNA target sequence for SLC22A15 (NM_018420.1,675-693).
ggcctttgtcttgcttaat

SEQ ID NO: 274293 - DNA, 19 bp, Homo sapiens
  siRNA target sequence for SLC22A15 (NM_018420.1,677-695).
cctttgtcttgcttaatga

SEQ ID NO: 274294 - DNA, 19 bp, Homo sapiens
  siRNA target sequence for SLC22A15 (NM_018420.1,772-790).
gccctgttaggatacttca

SEQ ID NO: 274295 - DNA, 19 bp, Homo sapiens
  siRNA target sequence for SLC22A15 (NM_018420.1,773-791).
ccctgttaggatacttcat

SEQ ID NO: 274296 - DNA, 19 bp, Homo sapiens
  siRNA target sequence for SLC22A15 (NM_018420.1,806-824).
ccctagccattctggttaa

SEQ ID NO: 274297 - DNA, 19 bp, Homo sapiens
  siRNA target sequence for SLC22A15 (NM_018420.1,868-886).
gaatcacctcgttggttat

SEQ ID NO: 274298 - DNA, 19 bp, Homo sapiens
  siRNA target sequence for SLC22A15 (NM_018420.1,957-975).
gtgcacgttctcactaaca

SEQ ID NO: 274299 - DNA, 19 bp, Homo sapiens
  siRNA target sequence for SLC22A15 (NM_018420.1,959-977).
gcacgttctcactaacaca

SEQ ID NO: 274300 - DNA, 19 bp, Homo sapiens
  siRNA target sequence for SLC22A15 (NM_018420.1,1118-1136).
gtgatctaggtggaagtat

SEQ ID NO: 274301 - DNA, 19 bp, Homo sapiens
  siRNA target sequence for SLC22A15 (NM_018420.1,1184-1202).
ctctctgtatctacttgat

SEQ ID NO: 274302 - DNA, 19 bp, Homo sapiens
  siRNA target sequence for SLC22A15 (NM_018420.1,1190-1208).
gtatctacttgattaacca

SEQ ID NO: 274303 - DNA, 19 bp, Homo sapiens
  siRNA target sequence for SLC22A15 (NM_018420.1,1219-1237).
ggtcggaagcgaacattat

SEQ ID NO: 274304 - DNA, 19 bp, Homo sapiens
  siRNA target sequence for SLC22A15 (NM_018420.1,1227-1245).
gcgaacattatcagcattt

SEQ ID NO: 274305 - DNA, 19 bp, Homo sapiens
  siRNA target sequence for SLC22A15 (NM_018420.1,1256-1274).
gaggactggcttgtcttat

SEQ ID NO: 274306 - DNA, 19 bp, Homo sapiens
  siRNA target sequence for SLC22A15 (NM_018420.1,1261-1279).
ctggcttgtcttattgtaa

SEQ ID NO: 274307 - DNA, 19 bp, Homo sapiens
  siRNA target sequence for SLC22A15 (NM_018420.1,1264-1282).
gcttgtcttattgtaatgt

SEQ ID NO: 274308 - DNA, 19 bp, Homo sapiens
  siRNA target sequence for SLC22A15 (NM_018420.1,1268-1286).
gtcttattgtaatgtttct

SEQ ID NO: 274309 - DNA, 19 bp, Homo sapiens
  siRNA target sequence for SLC22A15 (NM_018420.1,1426-1444).
gttgggcttggaacttgtt

SEQ ID NO: 274310 - DNA, 19 bp, Homo sapiens
  siRNA target sequence for SLC22A15 (NM_018420.1,1482-1500).
catcccctcactgaaatat

SEQ ID NO: 274311 - DNA, 19 bp, Homo sapiens
  siRNA target sequence for SLC22A15 (NM_018420.1,1501-1519).
gtgcaatggtctttaccat

SEQ ID NO: 274312 - DNA, 19 bp, Homo sapiens
  siRNA target sequence for SLC22A15 (NM_018420.1,1572-1590).
gccggagacccttaacagt

SEQ ID NO: 274313 - DNA, 19 bp, Homo sapiens
  siRNA target sequence for SLC22A15 (NM_018420.1,1612-1630).
gaccttcaggtgtattcgt

SEQ ID NO: 274314 - DNA, 19 bp, Homo sapiens
  siRNA target sequence for SLC22A15 (NM_018420.1,1614-1632).
ccttcaggtgtattcgtat

SEQ ID NO: 274315 - DNA, 19 bp, Homo sapiens
  siRNA target sequence for SLC22A16 (NM_033125.2,127-145).
gagagtcctctatttcata

SEQ ID NO: 274316 - DNA, 19 bp, Homo sapiens
  siRNA target sequence for SLC22A16 (NM_033125.2,157-175).
gaacatctcttgtggtatt

SEQ ID NO: 274317 - DNA, 19 bp, Homo sapiens
  siRNA target sequence for SLC22A16 (NM_033125.2,241-259).
gagtcaggttgttttccat

SEQ ID NO: 274318 - DNA, 19 bp, Homo sapiens
  siRNA target sequence for SLC22A16 (NM_033125.2,396-414).
cgagtttgggctatgaata

SEQ ID NO: 274319 - DNA, 19 bp, Homo sapiens
  siRNA target sequence for SLC22A16 (NM_033125.2,441-459).
gtgtggatggctacatata

SEQ ID NO: 274320 - DNA, 19 bp, Homo sapiens
  siRNA target sequence for SLC22A16 (NM_033125.2,662-680).
gcggcgtttgcagttgatt

SEQ ID NO: 274321 - DNA, 19 bp, Homo sapiens
  siRNA target sequence for SLC22A16 (NM_033125.2,663-681).
cggcgtttgcagttgatta

SEQ ID NO: 274322 - DNA, 19 bp, Homo sapiens
  siRNA target sequence for SLC22A16 (NM_033125.2,665-683).
gcgtttgcagttgattatt

SEQ ID NO: 274323 - DNA, 19 bp, Homo sapiens
  siRNA target sequence for SLC22A16 (NM_033125.2,666-684).
cgtttgcagttgattatta

SEQ ID NO: 274324 - DNA, 19 bp, Homo sapiens
  siRNA target sequence for SLC22A16 (NM_033125.2,691-709).
catggctgctcgctttttt

SEQ ID NO: 274325 - DNA, 19 bp, Homo sapiens
  siRNA target sequence for SLC22A16 (NM_033125.2,694-712).
ggctgctcgcttttttctt

SEQ ID NO: 274326 - DNA, 19 bp, Homo sapiens
  siRNA target sequence for SLC22A16 (NM_033125.2,718-736).
ggttgcaagtggctatctt

SEQ ID NO: 274327 - DNA, 19 bp, Homo sapiens
  siRNA target sequence for SLC22A16 (NM_033125.2,740-758).
gtggggtttgtctatgtga

SEQ ID NO: 274328 - DNA, 19 bp, Homo sapiens
  siRNA target sequence for SLC22A16 (NM_033125.2,786-804).
catgggcgtctgtccattt

SEQ ID NO: 274329 - DNA, 19 bp, Homo sapiens
  siRNA target sequence for SLC22A16 (NM_033125.2,789-807).
gggcgtctgtccatttgca

SEQ ID NO: 274330 - DNA, 19 bp, Homo sapiens
  siRNA target sequence for SLC22A16 (NM_033125.2,790-808).
ggcgtctgtccatttgcat

SEQ ID NO: 274331 - DNA, 19 bp, Homo sapiens
  siRNA target sequence for SLC22A16 (NM_033125.2,1012-1030).
cagggcaagctcctgtaaa

SEQ ID NO: 274332 - DNA, 19 bp, Homo sapiens
  siRNA target sequence for SLC22A16 (NM_033125.2,1014-1032).
gggcaagctcctgtaaact

SEQ ID NO: 274333 - DNA, 19 bp, Homo sapiens
  siRNA target sequence for SLC22A16 (NM_033125.2,1016-1034).
gcaagctcctgtaaactgt

SEQ ID NO: 274334 - DNA, 19 bp, Homo sapiens
  siRNA target sequence for SLC22A16 (NM_033125.2,1097-1115).
cacaacctatcatatctgt

SEQ ID NO: 274335 - DNA, 19 bp, Homo sapiens
  siRNA target sequence for SLC22A16 (NM_033125.2,1099-1117).
caacctatcatatctgttt

SEQ ID NO: 274336 - DNA, 19 bp, Homo sapiens
  siRNA target sequence for SLC22A16 (NM_033125.2,1145-1163).
cttaccgtttggctaatct

SEQ ID NO: 274337 - DNA, 19 bp, Homo sapiens
  siRNA target sequence for SLC22A16 (NM_033125.2,1181-1199).
ggattctactcgttttcct

SEQ ID NO: 274338 - DNA, 19 bp, Homo sapiens
  siRNA target sequence for SLC22A16 (NM_033125.2,1197-1215).
ccttgaattctgttaactt

SEQ ID NO: 274339 - DNA, 19 bp, Homo sapiens
  siRNA target sequence for SLC22A16 (NM_033125.2,1316-1334).
gtcctggcctactctcttt

SEQ ID NO: 274340 - DNA, 19 bp, Homo sapiens
  siRNA target sequence for SLC22A16 (NM_033125.2,1319-1337).
ctggcctactctcttttct

SEQ ID NO: 274341 - DNA, 19 bp, Homo sapiens
  siRNA target sequence for SLC22A16 (NM_033125.2,1350-1368).
cctgtggtgtcgttatggt

SEQ ID NO: 274342 - DNA, 19 bp, Homo sapiens
  siRNA target sequence for SLC22A16 (NM_033125.2,1369-1387).
gatcccccagaaacattat

SEQ ID NO: 274343 - DNA, 19 bp, Homo sapiens
  siRNA target sequence for SLC22A16 (NM_033125.2,1374-1392).
cccagaaacattatatttt

SEQ ID NO: 274344 - DNA, 19 bp, Homo sapiens
  siRNA target sequence for SLC22A16 (NM_033125.2,1402-1420).
gacagctatggttggaaaa

SEQ ID NO: 274345 - DNA, 19 bp, Homo sapiens
  siRNA target sequence for SLC22A16 (NM_033125.2,1404-1422).
cagctatggttggaaaatt

SEQ ID NO: 274346 - DNA, 19 bp, Homo sapiens
  siRNA target sequence for SLC22A16 (NM_033125.2,1433-1451).
gcagcatttggcctcattt

SEQ ID NO: 274347 - DNA, 19 bp, Homo sapiens
  siRNA target sequence for SLC22A16 (NM_033125.2,1564-1582).
cagcatttggatcttcata

SEQ ID NO: 274348 - DNA, 19 bp, Homo sapiens
  siRNA target sequence for SLC22A16 (NM_033125.2,1620-1638).
gagtgttaacactaaagct

SEQ ID NO: 274349 - DNA, 19 bp, Homo sapiens
  siRNA target sequence for SLC22A16 (NM_033125.2,1654-1672).
gaaacggctagcaactact

SEQ ID NO: 274350 - DNA, 19 bp, Homo sapiens
  siRNA target sequence for SLC22A16 (NM_033125.2,1710-1728).
gcaagtcaagcaaattact

SEQ ID NO: 274351 - DNA, 19 bp, Homo sapiens
  siRNA target sequence for SLC22A17 (NM_016609.2,171-189).
gcccttgtctctaaggatt

SEQ ID NO: 274352 - DNA, 19 bp, Homo sapiens
  siRNA target sequence for SLC22A17 (NM_016609.2,193-211).
gattcctacagcgaatgat

SEQ ID NO: 274353 - DNA, 19 bp, Homo sapiens
  siRNA target sequence for SLC22A17 (NM_016609.2,268-286).
ccgcacggtggctgatagt

SEQ ID NO: 274354 - DNA, 19 bp, Homo sapiens
  siRNA target sequence for SLC22A17 (NM_016609.2,447-465).
ctcaactaccgcaacatct

SEQ ID NO: 274355 - DNA, 19 bp, Homo sapiens
  siRNA target sequence for SLC22A17 (NM_016609.2,702-720).
ggcctgtgggattatctga

SEQ ID NO: 274356 - DNA, 19 bp, Homo sapiens
  siRNA target sequence for SLC22A17 (NM_016609.2,951-969).
ctctgcattctcagcatta

SEQ ID NO: 274357 - DNA, 19 bp, Homo sapiens
  siRNA target sequence for SLC22A17 (NM_016609.2,955-973).
gcattctcagcattatgct

SEQ ID NO: 274358 - DNA, 19 bp, Homo sapiens
  siRNA target sequence for SLC22A17 (NM_020372.2,60-78).
gcctcggaccccatcttca

SEQ ID NO: 274359 - DNA, 19 bp, Homo sapiens
  siRNA target sequence for SLC22A17 (NM_020372.2,412-430).
gttaccccgcagacagatt

SEQ ID NO: 274360 - DNA, 19 bp, Homo sapiens
  siRNA target sequence for SLC22A9 (NM_080866.1,635-653).
gacagaatctccttctcat

SEQ ID NO: 274361 - DNA, 19 bp, Homo sapiens
  siRNA target sequence for SLC22A9 (NM_080866.1,747-765).
gcatcctaggcggtcattt

SEQ ID NO: 274362 - DNA, 19 bp, Homo sapiens
  siRNA target sequence for SLC22A9 (NM_080866.1,751-769).
cctaggcggtcatttatca

SEQ ID NO: 274363 - DNA, 19 bp, Homo sapiens
  siRNA target sequence for SLC22A9 (NM_080866.1,808-826).
cctccaggttgccattgtt

SEQ ID NO: 274364 - DNA, 19 bp, Homo sapiens
  siRNA target sequence for SLC22A9 (NM_080866.1,984-1002).
gcccttctggtattgcatt

SEQ ID NO: 274365 - DNA, 19 bp, Homo sapiens
  siRNA target sequence for SLC22A9 (NM_080866.1,985-1003).
cccttctggtattgcattt

SEQ ID NO: 274366 - DNA, 19 bp, Homo sapiens
  siRNA target sequence for SLC22A9 (NM_080866.1,986-1004).
ccttctggtattgcattta

SEQ ID NO: 274367 - DNA, 19 bp, Homo sapiens
  siRNA target sequence for SLC22A9 (NM_080866.1,1060-1078).
ggtgtctgtaccatacttt

SEQ ID NO: 274368 - DNA, 19 bp, Homo sapiens
  siRNA target sequence for SLC22A9 (NM_080866.1,1327-1345).
cctgtcctttacgagattt

SEQ ID NO: 274369 - DNA, 19 bp, Homo sapiens
  siRNA target sequence for SLC22A9 (NM_080866.1,1330-1348).
gtcctttacgagatttgca

SEQ ID NO: 274370 - DNA, 19 bp, Homo sapiens
  siRNA target sequence for SLC22A9 (NM_080866.1,1359-1377).
cctattttggccttaatct

SEQ ID NO: 274371 - DNA, 19 bp, Homo sapiens
  siRNA target sequence for SLC22A9 (NM_080866.1,1715-1733).
ctggctcccctcatgatga

SEQ ID NO: 274372 - DNA, 19 bp, Homo sapiens
  siRNA target sequence for SLC22A9 (NM_080866.1,1729-1747).
gatgatcctaagtgtgtat

SEQ ID NO: 274373 - DNA, 19 bp, Homo sapiens
  siRNA target sequence for SLC22A9 (NM_080866.1,1756-1774).
cctgccctggatcatctat

SEQ ID NO: 274374 - DNA, 19 bp, Homo sapiens
  siRNA target sequence for SLC22A9 (NM_080866.1,1907-1925).
gtggaagtgacgcagtttt

SEQ ID NO: 274375 - DNA, 19 bp, Homo sapiens
  siRNA target sequence for SLC23A3 (NM_144712.2,349-367).
ccatccttagagttcctta

SEQ ID NO: 274376 - DNA, 19 bp, Homo sapiens
  siRNA target sequence for SLC23A3 (NM_144712.2,433-451).
ctcatgctgcacctttgta

SEQ ID NO: 274377 - DNA, 19 bp, Homo sapiens
  siRNA target sequence for SLC23A3 (NM_144712.2,723-741).
cgagcttcaacgtcatcaa

SEQ ID NO: 274378 - DNA, 19 bp, Homo sapiens
  siRNA target sequence for SLC23A3 (NM_144712.2,791-809).
caccaaggcaccatggatt

SEQ ID NO: 274379 - DNA, 19 bp, Homo sapiens
  siRNA target sequence for SLC23A3 (NM_144712.2,1003-1021).
gactctgggcgaaatatct

SEQ ID NO: 274380 - DNA, 19 bp, Homo sapiens
  siRNA target sequence for SLC23A3 (NM_144712.2,1010-1028).
ggcgaaatatcttcattgt

SEQ ID NO: 274381 - DNA, 19 bp, Homo sapiens
  siRNA target sequence for SLC23A3 (NM_144712.2,1104-1122).
gagccccttggatgtatta

SEQ ID NO: 274382 - DNA, 19 bp, Homo sapiens
  siRNA target sequence for SLC23A3 (NM_144712.2,1227-1245).
gctaccatctcctttcact

SEQ ID NO: 274383 - DNA, 19 bp, Homo sapiens
  siRNA target sequence for SLC23A3 (NM_144712.2,1440-1458).
ggagccatgccctgaatct

SEQ ID NO: 274384 - DNA, 19 bp, Homo sapiens
  siRNA target sequence for SLC23A3 (NM_144712.2,1441-1459).
gagccatgccctgaatcta

SEQ ID NO: 274385 - DNA, 19 bp, Homo sapiens
  siRNA target sequence for SLC23A3 (NM_144712.2,1468-1486).
gggtttaggtcccagaaat

SEQ ID NO: 274386 - DNA, 19 bp, Homo sapiens
  siRNA target sequence for SLC37A3 (NM_032295.1,211-229).
gctccatgcttcacgaaaa

SEQ ID NO: 274387 - DNA, 19 bp, Homo sapiens
  siRNA target sequence for SLC37A3 (NM_032295.1,215-233).
catgcttcacgaaaaacat

SEQ ID NO: 274388 - DNA, 19 bp, Homo sapiens
  siRNA target sequence for SLC37A3 (NM_032295.1,265-283).
gtggaccccaagtgctttt

SEQ ID NO: 274389 - DNA, 19 bp, Homo sapiens
  siRNA target sequence for SLC37A3 (NM_032295.1,267-285).
ggaccccaagtgcttttaa

SEQ ID NO: 274390 - DNA, 19 bp, Homo sapiens
  siRNA target sequence for SLC37A3 (NM_032295.1,315-333).
ggagcagcaaccatttgtt

SEQ ID NO: 274391 - DNA, 19 bp, Homo sapiens
  siRNA target sequence for SLC37A3 (NM_032295.1,341-359).
gcagagaaagcgactcttt

SEQ ID NO: 274392 - DNA, 19 bp, Homo sapiens
  siRNA target sequence for SLC37A3 (NM_032295.1,364-382).
cggcacactggataccatt

SEQ ID NO: 274393 - DNA, 19 bp, Homo sapiens
  siRNA target sequence for SLC37A3 (NM_032295.1,369-387).
cactggataccattttcct

SEQ ID NO: 274394 - DNA, 19 bp, Homo sapiens
  siRNA target sequence for SLC37A3 (NM_032295.1,398-416).
gctgtgggcctattcatca

SEQ ID NO: 274395 - DNA, 19 bp, Homo sapiens
  siRNA target sequence for SLC37A3 (NM_032295.1,424-442).
cgttggggatcggttgaat

SEQ ID NO: 274396 - DNA, 19 bp, Homo sapiens
  siRNA target sequence for SLC37A3 (NM_032295.1,479-497).
gcattagtggtgtttgtct

SEQ ID NO: 274397 - DNA, 19 bp, Homo sapiens
  siRNA target sequence for SLC37A3 (NM_032295.1,480-498).
cattagtggtgtttgtctt

SEQ ID NO: 274398 - DNA, 19 bp, Homo sapiens
  siRNA target sequence for SLC37A3 (NM_032295.1,516-534).
ggctgcgtttctacaacaa

SEQ ID NO: 274399 - DNA, 19 bp, Homo sapiens
  siRNA target sequence for SLC37A3 (NM_032295.1,518-536).
ctgcgtttctacaacaaat

SEQ ID NO: 274400 - DNA, 19 bp, Homo sapiens
  siRNA target sequence for SLC37A3 (NM_032295.1,546-564).
gctgcctgtggattgtgaa

SEQ ID NO: 274401 - DNA, 19 bp, Homo sapiens
  siRNA target sequence for SLC37A3 (NM_032295.1,629-647).
gccggacgaggagttgttt

SEQ ID NO: 274402 - DNA, 19 bp, Homo sapiens
  siRNA target sequence for SLC37A3 (NM_032295.1,708-726).
ctgttcttcagtatggtta

SEQ ID NO: 274403 - DNA, 19 bp, Homo sapiens
  siRNA target sequence for SLC37A3 (NM_032295.1,767-785).
ggtgggatcgttatcttct

SEQ ID NO: 274404 - DNA, 19 bp, Homo sapiens
  siRNA target sequence for SLC37A3 (NM_032295.1,768-786).
gtgggatcgttatcttctt

SEQ ID NO: 274405 - DNA, 19 bp, Homo sapiens
  siRNA target sequence for SLC37A3 (NM_032295.1,799-817).
gtcaccagaagaaattggt

SEQ ID NO: 274406 - DNA, 19 bp, Homo sapiens
  siRNA target sequence for SLC37A3 (NM_032295.1,854-872).
gactcacacaggccattaa

SEQ ID NO: 274407 - DNA, 19 bp, Homo sapiens
  siRNA target sequence for SLC37A3 (NM_032295.1,895-913).
cgaatatgagccgaattat

SEQ ID NO: 274408 - DNA, 19 bp, Homo sapiens
  siRNA target sequence for SLC37A3 (NM_032295.1,896-914).
gaatatgagccgaattatt

SEQ ID NO: 274409 - DNA, 19 bp, Homo sapiens
  siRNA target sequence for SLC37A3 (NM_032295.1,919-937).
ccaagatgatagttctgtt

SEQ ID NO: 274410 - DNA, 19 bp, Homo sapiens
  siRNA target sequence for SLC37A3 (NM_032295.1,930-948).
gttctgttgcccaagtcaa

SEQ ID NO: 274411 - DNA, 19 bp, Homo sapiens
  siRNA target sequence for SLC37A3 (NM_032295.1,941-959).
caagtcaaggcgataagct

SEQ ID NO: 274412 - DNA, 19 bp, Homo sapiens
  siRNA target sequence for SLC37A3 (NM_032295.1,1006-1024).
ctacgcctgcttgaagtta

SEQ ID NO: 274413 - DNA, 19 bp, Homo sapiens
  siRNA target sequence for SLC37A3 (NM_032295.1,1011-1029).
cctgcttgaagttagtgaa

SEQ ID NO: 274414 - DNA, 19 bp, Homo sapiens
  siRNA target sequence for SLC37A3 (NM_032295.1,1025-1043).
gtgaattactccttcttct

SEQ ID NO: 274415 - DNA, 19 bp, Homo sapiens
  siRNA target sequence for SLC37A3 (NM_032295.1,1052-1070).
cccttttatctgagtaaca

SEQ ID NO: 274416 - DNA, 19 bp, Homo sapiens
  siRNA target sequence for SLC37A3 (NM_032295.1,1094-1112).
gccgacaagctgtccattt

SEQ ID NO: 274417 - DNA, 19 bp, Homo sapiens
  siRNA target sequence for SLC37A3 (NM_032295.1,1097-1115).
gacaagctgtccatttggt

SEQ ID NO: 274418 - DNA, 19 bp, Homo sapiens
  siRNA target sequence for SLC37A3 (NM_032295.1,1117-1135).
cgacgttggagggatcata

SEQ ID NO: 274419 - DNA, 19 bp, Homo sapiens
  siRNA target sequence for SLC37A3 (NM_032295.1,1120-1138).
cgttggagggatcatagta

SEQ ID NO: 274420 - DNA, 19 bp, Homo sapiens
  siRNA target sequence for SLC37A3 (NM_032295.1,1121-1139).
gttggagggatcatagtat

SEQ ID NO: 274421 - DNA, 19 bp, Homo sapiens
  siRNA target sequence for SLC37A3 (NM_032295.1,1124-1142).
ggagggatcatagtattta

SEQ ID NO: 274422 - DNA, 19 bp, Homo sapiens
  siRNA target sequence for SLC37A3 (NM_032295.1,1167-1185).
ggatggatgtgggttttct

SEQ ID NO: 274423 - DNA, 19 bp, Homo sapiens
  siRNA target sequence for SLC37A3 (NM_032295.1,1172-1190).
gatgtgggttttctacttt

SEQ ID NO: 274424 - DNA, 19 bp, Homo sapiens
  siRNA target sequence for SLC37A3 (NM_032295.1,1193-1211).
cattctcatgacaagttgt

SEQ ID NO: 274425 - DNA, 19 bp, Homo sapiens
  siRNA target sequence for SLC37A3 (NM_032295.1,1197-1215).
ctcatgacaagttgtacaa

SEQ ID NO: 274426 - DNA, 19 bp, Homo sapiens
  siRNA target sequence for SLC37A3 (NM_032295.1,1199-1217).
catgacaagttgtacaatt

SEQ ID NO: 274427 - DNA, 19 bp, Homo sapiens
  siRNA target sequence for SLC37A3 (NM_032295.1,1218-1236).
gtgtttatctcgccattaa

SEQ ID NO: 274428 - DNA, 19 bp, Homo sapiens
  siRNA target sequence for SLC37A3 (NM_032295.1,1220-1238).
gtttatctcgccattaata

SEQ ID NO: 274429 - DNA, 19 bp, Homo sapiens
  siRNA target sequence for SLC37A3 (NM_032295.1,1305-1323).
gcgagacagaaagaacaat

SEQ ID NO: 274430 - DNA, 19 bp, Homo sapiens
  siRNA target sequence for SLC37A3 (NM_032295.1,1309-1327).
gacagaaagaacaatgtca

SEQ ID NO: 274431 - DNA, 19 bp, Homo sapiens
  siRNA target sequence for SLC37A3 (NM_032295.1,1349-1367).
cttcgagtctgccctaatt

SEQ ID NO: 274432 - DNA, 19 bp, Homo sapiens
  siRNA target sequence for SLC37A3 (NM_032295.1,1361-1379).
cctaatttgggtttgtcta

SEQ ID NO: 274433 - DNA, 19 bp, Homo sapiens
  siRNA target sequence for SLC37A3 (NM_032295.1,1389-1407).
gcctgatcttggattgtca

SEQ ID NO: 274434 - DNA, 19 bp, Homo sapiens
  siRNA target sequence for SLC5A8 (NM_145913.2,544-562).
ctcaccgctagcttcatgt

SEQ ID NO: 274435 - DNA, 19 bp, Homo sapiens
  siRNA target sequence for SLC5A8 (NM_145913.2,629-647).
ccttcacctacttctttgt

SEQ ID NO: 274436 - DNA, 19 bp, Homo sapiens
  siRNA target sequence for SLC5A8 (NM_145913.2,672-690).
cctcccggtgttctacaaa

SEQ ID NO: 274437 - DNA, 19 bp, Homo sapiens
  siRNA target sequence for SLC5A8 (NM_145913.2,702-720).
cagcacctacgagtattta

SEQ ID NO: 274438 - DNA, 19 bp, Homo sapiens
  siRNA target sequence for SLC5A8 (NM_145913.2,704-722).
gcacctacgagtatttaga

SEQ ID NO: 274439 - DNA, 19 bp, Homo sapiens
  siRNA target sequence for SLC5A8 (NM_145913.2,707-725).
cctacgagtatttagaact

SEQ ID NO: 274440 - DNA, 19 bp, Homo sapiens
  siRNA target sequence for SLC5A8 (NM_145913.2,714-732).
gtatttagaacttcgattt

SEQ ID NO: 274441 - DNA, 19 bp, Homo sapiens
  siRNA target sequence for SLC5A8 (NM_145913.2,721-739).
gaacttcgatttaacaaat

SEQ ID NO: 274442 - DNA, 19 bp, Homo sapiens
  siRNA target sequence for SLC5A8 (NM_145913.2,755-773).
gaacagtcctcttcattgt

SEQ ID NO: 274443 - DNA, 19 bp, Homo sapiens
  siRNA target sequence for SLC5A8 (NM_145913.2,825-843).
gaatcaagtcacaggattt

SEQ ID NO: 274444 - DNA, 19 bp, Homo sapiens
  siRNA target sequence for SLC5A8 (NM_145913.2,872-890).
gggtggtctgcacattcta

SEQ ID NO: 274445 - DNA, 19 bp, Homo sapiens
  siRNA target sequence for SLC5A8 (NM_145913.2,874-892).
gtggtctgcacattctact

SEQ ID NO: 274446 - DNA, 19 bp, Homo sapiens
  siRNA target sequence for SLC5A8 (NM_145913.2,893-911).
gcacactgggtggtcttaa

SEQ ID NO: 274447 - DNA, 19 bp, Homo sapiens
  siRNA target sequence for SLC5A8 (NM_145913.2,904-922).
ggtcttaaagcagttatct

SEQ ID NO: 274448 - DNA, 19 bp, Homo sapiens
  siRNA target sequence for SLC5A8 (NM_145913.2,958-976).
ggatttgcatccgtgatta

SEQ ID NO: 274449 - DNA, 19 bp, Homo sapiens
  siRNA target sequence for SLC5A8 (NM_145913.2,959-977).
gatttgcatccgtgattat

SEQ ID NO: 274450 - DNA, 19 bp, Homo sapiens
  siRNA target sequence for SLC5A8 (NM_145913.2,1025-1043).
cctatgatggtggaagatt

SEQ ID NO: 274451 - DNA, 19 bp, Homo sapiens
  siRNA target sequence for SLC5A8 (NM_145913.2,1081-1099).
cacaccttctggacaatta

SEQ ID NO: 274452 - DNA, 19 bp, Homo sapiens
  siRNA target sequence for SLC5A8 (NM_145913.2,1086-1104).
cttctggacaattattata

SEQ ID NO: 274453 - DNA, 19 bp, Homo sapiens
  siRNA target sequence for SLC5A8 (NM_145913.2,1148-1166).
cccaggtgcagagatatat

SEQ ID NO: 274454 - DNA, 19 bp, Homo sapiens
  siRNA target sequence for SLC5A8 (NM_145913.2,1197-1215).
gtctctctacatcaatctt

SEQ ID NO: 274455 - DNA, 19 bp, Homo sapiens
  siRNA target sequence for SLC5A8 (NM_145913.2,1199-1217).
ctctctacatcaatcttgt

SEQ ID NO: 274456 - DNA, 19 bp, Homo sapiens
  siRNA target sequence for SLC5A8 (NM_145913.2,1233-1251).
cctcacatgctcagtgttt

SEQ ID NO: 274457 - DNA, 19 bp, Homo sapiens
  siRNA target sequence for SLC5A8 (NM_145913.2,1236-1254).
cacatgctcagtgttttgt

SEQ ID NO: 274458 - DNA, 19 bp, Homo sapiens
  siRNA target sequence for SLC5A8 (NM_145913.2,1326-1344).
gctcatgccttatttggta

SEQ ID NO: 274459 - DNA, 19 bp, Homo sapiens
  siRNA target sequence for SLC5A8 (NM_145913.2,1396-1414).
gcttacagtgggacattaa

SEQ ID NO: 274460 - DNA, 19 bp, Homo sapiens
  siRNA target sequence for SLC5A8 (NM_145913.2,1459-1477).
gaagatctaatcaaacctt

SEQ ID NO: 274461 - DNA, 19 bp, Homo sapiens
  siRNA target sequence for SLC5A8 (NM_145913.2,1536-1554).
gtatggagccctgtgtatt

SEQ ID NO: 274462 - DNA, 19 bp, Homo sapiens
  siRNA target sequence for SLC5A8 (NM_145913.2,1561-1579).
gctgcgctggcgtcactta

SEQ ID NO: 274463 - DNA, 19 bp, Homo sapiens
  siRNA target sequence for SLC5A8 (NM_145913.2,1562-1580).
ctgcgctggcgtcacttat

SEQ ID NO: 274464 - DNA, 19 bp, Homo sapiens
  siRNA target sequence for SLC5A8 (NM_145913.2,1596-1614).
ggcagcactcagcgtattt

SEQ ID NO: 274465 - DNA, 19 bp, Homo sapiens
  siRNA target sequence for SLC5A8 (NM_145913.2,1600-1618).
gcactcagcgtatttggta

SEQ ID NO: 274466 - DNA, 19 bp, Homo sapiens
  siRNA target sequence for SLC5A8 (NM_145913.2,1601-1619).
cactcagcgtatttggtat

SEQ ID NO: 274467 - DNA, 19 bp, Homo sapiens
  siRNA target sequence for SLC5A8 (NM_145913.2,1647-1665).
cgctttgggcattttggtt

SEQ ID NO: 274468 - DNA, 19 bp, Homo sapiens
  siRNA target sequence for SLC5A8 (NM_145913.2,1677-1695).
ctcaattggagcacttgtt

SEQ ID NO: 274469 - DNA, 19 bp, Homo sapiens
  siRNA target sequence for SLC5A8 (NM_145913.2,1778-1796).
cattgcaccttgatatcca

SEQ ID NO: 274470 - DNA, 19 bp, Homo sapiens
  siRNA target sequence for SLC5A8 (NM_145913.2,1789-1807).
gatatccaaggctgtaaca

SEQ ID NO: 274471 - DNA, 19 bp, Homo sapiens
  siRNA target sequence for SLC5A8 (NM_145913.2,1800-1818).
ctgtaacagcacctacaat

SEQ ID NO: 274472 - DNA, 19 bp, Homo sapiens
  siRNA target sequence for SLC5A8 (NM_145913.2,1802-1820).
gtaacagcacctacaatga

SEQ ID NO: 274473 - DNA, 19 bp, Homo sapiens
  siRNA target sequence for SLC5A8 (NM_145913.2,1848-1866).
gccatttactactagtgtt

SEQ ID NO: 274474 - DNA, 19 bp, Homo sapiens
  siRNA target sequence for SLC5A8 (NM_145913.2,1849-1867).
ccatttactactagtgttt

SEQ ID NO: 274475 - DNA, 19 bp, Homo sapiens
  siRNA target sequence for SLC5A8 (NM_145913.2,1870-1888).
caaatatacaatgttcaaa

SEQ ID NO: 274476 - DNA, 19 bp, Homo sapiens
  siRNA target sequence for SLC5A8 (NM_145913.2,1938-1956).
cactgttggaactttggta

SEQ ID NO: 274477 - DNA, 19 bp, Homo sapiens
  siRNA target sequence for SLC5A8 (NM_145913.2,1942-1960).
gttggaactttggtaacat

SEQ ID NO: 274478 - DNA, 19 bp, Homo sapiens
  siRNA target sequence for SLC5A8 (NM_145913.2,1949-1967).
ctttggtaacattattagt

SEQ ID NO: 274479 - DNA, 19 bp, Homo sapiens
  siRNA target sequence for SLC5A8 (NM_145913.2,1968-1986).
ggggatacttgtcagttta

SEQ ID NO: 274480 - DNA, 19 bp, Homo sapiens
  siRNA target sequence for SLC5A8 (NM_145913.2,1969-1987).
gggatacttgtcagtttat

SEQ ID NO: 274481 - DNA, 19 bp, Homo sapiens
  siRNA target sequence for SLCO1C1 (NM_017435.2,478-496).
ccatgctgtggtgaactaa

SEQ ID NO: 274482 - DNA, 19 bp, Homo sapiens
  siRNA target sequence for SLCO1C1 (NM_017435.2,488-506).
gtgaactaaaggtgttctt

SEQ ID NO: 274483 - DNA, 19 bp, Homo sapiens
  siRNA target sequence for SLCO1C1 (NM_017435.2,490-508).
gaactaaaggtgttcttgt

SEQ ID NO: 274484 - DNA, 19 bp, Homo sapiens
  siRNA target sequence for SLCO1C1 (NM_017435.2,511-529).
gccttgtcttttgtttact

SEQ ID NO: 274485 - DNA, 19 bp, Homo sapiens
  siRNA target sequence for SLCO1C1 (NM_017435.2,512-530).
ccttgtcttttgtttactt

SEQ ID NO: 274486 - DNA, 19 bp, Homo sapiens
  siRNA target sequence for SLCO1C1 (NM_017435.2,576-594).
gatagagagaaggtttgat

SEQ ID NO: 274487 - DNA, 19 bp, Homo sapiens
  siRNA target sequence for SLCO1C1 (NM_017435.2,605-623).
cactggtgggagttattga

SEQ ID NO: 274488 - DNA, 19 bp, Homo sapiens
  siRNA target sequence for SLCO1C1 (NM_017435.2,614-632).
gagttattgatggtagttt

SEQ ID NO: 274489 - DNA, 19 bp, Homo sapiens
  siRNA target sequence for SLCO1C1 (NM_017435.2,642-660).
gaatctcttagttataaca

SEQ ID NO: 274490 - DNA, 19 bp, Homo sapiens
  siRNA target sequence for SLCO1C1 (NM_017435.2,706-724).
ggagcagggtgtgtaatca

SEQ ID NO: 274491 - DNA, 19 bp, Homo sapiens
  siRNA target sequence for SLCO1C1 (NM_017435.2,707-725).
gagcagggtgtgtaatcat

SEQ ID NO: 274492 - DNA, 19 bp, Homo sapiens
  siRNA target sequence for SLCO1C1 (NM_017435.2,769-787).
gagcagtacaaatatgaga

SEQ ID NO: 274493 - DNA, 19 bp, Homo sapiens
  siRNA target sequence for SLCO1C1 (NM_017435.2,835-853).
ctagagtcaagcagtcaat

SEQ ID NO: 274494 - DNA, 19 bp, Homo sapiens
  siRNA target sequence for SLCO1C1 (NM_017435.2,840-858).
gtcaagcagtcaattacca

SEQ ID NO: 274495 - DNA, 19 bp, Homo sapiens
  siRNA target sequence for SLCO1C1 (NM_017435.2,850-868).
caattaccagtttcagtta

SEQ ID NO: 274496 - DNA, 19 bp, Homo sapiens
  siRNA target sequence for SLCO1C1 (NM_017435.2,1024-1042).
gacaatgcagctttctata

SEQ ID NO: 274497 - DNA, 19 bp, Homo sapiens
  siRNA target sequence for SLCO1C1 (NM_017435.2,1049-1067).
gtgtgcagacggttgcaat

SEQ ID NO: 274498 - DNA, 19 bp, Homo sapiens
  siRNA target sequence for SLCO1C1 (NM_017435.2,1051-1069).
gtgcagacggttgcaatta

SEQ ID NO: 274499 - DNA, 19 bp, Homo sapiens
  siRNA target sequence for SLCO1C1 (NM_017435.2,1053-1071).
gcagacggttgcaattata

SEQ ID NO: 274500 - DNA, 19 bp, Homo sapiens
  siRNA target sequence for SLCO1C1 (NM_017435.2,1056-1074).
gacggttgcaattatagga

SEQ ID NO: 274501 - DNA, 19 bp, Homo sapiens
  siRNA target sequence for SLCO1C1 (NM_017435.2,1089-1107).
cctgttaggctcattatgt

SEQ ID NO: 274502 - DNA, 19 bp, Homo sapiens
  siRNA target sequence for SLCO1C1 (NM_017435.2,1098-1116).
ctcattatgtgccaaacta

SEQ ID NO: 274503 - DNA, 19 bp, Homo sapiens
  siRNA target sequence for SLCO1C1 (NM_017435.2,1109-1127).
ccaaactatatgttgacat

SEQ ID NO: 274504 - DNA, 19 bp, Homo sapiens
  siRNA target sequence for SLCO1C1 (NM_017435.2,1120-1138).
gttgacattggctttgtaa

SEQ ID NO: 274505 - DNA, 19 bp, Homo sapiens
  siRNA target sequence for SLCO1C1 (NM_017435.2,1125-1143).
cattggctttgtaaaccta

SEQ ID NO: 274506 - DNA, 19 bp, Homo sapiens
  siRNA target sequence for SLCO1C1 (NM_017435.2,1188-1206).
ctggtggcttggctatcta

SEQ ID NO: 274507 - DNA, 19 bp, Homo sapiens
  siRNA target sequence for SLCO1C1 (NM_017435.2,1190-1208).
ggtggcttggctatctaat

SEQ ID NO: 274508 - DNA, 19 bp, Homo sapiens
  siRNA target sequence for SLCO1C1 (NM_017435.2,1191-1209).
gtggcttggctatctaata

SEQ ID NO: 274509 - DNA, 19 bp, Homo sapiens
  siRNA target sequence for SLCO1C1 (NM_017435.2,1194-1212).
gcttggctatctaatagca

SEQ ID NO: 274510 - DNA, 19 bp, Homo sapiens
  siRNA target sequence for SLCO1C1 (NM_017435.2,1302-1320).
ctctgagaaatccaagttt

SEQ ID NO: 274511 - DNA, 19 bp, Homo sapiens
  siRNA target sequence for SLCO1C1 (NM_017435.2,1330-1348).
gatcacacagactaccaaa

SEQ ID NO: 274512 - DNA, 19 bp, Homo sapiens
  siRNA target sequence for SLCO1C1 (NM_017435.2,1426-1444).
ccagtatacttcctatatt

SEQ ID NO: 274513 - DNA, 19 bp, Homo sapiens
  siRNA target sequence for SLCO1C1 (NM_017435.2,1429-1447).
gtatacttcctatatttat

SEQ ID NO: 274514 - DNA, 19 bp, Homo sapiens
  siRNA target sequence for SLCO1C1 (NM_017435.2,1451-1469).
caagcactgttcagttcaa

SEQ ID NO: 274515 - DNA, 19 bp, Homo sapiens
  siRNA target sequence for SLCO1C1 (NM_017435.2,1479-1497).
cggcatggtgacgtacaaa

SEQ ID NO: 274516 - DNA, 19 bp, Homo sapiens
  siRNA target sequence for SLCO1C1 (NM_017435.2,1491-1509).
gtacaaaccaaagtacatt

SEQ ID NO: 274517 - DNA, 19 bp, Homo sapiens
  siRNA target sequence for SLCO1C1 (NM_017435.2,1551-1569).
gatcgggctcatcaacatt

SEQ ID NO: 274518 - DNA, 19 bp, Homo sapiens
  siRNA target sequence for SLCO1C1 (NM_017435.2,1574-1592).
cagtggcccttggaatatt

SEQ ID NO: 274519 - DNA, 19 bp, Homo sapiens
  siRNA target sequence for SLCO1C1 (NM_017435.2,1576-1594).
gtggcccttggaatattct

SEQ ID NO: 274520 - DNA, 19 bp, Homo sapiens
  siRNA target sequence for SLCO1C1 (NM_017435.2,1578-1596).
ggcccttggaatattctct

SEQ ID NO: 274521 - DNA, 19 bp, Homo sapiens
  siRNA target sequence for SLCO1C1 (NM_017435.2,1598-1616).
gggggatagttatgaaaaa

SEQ ID NO: 274522 - DNA, 19 bp, Homo sapiens
  siRNA target sequence for SLCO1C1 (NM_017435.2,1634-1652).
gtggagctgcaaaactcta

SEQ ID NO: 274523 - DNA, 19 bp, Homo sapiens
  siRNA target sequence for SLCO1C1 (NM_017435.2,1751-1769).
gaaccaaacctgtctctta

SEQ ID NO: 274524 - DNA, 19 bp, Homo sapiens
  siRNA target sequence for SLCO1C1 (NM_017435.2,1808-1826).
gcaaatgttcagagacaaa

SEQ ID NO: 274525 - DNA, 19 bp, Homo sapiens
  siRNA target sequence for SLCO1C1 (NM_017435.2,1842-1860).
cggtgaaaatggaatcaca

SEQ ID NO: 274526 - DNA, 19 bp, Homo sapiens
  siRNA target sequence for SLCO1C1 (NM_017435.2,1942-1960).
ggaattgcagcttctaaat

SEQ ID NO: 274527 - DNA, 19 bp, Homo sapiens
  siRNA target sequence for SLCO1C1 (NM_017435.2,1951-1969).
gcttctaaatccggaaatt

SEQ ID NO: 274528 - DNA, 19 bp, Homo sapiens
  siRNA target sequence for SLCO1C1 (NM_017435.2,2011-2029).
ccccaaatgtttctgtatt

SEQ ID NO: 274529 - DNA, 19 bp, Homo sapiens
  siRNA target sequence for SLCO1C1 (NM_017435.2,2075-2093).
gcatacctggatacatatt

SEQ ID NO: 274530 - DNA, 19 bp, Homo sapiens
  siRNA target sequence for SLCO1C1 (NM_017435.2,2081-2099).
ctggatacatattacttct

SEQ ID NO: 274531 - DNA, 19 bp, Homo sapiens
  siRNA target sequence for SLCO1C1 (NM_017435.2,2112-2130).
gccacagcttaagtctttt

SEQ ID NO: 274532 - DNA, 19 bp, Homo sapiens
  siRNA target sequence for SLCO1C1 (NM_017435.2,2126-2144).
cttttgccttgggtatcta

SEQ ID NO: 274533 - DNA, 19 bp, Homo sapiens
  siRNA target sequence for SLCO1C1 (NM_017435.2,2133-2151).
cttgggtatctacacatta

SEQ ID NO: 274534 - DNA, 19 bp, Homo sapiens
  siRNA target sequence for SLCO1C1 (NM_017435.2,2136-2154).
gggtatctacacattagca

SEQ ID NO: 274535 - DNA, 19 bp, Homo sapiens
  siRNA target sequence for SLCO1C1 (NM_017435.2,2137-2155).
ggtatctacacattagcaa

SEQ ID NO: 274536 - DNA, 19 bp, Homo sapiens
  siRNA target sequence for SLCO1C1 (NM_017435.2,2138-2156).
gtatctacacattagcaat

SEQ ID NO: 274537 - DNA, 19 bp, Homo sapiens
  siRNA target sequence for SLCO1C1 (NM_017435.2,2145-2163).
cacattagcaataagagtt

SEQ ID NO: 274538 - DNA, 19 bp, Homo sapiens
  siRNA target sequence for SLCO1C1 (NM_017435.2,2334-2352).
cctaagcattgcagtactt

SEQ ID NO: 274539 - DNA, 19 bp, Homo sapiens
  siRNA target sequence for SLCO1C1 (NM_017435.2,2335-2353).
ctaagcattgcagtacttt

SEQ ID NO: 274540 - DNA, 19 bp, Homo sapiens
  siRNA target sequence for SLCO1C1 (NM_017435.2,2339-2357).
gcattgcagtacttttcat

SEQ ID NO: 274541 - DNA, 19 bp, Homo sapiens
  siRNA target sequence for SLCO1C1 (NM_017435.2,2383-2401).
cacagaagttttataacca

SEQ ID NO: 274542 - DNA, 19 bp, Homo sapiens
  siRNA target sequence for SLCO1C1 (NM_017435.2,2414-2432).
caatggtgtctacaagatt

SEQ ID NO: 274543 - DNA, 19 bp, Homo sapiens
  siRNA target sequence for SLCO1C1 (NM_017435.2,2418-2436).
ggtgtctacaagattccaa

SEQ ID NO: 274544 - DNA, 19 bp, Homo sapiens
  siRNA target sequence for SLCO1C1 (NM_017435.2,2423-2441).
ctacaagattccaaaagga

SEQ ID NO: 274545 - DNA, 19 bp, Homo sapiens
  siRNA target sequence for SLCO1C1 (NM_017435.2,2464-2482).
ctgctacaacccaactact

SEQ ID NO: 274546 - DNA, 19 bp, Homo sapiens
  siRNA target sequence for SLCO2B1 (NM_007256.1,387-405).
cggccaagtgtgttccata

SEQ ID NO: 274547 - DNA, 19 bp, Homo sapiens
  siRNA target sequence for SLCO2B1 (NM_007256.1,394-412).
gtgtgttccataacatcaa

SEQ ID NO: 274548 - DNA, 19 bp, Homo sapiens
  siRNA target sequence for SLCO2B1 (NM_007256.1,602-620).
gcaccgaccccgaatgatt

SEQ ID NO: 274549 - DNA, 19 bp, Homo sapiens
  siRNA target sequence for SLCO2B1 (NM_007256.1,899-917).
ctcctacatcgatgacttt

SEQ ID NO: 274550 - DNA, 19 bp, Homo sapiens
  siRNA target sequence for SLCO2B1 (NM_007256.1,1014-1032).
cgcctttatgtggacatta

SEQ ID NO: 274551 - DNA, 19 bp, Homo sapiens
  siRNA target sequence for SLCO2B1 (NM_007256.1,1050-1068).
ggtatcagcctgaccataa

SEQ ID NO: 274552 - DNA, 19 bp, Homo sapiens
  siRNA target sequence for SLCO2B1 (NM_007256.1,1051-1069).
gtatcagcctgaccataaa

SEQ ID NO: 274553 - DNA, 19 bp, Homo sapiens
  siRNA target sequence for SLCO2B1 (NM_007256.1,1319-1337).
gactgtgatccagttcatt

SEQ ID NO: 274554 - DNA, 19 bp, Homo sapiens
  siRNA target sequence for SLCO2B1 (NM_007256.1,1321-1339).
ctgtgatccagttcattaa

SEQ ID NO: 274555 - DNA, 19 bp, Homo sapiens
  siRNA target sequence for SLCO2B1 (NM_007256.1,1634-1652).
cagcctgccgctcttcttt

SEQ ID NO: 274556 - DNA, 19 bp, Homo sapiens
  siRNA target sequence for SLCO2B1 (NM_007256.1,1636-1654).
gcctgccgctcttctttat

SEQ ID NO: 274557 - DNA, 19 bp, Homo sapiens
  siRNA target sequence for SLCO2B1 (NM_007256.1,1750-1768).
gcccattggacggctttaa

SEQ ID NO: 274558 - DNA, 19 bp, Homo sapiens
  siRNA target sequence for SLCO2B1 (NM_007256.1,2175-2193).
gctgtctgtcgctactaca

SEQ ID NO: 274559 - DNA, 19 bp, Homo sapiens
  siRNA target sequence for SLCO2B1 (NM_007256.1,2176-2194).
ctgtctgtcgctactacaa

SEQ ID NO: 274560 - DNA, 19 bp, Homo sapiens
  siRNA target sequence for SLCO2B1 (NM_007256.1,2178-2196).
gtctgtcgctactacaata

SEQ ID NO: 274561 - DNA, 19 bp, Homo sapiens
  siRNA target sequence for SLCO2B1 (NM_007256.1,2255-2273).
gatctgcttcgccttagtt

SEQ ID NO: 274562 - DNA, 19 bp, Homo sapiens
  siRNA target sequence for SLCO2B1 (NM_007256.1,2332-2350).
ctgccgtagagcagcaatt

SEQ ID NO: 274563 - DNA, 19 bp, Homo sapiens
  siRNA target sequence for SLCO2B1 (NM_007256.1,2335-2353).
ccgtagagcagcaattgct

SEQ ID NO: 274564 - DNA, 19 bp, Homo sapiens
  siRNA target sequence for SLCO2B1 (NM_007256.1,2336-2354).
cgtagagcagcaattgcta

SEQ ID NO: 274565 - DNA, 19 bp, Homo sapiens
  siRNA target sequence for SLCO3A1 (NM_013272.2,297-315).
gcttttccaacatcaagat

SEQ ID NO: 274566 - DNA, 19 bp, Homo sapiens
  siRNA target sequence for SLCO3A1 (NM_013272.2,578-596).
ctgacccaccagtacaagt

SEQ ID NO: 274567 - DNA, 19 bp, Homo sapiens
  siRNA target sequence for SLCO3A1 (NM_013272.2,701-719).
cggacggctaccaacatga

SEQ ID NO: 274568 - DNA, 19 bp, Homo sapiens
  siRNA target sequence for SLCO3A1 (NM_013272.2,702-720).
ggacggctaccaacatgat

SEQ ID NO: 274569 - DNA, 19 bp, Homo sapiens
  siRNA target sequence for SLCO3A1 (NM_013272.2,705-723).
cggctaccaacatgatgta

SEQ ID NO: 274570 - DNA, 19 bp, Homo sapiens
  siRNA target sequence for SLCO3A1 (NM_013272.2,707-725).
gctaccaacatgatgtact

SEQ ID NO: 274571 - DNA, 19 bp, Homo sapiens
  siRNA target sequence for SLCO3A1 (NM_013272.2,708-726).
ctaccaacatgatgtactt

SEQ ID NO: 274572 - DNA, 19 bp, Homo sapiens
  siRNA target sequence for SLCO3A1 (NM_013272.2,820-838).
ggactcctcgctctatata

SEQ ID NO: 274573 - DNA, 19 bp, Homo sapiens
  siRNA target sequence for SLCO3A1 (NM_013272.2,823-841).
ctcctcgctctatatagga

SEQ ID NO: 274574 - DNA, 19 bp, Homo sapiens
  siRNA target sequence for SLCO3A1 (NM_013272.2,825-843).
cctcgctctatataggaat

SEQ ID NO: 274575 - DNA, 19 bp, Homo sapiens
  siRNA target sequence for SLCO3A1 (NM_013272.2,847-865).
gttcacgatgctggtattt

SEQ ID NO: 274576 - DNA, 19 bp, Homo sapiens
  siRNA target sequence for SLCO3A1 (NM_013272.2,867-885).
gaccagcctgcgggtttat

SEQ ID NO: 274577 - DNA, 19 bp, Homo sapiens
  siRNA target sequence for SLCO3A1 (NM_013272.2,913-931).
cgtggatgcggtcttcatt

SEQ ID NO: 274578 - DNA, 19 bp, Homo sapiens
  siRNA target sequence for SLCO3A1 (NM_013272.2,923-941).
gtcttcattgacacaagta

SEQ ID NO: 274579 - DNA, 19 bp, Homo sapiens
  siRNA target sequence for SLCO3A1 (NM_013272.2,1098-1116).
ccatgctctccgaaagaga

SEQ ID NO: 274580 - DNA, 19 bp, Homo sapiens
  siRNA target sequence for SLCO3A1 (NM_013272.2,1592-1610).
ccctactcgccctgcaata

SEQ ID NO: 274581 - DNA, 19 bp, Homo sapiens
  siRNA target sequence for SLCO3A1 (NM_013272.2,1593-1611).
cctactcgccctgcaataa

SEQ ID NO: 274582 - DNA, 19 bp, Homo sapiens
  siRNA target sequence for SLCO3A1 (NM_013272.2,1594-1612).
ctactcgccctgcaataat

SEQ ID NO: 274583 - DNA, 19 bp, Homo sapiens
  siRNA target sequence for SLCO3A1 (NM_013272.2,1811-1829).
ctctgtgtgatgtgtatct

SEQ ID NO: 274584 - DNA, 19 bp, Homo sapiens
  siRNA target sequence for SLCO3A1 (NM_013272.2,1890-1908).
gccctgaactcaagtctta

SEQ ID NO: 274585 - DNA, 19 bp, Homo sapiens
  siRNA target sequence for SLCO3A1 (NM_013272.2,1909-1927).
cgctttgggagttcttttt

SEQ ID NO: 274586 - DNA, 19 bp, Homo sapiens
  siRNA target sequence for SLCO3A1 (NM_013272.2,2034-2052).
gcgtcctctacgacaatgt

SEQ ID NO: 274587 - DNA, 19 bp, Homo sapiens
  siRNA target sequence for SLCO3A1 (NM_013272.2,2081-2099).
gccatcgcgctcaaatcct

SEQ ID NO: 274588 - DNA, 19 bp, Homo sapiens
  siRNA target sequence for SLCO3A1 (NM_013272.2,2131-2149).
gtgcctgaggaaaaactat

SEQ ID NO: 274589 - DNA, 19 bp, Homo sapiens
  siRNA target sequence for SLCO3A1 (NM_013272.2,2133-2151).
gcctgaggaaaaactataa

SEQ ID NO: 274590 - DNA, 19 bp, Homo sapiens
  siRNA target sequence for SLCO3A1 (NM_013272.2,2134-2152).
cctgaggaaaaactataaa

SEQ ID NO: 274591 - DNA, 19 bp, Homo sapiens
  siRNA target sequence for SLCO3A1 (NM_013272.2,2182-2200).
gagcaccagtgagttcttt

SEQ ID NO: 274592 - DNA, 19 bp, Homo sapiens
  siRNA target sequence for SLCO3A1 (NM_013272.2,2243-2261).
cccgcaaaccagacacata

SEQ ID NO: 274593 - DNA, 19 bp, Homo sapiens
  siRNA target sequence for SLCO3A1 (NM_013272.2,2254-2272).
gacacataggacaaagttt

SEQ ID NO: 274594 - DNA, 19 bp, Homo sapiens
  siRNA target sequence for SLCO3A1 (NM_013272.2,2258-2276).
cataggacaaagtttatct

SEQ ID NO: 274595 - DNA, 19 bp, Homo sapiens
  siRNA target sequence for SLCO3A1 (NM_013272.2,2291-2309).
catgagtggtgtgaaaaca

SEQ ID NO: 274596 - DNA, 19 bp, Homo sapiens
  siRNA target sequence for SLCO4A1 (NM_016354.3,251-269).
cccaactcagccatggaaa

SEQ ID NO: 274597 - DNA, 19 bp, Homo sapiens
  siRNA target sequence for SLCO4A1 (NM_016354.3,550-568).
gcaggggatgactgtgaat

SEQ ID NO: 274598 - DNA, 19 bp, Homo sapiens
  siRNA target sequence for SLCO4A1 (NM_016354.3,879-897).
gctaccagctggtcttcat

SEQ ID NO: 274599 - DNA, 19 bp, Homo sapiens
  siRNA target sequence for SLCO4A1 (NM_016354.3,981-999).
gctgctcgcccgtctacat

SEQ ID NO: 274600 - DNA, 19 bp, Homo sapiens
  siRNA target sequence for SLCO4A1 (NM_016354.3,1416-1434).
cgttcagccccaagttctt

SEQ ID NO: 274601 - DNA, 19 bp, Homo sapiens
  siRNA target sequence for SLCO4A1 (NM_016354.3,1556-1574).
ggctccgcggtcatcaagt

SEQ ID NO: 274602 - DNA, 19 bp, Homo sapiens
  siRNA target sequence for SLCO4A1 (NM_016354.3,1557-1575).
gctccgcggtcatcaagtt

SEQ ID NO: 274603 - DNA, 19 bp, Homo sapiens
  siRNA target sequence for SLCO4A1 (NM_016354.3,1688-1706).
gaaggccacctgaacctaa

SEQ ID NO: 274604 - DNA, 19 bp, Homo sapiens
  siRNA target sequence for SLCO4A1 (NM_016354.3,1767-1785).
cggacggcctcatgtactt

SEQ ID NO: 274605 - DNA, 19 bp, Homo sapiens
  siRNA target sequence for SLCO4A1 (NM_016354.3,1769-1787).
gacggcctcatgtacttct

SEQ ID NO: 274606 - DNA, 19 bp, Homo sapiens
  siRNA target sequence for SLCO4A1 (NM_016354.3,1860-1878).
gctgtatccctcagaatct

SEQ ID NO: 274607 - DNA, 19 bp, Homo sapiens
  siRNA target sequence for SLCO4A1 (NM_016354.3,1861-1879).
ctgtatccctcagaatctt

SEQ ID NO: 274608 - DNA, 19 bp, Homo sapiens
  siRNA target sequence for SLCO4A1 (NM_016354.3,1940-1958).
ctccttctggttttcatat

SEQ ID NO: 274609 - DNA, 19 bp, Homo sapiens
  siRNA target sequence for SLCO4A1 (NM_016354.3,1949-1967).
gttttcatattcgttgtaa

SEQ ID NO: 274610 - DNA, 19 bp, Homo sapiens
  siRNA target sequence for SLCO4A1 (NM_016354.3,1960-1978).
cgttgtaattttctttaca

SEQ ID NO: 274611 - DNA, 19 bp, Homo sapiens
  siRNA target sequence for SLCO4A1 (NM_016354.3,2056-2074).
ccagtggattgtagttaga

SEQ ID NO: 274612 - DNA, 19 bp, Homo sapiens
  siRNA target sequence for SLCO4A1 (NM_016354.3,2057-2075).
cagtggattgtagttagaa

SEQ ID NO: 274613 - DNA, 19 bp, Homo sapiens
  siRNA target sequence for SLCO4A1 (NM_016354.3,2059-2077).
gtggattgtagttagaata

SEQ ID NO: 274614 - DNA, 19 bp, Homo sapiens
  siRNA target sequence for SLCO4A1 (NM_016354.3,2061-2079).
ggattgtagttagaatact

SEQ ID NO: 274615 - DNA, 19 bp, Homo sapiens
  siRNA target sequence for SLCO4A1 (NM_016354.3,2190-2208).
ccatgagccgctacatact

SEQ ID NO: 274616 - DNA, 19 bp, Homo sapiens
  siRNA target sequence for SLCO4A1 (NM_016354.3,2278-2296).
cctgtcggagtcttcagat

SEQ ID NO: 274617 - DNA, 19 bp, Homo sapiens
  siRNA target sequence for SLCO4A1 (NM_016354.3,2333-2351).
cctgacagtgccacagata

SEQ ID NO: 274618 - DNA, 19 bp, Homo sapiens
  siRNA target sequence for SLCO4C1 (NM_180991.4,290-308).
gaagagcgccaaaggtatt

SEQ ID NO: 274619 - DNA, 19 bp, Homo sapiens
  siRNA target sequence for SLCO4C1 (NM_180991.4,295-313).
gcgccaaaggtattgagaa

SEQ ID NO: 274620 - DNA, 19 bp, Homo sapiens
  siRNA target sequence for SLCO4C1 (NM_180991.4,361-379).
cgtcgccctcccaaatcga

SEQ ID NO: 274621 - DNA, 19 bp, Homo sapiens
  siRNA target sequence for SLCO4C1 (NM_180991.4,362-380).
gtcgccctcccaaatcgaa

SEQ ID NO: 274622 - DNA, 19 bp, Homo sapiens
  siRNA target sequence for SLCO4C1 (NM_180991.4,560-578).
gaacttccatcctcaatgt

SEQ ID NO: 274623 - DNA, 19 bp, Homo sapiens
  siRNA target sequence for SLCO4C1 (NM_180991.4,629-647).
ggccgtcacgcaaggtatt

SEQ ID NO: 274624 - DNA, 19 bp, Homo sapiens
  siRNA target sequence for SLCO4C1 (NM_180991.4,631-649).
ccgtcacgcaaggtattgt

SEQ ID NO: 274625 - DNA, 19 bp, Homo sapiens
  siRNA target sequence for SLCO4C1 (NM_180991.4,632-650).
cgtcacgcaaggtattgta

SEQ ID NO: 274626 - DNA, 19 bp, Homo sapiens
  siRNA target sequence for SLCO4C1 (NM_180991.4,635-653).
cacgcaaggtattgtagtt

SEQ ID NO: 274627 - DNA, 19 bp, Homo sapiens
  siRNA target sequence for SLCO4C1 (NM_180991.4,637-655).
cgcaaggtattgtagttaa

SEQ ID NO: 274628 - DNA, 19 bp, Homo sapiens
  siRNA target sequence for SLCO4C1 (NM_180991.4,648-666).
gtagttaatggcctagtaa

SEQ ID NO: 274629 - DNA, 19 bp, Homo sapiens
  siRNA target sequence for SLCO4C1 (NM_180991.4,716-734).
gactggcctgatttcatca

SEQ ID NO: 274630 - DNA, 19 bp, Homo sapiens
  siRNA target sequence for SLCO4C1 (NM_180991.4,733-751).
caagctacgatatttcatt

SEQ ID NO: 274631 - DNA, 19 bp, Homo sapiens
  siRNA target sequence for SLCO4C1 (NM_180991.4,800-818).
gccgagatggcttgcattt

SEQ ID NO: 274632 - DNA, 19 bp, Homo sapiens
  siRNA target sequence for SLCO4C1 (NM_180991.4,803-821).
gagatggcttgcatttgca

SEQ ID NO: 274633 - DNA, 19 bp, Homo sapiens
  siRNA target sequence for SLCO4C1 (NM_180991.4,834-852).
ggactgggagcacttgtat

SEQ ID NO: 274634 - DNA, 19 bp, Homo sapiens
  siRNA target sequence for SLCO4C1 (NM_180991.4,835-853).
gactgggagcacttgtatt

SEQ ID NO: 274635 - DNA, 19 bp, Homo sapiens
  siRNA target sequence for SLCO4C1 (NM_180991.4,837-855).
ctgggagcacttgtattct

SEQ ID NO: 274636 - DNA, 19 bp, Homo sapiens
  siRNA target sequence for SLCO4C1 (NM_180991.4,839-857).
gggagcacttgtattctca

SEQ ID NO: 274637 - DNA, 19 bp, Homo sapiens
  siRNA target sequence for SLCO4C1 (NM_180991.4,840-858).
ggagcacttgtattctcat

SEQ ID NO: 274638 - DNA, 19 bp, Homo sapiens
  siRNA target sequence for SLCO4C1 (NM_180991.4,906-924).
gacacttgtgtaacaacaa

SEQ ID NO: 274639 - DNA, 19 bp, Homo sapiens
  siRNA target sequence for SLCO4C1 (NM_180991.4,915-933).
gtaacaacaaggaatagca

SEQ ID NO: 274640 - DNA, 19 bp, Homo sapiens
  siRNA target sequence for SLCO4C1 (NM_180991.4,926-944).
gaatagcaccagttgtaca

SEQ ID NO: 274641 - DNA, 19 bp, Homo sapiens
  siRNA target sequence for SLCO4C1 (NM_180991.4,1015-1033).
gaactcctctttatactct

SEQ ID NO: 274642 - DNA, 19 bp, Homo sapiens
  siRNA target sequence for SLCO4C1 (NM_180991.4,1059-1077).
gtgcccacacacaagtctt

SEQ ID NO: 274643 - DNA, 19 bp, Homo sapiens
  siRNA target sequence for SLCO4C1 (NM_180991.4,1068-1086).
cacaagtcttctctctata

SEQ ID NO: 274644 - DNA, 19 bp, Homo sapiens
  siRNA target sequence for SLCO4C1 (NM_180991.4,1070-1088).
caagtcttctctctatata

SEQ ID NO: 274645 - DNA, 19 bp, Homo sapiens
  siRNA target sequence for SLCO4C1 (NM_180991.4,1093-1111).
ccggttatgctatgtcaat

SEQ ID NO: 274646 - DNA, 19 bp, Homo sapiens
  siRNA target sequence for SLCO4C1 (NM_180991.4,1144-1162).
gacaactgctaaccatata

SEQ ID NO: 274647 - DNA, 19 bp, Homo sapiens
  siRNA target sequence for SLCO4C1 (NM_180991.4,1146-1164).
caactgctaaccatataca

SEQ ID NO: 274648 - DNA, 19 bp, Homo sapiens
  siRNA target sequence for SLCO4C1 (NM_180991.4,1151-1169).
gctaaccatatacattgat

SEQ ID NO: 274649 - DNA, 19 bp, Homo sapiens
  siRNA target sequence for SLCO4C1 (NM_180991.4,1229-1247).
gtggattgggtttcttcta

SEQ ID NO: 274650 - DNA, 19 bp, Homo sapiens
  siRNA target sequence for SLCO4C1 (NM_180991.4,1245-1263).
ctatcatggatctttgctt

SEQ ID NO: 274651 - DNA, 19 bp, Homo sapiens
  siRNA target sequence for SLCO4C1 (NM_180991.4,1264-1282).
ggtctttaataataccttt

SEQ ID NO: 274652 - DNA, 19 bp, Homo sapiens
  siRNA target sequence for SLCO4C1 (NM_180991.4,1341-1359).
caggctcatcagagtaata

SEQ ID NO: 274653 - DNA, 19 bp, Homo sapiens
  siRNA target sequence for SLCO4C1 (NM_180991.4,1344-1362).
gctcatcagagtaatagta

SEQ ID NO: 274654 - DNA, 19 bp, Homo sapiens
  siRNA target sequence for SLCO4C1 (NM_180991.4,1345-1363).
ctcatcagagtaatagtaa

SEQ ID NO: 274655 - DNA, 19 bp, Homo sapiens
  siRNA target sequence for SLCO4C1 (NM_180991.4,1407-1425).
gctctaaagaatttgatga

SEQ ID NO: 274656 - DNA, 19 bp, Homo sapiens
  siRNA target sequence for SLCO4C1 (NM_180991.4,1480-1498).
ctactggatttgctacatt

SEQ ID NO: 274657 - DNA, 19 bp, Homo sapiens
  siRNA target sequence for SLCO4C1 (NM_180991.4,1538-1556).
cagcttcgcagctactctt

SEQ ID NO: 274658 - DNA, 19 bp, Homo sapiens
  siRNA target sequence for SLCO4C1 (NM_180991.4,1579-1597).
gagctgctctcggtcaaat

SEQ ID NO: 274659 - DNA, 19 bp, Homo sapiens
  siRNA target sequence for SLCO4C1 (NM_180991.4,1581-1599).
gctgctctcggtcaaattt

SEQ ID NO: 274660 - DNA, 19 bp, Homo sapiens
  siRNA target sequence for SLCO4C1 (NM_180991.4,1582-1600).
ctgctctcggtcaaatttt

SEQ ID NO: 274661 - DNA, 19 bp, Homo sapiens
  siRNA target sequence for SLCO4C1 (NM_180991.4,1678-1696).
cacttacgctgagttttgt

SEQ ID NO: 274662 - DNA, 19 bp, Homo sapiens
  siRNA target sequence for SLCO4C1 (NM_180991.4,1680-1698).
cttacgctgagttttgtat

SEQ ID NO: 274663 - DNA, 19 bp, Homo sapiens
  siRNA target sequence for SLCO4C1 (NM_180991.4,1732-1750).
ctggtgtatctgaatcata

SEQ ID NO: 274664 - DNA, 19 bp, Homo sapiens
  siRNA target sequence for SLCO4C1 (NM_180991.4,1734-1752).
ggtgtatctgaatcatata

SEQ ID NO: 274665 - DNA, 19 bp, Homo sapiens
  siRNA target sequence for SLCO4C1 (NM_180991.4,1775-1793).
cttgatagccccttgtaat

SEQ ID NO: 274666 - DNA, 19 bp, Homo sapiens
  siRNA target sequence for SLCO4C1 (NM_180991.4,1784-1802).
cccttgtaatgccaattgt

SEQ ID NO: 274667 - DNA, 19 bp, Homo sapiens
  siRNA target sequence for SLCO4C1 (NM_180991.4,1785-1803).
ccttgtaatgccaattgta

SEQ ID NO: 274668 - DNA, 19 bp, Homo sapiens
  siRNA target sequence for SLCO4C1 (NM_180991.4,1786-1804).
cttgtaatgccaattgtaa

SEQ ID NO: 274669 - DNA, 19 bp, Homo sapiens
  siRNA target sequence for SLCO4C1 (NM_180991.4,1801-1819).
gtaactgttcgcgatcata

SEQ ID NO: 274670 - DNA, 19 bp, Homo sapiens
  siRNA target sequence for SLCO4C1 (NM_180991.4,1805-1823).
ctgttcgcgatcatattat

SEQ ID NO: 274671 - DNA, 19 bp, Homo sapiens
  siRNA target sequence for SLCO4C1 (NM_180991.4,1807-1825).
gttcgcgatcatattatta

SEQ ID NO: 274672 - DNA, 19 bp, Homo sapiens
  siRNA target sequence for SLCO4C1 (NM_180991.4,1834-1852).
gtggagatggagtccaata

SEQ ID NO: 274673 - DNA, 19 bp, Homo sapiens
  siRNA target sequence for SLCO4C1 (NM_180991.4,1836-1854).
ggagatggagtccaatatt

SEQ ID NO: 274674 - DNA, 19 bp, Homo sapiens
  siRNA target sequence for SLCO4C1 (NM_180991.4,1839-1857).
gatggagtccaatattttt

SEQ ID NO: 274675 - DNA, 19 bp, Homo sapiens
  siRNA target sequence for SLCO4C1 (NM_180991.4,1895-1913).
caggaagccaaaggtatat

SEQ ID NO: 274676 - DNA, 19 bp, Homo sapiens
  siRNA target sequence for SLCO4C1 (NM_180991.4,1902-1920).
ccaaaggtatattacaact

SEQ ID NO: 274677 - DNA, 19 bp, Homo sapiens
  siRNA target sequence for SLCO4C1 (NM_180991.4,2008-2026).
gtgcgaaactgcccatatt

SEQ ID NO: 274678 - DNA, 19 bp, Homo sapiens
  siRNA target sequence for SLCO4C1 (NM_180991.4,2011-2029).
cgaaactgcccatattcct

SEQ ID NO: 274679 - DNA, 19 bp, Homo sapiens
  siRNA target sequence for SLCO4C1 (NM_180991.4,2012-2030).
gaaactgcccatattcctt

SEQ ID NO: 274680 - DNA, 19 bp, Homo sapiens
  siRNA target sequence for SLCO4C1 (NM_180991.4,2066-2084).
ggccggtactcctataact

SEQ ID NO: 274681 - DNA, 19 bp, Homo sapiens
  siRNA target sequence for SLCO4C1 (NM_180991.4,2068-2086).
ccggtactcctataactgt

SEQ ID NO: 274682 - DNA, 19 bp, Homo sapiens
  siRNA target sequence for SLCO4C1 (NM_180991.4,2094-2112).
ctaaggtgtgttaatcaca

SEQ ID NO: 274683 - DNA, 19 bp, Homo sapiens
  siRNA target sequence for SLCO4C1 (NM_180991.4,2124-2142).
ctagccttgggaatacaat

SEQ ID NO: 274684 - DNA, 19 bp, Homo sapiens
  siRNA target sequence for SLCO4C1 (NM_180991.4,2175-2193).
ggaccaattatatttggtt

SEQ ID NO: 274685 - DNA, 19 bp, Homo sapiens
  siRNA target sequence for SLCO4C1 (NM_180991.4,2176-2194).
gaccaattatatttggttt

SEQ ID NO: 274686 - DNA, 19 bp, Homo sapiens
  siRNA target sequence for SLCO4C1 (NM_180991.4,2197-2215).
caatagacagcacatgtat

SEQ ID NO: 274687 - DNA, 19 bp, Homo sapiens
  siRNA target sequence for SLCO4C1 (NM_180991.4,2251-2269).
cttgctggatttatgataa

SEQ ID NO: 274688 - DNA, 19 bp, Homo sapiens
  siRNA target sequence for SLCO4C1 (NM_180991.4,2273-2291).
caagatggcccatatgcta

SEQ ID NO: 274689 - DNA, 19 bp, Homo sapiens
  siRNA target sequence for SLCO4C1 (NM_180991.4,2288-2306).
gctagtagccataagtgtt

SEQ ID NO: 274690 - DNA, 19 bp, Homo sapiens
  siRNA target sequence for SLCO4C1 (NM_180991.4,2289-2307).
ctagtagccataagtgtta

SEQ ID NO: 274691 - DNA, 19 bp, Homo sapiens
  siRNA target sequence for SLCO4C1 (NM_180991.4,2292-2310).
gtagccataagtgttactt

SEQ ID NO: 274692 - DNA, 19 bp, Homo sapiens
  siRNA target sequence for SLCO4C1 (NM_180991.4,2295-2313).
gccataagtgttacttgta

SEQ ID NO: 274693 - DNA, 19 bp, Homo sapiens
  siRNA target sequence for SLCO4C1 (NM_180991.4,2327-2345).
gttcttcaatggatttgca

SEQ ID NO: 274694 - DNA, 19 bp, Homo sapiens
  siRNA target sequence for SLCO4C1 (NM_180991.4,2384-2402).
gtcatttcataaagagaat

SEQ ID NO: 274695 - DNA, 19 bp, Homo sapiens
  siRNA target sequence for SLCO4C1 (NM_180991.4,2399-2417).
gaatgcagttgtgactaat

SEQ ID NO: 274696 - DNA, 19 bp, Homo sapiens
  siRNA target sequence for SLCO5A1 (NM_030958.1,711-729).
ccctcaggtctaagagttt

SEQ ID NO: 274697 - DNA, 19 bp, Homo sapiens
  siRNA target sequence for SLCO5A1 (NM_030958.1,1029-1047).
ccttcatccaggcgttaat

SEQ ID NO: 274698 - DNA, 19 bp, Homo sapiens
  siRNA target sequence for SLCO5A1 (NM_030958.1,1057-1075).
gtacctgagcagcgtaatt

SEQ ID NO: 274699 - DNA, 19 bp, Homo sapiens
  siRNA target sequence for SLCO5A1 (NM_030958.1,1070-1088).
gtaattaccaccattgaaa

SEQ ID NO: 274700 - DNA, 19 bp, Homo sapiens
  siRNA target sequence for SLCO5A1 (NM_030958.1,1091-1109).
cgctacagtctgaagagtt

SEQ ID NO: 274701 - DNA, 19 bp, Homo sapiens
  siRNA target sequence for SLCO5A1 (NM_030958.1,1253-1271).
gccttacctcacttcatct

SEQ ID NO: 274702 - DNA, 19 bp, Homo sapiens
  siRNA target sequence for SLCO5A1 (NM_030958.1,1372-1390).
gaaggactcgggaggaaat

SEQ ID NO: 274703 - DNA, 19 bp, Homo sapiens
  siRNA target sequence for SLCO5A1 (NM_030958.1,1424-1442).
gcgcagattctcattggaa

SEQ ID NO: 274704 - DNA, 19 bp, Homo sapiens
  siRNA target sequence for SLCO5A1 (NM_030958.1,1425-1443).
cgcagattctcattggaat

SEQ ID NO: 274705 - DNA, 19 bp, Homo sapiens
  siRNA target sequence for SLCO5A1 (NM_030958.1,1444-1462).
gggctccacacctatttat

SEQ ID NO: 274706 - DNA, 19 bp, Homo sapiens
  siRNA target sequence for SLCO5A1 (NM_030958.1,1468-1486).
gggaccaacctacttagat

SEQ ID NO: 274707 - DNA, 19 bp, Homo sapiens
  siRNA target sequence for SLCO5A1 (NM_030958.1,1470-1488).
gaccaacctacttagatga

SEQ ID NO: 274708 - DNA, 19 bp, Homo sapiens
  siRNA target sequence for SLCO5A1 (NM_030958.1,1473-1491).
caacctacttagatgacaa

SEQ ID NO: 274709 - DNA, 19 bp, Homo sapiens
  siRNA target sequence for SLCO5A1 (NM_030958.1,1516-1534).
gtacctagccatcatgtat

SEQ ID NO: 274710 - DNA, 19 bp, Homo sapiens
  siRNA target sequence for SLCO5A1 (NM_030958.1,1574-1592).
ggtggacttcttattggtt

SEQ ID NO: 274711 - DNA, 19 bp, Homo sapiens
  siRNA target sequence for SLCO5A1 (NM_030958.1,1680-1698).
ccattgcaatgtttcttgt

SEQ ID NO: 274712 - DNA, 19 bp, Homo sapiens
  siRNA target sequence for SLCO5A1 (NM_030958.1,1697-1715).
gtgatattcccaatgttta

SEQ ID NO: 274713 - DNA, 19 bp, Homo sapiens
  siRNA target sequence for SLCO5A1 (NM_030958.1,1733-1751).
ccacctcgacacaagaaaa

SEQ ID NO: 274714 - DNA, 19 bp, Homo sapiens
  siRNA target sequence for SLCO5A1 (NM_030958.1,1734-1752).
cacctcgacacaagaaaaa

SEQ ID NO: 274715 - DNA, 19 bp, Homo sapiens
  siRNA target sequence for SLCO5A1 (NM_030958.1,1770-1788).
ctgttgatgctgttagtga

SEQ ID NO: 274716 - DNA, 19 bp, Homo sapiens
  siRNA target sequence for SLCO5A1 (NM_030958.1,1826-1844).
caagcggacaaaaaagttt

SEQ ID NO: 274717 - DNA, 19 bp, Homo sapiens
  siRNA target sequence for SLCO5A1 (NM_030958.1,1889-1907).
gctgtcaggatcttaagca

SEQ ID NO: 274718 - DNA, 19 bp, Homo sapiens
  siRNA target sequence for SLCO5A1 (NM_030958.1,1918-1936).
cctttttgtgagtttgtca

SEQ ID NO: 274719 - DNA, 19 bp, Homo sapiens
  siRNA target sequence for SLCO5A1 (NM_030958.1,1958-1976).
gtaactgctttcattacct

SEQ ID NO: 274720 - DNA, 19 bp, Homo sapiens
  siRNA target sequence for SLCO5A1 (NM_030958.1,1987-2005).
gttcatcgagtcacagttt

SEQ ID NO: 274721 - DNA, 19 bp, Homo sapiens
  siRNA target sequence for SLCO5A1 (NM_030958.1,2029-2047).
catctacactggggttatt

SEQ ID NO: 274722 - DNA, 19 bp, Homo sapiens
  siRNA target sequence for SLCO5A1 (NM_030958.1,2075-2093).
gtcctcggaggctacatta

SEQ ID NO: 274723 - DNA, 19 bp, Homo sapiens
  siRNA target sequence for SLCO5A1 (NM_030958.1,2077-2095).
cctcggaggctacattata

SEQ ID NO: 274724 - DNA, 19 bp, Homo sapiens
  siRNA target sequence for SLCO5A1 (NM_030958.1,2078-2096).
ctcggaggctacattataa

SEQ ID NO: 274725 - DNA, 19 bp, Homo sapiens
  siRNA target sequence for SLCO5A1 (NM_030958.1,2124-2142).
ctgcaaaactagcaatgat

SEQ ID NO: 274726 - DNA, 19 bp, Homo sapiens
  siRNA target sequence for SLCO5A1 (NM_030958.1,2190-2208).
gatgtgaaagcattaatct

SEQ ID NO: 274727 - DNA, 19 bp, Homo sapiens
  siRNA target sequence for SLCO5A1 (NM_030958.1,2213-2231).
ggcataaacatcccttata

SEQ ID NO: 274728 - DNA, 19 bp, Homo sapiens
  siRNA target sequence for SLCO5A1 (NM_030958.1,2215-2233).
cataaacatcccttataca

SEQ ID NO: 274729 - DNA, 19 bp, Homo sapiens
  siRNA target sequence for SLCO5A1 (NM_030958.1,2271-2289).
caggaagctgcaacgttaa

SEQ ID NO: 274730 - DNA, 19 bp, Homo sapiens
  siRNA target sequence for SLCO5A1 (NM_030958.1,2273-2291).
ggaagctgcaacgttaatt

SEQ ID NO: 274731 - DNA, 19 bp, Homo sapiens
  siRNA target sequence for SLCO5A1 (NM_030958.1,2284-2302).
cgttaattgtggttgtaaa

SEQ ID NO: 274732 - DNA, 19 bp, Homo sapiens
  siRNA target sequence for SLCO5A1 (NM_030958.1,2298-2316).
gtaaaatacacgagtatga

SEQ ID NO: 274733 - DNA, 19 bp, Homo sapiens
  siRNA target sequence for SLCO5A1 (NM_030958.1,2368-2386).
ctgtgttaatagtggtaat

SEQ ID NO: 274734 - DNA, 19 bp, Homo sapiens
  siRNA target sequence for SLCO5A1 (NM_030958.1,2397-2415).
ggatacggaattatacaga

SEQ ID NO: 274735 - DNA, 19 bp, Homo sapiens
  siRNA target sequence for SLCO5A1 (NM_030958.1,2472-2490).
gtcagctccgtgtggttat

SEQ ID NO: 274736 - DNA, 19 bp, Homo sapiens
  siRNA target sequence for SLCO5A1 (NM_030958.1,2477-2495).
ctccgtgtggttattgtca

SEQ ID NO: 274737 - DNA, 19 bp, Homo sapiens
  siRNA target sequence for SLCO5A1 (NM_030958.1,2485-2503).
ggttattgtcaagacttat

SEQ ID NO: 274738 - DNA, 19 bp, Homo sapiens
  siRNA target sequence for SLCO5A1 (NM_030958.1,2522-2540).
gctgtgtctgggaaatgta

SEQ ID NO: 274739 - DNA, 19 bp, Homo sapiens
  siRNA target sequence for SLCO5A1 (NM_030958.1,2543-2561).
cggacctgcaatactctta

SEQ ID NO: 274740 - DNA, 19 bp, Homo sapiens
  siRNA target sequence for SLCO5A1 (NM_030958.1,2544-2562).
ggacctgcaatactcttat

SEQ ID NO: 274741 - DNA, 19 bp, Homo sapiens
  siRNA target sequence for SLCO5A1 (NM_030958.1,2556-2574).
ctcttatcccattcttagt

SEQ ID NO: 274742 - DNA, 19 bp, Homo sapiens
  siRNA target sequence for SLCO5A1 (NM_030958.1,2558-2576).
cttatcccattcttagttt

SEQ ID NO: 274743 - DNA, 19 bp, Homo sapiens
  siRNA target sequence for SLCO5A1 (NM_030958.1,2610-2628).
cccaaccatcagctatcat

SEQ ID NO: 274744 - DNA, 19 bp, Homo sapiens
  siRNA target sequence for SLCO5A1 (NM_030958.1,2611-2629).
ccaaccatcagctatcata

SEQ ID NO: 274745 - DNA, 19 bp, Homo sapiens
  siRNA target sequence for SLCO5A1 (NM_030958.1,2615-2633).
ccatcagctatcatagtaa

SEQ ID NO: 274746 - DNA, 19 bp, Homo sapiens
  siRNA target sequence for SLCO5A1 (NM_030958.1,2619-2637).
cagctatcatagtaacact

SEQ ID NO: 274747 - DNA, 19 bp, Homo sapiens
  siRNA target sequence for SLCO5A1 (NM_030958.1,2634-2652).
cactcaggtccgtagaaga

SEQ ID NO: 274748 - DNA, 19 bp, Homo sapiens
  siRNA target sequence for SLCO5A1 (NM_030958.1,2672-2690).
ctgggaatgcagtttgttt

SEQ ID NO: 274749 - DNA, 19 bp, Homo sapiens
  siRNA target sequence for SLCO5A1 (NM_030958.1,2695-2713).
gcgaacacttgcatacatt

SEQ ID NO: 274750 - DNA, 19 bp, Homo sapiens
  siRNA target sequence for SLCO5A1 (NM_030958.1,2787-2805).
gttcttgctgggagtacaa

SEQ ID NO: 274751 - DNA, 19 bp, Homo sapiens
  siRNA target sequence for SLCO5A1 (NM_030958.1,2806-2824).
cgtgacgtcgtttcgtttt

SEQ ID NO: 274752 - DNA, 19 bp, Homo sapiens
  siRNA target sequence for SLCO5A1 (NM_030958.1,2811-2829).
cgtcgtttcgttttgtgta

SEQ ID NO: 274753 - DNA, 19 bp, Homo sapiens
  siRNA target sequence for SLCO5A1 (NM_030958.1,2851-2869).
caaattcgttgggtttatt

SEQ ID NO: 274754 - DNA, 19 bp, Homo sapiens
  siRNA target sequence for SLCO5A1 (NM_030958.1,2881-2899).
ggcctggtactccataaaa

SEQ ID NO: 274755 - DNA, 19 bp, Homo sapiens
  siRNA target sequence for SLCO5A1 (NM_030958.1,2882-2900).
gcctggtactccataaaat

SEQ ID NO: 274756 - DNA, 19 bp, Homo sapiens
  siRNA target sequence for SLCO5A1 (NM_030958.1,2883-2901).
cctggtactccataaaata

SEQ ID NO: 274757 - DNA, 19 bp, Homo sapiens
  siRNA target sequence for SLCO5A1 (NM_030958.1,2886-2904).
ggtactccataaaatacaa

SEQ ID NO: 274758 - DNA, 19 bp, Homo sapiens
  siRNA target sequence for SLCO5A1 (NM_030958.1,2923-2941).
gcggaggcagagagaattt

SEQ ID NO: 274759 - DNA, 19 bp, Homo sapiens
  siRNA target sequence for SLCO5A1 (NM_030958.1,2978-2996).
gacaatgcccggactagat

SEQ ID NO: 274760 - DNA, 19 bp, Homo sapiens
  siRNA target sequence for SLCO5A1 (NM_030958.1,2980-2998).
caatgcccggactagatct

SEQ ID NO: 274761 - DNA, 19 bp, Homo sapiens
  siRNA target sequence for SLCO6A1 (NM_173488.2,287-305).
ccggtatctgagactactt

SEQ ID NO: 274762 - DNA, 19 bp, Homo sapiens
  siRNA target sequence for SLCO6A1 (NM_173488.2,303-321).
cttccagaggccttgataa

SEQ ID NO: 274763 - DNA, 19 bp, Homo sapiens
  siRNA target sequence for SLCO6A1 (NM_173488.2,328-346).
gcggtttccgaaaaaggaa

SEQ ID NO: 274764 - DNA, 19 bp, Homo sapiens
  siRNA target sequence for SLCO6A1 (NM_173488.2,411-429).
ggtttgggctgcttagtca

SEQ ID NO: 274765 - DNA, 19 bp, Homo sapiens
  siRNA target sequence for SLCO6A1 (NM_173488.2,436-454).
gctgtgagtgttgcaataa

SEQ ID NO: 274766 - DNA, 19 bp, Homo sapiens
  siRNA target sequence for SLCO6A1 (NM_173488.2,439-457).
gtgagtgttgcaataacat

SEQ ID NO: 274767 - DNA, 19 bp, Homo sapiens
  siRNA target sequence for SLCO6A1 (NM_173488.2,549-567).
gaatatcaactgaaaacca

SEQ ID NO: 274768 - DNA, 19 bp, Homo sapiens
  siRNA target sequence for SLCO6A1 (NM_173488.2,585-603).
gaaaagagttacgatattt

SEQ ID NO: 274769 - DNA, 19 bp, Homo sapiens
  siRNA target sequence for SLCO6A1 (NM_173488.2,590-608).
gagttacgatatttcatct

SEQ ID NO: 274770 - DNA, 19 bp, Homo sapiens
  siRNA target sequence for SLCO6A1 (NM_173488.2,607-625).
ctggcctggtagcaatatt

SEQ ID NO: 274771 - DNA, 19 bp, Homo sapiens
  siRNA target sequence for SLCO6A1 (NM_173488.2,759-777).
gatatttgcgaagaaataa

SEQ ID NO: 274772 - DNA, 19 bp, Homo sapiens
  siRNA target sequence for SLCO6A1 (NM_173488.2,794-812).
ccagagcagtggtatatca

SEQ ID NO: 274773 - DNA, 19 bp, Homo sapiens
  siRNA target sequence for SLCO6A1 (NM_173488.2,795-813).
cagagcagtggtatatcat

SEQ ID NO: 274774 - DNA, 19 bp, Homo sapiens
  siRNA target sequence for SLCO6A1 (NM_173488.2,800-818).
cagtggtatatcattccaa

SEQ ID NO: 274775 - DNA, 19 bp, Homo sapiens
  siRNA target sequence for SLCO6A1 (NM_173488.2,804-822).
ggtatatcattccaatcaa

SEQ ID NO: 274776 - DNA, 19 bp, Homo sapiens
  siRNA target sequence for SLCO6A1 (NM_173488.2,805-823).
gtatatcattccaatcaaa

SEQ ID NO: 274777 - DNA, 19 bp, Homo sapiens
  siRNA target sequence for SLCO6A1 (NM_173488.2,811-829).
cattccaatcaaaatacct

SEQ ID NO: 274778 - DNA, 19 bp, Homo sapiens
  siRNA target sequence for SLCO6A1 (NM_173488.2,820-838).
caaaatacctgtctttctt

SEQ ID NO: 274779 - DNA, 19 bp, Homo sapiens
  siRNA target sequence for SLCO6A1 (NM_173488.2,868-886).
caggaatgcctctttatat

SEQ ID NO: 274780 - DNA, 19 bp, Homo sapiens
  siRNA target sequence for SLCO6A1 (NM_173488.2,871-889).
gaatgcctctttatatcct

SEQ ID NO: 274781 - DNA, 19 bp, Homo sapiens
  siRNA target sequence for SLCO6A1 (NM_173488.2,924-942).
cactcagctggtatctatt

SEQ ID NO: 274782 - DNA, 19 bp, Homo sapiens
  siRNA target sequence for SLCO6A1 (NM_173488.2,930-948).
gctggtatctatttaggta

SEQ ID NO: 274783 - DNA, 19 bp, Homo sapiens
  siRNA target sequence for SLCO6A1 (NM_173488.2,945-963).
ggtattgcagaatgtacat

SEQ ID NO: 274784 - DNA, 19 bp, Homo sapiens
  siRNA target sequence for SLCO6A1 (NM_173488.2,973-991).
gatatgctctgggttatgt

SEQ ID NO: 274785 - DNA, 19 bp, Homo sapiens
  siRNA target sequence for SLCO6A1 (NM_173488.2,992-1010).
gctaggagcaccactagtt

SEQ ID NO: 274786 - DNA, 19 bp, Homo sapiens
  siRNA target sequence for SLCO6A1 (NM_173488.2,993-1011).
ctaggagcaccactagtta

SEQ ID NO: 274787 - DNA, 19 bp, Homo sapiens
  siRNA target sequence for SLCO6A1 (NM_173488.2,997-1015).
gagcaccactagttaaagt

SEQ ID NO: 274788 - DNA, 19 bp, Homo sapiens
  siRNA target sequence for SLCO6A1 (NM_173488.2,1014-1032).
gtccctgagaatactactt

SEQ ID NO: 274789 - DNA, 19 bp, Homo sapiens
  siRNA target sequence for SLCO6A1 (NM_173488.2,1110-1128).
gtcgttgcatggtgtacat

SEQ ID NO: 274790 - DNA, 19 bp, Homo sapiens
  siRNA target sequence for SLCO6A1 (NM_173488.2,1112-1130).
cgttgcatggtgtacatta

SEQ ID NO: 274791 - DNA, 19 bp, Homo sapiens
  siRNA target sequence for SLCO6A1 (NM_173488.2,1113-1131).
gttgcatggtgtacattaa

SEQ ID NO: 274792 - DNA, 19 bp, Homo sapiens
  siRNA target sequence for SLCO6A1 (NM_173488.2,1120-1138).
ggtgtacattaataccatt

SEQ ID NO: 274793 - DNA, 19 bp, Homo sapiens
  siRNA target sequence for SLCO6A1 (NM_173488.2,1134-1152).
ccattgtcatgctttccaa

SEQ ID NO: 274794 - DNA, 19 bp, Homo sapiens
  siRNA target sequence for SLCO6A1 (NM_173488.2,1135-1153).
cattgtcatgctttccaaa

SEQ ID NO: 274795 - DNA, 19 bp, Homo sapiens
  siRNA target sequence for SLCO6A1 (NM_173488.2,1162-1180).
caggttcaacacggataaa

SEQ ID NO: 274796 - DNA, 19 bp, Homo sapiens
  siRNA target sequence for SLCO6A1 (NM_173488.2,1239-1257).
ggaactaatatcaaggatt

SEQ ID NO: 274797 - DNA, 19 bp, Homo sapiens
  siRNA target sequence for SLCO6A1 (NM_173488.2,1305-1323).
ctagctctgtcaaaagcta

SEQ ID NO: 274798 - DNA, 19 bp, Homo sapiens
  siRNA target sequence for SLCO6A1 (NM_173488.2,1458-1476).
ctgggaggtgtcattgttt

SEQ ID NO: 274799 - DNA, 19 bp, Homo sapiens
  siRNA target sequence for SLCO6A1 (NM_173488.2,1495-1513).
gtaaagcccttatgagatt

SEQ ID NO: 274800 - DNA, 19 bp, Homo sapiens
  siRNA target sequence for SLCO6A1 (NM_173488.2,1539-1557).
cttatactgcttgtgttta

SEQ ID NO: 274801 - DNA, 19 bp, Homo sapiens
  siRNA target sequence for SLCO6A1 (NM_173488.2,1570-1588).
gctgtaatccagtgcaatt

SEQ ID NO: 274802 - DNA, 19 bp, Homo sapiens
  siRNA target sequence for SLCO6A1 (NM_173488.2,1583-1601).
gcaatttgctgggatcaat

SEQ ID NO: 274803 - DNA, 19 bp, Homo sapiens
  siRNA target sequence for SLCO6A1 (NM_173488.2,1590-1608).
gctgggatcaatgaagatt

SEQ ID NO: 274804 - DNA, 19 bp, Homo sapiens
  siRNA target sequence for SLCO6A1 (NM_173488.2,1637-1655).
cacggctccttgcaatgaa

SEQ ID NO: 274805 - DNA, 19 bp, Homo sapiens
  siRNA target sequence for SLCO6A1 (NM_173488.2,1660-1678).
gtagatgctcatcttcaat

SEQ ID NO: 274806 - DNA, 19 bp, Homo sapiens
  siRNA target sequence for SLCO6A1 (NM_173488.2,1726-1744).
gctttgcagggtgtacata

SEQ ID NO: 274807 - DNA, 19 bp, Homo sapiens
  siRNA target sequence for SLCO6A1 (NM_173488.2,1727-1745).
ctttgcagggtgtacatat

SEQ ID NO: 274808 - DNA, 19 bp, Homo sapiens
  siRNA target sequence for SLCO6A1 (NM_173488.2,1731-1749).
gcagggtgtacatattcta

SEQ ID NO: 274809 - DNA, 19 bp, Homo sapiens
  siRNA target sequence for SLCO6A1 (NM_173488.2,1732-1750).
cagggtgtacatattctaa

SEQ ID NO: 274810 - DNA, 19 bp, Homo sapiens
  siRNA target sequence for SLCO6A1 (NM_173488.2,1819-1837).
cagaaggtgattttattga

SEQ ID NO: 274811 - DNA, 19 bp, Homo sapiens
  siRNA target sequence for SLCO6A1 (NM_173488.2,1840-1858).
ccagacccgggaaatgtga

SEQ ID NO: 274812 - DNA, 19 bp, Homo sapiens
  siRNA target sequence for SLCO6A1 (NM_173488.2,1841-1859).
cagacccgggaaatgtgat

SEQ ID NO: 274813 - DNA, 19 bp, Homo sapiens
  siRNA target sequence for SLCO6A1 (NM_173488.2,1857-1875).
gatgcaaagtgctataagt

SEQ ID NO: 274814 - DNA, 19 bp, Homo sapiens
  siRNA target sequence for SLCO6A1 (NM_173488.2,1921-1939).
gtttttctggtgtaccaat

SEQ ID NO: 274815 - DNA, 19 bp, Homo sapiens
  siRNA target sequence for SLCO6A1 (NM_173488.2,1955-1973).
gcgggttgtacctgacaaa

SEQ ID NO: 274816 - DNA, 19 bp, Homo sapiens
  siRNA target sequence for SLCO6A1 (NM_173488.2,1985-2003).
ggccttgggtgtaagctat

SEQ ID NO: 274817 - DNA, 19 bp, Homo sapiens
  siRNA target sequence for SLCO6A1 (NM_173488.2,1995-2013).
gtaagctatgtgattttga

SEQ ID NO: 274818 - DNA, 19 bp, Homo sapiens
  siRNA target sequence for SLCO6A1 (NM_173488.2,2031-2049).
cctggaccatcaatcttta

SEQ ID NO: 274819 - DNA, 19 bp, Homo sapiens
  siRNA target sequence for SLCO6A1 (NM_173488.2,2032-2050).
ctggaccatcaatctttaa

SEQ ID NO: 274820 - DNA, 19 bp, Homo sapiens
  siRNA target sequence for SLCO6A1 (NM_173488.2,2054-2072).
gtcaggagaaacttcttgt

SEQ ID NO: 274821 - DNA, 19 bp, Homo sapiens
  siRNA target sequence for SLCO6A1 (NM_173488.2,2056-2074).
caggagaaacttcttgtat

SEQ ID NO: 274822 - DNA, 19 bp, Homo sapiens
  siRNA target sequence for SLCO6A1 (NM_173488.2,2102-2120).
cacaggacgttgttggata

SEQ ID NO: 274823 - DNA, 19 bp, Homo sapiens
  siRNA target sequence for SLCO6A1 (NM_173488.2,2104-2122).
caggacgttgttggatata

SEQ ID NO: 274824 - DNA, 19 bp, Homo sapiens
  siRNA target sequence for SLCO6A1 (NM_173488.2,2107-2125).
gacgttgttggatatataa

SEQ ID NO: 274825 - DNA, 19 bp, Homo sapiens
  siRNA target sequence for SLCO6A1 (NM_173488.2,2109-2127).
cgttgttggatatataaca

SEQ ID NO: 274826 - DNA, 19 bp, Homo sapiens
  siRNA target sequence for SLCO6A1 (NM_173488.2,2182-2200).
ctatcatcttcactactat

SEQ ID NO: 274827 - DNA, 19 bp, Homo sapiens
  siRNA target sequence for SLCO6A1 (NM_173488.2,2194-2212).
ctactattgcatttttcat

SEQ ID NO: 274828 - DNA, 19 bp, Homo sapiens
  siRNA target sequence for SMBP (NM_020123.2,307-325).
gcacgaacacacgtatcaa

SEQ ID NO: 274829 - DNA, 19 bp, Homo sapiens
  siRNA target sequence for SMBP (NM_020123.2,311-329).
gaacacacgtatcaagata

SEQ ID NO: 274830 - DNA, 19 bp, Homo sapiens
  siRNA target sequence for SMBP (NM_020123.2,332-350).
gaggaagttgtcttatgga

SEQ ID NO: 274831 - DNA, 19 bp, Homo sapiens
  siRNA target sequence for SMBP (NM_020123.2,357-375).
ctgttgggccctaccataa

SEQ ID NO: 274832 - DNA, 19 bp, Homo sapiens
  siRNA target sequence for SMBP (NM_020123.2,367-385).
ctaccataatcgtcaagaa

SEQ ID NO: 274833 - DNA, 19 bp, Homo sapiens
  siRNA target sequence for SMBP (NM_020123.2,377-395).
cgtcaagaaacatataagt

SEQ ID NO: 274834 - DNA, 19 bp, Homo sapiens
  siRNA target sequence for SMBP (NM_020123.2,378-396).
gtcaagaaacatataagta

SEQ ID NO: 274835 - DNA, 19 bp, Homo sapiens
  siRNA target sequence for SMBP (NM_020123.2,380-398).
caagaaacatataagtact

SEQ ID NO: 274836 - DNA, 19 bp, Homo sapiens
  siRNA target sequence for SMBP (NM_020123.2,387-405).
catataagtacttttcact

SEQ ID NO: 274837 - DNA, 19 bp, Homo sapiens
  siRNA target sequence for SMBP (NM_020123.2,416-434).
gtggggtcaaaaaaaagta

SEQ ID NO: 274838 - DNA, 19 bp, Homo sapiens
  siRNA target sequence for SMBP (NM_020123.2,419-437).
gggtcaaaaaaaagtatca

SEQ ID NO: 274839 - DNA, 19 bp, Homo sapiens
  siRNA target sequence for SMBP (NM_020123.2,470-488).
caaggggttgaattggaat

SEQ ID NO: 274840 - DNA, 19 bp, Homo sapiens
  siRNA target sequence for SMBP (NM_020123.2,521-539).
gtgatgccagccacttact

SEQ ID NO: 274841 - DNA, 19 bp, Homo sapiens
  siRNA target sequence for SMBP (NM_020123.2,527-545).
ccagccacttactgtgaaa

SEQ ID NO: 274842 - DNA, 19 bp, Homo sapiens
  siRNA target sequence for SMBP (NM_020123.2,531-549).
ccacttactgtgaaattga

SEQ ID NO: 274843 - DNA, 19 bp, Homo sapiens
  siRNA target sequence for SMBP (NM_020123.2,584-602).
gccataaaaaatcattact

SEQ ID NO: 274844 - DNA, 19 bp, Homo sapiens
  siRNA target sequence for SMBP (NM_020123.2,601-619).
ctggtaccagatgtacata

SEQ ID NO: 274845 - DNA, 19 bp, Homo sapiens
  siRNA target sequence for SMBP (NM_020123.2,608-626).
cagatgtacatagatgatt

SEQ ID NO: 274846 - DNA, 19 bp, Homo sapiens
  siRNA target sequence for SMBP (NM_020123.2,616-634).
catagatgatttaccaata

SEQ ID NO: 274847 - DNA, 19 bp, Homo sapiens
  siRNA target sequence for SMBP (NM_020123.2,684-702).
ggacctataaaaaacttga

SEQ ID NO: 274848 - DNA, 19 bp, Homo sapiens
  siRNA target sequence for SMBP (NM_020123.2,717-735).
gaaatcgaattgttgatgt

SEQ ID NO: 274849 - DNA, 19 bp, Homo sapiens
  siRNA target sequence for SMBP (NM_020123.2,723-741).
gaattgttgatgttaatct

SEQ ID NO: 274850 - DNA, 19 bp, Homo sapiens
  siRNA target sequence for SMBP (NM_020123.2,728-746).
gttgatgttaatctaacta

SEQ ID NO: 274851 - DNA, 19 bp, Homo sapiens
  siRNA target sequence for SMBP (NM_020123.2,758-776).
gtgaaactggttccaaata

SEQ ID NO: 274852 - DNA, 19 bp, Homo sapiens
  siRNA target sequence for SMBP (NM_020123.2,872-890).
catcggattcattggtttt

SEQ ID NO: 274853 - DNA, 19 bp, Homo sapiens
  siRNA target sequence for SMBP (NM_020123.2,877-895).
gattcattggttttcaatt

SEQ ID NO: 274854 - DNA, 19 bp, Homo sapiens
  siRNA target sequence for SMBP (NM_020123.2,922-940).
cttggtgggcttagtttca

SEQ ID NO: 274855 - DNA, 19 bp, Homo sapiens
  siRNA target sequence for SMBP (NM_020123.2,926-944).
gtgggcttagtttcaatga

SEQ ID NO: 274856 - DNA, 19 bp, Homo sapiens
  siRNA target sequence for SMBP (NM_020123.2,928-946).
gggcttagtttcaatgatt

SEQ ID NO: 274857 - DNA, 19 bp, Homo sapiens
  siRNA target sequence for SMBP (NM_020123.2,968-986).
gattatgctcggtacagta

SEQ ID NO: 274858 - DNA, 19 bp, Homo sapiens
  siRNA target sequence for SMBP (NM_020123.2,1406-1424).
gccgtttgttgcatctgtt

SEQ ID NO: 274859 - DNA, 19 bp, Homo sapiens
  siRNA target sequence for SMBP (NM_020123.2,1458-1476).
caatacttggccgaaatct

SEQ ID NO: 274860 - DNA, 19 bp, Homo sapiens
  siRNA target sequence for SMBP (NM_020123.2,1492-1510).
ctttccttgtcgtgtcaat

SEQ ID NO: 274861 - DNA, 19 bp, Homo sapiens
  siRNA target sequence for SMBP (NM_020123.2,1546-1564).
catggagcctgcggttatt

SEQ ID NO: 274862 - DNA, 19 bp, Homo sapiens
  siRNA target sequence for SMBP (NM_020123.2,1549-1567).
ggagcctgcggttattgtt

SEQ ID NO: 274863 - DNA, 19 bp, Homo sapiens
  siRNA target sequence for SMBP (NM_020123.2,1550-1568).
gagcctgcggttattgttt

SEQ ID NO: 274864 - DNA, 19 bp, Homo sapiens
  siRNA target sequence for SMBP (NM_020123.2,1570-1588).
cctgggtggaattttacct

SEQ ID NO: 274865 - DNA, 19 bp, Homo sapiens
  siRNA target sequence for SMBP (NM_020123.2,1577-1595).
ggaattttaccttttggtt

SEQ ID NO: 274866 - DNA, 19 bp, Homo sapiens
  siRNA target sequence for SMBP (NM_020123.2,1596-1614).
caatctttattgaaatgta

SEQ ID NO: 274867 - DNA, 19 bp, Homo sapiens
  siRNA target sequence for SMBP (NM_020123.2,1626-1644).
cgtctttctgggcatataa

SEQ ID NO: 274868 - DNA, 19 bp, Homo sapiens
  siRNA target sequence for SMBP (NM_020123.2,1633-1651).
ctgggcatataagatctat

SEQ ID NO: 274869 - DNA, 19 bp, Homo sapiens
  siRNA target sequence for SMBP (NM_020123.2,1635-1653).
gggcatataagatctatta

SEQ ID NO: 274870 - DNA, 19 bp, Homo sapiens
  siRNA target sequence for SMBP (NM_020123.2,1636-1654).
ggcatataagatctattat

SEQ ID NO: 274871 - DNA, 19 bp, Homo sapiens
  siRNA target sequence for SMBP (NM_020123.2,1682-1700).
gttatcctgtgcattgtga

SEQ ID NO: 274872 - DNA, 19 bp, Homo sapiens
  siRNA target sequence for SMBP (NM_020123.2,1758-1776).
ggcaatggacaagttttct

SEQ ID NO: 274873 - DNA, 19 bp, Homo sapiens
  siRNA target sequence for SMBP (NM_020123.2,1785-1803).
catcaactgcaatctatgt

SEQ ID NO: 274874 - DNA, 19 bp, Homo sapiens
  siRNA target sequence for SMBP (NM_020123.2,1788-1806).
caactgcaatctatgttta

SEQ ID NO: 274875 - DNA, 19 bp, Homo sapiens
  siRNA target sequence for SMBP (NM_020123.2,1877-1895).
ggatatatggcggtattta

SEQ ID NO: 274876 - DNA, 19 bp, Homo sapiens
  siRNA target sequence for SMBP (NM_020123.2,1917-1935).
gtggagcgattggttacat

SEQ ID NO: 274877 - DNA, 19 bp, Homo sapiens
  siRNA target sequence for SMBP (NM_020123.2,1944-1962).
gtgcctttgtccgaaaaat

SEQ ID NO: 274878 - DNA, 19 bp, Homo sapiens
  siRNA target sequence for SMBP (NM_020123.2,1947-1965).
cctttgtccgaaaaatcta

SEQ ID NO: 274879 - DNA, 19 bp, Homo sapiens
  siRNA target sequence for SMBP (NM_020123.2,1952-1970).
gtccgaaaaatctatacta

SEQ ID NO: 274880 - DNA, 19 bp, Homo sapiens
  siRNA target sequence for SMBP (NM_020123.2,1954-1972).
ccgaaaaatctatactaat

SEQ ID NO: 274881 - DNA, 19 bp, Homo sapiens
  siRNA target sequence for SPINL (NM_032038.1,491-509).
gccgttcggctctcatagt

SEQ ID NO: 274882 - DNA, 19 bp, Homo sapiens
  siRNA target sequence for SPINL (NM_032038.1,512-530).
cggtgctgtgctacatcaa

SEQ ID NO: 274883 - DNA, 19 bp, Homo sapiens
  siRNA target sequence for SPINL (NM_032038.1,631-649).
gtgttcatctccagttaca

SEQ ID NO: 274884 - DNA, 19 bp, Homo sapiens
  siRNA target sequence for SPINL (NM_032038.1,684-702).
caggtacaatcggaagtat

SEQ ID NO: 274885 - DNA, 19 bp, Homo sapiens
  siRNA target sequence for SPINL (NM_032038.1,686-704).
ggtacaatcggaagtatct

SEQ ID NO: 274886 - DNA, 19 bp, Homo sapiens
  siRNA target sequence for SPINL (NM_032038.1,807-825).
ggtcggggaggccagttat

SEQ ID NO: 274887 - DNA, 19 bp, Homo sapiens
  siRNA target sequence for SPINL (NM_032038.1,808-826).
gtcggggaggccagttatt

SEQ ID NO: 274888 - DNA, 19 bp, Homo sapiens
  siRNA target sequence for SPINL (NM_032038.1,940-958).
ggctccaaagtgaaggata

SEQ ID NO: 274889 - DNA, 19 bp, Homo sapiens
  siRNA target sequence for SPINL (NM_032038.1,1463-1481).
gcatcgtggccacttatat

SEQ ID NO: 274890 - DNA, 19 bp, Homo sapiens
  siRNA target sequence for SPINL (NM_032038.1,1464-1482).
catcgtggccacttatatt

SEQ ID NO: 274891 - DNA, 19 bp, Homo sapiens
  siRNA target sequence for SPINL (NM_032038.1,1716-1734).
catgctctgcgcgtttgtt

SEQ ID NO: 274892 - DNA, 19 bp, Homo sapiens
  siRNA target sequence for SV2A (NM_014849.1,451-469).
gagaccgggcagctttcat

SEQ ID NO: 274893 - DNA, 19 bp, Homo sapiens
  siRNA target sequence for SV2A (NM_014849.1,490-508).
ctaaggaagtcaaaaagca

SEQ ID NO: 274894 - DNA, 19 bp, Homo sapiens
  siRNA target sequence for SV2A (NM_014849.1,1028-1046).
cctgtccgactccaacaaa

SEQ ID NO: 274895 - DNA, 19 bp, Homo sapiens
  siRNA target sequence for SV2A (NM_014849.1,1245-1263).
gggtccatccccattgtct

SEQ ID NO: 274896 - DNA, 19 bp, Homo sapiens
  siRNA target sequence for SV2A (NM_014849.1,1382-1400).
ccactatgggtggagtttt

SEQ ID NO: 274897 - DNA, 19 bp, Homo sapiens
  siRNA target sequence for SV2A (NM_014849.1,1454-1472).
cgcctttccttctgtgttt

SEQ ID NO: 274898 - DNA, 19 bp, Homo sapiens
  siRNA target sequence for SV2A (NM_014849.1,1554-1572).
ctgaagcaggtccatgata

SEQ ID NO: 274899 - DNA, 19 bp, Homo sapiens
  siRNA target sequence for SV2A (NM_014849.1,1599-1617).
gagcgagtgttctcagtaa

SEQ ID NO: 274900 - DNA, 19 bp, Homo sapiens
  siRNA target sequence for SV2A (NM_014849.1,1619-1637).
ccacattaagacgattcat

SEQ ID NO: 274901 - DNA, 19 bp, Homo sapiens
  siRNA target sequence for SV2A (NM_014849.1,1745-1763).
ctgttttggtcccgaatat

SEQ ID NO: 274902 - DNA, 19 bp, Homo sapiens
  siRNA target sequence for SV2A (NM_014849.1,1767-1785).
cgcatcactctgatgatga

SEQ ID NO: 274903 - DNA, 19 bp, Homo sapiens
  siRNA target sequence for SV2A (NM_014849.1,1875-1893).
gcatcccgcaccaaagtgt

SEQ ID NO: 274904 - DNA, 19 bp, Homo sapiens
  siRNA target sequence for SV2A (NM_014849.1,1876-1894).
catcccgcaccaaagtgtt

SEQ ID NO: 274905 - DNA, 19 bp, Homo sapiens
  siRNA target sequence for SV2A (NM_014849.1,1902-1920).
gagcgcgtagagcatgtaa

SEQ ID NO: 274906 - DNA, 19 bp, Homo sapiens
  siRNA target sequence for SV2A (NM_014849.1,1904-1922).
gcgcgtagagcatgtaact

SEQ ID NO: 274907 - DNA, 19 bp, Homo sapiens
  siRNA target sequence for SV2A (NM_014849.1,1905-1923).
cgcgtagagcatgtaactt

SEQ ID NO: 274908 - DNA, 19 bp, Homo sapiens
  siRNA target sequence for SV2A (NM_014849.1,1906-1924).
gcgtagagcatgtaacttt

SEQ ID NO: 274909 - DNA, 19 bp, Homo sapiens
  siRNA target sequence for SV2A (NM_014849.1,1907-1925).
cgtagagcatgtaactttt

SEQ ID NO: 274910 - DNA, 19 bp, Homo sapiens
  siRNA target sequence for SV2A (NM_014849.1,1967-1985).
cttcaatgacaagttcatt

SEQ ID NO: 274911 - DNA, 19 bp, Homo sapiens
  siRNA target sequence for SV2A (NM_014849.1,2021-2039).
cctgtttgaagagtgttat

SEQ ID NO: 274912 - DNA, 19 bp, Homo sapiens
  siRNA target sequence for SV2A (NM_014849.1,2073-2091).
cgcaactgcacattcatca

SEQ ID NO: 274913 - DNA, 19 bp, Homo sapiens
  siRNA target sequence for SV2A (NM_014849.1,2093-2111).
cactgtgttctataacact

SEQ ID NO: 274914 - DNA, 19 bp, Homo sapiens
  siRNA target sequence for SV2A (NM_014849.1,2138-2156).
cagccgtctgataaacagt

SEQ ID NO: 274915 - DNA, 19 bp, Homo sapiens
  siRNA target sequence for SV2A (NM_014849.1,2142-2160).
cgtctgataaacagtacat

SEQ ID NO: 274916 - DNA, 19 bp, Homo sapiens
  siRNA target sequence for SV2A (NM_014849.1,2143-2161).
gtctgataaacagtacatt

SEQ ID NO: 274917 - DNA, 19 bp, Homo sapiens
  siRNA target sequence for SV2A (NM_014849.1,2155-2173).
gtacattcctgcacaacaa

SEQ ID NO: 274918 - DNA, 19 bp, Homo sapiens
  siRNA target sequence for SV2A (NM_014849.1,2208-2226).
gaaggtgcctacatggtat

SEQ ID NO: 274919 - DNA, 19 bp, Homo sapiens
  siRNA target sequence for SV2A (NM_014849.1,2211-2229).
ggtgcctacatggtatact

SEQ ID NO: 274920 - DNA, 19 bp, Homo sapiens
  siRNA target sequence for SV2A (NM_014849.1,2212-2230).
gtgcctacatggtatactt

SEQ ID NO: 274921 - DNA, 19 bp, Homo sapiens
  siRNA target sequence for SV2A (NM_014849.1,2300-2318).
cggcaggctcagaatgctt

SEQ ID NO: 274922 - DNA, 19 bp, Homo sapiens
  siRNA target sequence for SV2A (NM_014849.1,2441-2459).
ggacgtgttgactgttgaa

SEQ ID NO: 274923 - DNA, 19 bp, Homo sapiens
  siRNA target sequence for SV2B (NM_014848.1,176-194).
caagtatcaggacaattat

SEQ ID NO: 274924 - DNA, 19 bp, Homo sapiens
  siRNA target sequence for SV2B (NM_014848.1,526-544).
ccgatggggtggaagtgtt

SEQ ID NO: 274925 - DNA, 19 bp, Homo sapiens
  siRNA target sequence for SV2B (NM_014848.1,607-625).
gaatgctagggatgatagt

SEQ ID NO: 274926 - DNA, 19 bp, Homo sapiens
  siRNA target sequence for SV2B (NM_014848.1,661-679).
gaggcctggctgataagct

SEQ ID NO: 274927 - DNA, 19 bp, Homo sapiens
  siRNA target sequence for SV2B (NM_014848.1,743-761).
cttcgtgcagggatatgga

SEQ ID NO: 274928 - DNA, 19 bp, Homo sapiens
  siRNA target sequence for SV2B (NM_014848.1,803-821).
gggtgctctaccgattgtt

SEQ ID NO: 274929 - DNA, 19 bp, Homo sapiens
  siRNA target sequence for SV2B (NM_014848.1,804-822).
ggtgctctaccgattgttt

SEQ ID NO: 274930 - DNA, 19 bp, Homo sapiens
  siRNA target sequence for SV2B (NM_014848.1,805-823).
gtgctctaccgattgtttt

SEQ ID NO: 274931 - DNA, 19 bp, Homo sapiens
  siRNA target sequence for SV2B (NM_014848.1,929-947).
gagcatcatcccacactat

SEQ ID NO: 274932 - DNA, 19 bp, Homo sapiens
  siRNA target sequence for SV2B (NM_014848.1,988-1006).
gctggagagtgtttgtcat

SEQ ID NO: 274933 - DNA, 19 bp, Homo sapiens
  siRNA target sequence for SV2B (NM_014848.1,1169-1187).
cacggtttccaacatcaaa

SEQ ID NO: 274934 - DNA, 19 bp, Homo sapiens
  siRNA target sequence for SV2B (NM_014848.1,1248-1266).
cgctggctggtcagattca

SEQ ID NO: 274935 - DNA, 19 bp, Homo sapiens
  siRNA target sequence for SV2B (NM_014848.1,1277-1295).
caagcaggtctgggataat

SEQ ID NO: 274936 - DNA, 19 bp, Homo sapiens
  siRNA target sequence for SV2B (NM_014848.1,1318-1336).
cctacagaatgaatacact

SEQ ID NO: 274937 - DNA, 19 bp, Homo sapiens
  siRNA target sequence for SV2B (NM_014848.1,1409-1427).
ccgctattttcaagatgaa

SEQ ID NO: 274938 - DNA, 19 bp, Homo sapiens
  siRNA target sequence for SV2B (NM_014848.1,1484-1502).
caacttcacgatggaaaat

SEQ ID NO: 274939 - DNA, 19 bp, Homo sapiens
  siRNA target sequence for SV2B (NM_014848.1,1508-1526).
ccaccaacatgggaaactt

SEQ ID NO: 274940 - DNA, 19 bp, Homo sapiens
  siRNA target sequence for SV2B (NM_014848.1,1518-1536).
gggaaacttgtgaatgata

SEQ ID NO: 274941 - DNA, 19 bp, Homo sapiens
  siRNA target sequence for SV2B (NM_014848.1,1519-1537).
ggaaacttgtgaatgataa

SEQ ID NO: 274942 - DNA, 19 bp, Homo sapiens
  siRNA target sequence for SV2B (NM_014848.1,1538-1556).
gttcacaagaatgtacttt

SEQ ID NO: 274943 - DNA, 19 bp, Homo sapiens
  siRNA target sequence for SV2B (NM_014848.1,1583-1601).
ctttgacgagtgctatttt

SEQ ID NO: 274944 - DNA, 19 bp, Homo sapiens
  siRNA target sequence for SV2B (NM_014848.1,1605-1623).
gacgtaacatcaacagata

SEQ ID NO: 274945 - DNA, 19 bp, Homo sapiens
  siRNA target sequence for SV2B (NM_014848.1,1643-1661).
cattgaatcaaccatcttt

SEQ ID NO: 274946 - DNA, 19 bp, Homo sapiens
  siRNA target sequence for SV2B (NM_014848.1,1647-1665).
gaatcaaccatcttttaca

SEQ ID NO: 274947 - DNA, 19 bp, Homo sapiens
  siRNA target sequence for SV2B (NM_014848.1,1674-1692).
ctctacgagcacaagttca

SEQ ID NO: 274948 - DNA, 19 bp, Homo sapiens
  siRNA target sequence for SV2B (NM_014848.1,1811-1829).
cttacccgggaacatcatt

SEQ ID NO: 274949 - DNA, 19 bp, Homo sapiens
  siRNA target sequence for SV2B (NM_014848.1,1833-1851).
gccctgctcatggatagaa

SEQ ID NO: 274950 - DNA, 19 bp, Homo sapiens
  siRNA target sequence for SV2B (NM_014848.1,1834-1852).
ccctgctcatggatagaat

SEQ ID NO: 274951 - DNA, 19 bp, Homo sapiens
  siRNA target sequence for SV2B (NM_014848.1,2045-2063).
cggcattctcaatggatta

SEQ ID NO: 274952 - DNA, 19 bp, Homo sapiens
  siRNA target sequence for SV2B (NM_014848.1,2052-2070).
ctcaatggattatgcaaat

SEQ ID NO: 274953 - DNA, 19 bp, Homo sapiens
  siRNA target sequence for SYPL (NM_006754.2,194-212).
gtcctcgagtggattgctt

SEQ ID NO: 274954 - DNA, 19 bp, Homo sapiens
  siRNA target sequence for SYPL (NM_006754.2,240-258).
gttttaagggccaaacaga

SEQ ID NO: 274955 - DNA, 19 bp, Homo sapiens
  siRNA target sequence for SYPL (NM_006754.2,356-374).
cctccaggtgtaaacatat

SEQ ID NO: 274956 - DNA, 19 bp, Homo sapiens
  siRNA target sequence for SYPL (NM_006754.2,398-416).
gtcctcataggcgattact

SEQ ID NO: 274957 - DNA, 19 bp, Homo sapiens
  siRNA target sequence for SYPL (NM_006754.2,400-418).
cctcataggcgattactct

SEQ ID NO: 274958 - DNA, 19 bp, Homo sapiens
  siRNA target sequence for SYPL (NM_006754.2,401-419).
ctcataggcgattactctt

SEQ ID NO: 274959 - DNA, 19 bp, Homo sapiens
  siRNA target sequence for SYPL (NM_006754.2,420-438).
cttctgcacaattctatgt

SEQ ID NO: 274960 - DNA, 19 bp, Homo sapiens
  siRNA target sequence for SYPL (NM_006754.2,495-513).
gctacacgagtctgtatct

SEQ ID NO: 274961 - DNA, 19 bp, Homo sapiens
  siRNA target sequence for SYPL (NM_006754.2,508-526).
gtatctggatagtcgtaaa

SEQ ID NO: 274962 - DNA, 19 bp, Homo sapiens
  siRNA target sequence for SYPL (NM_006754.2,522-540).
gtaaacttcctatgataga

SEQ ID NO: 274963 - DNA, 19 bp, Homo sapiens
  siRNA target sequence for SYPL (NM_006754.2,531-549).
ctatgatagactttgttgt

SEQ ID NO: 274964 - DNA, 19 bp, Homo sapiens
  siRNA target sequence for SYPL (NM_006754.2,597-615).
ctaaagctctgacagatat

SEQ ID NO: 274965 - DNA, 19 bp, Homo sapiens
  siRNA target sequence for SYPL (NM_006754.2,623-641).
gctactggtcacaatatta

SEQ ID NO: 274966 - DNA, 19 bp, Homo sapiens
  siRNA target sequence for SYPL (NM_006754.2,627-645).
ctggtcacaatattattga

SEQ ID NO: 274967 - DNA, 19 bp, Homo sapiens
  siRNA target sequence for SYPL (NM_006754.2,630-648).
gtcacaatattattgatga

SEQ ID NO: 274968 - DNA, 19 bp, Homo sapiens
  siRNA target sequence for SYPL (NM_006754.2,647-665).
gaacttccgccttgtaaga

SEQ ID NO: 274969 - DNA, 19 bp, Homo sapiens
  siRNA target sequence for SYPL (NM_006754.2,650-668).
cttccgccttgtaagaaga

SEQ ID NO: 274970 - DNA, 19 bp, Homo sapiens
  siRNA target sequence for SYPL (NM_006754.2,748-766).
gatactctggggaggaaat

SEQ ID NO: 274971 - DNA, 19 bp, Homo sapiens
  siRNA target sequence for SYPL (NM_006754.2,752-770).
ctctggggaggaaatgctt

SEQ ID NO: 274972 - DNA, 19 bp, Homo sapiens
  siRNA target sequence for SYPL (NM_006754.2,792-810).
gcctacacagtccatcaaa

SEQ ID NO: 274973 - DNA, 19 bp, Homo sapiens
  siRNA target sequence for SYPL (NM_006754.2,793-811).
cctacacagtccatcaaat

SEQ ID NO: 274974 - DNA, 19 bp, Homo sapiens
  siRNA target sequence for SYPL (NM_006754.2,842-860).
ccacctcctaccggaatat

SEQ ID NO: 274975 - DNA, 19 bp, Homo sapiens
  siRNA target sequence for SYT11 (NM_152280.2,268-286).
caatatccgacctagcttt

SEQ ID NO: 274976 - DNA, 19 bp, Homo sapiens
  siRNA target sequence for SYT11 (NM_152280.2,400-418).
gaacccaccatacaagttt

SEQ ID NO: 274977 - DNA, 19 bp, Homo sapiens
  siRNA target sequence for SYT11 (NM_152280.2,403-421).
cccaccatacaagtttatt

SEQ ID NO: 274978 - DNA, 19 bp, Homo sapiens
  siRNA target sequence for SYT11 (NM_152280.2,407-425).
ccatacaagtttattcaca

SEQ ID NO: 274979 - DNA, 19 bp, Homo sapiens
  siRNA target sequence for SYT11 (NM_152280.2,428-446).
ctcaaaggcatcagcatat

SEQ ID NO: 274980 - DNA, 19 bp, Homo sapiens
  siRNA target sequence for SYT11 (NM_152280.2,481-499).
caaagtgcggagagacaaa

SEQ ID NO: 274981 - DNA, 19 bp, Homo sapiens
  siRNA target sequence for SYT11 (NM_152280.2,559-577).
cctgctaagccgagacaaa

SEQ ID NO: 274982 - DNA, 19 bp, Homo sapiens
  siRNA target sequence for SYT11 (NM_152280.2,562-580).
gctaagccgagacaaagat

SEQ ID NO: 274983 - DNA, 19 bp, Homo sapiens
  siRNA target sequence for SYT11 (NM_152280.2,589-607).
gcctagctctggatcttgt

SEQ ID NO: 274984 - DNA, 19 bp, Homo sapiens
  siRNA target sequence for SYT11 (NM_152280.2,591-609).
ctagctctggatcttgtat

SEQ ID NO: 274985 - DNA, 19 bp, Homo sapiens
  siRNA target sequence for SYT11 (NM_152280.2,594-612).
gctctggatcttgtataga

SEQ ID NO: 274986 - DNA, 19 bp, Homo sapiens
  siRNA target sequence for SYT11 (NM_152280.2,600-618).
gatcttgtatagaccaatt

SEQ ID NO: 274987 - DNA, 19 bp, Homo sapiens
  siRNA target sequence for SYT11 (NM_152280.2,611-629).
gaccaattacccatcaaaa

SEQ ID NO: 274988 - DNA, 19 bp, Homo sapiens
  siRNA target sequence for SYT11 (NM_152280.2,644-662).
gaactaaggagccctatta

SEQ ID NO: 274989 - DNA, 19 bp, Homo sapiens
  siRNA target sequence for SYT11 (NM_152280.2,705-723).
ctccagaggaggatgtcat

SEQ ID NO: 274990 - DNA, 19 bp, Homo sapiens
  siRNA target sequence for SYT11 (NM_152280.2,738-756).
ccttctcagtggactataa

SEQ ID NO: 274991 - DNA, 19 bp, Homo sapiens
  siRNA target sequence for SYT11 (NM_152280.2,1065-1083).
gcacaggcaaggtacaact

SEQ ID NO: 274992 - DNA, 19 bp, Homo sapiens
  siRNA target sequence for SYT11 (NM_152280.2,1138-1156).
ccaggtgtctctgtcatat

SEQ ID NO: 274993 - DNA, 19 bp, Homo sapiens
  siRNA target sequence for SYT11 (NM_152280.2,1222-1240).
caccggtctctcaggtaat

SEQ ID NO: 274994 - DNA, 19 bp, Homo sapiens
  siRNA target sequence for SYT11 (NM_152280.2,1225-1243).
cggtctctcaggtaatcct

SEQ ID NO: 274995 - DNA, 19 bp, Homo sapiens
  siRNA target sequence for SYT11 (NM_152280.2,1226-1244).
ggtctctcaggtaatcctt

SEQ ID NO: 274996 - DNA, 19 bp, Homo sapiens
  siRNA target sequence for SYT11 (NM_152280.2,1227-1245).
gtctctcaggtaatcctta

SEQ ID NO: 274997 - DNA, 19 bp, Homo sapiens
  siRNA target sequence for SYT11 (NM_152280.2,1380-1398).
gcatcgagttcctcgttat

SEQ ID NO: 274998 - DNA, 19 bp, Homo sapiens
  siRNA target sequence for SYT11 (NM_152280.2,1405-1423).
cgatcgcaccaccaagaat

SEQ ID NO: 274999 - DNA, 19 bp, Homo sapiens
  siRNA target sequence for SYT12 (NM_177963.2,89-107).
catctgagcgtcatcaaga

SEQ ID NO: 275000 - DNA, 19 bp, Homo sapiens
  siRNA target sequence for SYT12 (NM_177963.2,216-234).
cctctccgttccccaatta

SEQ ID NO: 275001 - DNA, 19 bp, Homo sapiens
  siRNA target sequence for SYT12 (NM_177963.2,219-237).
ctccgttccccaattacga

SEQ ID NO: 275002 - DNA, 19 bp, Homo sapiens
  siRNA target sequence for SYT12 (NM_177963.2,664-682).
gcagatcgtgggcatttct

SEQ ID NO: 275003 - DNA, 19 bp, Homo sapiens
  siRNA target sequence for SYT12 (NM_177963.2,868-886).
cagtggctggctctattta

SEQ ID NO: 275004 - DNA, 19 bp, Homo sapiens
  siRNA target sequence for SYT12 (NM_177963.2,1213-1231).
cgtgggccatgtcatcatt

SEQ ID NO: 275005 - DNA, 19 bp, Homo sapiens
  siRNA target sequence for SYT12 (NM_177963.2,1260-1278).
cacattggaaccagatgtt

SEQ ID NO: 275006 - DNA, 19 bp, Homo sapiens
  siRNA target sequence for SYT13 (NM_020826.1,220-238).
gtctgcacaacagttcaat

SEQ ID NO: 275007 - DNA, 19 bp, Homo sapiens
  siRNA target sequence for SYT13 (NM_020826.1,222-240).
ctgcacaacagttcaatgt

SEQ ID NO: 275008 - DNA, 19 bp, Homo sapiens
  siRNA target sequence for SYT13 (NM_020826.1,227-245).
caacagttcaatgttaaaa

SEQ ID NO: 275009 - DNA, 19 bp, Homo sapiens
  siRNA target sequence for SYT13 (NM_020826.1,280-298).
caagttcccagacatctat

SEQ ID NO: 275010 - DNA, 19 bp, Homo sapiens
  siRNA target sequence for SYT13 (NM_020826.1,331-349).
catcaactatgcagactat

SEQ ID NO: 275011 - DNA, 19 bp, Homo sapiens
  siRNA target sequence for SYT13 (NM_020826.1,334-352).
caactatgcagactattca

SEQ ID NO: 275012 - DNA, 19 bp, Homo sapiens
  siRNA target sequence for SYT13 (NM_020826.1,911-929).
gctggagaggtcctactat

SEQ ID NO: 275013 - DNA, 19 bp, Homo sapiens
  siRNA target sequence for SYT13 (NM_020826.1,915-933).
gagaggtcctactatccat

SEQ ID NO: 275014 - DNA, 19 bp, Homo sapiens
  siRNA target sequence for SYT13 (NM_020826.1,981-999).
ccaagaacctccactctaa

SEQ ID NO: 275015 - DNA, 19 bp, Homo sapiens
  siRNA target sequence for SYT13 (NM_020826.1,1089-1107).
gagctaagcacaagatcaa

SEQ ID NO: 275016 - DNA, 19 bp, Homo sapiens
  siRNA target sequence for SYT13 (NM_020826.1,1112-1130).
gtgtggaacgagatgatca

SEQ ID NO: 275017 - DNA, 19 bp, Homo sapiens
  siRNA target sequence for SYT13 (NM_020826.1,1116-1134).
ggaacgagatgatcatgtt

SEQ ID NO: 275018 - DNA, 19 bp, Homo sapiens
  siRNA target sequence for SYT13 (NM_020826.1,1117-1135).
gaacgagatgatcatgttt

SEQ ID NO: 275019 - DNA, 19 bp, Homo sapiens
  siRNA target sequence for SYT14 (NM_153262.1,43-61).
gtggagtacatgaacttat

SEQ ID NO: 275020 - DNA, 19 bp, Homo sapiens
  siRNA target sequence for SYT14 (NM_153262.1,45-63).
ggagtacatgaacttatct

SEQ ID NO: 275021 - DNA, 19 bp, Homo sapiens
  siRNA target sequence for SYT14 (NM_153262.1,54-72).
gaacttatctgtattagaa

SEQ ID NO: 275022 - DNA, 19 bp, Homo sapiens
  siRNA target sequence for SYT14 (NM_153262.1,112-130).
gggtgtttattatcttgat

SEQ ID NO: 275023 - DNA, 19 bp, Homo sapiens
  siRNA target sequence for SYT14 (NM_153262.1,192-210).
gatcttggttcagaataca

SEQ ID NO: 275024 - DNA, 19 bp, Homo sapiens
  siRNA target sequence for SYT14 (NM_153262.1,195-213).
cttggttcagaatacagta

SEQ ID NO: 275025 - DNA, 19 bp, Homo sapiens
  siRNA target sequence for SYT14 (NM_153262.1,198-216).
ggttcagaatacagtacaa

SEQ ID NO: 275026 - DNA, 19 bp, Homo sapiens
  siRNA target sequence for SYT14 (NM_153262.1,218-236).
gaagaattcacaagataaa

SEQ ID NO: 275027 - DNA, 19 bp, Homo sapiens
  siRNA target sequence for SYT14 (NM_153262.1,271-289).
gttcatcctctgaaagtga

SEQ ID NO: 275028 - DNA, 19 bp, Homo sapiens
  siRNA target sequence for SYT14 (NM_153262.1,291-309).
gatgaagcgctgggtaaat

SEQ ID NO: 275029 - DNA, 19 bp, Homo sapiens
  siRNA target sequence for SYT14 (NM_153262.1,298-316).
cgctgggtaaatatcatga

SEQ ID NO: 275030 - DNA, 19 bp, Homo sapiens
  siRNA target sequence for SYT14 (NM_153262.1,345-363).
ctaccactggcagattcta

SEQ ID NO: 275031 - DNA, 19 bp, Homo sapiens
  siRNA target sequence for SYT14 (NM_153262.1,412-430).
cggcagagtatgatggata

SEQ ID NO: 275032 - DNA, 19 bp, Homo sapiens
  siRNA target sequence for SYT14 (NM_153262.1,417-435).
gagtatgatggatacagta

SEQ ID NO: 275033 - DNA, 19 bp, Homo sapiens
  siRNA target sequence for SYT14 (NM_153262.1,433-451).
gtagtgaagcatcaataga

SEQ ID NO: 275034 - DNA, 19 bp, Homo sapiens
  siRNA target sequence for SYT14 (NM_153262.1,604-622).
gtccaagatgctcatataa

SEQ ID NO: 275035 - DNA, 19 bp, Homo sapiens
  siRNA target sequence for SYT14 (NM_153262.1,640-658).
gaagcacaggtcatgaaat

SEQ ID NO: 275036 - DNA, 19 bp, Homo sapiens
  siRNA target sequence for SYT14 (NM_153262.1,643-661).
gcacaggtcatgaaataga

SEQ ID NO: 275037 - DNA, 19 bp, Homo sapiens
  siRNA target sequence for SYT14 (NM_153262.1,648-666).
ggtcatgaaatagaaagtt

SEQ ID NO: 275038 - DNA, 19 bp, Homo sapiens
  siRNA target sequence for SYT14 (NM_153262.1,649-667).
gtcatgaaatagaaagttt

SEQ ID NO: 275039 - DNA, 19 bp, Homo sapiens
  siRNA target sequence for SYT14 (NM_153262.1,802-820).
cactggatgtgacttttga

SEQ ID NO: 275040 - DNA, 19 bp, Homo sapiens
  siRNA target sequence for SYT14 (NM_153262.1,806-824).
ggatgtgacttttgactat

SEQ ID NO: 275041 - DNA, 19 bp, Homo sapiens
  siRNA target sequence for SYT14 (NM_153262.1,866-884).
cacagacatcccaacatat

SEQ ID NO: 275042 - DNA, 19 bp, Homo sapiens
  siRNA target sequence for SYT14 (NM_153262.1,898-916).
gcaactcatggcaagtaca

SEQ ID NO: 275043 - DNA, 19 bp, Homo sapiens
  siRNA target sequence for SYT14 (NM_153262.1,907-925).
ggcaagtacaccttgttct

SEQ ID NO: 275044 - DNA, 19 bp, Homo sapiens
  siRNA target sequence for SYT14 (NM_153262.1,908-926).
gcaagtacaccttgttctt

SEQ ID NO: 275045 - DNA, 19 bp, Homo sapiens
  siRNA target sequence for SYT14 (NM_153262.1,1059-1077).
ggtgtacatcgcatgaaaa

SEQ ID NO: 275046 - DNA, 19 bp, Homo sapiens
  siRNA target sequence for SYT14 (NM_153262.1,1060-1078).
gtgtacatcgcatgaaaaa

SEQ ID NO: 275047 - DNA, 19 bp, Homo sapiens
  siRNA target sequence for SYT14 (NM_153262.1,1125-1143).
cttcaagggaaaatgtcat

SEQ ID NO: 275048 - DNA, 19 bp, Homo sapiens
  siRNA target sequence for SYT14 (NM_153262.1,1157-1175).
ggaaccttcttacaatcat

SEQ ID NO: 275049 - DNA, 19 bp, Homo sapiens
  siRNA target sequence for SYT14 (NM_153262.1,1206-1224).
gaaatgtcgtgtagtgaaa

SEQ ID NO: 275050 - DNA, 19 bp, Homo sapiens
  siRNA target sequence for SYT14 (NM_153262.1,1211-1229).
gtcgtgtagtgaaagtaca

SEQ ID NO: 275051 - DNA, 19 bp, Homo sapiens
  siRNA target sequence for SYT14 (NM_153262.1,1293-1311).
gccacaactggaagactat

SEQ ID NO: 275052 - DNA, 19 bp, Homo sapiens
  siRNA target sequence for SYT14 (NM_153262.1,1306-1324).
gactatcagcagaagtgat

SEQ ID NO: 275053 - DNA, 19 bp, Homo sapiens
  siRNA target sequence for SYT14 (NM_153262.1,1308-1326).
ctatcagcagaagtgataa

SEQ ID NO: 275054 - DNA, 19 bp, Homo sapiens
  siRNA target sequence for SYT14 (NM_153262.1,1329-1347).
ggcagccacttcaaaaatt

SEQ ID NO: 275055 - DNA, 19 bp, Homo sapiens
  siRNA target sequence for SYT14 (NM_153262.1,1360-1378).
gaccacccaatacatatgt

SEQ ID NO: 275056 - DNA, 19 bp, Homo sapiens
  siRNA target sequence for SYT14 (NM_153262.1,1365-1383).
cccaatacatatgttaagt

SEQ ID NO: 275057 - DNA, 19 bp, Homo sapiens
  siRNA target sequence for SYT14 (NM_153262.1,1372-1390).
catatgttaagttaactct

SEQ ID NO: 275058 - DNA, 19 bp, Homo sapiens
  siRNA target sequence for SYT14 (NM_153262.1,1455-1473).
ccagtatataaggaaactt

SEQ ID NO: 275059 - DNA, 19 bp, Homo sapiens
  siRNA target sequence for SYT14 (NM_153262.1,1466-1484).
ggaaacttttgtctttcaa

SEQ ID NO: 275060 - DNA, 19 bp, Homo sapiens
  siRNA target sequence for SYT14 (NM_153262.1,1504-1522).
ctgatgtgacactcatact

SEQ ID NO: 275061 - DNA, 19 bp, Homo sapiens
  siRNA target sequence for SYT14 (NM_153262.1,1515-1533).
ctcatactgtctgtgtata

SEQ ID NO: 275062 - DNA, 19 bp, Homo sapiens
  siRNA target sequence for SYT14 (NM_153262.1,1562-1580).
gataggctggatttcttta

SEQ ID NO: 275063 - DNA, 19 bp, Homo sapiens
  siRNA target sequence for SYT14L (NM_031914.1,22-40).
caggatgttcagaacttct

SEQ ID NO: 275064 - DNA, 19 bp, Homo sapiens
  siRNA target sequence for SYT14L (NM_031914.1,57-75).
ctggatatctcgggtttat

SEQ ID NO: 275065 - DNA, 19 bp, Homo sapiens
  siRNA target sequence for SYT14L (NM_031914.1,60-78).
gatatctcgggtttatgaa

SEQ ID NO: 275066 - DNA, 19 bp, Homo sapiens
  siRNA target sequence for SYT14L (NM_031914.1,107-125).
ctgcttcgctggttaacat

SEQ ID NO: 275067 - DNA, 19 bp, Homo sapiens
  siRNA target sequence for SYT14L (NM_031914.1,109-127).
gcttcgctggttaacataa

SEQ ID NO: 275068 - DNA, 19 bp, Homo sapiens
  siRNA target sequence for SYT14L (NM_031914.1,113-131).
cgctggttaacataagcaa

SEQ ID NO: 275069 - DNA, 19 bp, Homo sapiens
  siRNA target sequence for SYT14L (NM_031914.1,140-158).
ctaaattgagtgacaaact

SEQ ID NO: 275070 - DNA, 19 bp, Homo sapiens
  siRNA target sequence for SYT14L (NM_031914.1,157-175).
ctagatcaggacttagata

SEQ ID NO: 275071 - DNA, 19 bp, Homo sapiens
  siRNA target sequence for SYT14L (NM_031914.1,168-186).
cttagataatattcagatt

SEQ ID NO: 275072 - DNA, 19 bp, Homo sapiens
  siRNA target sequence for SYT14L (NM_031914.1,183-201).
gattcaggaaacgtacttt

SEQ ID NO: 275073 - DNA, 19 bp, Homo sapiens
  siRNA target sequence for SYT14L (NM_031914.1,189-207).
ggaaacgtactttgaagat

SEQ ID NO: 275074 - DNA, 19 bp, Homo sapiens
  siRNA target sequence for SYT14L (NM_031914.1,242-260).
caaattccttgtttcttga

SEQ ID NO: 275075 - DNA, 19 bp, Homo sapiens
  siRNA target sequence for SYT14L (NM_031914.1,278-296).
gttgtaatagtgatttgca

SEQ ID NO: 275076 - DNA, 19 bp, Homo sapiens
  siRNA target sequence for SYT14L (NM_031914.1,297-315).
ggactctgcccaaaattca

SEQ ID NO: 275077 - DNA, 19 bp, Homo sapiens
  siRNA target sequence for SYT14L (NM_031914.1,298-316).
gactctgcccaaaattcaa

SEQ ID NO: 275078 - DNA, 19 bp, Homo sapiens
  siRNA target sequence for SYT14L (NM_031914.1,381-399).
cagtgatgaccgcaagtta

SEQ ID NO: 275079 - DNA, 19 bp, Homo sapiens
  siRNA target sequence for SYT14L (NM_031914.1,401-419).
cacatgtgctttcttctat

SEQ ID NO: 275080 - DNA, 19 bp, Homo sapiens
  siRNA target sequence for SYT14L (NM_031914.1,460-478).
cttcaacatggctttgaca

SEQ ID NO: 275081 - DNA, 19 bp, Homo sapiens
  siRNA target sequence for SYT14L (NM_031914.1,480-498).
ccagctccctggtacttta

SEQ ID NO: 275082 - DNA, 19 bp, Homo sapiens
  siRNA target sequence for SYT14L (NM_031914.1,483-501).
gctccctggtactttagaa

SEQ ID NO: 275083 - DNA, 19 bp, Homo sapiens
  siRNA target sequence for SYT14L (NM_031914.1,484-502).
ctccctggtactttagaaa

SEQ ID NO: 275084 - DNA, 19 bp, Homo sapiens
  siRNA target sequence for SYT14L (NM_031914.1,491-509).
gtactttagaaactgttaa

SEQ ID NO: 275085 - DNA, 19 bp, Homo sapiens
  siRNA target sequence for SYT14L (NM_031914.1,725-743).
ctgcctgcgaagatttgga

SEQ ID NO: 275086 - DNA, 19 bp, Homo sapiens
  siRNA target sequence for SYT14L (NM_031914.1,748-766).
gccagccaacggcgttatt

SEQ ID NO: 275087 - DNA, 19 bp, Homo sapiens
  siRNA target sequence for SYT14L (NM_031914.1,750-768).
cagccaacggcgttattct

SEQ ID NO: 275088 - DNA, 19 bp, Homo sapiens
  siRNA target sequence for SYT14L (NM_031914.1,752-770).
gccaacggcgttattctga

SEQ ID NO: 275089 - DNA, 19 bp, Homo sapiens
  siRNA target sequence for SYT14L (NM_031914.1,758-776).
ggcgttattctgagaatct

SEQ ID NO: 275090 - DNA, 19 bp, Homo sapiens
  siRNA target sequence for SYT14L (NM_031914.1,934-952).
gaacaggacaggaccaatt

SEQ ID NO: 275091 - DNA, 19 bp, Homo sapiens
  siRNA target sequence for SYT14L (NM_031914.1,1003-1021).
gatgtcatctttgaatata

SEQ ID NO: 275092 - DNA, 19 bp, Homo sapiens
  siRNA target sequence for SYT14L (NM_031914.1,1061-1079).
cacagggcctcccagataa

SEQ ID NO: 275093 - DNA, 19 bp, Homo sapiens
  siRNA target sequence for SYT14L (NM_031914.1,1100-1118).
cctggcaagttcatgtagt

SEQ ID NO: 275094 - DNA, 19 bp, Homo sapiens
  siRNA target sequence for SYT14L (NM_031914.1,1123-1141).
ctgcctggtaagaaacaca

SEQ ID NO: 275095 - DNA, 19 bp, Homo sapiens
  siRNA target sequence for SYT14L (NM_031914.1,1140-1158).
caggggcaggacgaacata

SEQ ID NO: 275096 - DNA, 19 bp, Homo sapiens
  siRNA target sequence for SYT14L (NM_031914.1,1142-1160).
ggggcaggacgaacataca

SEQ ID NO: 275097 - DNA, 19 bp, Homo sapiens
  siRNA target sequence for SYT14L (NM_031914.1,1144-1162).
ggcaggacgaacatacaga

SEQ ID NO: 275098 - DNA, 19 bp, Homo sapiens
  siRNA target sequence for SYT14L (NM_031914.1,1287-1305).
gggagagaaactattctat

SEQ ID NO: 275099 - DNA, 19 bp, Homo sapiens
  siRNA target sequence for SYT14L (NM_031914.1,1348-1366).
gttctggagccaagaagta

SEQ ID NO: 275100 - DNA, 19 bp, Homo sapiens
  siRNA target sequence for SYT14L (NM_031914.1,1353-1371).
ggagccaagaagtaatata

SEQ ID NO: 275101 - DNA, 19 bp, Homo sapiens
  siRNA target sequence for SYT14L (NM_031914.1,1402-1420).
gcggtttctcacagtgata

SEQ ID NO: 275102 - DNA, 19 bp, Homo sapiens
  siRNA target sequence for SYT14L (NM_031914.1,1404-1422).
ggtttctcacagtgatagt

SEQ ID NO: 275103 - DNA, 19 bp, Homo sapiens
  siRNA target sequence for SYT14L (NM_031914.1,1470-1488).
ggtggggctctcgtacaat

SEQ ID NO: 275104 - DNA, 19 bp, Homo sapiens
  siRNA target sequence for SYT14L (NM_031914.1,1554-1572).
ccgagcacctgatacatat

SEQ ID NO: 275105 - DNA, 19 bp, Homo sapiens
  siRNA target sequence for SYT14L (NM_031914.1,1656-1674).
ctataaggagacctttgtt

SEQ ID NO: 275106 - DNA, 19 bp, Homo sapiens
  siRNA target sequence for SYT14L (NM_031914.1,1700-1718).
ctgatgtcacgttgatgat

SEQ ID NO: 275107 - DNA, 19 bp, Homo sapiens
  siRNA target sequence for SYT14L (NM_031914.1,1702-1720).
gatgtcacgttgatgattt

SEQ ID NO: 275108 - DNA, 19 bp, Homo sapiens
  siRNA target sequence for SYT14L (NM_031914.1,1736-1754).
gtactatgaagcgtaaaga

SEQ ID NO: 275109 - DNA, 19 bp, Homo sapiens
  siRNA target sequence for SYT14L (NM_031914.1,1739-1757).
ctatgaagcgtaaagagat

SEQ ID NO: 275110 - DNA, 19 bp, Homo sapiens
  siRNA target sequence for SYT14L (NM_031914.1,1743-1761).
gaagcgtaaagagatgatt

SEQ ID NO: 275111 - DNA, 19 bp, Homo sapiens
  siRNA target sequence for SYT2 (NM_177402.3,724-742).
ctccttcctgacaagaaga

SEQ ID NO: 275112 - DNA, 19 bp, Homo sapiens
  siRNA target sequence for SYT2 (NM_177402.3,782-800).
ctgccttcaatgaaacctt

SEQ ID NO: 275113 - DNA, 19 bp, Homo sapiens
  siRNA target sequence for SYT2 (NM_177402.3,822-840).
ggagcttgggggcaaaact

SEQ ID NO: 275114 - DNA, 19 bp, Homo sapiens
  siRNA target sequence for SYT2 (NM_177402.3,846-864).
gatggccatctatgacttt

SEQ ID NO: 275115 - DNA, 19 bp, Homo sapiens
  siRNA target sequence for SYT2 (NM_177402.3,898-916).
gtaaaggtgcctatgaaca

SEQ ID NO: 275116 - DNA, 19 bp, Homo sapiens
  siRNA target sequence for SYT2 (NM_177402.3,1172-1190).
ccctgaacccatacttcaa

SEQ ID NO: 275117 - DNA, 19 bp, Homo sapiens
  siRNA target sequence for SYT2 (NM_177402.3,1282-1300).
gaagccataggcaagatct

SEQ ID NO: 275118 - DNA, 19 bp, Homo sapiens
  siRNA target sequence for SYT3 (NM_032298.1,805-823).
ggtcatcgtgacattctgt

SEQ ID NO: 275119 - DNA, 19 bp, Homo sapiens
  siRNA target sequence for SYT3 (NM_032298.1,1781-1799).
cacttcagcgtctatgact

SEQ ID NO: 275120 - DNA, 19 bp, Homo sapiens
  siRNA target sequence for SYT3 (NM_032298.1,1912-1930).
ctcggaaaaagcagatctt

SEQ ID NO: 275121 - DNA, 19 bp, Homo sapiens
  siRNA target sequence for SYT3 (NM_032298.1,2112-2130).
cgctgaaccccacctataa

SEQ ID NO: 275122 - DNA, 19 bp, Homo sapiens
  siRNA target sequence for SYT4 (NM_020783.2,112-130).
ccaccagccgggaagaatt

SEQ ID NO: 275123 - DNA, 19 bp, Homo sapiens
  siRNA target sequence for SYT4 (NM_020783.2,113-131).
caccagccgggaagaattt

SEQ ID NO: 275124 - DNA, 19 bp, Homo sapiens
  siRNA target sequence for SYT4 (NM_020783.2,116-134).
cagccgggaagaatttgat

SEQ ID NO: 275125 - DNA, 19 bp, Homo sapiens
  siRNA target sequence for SYT4 (NM_020783.2,152-170).
ggggatcttcagtgcattt

SEQ ID NO: 275126 - DNA, 19 bp, Homo sapiens
  siRNA target sequence for SYT4 (NM_020783.2,239-257).
gactcctccatacaagttt

SEQ ID NO: 275127 - DNA, 19 bp, Homo sapiens
  siRNA target sequence for SYT4 (NM_020783.2,241-259).
ctcctccatacaagtttgt

SEQ ID NO: 275128 - DNA, 19 bp, Homo sapiens
  siRNA target sequence for SYT4 (NM_020783.2,266-284).
gcttaagggagttgatatt

SEQ ID NO: 275129 - DNA, 19 bp, Homo sapiens
  siRNA target sequence for SYT4 (NM_020783.2,394-412).
gagatctcaatggcaattt

SEQ ID NO: 275130 - DNA, 19 bp, Homo sapiens
  siRNA target sequence for SYT4 (NM_020783.2,405-423).
ggcaattttcccaaaacca

SEQ ID NO: 275131 - DNA, 19 bp, Homo sapiens
  siRNA target sequence for SYT4 (NM_020783.2,406-424).
gcaattttcccaaaaccaa

SEQ ID NO: 275132 - DNA, 19 bp, Homo sapiens
  siRNA target sequence for SYT4 (NM_020783.2,460-478).
caaccccgaagctcttttt

SEQ ID NO: 275133 - DNA, 19 bp, Homo sapiens
  siRNA target sequence for SYT4 (NM_020783.2,463-481).
ccccgaagctctttttaga

SEQ ID NO: 275134 - DNA, 19 bp, Homo sapiens
  siRNA target sequence for SYT4 (NM_020783.2,587-605).
caacttcgagagaaaagca

SEQ ID NO: 275135 - DNA, 19 bp, Homo sapiens
  siRNA target sequence for SYT4 (NM_020783.2,756-774).
gatgagacctttacattct

SEQ ID NO: 275136 - DNA, 19 bp, Homo sapiens
  siRNA target sequence for SYT4 (NM_020783.2,883-901).
cgggaattgaattatctga

SEQ ID NO: 275137 - DNA, 19 bp, Homo sapiens
  siRNA target sequence for SYT4 (NM_020783.2,957-975).
ggacggggtgagttactga

SEQ ID NO: 275138 - DNA, 19 bp, Homo sapiens
  siRNA target sequence for SYT4 (NM_020783.2,958-976).
gacggggtgagttactgat

SEQ ID NO: 275139 - DNA, 19 bp, Homo sapiens
  siRNA target sequence for SYT4 (NM_020783.2,995-1013).
caccacaaacactctaact

SEQ ID NO: 275140 - DNA, 19 bp, Homo sapiens
  siRNA target sequence for SYT4 (NM_020783.2,1008-1026).
ctaactgtggttgtcttaa

SEQ ID NO: 275141 - DNA, 19 bp, Homo sapiens
  siRNA target sequence for SYT4 (NM_020783.2,1029-1047).
gctcgacatctgcctaaat

SEQ ID NO: 275142 - DNA, 19 bp, Homo sapiens
  siRNA target sequence for SYT4 (NM_020783.2,1091-1109).
gtaccatgccaaaaagaga

SEQ ID NO: 275143 - DNA, 19 bp, Homo sapiens
  siRNA target sequence for SYT4 (NM_020783.2,1095-1113).
catgccaaaaagagaatct

SEQ ID NO: 275144 - DNA, 19 bp, Homo sapiens
  siRNA target sequence for SYT4 (NM_020783.2,1147-1165).
ccaatgcagtgttcaatga

SEQ ID NO: 275145 - DNA, 19 bp, Homo sapiens
  siRNA target sequence for SYT4 (NM_020783.2,1160-1178).
caatgagctgtttgtcttt

SEQ ID NO: 275146 - DNA, 19 bp, Homo sapiens
  siRNA target sequence for SYT4 (NM_020783.2,1193-1211).
gggccttgaagatataagt

SEQ ID NO: 275147 - DNA, 19 bp, Homo sapiens
  siRNA target sequence for SYT4 (NM_020783.2,1196-1214).
ccttgaagatataagtgtt

SEQ ID NO: 275148 - DNA, 19 bp, Homo sapiens
  siRNA target sequence for SYT4 (NM_020783.2,1243-1261).
ggtcccgaaatgaggtaat

SEQ ID NO: 275149 - DNA, 19 bp, Homo sapiens
  siRNA target sequence for SYT4 (NM_020783.2,1257-1275).
gtaatcgggcagttagtct

SEQ ID NO: 275150 - DNA, 19 bp, Homo sapiens
  siRNA target sequence for SYT4 (NM_020783.2,1326-1344).
gactaccccaggagacaaa

SEQ ID NO: 275151 - DNA, 19 bp, Homo sapiens
  siRNA target sequence for SYT4 (NM_020783.2,1328-1346).
ctaccccaggagacaaatt

SEQ ID NO: 275152 - DNA, 19 bp, Homo sapiens
  siRNA target sequence for SYT7 (NM_004200.2,141-159).
gggcaaacgctacaagaat

SEQ ID NO: 275153 - DNA, 19 bp, Homo sapiens
  siRNA target sequence for SYT7 (NM_004200.2,142-160).
ggcaaacgctacaagaatt

SEQ ID NO: 275154 - DNA, 19 bp, Homo sapiens
  siRNA target sequence for SYT7 (NM_004200.2,518-536).
gcgaccccttcgtcaagat

SEQ ID NO: 275155 - DNA, 19 bp, Homo sapiens
  siRNA target sequence for SYT7 (NM_004200.2,609-627).
cgagaccttcctctttgaa

SEQ ID NO: 275156 - DNA, 19 bp, Homo sapiens
  siRNA target sequence for SYT7 (NM_004200.2,718-736).
gtgtccatcccccttaaca

SEQ ID NO: 275157 - DNA, 19 bp, Homo sapiens
  siRNA target sequence for SYT7 (NM_004200.2,1009-1027).
gagtccttcgccttcgata

SEQ ID NO: 275158 - DNA, 19 bp, Homo sapiens
  siRNA target sequence for SYT7 (NM_004200.2,1152-1170).
gcactggaaggacatgatt

SEQ ID NO: 275159 - DNA, 19 bp, Homo sapiens
  siRNA target sequence for SYTL4 (NM_080737.1,437-455).
gattaggcgactaaagaat

SEQ ID NO: 275160 - DNA, 19 bp, Homo sapiens
  siRNA target sequence for SYTL4 (NM_080737.1,443-461).
gcgactaaagaatgagtta

SEQ ID NO: 275161 - DNA, 19 bp, Homo sapiens
  siRNA target sequence for SYTL4 (NM_080737.1,445-463).
gactaaagaatgagttact

SEQ ID NO: 275162 - DNA, 19 bp, Homo sapiens
  siRNA target sequence for SYTL4 (NM_080737.1,546-564).
cgtttgagtcccaaaacca

SEQ ID NO: 275163 - DNA, 19 bp, Homo sapiens
  siRNA target sequence for SYTL4 (NM_080737.1,568-586).
cttgtcggggttgtaatca

SEQ ID NO: 275164 - DNA, 19 bp, Homo sapiens
  siRNA target sequence for SYTL4 (NM_080737.1,604-622).
gccgcatacaggaaagcaa

SEQ ID NO: 275165 - DNA, 19 bp, Homo sapiens
  siRNA target sequence for SYTL4 (NM_080737.1,605-623).
ccgcatacaggaaagcaat

SEQ ID NO: 275166 - DNA, 19 bp, Homo sapiens
  siRNA target sequence for SYTL4 (NM_080737.1,641-659).
ggtgtgcgccaaggaaata

SEQ ID NO: 275167 - DNA, 19 bp, Homo sapiens
  siRNA target sequence for SYTL4 (NM_080737.1,646-664).
gcgccaaggaaatagagtt

SEQ ID NO: 275168 - DNA, 19 bp, Homo sapiens
  siRNA target sequence for SYTL4 (NM_080737.1,672-690).
gcaactggggactggtttt

SEQ ID NO: 275169 - DNA, 19 bp, Homo sapiens
  siRNA target sequence for SYTL4 (NM_080737.1,673-691).
caactggggactggtttta

SEQ ID NO: 275170 - DNA, 19 bp, Homo sapiens
  siRNA target sequence for SYTL4 (NM_080737.1,719-737).
ccgcacaggtagtgagata

SEQ ID NO: 275171 - DNA, 19 bp, Homo sapiens
  siRNA target sequence for SYTL4 (NM_080737.1,829-847).
ggccaggaagaaagatcat

SEQ ID NO: 275172 - DNA, 19 bp, Homo sapiens
  siRNA target sequence for SYTL4 (NM_080737.1,863-881).
ggagcccagtgtgctattt

SEQ ID NO: 275173 - DNA, 19 bp, Homo sapiens
  siRNA target sequence for SYTL4 (NM_080737.1,868-886).
ccagtgtgctatttgaagt

SEQ ID NO: 275174 - DNA, 19 bp, Homo sapiens
  siRNA target sequence for SYTL4 (NM_080737.1,928-946).
gtgagagtctggatagctt

SEQ ID NO: 275175 - DNA, 19 bp, Homo sapiens
  siRNA target sequence for SYTL4 (NM_080737.1,973-991).
ggagagactctctggataa

SEQ ID NO: 275176 - DNA, 19 bp, Homo sapiens
  siRNA target sequence for SYTL4 (NM_080737.1,974-992).
gagagactctctggataaa

SEQ ID NO: 275177 - DNA, 19 bp, Homo sapiens
  siRNA target sequence for SYTL4 (NM_080737.1,1019-1037).
gatgtctgctcccaaatct

SEQ ID NO: 275178 - DNA, 19 bp, Homo sapiens
  siRNA target sequence for SYTL4 (NM_080737.1,1054-1072).
ctcagcctggaggtcaaaa

SEQ ID NO: 275179 - DNA, 19 bp, Homo sapiens
  siRNA target sequence for SYTL4 (NM_080737.1,1063-1081).
gaggtcaaaatgtggtatt

SEQ ID NO: 275180 - DNA, 19 bp, Homo sapiens
  siRNA target sequence for SYTL4 (NM_080737.1,1142-1160).
gtacactaaatctgtgata

SEQ ID NO: 275181 - DNA, 19 bp, Homo sapiens
  siRNA target sequence for SYTL4 (NM_080737.1,1377-1395).
ggtgatttcgggaacatct

SEQ ID NO: 275182 - DNA, 19 bp, Homo sapiens
  siRNA target sequence for SYTL4 (NM_080737.1,1506-1524).
cgctctaacccatatgtga

SEQ ID NO: 275183 - DNA, 19 bp, Homo sapiens
  siRNA target sequence for SYTL4 (NM_080737.1,1507-1525).
gctctaacccatatgtgaa

SEQ ID NO: 275184 - DNA, 19 bp, Homo sapiens
  siRNA target sequence for SYTL4 (NM_080737.1,1544-1562).
caagtcccgccaaggaaaa

SEQ ID NO: 275185 - DNA, 19 bp, Homo sapiens
  siRNA target sequence for SYTL4 (NM_080737.1,1680-1698).
ggtcgttttggcagaaaca

SEQ ID NO: 275186 - DNA, 19 bp, Homo sapiens
  siRNA target sequence for SYTL4 (NM_080737.1,1728-1746).
gattcctggaagcttgata

SEQ ID NO: 275187 - DNA, 19 bp, Homo sapiens
  siRNA target sequence for SYTL4 (NM_080737.1,1876-1894).
gtgaccggaaaaagagtaa

SEQ ID NO: 275188 - DNA, 19 bp, Homo sapiens
  siRNA target sequence for SYTL4 (NM_080737.1,1916-1934).
ccaggtgtggatcaaagaa

SEQ ID NO: 275189 - DNA, 19 bp, Homo sapiens
  siRNA target sequence for SYTL4 (NM_080737.1,1969-1987).
cttcagacagctttgtcaa

SEQ ID NO: 275190 - DNA, 19 bp, Homo sapiens
  siRNA target sequence for SYTL4 (NM_080737.1,2015-2033).
ggccagtaaacgtaaaact

SEQ ID NO: 275191 - DNA, 19 bp, Homo sapiens
  siRNA target sequence for SYTL4 (NM_080737.1,2050-2068).
ccctgaatcctcactacaa

SEQ ID NO: 275192 - DNA, 19 bp, Homo sapiens
  siRNA target sequence for SYTL4 (NM_080737.1,2058-2076).
cctcactacaaccatacat

SEQ ID NO: 275193 - DNA, 19 bp, Homo sapiens
  siRNA target sequence for SYTL4 (NM_080737.1,2059-2077).
ctcactacaaccatacatt

SEQ ID NO: 275194 - DNA, 19 bp, Homo sapiens
  siRNA target sequence for SYTL4 (NM_080737.1,2148-2166).
cccctggccagcaatgact

SEQ ID NO: 275195 - DNA, 19 bp, Homo sapiens
  siRNA target sequence for SYTL4 (NM_080737.1,2149-2167).
ccctggccagcaatgactt

SEQ ID NO: 275196 - DNA, 19 bp, Homo sapiens
  siRNA target sequence for TCOF1 (NM_000356.1,172-190).
cagagcggccagaagtgtt

SEQ ID NO: 275197 - DNA, 19 bp, Homo sapiens
  siRNA target sequence for TCOF1 (NM_000356.1,210-228).
ccttctggacatctataca

SEQ ID NO: 275198 - DNA, 19 bp, Homo sapiens
  siRNA target sequence for TCOF1 (NM_000356.1,281-299).
cggcactgcaagctaagaa

SEQ ID NO: 275199 - DNA, 19 bp, Homo sapiens
  siRNA target sequence for TCOF1 (NM_000356.1,372-390).
caaagccaccccaagacta

SEQ ID NO: 275200 - DNA, 19 bp, Homo sapiens
  siRNA target sequence for TCOF1 (NM_000356.1,516-534).
ggtggccaaccttctttct

SEQ ID NO: 275201 - DNA, 19 bp, Homo sapiens
  siRNA target sequence for TCOF1 (NM_000356.1,712-730).
gaggtaaaggcctctgaaa

SEQ ID NO: 275202 - DNA, 19 bp, Homo sapiens
  siRNA target sequence for TCOF1 (NM_000356.1,927-945).
ggcgaaggcctcaggaaaa

SEQ ID NO: 275203 - DNA, 19 bp, Homo sapiens
  siRNA target sequence for TCOF1 (NM_000356.1,928-946).
gcgaaggcctcaggaaaaa

SEQ ID NO: 275204 - DNA, 19 bp, Homo sapiens
  siRNA target sequence for TCOF1 (NM_000356.1,2694-2712).
ctctgcccaggtgattaaa

SEQ ID NO: 275205 - DNA, 19 bp, Homo sapiens
  siRNA target sequence for TCOF1 (NM_000356.1,2976-2994).
ggagtccagtcggatatca

SEQ ID NO: 275206 - DNA, 19 bp, Homo sapiens
  siRNA target sequence for TCOF1 (NM_000356.1,2979-2997).
gtccagtcggatatcagat

SEQ ID NO: 275207 - DNA, 19 bp, Homo sapiens
  siRNA target sequence for TCOF1 (NM_000356.1,3019-3037).
gccactcaggtgtcaaaga

SEQ ID NO: 275208 - DNA, 19 bp, Homo sapiens
  siRNA target sequence for TCOF1 (NM_000356.1,3448-3466).
ctcctctcaggttatatga

SEQ ID NO: 275209 - DNA, 19 bp, Homo sapiens
  siRNA target sequence for TCOF1 (NM_000356.1,3604-3622).
ggcatgttgtcccctaaaa

SEQ ID NO: 275210 - DNA, 19 bp, Homo sapiens
  siRNA target sequence for TCOF1 (NM_000356.1,3606-3624).
catgttgtcccctaaaaca

SEQ ID NO: 275211 - DNA, 19 bp, Homo sapiens
  siRNA target sequence for TCOF1 (NM_000356.1,3707-3725).
ccctggcgctgcaaagcaa

SEQ ID NO: 275212 - DNA, 19 bp, Homo sapiens
  siRNA target sequence for TCOF1 (NM_000356.1,4254-4272).
gtcaccgtcccagaagaaa

SEQ ID NO: 275213 - DNA, 19 bp, Homo sapiens
  siRNA target sequence for TM9SF1 (NM_006405.3,132-150).
ggcgaccctgttattctgt

SEQ ID NO: 275214 - DNA, 19 bp, Homo sapiens
  siRNA target sequence for TM9SF1 (NM_006405.3,133-151).
gcgaccctgttattctgta

SEQ ID NO: 275215 - DNA, 19 bp, Homo sapiens
  siRNA target sequence for TM9SF1 (NM_006405.3,134-152).
cgaccctgttattctgtat

SEQ ID NO: 275216 - DNA, 19 bp, Homo sapiens
  siRNA target sequence for TM9SF1 (NM_006405.3,138-156).
cctgttattctgtatgtca

SEQ ID NO: 275217 - DNA, 19 bp, Homo sapiens
  siRNA target sequence for TM9SF1 (NM_006405.3,276-294).
cgaatggctgagtctttgt

SEQ ID NO: 275218 - DNA, 19 bp, Homo sapiens
  siRNA target sequence for TM9SF1 (NM_006405.3,470-488).
gccacacagccacaagata

SEQ ID NO: 275219 - DNA, 19 bp, Homo sapiens
  siRNA target sequence for TM9SF1 (NM_006405.3,490-508).
gactctggacccatttgga

SEQ ID NO: 275220 - DNA, 19 bp, Homo sapiens
  siRNA target sequence for TM9SF1 (NM_006405.3,612-630).
ggccttacccacacttata

SEQ ID NO: 275221 - DNA, 19 bp, Homo sapiens
  siRNA target sequence for TM9SF1 (NM_006405.3,703-721).
ctcgaacactggaaatcca

SEQ ID NO: 275222 - DNA, 19 bp, Homo sapiens
  siRNA target sequence for TM9SF1 (NM_006405.3,705-723).
cgaacactggaaatccatt

SEQ ID NO: 275223 - DNA, 19 bp, Homo sapiens
  siRNA target sequence for TM9SF1 (NM_006405.3,709-727).
cactggaaatccattggtt

SEQ ID NO: 275224 - DNA, 19 bp, Homo sapiens
  siRNA target sequence for TM9SF1 (NM_006405.3,720-738).
cattggttgtccatcatca

SEQ ID NO: 275225 - DNA, 19 bp, Homo sapiens
  siRNA target sequence for TM9SF1 (NM_006405.3,812-830).
ggctcggtacaacttagat

SEQ ID NO: 275226 - DNA, 19 bp, Homo sapiens
  siRNA target sequence for TM9SF1 (NM_006405.3,814-832).
ctcggtacaacttagatga

SEQ ID NO: 275227 - DNA, 19 bp, Homo sapiens
  siRNA target sequence for TM9SF1 (NM_006405.3,863-881).
ctttgaccagggtgacaat

SEQ ID NO: 275228 - DNA, 19 bp, Homo sapiens
  siRNA target sequence for TM9SF1 (NM_006405.3,882-900).
ggctggaaaattatccata

SEQ ID NO: 275229 - DNA, 19 bp, Homo sapiens
  siRNA target sequence for TM9SF1 (NM_006405.3,979-997).
gcactggcattattgtcat

SEQ ID NO: 275230 - DNA, 19 bp, Homo sapiens
  siRNA target sequence for TM9SF1 (NM_006405.3,1325-1343).
caacgccagcccctttgat

SEQ ID NO: 275231 - DNA, 19 bp, Homo sapiens
  siRNA target sequence for TM9SF1 (NM_006405.3,1347-1365).
ccctgtcgcaccaagaaca

SEQ ID NO: 275232 - DNA, 19 bp, Homo sapiens
  siRNA target sequence for TM9SF1 (NM_006405.3,1348-1366).
cctgtcgcaccaagaacat

SEQ ID NO: 275233 - DNA, 19 bp, Homo sapiens
  siRNA target sequence for TM9SF1 (NM_006405.3,1386-1404).
cagccctggtacaagtcta

SEQ ID NO: 275234 - DNA, 19 bp, Homo sapiens
  siRNA target sequence for TM9SF1 (NM_006405.3,1455-1473).
gtggagctgtactacatct

SEQ ID NO: 275235 - DNA, 19 bp, Homo sapiens
  siRNA target sequence for TM9SF1 (NM_006405.3,1457-1475).
ggagctgtactacatcttt

SEQ ID NO: 275236 - DNA, 19 bp, Homo sapiens
  siRNA target sequence for TM9SF1 (NM_006405.3,1488-1506).
ggtcgggagcagtacactt

SEQ ID NO: 275237 - DNA, 19 bp, Homo sapiens
  siRNA target sequence for TM9SF1 (NM_006405.3,1489-1507).
gtcgggagcagtacacttt

SEQ ID NO: 275238 - DNA, 19 bp, Homo sapiens
  siRNA target sequence for TM9SF1 (NM_006405.3,1508-1526).
gtacggcatcctcttcttt

SEQ ID NO: 275239 - DNA, 19 bp, Homo sapiens
  siRNA target sequence for TM9SF1 (NM_006405.3,1636-1654).
gctccaccggcctcttcat

SEQ ID NO: 275240 - DNA, 19 bp, Homo sapiens
  siRNA target sequence for TM9SF1 (NM_006405.3,1799-1817).
gttcatccggtatatctat

SEQ ID NO: 275241 - DNA, 19 bp, Homo sapiens
  siRNA target sequence for TM9SF1 (NM_006405.3,1807-1825).
ggtatatctatgttaacct

SEQ ID NO: 275242 - DNA, 19 bp, Homo sapiens
  siRNA target sequence for TM9SF2 (NM_004800.1,268-286).
cttctgcgacgaagaaaaa

SEQ ID NO: 275243 - DNA, 19 bp, Homo sapiens
  siRNA target sequence for TM9SF2 (NM_004800.1,295-313).
cgagtgcaaggccgaaata

SEQ ID NO: 275244 - DNA, 19 bp, Homo sapiens
  siRNA target sequence for TM9SF2 (NM_004800.1,301-319).
caaggccgaaatagaacta

SEQ ID NO: 275245 - DNA, 19 bp, Homo sapiens
  siRNA target sequence for TM9SF2 (NM_004800.1,304-322).
ggccgaaatagaactattt

SEQ ID NO: 275246 - DNA, 19 bp, Homo sapiens
  siRNA target sequence for TM9SF2 (NM_004800.1,306-324).
ccgaaatagaactatttgt

SEQ ID NO: 275247 - DNA, 19 bp, Homo sapiens
  siRNA target sequence for TM9SF2 (NM_004800.1,362-380).
gaatacacagcgtttgatt

SEQ ID NO: 275248 - DNA, 19 bp, Homo sapiens
  siRNA target sequence for TM9SF2 (NM_004800.1,398-416).
ggaaagcgcccatctgaaa

SEQ ID NO: 275249 - DNA, 19 bp, Homo sapiens
  siRNA target sequence for TM9SF2 (NM_004800.1,399-417).
gaaagcgcccatctgaaaa

SEQ ID NO: 275250 - DNA, 19 bp, Homo sapiens
  siRNA target sequence for TM9SF2 (NM_004800.1,403-421).
gcgcccatctgaaaatctt

SEQ ID NO: 275251 - DNA, 19 bp, Homo sapiens
  siRNA target sequence for TM9SF2 (NM_004800.1,449-467).
gaaccttcaccatataagt

SEQ ID NO: 275252 - DNA, 19 bp, Homo sapiens
  siRNA target sequence for TM9SF2 (NM_004800.1,452-470).
ccttcaccatataagttta

SEQ ID NO: 275253 - DNA, 19 bp, Homo sapiens
  siRNA target sequence for TM9SF2 (NM_004800.1,456-474).
caccatataagtttacgtt

SEQ ID NO: 275254 - DNA, 19 bp, Homo sapiens
  siRNA target sequence for TM9SF2 (NM_004800.1,481-499).
gaaggagacctgtaagctt

SEQ ID NO: 275255 - DNA, 19 bp, Homo sapiens
  siRNA target sequence for TM9SF2 (NM_004800.1,485-503).
gagacctgtaagcttgttt

SEQ ID NO: 275256 - DNA, 19 bp, Homo sapiens
  siRNA target sequence for TM9SF2 (NM_004800.1,487-505).
gacctgtaagcttgtttgt

SEQ ID NO: 275257 - DNA, 19 bp, Homo sapiens
  siRNA target sequence for TM9SF2 (NM_004800.1,490-508).
ctgtaagcttgtttgtaca

SEQ ID NO: 275258 - DNA, 19 bp, Homo sapiens
  siRNA target sequence for TM9SF2 (NM_004800.1,571-589).
gttattgaattatcaacat

SEQ ID NO: 275259 - DNA, 19 bp, Homo sapiens
  siRNA target sequence for TM9SF2 (NM_004800.1,618-636).
cgtggtgttacgatgttga

SEQ ID NO: 275260 - DNA, 19 bp, Homo sapiens
  siRNA target sequence for TM9SF2 (NM_004800.1,619-637).
gtggtgttacgatgttgaa

SEQ ID NO: 275261 - DNA, 19 bp, Homo sapiens
  siRNA target sequence for TM9SF2 (NM_004800.1,621-639).
ggtgttacgatgttgaaga

SEQ ID NO: 275262 - DNA, 19 bp, Homo sapiens
  siRNA target sequence for TM9SF2 (NM_004800.1,622-640).
gtgttacgatgttgaagat

SEQ ID NO: 275263 - DNA, 19 bp, Homo sapiens
  siRNA target sequence for TM9SF2 (NM_004800.1,649-667).
gttctgtaatcctggattt

SEQ ID NO: 275264 - DNA, 19 bp, Homo sapiens
  siRNA target sequence for TM9SF2 (NM_004800.1,654-672).
gtaatcctggatttcctat

SEQ ID NO: 275265 - DNA, 19 bp, Homo sapiens
  siRNA target sequence for TM9SF2 (NM_004800.1,701-719).
gcaaaagatgcctgtgtta

SEQ ID NO: 275266 - DNA, 19 bp, Homo sapiens
  siRNA target sequence for TM9SF2 (NM_004800.1,702-720).
caaaagatgcctgtgttat

SEQ ID NO: 275267 - DNA, 19 bp, Homo sapiens
  siRNA target sequence for TM9SF2 (NM_004800.1,707-725).
gatgcctgtgttattagtt

SEQ ID NO: 275268 - DNA, 19 bp, Homo sapiens
  siRNA target sequence for TM9SF2 (NM_004800.1,712-730).
ctgtgttattagttcagat

SEQ ID NO: 275269 - DNA, 19 bp, Homo sapiens
  siRNA target sequence for TM9SF2 (NM_004800.1,760-778).
caaccatgttgacatcaaa

SEQ ID NO: 275270 - DNA, 19 bp, Homo sapiens
  siRNA target sequence for TM9SF2 (NM_004800.1,763-781).
ccatgttgacatcaaaata

SEQ ID NO: 275271 - DNA, 19 bp, Homo sapiens
  siRNA target sequence for TM9SF2 (NM_004800.1,805-823).
gtccatgggagcaagatta

SEQ ID NO: 275272 - DNA, 19 bp, Homo sapiens
  siRNA target sequence for TM9SF2 (NM_004800.1,819-837).
gattagtggctgctaaact

SEQ ID NO: 275273 - DNA, 19 bp, Homo sapiens
  siRNA target sequence for TM9SF2 (NM_004800.1,913-931).
ggcttctggggagataaaa

SEQ ID NO: 275274 - DNA, 19 bp, Homo sapiens
  siRNA target sequence for TM9SF2 (NM_004800.1,925-943).
gataaaaattgcctatact

SEQ ID NO: 275275 - DNA, 19 bp, Homo sapiens
  siRNA target sequence for TM9SF2 (NM_004800.1,935-953).
gcctatacttactctgtta

SEQ ID NO: 275276 - DNA, 19 bp, Homo sapiens
  siRNA target sequence for TM9SF2 (NM_004800.1,954-972).
gcttcgaggaagatgataa

SEQ ID NO: 275277 - DNA, 19 bp, Homo sapiens
  siRNA target sequence for TM9SF2 (NM_004800.1,983-1001).
gcgtctagatgggactata

SEQ ID NO: 275278 - DNA, 19 bp, Homo sapiens
  siRNA target sequence for TM9SF2 (NM_004800.1,984-1002).
cgtctagatgggactatat

SEQ ID NO: 275279 - DNA, 19 bp, Homo sapiens
  siRNA target sequence for TM9SF2 (NM_004800.1,985-1003).
gtctagatgggactatatt

SEQ ID NO: 275280 - DNA, 19 bp, Homo sapiens
  siRNA target sequence for TM9SF2 (NM_004800.1,1016-1034).
cctcatacccacattcagt

SEQ ID NO: 275281 - DNA, 19 bp, Homo sapiens
  siRNA target sequence for TM9SF2 (NM_004800.1,1031-1049).
cagtggtttagcattatga

SEQ ID NO: 275282 - DNA, 19 bp, Homo sapiens
  siRNA target sequence for TM9SF2 (NM_004800.1,1033-1051).
gtggtttagcattatgaat

SEQ ID NO: 275283 - DNA, 19 bp, Homo sapiens
  siRNA target sequence for TM9SF2 (NM_004800.1,1058-1076).
gtcattgttctcttcttat

SEQ ID NO: 275284 - DNA, 19 bp, Homo sapiens
  siRNA target sequence for TM9SF2 (NM_004800.1,1069-1087).
cttcttatctggaatggta

SEQ ID NO: 275285 - DNA, 19 bp, Homo sapiens
  siRNA target sequence for TM9SF2 (NM_004800.1,1079-1097).
ggaatggtagctatgatta

SEQ ID NO: 275286 - DNA, 19 bp, Homo sapiens
  siRNA target sequence for TM9SF2 (NM_004800.1,1103-1121).
cggacactgcacaaagata

SEQ ID NO: 275287 - DNA, 19 bp, Homo sapiens
  siRNA target sequence for TM9SF2 (NM_004800.1,1114-1132).
caaagatattgctagatat

SEQ ID NO: 275288 - DNA, 19 bp, Homo sapiens
  siRNA target sequence for TM9SF2 (NM_004800.1,1222-1240).
gctgctatcagtctttcta

SEQ ID NO: 275289 - DNA, 19 bp, Homo sapiens
  siRNA target sequence for TM9SF2 (NM_004800.1,1241-1259).
ggatccgggacacagattt

SEQ ID NO: 275290 - DNA, 19 bp, Homo sapiens
  siRNA target sequence for TM9SF2 (NM_004800.1,1245-1263).
ccgggacacagattttaat

SEQ ID NO: 275291 - DNA, 19 bp, Homo sapiens
  siRNA target sequence for TM9SF2 (NM_004800.1,1246-1264).
cgggacacagattttaatt

SEQ ID NO: 275292 - DNA, 19 bp, Homo sapiens
  siRNA target sequence for TM9SF2 (NM_004800.1,1247-1265).
gggacacagattttaatta

SEQ ID NO: 275293 - DNA, 19 bp, Homo sapiens
  siRNA target sequence for TM9SF2 (NM_004800.1,1248-1266).
ggacacagattttaattat

SEQ ID NO: 275294 - DNA, 19 bp, Homo sapiens
  siRNA target sequence for TM9SF2 (NM_004800.1,1385-1403).
gctgccagattctataagt

SEQ ID NO: 275295 - DNA, 19 bp, Homo sapiens
  siRNA target sequence for TM9SF2 (NM_004800.1,1409-1427).
ggaggtgagaagtggaaaa

SEQ ID NO: 275296 - DNA, 19 bp, Homo sapiens
  siRNA target sequence for TM9SF2 (NM_004800.1,1451-1469).
ctttgtcctgggattgtat

SEQ ID NO: 275297 - DNA, 19 bp, Homo sapiens
  siRNA target sequence for TM9SF2 (NM_004800.1,1548-1566).
ccatattggccctttggtt

SEQ ID NO: 275298 - DNA, 19 bp, Homo sapiens
  siRNA target sequence for TM9SF2 (NM_004800.1,1579-1597).
gcctctgacgtttattggt

SEQ ID NO: 275299 - DNA, 19 bp, Homo sapiens
  siRNA target sequence for TM9SF2 (NM_004800.1,1587-1605).
cgtttattggtgcatactt

SEQ ID NO: 275300 - DNA, 19 bp, Homo sapiens
  siRNA target sequence for TM9SF2 (NM_004800.1,1595-1613).
ggtgcatactttggtttta

SEQ ID NO: 275301 - DNA, 19 bp, Homo sapiens
  siRNA target sequence for TM9SF2 (NM_004800.1,1596-1614).
gtgcatactttggttttaa

SEQ ID NO: 275302 - DNA, 19 bp, Homo sapiens
  siRNA target sequence for TM9SF2 (NM_004800.1,1598-1616).
gcatactttggttttaaga

SEQ ID NO: 275303 - DNA, 19 bp, Homo sapiens
  siRNA target sequence for TM9SF2 (NM_004800.1,1635-1653).
cagttcgaaccaatcagat

SEQ ID NO: 275304 - DNA, 19 bp, Homo sapiens
  siRNA target sequence for TM9SF2 (NM_004800.1,1667-1685).
cctgaacagtcgttctaca

SEQ ID NO: 275305 - DNA, 19 bp, Homo sapiens
  siRNA target sequence for TM9SF2 (NM_004800.1,1687-1705).
gaagcccttgcctggtatt

SEQ ID NO: 275306 - DNA, 19 bp, Homo sapiens
  siRNA target sequence for TM9SF2 (NM_004800.1,1691-1709).
cccttgcctggtattatca

SEQ ID NO: 275307 - DNA, 19 bp, Homo sapiens
  siRNA target sequence for TM9SF2 (NM_004800.1,1731-1749).
gctgcatctttatacaact

SEQ ID NO: 275308 - DNA, 19 bp, Homo sapiens
  siRNA target sequence for TM9SF2 (NM_004800.1,1778-1796).
caccagatgtattacatgt

SEQ ID NO: 275309 - DNA, 19 bp, Homo sapiens
  siRNA target sequence for TM9SF2 (NM_004800.1,1805-1823).
ctatttctggtgtttatca

SEQ ID NO: 275310 - DNA, 19 bp, Homo sapiens
  siRNA target sequence for TM9SF2 (NM_004800.1,1828-1846).
ggttattacctgttctgaa

SEQ ID NO: 275311 - DNA, 19 bp, Homo sapiens
  siRNA target sequence for TM9SF2 (NM_004800.1,1836-1854).
cctgttctgaagcaactat

SEQ ID NO: 275312 - DNA, 19 bp, Homo sapiens
  siRNA target sequence for TM9SF2 (NM_004800.1,1839-1857).
gttctgaagcaactatact

SEQ ID NO: 275313 - DNA, 19 bp, Homo sapiens
  siRNA target sequence for TM9SF2 (NM_004800.1,1844-1862).
gaagcaactatacttcttt

SEQ ID NO: 275314 - DNA, 19 bp, Homo sapiens
  siRNA target sequence for TM9SF2 (NM_004800.1,1873-1891).
cctatgtgcagaggattat

SEQ ID NO: 275315 - DNA, 19 bp, Homo sapiens
  siRNA target sequence for TM9SF2 (NM_004800.1,1897-1915).
gcaatggcgttcattcctt

SEQ ID NO: 275316 - DNA, 19 bp, Homo sapiens
  siRNA target sequence for TM9SF2 (NM_004800.1,1898-1916).
caatggcgttcattcctta

SEQ ID NO: 275317 - DNA, 19 bp, Homo sapiens
  siRNA target sequence for TM9SF2 (NM_004800.1,1912-1930).
ccttacgagtggctttact

SEQ ID NO: 275318 - DNA, 19 bp, Homo sapiens
  siRNA target sequence for TM9SF2 (NM_004800.1,1952-1970).
gcagtacactacttctttt

SEQ ID NO: 275319 - DNA, 19 bp, Homo sapiens
  siRNA target sequence for TM9SF2 (NM_004800.1,1987-2005).
gggaacagcaagcacaatt

SEQ ID NO: 275320 - DNA, 19 bp, Homo sapiens
  siRNA target sequence for TM9SF2 (NM_004800.1,1992-2010).
cagcaagcacaattctgta

SEQ ID NO: 275321 - DNA, 19 bp, Homo sapiens
  siRNA target sequence for TM9SF2 (NM_004800.1,2006-2024).
ctgtactttggttatacca

SEQ ID NO: 275322 - DNA, 19 bp, Homo sapiens
  siRNA target sequence for TM9SF2 (NM_004800.1,2011-2029).
ctttggttataccatgata

SEQ ID NO: 275323 - DNA, 19 bp, Homo sapiens
  siRNA target sequence for TM9SF2 (NM_004800.1,2016-2034).
gttataccatgataatggt

SEQ ID NO: 275324 - DNA, 19 bp, Homo sapiens
  siRNA target sequence for TM9SF2 (NM_004800.1,2079-2097).
gcttttggtttgttaccaa

SEQ ID NO: 275325 - DNA, 19 bp, Homo sapiens
  siRNA target sequence for TM9SF4 (NM_014742.1,369-387).
ctggggtcgcgcctatcaa

SEQ ID NO: 275326 - DNA, 19 bp, Homo sapiens
  siRNA target sequence for TM9SF4 (NM_014742.1,371-389).
ggggtcgcgcctatcaact

SEQ ID NO: 275327 - DNA, 19 bp, Homo sapiens
  siRNA target sequence for TM9SF4 (NM_014742.1,395-413).
cagaacgatcccgtagaaa

SEQ ID NO: 275328 - DNA, 19 bp, Homo sapiens
  siRNA target sequence for TM9SF4 (NM_014742.1,438-456).
ctcgaacccagctacctta

SEQ ID NO: 275329 - DNA, 19 bp, Homo sapiens
  siRNA target sequence for TM9SF4 (NM_014742.1,441-459).
gaacccagctaccttatga

SEQ ID NO: 275330 - DNA, 19 bp, Homo sapiens
  siRNA target sequence for TM9SF4 (NM_014742.1,478-496).
ctgccagcccagcaagata

SEQ ID NO: 275331 - DNA, 19 bp, Homo sapiens
  siRNA target sequence for TM9SF4 (NM_014742.1,531-549).
gaggggaccggattgtcaa

SEQ ID NO: 275332 - DNA, 19 bp, Homo sapiens
  siRNA target sequence for TM9SF4 (NM_014742.1,577-595).
cgagaagaagtgtgaagtt

SEQ ID NO: 275333 - DNA, 19 bp, Homo sapiens
  siRNA target sequence for TM9SF4 (NM_014742.1,1051-1069).
ccactgggaggaaagtgat

SEQ ID NO: 275334 - DNA, 19 bp, Homo sapiens
  siRNA target sequence for TM9SF4 (NM_014742.1,1115-1133).
gtccagatccactggtttt

SEQ ID NO: 275335 - DNA, 19 bp, Homo sapiens
  siRNA target sequence for TM9SF4 (NM_014742.1,1124-1142).
cactggttttctatcatta

SEQ ID NO: 275336 - DNA, 19 bp, Homo sapiens
  siRNA target sequence for TM9SF4 (NM_014742.1,1340-1358).
ggcattcagctgttctgta

SEQ ID NO: 275337 - DNA, 19 bp, Homo sapiens
  siRNA target sequence for TM9SF4 (NM_014742.1,1457-1475).
ggggtgtttggcggatttt

SEQ ID NO: 275338 - DNA, 19 bp, Homo sapiens
  siRNA target sequence for TM9SF4 (NM_014742.1,1483-1501).
ccgtctgtaccgcacttta

SEQ ID NO: 275339 - DNA, 19 bp, Homo sapiens
  siRNA target sequence for TM9SF4 (NM_014742.1,1484-1502).
cgtctgtaccgcactttaa

SEQ ID NO: 275340 - DNA, 19 bp, Homo sapiens
  siRNA target sequence for TM9SF4 (NM_014742.1,1485-1503).
gtctgtaccgcactttaaa

SEQ ID NO: 275341 - DNA, 19 bp, Homo sapiens
  siRNA target sequence for TM9SF4 (NM_014742.1,1565-1583).
ggcatctgcttcgtattga

SEQ ID NO: 275342 - DNA, 19 bp, Homo sapiens
  siRNA target sequence for TM9SF4 (NM_014742.1,1566-1584).
gcatctgcttcgtattgaa

SEQ ID NO: 275343 - DNA, 19 bp, Homo sapiens
  siRNA target sequence for TM9SF4 (NM_014742.1,1567-1585).
catctgcttcgtattgaat

SEQ ID NO: 275344 - DNA, 19 bp, Homo sapiens
  siRNA target sequence for TM9SF4 (NM_014742.1,1706-1724).
cgaaagcagccatatgaca

SEQ ID NO: 275345 - DNA, 19 bp, Homo sapiens
  siRNA target sequence for TM9SF4 (NM_014742.1,1773-1791).
ggtacatgaaccgatttgt

SEQ ID NO: 275346 - DNA, 19 bp, Homo sapiens
  siRNA target sequence for TM9SF4 (NM_014742.1,1860-1878).
ctatctgggagaatcagtt

SEQ ID NO: 275347 - DNA, 19 bp, Homo sapiens
  siRNA target sequence for TM9SF4 (NM_014742.1,1921-1939).
ggtggtatcctgttcacaa

SEQ ID NO: 275348 - DNA, 19 bp, Homo sapiens
  siRNA target sequence for TM9SF4 (NM_014742.1,1922-1940).
gtggtatcctgttcacaaa

SEQ ID NO: 275349 - DNA, 19 bp, Homo sapiens
  siRNA target sequence for TM9SF4 (NM_014742.1,1944-1962).
gcatcgtcatggtgtactt

SEQ ID NO: 275350 - DNA, 19 bp, Homo sapiens
  siRNA target sequence for TM9SF4 (NM_014742.1,1985-2003).
cgctggtggtggagaaatt

SEQ ID NO: 275351 - DNA, 19 bp, Homo sapiens
  siRNA target sequence for TM9SF4 (NM_014742.1,1989-2007).
ggtggtggagaaatttcct

SEQ ID NO: 275352 - DNA, 19 bp, Homo sapiens
  siRNA target sequence for TM9SF4 (NM_014742.1,1990-2008).
gtggtggagaaatttccta

SEQ ID NO: 275353 - DNA, 19 bp, Homo sapiens
  siRNA target sequence for TM9SF4 (NM_014742.1,2025-2043).
cattctacgtcctggttta

SEQ ID NO: 275354 - DNA, 19 bp, Homo sapiens
  siRNA target sequence for TM9SF4 (NM_014742.1,2149-2167).
gggtaccatcggcttctat

SEQ ID NO: 275355 - DNA, 19 bp, Homo sapiens
  siRNA target sequence for TM9SF4 (NM_014742.1,2164-2182).
ctatgcagcctacatgttt

SEQ ID NO: 275356 - DNA, 19 bp, Homo sapiens
  siRNA target sequence for TM9SF4 (NM_014742.1,2179-2197).
gtttgttcgcaagatctat

SEQ ID NO: 275357 - DNA, 19 bp, Homo sapiens
  siRNA target sequence for CNOT2 (NM_014515.1,123-141).
ggactgatggacatacatt

SEQ ID NO: 275358 - DNA, 19 bp, Homo sapiens
  siRNA target sequence for CNOT2 (NM_014515.1,134-152).
catacattatctgagaaaa

SEQ ID NO: 275359 - DNA, 19 bp, Homo sapiens
  siRNA target sequence for CNOT2 (NM_014515.1,175-193).
catgtttggtgcttcaaga

SEQ ID NO: 275360 - DNA, 19 bp, Homo sapiens
  siRNA target sequence for CNOT2 (NM_014515.1,227-245).
catgacgaaaacatgtact

SEQ ID NO: 275361 - DNA, 19 bp, Homo sapiens
  siRNA target sequence for CNOT2 (NM_014515.1,267-285).
cacatcggtcagaaaaaga

SEQ ID NO: 275362 - DNA, 19 bp, Homo sapiens
  siRNA target sequence for CNOT2 (NM_014515.1,269-287).
catcggtcagaaaaagata

SEQ ID NO: 275363 - DNA, 19 bp, Homo sapiens
  siRNA target sequence for CNOT2 (NM_014515.1,321-339).
ctcagtttggggcaagttt

SEQ ID NO: 275364 - DNA, 19 bp, Homo sapiens
  siRNA target sequence for CNOT2 (NM_014515.1,373-391).
gagggggatgagcaacaat

SEQ ID NO: 275365 - DNA, 19 bp, Homo sapiens
  siRNA target sequence for CNOT2 (NM_014515.1,385-403).
caacaatacccctcagtta

SEQ ID NO: 275366 - DNA, 19 bp, Homo sapiens
  siRNA target sequence for CNOT2 (NM_014515.1,400-418).
gttaaatcgcagcttatca

SEQ ID NO: 275367 - DNA, 19 bp, Homo sapiens
  siRNA target sequence for CNOT2 (NM_014515.1,439-457).
ccacgtcacgccaacaaca

SEQ ID NO: 275368 - DNA, 19 bp, Homo sapiens
  siRNA target sequence for CNOT2 (NM_014515.1,501-519).
ggggtattttgcctatgaa

SEQ ID NO: 275369 - DNA, 19 bp, Homo sapiens
  siRNA target sequence for CNOT2 (NM_014515.1,569-587).
cctagcaggacaaatagca

SEQ ID NO: 275370 - DNA, 19 bp, Homo sapiens
  siRNA target sequence for CNOT2 (NM_014515.1,570-588).
ctagcaggacaaatagcat

SEQ ID NO: 275371 - DNA, 19 bp, Homo sapiens
  siRNA target sequence for CNOT2 (NM_014515.1,616-634).
cagaagctcgccaagcata

SEQ ID NO: 275372 - DNA, 19 bp, Homo sapiens
  siRNA target sequence for CNOT2 (NM_014515.1,618-636).
gaagctcgccaagcataat

SEQ ID NO: 275373 - DNA, 19 bp, Homo sapiens
  siRNA target sequence for CNOT2 (NM_014515.1,622-640).
ctcgccaagcataatatgt

SEQ ID NO: 275374 - DNA, 19 bp, Homo sapiens
  siRNA target sequence for CNOT2 (NM_014515.1,624-642).
cgccaagcataatatgtat

SEQ ID NO: 275375 - DNA, 19 bp, Homo sapiens
  siRNA target sequence for CNOT2 (NM_014515.1,656-674).
ccttctcgacagcctttta

SEQ ID NO: 275376 - DNA, 19 bp, Homo sapiens
  siRNA target sequence for CNOT2 (NM_014515.1,660-678).
ctcgacagccttttactgt

SEQ ID NO: 275377 - DNA, 19 bp, Homo sapiens
  siRNA target sequence for CNOT2 (NM_014515.1,668-686).
ccttttactgtgaacagta

SEQ ID NO: 275378 - DNA, 19 bp, Homo sapiens
  siRNA target sequence for CNOT2 (NM_014515.1,684-702).
gtatgtctggatttggaat

SEQ ID NO: 275379 - DNA, 19 bp, Homo sapiens
  siRNA target sequence for CNOT2 (NM_014515.1,722-740).
ggaatgaataactccttat

SEQ ID NO: 275380 - DNA, 19 bp, Homo sapiens
  siRNA target sequence for CNOT2 (NM_014515.1,727-745).
gaataactccttatcaagt

SEQ ID NO: 275381 - DNA, 19 bp, Homo sapiens
  siRNA target sequence for CNOT2 (NM_014515.1,786-804).
gattggacctttcagattt

SEQ ID NO: 275382 - DNA, 19 bp, Homo sapiens
  siRNA target sequence for CNOT2 (NM_014515.1,842-860).
ggtaacccaactccattaa

SEQ ID NO: 275383 - DNA, 19 bp, Homo sapiens
  siRNA target sequence for CNOT2 (NM_014515.1,873-891).
ctggaagagctccttatgt

SEQ ID NO: 275384 - DNA, 19 bp, Homo sapiens
  siRNA target sequence for CNOT2 (NM_014515.1,879-897).
gagctccttatgttggaat

SEQ ID NO: 275385 - DNA, 19 bp, Homo sapiens
  siRNA target sequence for CNOT2 (NM_014515.1,898-916).
ggtaacaaaaccagcaaat

SEQ ID NO: 275386 - DNA, 19 bp, Homo sapiens
  siRNA target sequence for CNOT2 (NM_014515.1,920-938).
caatcccaggacttctcaa

SEQ ID NO: 275387 - DNA, 19 bp, Homo sapiens
  siRNA target sequence for CNOT2 (NM_014515.1,928-946).
ggacttctcaatacacaat

SEQ ID NO: 275388 - DNA, 19 bp, Homo sapiens
  siRNA target sequence for CNOT2 (NM_014515.1,976-994).
ctataaagatccaacatca

SEQ ID NO: 275389 - DNA, 19 bp, Homo sapiens
  siRNA target sequence for CNOT2 (NM_014515.1,987-1005).
caacatcaagtaatgatga

SEQ ID NO: 275390 - DNA, 19 bp, Homo sapiens
  siRNA target sequence for CNOT2 (NM_014515.1,993-1011).
caagtaatgatgacagtaa

SEQ ID NO: 275391 - DNA, 19 bp, Homo sapiens
  siRNA target sequence for CNOT2 (NM_014515.1,1001-1019).
gatgacagtaaatctaatt

SEQ ID NO: 275392 - DNA, 19 bp, Homo sapiens
  siRNA target sequence for CNOT2 (NM_014515.1,1004-1022).
gacagtaaatctaatttga

SEQ ID NO: 275393 - DNA, 19 bp, Homo sapiens
  siRNA target sequence for CNOT2 (NM_014515.1,1067-1085).
cctggagataaaagttcaa

SEQ ID NO: 275394 - DNA, 19 bp, Homo sapiens
  siRNA target sequence for CNOT2 (NM_014515.1,1130-1148).
cctgatggtcgggttacta

SEQ ID NO: 275395 - DNA, 19 bp, Homo sapiens
  siRNA target sequence for CNOT2 (NM_014515.1,1131-1149).
ctgatggtcgggttactaa

SEQ ID NO: 275396 - DNA, 19 bp, Homo sapiens
  siRNA target sequence for CNOT2 (NM_014515.1,1133-1151).
gatggtcgggttactaaca

SEQ ID NO: 275397 - DNA, 19 bp, Homo sapiens
  siRNA target sequence for CNOT2 (NM_014515.1,1161-1179).
ggatggtgacggaccaatt

SEQ ID NO: 275398 - DNA, 19 bp, Homo sapiens
  siRNA target sequence for CNOT2 (NM_014515.1,1162-1180).
gatggtgacggaccaattt

SEQ ID NO: 275399 - DNA, 19 bp, Homo sapiens
  siRNA target sequence for CNOT2 (NM_014515.1,1165-1183).
ggtgacggaccaatttgga

SEQ ID NO: 275400 - DNA, 19 bp, Homo sapiens
  siRNA target sequence for CNOT2 (NM_014515.1,1166-1184).
gtgacggaccaatttggaa

SEQ ID NO: 275401 - DNA, 19 bp, Homo sapiens
  siRNA target sequence for CNOT2 (NM_014515.1,1186-1204).
gattggcctgttaacattt

SEQ ID NO: 275402 - DNA, 19 bp, Homo sapiens
  siRNA target sequence for CNOT2 (NM_014515.1,1190-1208).
ggcctgttaacatttatca

SEQ ID NO: 275403 - DNA, 19 bp, Homo sapiens
  siRNA target sequence for CNOT2 (NM_014515.1,1234-1252).
ggtacatcttgcattagga

SEQ ID NO: 275404 - DNA, 19 bp, Homo sapiens
  siRNA target sequence for CNOT2 (NM_014515.1,1250-1268).
ggaagtgacttaacaacat

SEQ ID NO: 275405 - DNA, 19 bp, Homo sapiens
  siRNA target sequence for CNOT2 (NM_014515.1,1335-1353).
cttgtcgacctcaagacat

SEQ ID NO: 275406 - DNA, 19 bp, Homo sapiens
  siRNA target sequence for CNOT2 (NM_014515.1,1338-1356).
gtcgacctcaagacataga

SEQ ID NO: 275407 - DNA, 19 bp, Homo sapiens
  siRNA target sequence for CNOT2 (NM_014515.1,1340-1358).
cgacctcaagacatagact

SEQ ID NO: 275408 - DNA, 19 bp, Homo sapiens
  siRNA target sequence for CNOT2 (NM_014515.1,1364-1382).
gttccatctgagtacttaa

SEQ ID NO: 275409 - DNA, 19 bp, Homo sapiens
  siRNA target sequence for CNOT2 (NM_014515.1,1367-1385).
ccatctgagtacttaacga

SEQ ID NO: 275410 - DNA, 19 bp, Homo sapiens
  siRNA target sequence for CNOT2 (NM_014515.1,1368-1386).
catctgagtacttaacgaa

SEQ ID NO: 275411 - DNA, 19 bp, Homo sapiens
  siRNA target sequence for CNOT2 (NM_014515.1,1378-1396).
cttaacgaacattcacatt

SEQ ID NO: 275412 - DNA, 19 bp, Homo sapiens
  siRNA target sequence for CNOT2 (NM_014515.1,1405-1423).
gctggctgcaataaaactt

SEQ ID NO: 275413 - DNA, 19 bp, Homo sapiens
  siRNA target sequence for CNOT2 (NM_014515.1,1450-1468).
ctatctctattacatgaat

SEQ ID NO: 275414 - DNA, 19 bp, Homo sapiens
  siRNA target sequence for CNOT2 (NM_014515.1,1465-1483).
gaatggaggagacgtatta

SEQ ID NO: 275415 - DNA, 19 bp, Homo sapiens
  siRNA target sequence for CNOT2 (NM_014515.1,1470-1488).
gaggagacgtattacaact

SEQ ID NO: 275416 - DNA, 19 bp, Homo sapiens
  siRNA target sequence for CNOT2 (NM_014515.1,1472-1490).
ggagacgtattacaacttt

SEQ ID NO: 275417 - DNA, 19 bp, Homo sapiens
  siRNA target sequence for CNOT2 (NM_014515.1,1473-1491).
gagacgtattacaactttt

SEQ ID NO: 275418 - DNA, 19 bp, Homo sapiens
  siRNA target sequence for CNOT2 (NM_014515.1,1477-1495).
cgtattacaacttttagct

SEQ ID NO: 275419 - DNA, 19 bp, Homo sapiens
  siRNA target sequence for CNOT2 (NM_014515.1,1535-1553).
gaagaacgagtatggatta

SEQ ID NO: 275420 - DNA, 19 bp, Homo sapiens
  siRNA target sequence for CNOT2 (NM_014515.1,1538-1556).
gaacgagtatggattacca

SEQ ID NO: 275421 - DNA, 19 bp, Homo sapiens
  siRNA target sequence for CNOT2 (NM_014515.1,1594-1612).
ctatgagaggggaacatat

SEQ ID NO: 275422 - DNA, 19 bp, Homo sapiens
  siRNA target sequence for GTF2B (NM_001514.2,44-62).
gtctaccagccgtttggat

SEQ ID NO: 275423 - DNA, 19 bp, Homo sapiens
  siRNA target sequence for GTF2B (NM_001514.2,163-181).
gtgaccgggttattgatgt

SEQ ID NO: 275424 - DNA, 19 bp, Homo sapiens
  siRNA target sequence for GTF2B (NM_001514.2,195-213).
cgaactttcagcaatgaca

SEQ ID NO: 275425 - DNA, 19 bp, Homo sapiens
  siRNA target sequence for GTF2B (NM_001514.2,232-250).
ctcgagttggagattctca

SEQ ID NO: 275426 - DNA, 19 bp, Homo sapiens
  siRNA target sequence for GTF2B (NM_001514.2,298-316).
gcacaggagctgcaagttt

SEQ ID NO: 275427 - DNA, 19 bp, Homo sapiens
  siRNA target sequence for GTF2B (NM_001514.2,342-360).
cagaatcggagaacaatga

SEQ ID NO: 275428 - DNA, 19 bp, Homo sapiens
  siRNA target sequence for GTF2B (NM_001514.2,364-382).
gttctgatcgggcaatgat

SEQ ID NO: 275429 - DNA, 19 bp, Homo sapiens
  siRNA target sequence for GTF2B (NM_001514.2,367-385).
ctgatcgggcaatgatgaa

SEQ ID NO: 275430 - DNA, 19 bp, Homo sapiens
  siRNA target sequence for GTF2B (NM_001514.2,372-390).
cgggcaatgatgaatgcat

SEQ ID NO: 275431 - DNA, 19 bp, Homo sapiens
  siRNA target sequence for GTF2B (NM_001514.2,406-424).
ccatggcagacagaatcaa

SEQ ID NO: 275432 - DNA, 19 bp, Homo sapiens
  siRNA target sequence for GTF2B (NM_001514.2,410-428).
ggcagacagaatcaatcta

SEQ ID NO: 275433 - DNA, 19 bp, Homo sapiens
  siRNA target sequence for GTF2B (NM_001514.2,422-440).
caatctacctcgaaatata

SEQ ID NO: 275434 - DNA, 19 bp, Homo sapiens
  siRNA target sequence for GTF2B (NM_001514.2,441-459).
gttgatcgaacaaataatt

SEQ ID NO: 275435 - DNA, 19 bp, Homo sapiens
  siRNA target sequence for GTF2B (NM_001514.2,501-519).
gctaatgatgctatagctt

SEQ ID NO: 275436 - DNA, 19 bp, Homo sapiens
  siRNA target sequence for GTF2B (NM_001514.2,552-570).
ggggttcctaggacattta

SEQ ID NO: 275437 - DNA, 19 bp, Homo sapiens
  siRNA target sequence for GTF2B (NM_001514.2,553-571).
gggttcctaggacatttaa

SEQ ID NO: 275438 - DNA, 19 bp, Homo sapiens
  siRNA target sequence for GTF2B (NM_001514.2,554-572).
ggttcctaggacatttaaa

SEQ ID NO: 275439 - DNA, 19 bp, Homo sapiens
  siRNA target sequence for GTF2B (NM_001514.2,582-600).
gccgtatcacgaatttcta

SEQ ID NO: 275440 - DNA, 19 bp, Homo sapiens
  siRNA target sequence for GTF2B (NM_001514.2,583-601).
ccgtatcacgaatttctaa

SEQ ID NO: 275441 - DNA, 19 bp, Homo sapiens
  siRNA target sequence for GTF2B (NM_001514.2,585-603).
gtatcacgaatttctaaga

SEQ ID NO: 275442 - DNA, 19 bp, Homo sapiens
  siRNA target sequence for GTF2B (NM_001514.2,606-624).
gaaattggtcggtgtttta

SEQ ID NO: 275443 - DNA, 19 bp, Homo sapiens
  siRNA target sequence for GTF2B (NM_001514.2,612-630).
ggtcggtgttttaaactta

SEQ ID NO: 275444 - DNA, 19 bp, Homo sapiens
  siRNA target sequence for GTF2B (NM_001514.2,645-663).
gaaaccagtgtggatttga

SEQ ID NO: 275445 - DNA, 19 bp, Homo sapiens
  siRNA target sequence for GTF2B (NM_001514.2,799-817).
cagcggcagctatttacat

SEQ ID NO: 275446 - DNA, 19 bp, Homo sapiens
  siRNA target sequence for GTF2B (NM_001514.2,823-841).
cacaggcatcagctgaaaa

SEQ ID NO: 275447 - DNA, 19 bp, Homo sapiens
  siRNA target sequence for GTF2B (NM_001514.2,876-894).
gttgctgatgttacaatca

SEQ ID NO: 275448 - DNA, 19 bp, Homo sapiens
  siRNA target sequence for GTF2B (NM_001514.2,899-917).
gtcctatagactgatctat

SEQ ID NO: 275449 - DNA, 19 bp, Homo sapiens
  siRNA target sequence for GTF2B (NM_001514.2,919-937).
ctcgagccccagatctgtt

SEQ ID NO: 275450 - DNA, 19 bp, Homo sapiens
  siRNA target sequence for GTF2B (NM_001514.2,924-942).
gccccagatctgtttccta

SEQ ID NO: 275451 - DNA, 19 bp, Homo sapiens
  siRNA target sequence for GTF2B (NM_001514.2,959-977).
caccccagtggacaaacta

SEQ ID NO: 275452 - DNA, 19 bp, Homo sapiens
  siRNA target sequence for GTF2E1 (NM_005513.1,96-114).
gaagcggttagccaagtat

SEQ ID NO: 275453 - DNA, 19 bp, Homo sapiens
  siRNA target sequence for GTF2E1 (NM_005513.1,170-188).
ggaactcctgtgtgaaaga

SEQ ID NO: 275454 - DNA, 19 bp, Homo sapiens
  siRNA target sequence for GTF2E1 (NM_005513.1,226-244).
caacttcgatcagttttga

SEQ ID NO: 275455 - DNA, 19 bp, Homo sapiens
  siRNA target sequence for GTF2E1 (NM_005513.1,229-247).
cttcgatcagttttgaata

SEQ ID NO: 275456 - DNA, 19 bp, Homo sapiens
  siRNA target sequence for GTF2E1 (NM_005513.1,232-250).
cgatcagttttgaataatt

SEQ ID NO: 275457 - DNA, 19 bp, Homo sapiens
  siRNA target sequence for GTF2E1 (NM_005513.1,233-251).
gatcagttttgaataattt

SEQ ID NO: 275458 - DNA, 19 bp, Homo sapiens
  siRNA target sequence for GTF2E1 (NM_005513.1,256-274).
ggagacaagtttatcaaat

SEQ ID NO: 275459 - DNA, 19 bp, Homo sapiens
  siRNA target sequence for GTF2E1 (NM_005513.1,311-329).
ccactcgccataactacta

SEQ ID NO: 275460 - DNA, 19 bp, Homo sapiens
  siRNA target sequence for GTF2E1 (NM_005513.1,314-332).
ctcgccataactactactt

SEQ ID NO: 275461 - DNA, 19 bp, Homo sapiens
  siRNA target sequence for GTF2E1 (NM_005513.1,316-334).
cgccataactactacttca

SEQ ID NO: 275462 - DNA, 19 bp, Homo sapiens
  siRNA target sequence for GTF2E1 (NM_005513.1,324-342).
ctactacttcatcaattat

SEQ ID NO: 275463 - DNA, 19 bp, Homo sapiens
  siRNA target sequence for GTF2E1 (NM_005513.1,327-345).
ctacttcatcaattatcgt

SEQ ID NO: 275464 - DNA, 19 bp, Homo sapiens
  siRNA target sequence for GTF2E1 (NM_005513.1,333-351).
catcaattatcgtactctt

SEQ ID NO: 275465 - DNA, 19 bp, Homo sapiens
  siRNA target sequence for GTF2E1 (NM_005513.1,336-354).
caattatcgtactcttgtt

SEQ ID NO: 275466 - DNA, 19 bp, Homo sapiens
  siRNA target sequence for GTF2E1 (NM_005513.1,347-365).
ctcttgttaatgtggtaaa

SEQ ID NO: 275467 - DNA, 19 bp, Homo sapiens
  siRNA target sequence for GTF2E1 (NM_005513.1,397-415).
gagaccgatgagagagatt

SEQ ID NO: 275468 - DNA, 19 bp, Homo sapiens
  siRNA target sequence for GTF2E1 (NM_005513.1,442-460).
cctgtctgtagtagtactt

SEQ ID NO: 275469 - DNA, 19 bp, Homo sapiens
  siRNA target sequence for GTF2E1 (NM_005513.1,443-461).
ctgtctgtagtagtacttt

SEQ ID NO: 275470 - DNA, 19 bp, Homo sapiens
  siRNA target sequence for GTF2E1 (NM_005513.1,447-465).
ctgtagtagtactttcaca

SEQ ID NO: 275471 - DNA, 19 bp, Homo sapiens
  siRNA target sequence for GTF2E1 (NM_005513.1,483-501).
gctctttgatcctatgaca

SEQ ID NO: 275472 - DNA, 19 bp, Homo sapiens
  siRNA target sequence for GTF2E1 (NM_005513.1,502-520).
ggaactttccgctgtactt

SEQ ID NO: 275473 - DNA, 19 bp, Homo sapiens
  siRNA target sequence for GTF2E1 (NM_005513.1,515-533).
gtactttttgccatacaga

SEQ ID NO: 275474 - DNA, 19 bp, Homo sapiens
  siRNA target sequence for GTF2E1 (NM_005513.1,585-603).
ggcaaggtttaatgaacaa

SEQ ID NO: 275475 - DNA, 19 bp, Homo sapiens
  siRNA target sequence for GTF2E1 (NM_005513.1,645-663).
gaacttggcctatgaaata

SEQ ID NO: 275476 - DNA, 19 bp, Homo sapiens
  siRNA target sequence for GTF2E1 (NM_005513.1,708-726).
ggaccatgcagcaactact

SEQ ID NO: 275477 - DNA, 19 bp, Homo sapiens
  siRNA target sequence for GTF2E1 (NM_005513.1,784-802).
ccttcctatgaagacttat

SEQ ID NO: 275478 - DNA, 19 bp, Homo sapiens
  siRNA target sequence for GTF2E1 (NM_005513.1,808-826).
cagaatgttgtcattaaca

SEQ ID NO: 275479 - DNA, 19 bp, Homo sapiens
  siRNA target sequence for GTF2E1 (NM_005513.1,874-892).
gccaaagagaggcctattt

SEQ ID NO: 275480 - DNA, 19 bp, Homo sapiens
  siRNA target sequence for GTF2E1 (NM_005513.1,910-928).
gtccaaggggcatatggtt

SEQ ID NO: 275481 - DNA, 19 bp, Homo sapiens
  siRNA target sequence for GTF2E1 (NM_005513.1,918-936).
ggcatatggttctgaagat

SEQ ID NO: 275482 - DNA, 19 bp, Homo sapiens
  siRNA target sequence for GTF2E1 (NM_005513.1,919-937).
gcatatggttctgaagata

SEQ ID NO: 275483 - DNA, 19 bp, Homo sapiens
  siRNA target sequence for GTF2E1 (NM_005513.1,1027-1045).
ctgctcattcacgagaaaa

SEQ ID NO: 275484 - DNA, 19 bp, Homo sapiens
  siRNA target sequence for GTF2E1 (NM_005513.1,1226-1244).
cagatgaccccattgtcat

SEQ ID NO: 275485 - DNA, 19 bp, Homo sapiens
  siRNA target sequence for GTF2E2 (NM_002095.3,254-272).
ccaagcctgttgagagaaa

SEQ ID NO: 275486 - DNA, 19 bp, Homo sapiens
  siRNA target sequence for GTF2E2 (NM_002095.3,274-292).
ggagctgttcaaaaaacga

SEQ ID NO: 275487 - DNA, 19 bp, Homo sapiens
  siRNA target sequence for GTF2E2 (NM_002095.3,283-301).
caaaaaacgagctctttct

SEQ ID NO: 275488 - DNA, 19 bp, Homo sapiens
  siRNA target sequence for GTF2E2 (NM_002095.3,305-323).
cctgtagtagaaaaacgtt

SEQ ID NO: 275489 - DNA, 19 bp, Homo sapiens
  siRNA target sequence for GTF2E2 (NM_002095.3,387-405).
gatcgtcaggctctaaaca

SEQ ID NO: 275490 - DNA, 19 bp, Homo sapiens
  siRNA target sequence for GTF2E2 (NM_002095.3,390-408).
cgtcaggctctaaacaaaa

SEQ ID NO: 275491 - DNA, 19 bp, Homo sapiens
  siRNA target sequence for GTF2E2 (NM_002095.3,391-409).
gtcaggctctaaacaaaat

SEQ ID NO: 275492 - DNA, 19 bp, Homo sapiens
  siRNA target sequence for GTF2E2 (NM_002095.3,474-492).
gtgttcttgctaagattgt

SEQ ID NO: 275493 - DNA, 19 bp, Homo sapiens
  siRNA target sequence for GTF2E2 (NM_002095.3,482-500).
gctaagattgtgaattaca

SEQ ID NO: 275494 - DNA, 19 bp, Homo sapiens
  siRNA target sequence for GTF2E2 (NM_002095.3,529-547).
gcatcctctaaccttagat

SEQ ID NO: 275495 - DNA, 19 bp, Homo sapiens
  siRNA target sequence for GTF2E2 (NM_002095.3,533-551).
cctctaaccttagatgaaa

SEQ ID NO: 275496 - DNA, 19 bp, Homo sapiens
  siRNA target sequence for GTF2E2 (NM_002095.3,534-552).
ctctaaccttagatgaaat

SEQ ID NO: 275497 - DNA, 19 bp, Homo sapiens
  siRNA target sequence for GTF2E2 (NM_002095.3,609-627).
ctgaggctttagtcaacaa

SEQ ID NO: 275498 - DNA, 19 bp, Homo sapiens
  siRNA target sequence for GTF2E2 (NM_002095.3,686-704).
gataagaaggccctactta

SEQ ID NO: 275499 - DNA, 19 bp, Homo sapiens
  siRNA target sequence for GTF2E2 (NM_002095.3,696-714).
ccctacttaggctcttaga

SEQ ID NO: 275500 - DNA, 19 bp, Homo sapiens
  siRNA target sequence for GTF2E2 (NM_002095.3,697-715).
cctacttaggctcttagat

SEQ ID NO: 275501 - DNA, 19 bp, Homo sapiens
  siRNA target sequence for GTF2E2 (NM_002095.3,718-736).
gcatgaccagcgaggatta

SEQ ID NO: 275502 - DNA, 19 bp, Homo sapiens
  siRNA target sequence for GTF2E2 (NM_002095.3,798-816).
ctttgggggaccagatact

SEQ ID NO: 275503 - DNA, 19 bp, Homo sapiens
  siRNA target sequence for GTF2E2 (NM_002095.3,802-820).
gggggaccagatactattt

SEQ ID NO: 275504 - DNA, 19 bp, Homo sapiens
  siRNA target sequence for GTF2E2 (NM_002095.3,804-822).
gggaccagatactatttgt

SEQ ID NO: 275505 - DNA, 19 bp, Homo sapiens
  siRNA target sequence for GTF2E2 (NM_002095.3,805-823).
ggaccagatactatttgta

SEQ ID NO: 275506 - DNA, 19 bp, Homo sapiens
  siRNA target sequence for GTF2E2 (NM_002095.3,811-829).
gatactatttgtaaatcgt

SEQ ID NO: 275507 - DNA, 19 bp, Homo sapiens
  siRNA target sequence for GTF2E2 (NM_002095.3,821-839).
gtaaatcgtcccgataaga

SEQ ID NO: 275508 - DNA, 19 bp, Homo sapiens
  siRNA target sequence for GTF2E2 (NM_002095.3,956-974).
ctgaagcgacagggtattt

SEQ ID NO: 275509 - DNA, 19 bp, Homo sapiens
  siRNA target sequence for GTF2E2 (NM_002095.3,958-976).
gaagcgacagggtatttct

SEQ ID NO: 275510 - DNA, 19 bp, Homo sapiens
  siRNA target sequence for GTF2E2 (NM_002095.3,1049-1067).
cgacgctttaagactcata

SEQ ID NO: 275511 - DNA, 19 bp, Homo sapiens
  siRNA target sequence for GTF2E2 (NM_002095.3,1050-1068).
gacgctttaagactcataa

SEQ ID NO: 275512 - DNA, 19 bp, Homo sapiens
  siRNA target sequence for GTF2E2 (NM_002095.3,1053-1071).
gctttaagactcataacga

SEQ ID NO: 275513 - DNA, 19 bp, Homo sapiens
  siRNA target sequence for GTF2E2 (NM_002095.3,1054-1072).
ctttaagactcataacgaa

SEQ ID NO: 275514 - DNA, 19 bp, Homo sapiens
  siRNA target sequence for GTF2E2 (NM_002095.3,1093-1111).
ggattactctgacattact

SEQ ID NO: 275515 - DNA, 19 bp, Homo sapiens
  siRNA target sequence for GTF2E2 (NM_002095.3,1094-1112).
gattactctgacattactt

SEQ ID NO: 275516 - DNA, 19 bp, Homo sapiens
  siRNA target sequence for TAF1C (NM_005679.2,245-263).
ccctccgccctgcattgtt

SEQ ID NO: 275517 - DNA, 19 bp, Homo sapiens
  siRNA target sequence for TAF1C (NM_005679.2,292-310).
gtccctgacctctctttca

SEQ ID NO: 275518 - DNA, 19 bp, Homo sapiens
  siRNA target sequence for TAF1C (NM_005679.2,295-313).
cctgacctctctttcatgt

SEQ ID NO: 275519 - DNA, 19 bp, Homo sapiens
  siRNA target sequence for TAF1C (NM_005679.2,632-650).
cggggagccgcactaagaa

SEQ ID NO: 275520 - DNA, 19 bp, Homo sapiens
  siRNA target sequence for TAF1C (NM_005679.2,634-652).
gggagccgcactaagaaga

SEQ ID NO: 275521 - DNA, 19 bp, Homo sapiens
  siRNA target sequence for TAF1C (NM_005679.2,635-653).
ggagccgcactaagaagaa

SEQ ID NO: 275522 - DNA, 19 bp, Homo sapiens
  siRNA target sequence for TAF1C (NM_005679.2,977-995).
gtgacaatccccaattcct

SEQ ID NO: 275523 - DNA, 19 bp, Homo sapiens
  siRNA target sequence for TAF1C (NM_005679.2,1052-1070).
ccgtccagggagaaagtaa

SEQ ID NO: 275524 - DNA, 19 bp, Homo sapiens
  siRNA target sequence for TAF1C (NM_005679.2,1063-1081).
gaaagtaaggcccttatat

SEQ ID NO: 275525 - DNA, 19 bp, Homo sapiens
  siRNA target sequence for TAF1C (NM_005679.2,1177-1195).
gccgtgtggaagtttggta

SEQ ID NO: 275526 - DNA, 19 bp, Homo sapiens
  siRNA target sequence for TAF1C (NM_005679.2,1178-1196).
ccgtgtggaagtttggtaa

SEQ ID NO: 275527 - DNA, 19 bp, Homo sapiens
  siRNA target sequence for TAF1C (NM_005679.2,1330-1348).
gatgggctgcggcaaatct

SEQ ID NO: 275528 - DNA, 19 bp, Homo sapiens
  siRNA target sequence for TAF1C (NM_005679.2,1333-1351).
gggctgcggcaaatctaca

SEQ ID NO: 275529 - DNA, 19 bp, Homo sapiens
  siRNA target sequence for TAF1C (NM_005679.2,1481-1499).
gctgtggtctgttgctttt

SEQ ID NO: 275530 - DNA, 19 bp, Homo sapiens
  siRNA target sequence for TAF1C (NM_005679.2,1486-1504).
ggtctgttgctttttcgtt

SEQ ID NO: 275531 - DNA, 19 bp, Homo sapiens
  siRNA target sequence for TAF1C (NM_005679.2,1868-1886).
ctctgctggagcctaagat

SEQ ID NO: 275532 - DNA, 19 bp, Homo sapiens
  siRNA target sequence for TAF1C (NM_139353.1,891-909).
ccgtccagggagaaactct

SEQ ID NO: 275533 - DNA, 19 bp, Homo sapiens
  siRNA target sequence for BLZF1 (NM_003666.2,461-479).
caaagtcaccgttacttca

SEQ ID NO: 275534 - DNA, 19 bp, Homo sapiens
  siRNA target sequence for BLZF1 (NM_003666.2,518-536).
ggaaccacctaaatctgtt

SEQ ID NO: 275535 - DNA, 19 bp, Homo sapiens
  siRNA target sequence for BLZF1 (NM_003666.2,525-543).
cctaaatctgttgaagtta

SEQ ID NO: 275536 - DNA, 19 bp, Homo sapiens
  siRNA target sequence for BLZF1 (NM_003666.2,547-565).
ccggagtccaatctagaaa

SEQ ID NO: 275537 - DNA, 19 bp, Homo sapiens
  siRNA target sequence for BLZF1 (NM_003666.2,659-677).
ggaagttaaagctgtaaga

SEQ ID NO: 275538 - DNA, 19 bp, Homo sapiens
  siRNA target sequence for BLZF1 (NM_003666.2,694-712).
ctgctataactcatgatat

SEQ ID NO: 275539 - DNA, 19 bp, Homo sapiens
  siRNA target sequence for BLZF1 (NM_003666.2,769-787).
gtcagtcagagggagttat

SEQ ID NO: 275540 - DNA, 19 bp, Homo sapiens
  siRNA target sequence for BLZF1 (NM_003666.2,773-791).
gtcagagggagttatagaa

SEQ ID NO: 275541 - DNA, 19 bp, Homo sapiens
  siRNA target sequence for BLZF1 (NM_003666.2,779-797).
gggagttatagaacctaat

SEQ ID NO: 275542 - DNA, 19 bp, Homo sapiens
  siRNA target sequence for BLZF1 (NM_003666.2,780-798).
ggagttatagaacctaata

SEQ ID NO: 275543 - DNA, 19 bp, Homo sapiens
  siRNA target sequence for BLZF1 (NM_003666.2,781-799).
gagttatagaacctaataa

SEQ ID NO: 275544 - DNA, 19 bp, Homo sapiens
  siRNA target sequence for BLZF1 (NM_003666.2,806-824).
ctcagaggtaaagaatgta

SEQ ID NO: 275545 - DNA, 19 bp, Homo sapiens
  siRNA target sequence for BLZF1 (NM_003666.2,839-857).
gaattctgaaagaaggtta

SEQ ID NO: 275546 - DNA, 19 bp, Homo sapiens
  siRNA target sequence for BLZF1 (NM_003666.2,903-921).
gaggtaaatcgtgagttaa

SEQ ID NO: 275547 - DNA, 19 bp, Homo sapiens
  siRNA target sequence for BLZF1 (NM_003666.2,905-923).
ggtaaatcgtgagttaaaa

SEQ ID NO: 275548 - DNA, 19 bp, Homo sapiens
  siRNA target sequence for BLZF1 (NM_003666.2,913-931).
gtgagttaaaaaagttact

SEQ ID NO: 275549 - DNA, 19 bp, Homo sapiens
  siRNA target sequence for BLZF1 (NM_003666.2,972-990).
cgtctagcccgtgagaaaa

SEQ ID NO: 275550 - DNA, 19 bp, Homo sapiens
  siRNA target sequence for BLZF1 (NM_003666.2,973-991).
gtctagcccgtgagaaaaa

SEQ ID NO: 275551 - DNA, 19 bp, Homo sapiens
  siRNA target sequence for BLZF1 (NM_003666.2,1049-1067).
gttagaacgtatgtcaata

SEQ ID NO: 275552 - DNA, 19 bp, Homo sapiens
  siRNA target sequence for BLZF1 (NM_003666.2,1053-1071).
gaacgtatgtcaatacagt

SEQ ID NO: 275553 - DNA, 19 bp, Homo sapiens
  siRNA target sequence for BLZF1 (NM_003666.2,1061-1079).
gtcaatacagtgtgatgta

SEQ ID NO: 275554 - DNA, 19 bp, Homo sapiens
  siRNA target sequence for BLZF1 (NM_003666.2,1072-1090).
gtgatgtatggcgaagtaa

SEQ ID NO: 275555 - DNA, 19 bp, Homo sapiens
  siRNA target sequence for BLZF1 (NM_003666.2,1074-1092).
gatgtatggcgaagtaaat

SEQ ID NO: 275556 - DNA, 19 bp, Homo sapiens
  siRNA target sequence for BLZF1 (NM_003666.2,1106-1124).
ggtaatggcagatgagtta

SEQ ID NO: 275557 - DNA, 19 bp, Homo sapiens
  siRNA target sequence for BLZF1 (NM_003666.2,1127-1145).
caactcaagagcagcttta

SEQ ID NO: 275558 - DNA, 19 bp, Homo sapiens
  siRNA target sequence for BLZF1 (NM_003666.2,1165-1183).
cacacggggctatacaaga

SEQ ID NO: 275559 - DNA, 19 bp, Homo sapiens
  siRNA target sequence for BLZF1 (NM_003666.2,1203-1221).
cagtttcgtcaagaaatga

SEQ ID NO: 275560 - DNA, 19 bp, Homo sapiens
  siRNA target sequence for BLZF1 (NM_003666.2,1205-1223).
gtttcgtcaagaaatgata

SEQ ID NO: 275561 - DNA, 19 bp, Homo sapiens
  siRNA target sequence for BLZF1 (NM_003666.2,1209-1227).
cgtcaagaaatgatagcta

SEQ ID NO: 275562 - DNA, 19 bp, Homo sapiens
  siRNA target sequence for BLZF1 (NM_003666.2,1248-1266).
ctcttagtttccttgcaat

SEQ ID NO: 275563 - DNA, 19 bp, Homo sapiens
  siRNA target sequence for BLZF1 (NM_003666.2,1267-1285).
ggggaagagagcaaactta

SEQ ID NO: 275564 - DNA, 19 bp, Homo sapiens
  siRNA target sequence for BLZF1 (NM_003666.2,1269-1287).
ggaagagagcaaacttact

SEQ ID NO: 275565 - DNA, 19 bp, Homo sapiens
  siRNA target sequence for BLZF1 (NM_003666.2,1320-1338).
ctagcattaacaaatcaca

SEQ ID NO: 275566 - DNA, 19 bp, Homo sapiens
  siRNA target sequence for BLZF1 (NM_003666.2,1345-1363).
caaaagcagtaaattctca

SEQ ID NO: 275567 - DNA, 19 bp, Homo sapiens
  siRNA target sequence for BLZF1 (NM_003666.2,1445-1463).
ggctgaaacggttctaaga

SEQ ID NO: 275568 - DNA, 19 bp, Homo sapiens
  siRNA target sequence for BLZF1 (NM_003666.2,1446-1464).
gctgaaacggttctaagaa

SEQ ID NO: 275569 - DNA, 19 bp, Homo sapiens
  siRNA target sequence for BLZF1 (NM_003666.2,1490-1508).
gagttcacctgataatcca

SEQ ID NO: 275570 - DNA, 19 bp, Homo sapiens
  siRNA target sequence for BLZF1 (NM_003666.2,1492-1510).
gttcacctgataatccatt

SEQ ID NO: 275571 - DNA, 19 bp, Homo sapiens
  siRNA target sequence for BLZF1 (NM_003666.2,1500-1518).
gataatccattttttgagt

SEQ ID NO: 275572 - DNA, 19 bp, Homo sapiens
  siRNA target sequence for BLZF1 (NM_003666.2,1528-1546).
ccaccttacttgctacaaa

SEQ ID NO: 275573 - DNA, 19 bp, Homo sapiens
  siRNA target sequence for BLZF1 (NM_003666.2,1531-1549).
ccttacttgctacaaagaa

SEQ ID NO: 275574 - DNA, 19 bp, Homo sapiens
  siRNA target sequence for BLZF1 (NM_003666.2,1560-1578).
cgatttcatccctatacta

SEQ ID NO: 275575 - DNA, 19 bp, Homo sapiens
  siRNA target sequence for BLZF1 (NM_003666.2,1579-1597).
gatatgaaaatataacttt

SEQ ID NO: 275576 - DNA, 19 bp, Homo sapiens
  siRNA target sequence for CEP1 (NM_007018.3,91-109).
ctctcctatcccatcatct

SEQ ID NO: 275577 - DNA, 19 bp, Homo sapiens
  siRNA target sequence for CEP1 (NM_007018.3,101-119).
ccatcatctatgtccaata

SEQ ID NO: 275578 - DNA, 19 bp, Homo sapiens
  siRNA target sequence for CEP1 (NM_007018.3,102-120).
catcatctatgtccaatat

SEQ ID NO: 275579 - DNA, 19 bp, Homo sapiens
  siRNA target sequence for CEP1 (NM_007018.3,121-139).
gagatctaggtcactttca

SEQ ID NO: 275580 - DNA, 19 bp, Homo sapiens
  siRNA target sequence for CEP1 (NM_007018.3,129-147).
ggtcactttcacctttgat

SEQ ID NO: 275581 - DNA, 19 bp, Homo sapiens
  siRNA target sequence for CEP1 (NM_007018.3,229-247).
ggactatcaagaccataaa

SEQ ID NO: 275582 - DNA, 19 bp, Homo sapiens
  siRNA target sequence for CEP1 (NM_007018.3,263-281).
gcaggagttagatatatta

SEQ ID NO: 275583 - DNA, 19 bp, Homo sapiens
  siRNA target sequence for CEP1 (NM_007018.3,282-300).
cagaggccctcattaaaaa

SEQ ID NO: 275584 - DNA, 19 bp, Homo sapiens
  siRNA target sequence for CEP1 (NM_007018.3,290-308).
ctcattaaaaaacttacta

SEQ ID NO: 275585 - DNA, 19 bp, Homo sapiens
  siRNA target sequence for CEP1 (NM_007018.3,359-377).
gacggtggcaagaaattta

SEQ ID NO: 275586 - DNA, 19 bp, Homo sapiens
  siRNA target sequence for CEP1 (NM_007018.3,402-420).
gtgttaaacttgaagtact

SEQ ID NO: 275587 - DNA, 19 bp, Homo sapiens
  siRNA target sequence for CEP1 (NM_007018.3,416-434).
gtactgaatctcagctata

SEQ ID NO: 275588 - DNA, 19 bp, Homo sapiens
  siRNA target sequence for CEP1 (NM_007018.3,460-478).
ggacaagctgttaaaatta

SEQ ID NO: 275589 - DNA, 19 bp, Homo sapiens
  siRNA target sequence for CEP1 (NM_007018.3,479-497).
cgtgaactcaacttatcat

SEQ ID NO: 275590 - DNA, 19 bp, Homo sapiens
  siRNA target sequence for CEP1 (NM_007018.3,480-498).
gtgaactcaacttatcata

SEQ ID NO: 275591 - DNA, 19 bp, Homo sapiens
  siRNA target sequence for CEP1 (NM_007018.3,482-500).
gaactcaacttatcatata

SEQ ID NO: 275592 - DNA, 19 bp, Homo sapiens
  siRNA target sequence for CEP1 (NM_007018.3,485-503).
ctcaacttatcatataaca

SEQ ID NO: 275593 - DNA, 19 bp, Homo sapiens
  siRNA target sequence for CEP1 (NM_007018.3,537-555).
gtaatctgcaaaagcttaa

SEQ ID NO: 275594 - DNA, 19 bp, Homo sapiens
  siRNA target sequence for CEP1 (NM_007018.3,616-634).
gcgagtcctcaatttgaaa

SEQ ID NO: 275595 - DNA, 19 bp, Homo sapiens
  siRNA target sequence for CEP1 (NM_007018.3,651-669).
cgctccaagatataagcaa

SEQ ID NO: 275596 - DNA, 19 bp, Homo sapiens
  siRNA target sequence for CEP1 (NM_007018.3,656-674).
caagatataagcaagttga

SEQ ID NO: 275597 - DNA, 19 bp, Homo sapiens
  siRNA target sequence for CEP1 (NM_007018.3,670-688).
gttgaaaccgcttcaagat

SEQ ID NO: 275598 - DNA, 19 bp, Homo sapiens
  siRNA target sequence for CEP1 (NM_007018.3,700-718).
gatcctagttgaaaatcca

SEQ ID NO: 275599 - DNA, 19 bp, Homo sapiens
  siRNA target sequence for CEP1 (NM_007018.3,734-752).
cattacctccagtttacca

SEQ ID NO: 275600 - DNA, 19 bp, Homo sapiens
  siRNA target sequence for CEP1 (NM_007018.3,757-775).
ccacctccgttcattggaa

SEQ ID NO: 275601 - DNA, 19 bp, Homo sapiens
  siRNA target sequence for CEP1 (NM_007018.3,758-776).
cacctccgttcattggaaa

SEQ ID NO: 275602 - DNA, 19 bp, Homo sapiens
  siRNA target sequence for CEP1 (NM_007018.3,815-833).
gaggcttttgagagattca

SEQ ID NO: 275603 - DNA, 19 bp, Homo sapiens
  siRNA target sequence for CEP1 (NM_007018.3,893-911).
gagcttaagagcaaacaaa

SEQ ID NO: 275604 - DNA, 19 bp, Homo sapiens
  siRNA target sequence for CEP1 (NM_007018.3,967-985).
ggaggccatgttacagaaa

SEQ ID NO: 275605 - DNA, 19 bp, Homo sapiens
  siRNA target sequence for CEP1 (NM_007018.3,1018-1036).
cacaaaaaatgaattgcta

SEQ ID NO: 275606 - DNA, 19 bp, Homo sapiens
  siRNA target sequence for CEP1 (NM_007018.3,1091-1109).
caggaattggccttttata

SEQ ID NO: 275607 - DNA, 19 bp, Homo sapiens
  siRNA target sequence for CEP1 (NM_007018.3,1129-1147).
gccactaaattattatcca

SEQ ID NO: 275608 - DNA, 19 bp, Homo sapiens
  siRNA target sequence for CEP1 (NM_007018.3,1146-1164).
catcagagtatgctgaaat

SEQ ID NO: 275609 - DNA, 19 bp, Homo sapiens
  siRNA target sequence for CEP1 (NM_007018.3,1149-1167).
cagagtatgctgaaattga

SEQ ID NO: 275610 - DNA, 19 bp, Homo sapiens
  siRNA target sequence for CEP1 (NM_007018.3,1276-1294).
gatggagccagatgaacaa

SEQ ID NO: 275611 - DNA, 19 bp, Homo sapiens
  siRNA target sequence for CEP1 (NM_007018.3,1280-1298).
gagccagatgaacaactta

SEQ ID NO: 275612 - DNA, 19 bp, Homo sapiens
  siRNA target sequence for CEP1 (NM_007018.3,1282-1300).
gccagatgaacaacttaga

SEQ ID NO: 275613 - DNA, 19 bp, Homo sapiens
  siRNA target sequence for CEP1 (NM_007018.3,1283-1301).
ccagatgaacaacttagaa

SEQ ID NO: 275614 - DNA, 19 bp, Homo sapiens
  siRNA target sequence for CEP1 (NM_007018.3,1469-1487).
gctatacaactaaaaaaga

SEQ ID NO: 275615 - DNA, 19 bp, Homo sapiens
  siRNA target sequence for CEP1 (NM_007018.3,1496-1514).
gcagggaaagaccttcttt

SEQ ID NO: 275616 - DNA, 19 bp, Homo sapiens
  siRNA target sequence for CEP1 (NM_007018.3,1519-1537).
gcagttgagtggtagacta

SEQ ID NO: 275617 - DNA, 19 bp, Homo sapiens
  siRNA target sequence for CEP1 (NM_007018.3,1525-1543).
gagtggtagactacaactt

SEQ ID NO: 275618 - DNA, 19 bp, Homo sapiens
  siRNA target sequence for CEP1 (NM_007018.3,1527-1545).
gtggtagactacaacttgt

SEQ ID NO: 275619 - DNA, 19 bp, Homo sapiens
  siRNA target sequence for CEP1 (NM_007018.3,1529-1547).
ggtagactacaacttgtaa

SEQ ID NO: 275620 - DNA, 19 bp, Homo sapiens
  siRNA target sequence for CEP1 (NM_007018.3,1530-1548).
gtagactacaacttgtaaa

SEQ ID NO: 275621 - DNA, 19 bp, Homo sapiens
  siRNA target sequence for CEP1 (NM_007018.3,1636-1654).
cctgcaaatagccatagat

SEQ ID NO: 275622 - DNA, 19 bp, Homo sapiens
  siRNA target sequence for CEP1 (NM_007018.3,1637-1655).
ctgcaaatagccatagata

SEQ ID NO: 275623 - DNA, 19 bp, Homo sapiens
  siRNA target sequence for CEP1 (NM_007018.3,1674-1692).
caaaacattcccatatgaa

SEQ ID NO: 275624 - DNA, 19 bp, Homo sapiens
  siRNA target sequence for CEP1 (NM_007018.3,1712-1730).
gaacaacagcttgacatta

SEQ ID NO: 275625 - DNA, 19 bp, Homo sapiens
  siRNA target sequence for CEP1 (NM_007018.3,1715-1733).
caacagcttgacattatga

SEQ ID NO: 275626 - DNA, 19 bp, Homo sapiens
  siRNA target sequence for CEP1 (NM_007018.3,1718-1736).
cagcttgacattatgaaca

SEQ ID NO: 275627 - DNA, 19 bp, Homo sapiens
  siRNA target sequence for CEP1 (NM_007018.3,1735-1753).
caagcagtaccaacaactt

SEQ ID NO: 275628 - DNA, 19 bp, Homo sapiens
  siRNA target sequence for CEP1 (NM_007018.3,1738-1756).
gcagtaccaacaacttgaa

SEQ ID NO: 275629 - DNA, 19 bp, Homo sapiens
  siRNA target sequence for CEP1 (NM_007018.3,1760-1778).
cgtttggatgagatacttt

SEQ ID NO: 275630 - DNA, 19 bp, Homo sapiens
  siRNA target sequence for CEP1 (NM_007018.3,1765-1783).
ggatgagatactttctaga

SEQ ID NO: 275631 - DNA, 19 bp, Homo sapiens
  siRNA target sequence for CEP1 (NM_007018.3,1771-1789).
gatactttctagaattgct

SEQ ID NO: 275632 - DNA, 19 bp, Homo sapiens
  siRNA target sequence for CEP1 (NM_007018.3,1868-1886).
gatttagaaggtgttatca

SEQ ID NO: 275633 - DNA, 19 bp, Homo sapiens
  siRNA target sequence for CEP1 (NM_007018.3,1887-1905).
gtgggttgcaagaatacct

SEQ ID NO: 275634 - DNA, 19 bp, Homo sapiens
  siRNA target sequence for CEP1 (NM_007018.3,2010-2028).
gagaccagctggaaatagt

SEQ ID NO: 275635 - DNA, 19 bp, Homo sapiens
  siRNA target sequence for CEP1 (NM_007018.3,2059-2077).
gcttgcagagctagaaagt

SEQ ID NO: 275636 - DNA, 19 bp, Homo sapiens
  siRNA target sequence for CEP1 (NM_007018.3,2156-2174).
gaggctcggctaaacctaa

SEQ ID NO: 275637 - DNA, 19 bp, Homo sapiens
  siRNA target sequence for CEP1 (NM_007018.3,2220-2238).
caagacttacccagttaga

SEQ ID NO: 275638 - DNA, 19 bp, Homo sapiens
  siRNA target sequence for CEP1 (NM_007018.3,2223-2241).
gacttacccagttagaaca

SEQ ID NO: 275639 - DNA, 19 bp, Homo sapiens
  siRNA target sequence for CEP1 (NM_007018.3,2335-2353).
cagtgagctccatgcaaaa

SEQ ID NO: 275640 - DNA, 19 bp, Homo sapiens
  siRNA target sequence for CEP1 (NM_007018.3,2337-2355).
gtgagctccatgcaaaact

SEQ ID NO: 275641 - DNA, 19 bp, Homo sapiens
  siRNA target sequence for CEP1 (NM_007018.3,2368-2386).
ggatgacaataatctgtta

SEQ ID NO: 275642 - DNA, 19 bp, Homo sapiens
  siRNA target sequence for CEP1 (NM_007018.3,2465-2483).
cgtgtggatgagctaagaa

SEQ ID NO: 275643 - DNA, 19 bp, Homo sapiens
  siRNA target sequence for CEP1 (NM_007018.3,2504-2522).
ggggaaatgaacatccata

SEQ ID NO: 275644 - DNA, 19 bp, Homo sapiens
  siRNA target sequence for CEP1 (NM_007018.3,2877-2895).
cccaactccgagagttaga

SEQ ID NO: 275645 - DNA, 19 bp, Homo sapiens
  siRNA target sequence for CEP1 (NM_007018.3,2882-2900).
ctccgagagttagagaaaa

SEQ ID NO: 275646 - DNA, 19 bp, Homo sapiens
  siRNA target sequence for CEP1 (NM_007018.3,2932-2950).
gcaagtttttggtttagat

SEQ ID NO: 275647 - DNA, 19 bp, Homo sapiens
  siRNA target sequence for CEP1 (NM_007018.3,2976-2994).
ccgtggccacctctgataa

SEQ ID NO: 275648 - DNA, 19 bp, Homo sapiens
  siRNA target sequence for CEP1 (NM_007018.3,3037-3055).
gtcccttcatggaactgtt

SEQ ID NO: 275649 - DNA, 19 bp, Homo sapiens
  siRNA target sequence for CEP1 (NM_007018.3,3039-3057).
cccttcatggaactgttat

SEQ ID NO: 275650 - DNA, 19 bp, Homo sapiens
  siRNA target sequence for CEP1 (NM_007018.3,3246-3264).
cacaggtcctagaaattga

SEQ ID NO: 275651 - DNA, 19 bp, Homo sapiens
  siRNA target sequence for CEP1 (NM_007018.3,3386-3404).
cttcgacgtgaagtttctt

SEQ ID NO: 275652 - DNA, 19 bp, Homo sapiens
  siRNA target sequence for CEP1 (NM_007018.3,3390-3408).
gacgtgaagtttcttatca

SEQ ID NO: 275653 - DNA, 19 bp, Homo sapiens
  siRNA target sequence for CEP1 (NM_007018.3,3402-3420).
cttatcagaatgattacat

SEQ ID NO: 275654 - DNA, 19 bp, Homo sapiens
  siRNA target sequence for CEP1 (NM_007018.3,3426-3444).
gcatggcagatcctttcaa

SEQ ID NO: 275655 - DNA, 19 bp, Homo sapiens
  siRNA target sequence for CEP1 (NM_007018.3,3449-3467).
cgaggctattggtacttta

SEQ ID NO: 275656 - DNA, 19 bp, Homo sapiens
  siRNA target sequence for CEP1 (NM_007018.3,3450-3468).
gaggctattggtactttat

SEQ ID NO: 275657 - DNA, 19 bp, Homo sapiens
  siRNA target sequence for CEP1 (NM_007018.3,3525-3543).
ctggtgttggccttaagta

SEQ ID NO: 275658 - DNA, 19 bp, Homo sapiens
  siRNA target sequence for CEP1 (NM_007018.3,3527-3545).
ggtgttggccttaagtact

SEQ ID NO: 275659 - DNA, 19 bp, Homo sapiens
  siRNA target sequence for CEP1 (NM_007018.3,3548-3566).
gcctcaactcctgttagaa

SEQ ID NO: 275660 - DNA, 19 bp, Homo sapiens
  siRNA target sequence for CEP1 (NM_007018.3,3549-3567).
cctcaactcctgttagaaa

SEQ ID NO: 275661 - DNA, 19 bp, Homo sapiens
  siRNA target sequence for CEP1 (NM_007018.3,3619-3637).
ctcaggatactgggtttat

SEQ ID NO: 275662 - DNA, 19 bp, Homo sapiens
  siRNA target sequence for CEP1 (NM_007018.3,3648-3666).
ggagtgggttacataaact

SEQ ID NO: 275663 - DNA, 19 bp, Homo sapiens
  siRNA target sequence for CEP1 (NM_007018.3,3651-3669).
gtgggttacataaactgtt

SEQ ID NO: 275664 - DNA, 19 bp, Homo sapiens
  siRNA target sequence for CEP1 (NM_007018.3,3749-3767).
cctcctcctggatacatga

SEQ ID NO: 275665 - DNA, 19 bp, Homo sapiens
  siRNA target sequence for CEP1 (NM_007018.3,3750-3768).
ctcctcctggatacatgat

SEQ ID NO: 275666 - DNA, 19 bp, Homo sapiens
  siRNA target sequence for CEP1 (NM_007018.3,3752-3770).
cctcctggatacatgatgt

SEQ ID NO: 275667 - DNA, 19 bp, Homo sapiens
  siRNA target sequence for CEP1 (NM_007018.3,3759-3777).
gatacatgatgtatactgt

SEQ ID NO: 275668 - DNA, 19 bp, Homo sapiens
  siRNA target sequence for CEP1 (NM_007018.3,3830-3848).
cctcccttgccaaacaata

SEQ ID NO: 275669 - DNA, 19 bp, Homo sapiens
  siRNA target sequence for CEP1 (NM_007018.3,3859-3877).
cacccctggcactgttgtt

SEQ ID NO: 275670 - DNA, 19 bp, Homo sapiens
  siRNA target sequence for CEP1 (NM_007018.3,3974-3992).
gtccctgaacaccataact

SEQ ID NO: 275671 - DNA, 19 bp, Homo sapiens
  siRNA target sequence for CEP1 (NM_007018.3,3976-3994).
ccctgaacaccataactta

SEQ ID NO: 275672 - DNA, 19 bp, Homo sapiens
  siRNA target sequence for CEP1 (NM_007018.3,3980-3998).
gaacaccataacttagaga

SEQ ID NO: 275673 - DNA, 19 bp, Homo sapiens
  siRNA target sequence for CEP1 (NM_007018.3,4079-4097).
cggcagtcggagaaagaaa

SEQ ID NO: 275674 - DNA, 19 bp, Homo sapiens
  siRNA target sequence for CEP1 (NM_007018.3,4099-4117).
ggaagaactgcatcataat

SEQ ID NO: 275675 - DNA, 19 bp, Homo sapiens
  siRNA target sequence for CEP1 (NM_007018.3,4100-4118).
gaagaactgcatcataata

SEQ ID NO: 275676 - DNA, 19 bp, Homo sapiens
  siRNA target sequence for CEP1 (NM_007018.3,4108-4126).
gcatcataatattgatgat

SEQ ID NO: 275677 - DNA, 19 bp, Homo sapiens
  siRNA target sequence for CEP1 (NM_007018.3,4146-4164).
gcttagagtgtgaagtaga

SEQ ID NO: 275678 - DNA, 19 bp, Homo sapiens
  siRNA target sequence for CEP1 (NM_007018.3,4204-4222).
ggacttcattgatggaaat

SEQ ID NO: 275679 - DNA, 19 bp, Homo sapiens
  siRNA target sequence for CEP1 (NM_007018.3,4228-4246).
gagtcttatgactgaacta

SEQ ID NO: 275680 - DNA, 19 bp, Homo sapiens
  siRNA target sequence for CEP1 (NM_007018.3,4230-4248).
gtcttatgactgaactaga

SEQ ID NO: 275681 - DNA, 19 bp, Homo sapiens
  siRNA target sequence for CEP1 (NM_007018.3,4232-4250).
cttatgactgaactagaaa

SEQ ID NO: 275682 - DNA, 19 bp, Homo sapiens
  siRNA target sequence for CEP1 (NM_007018.3,4434-4452).
gaagtttattgcaaactga

SEQ ID NO: 275683 - DNA, 19 bp, Homo sapiens
  siRNA target sequence for CEP1 (NM_007018.3,4453-4471).
gtcagatgctgaggaatta

SEQ ID NO: 275684 - DNA, 19 bp, Homo sapiens
  siRNA target sequence for CEP1 (NM_007018.3,4511-4529).
gctgatcagcagctaagat

SEQ ID NO: 275685 - DNA, 19 bp, Homo sapiens
  siRNA target sequence for CEP1 (NM_007018.3,4530-4548).
cgctccaggctgatgcaaa

SEQ ID NO: 275686 - DNA, 19 bp, Homo sapiens
  siRNA target sequence for CEP1 (NM_007018.3,4619-4637).
gactcagacttccaatgtt

SEQ ID NO: 275687 - DNA, 19 bp, Homo sapiens
  siRNA target sequence for CEP1 (NM_007018.3,4625-4643).
gacttccaatgtttaagca

SEQ ID NO: 275688 - DNA, 19 bp, Homo sapiens
  siRNA target sequence for CEP1 (NM_007018.3,4833-4851).
ggcagttagggcataaaaa

SEQ ID NO: 275689 - DNA, 19 bp, Homo sapiens
  siRNA target sequence for CEP1 (NM_007018.3,4919-4937).
ctgggagagactgaagtaa

SEQ ID NO: 275690 - DNA, 19 bp, Homo sapiens
  siRNA target sequence for CEP1 (NM_007018.3,4952-4970).
cacattagggaagtaaaat

SEQ ID NO: 275691 - DNA, 19 bp, Homo sapiens
  siRNA target sequence for CEP1 (NM_007018.3,4954-4972).
cattagggaagtaaaatct

SEQ ID NO: 275692 - DNA, 19 bp, Homo sapiens
  siRNA target sequence for CEP1 (NM_007018.3,4996-5014).
gaaaggagaactaaatgtt

SEQ ID NO: 275693 - DNA, 19 bp, Homo sapiens
  siRNA target sequence for CEP1 (NM_007018.3,5034-5052).
ctcaacttacacttataaa

SEQ ID NO: 275694 - DNA, 19 bp, Homo sapiens
  siRNA target sequence for CEP1 (NM_007018.3,5097-5115).
ggcagatgtctaaacataa

SEQ ID NO: 275695 - DNA, 19 bp, Homo sapiens
  siRNA target sequence for CEP1 (NM_007018.3,5099-5117).
cagatgtctaaacataaaa

SEQ ID NO: 275696 - DNA, 19 bp, Homo sapiens
  siRNA target sequence for CEP1 (NM_007018.3,5118-5136).
ccgaactaaagaatattct

SEQ ID NO: 275697 - DNA, 19 bp, Homo sapiens
  siRNA target sequence for CEP1 (NM_007018.3,5137-5155).
ggacatgttgcaacttgaa

SEQ ID NO: 275698 - DNA, 19 bp, Homo sapiens
  siRNA target sequence for CEP1 (NM_007018.3,5143-5161).
gttgcaacttgaaaaccat

SEQ ID NO: 275699 - DNA, 19 bp, Homo sapiens
  siRNA target sequence for CEP1 (NM_007018.3,5308-5326).
gctccttgagagggataaa

SEQ ID NO: 275700 - DNA, 19 bp, Homo sapiens
  siRNA target sequence for CEP1 (NM_007018.3,5311-5329).
ccttgagagggataaacga

SEQ ID NO: 275701 - DNA, 19 bp, Homo sapiens
  siRNA target sequence for CEP1 (NM_007018.3,5317-5335).
gagggataaacgagaaata

SEQ ID NO: 275702 - DNA, 19 bp, Homo sapiens
  siRNA target sequence for CEP1 (NM_007018.3,5319-5337).
gggataaacgagaaataga

SEQ ID NO: 275703 - DNA, 19 bp, Homo sapiens
  siRNA target sequence for CEP1 (NM_007018.3,5349-5367).
ctgagtcccgagctttaca

SEQ ID NO: 275704 - DNA, 19 bp, Homo sapiens
  siRNA target sequence for CEP1 (NM_007018.3,5378-5396).
gagtgtttgagcaaagaaa

SEQ ID NO: 275705 - DNA, 19 bp, Homo sapiens
  siRNA target sequence for CEP1 (NM_007018.3,5488-5506).
ggagcaatcaaacttagaa

SEQ ID NO: 275706 - DNA, 19 bp, Homo sapiens
  siRNA target sequence for CEP1 (NM_007018.3,5540-5558).
gaactagaccaactaaaca

SEQ ID NO: 275707 - DNA, 19 bp, Homo sapiens
  siRNA target sequence for CEP1 (NM_007018.3,5652-5670).
ctaatgtccaagaccattt

SEQ ID NO: 275708 - DNA, 19 bp, Homo sapiens
  siRNA target sequence for CEP1 (NM_007018.3,5757-5775).
gtgaatgggcaaataggtt

SEQ ID NO: 275709 - DNA, 19 bp, Homo sapiens
  siRNA target sequence for CEP1 (NM_007018.3,5763-5781).
gggcaaataggtttgaaga

SEQ ID NO: 275710 - DNA, 19 bp, Homo sapiens
  siRNA target sequence for CEP1 (NM_007018.3,5773-5791).
gtttgaagactgtcagaaa

SEQ ID NO: 275711 - DNA, 19 bp, Homo sapiens
  siRNA target sequence for CEP1 (NM_007018.3,5854-5872).
caaactagtccaacaagaa

SEQ ID NO: 275712 - DNA, 19 bp, Homo sapiens
  siRNA target sequence for CEP1 (NM_007018.3,5858-5876).
ctagtccaacaagaaatga

SEQ ID NO: 275713 - DNA, 19 bp, Homo sapiens
  siRNA target sequence for CEP1 (NM_007018.3,6099-6117).
ctaaacggcagctttcaga

SEQ ID NO: 275714 - DNA, 19 bp, Homo sapiens
  siRNA target sequence for CEP1 (NM_007018.3,6319-6337).
ggagaacagctgcatacaa

SEQ ID NO: 275715 - DNA, 19 bp, Homo sapiens
  siRNA target sequence for CEP1 (NM_007018.3,6320-6338).
gagaacagctgcatacaaa

SEQ ID NO: 275716 - DNA, 19 bp, Homo sapiens
  siRNA target sequence for CEP1 (NM_007018.3,6448-6466).
gatggcaaaccaaaaagat

SEQ ID NO: 275717 - DNA, 19 bp, Homo sapiens
  siRNA target sequence for CEP1 (NM_007018.3,6453-6471).
caaaccaaaaagatttgga

SEQ ID NO: 275718 - DNA, 19 bp, Homo sapiens
  siRNA target sequence for CEP1 (NM_007018.3,6494-6512).
gatgcaatgaggacactta

SEQ ID NO: 275719 - DNA, 19 bp, Homo sapiens
  siRNA target sequence for CEP1 (NM_007018.3,6547-6565).
gaagaatcttaatcagttt

SEQ ID NO: 275720 - DNA, 19 bp, Homo sapiens
  siRNA target sequence for CEP1 (NM_007018.3,6579-6597).
cagcagatctagaagctat

SEQ ID NO: 275721 - DNA, 19 bp, Homo sapiens
  siRNA target sequence for CEP1 (NM_007018.3,6581-6599).
gcagatctagaagctattt

SEQ ID NO: 275722 - DNA, 19 bp, Homo sapiens
  siRNA target sequence for CEP1 (NM_007018.3,6616-6634).
cctagaaggagaattggaa

SEQ ID NO: 275723 - DNA, 19 bp, Homo sapiens
  siRNA target sequence for CEP1 (NM_007018.3,6661-6679).
catgaatgagggacctttt

SEQ ID NO: 275724 - DNA, 19 bp, Homo sapiens
  siRNA target sequence for CEP1 (NM_007018.3,6664-6682).
gaatgagggaccttttgaa

SEQ ID NO: 275725 - DNA, 19 bp, Homo sapiens
  siRNA target sequence for CEP1 (NM_007018.3,6699-6717).
cccaagttcacataatgga

SEQ ID NO: 275726 - DNA, 19 bp, Homo sapiens
  siRNA target sequence for CEP1 (NM_007018.3,6780-6798).
cccaactccgacactgtat

SEQ ID NO: 275727 - DNA, 19 bp, Homo sapiens
  siRNA target sequence for CEP1 (NM_007018.3,6782-6800).
caactccgacactgtatgt

SEQ ID NO: 275728 - DNA, 19 bp, Homo sapiens
  siRNA target sequence for CEP1 (NM_007018.3,6802-6820).
caagcaagcagaagtatta

SEQ ID NO: 275729 - DNA, 19 bp, Homo sapiens
  siRNA target sequence for CEP1 (NM_007018.3,6835-6853).
gcagacagagggcacttta

SEQ ID NO: 275730 - DNA, 19 bp, Homo sapiens
  siRNA target sequence for CEP1 (NM_007018.3,6955-6973).
cacagaggactctcaactt

SEQ ID NO: 275731 - DNA, 19 bp, Homo sapiens
  siRNA target sequence for EAP30 (NM_007241.2,85-103).
cgccatcgccaagaagaaa

SEQ ID NO: 275732 - DNA, 19 bp, Homo sapiens
  siRNA target sequence for EAP30 (NM_007241.2,87-105).
ccatcgccaagaagaaact

SEQ ID NO: 275733 - DNA, 19 bp, Homo sapiens
  siRNA target sequence for EAP30 (NM_007241.2,152-170).
cagctagcccagatgtcaa

SEQ ID NO: 275734 - DNA, 19 bp, Homo sapiens
  siRNA target sequence for EAP30 (NM_007241.2,168-186).
caaagcagttggacatgtt

SEQ ID NO: 275735 - DNA, 19 bp, Homo sapiens
  siRNA target sequence for EAP30 (NM_007241.2,298-316).
ggcctctggaaaaggattt

SEQ ID NO: 275736 - DNA, 19 bp, Homo sapiens
  siRNA target sequence for EAP30 (NM_007241.2,332-350).
ggcgtgggggacttctatt

SEQ ID NO: 275737 - DNA, 19 bp, Homo sapiens
  siRNA target sequence for EAP30 (NM_007241.2,337-355).
gggggacttctattacgaa

SEQ ID NO: 275738 - DNA, 19 bp, Homo sapiens
  siRNA target sequence for EAP30 (NM_007241.2,398-416).
cggaatggaggtctgataa

SEQ ID NO: 275739 - DNA, 19 bp, Homo sapiens
  siRNA target sequence for EAP30 (NM_007241.2,466-484).
ccaggatgtcagtcaagat

SEQ ID NO: 275740 - DNA, 19 bp, Homo sapiens
  siRNA target sequence for EAP30 (NM_007241.2,490-508).
gatcagagccatcaagaaa

SEQ ID NO: 275741 - DNA, 19 bp, Homo sapiens
  siRNA target sequence for EAP30 (NM_007241.2,493-511).
cagagccatcaagaaacta

SEQ ID NO: 275742 - DNA, 19 bp, Homo sapiens
  siRNA target sequence for EAP30 (NM_007241.2,572-590).
gttccagctgagctcaata

SEQ ID NO: 275743 - DNA, 19 bp, Homo sapiens
  siRNA target sequence for EAP30 (NM_007241.2,637-655).
gactgtcagtgagatcaaa

SEQ ID NO: 275744 - DNA, 19 bp, Homo sapiens
  siRNA target sequence for EAP30 (NM_007241.2,647-665).
gagatcaaagccagtctta

SEQ ID NO: 275745 - DNA, 19 bp, Homo sapiens
  siRNA target sequence for EAP30 (NM_007241.2,649-667).
gatcaaagccagtcttaaa

SEQ ID NO: 275746 - DNA, 19 bp, Homo sapiens
  siRNA target sequence for EAP30 (NM_007241.2,785-803).
ctctactcccaggagatta

SEQ ID NO: 275747 - DNA, 19 bp, Homo sapiens
  siRNA target sequence for ELL2 (NM_012081.3,490-508).
gagccacaagaatttaatt

SEQ ID NO: 275748 - DNA, 19 bp, Homo sapiens
  siRNA target sequence for ELL2 (NM_012081.3,537-555).
gactccacgggcttgtcaa

SEQ ID NO: 275749 - DNA, 19 bp, Homo sapiens
  siRNA target sequence for ELL2 (NM_012081.3,539-557).
ctccacgggcttgtcaaaa

SEQ ID NO: 275750 - DNA, 19 bp, Homo sapiens
  siRNA target sequence for ELL2 (NM_012081.3,541-559).
ccacgggcttgtcaaaatt

SEQ ID NO: 275751 - DNA, 19 bp, Homo sapiens
  siRNA target sequence for ELL2 (NM_012081.3,572-590).
cccctcaatgaagttcata

SEQ ID NO: 275752 - DNA, 19 bp, Homo sapiens
  siRNA target sequence for ELL2 (NM_012081.3,581-599).
gaagttcataactttaact

SEQ ID NO: 275753 - DNA, 19 bp, Homo sapiens
  siRNA target sequence for ELL2 (NM_012081.3,644-662).
gactgcatccagcaaacat

SEQ ID NO: 275754 - DNA, 19 bp, Homo sapiens
  siRNA target sequence for ELL2 (NM_012081.3,732-750).
caaacgactcgtatcagat

SEQ ID NO: 275755 - DNA, 19 bp, Homo sapiens
  siRNA target sequence for ELL2 (NM_012081.3,787-805).
ccgcaaccgaagcacaaaa

SEQ ID NO: 275756 - DNA, 19 bp, Homo sapiens
  siRNA target sequence for ELL2 (NM_012081.3,790-808).
caaccgaagcacaaaagtt

SEQ ID NO: 275757 - DNA, 19 bp, Homo sapiens
  siRNA target sequence for ELL2 (NM_012081.3,794-812).
cgaagcacaaaagttatca

SEQ ID NO: 275758 - DNA, 19 bp, Homo sapiens
  siRNA target sequence for ELL2 (NM_012081.3,811-829).
caaacccggtggaccatat

SEQ ID NO: 275759 - DNA, 19 bp, Homo sapiens
  siRNA target sequence for ELL2 (NM_012081.3,904-922).
ccccatgaaccctgcaaat

SEQ ID NO: 275760 - DNA, 19 bp, Homo sapiens
  siRNA target sequence for ELL2 (NM_012081.3,907-925).
catgaaccctgcaaataca

SEQ ID NO: 275761 - DNA, 19 bp, Homo sapiens
  siRNA target sequence for ELL2 (NM_012081.3,914-932).
cctgcaaatacaattcgaa

SEQ ID NO: 275762 - DNA, 19 bp, Homo sapiens
  siRNA target sequence for ELL2 (NM_012081.3,915-933).
ctgcaaatacaattcgaaa

SEQ ID NO: 275763 - DNA, 19 bp, Homo sapiens
  siRNA target sequence for ELL2 (NM_012081.3,1046-1064).
ggtgtcaatcaaaaagaca

SEQ ID NO: 275764 - DNA, 19 bp, Homo sapiens
  siRNA target sequence for ELL2 (NM_012081.3,1091-1109).
caggtagccaatctgaatt

SEQ ID NO: 275765 - DNA, 19 bp, Homo sapiens
  siRNA target sequence for ELL2 (NM_012081.3,1093-1111).
ggtagccaatctgaattct

SEQ ID NO: 275766 - DNA, 19 bp, Homo sapiens
  siRNA target sequence for ELL2 (NM_012081.3,1094-1112).
gtagccaatctgaattcta

SEQ ID NO: 275767 - DNA, 19 bp, Homo sapiens
  siRNA target sequence for ELL2 (NM_012081.3,1114-1132).
ggacctctcatatacctta

SEQ ID NO: 275768 - DNA, 19 bp, Homo sapiens
  siRNA target sequence for ELL2 (NM_012081.3,1115-1133).
gacctctcatataccttaa

SEQ ID NO: 275769 - DNA, 19 bp, Homo sapiens
  siRNA target sequence for ELL2 (NM_012081.3,1210-1228).
gctctctagaaaactaaat

SEQ ID NO: 275770 - DNA, 19 bp, Homo sapiens
  siRNA target sequence for ELL2 (NM_012081.3,1249-1267).
caccagccgttcagaatct

SEQ ID NO: 275771 - DNA, 19 bp, Homo sapiens
  siRNA target sequence for ELL2 (NM_012081.3,1304-1322).
cagaaacggcttttggatt

SEQ ID NO: 275772 - DNA, 19 bp, Homo sapiens
  siRNA target sequence for ELL2 (NM_012081.3,1313-1331).
cttttggattcagagttta

SEQ ID NO: 275773 - DNA, 19 bp, Homo sapiens
  siRNA target sequence for ELL2 (NM_012081.3,1378-1396).
cagagtaccaccaacacta

SEQ ID NO: 275774 - DNA, 19 bp, Homo sapiens
  siRNA target sequence for ELL2 (NM_012081.3,1392-1410).
cactaaatggtcatttgaa

SEQ ID NO: 275775 - DNA, 19 bp, Homo sapiens
  siRNA target sequence for ELL2 (NM_012081.3,1511-1529).
catcctcctcagattgtaa

SEQ ID NO: 275776 - DNA, 19 bp, Homo sapiens
  siRNA target sequence for ELL2 (NM_012081.3,1514-1532).
cctcctcagattgtaaatt

SEQ ID NO: 275777 - DNA, 19 bp, Homo sapiens
  siRNA target sequence for ELL2 (NM_012081.3,1517-1535).
cctcagattgtaaattcta

SEQ ID NO: 275778 - DNA, 19 bp, Homo sapiens
  siRNA target sequence for ELL2 (NM_012081.3,1621-1639).
ggaccagcaagacaaatat

SEQ ID NO: 275779 - DNA, 19 bp, Homo sapiens
  siRNA target sequence for ELL2 (NM_012081.3,1622-1640).
gaccagcaagacaaatata

SEQ ID NO: 275780 - DNA, 19 bp, Homo sapiens
  siRNA target sequence for ELL2 (NM_012081.3,1625-1643).
cagcaagacaaatatacct

SEQ ID NO: 275781 - DNA, 19 bp, Homo sapiens
  siRNA target sequence for LITAF (NM_004862.1,401-419).
gaatcctccttcgtattat

SEQ ID NO: 275782 - DNA, 19 bp, Homo sapiens
  siRNA target sequence for LITAF (NM_004862.1,427-445).
cagcgcccatccccaataa

SEQ ID NO: 275783 - DNA, 19 bp, Homo sapiens
  siRNA target sequence for LITAF (NM_004862.1,430-448).
cgcccatccccaataacaa

SEQ ID NO: 275784 - DNA, 19 bp, Homo sapiens
  siRNA target sequence for LITAF (NM_004862.1,431-449).
gcccatccccaataacaat

SEQ ID NO: 275785 - DNA, 19 bp, Homo sapiens
  siRNA target sequence for LITAF (NM_004862.1,437-455).
ccccaataacaatccaatt

SEQ ID NO: 275786 - DNA, 19 bp, Homo sapiens
  siRNA target sequence for LITAF (NM_004862.1,438-456).
cccaataacaatccaatta

SEQ ID NO: 275787 - DNA, 19 bp, Homo sapiens
  siRNA target sequence for LITAF (NM_004862.1,498-516).
gaccgccctatccaaatgt

SEQ ID NO: 275788 - DNA, 19 bp, Homo sapiens
  siRNA target sequence for LITAF (NM_004862.1,658-676).
caggacgtggaccattact

SEQ ID NO: 275789 - DNA, 19 bp, Homo sapiens
  siRNA target sequence for LITAF (NM_004862.1,660-678).
ggacgtggaccattactgt

SEQ ID NO: 275790 - DNA, 19 bp, Homo sapiens
  siRNA target sequence for LITAF (NM_004862.1,856-874).
gggaatacgtcgcaaaact

SEQ ID NO: 275791 - DNA, 19 bp, Homo sapiens
  siRNA target sequence for LITAF (NM_004862.1,857-875).
ggaatacgtcgcaaaacta

SEQ ID NO: 275792 - DNA, 19 bp, Homo sapiens
  siRNA target sequence for LITAF (NM_004862.1,858-876).
gaatacgtcgcaaaactaa

SEQ ID NO: 275793 - DNA, 19 bp, Homo sapiens
  siRNA target sequence for SUPT3H (NM_003599.1,83-101).
ggcagctagtccaatgtct

SEQ ID NO: 275794 - DNA, 19 bp, Homo sapiens
  siRNA target sequence for SUPT3H (NM_003599.1,84-102).
gcagctagtccaatgtcta

SEQ ID NO: 275795 - DNA, 19 bp, Homo sapiens
  siRNA target sequence for SUPT3H (NM_003599.1,98-116).
gtctactgcaacttcaagt

SEQ ID NO: 275796 - DNA, 19 bp, Homo sapiens
  siRNA target sequence for SUPT3H (NM_003599.1,124-142).
ggagtacagggaagtctat

SEQ ID NO: 275797 - DNA, 19 bp, Homo sapiens
  siRNA target sequence for SUPT3H (NM_003599.1,125-143).
gagtacagggaagtctata

SEQ ID NO: 275798 - DNA, 19 bp, Homo sapiens
  siRNA target sequence for SUPT3H (NM_003599.1,162-180).
cagagtatgatgtattctt

SEQ ID NO: 275799 - DNA, 19 bp, Homo sapiens
  siRNA target sequence for SUPT3H (NM_003599.1,190-208).
ctagaaggcctcttcatga

SEQ ID NO: 275800 - DNA, 19 bp, Homo sapiens
  siRNA target sequence for SUPT3H (NM_003599.1,288-306).
cggggagcaagggtaatca

SEQ ID NO: 275801 - DNA, 19 bp, Homo sapiens
  siRNA target sequence for SUPT3H (NM_003599.1,307-325).
ctcctgaagatcttctgtt

SEQ ID NO: 275802 - DNA, 19 bp, Homo sapiens
  siRNA target sequence for SUPT3H (NM_003599.1,312-330).
gaagatcttctgtttttga

SEQ ID NO: 275803 - DNA, 19 bp, Homo sapiens
  siRNA target sequence for SUPT3H (NM_003599.1,323-341).
gtttttgatgcgcaaagat

SEQ ID NO: 275804 - DNA, 19 bp, Homo sapiens
  siRNA target sequence for SUPT3H (NM_003599.1,374-392).
gtttatccgagactacaaa

SEQ ID NO: 275805 - DNA, 19 bp, Homo sapiens
  siRNA target sequence for SUPT3H (NM_003599.1,381-399).
cgagactacaaatcaaaga

SEQ ID NO: 275806 - DNA, 19 bp, Homo sapiens
  siRNA target sequence for SUPT3H (NM_003599.1,449-467).
cagcaataatgcgaacaaa

SEQ ID NO: 275807 - DNA, 19 bp, Homo sapiens
  siRNA target sequence for SUPT3H (NM_003599.1,452-470).
caataatgcgaacaaaaga

SEQ ID NO: 275808 - DNA, 19 bp, Homo sapiens
  siRNA target sequence for SUPT3H (NM_003599.1,511-529).
caggagaacttttagcaat

SEQ ID NO: 275809 - DNA, 19 bp, Homo sapiens
  siRNA target sequence for SUPT3H (NM_003599.1,607-625).
cagctcaatatgcagaatt

SEQ ID NO: 275810 - DNA, 19 bp, Homo sapiens
  siRNA target sequence for SUPT3H (NM_003599.1,609-627).
gctcaatatgcagaattct

SEQ ID NO: 275811 - DNA, 19 bp, Homo sapiens
  siRNA target sequence for SUPT3H (NM_003599.1,626-644).
ctgtgaaagtcgacaatta

SEQ ID NO: 275812 - DNA, 19 bp, Homo sapiens
  siRNA target sequence for SUPT3H (NM_003599.1,714-732).
gttgtcgcaatggaaatct

SEQ ID NO: 275813 - DNA, 19 bp, Homo sapiens
  siRNA target sequence for SUPT3H (NM_003599.1,735-753).
gcatatttagcgtatgaaa

SEQ ID NO: 275814 - DNA, 19 bp, Homo sapiens
  siRNA target sequence for SUPT3H (NM_003599.1,786-804).
gtgaggcaagacatggtaa

SEQ ID NO: 275815 - DNA, 19 bp, Homo sapiens
  siRNA target sequence for SUPT3H (NM_003599.1,790-808).
ggcaagacatggtaaccaa

SEQ ID NO: 275816 - DNA, 19 bp, Homo sapiens
  siRNA target sequence for SUPT3H (NM_003599.1,844-862).
ccttcattcagtatcacaa

SEQ ID NO: 275817 - DNA, 19 bp, Homo sapiens
  siRNA target sequence for SURB7 (NM_004264.2,51-69).
gcttcaggacgctgtgaat

SEQ ID NO: 275818 - DNA, 19 bp, Homo sapiens
  siRNA target sequence for SURB7 (NM_004264.2,72-90).
gcttgcagatcagttttgt

SEQ ID NO: 275819 - DNA, 19 bp, Homo sapiens
  siRNA target sequence for SURB7 (NM_004264.2,73-91).
cttgcagatcagttttgta

SEQ ID NO: 275820 - DNA, 19 bp, Homo sapiens
  siRNA target sequence for SURB7 (NM_004264.2,173-191).
ctaaccctacagaagagta

SEQ ID NO: 275821 - DNA, 19 bp, Homo sapiens
  siRNA target sequence for SURB7 (NM_004264.2,290-308).
ctgctagcttgtataagct

SEQ ID NO: 275822 - DNA, 19 bp, Homo sapiens
  siRNA target sequence for SURB7 (NM_004264.2,296-314).
gcttgtataagctagaaga

SEQ ID NO: 275823 - DNA, 19 bp, Homo sapiens
  siRNA target sequence for SURB7 (NM_004264.2,297-315).
cttgtataagctagaagaa

SEQ ID NO: 275824 - DNA, 19 bp, Homo sapiens
  siRNA target sequence for SURB7 (NM_004264.2,321-339).
ccatgaagctgctacatgt

SEQ ID NO: 275825 - DNA, 19 bp, Homo sapiens
  siRNA target sequence for SURB7 (NM_004264.2,342-360).
ggaggatgttgtttatcga

SEQ ID NO: 275826 - DNA, 19 bp, Homo sapiens
  siRNA target sequence for SURB7 (NM_004264.2,390-408).
cgcacttgctgatattgca

SEQ ID NO: 275827 - DNA, 19 bp, Homo sapiens
  siRNA target sequence for EPC1 (NM_025209.2,355-373).
cacgaatacgcctcgataa

SEQ ID NO: 275828 - DNA, 19 bp, Homo sapiens
  siRNA target sequence for EPC1 (NM_025209.2,358-376).
gaatacgcctcgataaaca

SEQ ID NO: 275829 - DNA, 19 bp, Homo sapiens
  siRNA target sequence for EPC1 (NM_025209.2,430-448).
catcttcagcgggctattt

SEQ ID NO: 275830 - DNA, 19 bp, Homo sapiens
  siRNA target sequence for EPC1 (NM_025209.2,466-484).
ggcgagaagagggataata

SEQ ID NO: 275831 - DNA, 19 bp, Homo sapiens
  siRNA target sequence for EPC1 (NM_025209.2,471-489).
gaagagggataatatggtt

SEQ ID NO: 275832 - DNA, 19 bp, Homo sapiens
  siRNA target sequence for EPC1 (NM_025209.2,474-492).
gagggataatatggttata

SEQ ID NO: 275833 - DNA, 19 bp, Homo sapiens
  siRNA target sequence for EPC1 (NM_025209.2,506-524).
cagaaagtaatattgctta

SEQ ID NO: 275834 - DNA, 19 bp, Homo sapiens
  siRNA target sequence for EPC1 (NM_025209.2,520-538).
gcttactatgagtctatat

SEQ ID NO: 275835 - DNA, 19 bp, Homo sapiens
  siRNA target sequence for EPC1 (NM_025209.2,521-539).
cttactatgagtctatata

SEQ ID NO: 275836 - DNA, 19 bp, Homo sapiens
  siRNA target sequence for EPC1 (NM_025209.2,599-617).
ctgaacagcctgattatga

SEQ ID NO: 275837 - DNA, 19 bp, Homo sapiens
  siRNA target sequence for EPC1 (NM_025209.2,669-687).
catctgcccattgcaattt

SEQ ID NO: 275838 - DNA, 19 bp, Homo sapiens
  siRNA target sequence for EPC1 (NM_025209.2,790-808).
gtttatgaatattggatta

SEQ ID NO: 275839 - DNA, 19 bp, Homo sapiens
  siRNA target sequence for EPC1 (NM_025209.2,824-842).
gtcgagggccatctcttat

SEQ ID NO: 275840 - DNA, 19 bp, Homo sapiens
  siRNA target sequence for EPC1 (NM_025209.2,829-847).
gggccatctcttattccat

SEQ ID NO: 275841 - DNA, 19 bp, Homo sapiens
  siRNA target sequence for EPC1 (NM_025209.2,878-896).
gcacaaatgatccttatgt

SEQ ID NO: 275842 - DNA, 19 bp, Homo sapiens
  siRNA target sequence for EPC1 (NM_025209.2,889-907).
ccttatgtggcttttagaa

SEQ ID NO: 275843 - DNA, 19 bp, Homo sapiens
  siRNA target sequence for EPC1 (NM_025209.2,908-926).
ggcgtactgaaaaaatgca

SEQ ID NO: 275844 - DNA, 19 bp, Homo sapiens
  siRNA target sequence for EPC1 (NM_025209.2,956-974).
cctcttacgaaaaaatgct

SEQ ID NO: 275845 - DNA, 19 bp, Homo sapiens
  siRNA target sequence for EPC1 (NM_025209.2,959-977).
cttacgaaaaaatgcttaa

SEQ ID NO: 275846 - DNA, 19 bp, Homo sapiens
  siRNA target sequence for EPC1 (NM_025209.2,978-996).
gctgcgacgagatctaagt

SEQ ID NO: 275847 - DNA, 19 bp, Homo sapiens
  siRNA target sequence for EPC1 (NM_025209.2,995-1013).
gtcgagctgttactattct

SEQ ID NO: 275848 - DNA, 19 bp, Homo sapiens
  siRNA target sequence for EPC1 (NM_025209.2,1056-1074).
gcacttaacactggaaatt

SEQ ID NO: 275849 - DNA, 19 bp, Homo sapiens
  siRNA target sequence for EPC1 (NM_025209.2,1057-1075).
cacttaacactggaaatta

SEQ ID NO: 275850 - DNA, 19 bp, Homo sapiens
  siRNA target sequence for EPC1 (NM_025209.2,1167-1185).
ccccatcatccctattact

SEQ ID NO: 275851 - DNA, 19 bp, Homo sapiens
  siRNA target sequence for EPC1 (NM_025209.2,1168-1186).
cccatcatccctattacta

SEQ ID NO: 275852 - DNA, 19 bp, Homo sapiens
  siRNA target sequence for EPC1 (NM_025209.2,1169-1187).
ccatcatccctattactaa

SEQ ID NO: 275853 - DNA, 19 bp, Homo sapiens
  siRNA target sequence for EPC1 (NM_025209.2,1184-1202).
ctaatagcagtcaatttaa

SEQ ID NO: 275854 - DNA, 19 bp, Homo sapiens
  siRNA target sequence for EPC1 (NM_025209.2,1222-1240).
gtgaaggagttcaaagtta

SEQ ID NO: 275855 - DNA, 19 bp, Homo sapiens
  siRNA target sequence for EPC1 (NM_025209.2,1246-1264).
caagataaagccgatctta

SEQ ID NO: 275856 - DNA, 19 bp, Homo sapiens
  siRNA target sequence for EPC1 (NM_025209.2,1266-1284).
ccgaccgaaacggaaatat

SEQ ID NO: 275857 - DNA, 19 bp, Homo sapiens
  siRNA target sequence for EPC1 (NM_025209.2,1268-1286).
gaccgaaacggaaatatga

SEQ ID NO: 275858 - DNA, 19 bp, Homo sapiens
  siRNA target sequence for EPC1 (NM_025209.2,1270-1288).
ccgaaacggaaatatgaaa

SEQ ID NO: 275859 - DNA, 19 bp, Homo sapiens
  siRNA target sequence for EPC1 (NM_025209.2,1271-1289).
cgaaacggaaatatgaaaa

SEQ ID NO: 275860 - DNA, 19 bp, Homo sapiens
  siRNA target sequence for EPC1 (NM_025209.2,1351-1369).
ctgccagtcttcaatgcta

SEQ ID NO: 275861 - DNA, 19 bp, Homo sapiens
  siRNA target sequence for EPC1 (NM_025209.2,1353-1371).
gccagtcttcaatgctaaa

SEQ ID NO: 275862 - DNA, 19 bp, Homo sapiens
  siRNA target sequence for EPC1 (NM_025209.2,1355-1373).
cagtcttcaatgctaaaga

SEQ ID NO: 275863 - DNA, 19 bp, Homo sapiens
  siRNA target sequence for EPC1 (NM_025209.2,1439-1457).
cggaagctgaggaagacaa

SEQ ID NO: 275864 - DNA, 19 bp, Homo sapiens
  siRNA target sequence for EPC1 (NM_025209.2,1570-1588).
ggggatgtgcgatatagat

SEQ ID NO: 275865 - DNA, 19 bp, Homo sapiens
  siRNA target sequence for EPC1 (NM_025209.2,1571-1589).
gggatgtgcgatatagata

SEQ ID NO: 275866 - DNA, 19 bp, Homo sapiens
  siRNA target sequence for EPC1 (NM_025209.2,1573-1591).
gatgtgcgatatagatact

SEQ ID NO: 275867 - DNA, 19 bp, Homo sapiens
  siRNA target sequence for EPC1 (NM_025209.2,1579-1597).
cgatatagatactgcttaa

SEQ ID NO: 275868 - DNA, 19 bp, Homo sapiens
  siRNA target sequence for EPC1 (NM_025209.2,1608-1626).
cgtaccccaaaggtgtatt

SEQ ID NO: 275869 - DNA, 19 bp, Homo sapiens
  siRNA target sequence for EPC1 (NM_025209.2,1652-1670).
gcggtggaagggtcttact

SEQ ID NO: 275870 - DNA, 19 bp, Homo sapiens
  siRNA target sequence for EPC1 (NM_025209.2,1676-1694).
gagctcattcagactatga

SEQ ID NO: 275871 - DNA, 19 bp, Homo sapiens
  siRNA target sequence for EPC1 (NM_025209.2,1763-1781).
ccaatacctcagaaacaaa

SEQ ID NO: 275872 - DNA, 19 bp, Homo sapiens
  siRNA target sequence for EPC1 (NM_025209.2,1816-1834).
cagatactagtcaatatca

SEQ ID NO: 275873 - DNA, 19 bp, Homo sapiens
  siRNA target sequence for EPC1 (NM_025209.2,1818-1836).
gatactagtcaatatcaaa

SEQ ID NO: 275874 - DNA, 19 bp, Homo sapiens
  siRNA target sequence for EPC1 (NM_025209.2,1822-1840).
ctagtcaatatcaaatcat

SEQ ID NO: 275875 - DNA, 19 bp, Homo sapiens
  siRNA target sequence for EPC1 (NM_025209.2,1865-1883).
ggacaccatccctacatga

SEQ ID NO: 275876 - DNA, 19 bp, Homo sapiens
  siRNA target sequence for EPC1 (NM_025209.2,1894-1912).
gatgaactctcctgtagaa

SEQ ID NO: 275877 - DNA, 19 bp, Homo sapiens
  siRNA target sequence for EPC1 (NM_025209.2,1897-1915).
gaactctcctgtagaaaat

SEQ ID NO: 275878 - DNA, 19 bp, Homo sapiens
  siRNA target sequence for EPC1 (NM_025209.2,1999-2017).
ggttcagcacactttgcat

SEQ ID NO: 275879 - DNA, 19 bp, Homo sapiens
  siRNA target sequence for EPC1 (NM_025209.2,2000-2018).
gttcagcacactttgcatt

SEQ ID NO: 275880 - DNA, 19 bp, Homo sapiens
  siRNA target sequence for EPC1 (NM_025209.2,2014-2032).
gcatttacagccgaacaat

SEQ ID NO: 275881 - DNA, 19 bp, Homo sapiens
  siRNA target sequence for EPC1 (NM_025209.2,2015-2033).
catttacagccgaacaata

SEQ ID NO: 275882 - DNA, 19 bp, Homo sapiens
  siRNA target sequence for EPC1 (NM_025209.2,2091-2109).
gcaacagcaagcaaatagt

SEQ ID NO: 275883 - DNA, 19 bp, Homo sapiens
  siRNA target sequence for EPC1 (NM_025209.2,2181-2199).
gggtttagaaagaacacta

SEQ ID NO: 275884 - DNA, 19 bp, Homo sapiens
  siRNA target sequence for EPC1 (NM_025209.2,2209-2227).
gtttctaagactttggatt

SEQ ID NO: 275885 - DNA, 19 bp, Homo sapiens
  siRNA target sequence for EPC1 (NM_025209.2,2272-2290).
caactgatgggattcaaga

SEQ ID NO: 275886 - DNA, 19 bp, Homo sapiens
  siRNA target sequence for EPC1 (NM_025209.2,2275-2293).
ctgatgggattcaagatga

SEQ ID NO: 275887 - DNA, 19 bp, Homo sapiens
  siRNA target sequence for EPC1 (NM_025209.2,2336-2354).
cagcctcaggagtatacaa

SEQ ID NO: 275888 - DNA, 19 bp, Homo sapiens
  siRNA target sequence for EPC1 (NM_025209.2,2411-2429).
cggcaggttcagctttgtt

SEQ ID NO: 275889 - DNA, 19 bp, Homo sapiens
  siRNA target sequence for EPC1 (NM_025209.2,2414-2432).
caggttcagctttgttaca

SEQ ID NO: 275890 - DNA, 19 bp, Homo sapiens
  siRNA target sequence for EPC1 (NM_025209.2,2423-2441).
ctttgttacagccttcaaa

SEQ ID NO: 275891 - DNA, 19 bp, Homo sapiens
  siRNA target sequence for EPC1 (NM_025209.2,2466-2484).
cagtgcactgagtcatcaa

SEQ ID NO: 275892 - DNA, 19 bp, Homo sapiens
  siRNA target sequence for EPC1 (NM_025209.2,2468-2486).
gtgcactgagtcatcaagt

SEQ ID NO: 275893 - DNA, 19 bp, Homo sapiens
  siRNA target sequence for EPC1 (NM_025209.2,2470-2488).
gcactgagtcatcaagtaa

SEQ ID NO: 275894 - DNA, 19 bp, Homo sapiens
  siRNA target sequence for EPC1 (NM_025209.2,2524-2542).
gggaacaacattcgattaa

SEQ ID NO: 275895 - DNA, 19 bp, Homo sapiens
  siRNA target sequence for EPC1 (NM_025209.2,2526-2544).
gaacaacattcgattaact

SEQ ID NO: 275896 - DNA, 19 bp, Homo sapiens
  siRNA target sequence for EPC1 (NM_025209.2,2529-2547).
caacattcgattaactgta

SEQ ID NO: 275897 - DNA, 19 bp, Homo sapiens
  siRNA target sequence for EPC1 (NM_025209.2,2552-2570).
catcagttgccactgtaaa

SEQ ID NO: 275898 - DNA, 19 bp, Homo sapiens
  siRNA target sequence for EPC1 (NM_025209.2,2557-2575).
gttgccactgtaaactcta

SEQ ID NO: 275899 - DNA, 19 bp, Homo sapiens
  siRNA target sequence for EPC1 (NM_025209.2,2582-2600).
caataaatgcacgacatat

SEQ ID NO: 275900 - DNA, 19 bp, Homo sapiens
  siRNA target sequence for EPC1 (NM_025209.2,2596-2614).
catatacctaggactttaa

SEQ ID NO: 275901 - DNA, 19 bp, Homo sapiens
  siRNA target sequence for EPC1 (NM_025209.2,2643-2661).
ggccgctgcagcaaactgt

SEQ ID NO: 275902 - DNA, 19 bp, Homo sapiens
  siRNA target sequence for EPC1 (NM_025209.2,2654-2672).
caaactgtcaagtttccaa

SEQ ID NO: 275903 - DNA, 19 bp, Homo sapiens
  siRNA target sequence for EPC1 (NM_025209.2,2704-2722).
ccaagggaaaatcatgaat

SEQ ID NO: 275904 - DNA, 19 bp, Homo sapiens
  siRNA target sequence for EPC1 (NM_025209.2,2730-2748).
gccagcactgaacaacata

SEQ ID NO: 275905 - DNA, 19 bp, Homo sapiens
  siRNA target sequence for BTF (NM_014739.1,257-275).
ggtcgctccaattctagat

SEQ ID NO: 275906 - DNA, 19 bp, Homo sapiens
  siRNA target sequence for BTF (NM_014739.1,265-283).
caattctagatcacattct

SEQ ID NO: 275907 - DNA, 19 bp, Homo sapiens
  siRNA target sequence for BTF (NM_014739.1,307-325).
gtctagttctcgatcaaga

SEQ ID NO: 275908 - DNA, 19 bp, Homo sapiens
  siRNA target sequence for BTF (NM_014739.1,368-386).
cgttccagaacatattcaa

SEQ ID NO: 275909 - DNA, 19 bp, Homo sapiens
  siRNA target sequence for BTF (NM_014739.1,390-408).
ctcgtagtagagatcgtat

SEQ ID NO: 275910 - DNA, 19 bp, Homo sapiens
  siRNA target sequence for BTF (NM_014739.1,393-411).
gtagtagagatcgtatgta

SEQ ID NO: 275911 - DNA, 19 bp, Homo sapiens
  siRNA target sequence for BTF (NM_014739.1,404-422).
cgtatgtattctagagatt

SEQ ID NO: 275912 - DNA, 19 bp, Homo sapiens
  siRNA target sequence for BTF (NM_014739.1,419-437).
gattatcgtcgcgattaca

SEQ ID NO: 275913 - DNA, 19 bp, Homo sapiens
  siRNA target sequence for BTF (NM_014739.1,425-443).
cgtcgcgattacagaaata

SEQ ID NO: 275914 - DNA, 19 bp, Homo sapiens
  siRNA target sequence for BTF (NM_014739.1,426-444).
gtcgcgattacagaaataa

SEQ ID NO: 275915 - DNA, 19 bp, Homo sapiens
  siRNA target sequence for BTF (NM_014739.1,428-446).
cgcgattacagaaataata

SEQ ID NO: 275916 - DNA, 19 bp, Homo sapiens
  siRNA target sequence for BTF (NM_014739.1,477-495).
gaaggggtagagggtatta

SEQ ID NO: 275917 - DNA, 19 bp, Homo sapiens
  siRNA target sequence for BTF (NM_014739.1,481-499).
gggtagagggtattatcaa

SEQ ID NO: 275918 - DNA, 19 bp, Homo sapiens
  siRNA target sequence for BTF (NM_014739.1,641-659).
cgccggtcatatagatctt

SEQ ID NO: 275919 - DNA, 19 bp, Homo sapiens
  siRNA target sequence for BTF (NM_014739.1,643-661).
ccggtcatatagatcttct

SEQ ID NO: 275920 - DNA, 19 bp, Homo sapiens
  siRNA target sequence for BTF (NM_014739.1,644-662).
cggtcatatagatcttcta

SEQ ID NO: 275921 - DNA, 19 bp, Homo sapiens
  siRNA target sequence for BTF (NM_014739.1,686-704).
cgttcttcatccccatata

SEQ ID NO: 275922 - DNA, 19 bp, Homo sapiens
  siRNA target sequence for BTF (NM_014739.1,779-797).
gagagtccgttgaaaagta

SEQ ID NO: 275923 - DNA, 19 bp, Homo sapiens
  siRNA target sequence for BTF (NM_014739.1,803-821).
caggaggaaccgaaagata

SEQ ID NO: 275924 - DNA, 19 bp, Homo sapiens
  siRNA target sequence for BTF (NM_014739.1,805-823).
ggaggaaccgaaagataca

SEQ ID NO: 275925 - DNA, 19 bp, Homo sapiens
  siRNA target sequence for BTF (NM_014739.1,808-826).
ggaaccgaaagatacattt

SEQ ID NO: 275926 - DNA, 19 bp, Homo sapiens
  siRNA target sequence for BTF (NM_014739.1,813-831).
cgaaagatacatttgaaca

SEQ ID NO: 275927 - DNA, 19 bp, Homo sapiens
  siRNA target sequence for BTF (NM_014739.1,835-853).
cccatctgagtctatcgat

SEQ ID NO: 275928 - DNA, 19 bp, Homo sapiens
  siRNA target sequence for BTF (NM_014739.1,850-868).
cgatgaatttaataagtca

SEQ ID NO: 275929 - DNA, 19 bp, Homo sapiens
  siRNA target sequence for BTF (NM_014739.1,870-888).
cagccacatccggtgatat

SEQ ID NO: 275930 - DNA, 19 bp, Homo sapiens
  siRNA target sequence for BTF (NM_014739.1,872-890).
gccacatccggtgatattt

SEQ ID NO: 275931 - DNA, 19 bp, Homo sapiens
  siRNA target sequence for BTF (NM_014739.1,931-949).
ccatagtccttcacctatt

SEQ ID NO: 275932 - DNA, 19 bp, Homo sapiens
  siRNA target sequence for BTF (NM_014739.1,1071-1089).
ggtctggttctgttggaaa

SEQ ID NO: 275933 - DNA, 19 bp, Homo sapiens
  siRNA target sequence for BTF (NM_014739.1,1072-1090).
gtctggttctgttggaaat

SEQ ID NO: 275934 - DNA, 19 bp, Homo sapiens
  siRNA target sequence for BTF (NM_014739.1,1105-1123).
cagtccttctcagaatagt

SEQ ID NO: 275935 - DNA, 19 bp, Homo sapiens
  siRNA target sequence for BTF (NM_014739.1,1135-1153).
catcccttcacgaagaagt

SEQ ID NO: 275936 - DNA, 19 bp, Homo sapiens
  siRNA target sequence for BTF (NM_014739.1,1204-1222).
ccgttcctcgttttatcct

SEQ ID NO: 275937 - DNA, 19 bp, Homo sapiens
  siRNA target sequence for BTF (NM_014739.1,1277-1295).
gatgaagagtctagagtat

SEQ ID NO: 275938 - DNA, 19 bp, Homo sapiens
  siRNA target sequence for BTF (NM_014739.1,1298-1316).
ctgcttgataggggtaata

SEQ ID NO: 275939 - DNA, 19 bp, Homo sapiens
  siRNA target sequence for BTF (NM_014739.1,1301-1319).
cttgataggggtaatacca

SEQ ID NO: 275940 - DNA, 19 bp, Homo sapiens
  siRNA target sequence for BTF (NM_014739.1,1311-1329).
gtaataccagggataaaga

SEQ ID NO: 275941 - DNA, 19 bp, Homo sapiens
  siRNA target sequence for BTF (NM_014739.1,1385-1403).
caggaagctctagattact

SEQ ID NO: 275942 - DNA, 19 bp, Homo sapiens
  siRNA target sequence for BTF (NM_014739.1,1394-1412).
ctagattacttcagtgata

SEQ ID NO: 275943 - DNA, 19 bp, Homo sapiens
  siRNA target sequence for BTF (NM_014739.1,1460-1478).
gaggagacagaggattata

SEQ ID NO: 275944 - DNA, 19 bp, Homo sapiens
  siRNA target sequence for BTF (NM_014739.1,1462-1480).
ggagacagaggattataga

SEQ ID NO: 275945 - DNA, 19 bp, Homo sapiens
  siRNA target sequence for BTF (NM_014739.1,1499-1517).
ctcgcagatcagggtaaaa

SEQ ID NO: 275946 - DNA, 19 bp, Homo sapiens
  siRNA target sequence for BTF (NM_014739.1,1501-1519).
cgcagatcagggtaaaagt

SEQ ID NO: 275947 - DNA, 19 bp, Homo sapiens
  siRNA target sequence for BTF (NM_014739.1,1502-1520).
gcagatcagggtaaaagtt

SEQ ID NO: 275948 - DNA, 19 bp, Homo sapiens
  siRNA target sequence for BTF (NM_014739.1,1508-1526).
cagggtaaaagttttgcta

SEQ ID NO: 275949 - DNA, 19 bp, Homo sapiens
  siRNA target sequence for BTF (NM_014739.1,1530-1548).
catctcaccggaatactga

SEQ ID NO: 275950 - DNA, 19 bp, Homo sapiens
  siRNA target sequence for BTF (NM_014739.1,1564-1582).
gtacaagtccaaagtttca

SEQ ID NO: 275951 - DNA, 19 bp, Homo sapiens
  siRNA target sequence for BTF (NM_014739.1,1658-1676).
gaaaggcctagcactacaa

SEQ ID NO: 275952 - DNA, 19 bp, Homo sapiens
  siRNA target sequence for BTF (NM_014739.1,1662-1680).
ggcctagcactacaaaaga

SEQ ID NO: 275953 - DNA, 19 bp, Homo sapiens
  siRNA target sequence for BTF (NM_014739.1,1663-1681).
gcctagcactacaaaagat

SEQ ID NO: 275954 - DNA, 19 bp, Homo sapiens
  siRNA target sequence for BTF (NM_014739.1,1745-1763).
gagcaggtaaagtctgaaa

SEQ ID NO: 275955 - DNA, 19 bp, Homo sapiens
  siRNA target sequence for BTF (NM_014739.1,1788-1806).
gtccccctctacacaagaa

SEQ ID NO: 275956 - DNA, 19 bp, Homo sapiens
  siRNA target sequence for BTF (NM_014739.1,1791-1809).
cccctctacacaagaatct

SEQ ID NO: 275957 - DNA, 19 bp, Homo sapiens
  siRNA target sequence for BTF (NM_014739.1,1808-1826).
ctggatgcacgagaaaagt

SEQ ID NO: 275958 - DNA, 19 bp, Homo sapiens
  siRNA target sequence for BTF (NM_014739.1,1810-1828).
ggatgcacgagaaaagtct

SEQ ID NO: 275959 - DNA, 19 bp, Homo sapiens
  siRNA target sequence for BTF (NM_014739.1,1811-1829).
gatgcacgagaaaagtcta

SEQ ID NO: 275960 - DNA, 19 bp, Homo sapiens
  siRNA target sequence for BTF (NM_014739.1,1845-1863).
gcccacttaggatcaaaat

SEQ ID NO: 275961 - DNA, 19 bp, Homo sapiens
  siRNA target sequence for BTF (NM_014739.1,1847-1865).
ccacttaggatcaaaatga

SEQ ID NO: 275962 - DNA, 19 bp, Homo sapiens
  siRNA target sequence for BTF (NM_014739.1,1878-1896).
ctcaccgtcctgaagtcaa

SEQ ID NO: 275963 - DNA, 19 bp, Homo sapiens
  siRNA target sequence for BTF (NM_014739.1,1883-1901).
cgtcctgaagtcaaactca

SEQ ID NO: 275964 - DNA, 19 bp, Homo sapiens
  siRNA target sequence for BTF (NM_014739.1,1906-1924).
ggcacctgttcctcttgat

SEQ ID NO: 275965 - DNA, 19 bp, Homo sapiens
  siRNA target sequence for BTF (NM_014739.1,1916-1934).
cctcttgatgattctaaca

SEQ ID NO: 275966 - DNA, 19 bp, Homo sapiens
  siRNA target sequence for BTF (NM_014739.1,2083-2101).
gtccttggttcatcatgtt

SEQ ID NO: 275967 - DNA, 19 bp, Homo sapiens
  siRNA target sequence for BTF (NM_014739.1,2085-2103).
ccttggttcatcatgttaa

SEQ ID NO: 275968 - DNA, 19 bp, Homo sapiens
  siRNA target sequence for BTF (NM_014739.1,2124-2142).
ctgcaatgaccctaaacga

SEQ ID NO: 275969 - DNA, 19 bp, Homo sapiens
  siRNA target sequence for BTF (NM_014739.1,2140-2158).
cgagcggttcacttcgtat

SEQ ID NO: 275970 - DNA, 19 bp, Homo sapiens
  siRNA target sequence for BTF (NM_014739.1,2144-2162).
cggttcacttcgtatcaga

SEQ ID NO: 275971 - DNA, 19 bp, Homo sapiens
  siRNA target sequence for BTF (NM_014739.1,2145-2163).
ggttcacttcgtatcagaa

SEQ ID NO: 275972 - DNA, 19 bp, Homo sapiens
  siRNA target sequence for BTF (NM_014739.1,2177-2195).
catagtactcggcaaaaga

SEQ ID NO: 275973 - DNA, 19 bp, Homo sapiens
  siRNA target sequence for BTF (NM_014739.1,2242-2260).
gaagcatacccgtttagca

SEQ ID NO: 275974 - DNA, 19 bp, Homo sapiens
  siRNA target sequence for BTF (NM_014739.1,2325-2343).
ctgaccttcggcatgacat

SEQ ID NO: 275975 - DNA, 19 bp, Homo sapiens
  siRNA target sequence for BTF (NM_014739.1,2329-2347).
ccttcggcatgacattgat

SEQ ID NO: 275976 - DNA, 19 bp, Homo sapiens
  siRNA target sequence for BTF (NM_014739.1,2341-2359).
cattgatcgccgtagaaaa

SEQ ID NO: 275977 - DNA, 19 bp, Homo sapiens
  siRNA target sequence for BTF (NM_014739.1,2492-2510).
gatcattctcgatcttcat

SEQ ID NO: 275978 - DNA, 19 bp, Homo sapiens
  siRNA target sequence for BTF (NM_014739.1,2534-2552).
cccagttctcgagaagaaa

SEQ ID NO: 275979 - DNA, 19 bp, Homo sapiens
  siRNA target sequence for BTF (NM_014739.1,2632-2650).
ccgaccacgaggaaccttt

SEQ ID NO: 275980 - DNA, 19 bp, Homo sapiens
  siRNA target sequence for BTF (NM_014739.1,2633-2651).
cgaccacgaggaacctttt

SEQ ID NO: 275981 - DNA, 19 bp, Homo sapiens
  siRNA target sequence for BTF (NM_014739.1,2634-2652).
gaccacgaggaaccttttt

SEQ ID NO: 275982 - DNA, 19 bp, Homo sapiens
  siRNA target sequence for BTF (NM_014739.1,2639-2657).
cgaggaaccttttttcgaa

SEQ ID NO: 275983 - DNA, 19 bp, Homo sapiens
  siRNA target sequence for BTF (NM_014739.1,2684-2702).
gtttttgctgggacaaata

SEQ ID NO: 275984 - DNA, 19 bp, Homo sapiens
  siRNA target sequence for BTF (NM_014739.1,2697-2715).
caaatactggtccaaacaa

SEQ ID NO: 275985 - DNA, 19 bp, Homo sapiens
  siRNA target sequence for BTF (NM_014739.1,2703-2721).
ctggtccaaacaactcaaa

SEQ ID NO: 275986 - DNA, 19 bp, Homo sapiens
  siRNA target sequence for BTF (NM_014739.1,2705-2723).
ggtccaaacaactcaaata

SEQ ID NO: 275987 - DNA, 19 bp, Homo sapiens
  siRNA target sequence for BTF (NM_014739.1,2808-2826).
gagatgatggtgtggatta

SEQ ID NO: 275988 - DNA, 19 bp, Homo sapiens
  siRNA target sequence for BTF (NM_014739.1,2841-2859).
gaagaggtcgtggtacttt

SEQ ID NO: 275989 - DNA, 19 bp, Homo sapiens
  siRNA target sequence for BTF (NM_014739.1,2867-2885).
ggcagagggcgctttaact

SEQ ID NO: 275990 - DNA, 19 bp, Homo sapiens
  siRNA target sequence for BTF (NM_014739.1,2868-2886).
gcagagggcgctttaactt

SEQ ID NO: 275991 - DNA, 19 bp, Homo sapiens
  siRNA target sequence for BTF (NM_014739.1,2874-2892).
ggcgctttaacttcaaaaa

SEQ ID NO: 275992 - DNA, 19 bp, Homo sapiens
  siRNA target sequence for BTF (NM_014739.1,2897-2915).
ggtagcagtcctaaatgga

SEQ ID NO: 275993 - DNA, 19 bp, Homo sapiens
  siRNA target sequence for BTF (NM_014739.1,2907-2925).
ctaaatggactcatgacaa

SEQ ID NO: 275994 - DNA, 19 bp, Homo sapiens
  siRNA target sequence for BTF (NM_014739.1,2935-2953).
ggatgggattgttgaagat

SEQ ID NO: 275995 - DNA, 19 bp, Homo sapiens
  siRNA target sequence for EED (NM_003797.2,585-603).
gtatagaaagtggtacaaa

SEQ ID NO: 275996 - DNA, 19 bp, Homo sapiens
  siRNA target sequence for EED (NM_003797.2,612-630).
gccctgatacacctacaaa

SEQ ID NO: 275997 - DNA, 19 bp, Homo sapiens
  siRNA target sequence for EED (NM_003797.2,614-632).
cctgatacacctacaaaca

SEQ ID NO: 275998 - DNA, 19 bp, Homo sapiens
  siRNA target sequence for EED (NM_003797.2,741-759).
cattgtttggagttcagtt

SEQ ID NO: 275999 - DNA, 19 bp, Homo sapiens
  siRNA target sequence for EED (NM_003797.2,771-789).
gtaaagaaggagatccatt

SEQ ID NO: 276000 - DNA, 19 bp, Homo sapiens
  siRNA target sequence for EED (NM_003797.2,776-794).
gaaggagatccattagtgt

SEQ ID NO: 276001 - DNA, 19 bp, Homo sapiens
  siRNA target sequence for EED (NM_003797.2,811-829).
caacagagttaccttgtat

SEQ ID NO: 276002 - DNA, 19 bp, Homo sapiens
  siRNA target sequence for EED (NM_003797.2,823-841).
cttgtatgaatgtcattca

SEQ ID NO: 276003 - DNA, 19 bp, Homo sapiens
  siRNA target sequence for EED (NM_003797.2,848-866).
gaaatccggttgttgcaat

SEQ ID NO: 276004 - DNA, 19 bp, Homo sapiens
  siRNA target sequence for EED (NM_003797.2,909-927).
catggacctatgatagcaa

SEQ ID NO: 276005 - DNA, 19 bp, Homo sapiens
  siRNA target sequence for EED (NM_003797.2,946-964).
ggctgtagctggatctaga

SEQ ID NO: 276006 - DNA, 19 bp, Homo sapiens
  siRNA target sequence for EED (NM_003797.2,956-974).
ggatctagaggcataatta

SEQ ID NO: 276007 - DNA, 19 bp, Homo sapiens
  siRNA target sequence for EED (NM_003797.2,960-978).
ctagaggcataattaggat

SEQ ID NO: 276008 - DNA, 19 bp, Homo sapiens
  siRNA target sequence for EED (NM_003797.2,1051-1069).
ccatccaagagatccaaat

SEQ ID NO: 276009 - DNA, 19 bp, Homo sapiens
  siRNA target sequence for EED (NM_003797.2,1070-1088).
cttctcctgtcagtaagta

SEQ ID NO: 276010 - DNA, 19 bp, Homo sapiens
  siRNA target sequence for EED (NM_003797.2,1091-1109).
gatcatgctttacgattat

SEQ ID NO: 276011 - DNA, 19 bp, Homo sapiens
  siRNA target sequence for EED (NM_003797.2,1124-1142).
gacactctggtggcaatat

SEQ ID NO: 276012 - DNA, 19 bp, Homo sapiens
  siRNA target sequence for EED (NM_003797.2,1126-1144).
cactctggtggcaatattt

SEQ ID NO: 276013 - DNA, 19 bp, Homo sapiens
  siRNA target sequence for EED (NM_003797.2,1221-1239).
gtatggatcattctcttaa

SEQ ID NO: 276014 - DNA, 19 bp, Homo sapiens
  siRNA target sequence for EED (NM_003797.2,1275-1293).
caattaaggaatcttatga

SEQ ID NO: 276015 - DNA, 19 bp, Homo sapiens
  siRNA target sequence for EED (NM_003797.2,1362-1380).
gagacatacataggaatta

SEQ ID NO: 276016 - DNA, 19 bp, Homo sapiens
  siRNA target sequence for EED (NM_003797.2,1394-1412).
cgatggttaggcgatttga

SEQ ID NO: 276017 - DNA, 19 bp, Homo sapiens
  siRNA target sequence for EED (NM_003797.2,1398-1416).
ggttaggcgatttgatact

SEQ ID NO: 276018 - DNA, 19 bp, Homo sapiens
  siRNA target sequence for EED (NM_003797.2,1403-1421).
ggcgatttgatactttcta

SEQ ID NO: 276019 - DNA, 19 bp, Homo sapiens
  siRNA target sequence for EED (NM_003797.2,1404-1422).
gcgatttgatactttctaa

SEQ ID NO: 276020 - DNA, 19 bp, Homo sapiens
  siRNA target sequence for EED (NM_003797.2,1406-1424).
gatttgatactttctaagt

SEQ ID NO: 276021 - DNA, 19 bp, Homo sapiens
  siRNA target sequence for EED (NM_003797.2,1494-1512).
gtgaatctaatgtgactat

SEQ ID NO: 276022 - DNA, 19 bp, Homo sapiens
  siRNA target sequence for EED (NM_003797.2,1514-1532).
cttgggcgatttgattaca

SEQ ID NO: 276023 - DNA, 19 bp, Homo sapiens
  siRNA target sequence for EED (NM_003797.2,1552-1570).
catgaggttttctatggat

SEQ ID NO: 276024 - DNA, 19 bp, Homo sapiens
  siRNA target sequence for EED (NM_003797.2,1585-1603).
gcttgcattgggcaatcaa

SEQ ID NO: 276025 - DNA, 19 bp, Homo sapiens
  siRNA target sequence for EED (NM_003797.2,1604-1622).
gttggcaaactttatgttt

SEQ ID NO: 276026 - DNA, 19 bp, Homo sapiens
  siRNA target sequence for EED (NM_003797.2,1643-1661).
cctcataaagccaaatgta

SEQ ID NO: 276027 - DNA, 19 bp, Homo sapiens
  siRNA target sequence for EED (NM_003797.2,1697-1715).
cgacaaaccagttttagca

SEQ ID NO: 276028 - DNA, 19 bp, Homo sapiens
  siRNA target sequence for EED (NM_003797.2,1716-1734).
gggatagcagcattcttat

SEQ ID NO: 276029 - DNA, 19 bp, Homo sapiens
  siRNA target sequence for NAB1 (NM_005966.2,49-67).
ggagttgcagctgtataga

SEQ ID NO: 276030 - DNA, 19 bp, Homo sapiens
  siRNA target sequence for NAB1 (NM_005966.2,50-68).
gagttgcagctgtatagaa

SEQ ID NO: 276031 - DNA, 19 bp, Homo sapiens
  siRNA target sequence for NAB1 (NM_005966.2,52-70).
gttgcagctgtatagaata

SEQ ID NO: 276032 - DNA, 19 bp, Homo sapiens
  siRNA target sequence for NAB1 (NM_005966.2,55-73).
gcagctgtatagaatatta

SEQ ID NO: 276033 - DNA, 19 bp, Homo sapiens
  siRNA target sequence for NAB1 (NM_005966.2,58-76).
gctgtatagaatattacaa

SEQ ID NO: 276034 - DNA, 19 bp, Homo sapiens
  siRNA target sequence for NAB1 (NM_005966.2,199-217).
caagccccttcatgttaga

SEQ ID NO: 276035 - DNA, 19 bp, Homo sapiens
  siRNA target sequence for NAB1 (NM_005966.2,283-301).
ccttcctgtcagtagcata

SEQ ID NO: 276036 - DNA, 19 bp, Homo sapiens
  siRNA target sequence for NAB1 (NM_005966.2,297-315).
gcatacccatctataaatt

SEQ ID NO: 276037 - DNA, 19 bp, Homo sapiens
  siRNA target sequence for NAB1 (NM_005966.2,642-660).
ccacactgccaaaaagtga

SEQ ID NO: 276038 - DNA, 19 bp, Homo sapiens
  siRNA target sequence for NAB1 (NM_005966.2,736-754).
cgatgatgatccacacaaa

SEQ ID NO: 276039 - DNA, 19 bp, Homo sapiens
  siRNA target sequence for NAB1 (NM_005966.2,767-785).
cggaaatacagtgcaatat

SEQ ID NO: 276040 - DNA, 19 bp, Homo sapiens
  siRNA target sequence for NAB1 (NM_005966.2,768-786).
ggaaatacagtgcaatata

SEQ ID NO: 276041 - DNA, 19 bp, Homo sapiens
  siRNA target sequence for NAB1 (NM_005966.2,863-881).
caactctgtgtgaaggata

SEQ ID NO: 276042 - DNA, 19 bp, Homo sapiens
  siRNA target sequence for NAB1 (NM_005966.2,914-932).
gccttggctcgacagattt

SEQ ID NO: 276043 - DNA, 19 bp, Homo sapiens
  siRNA target sequence for NAB1 (NM_005966.2,935-953).
cgagaagtcacctataaat

SEQ ID NO: 276044 - DNA, 19 bp, Homo sapiens
  siRNA target sequence for NAB1 (NM_005966.2,1035-1053).
cagatttccaggattctgt

SEQ ID NO: 276045 - DNA, 19 bp, Homo sapiens
  siRNA target sequence for NAB1 (NM_005966.2,1091-1109).
gaacttgcagctcttagtt

SEQ ID NO: 276046 - DNA, 19 bp, Homo sapiens
  siRNA target sequence for NAB1 (NM_005966.2,1247-1265).
ggcttgacttccgataact

SEQ ID NO: 276047 - DNA, 19 bp, Homo sapiens
  siRNA target sequence for NAB1 (NM_005966.2,1249-1267).
cttgacttccgataactca

SEQ ID NO: 276048 - DNA, 19 bp, Homo sapiens
  siRNA target sequence for NAB1 (NM_005966.2,1299-1317).
gaatgcctaatttacagaa

SEQ ID NO: 276049 - DNA, 19 bp, Homo sapiens
  siRNA target sequence for NAB1 (NM_005966.2,1320-1338).
gacaaccccatcattttgt

SEQ ID NO: 276050 - DNA, 19 bp, Homo sapiens
  siRNA target sequence for NAB1 (NM_005966.2,1417-1435).
ctaccctcattcagctttt

SEQ ID NO: 276051 - DNA, 19 bp, Homo sapiens
  siRNA target sequence for NAB1 (NM_005966.2,1431-1449).
cttttaccttagaaaagaa

SEQ ID NO: 276052 - DNA, 19 bp, Homo sapiens
  siRNA target sequence for REST (NM_005612.3,421-439).
ccctgcctaacgacatgta

SEQ ID NO: 276053 - DNA, 19 bp, Homo sapiens
  siRNA target sequence for REST (NM_005612.3,422-440).
cctgcctaacgacatgtat

SEQ ID NO: 276054 - DNA, 19 bp, Homo sapiens
  siRNA target sequence for REST (NM_005612.3,426-444).
cctaacgacatgtatgact

SEQ ID NO: 276055 - DNA, 19 bp, Homo sapiens
  siRNA target sequence for REST (NM_005612.3,427-445).
ctaacgacatgtatgactt

SEQ ID NO: 276056 - DNA, 19 bp, Homo sapiens
  siRNA target sequence for REST (NM_005612.3,470-488).
ggccgcacctcagcttatt

SEQ ID NO: 276057 - DNA, 19 bp, Homo sapiens
  siRNA target sequence for REST (NM_005612.3,471-489).
gccgcacctcagcttatta

SEQ ID NO: 276058 - DNA, 19 bp, Homo sapiens
  siRNA target sequence for REST (NM_005612.3,472-490).
ccgcacctcagcttattat

SEQ ID NO: 276059 - DNA, 19 bp, Homo sapiens
  siRNA target sequence for REST (NM_005612.3,475-493).
cacctcagcttattatgct

SEQ ID NO: 276060 - DNA, 19 bp, Homo sapiens
  siRNA target sequence for REST (NM_005612.3,494-512).
ggcaaatgtggccttaact

SEQ ID NO: 276061 - DNA, 19 bp, Homo sapiens
  siRNA target sequence for REST (NM_005612.3,542-560).
cctggtcggtgaagaaaga

SEQ ID NO: 276062 - DNA, 19 bp, Homo sapiens
  siRNA target sequence for REST (NM_005612.3,579-597).
ccggttggggataacaact

SEQ ID NO: 276063 - DNA, 19 bp, Homo sapiens
  siRNA target sequence for REST (NM_005612.3,580-598).
cggttggggataacaactt

SEQ ID NO: 276064 - DNA, 19 bp, Homo sapiens
  siRNA target sequence for REST (NM_005612.3,588-606).
gataacaacttttcagata

SEQ ID NO: 276065 - DNA, 19 bp, Homo sapiens
  siRNA target sequence for REST (NM_005612.3,654-672).
cctcatggactggaaaaca

SEQ ID NO: 276066 - DNA, 19 bp, Homo sapiens
  siRNA target sequence for REST (NM_005612.3,727-745).
catcaggtgctccagatat

SEQ ID NO: 276067 - DNA, 19 bp, Homo sapiens
  siRNA target sequence for REST (NM_005612.3,827-845).
ctgtaagccatgccaatat

SEQ ID NO: 276068 - DNA, 19 bp, Homo sapiens
  siRNA target sequence for REST (NM_005612.3,829-847).
gtaagccatgccaatatga

SEQ ID NO: 276069 - DNA, 19 bp, Homo sapiens
  siRNA target sequence for REST (NM_005612.3,888-906).
cacagtgctaagaaatttt

SEQ ID NO: 276070 - DNA, 19 bp, Homo sapiens
  siRNA target sequence for REST (NM_005612.3,892-910).
gtgctaagaaattttttgt

SEQ ID NO: 276071 - DNA, 19 bp, Homo sapiens
  siRNA target sequence for REST (NM_005612.3,1002-1020).
gaccgctgcggctacaata

SEQ ID NO: 276072 - DNA, 19 bp, Homo sapiens
  siRNA target sequence for REST (NM_005612.3,1004-1022).
ccgctgcggctacaatact

SEQ ID NO: 276073 - DNA, 19 bp, Homo sapiens
  siRNA target sequence for REST (NM_005612.3,1005-1023).
cgctgcggctacaatacta

SEQ ID NO: 276074 - DNA, 19 bp, Homo sapiens
  siRNA target sequence for REST (NM_005612.3,1006-1024).
gctgcggctacaatactaa

SEQ ID NO: 276075 - DNA, 19 bp, Homo sapiens
  siRNA target sequence for REST (NM_005612.3,1007-1025).
ctgcggctacaatactaat

SEQ ID NO: 276076 - DNA, 19 bp, Homo sapiens
  siRNA target sequence for REST (NM_005612.3,1010-1028).
cggctacaatactaatcga

SEQ ID NO: 276077 - DNA, 19 bp, Homo sapiens
  siRNA target sequence for REST (NM_005612.3,1011-1029).
ggctacaatactaatcgat

SEQ ID NO: 276078 - DNA, 19 bp, Homo sapiens
  siRNA target sequence for REST (NM_005612.3,1012-1030).
gctacaatactaatcgata

SEQ ID NO: 276079 - DNA, 19 bp, Homo sapiens
  siRNA target sequence for REST (NM_005612.3,1013-1031).
ctacaatactaatcgatat

SEQ ID NO: 276080 - DNA, 19 bp, Homo sapiens
  siRNA target sequence for REST (NM_005612.3,1016-1034).
caatactaatcgatatgat

SEQ ID NO: 276081 - DNA, 19 bp, Homo sapiens
  siRNA target sequence for REST (NM_005612.3,1021-1039).
ctaatcgatatgatcacta

SEQ ID NO: 276082 - DNA, 19 bp, Homo sapiens
  siRNA target sequence for REST (NM_005612.3,1061-1079).
caccagagctggggataat

SEQ ID NO: 276083 - DNA, 19 bp, Homo sapiens
  siRNA target sequence for REST (NM_005612.3,1080-1098).
gagcgagtctacaagtgta

SEQ ID NO: 276084 - DNA, 19 bp, Homo sapiens
  siRNA target sequence for REST (NM_005612.3,1083-1101).
cgagtctacaagtgtatca

SEQ ID NO: 276085 - DNA, 19 bp, Homo sapiens
  siRNA target sequence for REST (NM_005612.3,1086-1104).
gtctacaagtgtatcattt

SEQ ID NO: 276086 - DNA, 19 bp, Homo sapiens
  siRNA target sequence for REST (NM_005612.3,1114-1132).
caacagtgagcgagtatca

SEQ ID NO: 276087 - DNA, 19 bp, Homo sapiens
  siRNA target sequence for REST (NM_005612.3,1290-1308).
cagaagactcatctaacta

SEQ ID NO: 276088 - DNA, 19 bp, Homo sapiens
  siRNA target sequence for REST (NM_005612.3,1292-1310).
gaagactcatctaactaga

SEQ ID NO: 276089 - DNA, 19 bp, Homo sapiens
  siRNA target sequence for REST (NM_005612.3,1297-1315).
ctcatctaactagacatat

SEQ ID NO: 276090 - DNA, 19 bp, Homo sapiens
  siRNA target sequence for REST (NM_005612.3,1358-1376).
cagttatgtggcctctaat

SEQ ID NO: 276091 - DNA, 19 bp, Homo sapiens
  siRNA target sequence for REST (NM_005612.3,1360-1378).
gttatgtggcctctaatca

SEQ ID NO: 276092 - DNA, 19 bp, Homo sapiens
  siRNA target sequence for REST (NM_005612.3,1369-1387).
cctctaatcaacatgaagt

SEQ ID NO: 276093 - DNA, 19 bp, Homo sapiens
  siRNA target sequence for REST (NM_005612.3,1416-1434).
gggcctaaacctcttaatt

SEQ ID NO: 276094 - DNA, 19 bp, Homo sapiens
  siRNA target sequence for REST (NM_005612.3,1511-1529).
gttcaattgccctgtatgt

SEQ ID NO: 276095 - DNA, 19 bp, Homo sapiens
  siRNA target sequence for REST (NM_005612.3,1540-1558).
cttccaagaagtgtaatct

SEQ ID NO: 276096 - DNA, 19 bp, Homo sapiens
  siRNA target sequence for REST (NM_005612.3,1552-1570).
gtaatctacagtatcactt

SEQ ID NO: 276097 - DNA, 19 bp, Homo sapiens
  siRNA target sequence for REST (NM_005612.3,1557-1575).
ctacagtatcacttcaaat

SEQ ID NO: 276098 - DNA, 19 bp, Homo sapiens
  siRNA target sequence for REST (NM_005612.3,1584-1602).
cctacttgtcctaataaaa

SEQ ID NO: 276099 - DNA, 19 bp, Homo sapiens
  siRNA target sequence for REST (NM_005612.3,1603-1621).
caatggatgtctcaaaagt

SEQ ID NO: 276100 - DNA, 19 bp, Homo sapiens
  siRNA target sequence for REST (NM_005612.3,1611-1629).
gtctcaaaagtgaaactaa

SEQ ID NO: 276101 - DNA, 19 bp, Homo sapiens
  siRNA target sequence for REST (NM_005612.3,1649-1667).
ggctgacttgcctgataat

SEQ ID NO: 276102 - DNA, 19 bp, Homo sapiens
  siRNA target sequence for REST (NM_005612.3,1742-1760).
cgtcaaagcagagaaaaga

SEQ ID NO: 276103 - DNA, 19 bp, Homo sapiens
  siRNA target sequence for REST (NM_005612.3,1811-1829).
gactaccagaactcgaaaa

SEQ ID NO: 276104 - DNA, 19 bp, Homo sapiens
  siRNA target sequence for REST (NM_005612.3,1947-1965).
gtgaatgatgaggaatctt

SEQ ID NO: 276105 - DNA, 19 bp, Homo sapiens
  siRNA target sequence for REST (NM_005612.3,1949-1967).
gaatgatgaggaatcttca

SEQ ID NO: 276106 - DNA, 19 bp, Homo sapiens
  siRNA target sequence for REST (NM_005612.3,2290-2308).
ctgacgagcctgttcagat

SEQ ID NO: 276107 - DNA, 19 bp, Homo sapiens
  siRNA target sequence for REST (NM_005612.3,2372-2390).
ggtgggtgcccaaattgta

SEQ ID NO: 276108 - DNA, 19 bp, Homo sapiens
  siRNA target sequence for REST (NM_005612.3,2842-2860).
ggaaggagcaagtccttat

SEQ ID NO: 276109 - DNA, 19 bp, Homo sapiens
  siRNA target sequence for REST (NM_005612.3,2843-2861).
gaaggagcaagtccttatt

SEQ ID NO: 276110 - DNA, 19 bp, Homo sapiens
  siRNA target sequence for REST (NM_005612.3,2846-2864).
ggagcaagtccttattgaa

SEQ ID NO: 276111 - DNA, 19 bp, Homo sapiens
  siRNA target sequence for REST (NM_005612.3,2869-2887).
gcttagtgcctgttaaaga

SEQ ID NO: 276112 - DNA, 19 bp, Homo sapiens
  siRNA target sequence for REST (NM_005612.3,2980-2998).
gagaccaaaaattactcaa

SEQ ID NO: 276113 - DNA, 19 bp, Homo sapiens
  siRNA target sequence for REST (NM_005612.3,3075-3093).
gctgctaatatcaacgaat

SEQ ID NO: 276114 - DNA, 19 bp, Homo sapiens
  siRNA target sequence for REST (NM_005612.3,3078-3096).
gctaatatcaacgaatcta

SEQ ID NO: 276115 - DNA, 19 bp, Homo sapiens
  siRNA target sequence for REST (NM_005612.3,3086-3104).
caacgaatctacccatatt

SEQ ID NO: 276116 - DNA, 19 bp, Homo sapiens
  siRNA target sequence for REST (NM_005612.3,3089-3107).
cgaatctacccatatttca

SEQ ID NO: 276117 - DNA, 19 bp, Homo sapiens
  siRNA target sequence for REST (NM_005612.3,3090-3108).
gaatctacccatatttcat

SEQ ID NO: 276118 - DNA, 19 bp, Homo sapiens
  siRNA target sequence for REST (NM_005612.3,3130-3148).
cgccagagggtgaaacttt

SEQ ID NO: 276119 - DNA, 19 bp, Homo sapiens
  siRNA target sequence for REST (NM_005612.3,3131-3149).
gccagagggtgaaacttta

SEQ ID NO: 276120 - DNA, 19 bp, Homo sapiens
  siRNA target sequence for REST (NM_005612.3,3132-3150).
ccagagggtgaaactttaa

SEQ ID NO: 276121 - DNA, 19 bp, Homo sapiens
  siRNA target sequence for REST (NM_005612.3,3133-3151).
cagagggtgaaactttaaa

SEQ ID NO: 276122 - DNA, 19 bp, Homo sapiens
  siRNA target sequence for REST (NM_005612.3,3137-3155).
gggtgaaactttaaatggt

SEQ ID NO: 276123 - DNA, 19 bp, Homo sapiens
  siRNA target sequence for REST (NM_005612.3,3138-3156).
ggtgaaactttaaatggta

SEQ ID NO: 276124 - DNA, 19 bp, Homo sapiens
  siRNA target sequence for REST (NM_005612.3,3216-3234).
gagaatctcactggtataa

SEQ ID NO: 276125 - DNA, 19 bp, Homo sapiens
  siRNA target sequence for REST (NM_005612.3,3218-3236).
gaatctcactggtataaat

SEQ ID NO: 276126 - DNA, 19 bp, Homo sapiens
  siRNA target sequence for REST (NM_005612.3,3291-3309).
cgtgaagcagtgtccaaaa

SEQ ID NO: 276127 - DNA, 19 bp, Homo sapiens
  siRNA target sequence for REST (NM_005612.3,3413-3431).
catgtcagagggtagtgat

SEQ ID NO: 276128 - DNA, 19 bp, Homo sapiens
  siRNA target sequence for REST (NM_005612.3,3453-3471).
cggccagttccacaagaat

SEQ ID NO: 276129 - DNA, 19 bp, Homo sapiens
  siRNA target sequence for REST (NM_005612.3,3455-3473).
gccagttccacaagaatct

SEQ ID NO: 276130 - DNA, 19 bp, Homo sapiens
  siRNA target sequence for REST (NM_005612.3,3456-3474).
ccagttccacaagaatcta

SEQ ID NO: 276131 - DNA, 19 bp, Homo sapiens
  siRNA target sequence for REST (NM_005612.3,3511-3529).
cggctaagggagattttgt

SEQ ID NO: 276132 - DNA, 19 bp, Homo sapiens
  siRNA target sequence for REST (NM_005612.3,3541-3559).
gtgatcgttctttcagaaa

SEQ ID NO: 276133 - DNA, 19 bp, Homo sapiens
  siRNA target sequence for REST (NM_005612.3,3581-3599).
cctcaatcgccatttggtt

SEQ ID NO: 276134 - DNA, 19 bp, Homo sapiens
  siRNA target sequence for REST (NM_005612.3,3584-3602).
caatcgccatttggttaat

SEQ ID NO: 276135 - DNA, 19 bp, Homo sapiens
  siRNA target sequence for REST (NM_005612.3,3588-3606).
cgccatttggttaatgtgt

SEQ ID NO: 276136 - DNA, 19 bp, Homo sapiens
  siRNA target sequence for REST (NM_005612.3,3596-3614).
ggttaatgtgtactatctt

SEQ ID NO: 276137 - DNA, 19 bp, Homo sapiens
  siRNA target sequence for ELL (NM_006532.1,139-157).
gccagacaggattctgttt

SEQ ID NO: 276138 - DNA, 19 bp, Homo sapiens
  siRNA target sequence for ELL (NM_006532.1,143-161).
gacaggattctgtttcact

SEQ ID NO: 276139 - DNA, 19 bp, Homo sapiens
  siRNA target sequence for ELL (NM_006532.1,164-182).
ggccatctatccgatttca

SEQ ID NO: 276140 - DNA, 19 bp, Homo sapiens
  siRNA target sequence for ELL (NM_006532.1,440-458).
gccgaagtgccattgtcat

SEQ ID NO: 276141 - DNA, 19 bp, Homo sapiens
  siRNA target sequence for ELL (NM_006532.1,1523-1541).
cggagacgcctgactactt

SEQ ID NO: 276142 - DNA, 19 bp, Homo sapiens
  siRNA target sequence for ELL (NM_006532.1,1583-1601).
gctacaagaacgacttcaa

SEQ ID NO: 276143 - DNA, 19 bp, Homo sapiens
  siRNA target sequence for ELL (NM_006532.1,1584-1602).
ctacaagaacgacttcaat

SEQ ID NO: 276144 - DNA, 19 bp, Homo sapiens
  siRNA target sequence for ELL (NM_006532.1,1721-1739).
ctcgagggcagattttgca

SEQ ID NO: 276145 - DNA, 19 bp, Homo sapiens
  siRNA target sequence for ELL (NM_006532.1,1731-1749).
gattttgcaggaatatcga

SEQ ID NO: 276146 - DNA, 19 bp, Homo sapiens
  siRNA target sequence for GTF3C3 (NM_012086.1,101-119).
ggttcagtccggaactcat

SEQ ID NO: 276147 - DNA, 19 bp, Homo sapiens
  siRNA target sequence for GTF3C3 (NM_012086.1,182-200).
cccgcgagaagaaaagtct

SEQ ID NO: 276148 - DNA, 19 bp, Homo sapiens
  siRNA target sequence for GTF3C3 (NM_012086.1,183-201).
ccgcgagaagaaaagtctt

SEQ ID NO: 276149 - DNA, 19 bp, Homo sapiens
  siRNA target sequence for GTF3C3 (NM_012086.1,202-220).
caggaaaaaggcaagttat

SEQ ID NO: 276150 - DNA, 19 bp, Homo sapiens
  siRNA target sequence for GTF3C3 (NM_012086.1,253-271).
ccatcatcatcaggaatta

SEQ ID NO: 276151 - DNA, 19 bp, Homo sapiens
  siRNA target sequence for GTF3C3 (NM_012086.1,449-467).
gcgatgtatttgtattgga

SEQ ID NO: 276152 - DNA, 19 bp, Homo sapiens
  siRNA target sequence for GTF3C3 (NM_012086.1,477-495).
caatcgtgaaaccaagaaa

SEQ ID NO: 276153 - DNA, 19 bp, Homo sapiens
  siRNA target sequence for GTF3C3 (NM_012086.1,553-571).
ggtgaagccaacattcgtt

SEQ ID NO: 276154 - DNA, 19 bp, Homo sapiens
  siRNA target sequence for GTF3C3 (NM_012086.1,554-572).
gtgaagccaacattcgttt

SEQ ID NO: 276155 - DNA, 19 bp, Homo sapiens
  siRNA target sequence for GTF3C3 (NM_012086.1,586-604).
cgtgaagaggcgatattga

SEQ ID NO: 276156 - DNA, 19 bp, Homo sapiens
  siRNA target sequence for GTF3C3 (NM_012086.1,587-605).
gtgaagaggcgatattgat

SEQ ID NO: 276157 - DNA, 19 bp, Homo sapiens
  siRNA target sequence for GTF3C3 (NM_012086.1,589-607).
gaagaggcgatattgatgt

SEQ ID NO: 276158 - DNA, 19 bp, Homo sapiens
  siRNA target sequence for GTF3C3 (NM_012086.1,651-669).
ctctactctagccatgata

SEQ ID NO: 276159 - DNA, 19 bp, Homo sapiens
  siRNA target sequence for GTF3C3 (NM_012086.1,653-671).
ctactctagccatgatata

SEQ ID NO: 276160 - DNA, 19 bp, Homo sapiens
  siRNA target sequence for GTF3C3 (NM_012086.1,656-674).
ctctagccatgatatatga

SEQ ID NO: 276161 - DNA, 19 bp, Homo sapiens
  siRNA target sequence for GTF3C3 (NM_012086.1,679-697).
caaggtgacatggaaaaat

SEQ ID NO: 276162 - DNA, 19 bp, Homo sapiens
  siRNA target sequence for GTF3C3 (NM_012086.1,711-729).
gttgattgctgcgcattta

SEQ ID NO: 276163 - DNA, 19 bp, Homo sapiens
  siRNA target sequence for GTF3C3 (NM_012086.1,714-732).
gattgctgcgcatttaaat

SEQ ID NO: 276164 - DNA, 19 bp, Homo sapiens
  siRNA target sequence for GTF3C3 (NM_012086.1,743-761).
cagaagaatgggttagact

SEQ ID NO: 276165 - DNA, 19 bp, Homo sapiens
  siRNA target sequence for GTF3C3 (NM_012086.1,752-770).
gggttagactggcagaaat

SEQ ID NO: 276166 - DNA, 19 bp, Homo sapiens
  siRNA target sequence for GTF3C3 (NM_012086.1,775-793).
ctggaacaagacaatatta

SEQ ID NO: 276167 - DNA, 19 bp, Homo sapiens
  siRNA target sequence for GTF3C3 (NM_012086.1,795-813).
gcaggctattttttgctat

SEQ ID NO: 276168 - DNA, 19 bp, Homo sapiens
  siRNA target sequence for GTF3C3 (NM_012086.1,815-833).
caaaagctcttaaatatga

SEQ ID NO: 276169 - DNA, 19 bp, Homo sapiens
  siRNA target sequence for GTF3C3 (NM_012086.1,858-876).
ggagcgatcaagcctttat

SEQ ID NO: 276170 - DNA, 19 bp, Homo sapiens
  siRNA target sequence for GTF3C3 (NM_012086.1,877-895).
gaacagatgggtgatcata

SEQ ID NO: 276171 - DNA, 19 bp, Homo sapiens
  siRNA target sequence for GTF3C3 (NM_012086.1,880-898).
cagatgggtgatcataaaa

SEQ ID NO: 276172 - DNA, 19 bp, Homo sapiens
  siRNA target sequence for GTF3C3 (NM_012086.1,907-925).
gatggttataggcgtattt

SEQ ID NO: 276173 - DNA, 19 bp, Homo sapiens
  siRNA target sequence for GTF3C3 (NM_012086.1,941-959).
catctgatggcgaacgttt

SEQ ID NO: 276174 - DNA, 19 bp, Homo sapiens
  siRNA target sequence for GTF3C3 (NM_012086.1,944-962).
ctgatggcgaacgttttat

SEQ ID NO: 276175 - DNA, 19 bp, Homo sapiens
  siRNA target sequence for GTF3C3 (NM_012086.1,1006-1024).
gatgttacttctgctatta

SEQ ID NO: 276176 - DNA, 19 bp, Homo sapiens
  siRNA target sequence for GTF3C3 (NM_012086.1,1083-1101).
catagcagctgaactatat

SEQ ID NO: 276177 - DNA, 19 bp, Homo sapiens
  siRNA target sequence for GTF3C3 (NM_012086.1,1090-1108).
gctgaactatatatttcta

SEQ ID NO: 276178 - DNA, 19 bp, Homo sapiens
  siRNA target sequence for GTF3C3 (NM_012086.1,1106-1124).
ctaacaaacagtatgacaa

SEQ ID NO: 276179 - DNA, 19 bp, Homo sapiens
  siRNA target sequence for GTF3C3 (NM_012086.1,1187-1205).
gcacctcagaagagaataa

SEQ ID NO: 276180 - DNA, 19 bp, Homo sapiens
  siRNA target sequence for GTF3C3 (NM_012086.1,1215-1233).
gaatgttacctgcactata

SEQ ID NO: 276181 - DNA, 19 bp, Homo sapiens
  siRNA target sequence for GTF3C3 (NM_012086.1,1235-1253).
ctgatggcgtgccaataga

SEQ ID NO: 276182 - DNA, 19 bp, Homo sapiens
  siRNA target sequence for GTF3C3 (NM_012086.1,1237-1255).
gatggcgtgccaatagata

SEQ ID NO: 276183 - DNA, 19 bp, Homo sapiens
  siRNA target sequence for GTF3C3 (NM_012086.1,1240-1258).
ggcgtgccaatagatatca

SEQ ID NO: 276184 - DNA, 19 bp, Homo sapiens
  siRNA target sequence for GTF3C3 (NM_012086.1,1242-1260).
cgtgccaatagatatcaca

SEQ ID NO: 276185 - DNA, 19 bp, Homo sapiens
  siRNA target sequence for GTF3C3 (NM_012086.1,1269-1287).
gatggtctgccttgtacat

SEQ ID NO: 276186 - DNA, 19 bp, Homo sapiens
  siRNA target sequence for GTF3C3 (NM_012086.1,1277-1295).
gccttgtacatctcaacat

SEQ ID NO: 276187 - DNA, 19 bp, Homo sapiens
  siRNA target sequence for GTF3C3 (NM_012086.1,1278-1296).
ccttgtacatctcaacatt

SEQ ID NO: 276188 - DNA, 19 bp, Homo sapiens
  siRNA target sequence for GTF3C3 (NM_012086.1,1306-1324).
cttaatcctctcttgacaa

SEQ ID NO: 276189 - DNA, 19 bp, Homo sapiens
  siRNA target sequence for GTF3C3 (NM_012086.1,1322-1340).
caacactagtagaacagaa

SEQ ID NO: 276190 - DNA, 19 bp, Homo sapiens
  siRNA target sequence for GTF3C3 (NM_012086.1,1355-1373).
gagacctatacctagatgt

SEQ ID NO: 276191 - DNA, 19 bp, Homo sapiens
  siRNA target sequence for GTF3C3 (NM_012086.1,1474-1492).
cgtcatgcagaatgtttaa

SEQ ID NO: 276192 - DNA, 19 bp, Homo sapiens
  siRNA target sequence for GTF3C3 (NM_012086.1,1512-1530).
gcgagctgctgaaagctat

SEQ ID NO: 276193 - DNA, 19 bp, Homo sapiens
  siRNA target sequence for GTF3C3 (NM_012086.1,1557-1575).
ccatttggatgcaaggatt

SEQ ID NO: 276194 - DNA, 19 bp, Homo sapiens
  siRNA target sequence for GTF3C3 (NM_012086.1,1563-1581).
ggatgcaaggatttcactt

SEQ ID NO: 276195 - DNA, 19 bp, Homo sapiens
  siRNA target sequence for GTF3C3 (NM_012086.1,1567-1585).
gcaaggatttcactttcta

SEQ ID NO: 276196 - DNA, 19 bp, Homo sapiens
  siRNA target sequence for GTF3C3 (NM_012086.1,1628-1646).
ctctggaaccaatgtatga

SEQ ID NO: 276197 - DNA, 19 bp, Homo sapiens
  siRNA target sequence for GTF3C3 (NM_012086.1,1641-1659).
gtatgatccagatacttta

SEQ ID NO: 276198 - DNA, 19 bp, Homo sapiens
  siRNA target sequence for GTF3C3 (NM_012086.1,1750-1768).
gtggataccttacttacta

SEQ ID NO: 276199 - DNA, 19 bp, Homo sapiens
  siRNA target sequence for GTF3C3 (NM_012086.1,1753-1771).
gataccttacttactatgt

SEQ ID NO: 276200 - DNA, 19 bp, Homo sapiens
  siRNA target sequence for GTF3C3 (NM_012086.1,1797-1815).
gaatcgagcccaagtttgt

SEQ ID NO: 276201 - DNA, 19 bp, Homo sapiens
  siRNA target sequence for GTF3C3 (NM_012086.1,1802-1820).
gagcccaagtttgtttgat

SEQ ID NO: 276202 - DNA, 19 bp, Homo sapiens
  siRNA target sequence for GTF3C3 (NM_012086.1,1840-1858).
gagaggcatctttatctta

SEQ ID NO: 276203 - DNA, 19 bp, Homo sapiens
  siRNA target sequence for GTF3C3 (NM_012086.1,1842-1860).
gaggcatctttatcttatt

SEQ ID NO: 276204 - DNA, 19 bp, Homo sapiens
  siRNA target sequence for GTF3C3 (NM_012086.1,1868-1886).
cgagagacaaaatatcaga

SEQ ID NO: 276205 - DNA, 19 bp, Homo sapiens
  siRNA target sequence for GTF3C3 (NM_012086.1,1939-1957).
ctcacaagcgtcttgacaa

SEQ ID NO: 276206 - DNA, 19 bp, Homo sapiens
  siRNA target sequence for GTF3C3 (NM_012086.1,1967-1985).
ggtggaatcttctgttgaa

SEQ ID NO: 276207 - DNA, 19 bp, Homo sapiens
  siRNA target sequence for GTF3C3 (NM_012086.1,1986-2004).
ggccatatactccttatgt

SEQ ID NO: 276208 - DNA, 19 bp, Homo sapiens
  siRNA target sequence for GTF3C3 (NM_012086.1,1988-2006).
ccatatactccttatgtga

SEQ ID NO: 276209 - DNA, 19 bp, Homo sapiens
  siRNA target sequence for GTF3C3 (NM_012086.1,2003-2021).
gtgacctatcccgatttca

SEQ ID NO: 276210 - DNA, 19 bp, Homo sapiens
  siRNA target sequence for GTF3C3 (NM_012086.1,2038-2056).
gtagattcctcattggaat

SEQ ID NO: 276211 - DNA, 19 bp, Homo sapiens
  siRNA target sequence for GTF3C3 (NM_012086.1,2046-2064).
ctcattggaatattactca

SEQ ID NO: 276212 - DNA, 19 bp, Homo sapiens
  siRNA target sequence for GTF3C3 (NM_012086.1,2052-2070).
ggaatattactcattttat

SEQ ID NO: 276213 - DNA, 19 bp, Homo sapiens
  siRNA target sequence for GTF3C3 (NM_012086.1,2079-2097).
gcaaaaacgcaaagaacta

SEQ ID NO: 276214 - DNA, 19 bp, Homo sapiens
  siRNA target sequence for GTF3C3 (NM_012086.1,2108-2126).
gtctgtctgctgcaattct

SEQ ID NO: 276215 - DNA, 19 bp, Homo sapiens
  siRNA target sequence for GTF3C3 (NM_012086.1,2116-2134).
gctgcaattctggacaaaa

SEQ ID NO: 276216 - DNA, 19 bp, Homo sapiens
  siRNA target sequence for GTF3C3 (NM_012086.1,2154-2172).
ctatatcaggataatggta

SEQ ID NO: 276217 - DNA, 19 bp, Homo sapiens
  siRNA target sequence for GTF3C3 (NM_012086.1,2170-2188).
gtaatggaaaatgtcaata

SEQ ID NO: 276218 - DNA, 19 bp, Homo sapiens
  siRNA target sequence for GTF3C3 (NM_012086.1,2201-2219).
ggaacattttcaatcaagt

SEQ ID NO: 276219 - DNA, 19 bp, Homo sapiens
  siRNA target sequence for GTF3C3 (NM_012086.1,2252-2270).
gcttctgtctccgtttgat

SEQ ID NO: 276220 - DNA, 19 bp, Homo sapiens
  siRNA target sequence for GTF3C3 (NM_012086.1,2290-2308).
catgccctatgtgtcttaa

SEQ ID NO: 276221 - DNA, 19 bp, Homo sapiens
  siRNA target sequence for GTF3C3 (NM_012086.1,2295-2313).
cctatgtgtcttaaatgga

SEQ ID NO: 276222 - DNA, 19 bp, Homo sapiens
  siRNA target sequence for GTF3C3 (NM_012086.1,2383-2401).
cctgacgaacctctctata

SEQ ID NO: 276223 - DNA, 19 bp, Homo sapiens
  siRNA target sequence for GTF3C3 (NM_012086.1,2386-2404).
gacgaacctctctatagct

SEQ ID NO: 276224 - DNA, 19 bp, Homo sapiens
  siRNA target sequence for GTF3C3 (NM_012086.1,2408-2426).
gtataggcctaacctttat

SEQ ID NO: 276225 - DNA, 19 bp, Homo sapiens
  siRNA target sequence for GTF3C3 (NM_012086.1,2413-2431).
ggcctaacctttattcata

SEQ ID NO: 276226 - DNA, 19 bp, Homo sapiens
  siRNA target sequence for GTF3C3 (NM_012086.1,2414-2432).
gcctaacctttattcatat

SEQ ID NO: 276227 - DNA, 19 bp, Homo sapiens
  siRNA target sequence for GTF3C3 (NM_012086.1,2435-2453).
catctcagaagtatgtgtt

SEQ ID NO: 276228 - DNA, 19 bp, Homo sapiens
  siRNA target sequence for GTF3C3 (NM_012086.1,2456-2474).
ggagacatgctcttattgt

SEQ ID NO: 276229 - DNA, 19 bp, Homo sapiens
  siRNA target sequence for GTF3C3 (NM_012086.1,2457-2475).
gagacatgctcttattgta

SEQ ID NO: 276230 - DNA, 19 bp, Homo sapiens
  siRNA target sequence for GTF3C3 (NM_012086.1,2459-2477).
gacatgctcttattgtaca

SEQ ID NO: 276231 - DNA, 19 bp, Homo sapiens
  siRNA target sequence for GTF3C3 (NM_012086.1,2515-2533).
gggccctgccaggaatcat

SEQ ID NO: 276232 - DNA, 19 bp, Homo sapiens
  siRNA target sequence for GTF3C3 (NM_012086.1,2516-2534).
ggccctgccaggaatcatt

SEQ ID NO: 276233 - DNA, 19 bp, Homo sapiens
  siRNA target sequence for GTF3C3 (NM_012086.1,2518-2536).
ccctgccaggaatcattct

SEQ ID NO: 276234 - DNA, 19 bp, Homo sapiens
  siRNA target sequence for GTF3C3 (NM_012086.1,2519-2537).
cctgccaggaatcattcta

SEQ ID NO: 276235 - DNA, 19 bp, Homo sapiens
  siRNA target sequence for GTF3C3 (NM_012086.1,2522-2540).
gccaggaatcattctacaa

SEQ ID NO: 276236 - DNA, 19 bp, Homo sapiens
  siRNA target sequence for GTF3C3 (NM_012086.1,2562-2580).
gttggggctgattcatctt

SEQ ID NO: 276237 - DNA, 19 bp, Homo sapiens
  siRNA target sequence for GTF3C3 (NM_012086.1,2575-2593).
catcttgcaatccactatt

SEQ ID NO: 276238 - DNA, 19 bp, Homo sapiens
  siRNA target sequence for GTF3C3 (NM_012086.1,2581-2599).
gcaatccactattatcaga

SEQ ID NO: 276239 - DNA, 19 bp, Homo sapiens
  siRNA target sequence for GTF3C3 (NM_012086.1,2582-2600).
caatccactattatcagaa

SEQ ID NO: 276240 - DNA, 19 bp, Homo sapiens
  siRNA target sequence for GTF3C3 (NM_012086.1,2644-2662).
gaccagttagacttacgaa

SEQ ID NO: 276241 - DNA, 19 bp, Homo sapiens
  siRNA target sequence for GTF3C3 (NM_012086.1,2649-2667).
gttagacttacgaagagat

SEQ ID NO: 276242 - DNA, 19 bp, Homo sapiens
  siRNA target sequence for GTF3C3 (NM_012086.1,2663-2681).
gagatattgcctacaactt

SEQ ID NO: 276243 - DNA, 19 bp, Homo sapiens
  siRNA target sequence for GTF3C3 (NM_012086.1,2665-2683).
gatattgcctacaacttgt

SEQ ID NO: 276244 - DNA, 19 bp, Homo sapiens
  siRNA target sequence for GTF3C3 (NM_012086.1,2676-2694).
caacttgtctctcatctat

SEQ ID NO: 276245 - DNA, 19 bp, Homo sapiens
  siRNA target sequence for GTF3C3 (NM_012086.1,2727-2745).
gcttttgtatacctattgt

SEQ ID NO: 276246 - DNA, 19 bp, Homo sapiens
  siRNA target sequence for GTF3C3 (NM_012086.1,2733-2751).
gtatacctattgttctata

SEQ ID NO: 276247 - DNA, 19 bp, Homo sapiens
  siRNA target sequence for GTF3C5 (NM_012087.1,548-566).
ctccgcatcaggaagagaa

SEQ ID NO: 276248 - DNA, 19 bp, Homo sapiens
  siRNA target sequence for GTF3C5 (NM_012087.1,600-618).
cccactccgaggtcacatt

SEQ ID NO: 276249 - DNA, 19 bp, Homo sapiens
  siRNA target sequence for GTF3C5 (NM_012087.1,701-719).
gaagcaggcggcaagcata

SEQ ID NO: 276250 - DNA, 19 bp, Homo sapiens
  siRNA target sequence for GTF3C5 (NM_012087.1,710-728).
ggcaagcatacgtcaatgt

SEQ ID NO: 276251 - DNA, 19 bp, Homo sapiens
  siRNA target sequence for GTF3C5 (NM_012087.1,711-729).
gcaagcatacgtcaatgta

SEQ ID NO: 276252 - DNA, 19 bp, Homo sapiens
  siRNA target sequence for GTF3C5 (NM_012087.1,716-734).
catacgtcaatgtatgaca

SEQ ID NO: 276253 - DNA, 19 bp, Homo sapiens
  siRNA target sequence for GTF3C5 (NM_012087.1,932-950).
cacaatgccatctttgtca

SEQ ID NO: 276254 - DNA, 19 bp, Homo sapiens
  siRNA target sequence for GTF3C5 (NM_012087.1,1145-1163).
cccttcatagcctattaca

SEQ ID NO: 276255 - DNA, 19 bp, Homo sapiens
  siRNA target sequence for GTF3C5 (NM_012087.1,1150-1168).
catagcctattacatgata

SEQ ID NO: 276256 - DNA, 19 bp, Homo sapiens
  siRNA target sequence for GTF3C5 (NM_012087.1,1181-1199).
cgcagcctatggattcgat

SEQ ID NO: 276257 - DNA, 19 bp, Homo sapiens
  siRNA target sequence for GTF3C5 (NM_012087.1,1182-1200).
gcagcctatggattcgatt

SEQ ID NO: 276258 - DNA, 19 bp, Homo sapiens
  siRNA target sequence for GTF3C5 (NM_012087.1,1183-1201).
cagcctatggattcgattt

SEQ ID NO: 276259 - DNA, 19 bp, Homo sapiens
  siRNA target sequence for GTF3C5 (NM_012087.1,1202-1220).
gggtatgacccccgaaaaa

SEQ ID NO: 276260 - DNA, 19 bp, Homo sapiens
  siRNA target sequence for GTF3C5 (NM_012087.1,1257-1275).
gaatccgttgtggaatgaa

SEQ ID NO: 276261 - DNA, 19 bp, Homo sapiens
  siRNA target sequence for GTF3C5 (NM_012087.1,1340-1358).
cccatcaccgtcaagaaga

SEQ ID NO: 276262 - DNA, 19 bp, Homo sapiens
  siRNA target sequence for GTF3C5 (NM_012087.1,1505-1523).
cagatgttctaccagttat

SEQ ID NO: 276263 - DNA, 19 bp, Homo sapiens
  siRNA target sequence for GTF3C5 (NM_012087.1,1516-1534).
ccagttatgcgacttgaat

SEQ ID NO: 276264 - DNA, 19 bp, Homo sapiens
  siRNA target sequence for GTF3C5 (NM_012087.1,1799-1817).
ccatccgacggcagtgaaa

SEQ ID NO: 276265 - DNA, 19 bp, Homo sapiens
  siRNA target sequence for GTF3C5 (NM_012087.1,1803-1821).
ccgacggcagtgaaaacga

SEQ ID NO: 276266 - DNA, 19 bp, Homo sapiens
  siRNA target sequence for GTF3C5 (NM_012087.1,1804-1822).
cgacggcagtgaaaacgaa

SEQ ID NO: 276267 - DNA, 19 bp, Homo sapiens
  siRNA target sequence for GTF3C5 (NM_012087.1,1819-1837).
cgaaatggagacagagatt

SEQ ID NO: 276268 - DNA, 19 bp, Homo sapiens
  siRNA target sequence for 8D6A (NM_016579.1,557-575).
gctcggctgtggaaccaat

SEQ ID NO: 276269 - DNA, 19 bp, Homo sapiens
  siRNA target sequence for A1BG (NM_130786.2,59-77).
ccatgctcgtggtctttct

SEQ ID NO: 276270 - DNA, 19 bp, Homo sapiens
  siRNA target sequence for A1BG (NM_130786.2,149-167).
gggcagagtccgaatcact

SEQ ID NO: 276271 - DNA, 19 bp, Homo sapiens
  siRNA target sequence for A1BG (NM_130786.2,223-241).
gacttccagctgttcaaga

SEQ ID NO: 276272 - DNA, 19 bp, Homo sapiens
  siRNA target sequence for A1BG (NM_130786.2,509-527).
gggagggcgaccatgagtt

SEQ ID NO: 276273 - DNA, 19 bp, Homo sapiens
  siRNA target sequence for A1BG (NM_130786.2,577-595).
catcagcctggcaactaca

SEQ ID NO: 276274 - DNA, 19 bp, Homo sapiens
  siRNA target sequence for A1BG (NM_130786.2,827-845).
gcccagatcgcatcttctt

SEQ ID NO: 276275 - DNA, 19 bp, Homo sapiens
  siRNA target sequence for A1BG (NM_130786.2,893-911).
gctaccggctgcatgacaa

SEQ ID NO: 276276 - DNA, 19 bp, Homo sapiens
  siRNA target sequence for A1BG (NM_130786.2,898-916).
cggctgcatgacaaccaaa

SEQ ID NO: 276277 - DNA, 19 bp, Homo sapiens
  siRNA target sequence for A1BG (NM_130786.2,940-958).
ccggtcgagctgattctga

SEQ ID NO: 276278 - DNA, 19 bp, Homo sapiens
  siRNA target sequence for A1BG (NM_130786.2,1128-1146).
cttcgagctgcacaacatt

SEQ ID NO: 276279 - DNA, 19 bp, Homo sapiens
  siRNA target sequence for A2LP (NM_007245.2,494-512).
cacagtcacctgtgtttga

SEQ ID NO: 276280 - DNA, 19 bp, Homo sapiens
  siRNA target sequence for A2LP (NM_007245.2,511-529).
gaaggcgtctacaacaatt

SEQ ID NO: 276281 - DNA, 19 bp, Homo sapiens
  siRNA target sequence for A2LP (NM_007245.2,514-532).
ggcgtctacaacaattcca

SEQ ID NO: 276282 - DNA, 19 bp, Homo sapiens
  siRNA target sequence for A2LP (NM_007245.2,562-580).
ggctccacttgtgatgtaa

SEQ ID NO: 276283 - DNA, 19 bp, Homo sapiens
  siRNA target sequence for A2LP (NM_007245.2,563-581).
gctccacttgtgatgtaaa

SEQ ID NO: 276284 - DNA, 19 bp, Homo sapiens
  siRNA target sequence for A2LP (NM_007245.2,566-584).
ccacttgtgatgtaaaggt

SEQ ID NO: 276285 - DNA, 19 bp, Homo sapiens
  siRNA target sequence for A2LP (NM_007245.2,585-603).
gaaaaatggtaccacttat

SEQ ID NO: 276286 - DNA, 19 bp, Homo sapiens
  siRNA target sequence for A2LP (NM_007245.2,599-617).
cttatgagggtatcttcaa

SEQ ID NO: 276287 - DNA, 19 bp, Homo sapiens
  siRNA target sequence for A2LP (NM_007245.2,618-636).
gacgctaagctcaaagttt

SEQ ID NO: 276288 - DNA, 19 bp, Homo sapiens
  siRNA target sequence for A2LP (NM_007245.2,620-638).
cgctaagctcaaagtttga

SEQ ID NO: 276289 - DNA, 19 bp, Homo sapiens
  siRNA target sequence for A2LP (NM_007245.2,652-670).
gctgtgcaccggaaagcat

SEQ ID NO: 276290 - DNA, 19 bp, Homo sapiens
  siRNA target sequence for A2LP (NM_007245.2,689-707).
ctcgtcgggaggacattgt

SEQ ID NO: 276291 - DNA, 19 bp, Homo sapiens
  siRNA target sequence for A2LP (NM_007245.2,754-772).
cgaaatgttgacttcaact

SEQ ID NO: 276292 - DNA, 19 bp, Homo sapiens
  siRNA target sequence for A2LP (NM_007245.2,755-773).
gaaatgttgacttcaacta

SEQ ID NO: 276293 - DNA, 19 bp, Homo sapiens
  siRNA target sequence for A2LP (NM_007245.2,760-778).
gttgacttcaactatgcta

SEQ ID NO: 276294 - DNA, 19 bp, Homo sapiens
  siRNA target sequence for A2LP (NM_007245.2,765-783).
cttcaactatgctactaaa

SEQ ID NO: 276295 - DNA, 19 bp, Homo sapiens
  siRNA target sequence for A2LP (NM_007245.2,808-826).
gccatgaactcgaaagtga

SEQ ID NO: 276296 - DNA, 19 bp, Homo sapiens
  siRNA target sequence for A2LP (NM_007245.2,810-828).
catgaactcgaaagtgaat

SEQ ID NO: 276297 - DNA, 19 bp, Homo sapiens
  siRNA target sequence for A2LP (NM_007245.2,922-940).
gaccccaatgaaatgttca

SEQ ID NO: 276298 - DNA, 19 bp, Homo sapiens
  siRNA target sequence for A2LP (NM_007245.2,979-997).
gatagcagtctttcttctt

SEQ ID NO: 276299 - DNA, 19 bp, Homo sapiens
  siRNA target sequence for A2LP (NM_007245.2,1001-1019).
cggtgcccttagaaaagga

SEQ ID NO: 276300 - DNA, 19 bp, Homo sapiens
  siRNA target sequence for A2LP (NM_007245.2,1017-1035).
ggacaactcagaagagttt

SEQ ID NO: 276301 - DNA, 19 bp, Homo sapiens
  siRNA target sequence for A2LP (NM_007245.2,1062-1080).
gttggctcgagagattgaa

SEQ ID NO: 276302 - DNA, 19 bp, Homo sapiens
  siRNA target sequence for A2LP (NM_007245.2,1065-1083).
ggctcgagagattgaatca

SEQ ID NO: 276303 - DNA, 19 bp, Homo sapiens
  siRNA target sequence for A2LP (NM_007245.2,1355-1373).
ctgaggcccgtggtatcaa

SEQ ID NO: 276304 - DNA, 19 bp, Homo sapiens
  siRNA target sequence for A2LP (NM_007245.2,1432-1450).
ctgtcttcgcccagtaata

SEQ ID NO: 276305 - DNA, 19 bp, Homo sapiens
  siRNA target sequence for A2LP (NM_007245.2,1915-1933).
gttgatggtctgttgactt

SEQ ID NO: 276306 - DNA, 19 bp, Homo sapiens
  siRNA target sequence for A2LP (NM_007245.2,2111-2129).
gccctgttgctgaacaagt

SEQ ID NO: 276307 - DNA, 19 bp, Homo sapiens
  siRNA target sequence for A2LP (NM_007245.2,2112-2130).
ccctgttgctgaacaagta

SEQ ID NO: 276308 - DNA, 19 bp, Homo sapiens
  siRNA target sequence for A2LP (NM_007245.2,2113-2131).
cctgttgctgaacaagtaa

SEQ ID NO: 276309 - DNA, 19 bp, Homo sapiens
  siRNA target sequence for A2LP (NM_007245.2,2114-2132).
ctgttgctgaacaagtaaa

SEQ ID NO: 276310 - DNA, 19 bp, Homo sapiens
  siRNA target sequence for A2LP (NM_007245.2,2141-2159).
cgttgaaccctaatgctaa

SEQ ID NO: 276311 - DNA, 19 bp, Homo sapiens
  siRNA target sequence for A2LP (NM_007245.2,2269-2287).
ggccagagtgggctataca

SEQ ID NO: 276312 - DNA, 19 bp, Homo sapiens
  siRNA target sequence for A2LP (NM_007245.2,2292-2310).
ccagtacatctcctacata

SEQ ID NO: 276313 - DNA, 19 bp, Homo sapiens
  siRNA target sequence for A2LP (NM_007245.2,2394-2412).
caagtaccggggagcaaaa

SEQ ID NO: 276314 - DNA, 19 bp, Homo sapiens
  siRNA target sequence for A2LP (NM_017492.2,1329-1347).
cgctggagacggaagatct

SEQ ID NO: 276315 - DNA, 19 bp, Homo sapiens
  siRNA target sequence for A2LP (NM_017492.2,1331-1349).
ctggagacggaagatcttt

SEQ ID NO: 276316 - DNA, 19 bp, Homo sapiens
  siRNA target sequence for A2LP (NM_017492.2,1336-1354).
gacggaagatcttttattt

SEQ ID NO: 276317 - DNA, 19 bp, Homo sapiens
  siRNA target sequence for A2LP (NM_148414.1,3295-3313).
gatgacaggattctatgta

SEQ ID NO: 276318 - DNA, 19 bp, Homo sapiens
  siRNA target sequence for A2LP (NM_148414.1,3381-3399).
gtcctcgctcagttgtgat

SEQ ID NO: 276319 - DNA, 19 bp, Homo sapiens
  siRNA target sequence for A2LP (NM_148415.1,3246-3264).
cccccaagttcaatctcat

SEQ ID NO: 276320 - DNA, 19 bp, Homo sapiens
  siRNA target sequence for AAAS (NM_015665.3,164-182).
gggtcaagtcaccctatat

SEQ ID NO: 276321 - DNA, 19 bp, Homo sapiens
  siRNA target sequence for AAAS (NM_015665.3,175-193).
ccctatatgagcacaataa

SEQ ID NO: 276322 - DNA, 19 bp, Homo sapiens
  siRNA target sequence for AAAS (NM_015665.3,200-218).
ggtgacgggcagtagctat

SEQ ID NO: 276323 - DNA, 19 bp, Homo sapiens
  siRNA target sequence for AAAS (NM_015665.3,262-280).
ctgtcctacaactgacaaa

SEQ ID NO: 276324 - DNA, 19 bp, Homo sapiens
  siRNA target sequence for AAAS (NM_015665.3,266-284).
cctacaactgacaaaggat

SEQ ID NO: 276325 - DNA, 19 bp, Homo sapiens
  siRNA target sequence for AAAS (NM_015665.3,345-363).
gagcaagtgtggaagagat

SEQ ID NO: 276326 - DNA, 19 bp, Homo sapiens
  siRNA target sequence for AAAS (NM_015665.3,356-374).
gaagagatgcatcaacatt

SEQ ID NO: 276327 - DNA, 19 bp, Homo sapiens
  siRNA target sequence for AAAS (NM_015665.3,377-395).
gcgtgatgtgggccttttt

SEQ ID NO: 276328 - DNA, 19 bp, Homo sapiens
  siRNA target sequence for AAAS (NM_015665.3,398-416).
ggtgctaaatgaaattgca

SEQ ID NO: 276329 - DNA, 19 bp, Homo sapiens
  siRNA target sequence for AAAS (NM_015665.3,555-573).
gcccaagtcacaaattggt

SEQ ID NO: 276330 - DNA, 19 bp, Homo sapiens
  siRNA target sequence for AAAS (NM_015665.3,642-660).
gactcagtccgtgtgtata

SEQ ID NO: 276331 - DNA, 19 bp, Homo sapiens
  siRNA target sequence for AAAS (NM_015665.3,644-662).
ctcagtccgtgtgtataat

SEQ ID NO: 276332 - DNA, 19 bp, Homo sapiens
  siRNA target sequence for AAAS (NM_015665.3,792-810).
gaccctacctccttgtcta

SEQ ID NO: 276333 - DNA, 19 bp, Homo sapiens
  siRNA target sequence for AAAS (NM_015665.3,1015-1033).
cagacggcagcaaaatcct

SEQ ID NO: 276334 - DNA, 19 bp, Homo sapiens
  siRNA target sequence for AAAS (NM_015665.3,1089-1107).
gagaggtggcctactctat

SEQ ID NO: 276335 - DNA, 19 bp, Homo sapiens
  siRNA target sequence for AAAS (NM_015665.3,1149-1167).
cgactgctgttcactgtat

SEQ ID NO: 276336 - DNA, 19 bp, Homo sapiens
  siRNA target sequence for AAAS (NM_015665.3,1381-1399).
caagggtacaggatggtaa

SEQ ID NO: 276337 - DNA, 19 bp, Homo sapiens
  siRNA target sequence for AAAS (NM_015665.3,1590-1608).
gcccagtttccacgtttta

SEQ ID NO: 276338 - DNA, 19 bp, Homo sapiens
  siRNA target sequence for AAAS (NM_015665.3,1645-1663).
ggggtggaggctctattca

SEQ ID NO: 276339 - DNA, 19 bp, Homo sapiens
  siRNA target sequence for AAAS (NM_015665.3,1646-1664).
gggtggaggctctattcat

SEQ ID NO: 276340 - DNA, 19 bp, Homo sapiens
  siRNA target sequence for AAAS (NM_015665.3,1648-1666).
gtggaggctctattcatga

SEQ ID NO: 276341 - DNA, 19 bp, Homo sapiens
  siRNA target sequence for ACRBP (NM_032489.2,162-180).
ctctcctaccgaatacgaa

SEQ ID NO: 276342 - DNA, 19 bp, Homo sapiens
  siRNA target sequence for ACRBP (NM_032489.2,267-285).
cgtccagctggaccaatat

SEQ ID NO: 276343 - DNA, 19 bp, Homo sapiens
  siRNA target sequence for ACRBP (NM_032489.2,447-465).
cactctcaaggagatagaa

SEQ ID NO: 276344 - DNA, 19 bp, Homo sapiens
  siRNA target sequence for ACRBP (NM_032489.2,810-828).
caagtttcactctgaatct

SEQ ID NO: 276345 - DNA, 19 bp, Homo sapiens
  siRNA target sequence for ACRBP (NM_032489.2,874-892).
gagtctactcctatgataa

SEQ ID NO: 276346 - DNA, 19 bp, Homo sapiens
  siRNA target sequence for ACRBP (NM_032489.2,878-896).
ctactcctatgataatgga

SEQ ID NO: 276347 - DNA, 19 bp, Homo sapiens
  siRNA target sequence for ACRBP (NM_032489.2,1024-1042).
ctggtgctgtgctattcga

SEQ ID NO: 276348 - DNA, 19 bp, Homo sapiens
  siRNA target sequence for ACRBP (NM_032489.2,1048-1066).
gagaatacctgcatcataa

SEQ ID NO: 276349 - DNA, 19 bp, Homo sapiens
  siRNA target sequence for ACRBP (NM_032489.2,1075-1093).
gccaaggcctggaagtaca

SEQ ID NO: 276350 - DNA, 19 bp, Homo sapiens
  siRNA target sequence for ACRBP (NM_032489.2,1305-1323).
ggtagggtccccagaatca

SEQ ID NO: 276351 - DNA, 19 bp, Homo sapiens
  siRNA target sequence for ACRBP (NM_032489.2,1328-1346).
gcttttacgggctggattt

SEQ ID NO: 276352 - DNA, 19 bp, Homo sapiens
  siRNA target sequence for ACRBP (NM_032489.2,1426-1444).
ctccagactgagttcctta

SEQ ID NO: 276353 - DNA, 19 bp, Homo sapiens
  siRNA target sequence for ACRBP (NM_032489.2,1458-1476).
ggatttccctaccaagatt

SEQ ID NO: 276354 - DNA, 19 bp, Homo sapiens
  siRNA target sequence for ACRBP (NM_032489.2,1473-1491).
gatttgtgacacagactat

SEQ ID NO: 276355 - DNA, 19 bp, Homo sapiens
  siRNA target sequence for ACRBP (NM_032489.2,1478-1496).
gtgacacagactatatcca

SEQ ID NO: 276356 - DNA, 19 bp, Homo sapiens
  siRNA target sequence for ACRBP (NM_032489.2,1574-1592).
gtctgcagaatgagactta

SEQ ID NO: 276357 - DNA, 19 bp, Homo sapiens
  siRNA target sequence for ACRBP (NM_032489.2,1599-1617).
gctgagccctggcaaaagt

SEQ ID NO: 276358 - DNA, 19 bp, Homo sapiens
  siRNA target sequence for ACTL6 (NM_016188.3,316-334).
catgtcgcccctcaagaat

SEQ ID NO: 276359 - DNA, 19 bp, Homo sapiens
  siRNA target sequence for ACTL6 (NM_016188.3,484-502).
gttcgagcagtacaacatt

SEQ ID NO: 276360 - DNA, 19 bp, Homo sapiens
  siRNA target sequence for ACTL6 (NM_016188.3,530-548).
gtgctcaccgcctttgcaa

SEQ ID NO: 276361 - DNA, 19 bp, Homo sapiens
  siRNA target sequence for ACTL6 (NM_016188.3,595-613).
cacggccattccagtacat

SEQ ID NO: 276362 - DNA, 19 bp, Homo sapiens
  siRNA target sequence for ACTL6 (NM_016188.3,813-831).
ggcataactacatgtgtaa

SEQ ID NO: 276363 - DNA, 19 bp, Homo sapiens
  siRNA target sequence for ACTL6 (NM_016188.3,814-832).
gcataactacatgtgtaat

SEQ ID NO: 276364 - DNA, 19 bp, Homo sapiens
  siRNA target sequence for ACTL6 (NM_016188.3,928-946).
gatgcccaatggctacaat

SEQ ID NO: 276365 - DNA, 19 bp, Homo sapiens
  siRNA target sequence for ACTL6 (NM_016188.3,931-949).
gcccaatggctacaataca

SEQ ID NO: 276366 - DNA, 19 bp, Homo sapiens
  siRNA target sequence for ACTL6 (NM_016188.3,1060-1078).
catcggcatgtgtgacatt

SEQ ID NO: 276367 - DNA, 19 bp, Homo sapiens
  siRNA target sequence for ACTL6 (NM_016188.3,1093-1111).
cctgtacgggagtgtcatt

SEQ ID NO: 276368 - DNA, 19 bp, Homo sapiens
  siRNA target sequence for ACTL6 (NM_016188.3,1185-1203).
cgagcatgcgactgaaact

SEQ ID NO: 276369 - DNA, 19 bp, Homo sapiens
  siRNA target sequence for ACTL6 (NM_016188.3,1188-1206).
gcatgcgactgaaactcat

SEQ ID NO: 276370 - DNA, 19 bp, Homo sapiens
  siRNA target sequence for ACTL6 (NM_016188.3,1189-1207).
catgcgactgaaactcatt

SEQ ID NO: 276371 - DNA, 19 bp, Homo sapiens
  siRNA target sequence for AF1Q (NM_006818.2,365-383).
gtgagtagccagtacagtt

SEQ ID NO: 276372 - DNA, 19 bp, Homo sapiens
  siRNA target sequence for AF1Q (NM_006818.2,373-391).
ccagtacagttcctttctt

SEQ ID NO: 276373 - DNA, 19 bp, Homo sapiens
  siRNA target sequence for AF1Q (NM_006818.2,437-455).
ggcctgggtctgtcagata

SEQ ID NO: 276374 - DNA, 19 bp, Homo sapiens
  siRNA target sequence for AF1Q (NM_006818.2,439-457).
cctgggtctgtcagataca

SEQ ID NO: 276375 - DNA, 19 bp, Homo sapiens
  siRNA target sequence for AMMECR1 (NM_015365.1,179-197).
gttgctgcggggtgaagaa

SEQ ID NO: 276376 - DNA, 19 bp, Homo sapiens
  siRNA target sequence for AMMECR1 (NM_015365.1,633-651).
cgagccctacccactgttt

SEQ ID NO: 276377 - DNA, 19 bp, Homo sapiens
  siRNA target sequence for AMMECR1 (NM_015365.1,663-681).
gattggtcgagacaaaaga

SEQ ID NO: 276378 - DNA, 19 bp, Homo sapiens
  siRNA target sequence for AMMECR1 (NM_015365.1,686-704).
gtggatgcataggtacttt

SEQ ID NO: 276379 - DNA, 19 bp, Homo sapiens
  siRNA target sequence for AMMECR1 (NM_015365.1,769-787).
cgttttcccccaatgacaa

SEQ ID NO: 276380 - DNA, 19 bp, Homo sapiens
  siRNA target sequence for AMMECR1 (NM_015365.1,821-839).
ctctgctcactaactttga

SEQ ID NO: 276381 - DNA, 19 bp, Homo sapiens
  siRNA target sequence for AMMECR1 (NM_015365.1,825-843).
gctcactaactttgaagat

SEQ ID NO: 276382 - DNA, 19 bp, Homo sapiens
  siRNA target sequence for AMMECR1 (NM_015365.1,870-888).
gggtgtacatggcattaga

SEQ ID NO: 276383 - DNA, 19 bp, Homo sapiens
  siRNA target sequence for AMMECR1 (NM_015365.1,954-972).
gcaaggatgggaccatata

SEQ ID NO: 276384 - DNA, 19 bp, Homo sapiens
  siRNA target sequence for AMMECR1 (NM_015365.1,958-976).
ggatgggaccatatacaga

SEQ ID NO: 276385 - DNA, 19 bp, Homo sapiens
  siRNA target sequence for AMMECR1 (NM_015365.1,967-985).
catatacagaccatagact

SEQ ID NO: 276386 - DNA, 19 bp, Homo sapiens
  siRNA target sequence for AMMECR1 (NM_015365.1,1008-1026).
caaagctccgattactaat

SEQ ID NO: 276387 - DNA, 19 bp, Homo sapiens
  siRNA target sequence for AMMECR1 (NM_015365.1,1012-1030).
gctccgattactaatgaat

SEQ ID NO: 276388 - DNA, 19 bp, Homo sapiens
  siRNA target sequence for AMMECR1 (NM_015365.1,1013-1031).
ctccgattactaatgaatt

SEQ ID NO: 276389 - DNA, 19 bp, Homo sapiens
  siRNA target sequence for AMMECR1 (NM_015365.1,1015-1033).
ccgattactaatgaattca

SEQ ID NO: 276390 - DNA, 19 bp, Homo sapiens
  siRNA target sequence for AMMECR1 (NM_015365.1,1050-1068).
gaccaggtatcgtagtgaa

SEQ ID NO: 276391 - DNA, 19 bp, Homo sapiens
  siRNA target sequence for AMMECR1 (NM_015365.1,1052-1070).
ccaggtatcgtagtgaaaa

SEQ ID NO: 276392 - DNA, 19 bp, Homo sapiens
  siRNA target sequence for AMMECR1 (NM_015365.1,1055-1073).
ggtatcgtagtgaaaagat

SEQ ID NO: 276393 - DNA, 19 bp, Homo sapiens
  siRNA target sequence for AMMECR1 (NM_015365.1,1076-1094).
ccctgagctatgctgaata

SEQ ID NO: 276394 - DNA, 19 bp, Homo sapiens
  siRNA target sequence for AMMECR1 (NM_015365.1,1144-1162).
cttccgccatacaaccatt

SEQ ID NO: 276395 - DNA, 19 bp, Homo sapiens
  siRNA target sequence for AMMECR1 (NM_015365.1,1147-1165).
ccgccatacaaccattatt

SEQ ID NO: 276396 - DNA, 19 bp, Homo sapiens
  siRNA target sequence for ANGPT4 (NM_015985.2,196-214).
gggctgcgagacacttgta

SEQ ID NO: 276397 - DNA, 19 bp, Homo sapiens
  siRNA target sequence for ANGPT4 (NM_015985.2,467-485).
caaatggcccagaatcaga

SEQ ID NO: 276398 - DNA, 19 bp, Homo sapiens
  siRNA target sequence for ANGPT4 (NM_015985.2,1096-1114).
catccagcgccgtgagaat

SEQ ID NO: 276399 - DNA, 19 bp, Homo sapiens
  siRNA target sequence for ANGPT4 (NM_015985.2,1278-1296).
cccagtacgaacatttcca

SEQ ID NO: 276400 - DNA, 19 bp, Homo sapiens
  siRNA target sequence for ANGPT4 (NM_015985.2,1428-1446).
gcaagtgtgcccaagtgat

SEQ ID NO: 276401 - DNA, 19 bp, Homo sapiens
  siRNA target sequence for ANGPT4 (NM_015985.2,1505-1523).
cacgctcccgacaacaagt

SEQ ID NO: 276402 - DNA, 19 bp, Homo sapiens
  siRNA target sequence for ANGPT4 (NM_015985.2,1508-1526).
gctcccgacaacaagtaca

SEQ ID NO: 276403 - DNA, 19 bp, Homo sapiens
  siRNA target sequence for ANGPT4 (NM_015985.2,1509-1527).
ctcccgacaacaagtacaa

SEQ ID NO: 276404 - DNA, 19 bp, Homo sapiens
  siRNA target sequence for ANGPT4 (NM_015985.2,1536-1554).
gcatccgctggcactactt

SEQ ID NO: 276405 - DNA, 19 bp, Homo sapiens
  siRNA target sequence for ANGPT4 (NM_015985.2,1577-1595).
cgtgcctctcgcatgatga

SEQ ID NO: 276406 - DNA, 19 bp, Homo sapiens
  siRNA target sequence for ANGPT4 (NM_015985.2,1578-1596).
gtgcctctcgcatgatgat

SEQ ID NO: 276407 - DNA, 19 bp, Homo sapiens
  siRNA target sequence for ANK3 (NM_001149.2,632-650).
cgcagagtgaagatgcaat

SEQ ID NO: 276408 - DNA, 19 bp, Homo sapiens
  siRNA target sequence for ANK3 (NM_001149.2,653-671).
ccggggacacagacaaata

SEQ ID NO: 276409 - DNA, 19 bp, Homo sapiens
  siRNA target sequence for ANK3 (NM_001149.2,654-672).
cggggacacagacaaatat

SEQ ID NO: 276410 - DNA, 19 bp, Homo sapiens
  siRNA target sequence for ANK3 (NM_001149.2,679-697).
ccacaggaccttaaggaat

SEQ ID NO: 276411 - DNA, 19 bp, Homo sapiens
  siRNA target sequence for ANK3 (NM_001149.2,725-743).
gttacatgggctttagtct

SEQ ID NO: 276412 - DNA, 19 bp, Homo sapiens
  siRNA target sequence for ANK3 (NM_001149.2,855-873).
caaagagcagcatctaaca

SEQ ID NO: 276413 - DNA, 19 bp, Homo sapiens
  siRNA target sequence for ANK3 (NM_001149.2,859-877).
gagcagcatctaacattca

SEQ ID NO: 276414 - DNA, 19 bp, Homo sapiens
  siRNA target sequence for ANK3 (NM_001149.2,878-896).
caagggaatttgattcaga

SEQ ID NO: 276415 - DNA, 19 bp, Homo sapiens
  siRNA target sequence for ANK3 (NM_001149.2,895-913).
gattctcttagacattaca

SEQ ID NO: 276416 - DNA, 19 bp, Homo sapiens
  siRNA target sequence for ANK3 (NM_001149.2,919-937).
gctgcagacaccttagaca

SEQ ID NO: 276417 - DNA, 19 bp, Homo sapiens
  siRNA target sequence for ANK3 (NM_001149.2,920-938).
ctgcagacaccttagacaa

SEQ ID NO: 276418 - DNA, 19 bp, Homo sapiens
  siRNA target sequence for ANK3 (NM_001149.2,923-941).
cagacaccttagacaatgt

SEQ ID NO: 276419 - DNA, 19 bp, Homo sapiens
  siRNA target sequence for ANK3 (NM_001149.2,929-947).
ccttagacaatgtcaatct

SEQ ID NO: 276420 - DNA, 19 bp, Homo sapiens
  siRNA target sequence for ANK3 (NM_001149.2,930-948).
cttagacaatgtcaatctt

SEQ ID NO: 276421 - DNA, 19 bp, Homo sapiens
  siRNA target sequence for ANK3 (NM_001149.2,934-952).
gacaatgtcaatcttgttt

SEQ ID NO: 276422 - DNA, 19 bp, Homo sapiens
  siRNA target sequence for ANK3 (NM_001149.2,1024-1042).
cgtcatcacgggatgagaa

SEQ ID NO: 276423 - DNA, 19 bp, Homo sapiens
  siRNA target sequence for ANK3 (NM_001149.2,1025-1043).
gtcatcacgggatgagaat

SEQ ID NO: 276424 - DNA, 19 bp, Homo sapiens
  siRNA target sequence for ANK3 (NM_001149.2,1027-1045).
catcacgggatgagaatca

SEQ ID NO: 276425 - DNA, 19 bp, Homo sapiens
  siRNA target sequence for ANK3 (NM_001149.2,1030-1048).
cacgggatgagaatcatca

SEQ ID NO: 276426 - DNA, 19 bp, Homo sapiens
  siRNA target sequence for ANK3 (NM_001149.2,1172-1190).
gtcctgcaggggcacaatt

SEQ ID NO: 276427 - DNA, 19 bp, Homo sapiens
  siRNA target sequence for ANK3 (NM_001149.2,1226-1244).
ggtccatgagaggaaaaga

SEQ ID NO: 276428 - DNA, 19 bp, Homo sapiens
  siRNA target sequence for ANK3 (NM_001149.2,1245-1263).
gagagaactcattgttctt

SEQ ID NO: 276429 - DNA, 19 bp, Homo sapiens
  siRNA target sequence for ANK3 (NM_001149.2,1283-1301).
cttggaaggagcatcagtt

SEQ ID NO: 276430 - DNA, 19 bp, Homo sapiens
  siRNA target sequence for ANK3 (NM_001149.2,1318-1336).
gatttaaccgagttactta

SEQ ID NO: 276431 - DNA, 19 bp, Homo sapiens
  siRNA target sequence for ANK3 (NM_001149.2,1394-1412).
ggattatcacgaaagattt

SEQ ID NO: 276432 - DNA, 19 bp, Homo sapiens
  siRNA target sequence for ANK3 (NM_001149.2,1427-1445).
cagtggtttcccggattaa

SEQ ID NO: 276433 - DNA, 19 bp, Homo sapiens
  siRNA target sequence for ANK3 (NM_001149.2,1494-1512).
cacagtgccccttgttcaa

SEQ ID NO: 276434 - DNA, 19 bp, Homo sapiens
  siRNA target sequence for ANK3 (NM_001149.2,1523-1541).
cagagggtgccctaactaa

SEQ ID NO: 276435 - DNA, 19 bp, Homo sapiens
  siRNA target sequence for ANK3 (NM_001149.2,1527-1545).
gggtgccctaactaaaaga

SEQ ID NO: 276436 - DNA, 19 bp, Homo sapiens
  siRNA target sequence for ANK3 (NM_001149.2,1528-1546).
ggtgccctaactaaaagaa

SEQ ID NO: 276437 - DNA, 19 bp, Homo sapiens
  siRNA target sequence for ANK3 (NM_001149.2,1529-1547).
gtgccctaactaaaagaat

SEQ ID NO: 276438 - DNA, 19 bp, Homo sapiens
  siRNA target sequence for ANK3 (NM_001149.2,1533-1551).
cctaactaaaagaattcga

SEQ ID NO: 276439 - DNA, 19 bp, Homo sapiens
  siRNA target sequence for ANK3 (NM_001149.2,1603-1621).
ggaaacaaagcaactttta

SEQ ID NO: 276440 - DNA, 19 bp, Homo sapiens
  siRNA target sequence for ANK3 (NM_001149.2,1646-1664).
gaagacggaaattccataa

SEQ ID NO: 276441 - DNA, 19 bp, Homo sapiens
  siRNA target sequence for ANK3 (NM_001149.2,1709-1727).
gtgtatccaatggatacaa

SEQ ID NO: 276442 - DNA, 19 bp, Homo sapiens
  siRNA target sequence for ANK3 (NM_001149.2,1749-1767).
gcgtcttctctgtagcatt

SEQ ID NO: 276443 - DNA, 19 bp, Homo sapiens
  siRNA target sequence for ANK3 (NM_001149.2,1750-1768).
cgtcttctctgtagcatta

SEQ ID NO: 276444 - DNA, 19 bp, Homo sapiens
  siRNA target sequence for ANK3 (NM_001149.2,1811-1829).
caactcctttgacgtttat

SEQ ID NO: 276445 - DNA, 19 bp, Homo sapiens
  siRNA target sequence for ANK3 (NM_001149.2,1910-1928).
ggttagccacgcaactgta

SEQ ID NO: 276446 - DNA, 19 bp, Homo sapiens
  siRNA target sequence for ANK3 (NM_001149.2,1983-2001).
gaatgatcccgtagaatct

SEQ ID NO: 276447 - DNA, 19 bp, Homo sapiens
  siRNA target sequence for ANK3 (NM_001149.2,2076-2094).
cgcaagaagcaaagatatt

SEQ ID NO: 276448 - DNA, 19 bp, Homo sapiens
  siRNA target sequence for ANK3 (NM_001149.2,2303-2321).
cagcggtttgcaacttaaa

SEQ ID NO: 276449 - DNA, 19 bp, Homo sapiens
  siRNA target sequence for ANK3 (NM_001149.2,2305-2323).
gcggtttgcaacttaaata

SEQ ID NO: 276450 - DNA, 19 bp, Homo sapiens
  siRNA target sequence for ANK3 (NM_001149.2,2306-2324).
cggtttgcaacttaaatat

SEQ ID NO: 276451 - DNA, 19 bp, Homo sapiens
  siRNA target sequence for ANK3 (NM_001149.2,2335-2353).
gcacataaaaagattgaga

SEQ ID NO: 276452 - DNA, 19 bp, Homo sapiens
  siRNA target sequence for ANK3 (NM_001149.2,2336-2354).
cacataaaaagattgagaa

SEQ ID NO: 276453 - DNA, 19 bp, Homo sapiens
  siRNA target sequence for ANK3 (NM_001149.2,2373-2391).
cttcgcatccttagcttta

SEQ ID NO: 276454 - DNA, 19 bp, Homo sapiens
  siRNA target sequence for ANK3 (NM_001149.2,2376-2394).
cgcatccttagctttacgt

SEQ ID NO: 276455 - DNA, 19 bp, Homo sapiens
  siRNA target sequence for ANK3 (NM_001149.2,2377-2395).
gcatccttagctttacgta

SEQ ID NO: 276456 - DNA, 19 bp, Homo sapiens
  siRNA target sequence for ANK3 (NM_001149.2,2378-2396).
catccttagctttacgtaa

SEQ ID NO: 276457 - DNA, 19 bp, Homo sapiens
  siRNA target sequence for ANK3 (NM_001149.2,2440-2458).
ccatgtgaacggacagata

SEQ ID NO: 276458 - DNA, 19 bp, Homo sapiens
  siRNA target sequence for ANK3 (NM_001149.2,2441-2459).
catgtgaacggacagatat

SEQ ID NO: 276459 - DNA, 19 bp, Homo sapiens
  siRNA target sequence for ANK3 (NM_001149.2,2478-2496).
cgatcacctgggacttagt

SEQ ID NO: 276460 - DNA, 19 bp, Homo sapiens
  siRNA target sequence for ANK3 (NM_001149.2,2479-2497).
gatcacctgggacttagtt

SEQ ID NO: 276461 - DNA, 19 bp, Homo sapiens
  siRNA target sequence for ANK3 (NM_001149.2,2506-2524).
ctggcaagggaactgaatt

SEQ ID NO: 276462 - DNA, 19 bp, Homo sapiens
  siRNA target sequence for ANK3 (NM_001149.2,2608-2626).
gttaccagagacggaaaaa

SEQ ID NO: 276463 - DNA, 19 bp, Homo sapiens
  siRNA target sequence for ANK3 (NM_001149.2,2648-2666).
cttcggtcttgacaaaaat

SEQ ID NO: 276464 - DNA, 19 bp, Homo sapiens
  siRNA target sequence for ANK3 (NM_001149.2,2655-2673).
cttgacaaaaattaatcga

SEQ ID NO: 276465 - DNA, 19 bp, Homo sapiens
  siRNA target sequence for ANK3 (NM_001149.2,2691-2709).
gctagaaggaccaatattt

SEQ ID NO: 276466 - DNA, 19 bp, Homo sapiens
  siRNA target sequence for ANK3 (NM_001149.2,2695-2713).
gaaggaccaatatttgatt

SEQ ID NO: 276467 - DNA, 19 bp, Homo sapiens
  siRNA target sequence for ANK3 (NM_001149.2,2770-2788).
cctgttgatggttatcctt

SEQ ID NO: 276468 - DNA, 19 bp, Homo sapiens
  siRNA target sequence for ANK3 (NM_001149.2,2840-2858).
cccctttccagcaagatga

SEQ ID NO: 276469 - DNA, 19 bp, Homo sapiens
  siRNA target sequence for ANK3 (NM_001149.2,2928-2946).
gccttcccaggggaacata

SEQ ID NO: 276470 - DNA, 19 bp, Homo sapiens
  siRNA target sequence for ANK3 (NM_001149.2,2930-2948).
cttcccaggggaacataga

SEQ ID NO: 276471 - DNA, 19 bp, Homo sapiens
  siRNA target sequence for ANK3 (NM_001149.2,3066-3084).
ccagttggagaatgtatgt

SEQ ID NO: 276472 - DNA, 19 bp, Homo sapiens
  siRNA target sequence for ANK3 (NM_001149.2,3093-3111).
gcagaatgagacatcaagt

SEQ ID NO: 276473 - DNA, 19 bp, Homo sapiens
  siRNA target sequence for ANK3 (NM_001149.2,3102-3120).
gacatcaagtggaaaccta

SEQ ID NO: 276474 - DNA, 19 bp, Homo sapiens
  siRNA target sequence for ANK3 (NM_001149.2,3129-3147).
cgctcaagctcgaagagta

SEQ ID NO: 276475 - DNA, 19 bp, Homo sapiens
  siRNA target sequence for ANK3 (NM_001149.2,3130-3148).
gctcaagctcgaagagtaa

SEQ ID NO: 276476 - DNA, 19 bp, Homo sapiens
  siRNA target sequence for ANK3 (NM_001149.2,3186-3204).
ccagtgtagagattccatt

SEQ ID NO: 276477 - DNA, 19 bp, Homo sapiens
  siRNA target sequence for ANK3 (NM_001149.2,3187-3205).
cagtgtagagattccatta

SEQ ID NO: 276478 - DNA, 19 bp, Homo sapiens
  siRNA target sequence for ANK3 (NM_001149.2,3200-3218).
ccattacctcatatctcaa

SEQ ID NO: 276479 - DNA, 19 bp, Homo sapiens
  siRNA target sequence for ANK3 (NM_001149.2,3386-3404).
caccactagcagcatatca

SEQ ID NO: 276480 - DNA, 19 bp, Homo sapiens
  siRNA target sequence for ANK3 (NM_001149.2,3391-3409).
ctagcagcatatcagaaat

SEQ ID NO: 276481 - DNA, 19 bp, Homo sapiens
  siRNA target sequence for ANK3 (NM_001149.2,3395-3413).
cagcatatcagaaatctct

SEQ ID NO: 276482 - DNA, 19 bp, Homo sapiens
  siRNA target sequence for ANK3 (NM_001149.2,3425-3443).
gcaagcttataatagaaga

SEQ ID NO: 276483 - DNA, 19 bp, Homo sapiens
  siRNA target sequence for ANK3 (NM_001149.2,3457-3475).
gtgcctgtcagtatgaaaa

SEQ ID NO: 276484 - DNA, 19 bp, Homo sapiens
  siRNA target sequence for ANK3 (NM_001149.2,3568-3586).
ggttttaaggtgaaaacga

SEQ ID NO: 276485 - DNA, 19 bp, Homo sapiens
  siRNA target sequence for ANK3 (NM_020987.2,285-303).
gtcccgggatcggaagaaa

SEQ ID NO: 276486 - DNA, 19 bp, Homo sapiens
  siRNA target sequence for ANK3 (NM_020987.2,287-305).
cccgggatcggaagaaaaa

SEQ ID NO: 276487 - DNA, 19 bp, Homo sapiens
  siRNA target sequence for ANK3 (NM_020987.2,289-307).
cgggatcggaagaaaaagt

SEQ ID NO: 276488 - DNA, 19 bp, Homo sapiens
  siRNA target sequence for ANK3 (NM_020987.2,291-309).
ggatcggaagaaaaagtct

SEQ ID NO: 276489 - DNA, 19 bp, Homo sapiens
  siRNA target sequence for ANK3 (NM_020987.2,308-326).
ctgatgccaatgcaagtta

SEQ ID NO: 276490 - DNA, 19 bp, Homo sapiens
  siRNA target sequence for ANK3 (NM_020987.2,313-331).
gccaatgcaagttacttaa

SEQ ID NO: 276491 - DNA, 19 bp, Homo sapiens
  siRNA target sequence for ANK3 (NM_020987.2,360-378).
ggccctcgactacataaaa

SEQ ID NO: 276492 - DNA, 19 bp, Homo sapiens
  siRNA target sequence for ANK3 (NM_020987.2,361-379).
gccctcgactacataaaaa

SEQ ID NO: 276493 - DNA, 19 bp, Homo sapiens
  siRNA target sequence for ANK3 (NM_020987.2,362-380).
ccctcgactacataaaaaa

SEQ ID NO: 276494 - DNA, 19 bp, Homo sapiens
  siRNA target sequence for ANK3 (NM_020987.2,363-381).
cctcgactacataaaaaat

SEQ ID NO: 276495 - DNA, 19 bp, Homo sapiens
  siRNA target sequence for ANK3 (NM_020987.2,366-384).
cgactacataaaaaatgga

SEQ ID NO: 276496 - DNA, 19 bp, Homo sapiens
  siRNA target sequence for ANK3 (NM_020987.2,426-444).
ccaccttgcttccaaagaa

SEQ ID NO: 276497 - DNA, 19 bp, Homo sapiens
  siRNA target sequence for ANK3 (NM_020987.2,437-455).
ccaaagaaggccatgtaga

SEQ ID NO: 276498 - DNA, 19 bp, Homo sapiens
  siRNA target sequence for ANK3 (NM_020987.2,521-539).
cattgcacatcgcatcttt

SEQ ID NO: 276499 - DNA, 19 bp, Homo sapiens
  siRNA target sequence for ANK3 (NM_020987.2,545-563).
ggcaagcagaggtggtaaa

SEQ ID NO: 276500 - DNA, 19 bp, Homo sapiens
  siRNA target sequence for ANK3 (NM_020987.2,559-577).
gtaaaagtcttggttacaa

SEQ ID NO: 276501 - DNA, 19 bp, Homo sapiens
  siRNA target sequence for ANK3 (NM_020987.2,610-628).
ggtttcacgccattgtata

SEQ ID NO: 276502 - DNA, 19 bp, Homo sapiens
  siRNA target sequence for ANK3 (NM_020987.2,940-958).
gtagccacgttgctgttaa

SEQ ID NO: 276503 - DNA, 19 bp, Homo sapiens
  siRNA target sequence for ANK3 (NM_020987.2,1004-1022).
ctttacatgttgcatcaaa

SEQ ID NO: 276504 - DNA, 19 bp, Homo sapiens
  siRNA target sequence for ANK3 (NM_020987.2,1053-1071).
gctcgatcgaggagctaaa

SEQ ID NO: 276505 - DNA, 19 bp, Homo sapiens
  siRNA target sequence for ANK3 (NM_020987.2,1054-1072).
ctcgatcgaggagctaaaa

SEQ ID NO: 276506 - DNA, 19 bp, Homo sapiens
  siRNA target sequence for ANK3 (NM_020987.2,1168-1186).
cccattctttcaaaaacca

SEQ ID NO: 276507 - DNA, 19 bp, Homo sapiens
  siRNA target sequence for ANK3 (NM_020987.2,1213-1231).
gccacacaaggggatcatt

SEQ ID NO: 276508 - DNA, 19 bp, Homo sapiens
  siRNA target sequence for ANK3 (NM_020987.2,1315-1333).
gcccactgtggccattaca

SEQ ID NO: 276509 - DNA, 19 bp, Homo sapiens
  siRNA target sequence for ANK3 (NM_020987.2,1348-1366).
ctcttggataagaaagcta

SEQ ID NO: 276510 - DNA, 19 bp, Homo sapiens
  siRNA target sequence for ANK3 (NM_020987.2,1392-1410).
ctttacccctcttcatatt

SEQ ID NO: 276511 - DNA, 19 bp, Homo sapiens
  siRNA target sequence for ANK3 (NM_020987.2,1419-1437).
gaagaatcgaattaaagta

SEQ ID NO: 276512 - DNA, 19 bp, Homo sapiens
  siRNA target sequence for ANK3 (NM_020987.2,1518-1536).
catggggcatgtaaatatt

SEQ ID NO: 276513 - DNA, 19 bp, Homo sapiens
  siRNA target sequence for ANK3 (NM_020987.2,1521-1539).
ggggcatgtaaatattgta

SEQ ID NO: 276514 - DNA, 19 bp, Homo sapiens
  siRNA target sequence for ANK3 (NM_020987.2,1522-1540).
gggcatgtaaatattgtat

SEQ ID NO: 276515 - DNA, 19 bp, Homo sapiens
  siRNA target sequence for ANK3 (NM_020987.2,1567-1585).
ccaaacaccaccaatgtga

SEQ ID NO: 276516 - DNA, 19 bp, Homo sapiens
  siRNA target sequence for ANK3 (NM_020987.2,1721-1739).
ggaaagcagacatagtaca

SEQ ID NO: 276517 - DNA, 19 bp, Homo sapiens
  siRNA target sequence for ANK3 (NM_020987.2,1752-1770).
gcaaggggcatctccaaat

SEQ ID NO: 276518 - DNA, 19 bp, Homo sapiens
  siRNA target sequence for ANK3 (NM_020987.2,1848-1866).
ggatcatggagcgtcttta

SEQ ID NO: 276519 - DNA, 19 bp, Homo sapiens
  siRNA target sequence for ANK3 (NM_020987.2,1852-1870).
catggagcgtctttatcta

SEQ ID NO: 276520 - DNA, 19 bp, Homo sapiens
  siRNA target sequence for ANK3 (NM_020987.2,1855-1873).
ggagcgtctttatctataa

SEQ ID NO: 276521 - DNA, 19 bp, Homo sapiens
  siRNA target sequence for ANK3 (NM_020987.2,1858-1876).
gcgtctttatctataacaa

SEQ ID NO: 276522 - DNA, 19 bp, Homo sapiens
  siRNA target sequence for ANK3 (NM_020987.2,1903-1921).
gtggcagcaaaatatggaa

SEQ ID NO: 276523 - DNA, 19 bp, Homo sapiens
  siRNA target sequence for ANK3 (NM_020987.2,2002-2020).
gtagctgcacattacgata

SEQ ID NO: 276524 - DNA, 19 bp, Homo sapiens
  siRNA target sequence for ANK3 (NM_020987.2,2006-2024).
ctgcacattacgataatca

SEQ ID NO: 276525 - DNA, 19 bp, Homo sapiens
  siRNA target sequence for ANK3 (NM_020987.2,2008-2026).
gcacattacgataatcaga

SEQ ID NO: 276526 - DNA, 19 bp, Homo sapiens
  siRNA target sequence for ANK3 (NM_020987.2,2009-2027).
cacattacgataatcagaa

SEQ ID NO: 276527 - DNA, 19 bp, Homo sapiens
  siRNA target sequence for ANK3 (NM_020987.2,2068-2086).
gcagccgcaaagaatggtt

SEQ ID NO: 276528 - DNA, 19 bp, Homo sapiens
  siRNA target sequence for ANK3 (NM_020987.2,2069-2087).
cagccgcaaagaatggtta

SEQ ID NO: 276529 - DNA, 19 bp, Homo sapiens
  siRNA target sequence for ANK3 (NM_020987.2,2071-2089).
gccgcaaagaatggttata

SEQ ID NO: 276530 - DNA, 19 bp, Homo sapiens
  siRNA target sequence for ANK3 (NM_020987.2,2132-2150).
cgacaactctgctggaata

SEQ ID NO: 276531 - DNA, 19 bp, Homo sapiens
  siRNA target sequence for ANK3 (NM_020987.2,2168-2186).
cagttacccggcaaggaat

SEQ ID NO: 276532 - DNA, 19 bp, Homo sapiens
  siRNA target sequence for ANK3 (NM_020987.2,2359-2377).
gtggacgcccagacaaaga

SEQ ID NO: 276533 - DNA, 19 bp, Homo sapiens
  siRNA target sequence for ANK3 (NM_020987.2,2443-2461).
cagcattctgcaaaagtta

SEQ ID NO: 276534 - DNA, 19 bp, Homo sapiens
  siRNA target sequence for ANK3 (NM_020987.2,2458-2476).
gttaatgccaaaacaaaga

SEQ ID NO: 276535 - DNA, 19 bp, Homo sapiens
  siRNA target sequence for ANK3 (NM_020987.2,2480-2498).
ggtatacgccattacatca

SEQ ID NO: 276536 - DNA, 19 bp, Homo sapiens
  siRNA target sequence for ANK3 (NM_020987.2,2481-2499).
gtatacgccattacatcaa

SEQ ID NO: 276537 - DNA, 19 bp, Homo sapiens
  siRNA target sequence for ANK3 (NM_020987.2,2508-2526).
gcaggggcatacgcatata

SEQ ID NO: 276538 - DNA, 19 bp, Homo sapiens
  siRNA target sequence for ANK3 (NM_020987.2,2509-2527).
caggggcatacgcatataa

SEQ ID NO: 276539 - DNA, 19 bp, Homo sapiens
  siRNA target sequence for ANK3 (NM_020987.2,2511-2529).
ggggcatacgcatataata

SEQ ID NO: 276540 - DNA, 19 bp, Homo sapiens
  siRNA target sequence for ANK3 (NM_020987.2,2512-2530).
gggcatacgcatataataa

SEQ ID NO: 276541 - DNA, 19 bp, Homo sapiens
  siRNA target sequence for ANK3 (NM_020987.2,2513-2531).
ggcatacgcatataataaa

SEQ ID NO: 276542 - DNA, 19 bp, Homo sapiens
  siRNA target sequence for ANK3 (NM_020987.2,2514-2532).
gcatacgcatataataaat

SEQ ID NO: 276543 - DNA, 19 bp, Homo sapiens
  siRNA target sequence for ANK3 (NM_020987.2,2519-2537).
cgcatataataaatgtctt

SEQ ID NO: 276544 - DNA, 19 bp, Homo sapiens
  siRNA target sequence for ANK3 (NM_020987.2,2547-2565).
caacgcctcccccaatgaa

SEQ ID NO: 276545 - DNA, 19 bp, Homo sapiens
  siRNA target sequence for ANK3 (NM_020987.2,2559-2577).
caatgaactcactgtgaat

SEQ ID NO: 276546 - DNA, 19 bp, Homo sapiens
  siRNA target sequence for ANK3 (NM_020987.2,2653-2671).
gagaccatgaccacaacta

SEQ ID NO: 276547 - DNA, 19 bp, Homo sapiens
  siRNA target sequence for ANK3 (NM_020987.2,2702-2720).
cagaaacgatgaatgaagt

SEQ ID NO: 276548 - DNA, 19 bp, Homo sapiens
  siRNA target sequence for ANK3 (NM_020987.2,2732-2750).
ctgatgatgaagttcgtaa

SEQ ID NO: 276549 - DNA, 19 bp, Homo sapiens
  siRNA target sequence for ANK3 (NM_020987.2,2769-2787).
gctcagtgatggcgaatat

SEQ ID NO: 276550 - DNA, 19 bp, Homo sapiens
  siRNA target sequence for ANK3 (NM_020987.2,2770-2788).
ctcagtgatggcgaatata

SEQ ID NO: 276551 - DNA, 19 bp, Homo sapiens
  siRNA target sequence for ANK3 (NM_020987.2,2781-2799).
cgaatatatctcagatgtt

SEQ ID NO: 276552 - DNA, 19 bp, Homo sapiens
  siRNA target sequence for ANK3 (NM_020987.2,4710-4728).
gacaacagctccgattaca

SEQ ID NO: 276553 - DNA, 19 bp, Homo sapiens
  siRNA target sequence for ANK3 (NM_020987.2,4746-4764).
gtcaggcttcacttcctta

SEQ ID NO: 276554 - DNA, 19 bp, Homo sapiens
  siRNA target sequence for ANK3 (NM_020987.2,4752-4770).
cttcacttccttatcaagt

SEQ ID NO: 276555 - DNA, 19 bp, Homo sapiens
  siRNA target sequence for ANK3 (NM_020987.2,4787-4805).
catcagcttctccgttaaa

SEQ ID NO: 276556 - DNA, 19 bp, Homo sapiens
  siRNA target sequence for ANK3 (NM_020987.2,4792-4810).
gcttctccgttaaaatcaa

SEQ ID NO: 276557 - DNA, 19 bp, Homo sapiens
  siRNA target sequence for ANK3 (NM_020987.2,4793-4811).
cttctccgttaaaatcaat

SEQ ID NO: 276558 - DNA, 19 bp, Homo sapiens
  siRNA target sequence for ANK3 (NM_020987.2,4798-4816).
ccgttaaaatcaatatggt

SEQ ID NO: 276559 - DNA, 19 bp, Homo sapiens
  siRNA target sequence for ANK3 (NM_020987.2,4823-4841).
cgacaccttctccaatcaa

SEQ ID NO: 276560 - DNA, 19 bp, Homo sapiens
  siRNA target sequence for ANK3 (NM_020987.2,4852-4870).
ggcgcgtcaactacatctt

SEQ ID NO: 276561 - DNA, 19 bp, Homo sapiens
  siRNA target sequence for ANK3 (NM_020987.2,4854-4872).
cgcgtcaactacatcttca

SEQ ID NO: 276562 - DNA, 19 bp, Homo sapiens
  siRNA target sequence for ANK3 (NM_020987.2,4871-4889).
cagttaaatccattagtga

SEQ ID NO: 276563 - DNA, 19 bp, Homo sapiens
  siRNA target sequence for ANK3 (NM_020987.2,4888-4906).
gacgtggcatctccaatta

SEQ ID NO: 276564 - DNA, 19 bp, Homo sapiens
  siRNA target sequence for ANK3 (NM_020987.2,4890-4908).
cgtggcatctccaattaga

SEQ ID NO: 276565 - DNA, 19 bp, Homo sapiens
  siRNA target sequence for ANK3 (NM_020987.2,4919-4937).
caatgtcttcgccgataaa

SEQ ID NO: 276566 - DNA, 19 bp, Homo sapiens
  siRNA target sequence for ANK3 (NM_020987.2,4923-4941).
gtcttcgccgataaaaact

SEQ ID NO: 276567 - DNA, 19 bp, Homo sapiens
  siRNA target sequence for ANK3 (NM_020987.2,4925-4943).
cttcgccgataaaaactgt

SEQ ID NO: 276568 - DNA, 19 bp, Homo sapiens
  siRNA target sequence for ANK3 (NM_020987.2,4947-4965).
gtcacaatctccatacaat

SEQ ID NO: 276569 - DNA, 19 bp, Homo sapiens
  siRNA target sequence for ANK3 (NM_020987.2,4949-4967).
cacaatctccatacaatat

SEQ ID NO: 276570 - DNA, 19 bp, Homo sapiens
  siRNA target sequence for ANK3 (NM_020987.2,4957-4975).
ccatacaatatccaagttt

SEQ ID NO: 276571 - DNA, 19 bp, Homo sapiens
  siRNA target sequence for ANK3 (NM_020987.2,5009-5027).
cggaagctacgcccttaaa

SEQ ID NO: 276572 - DNA, 19 bp, Homo sapiens
  siRNA target sequence for ANK3 (NM_020987.2,5010-5028).
ggaagctacgcccttaaaa

SEQ ID NO: 276573 - DNA, 19 bp, Homo sapiens
  siRNA target sequence for ANK3 (NM_020987.2,5029-5047).
gggctggcatccaattcta

SEQ ID NO: 276574 - DNA, 19 bp, Homo sapiens
  siRNA target sequence for ANK3 (NM_020987.2,5034-5052).
ggcatccaattctacgttt

SEQ ID NO: 276575 - DNA, 19 bp, Homo sapiens
  siRNA target sequence for ANK3 (NM_020987.2,5035-5053).
gcatccaattctacgtttt

SEQ ID NO: 276576 - DNA, 19 bp, Homo sapiens
  siRNA target sequence for ANK3 (NM_020987.2,5075-5093).
ctacagcagggtctctttt

SEQ ID NO: 276577 - DNA, 19 bp, Homo sapiens
  siRNA target sequence for ANK3 (NM_020987.2,5089-5107).
cttttggagaggtcatcaa

SEQ ID NO: 276578 - DNA, 19 bp, Homo sapiens
  siRNA target sequence for ANK3 (NM_020987.2,5162-5180).
gtttgccatttaagtcaat

SEQ ID NO: 276579 - DNA, 19 bp, Homo sapiens
  siRNA target sequence for ANK3 (NM_020987.2,5166-5184).
gccatttaagtcaattatt

SEQ ID NO: 276580 - DNA, 19 bp, Homo sapiens
  siRNA target sequence for ANK3 (NM_020987.2,5191-5209).
gcagcaccgctaatatctt

SEQ ID NO: 276581 - DNA, 19 bp, Homo sapiens
  siRNA target sequence for ANK3 (NM_020987.2,5256-5274).
catttcatcagccaaaatt

SEQ ID NO: 276582 - DNA, 19 bp, Homo sapiens
  siRNA target sequence for ANK3 (NM_020987.2,5329-5347).
gtagcattagtcaatggat

SEQ ID NO: 276583 - DNA, 19 bp, Homo sapiens
  siRNA target sequence for ANK3 (NM_020987.2,5333-5351).
cattagtcaatggatctat

SEQ ID NO: 276584 - DNA, 19 bp, Homo sapiens
  siRNA target sequence for ANK3 (NM_020987.2,5520-5538).
cccactcaggtcatatgtt

SEQ ID NO: 276585 - DNA, 19 bp, Homo sapiens
  siRNA target sequence for ANK3 (NM_020987.2,5521-5539).
ccactcaggtcatatgttt

SEQ ID NO: 276586 - DNA, 19 bp, Homo sapiens
  siRNA target sequence for ANK3 (NM_020987.2,5545-5563).
gcaccatcagcttttcagt

SEQ ID NO: 276587 - DNA, 19 bp, Homo sapiens
  siRNA target sequence for ANK3 (NM_020987.2,5580-5598).
cgcaagtgcactctataca

SEQ ID NO: 276588 - DNA, 19 bp, Homo sapiens
  siRNA target sequence for ANK3 (NM_020987.2,5601-5619).
ccttgggtcgtcaatatct

SEQ ID NO: 276589 - DNA, 19 bp, Homo sapiens
  siRNA target sequence for ANK3 (NM_020987.2,5639-5657).
cttcatcaattataacagt

SEQ ID NO: 276590 - DNA, 19 bp, Homo sapiens
  siRNA target sequence for ANK3 (NM_020987.2,5660-5678).
cagtatactctgtagtcaa

SEQ ID NO: 276591 - DNA, 19 bp, Homo sapiens
  siRNA target sequence for ANK3 (NM_020987.2,5703-5721).
gaaacttccagactctaat

SEQ ID NO: 276592 - DNA, 19 bp, Homo sapiens
  siRNA target sequence for ANK3 (NM_020987.2,5713-5731).
gactctaattcatttacaa

SEQ ID NO: 276593 - DNA, 19 bp, Homo sapiens
  siRNA target sequence for ANK3 (NM_020987.2,5755-5773).
cccattaaaacattgacta

SEQ ID NO: 276594 - DNA, 19 bp, Homo sapiens
  siRNA target sequence for ANK3 (NM_020987.2,5804-5822).
gaacttcatctccagttaa

SEQ ID NO: 276595 - DNA, 19 bp, Homo sapiens
  siRNA target sequence for ANK3 (NM_020987.2,5813-5831).
ctccagttaagtcatcttt

SEQ ID NO: 276596 - DNA, 19 bp, Homo sapiens
  siRNA target sequence for ANK3 (NM_020987.2,5842-5860).
ccctctgcccttaagttgt

SEQ ID NO: 276597 - DNA, 19 bp, Homo sapiens
  siRNA target sequence for ANK3 (NM_020987.2,5879-5897).
cttccagtcaggagatact

SEQ ID NO: 276598 - DNA, 19 bp, Homo sapiens
  siRNA target sequence for ANK3 (NM_020987.2,5883-5901).
cagtcaggagatactaaaa

SEQ ID NO: 276599 - DNA, 19 bp, Homo sapiens
  siRNA target sequence for ANK3 (NM_020987.2,5931-5949).
gcggatgaccgcaatacta

SEQ ID NO: 276600 - DNA, 19 bp, Homo sapiens
  siRNA target sequence for ANK3 (NM_020987.2,5933-5951).
ggatgaccgcaatactaca

SEQ ID NO: 276601 - DNA, 19 bp, Homo sapiens
  siRNA target sequence for ANK3 (NM_020987.2,6048-6066).
ggaagacttagtgaaagtt

SEQ ID NO: 276602 - DNA, 19 bp, Homo sapiens
  siRNA target sequence for ANK3 (NM_020987.2,6064-6082).
gttagtgaaatccttaaaa

SEQ ID NO: 276603 - DNA, 19 bp, Homo sapiens
  siRNA target sequence for ANK3 (NM_020987.2,6256-6274).
gccgcctccgaaaaggatt

SEQ ID NO: 276604 - DNA, 19 bp, Homo sapiens
  siRNA target sequence for ANK3 (NM_020987.2,6258-6276).
cgcctccgaaaaggattat

SEQ ID NO: 276605 - DNA, 19 bp, Homo sapiens
  siRNA target sequence for ANK3 (NM_020987.2,6263-6281).
ccgaaaaggattataactt

SEQ ID NO: 276606 - DNA, 19 bp, Homo sapiens
  siRNA target sequence for ANK3 (NM_020987.2,6289-6307).
gttattgattacctaacaa

SEQ ID NO: 276607 - DNA, 19 bp, Homo sapiens
  siRNA target sequence for ANK3 (NM_020987.2,6295-6313).
gattacctaacaaatgata

SEQ ID NO: 276608 - DNA, 19 bp, Homo sapiens
  siRNA target sequence for ANK3 (NM_020987.2,6320-6338).
gtagttcactgacaaactt

SEQ ID NO: 276609 - DNA, 19 bp, Homo sapiens
  siRNA target sequence for ANK3 (NM_020987.2,6410-6428).
ctttgcaggaacacaaact

SEQ ID NO: 276610 - DNA, 19 bp, Homo sapiens
  siRNA target sequence for ANK3 (NM_020987.2,6453-6471).
gacttccacctctgagaaa

SEQ ID NO: 276611 - DNA, 19 bp, Homo sapiens
  siRNA target sequence for ANK3 (NM_020987.2,6539-6557).
ctcaacacgaccaagataa

SEQ ID NO: 276612 - DNA, 19 bp, Homo sapiens
  siRNA target sequence for ANK3 (NM_020987.2,6673-6691).
gtcattacagaaacaagaa

SEQ ID NO: 276613 - DNA, 19 bp, Homo sapiens
  siRNA target sequence for ANK3 (NM_020987.2,6763-6781).
cctgtgtcacctaaacctt

SEQ ID NO: 276614 - DNA, 19 bp, Homo sapiens
  siRNA target sequence for ANK3 (NM_020987.2,6782-6800).
cacctacttttatggaatt

SEQ ID NO: 276615 - DNA, 19 bp, Homo sapiens
  siRNA target sequence for ANK3 (NM_020987.2,6810-6828).
gcccaccacctctagtatt

SEQ ID NO: 276616 - DNA, 19 bp, Homo sapiens
  siRNA target sequence for ANK3 (NM_020987.2,6811-6829).
cccaccacctctagtatta

SEQ ID NO: 276617 - DNA, 19 bp, Homo sapiens
  siRNA target sequence for ANK3 (NM_020987.2,6813-6831).
caccacctctagtattaaa

SEQ ID NO: 276618 - DNA, 19 bp, Homo sapiens
  siRNA target sequence for ANK3 (NM_020987.2,6815-6833).
ccacctctagtattaaaga

SEQ ID NO: 276619 - DNA, 19 bp, Homo sapiens
  siRNA target sequence for ANK3 (NM_020987.2,6877-6895).
gaccacaatcgggttttaa

SEQ ID NO: 276620 - DNA, 19 bp, Homo sapiens
  siRNA target sequence for ANK3 (NM_020987.2,6880-6898).
cacaatcgggttttaagca

SEQ ID NO: 276621 - DNA, 19 bp, Homo sapiens
  siRNA target sequence for ANK3 (NM_020987.2,6896-6914).
gcaaaggcatgcgtgttaa

SEQ ID NO: 276622 - DNA, 19 bp, Homo sapiens
  siRNA target sequence for ANK3 (NM_020987.2,6897-6915).
caaaggcatgcgtgttaaa

SEQ ID NO: 276623 - DNA, 19 bp, Homo sapiens
  siRNA target sequence for ANK3 (NM_020987.2,6902-6920).
gcatgcgtgttaaagaaga

SEQ ID NO: 276624 - DNA, 19 bp, Homo sapiens
  siRNA target sequence for ANK3 (NM_020987.2,6935-6953).
caaccaccagaatggttta

SEQ ID NO: 276625 - DNA, 19 bp, Homo sapiens
  siRNA target sequence for ANK3 (NM_020987.2,6969-6987).
cggtgaaggtgcatctgaa

SEQ ID NO: 276626 - DNA, 19 bp, Homo sapiens
  siRNA target sequence for ANK3 (NM_020987.2,7001-7019).
ccatgtcagtccatgacat

SEQ ID NO: 276627 - DNA, 19 bp, Homo sapiens
  siRNA target sequence for ANK3 (NM_020987.2,7064-7082).
caggtctgtttgaacataa

SEQ ID NO: 276628 - DNA, 19 bp, Homo sapiens
  siRNA target sequence for ANK3 (NM_020987.2,7162-7180).
cccaaactggagcgtataa

SEQ ID NO: 276629 - DNA, 19 bp, Homo sapiens
  siRNA target sequence for ANK3 (NM_020987.2,7163-7181).
ccaaactggagcgtataat

SEQ ID NO: 276630 - DNA, 19 bp, Homo sapiens
  siRNA target sequence for ANK3 (NM_020987.2,7164-7182).
caaactggagcgtataata

SEQ ID NO: 276631 - DNA, 19 bp, Homo sapiens
  siRNA target sequence for ANK3 (NM_020987.2,7215-7233).
gcccactgaagtcattatt

SEQ ID NO: 276632 - DNA, 19 bp, Homo sapiens
  siRNA target sequence for ANK3 (NM_020987.2,7270-7288).
gtatatcagaaagacttat

SEQ ID NO: 276633 - DNA, 19 bp, Homo sapiens
  siRNA target sequence for ANK3 (NM_020987.2,7292-7310).
ggggagatattaacctaaa

SEQ ID NO: 276634 - DNA, 19 bp, Homo sapiens
  siRNA target sequence for ANK3 (NM_020987.2,7295-7313).
gagatattaacctaaaaga

SEQ ID NO: 276635 - DNA, 19 bp, Homo sapiens
  siRNA target sequence for ANK3 (NM_020987.2,7297-7315).
gatattaacctaaaagatt

SEQ ID NO: 276636 - DNA, 19 bp, Homo sapiens
  siRNA target sequence for ANK3 (NM_020987.2,7332-7350).
cgatgcttttccttgttca

SEQ ID NO: 276637 - DNA, 19 bp, Homo sapiens
  siRNA target sequence for ANK3 (NM_020987.2,7414-7432).
gagtcttccagagtaaaca

SEQ ID NO: 276638 - DNA, 19 bp, Homo sapiens
  siRNA target sequence for ANK3 (NM_020987.2,7416-7434).
gtcttccagagtaaacact

SEQ ID NO: 276639 - DNA, 19 bp, Homo sapiens
  siRNA target sequence for ANK3 (NM_020987.2,7489-7507).
gactcttataaaacattga

SEQ ID NO: 276640 - DNA, 19 bp, Homo sapiens
  siRNA target sequence for ANK3 (NM_020987.2,7515-7533).
gagtcaacactcaatagaa

SEQ ID NO: 276641 - DNA, 19 bp, Homo sapiens
  siRNA target sequence for ANK3 (NM_020987.2,7542-7560).
cgatgagttgtcagaacta

SEQ ID NO: 276642 - DNA, 19 bp, Homo sapiens
  siRNA target sequence for ANK3 (NM_020987.2,7543-7561).
gatgagttgtcagaactaa

SEQ ID NO: 276643 - DNA, 19 bp, Homo sapiens
  siRNA target sequence for ANK3 (NM_020987.2,7558-7576).
ctaagaggggagtcttaca

SEQ ID NO: 276644 - DNA, 19 bp, Homo sapiens
  siRNA target sequence for ANK3 (NM_020987.2,7608-7626).
gctagatgtgtctcattct

SEQ ID NO: 276645 - DNA, 19 bp, Homo sapiens
  siRNA target sequence for ANK3 (NM_020987.2,7612-7630).
gatgtgtctcattctgata

SEQ ID NO: 276646 - DNA, 19 bp, Homo sapiens
  siRNA target sequence for ANK3 (NM_020987.2,7631-7649).
ctgaggaatcggttacaga

SEQ ID NO: 276647 - DNA, 19 bp, Homo sapiens
  siRNA target sequence for ANK3 (NM_020987.2,7687-7705).
gataagcggtccagagaaa

SEQ ID NO: 276648 - DNA, 19 bp, Homo sapiens
  siRNA target sequence for ANK3 (NM_020987.2,7692-7710).
gcggtccagagaaaaaata

SEQ ID NO: 276649 - DNA, 19 bp, Homo sapiens
  siRNA target sequence for ANK3 (NM_020987.2,7769-7787).
gtgtaggtaaagtgtctaa

SEQ ID NO: 276650 - DNA, 19 bp, Homo sapiens
  siRNA target sequence for ANK3 (NM_020987.2,7807-7825).
gtgacagtgttgcactatt

SEQ ID NO: 276651 - DNA, 19 bp, Homo sapiens
  siRNA target sequence for ANK3 (NM_020987.2,7809-7827).
gacagtgttgcactattct

SEQ ID NO: 276652 - DNA, 19 bp, Homo sapiens
  siRNA target sequence for ANK3 (NM_020987.2,7818-7836).
gcactattctggcaatgtt

SEQ ID NO: 276653 - DNA, 19 bp, Homo sapiens
  siRNA target sequence for ANK3 (NM_020987.2,7819-7837).
cactattctggcaatgtta

SEQ ID NO: 276654 - DNA, 19 bp, Homo sapiens
  siRNA target sequence for ANK3 (NM_020987.2,7830-7848).
caatgttagtagtccaaaa

SEQ ID NO: 276655 - DNA, 19 bp, Homo sapiens
  siRNA target sequence for ANK3 (NM_020987.2,7865-7883).
gctttactgaggacagatt

SEQ ID NO: 276656 - DNA, 19 bp, Homo sapiens
  siRNA target sequence for ANK3 (NM_020987.2,7956-7974).
gactgaagtgtcacagttt

SEQ ID NO: 276657 - DNA, 19 bp, Homo sapiens
  siRNA target sequence for ANK3 (NM_020987.2,7983-8001).
caaaactgaaaagctaaat

SEQ ID NO: 276658 - DNA, 19 bp, Homo sapiens
  siRNA target sequence for ANK3 (NM_020987.2,8316-8334).
ccagctcaaacaatctaaa

SEQ ID NO: 276659 - DNA, 19 bp, Homo sapiens
  siRNA target sequence for ANK3 (NM_020987.2,8320-8338).
ctcaaacaatctaaactca

SEQ ID NO: 276660 - DNA, 19 bp, Homo sapiens
  siRNA target sequence for ANK3 (NM_020987.2,8335-8353).
ctcagttccattagattaa

SEQ ID NO: 276661 - DNA, 19 bp, Homo sapiens
  siRNA target sequence for ANK3 (NM_020987.2,8342-8360).
ccattagattaaaatttga

SEQ ID NO: 276662 - DNA, 19 bp, Homo sapiens
  siRNA target sequence for ANK3 (NM_020987.2,8458-8476).
ctacccgtctaccaagttt

SEQ ID NO: 276663 - DNA, 19 bp, Homo sapiens
  siRNA target sequence for ANK3 (NM_020987.2,8522-8540).
gtgtatctgtgcaaaaaga

SEQ ID NO: 276664 - DNA, 19 bp, Homo sapiens
  siRNA target sequence for ANK3 (NM_020987.2,8524-8542).
gtatctgtgcaaaaagatt

SEQ ID NO: 276665 - DNA, 19 bp, Homo sapiens
  siRNA target sequence for ANK3 (NM_020987.2,8532-8550).
gcaaaaagattttatggta

SEQ ID NO: 276666 - DNA, 19 bp, Homo sapiens
  siRNA target sequence for ANK3 (NM_020987.2,8573-8591).
cccaaagcaacgaaattgt

SEQ ID NO: 276667 - DNA, 19 bp, Homo sapiens
  siRNA target sequence for ANK3 (NM_020987.2,8574-8592).
ccaaagcaacgaaattgtt

SEQ ID NO: 276668 - DNA, 19 bp, Homo sapiens
  siRNA target sequence for ANK3 (NM_020987.2,8605-8623).
ggctctgataatgtgaaaa

SEQ ID NO: 276669 - DNA, 19 bp, Homo sapiens
  siRNA target sequence for ANK3 (NM_020987.2,8762-8780).
gttcgggagccactaacaa

SEQ ID NO: 276670 - DNA, 19 bp, Homo sapiens
  siRNA target sequence for ANK3 (NM_020987.2,8765-8783).
cgggagccactaacaataa

SEQ ID NO: 276671 - DNA, 19 bp, Homo sapiens
  siRNA target sequence for ANK3 (NM_020987.2,8767-8785).
ggagccactaacaataagt

SEQ ID NO: 276672 - DNA, 19 bp, Homo sapiens
  siRNA target sequence for ANK3 (NM_020987.2,8821-8839).
gatgtaagagagaatcaca

SEQ ID NO: 276673 - DNA, 19 bp, Homo sapiens
  siRNA target sequence for ANK3 (NM_020987.2,8842-8860).
ggtcaccctgagagtaaaa

SEQ ID NO: 276674 - DNA, 19 bp, Homo sapiens
  siRNA target sequence for ANK3 (NM_020987.2,8894-8912).
ctgagagagaacgcaaatt

SEQ ID NO: 276675 - DNA, 19 bp, Homo sapiens
  siRNA target sequence for ANK3 (NM_020987.2,8922-8940).
cggctctctctcagaaatt

SEQ ID NO: 276676 - DNA, 19 bp, Homo sapiens
  siRNA target sequence for ANK3 (NM_020987.2,9095-9113).
ggagaatgctgtcttctaa

SEQ ID NO: 276677 - DNA, 19 bp, Homo sapiens
  siRNA target sequence for ANK3 (NM_020987.2,9110-9128).
ctaatattcccgatggttt

SEQ ID NO: 276678 - DNA, 19 bp, Homo sapiens
  siRNA target sequence for ANK3 (NM_020987.2,9133-9151).
gaacagtcggcatttccaa

SEQ ID NO: 276679 - DNA, 19 bp, Homo sapiens
  siRNA target sequence for ANK3 (NM_020987.2,9138-9156).
gtcggcatttccaaaacat

SEQ ID NO: 276680 - DNA, 19 bp, Homo sapiens
  siRNA target sequence for ANK3 (NM_020987.2,9149-9167).
caaaacatgaactatcaca

SEQ ID NO: 276681 - DNA, 19 bp, Homo sapiens
  siRNA target sequence for ANK3 (NM_020987.2,9157-9175).
gaactatcacaaaaattgt

SEQ ID NO: 276682 - DNA, 19 bp, Homo sapiens
  siRNA target sequence for ANK3 (NM_020987.2,9176-9194).
cccagtcaagcatgagtaa

SEQ ID NO: 276683 - DNA, 19 bp, Homo sapiens
  siRNA target sequence for ANK3 (NM_020987.2,9202-9220).
gttgagacacagcacttta

SEQ ID NO: 276684 - DNA, 19 bp, Homo sapiens
  siRNA target sequence for ANK3 (NM_020987.2,9205-9223).
gagacacagcactttaatt

SEQ ID NO: 276685 - DNA, 19 bp, Homo sapiens
  siRNA target sequence for ANK3 (NM_020987.2,9216-9234).
ctttaattctatagaagat

SEQ ID NO: 276686 - DNA, 19 bp, Homo sapiens
  siRNA target sequence for ANK3 (NM_020987.2,9241-9259).
gttacctattcagaaatca

SEQ ID NO: 276687 - DNA, 19 bp, Homo sapiens
  siRNA target sequence for ANK3 (NM_020987.2,9270-9288).
caaacaccagagttatgta

SEQ ID NO: 276688 - DNA, 19 bp, Homo sapiens
  siRNA target sequence for ANK3 (NM_020987.2,9335-9353).
ctcctgattctttagagtt

SEQ ID NO: 276689 - DNA, 19 bp, Homo sapiens
  siRNA target sequence for ANK3 (NM_020987.2,9337-9355).
cctgattctttagagttta

SEQ ID NO: 276690 - DNA, 19 bp, Homo sapiens
  siRNA target sequence for ANK3 (NM_020987.2,9366-9384).
ggaatctccctctagtgat

SEQ ID NO: 276691 - DNA, 19 bp, Homo sapiens
  siRNA target sequence for ANK3 (NM_020987.2,9371-9389).
ctccctctagtgatgtatt

SEQ ID NO: 276692 - DNA, 19 bp, Homo sapiens
  siRNA target sequence for ANK3 (NM_020987.2,9374-9392).
cctctagtgatgtattcga

SEQ ID NO: 276693 - DNA, 19 bp, Homo sapiens
  siRNA target sequence for ANK3 (NM_020987.2,9390-9408).
cgaccacagtcccattgat

SEQ ID NO: 276694 - DNA, 19 bp, Homo sapiens
  siRNA target sequence for ANK3 (NM_020987.2,9400-9418).
cccattgatggattggaaa

SEQ ID NO: 276695 - DNA, 19 bp, Homo sapiens
  siRNA target sequence for ANK3 (NM_020987.2,9487-9505).
gtacaagtggggaagcaat

SEQ ID NO: 276696 - DNA, 19 bp, Homo sapiens
  siRNA target sequence for ANK3 (NM_020987.2,9520-9538).
caacaaggaggtgtaaaaa

SEQ ID NO: 276697 - DNA, 19 bp, Homo sapiens
  siRNA target sequence for ANK3 (NM_020987.2,9552-9570).
ggaatgtaagacagtacaa

SEQ ID NO: 276698 - DNA, 19 bp, Homo sapiens
  siRNA target sequence for ANK3 (NM_020987.2,9580-9598).
gggaccttttatacaacta

SEQ ID NO: 276699 - DNA, 19 bp, Homo sapiens
  siRNA target sequence for ANK3 (NM_020987.2,9582-9600).
gaccttttatacaactaga

SEQ ID NO: 276700 - DNA, 19 bp, Homo sapiens
  siRNA target sequence for ANK3 (NM_020987.2,9624-9642).
ccaaggtagtccagaagat

SEQ ID NO: 276701 - DNA, 19 bp, Homo sapiens
  siRNA target sequence for ANK3 (NM_020987.2,9710-9728).
gttcagaggaagtgagtta

SEQ ID NO: 276702 - DNA, 19 bp, Homo sapiens
  siRNA target sequence for ANK3 (NM_020987.2,9715-9733).
gaggaagtgagttatgaat

SEQ ID NO: 276703 - DNA, 19 bp, Homo sapiens
  siRNA target sequence for ANK3 (NM_020987.2,9721-9739).
gtgagttatgaatttacat

SEQ ID NO: 276704 - DNA, 19 bp, Homo sapiens
  siRNA target sequence for ANK3 (NM_020987.2,9725-9743).
gttatgaatttacatctaa

SEQ ID NO: 276705 - DNA, 19 bp, Homo sapiens
  siRNA target sequence for ANK3 (NM_020987.2,9748-9766).
cctgactcgctcatagctt

SEQ ID NO: 276706 - DNA, 19 bp, Homo sapiens
  siRNA target sequence for ANK3 (NM_020987.2,9749-9767).
ctgactcgctcatagctta

SEQ ID NO: 276707 - DNA, 19 bp, Homo sapiens
  siRNA target sequence for ANK3 (NM_020987.2,9751-9769).
gactcgctcatagcttata

SEQ ID NO: 276708 - DNA, 19 bp, Homo sapiens
  siRNA target sequence for ANK3 (NM_020987.2,9753-9771).
ctcgctcatagcttatata

SEQ ID NO: 276709 - DNA, 19 bp, Homo sapiens
  siRNA target sequence for ANK3 (NM_020987.2,9869-9887).
cagcagttgagcgtgaaat

SEQ ID NO: 276710 - DNA, 19 bp, Homo sapiens
  siRNA target sequence for ANK3 (NM_020987.2,9973-9991).
gatgcggaccagattgagt

SEQ ID NO: 276711 - DNA, 19 bp, Homo sapiens
  siRNA target sequence for ANK3 (NM_020987.2,9979-9997).
gaccagattgagtcagata

SEQ ID NO: 276712 - DNA, 19 bp, Homo sapiens
  siRNA target sequence for ANK3 (NM_020987.2,10075-10093).
ctggctgaacctgtcatta

SEQ ID NO: 276713 - DNA, 19 bp, Homo sapiens
  siRNA target sequence for ANK3 (NM_020987.2,10077-10095).
ggctgaacctgtcattaga

SEQ ID NO: 276714 - DNA, 19 bp, Homo sapiens
  siRNA target sequence for ANK3 (NM_020987.2,10126-10144).
gcagacgtcagtgattcaa

SEQ ID NO: 276715 - DNA, 19 bp, Homo sapiens
  siRNA target sequence for ANK3 (NM_020987.2,10142-10160).
caagcgatgacgaatctat

SEQ ID NO: 276716 - DNA, 19 bp, Homo sapiens
  siRNA target sequence for ANK3 (NM_020987.2,10145-10163).
gcgatgacgaatctattta

SEQ ID NO: 276717 - DNA, 19 bp, Homo sapiens
  siRNA target sequence for ANK3 (NM_020987.2,10146-10164).
cgatgacgaatctatttat

SEQ ID NO: 276718 - DNA, 19 bp, Homo sapiens
  siRNA target sequence for ANK3 (NM_020987.2,10365-10383).
catcacagagtgttccatt

SEQ ID NO: 276719 - DNA, 19 bp, Homo sapiens
  siRNA target sequence for ANK3 (NM_020987.2,10384-10402).
gccaccacagcagagtttt

SEQ ID NO: 276720 - DNA, 19 bp, Homo sapiens
  siRNA target sequence for ANK3 (NM_020987.2,10475-10493).
cagagagtgattctaaact

SEQ ID NO: 276721 - DNA, 19 bp, Homo sapiens
  siRNA target sequence for ANK3 (NM_020987.2,10552-10570).
ccagctgaccgctctttta

SEQ ID NO: 276722 - DNA, 19 bp, Homo sapiens
  siRNA target sequence for ANK3 (NM_020987.2,10561-10579).
cgctcttttagccaaagta

SEQ ID NO: 276723 - DNA, 19 bp, Homo sapiens
  siRNA target sequence for ANK3 (NM_020987.2,10562-10580).
gctcttttagccaaagtaa

SEQ ID NO: 276724 - DNA, 19 bp, Homo sapiens
  siRNA target sequence for ANK3 (NM_020987.2,10577-10595).
gtaaacttgaagttatcga

SEQ ID NO: 276725 - DNA, 19 bp, Homo sapiens
  siRNA target sequence for ANK3 (NM_020987.2,10730-10748).
cagtgtttcctgatactta

SEQ ID NO: 276726 - DNA, 19 bp, Homo sapiens
  siRNA target sequence for ANK3 (NM_020987.2,10732-10750).
gtgtttcctgatacttact

SEQ ID NO: 276727 - DNA, 19 bp, Homo sapiens
  siRNA target sequence for ANK3 (NM_020987.2,10749-10767).
cttcagttacaaagtagat

SEQ ID NO: 276728 - DNA, 19 bp, Homo sapiens
  siRNA target sequence for ANK3 (NM_020987.2,10798-10816).
gctaccaaaggtctagatt

SEQ ID NO: 276729 - DNA, 19 bp, Homo sapiens
  siRNA target sequence for ANK3 (NM_020987.2,10802-10820).
ccaaaggtctagattttga

SEQ ID NO: 276730 - DNA, 19 bp, Homo sapiens
  siRNA target sequence for ANK3 (NM_020987.2,10837-10855).
cgaggggatgatgaagttt

SEQ ID NO: 276731 - DNA, 19 bp, Homo sapiens
  siRNA target sequence for ANK3 (NM_020987.2,10862-10880).
gtaaatcacgggaagatga

SEQ ID NO: 276732 - DNA, 19 bp, Homo sapiens
  siRNA target sequence for ANK3 (NM_020987.2,10868-10886).
cacgggaagatgaaactaa

SEQ ID NO: 276733 - DNA, 19 bp, Homo sapiens
  siRNA target sequence for ANK3 (NM_020987.2,10921-10939).
gcaacaacccctgatacaa

SEQ ID NO: 276734 - DNA, 19 bp, Homo sapiens
  siRNA target sequence for ANK3 (NM_020987.2,10985-11003).
ctaaccccttcccatttca

SEQ ID NO: 276735 - DNA, 19 bp, Homo sapiens
  siRNA target sequence for ANK3 (NM_020987.2,11027-11045).
ctcgcagtggtgcaattga

SEQ ID NO: 276736 - DNA, 19 bp, Homo sapiens
  siRNA target sequence for ANK3 (NM_020987.2,11029-11047).
cgcagtggtgcaattgaca

SEQ ID NO: 276737 - DNA, 19 bp, Homo sapiens
  siRNA target sequence for ANK3 (NM_020987.2,11089-11107).
cagattggtgagcatactt

SEQ ID NO: 276738 - DNA, 19 bp, Homo sapiens
  siRNA target sequence for ANK3 (NM_020987.2,11316-11334).
cactaacacctctaaagtt

SEQ ID NO: 276739 - DNA, 19 bp, Homo sapiens
  siRNA target sequence for ANK3 (NM_020987.2,11318-11336).
ctaacacctctaaagttga

SEQ ID NO: 276740 - DNA, 19 bp, Homo sapiens
  siRNA target sequence for ANK3 (NM_020987.2,11343-11361).
gttgcgcacgcctataaaa

SEQ ID NO: 276741 - DNA, 19 bp, Homo sapiens
  siRNA target sequence for ANK3 (NM_020987.2,11398-11416).
gaaggccctggagaaataa

SEQ ID NO: 276742 - DNA, 19 bp, Homo sapiens
  siRNA target sequence for ANK3 (NM_020987.2,11441-11459).
ccagttgtcagggattaga

SEQ ID NO: 276743 - DNA, 19 bp, Homo sapiens
  siRNA target sequence for ANK3 (NM_020987.2,11442-11460).
cagttgtcagggattagaa

SEQ ID NO: 276744 - DNA, 19 bp, Homo sapiens
  siRNA target sequence for ANK3 (NM_020987.2,11506-11524).
ggcgttaggccccatgaaa

SEQ ID NO: 276745 - DNA, 19 bp, Homo sapiens
  siRNA target sequence for ANK3 (NM_020987.2,11513-11531).
ggccccatgaaaaacatga

SEQ ID NO: 276746 - DNA, 19 bp, Homo sapiens
  siRNA target sequence for ANK3 (NM_020987.2,11569-11587).
gattcttccactatacaga

SEQ ID NO: 276747 - DNA, 19 bp, Homo sapiens
  siRNA target sequence for ANK3 (NM_020987.2,11576-11594).
ccactatacagacagataa

SEQ ID NO: 276748 - DNA, 19 bp, Homo sapiens
  siRNA target sequence for ANK3 (NM_020987.2,11584-11602).
cagacagataacattatga

SEQ ID NO: 276749 - DNA, 19 bp, Homo sapiens
  siRNA target sequence for ANK3 (NM_020987.2,11586-11604).
gacagataacattatgagt

SEQ ID NO: 276750 - DNA, 19 bp, Homo sapiens
  siRNA target sequence for ANK3 (NM_020987.2,11588-11606).
cagataacattatgagtaa

SEQ ID NO: 276751 - DNA, 19 bp, Homo sapiens
  siRNA target sequence for ANK3 (NM_020987.2,11595-11613).
cattatgagtaatatagtt

SEQ ID NO: 276752 - DNA, 19 bp, Homo sapiens
  siRNA target sequence for ANK3 (NM_020987.2,11639-11657).
gtaccacagagaaagataa

SEQ ID NO: 276753 - DNA, 19 bp, Homo sapiens
  siRNA target sequence for ANK3 (NM_020987.2,11649-11667).
gaaagataacccagtgaaa

SEQ ID NO: 276754 - DNA, 19 bp, Homo sapiens
  siRNA target sequence for ANK3 (NM_020987.2,11653-11671).
gataacccagtgaaagtct

SEQ ID NO: 276755 - DNA, 19 bp, Homo sapiens
  siRNA target sequence for ANK3 (NM_020987.2,11695-11713).
ctacaaggacactgtgtaa

SEQ ID NO: 276756 - DNA, 19 bp, Homo sapiens
  siRNA target sequence for ANK3 (NM_020987.2,11702-11720).
gacactgtgtaagagataa

SEQ ID NO: 276757 - DNA, 19 bp, Homo sapiens
  siRNA target sequence for ANK3 (NM_020987.2,11764-11782).
gggattaggcaaaaatcca

SEQ ID NO: 276758 - DNA, 19 bp, Homo sapiens
  siRNA target sequence for ANK3 (NM_020987.2,11766-11784).
gattaggcaaaaatccaaa

SEQ ID NO: 276759 - DNA, 19 bp, Homo sapiens
  siRNA target sequence for ANK3 (NM_020987.2,11816-11834).
ccttcccaccgaaccatat

SEQ ID NO: 276760 - DNA, 19 bp, Homo sapiens
  siRNA target sequence for ANK3 (NM_020987.2,11866-11884).
gttagtcaatccgagaaaa

SEQ ID NO: 276761 - DNA, 19 bp, Homo sapiens
  siRNA target sequence for ANK3 (NM_020987.2,11870-11888).
gtcaatccgagaaaaccaa

SEQ ID NO: 276762 - DNA, 19 bp, Homo sapiens
  siRNA target sequence for ANK3 (NM_020987.2,11943-11961).
cacacacagggataacata

SEQ ID NO: 276763 - DNA, 19 bp, Homo sapiens
  siRNA target sequence for ANK3 (NM_020987.2,11958-11976).
cataattgcagttagaaaa

SEQ ID NO: 276764 - DNA, 19 bp, Homo sapiens
  siRNA target sequence for ANK3 (NM_020987.2,12035-12053).
ccaagttgccagtaaaggt

SEQ ID NO: 276765 - DNA, 19 bp, Homo sapiens
  siRNA target sequence for ANK3 (NM_020987.2,12036-12054).
caagttgccagtaaaggta

SEQ ID NO: 276766 - DNA, 19 bp, Homo sapiens
  siRNA target sequence for ANK3 (NM_020987.2,12125-12143).
ccagctgcacagttaaagt

SEQ ID NO: 276767 - DNA, 19 bp, Homo sapiens
  siRNA target sequence for ANK3 (NM_020987.2,12126-12144).
cagctgcacagttaaagtt

SEQ ID NO: 276768 - DNA, 19 bp, Homo sapiens
  siRNA target sequence for ANK3 (NM_020987.2,12325-12343).
ggccagccttcggttacaa

SEQ ID NO: 276769 - DNA, 19 bp, Homo sapiens
  siRNA target sequence for ANK3 (NM_020987.2,12344-12362).
cgaagtctgctagagataa

SEQ ID NO: 276770 - DNA, 19 bp, Homo sapiens
  siRNA target sequence for ANK3 (NM_020987.2,12368-12386).
cagaggcagcacctttaaa

SEQ ID NO: 276771 - DNA, 19 bp, Homo sapiens
  siRNA target sequence for ANK3 (NM_020987.2,12370-12388).
gaggcagcacctttaaaat

SEQ ID NO: 276772 - DNA, 19 bp, Homo sapiens
  siRNA target sequence for ANK3 (NM_020987.2,12372-12390).
ggcagcacctttaaaatca

SEQ ID NO: 276773 - DNA, 19 bp, Homo sapiens
  siRNA target sequence for ANK3 (NM_020987.2,12374-12392).
cagcacctttaaaatcaaa

SEQ ID NO: 276774 - DNA, 19 bp, Homo sapiens
  siRNA target sequence for ANKRD2 (NM_020349.2,928-946).
ccaatgtgagggataagct

SEQ ID NO: 276775 - DNA, 19 bp, Homo sapiens
  siRNA target sequence for ANKRD2 (NM_020349.2,1075-1093).
ggctcaaccgctacaaaat

SEQ ID NO: 276776 - DNA, 19 bp, Homo sapiens
  siRNA target sequence for ANKRD2 (NM_020349.2,1113-1131).
catggggctgacatgatga

SEQ ID NO: 276777 - DNA, 19 bp, Homo sapiens
  siRNA target sequence for ANKRD2 (NM_020349.2,1236-1254).
ctggaggggcctaatgata

SEQ ID NO: 276778 - DNA, 19 bp, Homo sapiens
  siRNA target sequence for ANKRD2 (NM_020349.2,1238-1256).
ggaggggcctaatgatagt

SEQ ID NO: 276779 - DNA, 19 bp, Homo sapiens
  siRNA target sequence for ANUBL1 (NM_174890.1,227-245).
gaaaagagcctccattctt

SEQ ID NO: 276780 - DNA, 19 bp, Homo sapiens
  siRNA target sequence for ANUBL1 (NM_174890.1,234-252).
gcctccattcttcaatgat

SEQ ID NO: 276781 - DNA, 19 bp, Homo sapiens
  siRNA target sequence for ANUBL1 (NM_174890.1,238-256).
ccattcttcaatgatgata

SEQ ID NO: 276782 - DNA, 19 bp, Homo sapiens
  siRNA target sequence for ANUBL1 (NM_174890.1,253-271).
gataacatgggaccatttt

SEQ ID NO: 276783 - DNA, 19 bp, Homo sapiens
  siRNA target sequence for ANUBL1 (NM_174890.1,306-324).
cttcattgaaacattaact

SEQ ID NO: 276784 - DNA, 19 bp, Homo sapiens
  siRNA target sequence for ANUBL1 (NM_174890.1,317-335).
cattaactggaacatgttt

SEQ ID NO: 276785 - DNA, 19 bp, Homo sapiens
  siRNA target sequence for ANUBL1 (NM_174890.1,407-425).
ccatctgtcgacaacactt

SEQ ID NO: 276786 - DNA, 19 bp, Homo sapiens
  siRNA target sequence for ANUBL1 (NM_174890.1,411-429).
ctgtcgacaacacttaatt

SEQ ID NO: 276787 - DNA, 19 bp, Homo sapiens
  siRNA target sequence for ANUBL1 (NM_174890.1,421-439).
cacttaatttggaataaca

SEQ ID NO: 276788 - DNA, 19 bp, Homo sapiens
  siRNA target sequence for ANUBL1 (NM_174890.1,431-449).
ggaataacatggaacttga

SEQ ID NO: 276789 - DNA, 19 bp, Homo sapiens
  siRNA target sequence for ANUBL1 (NM_174890.1,432-450).
gaataacatggaacttgaa

SEQ ID NO: 276790 - DNA, 19 bp, Homo sapiens
  siRNA target sequence for ANUBL1 (NM_174890.1,516-534).
gcgtggcggacctataaat

SEQ ID NO: 276791 - DNA, 19 bp, Homo sapiens
  siRNA target sequence for ANUBL1 (NM_174890.1,517-535).
cgtggcggacctataaata

SEQ ID NO: 276792 - DNA, 19 bp, Homo sapiens
  siRNA target sequence for ANUBL1 (NM_174890.1,520-538).
ggcggacctataaatacta

SEQ ID NO: 276793 - DNA, 19 bp, Homo sapiens
  siRNA target sequence for ANUBL1 (NM_174890.1,522-540).
cggacctataaatactaga

SEQ ID NO: 276794 - DNA, 19 bp, Homo sapiens
  siRNA target sequence for ANUBL1 (NM_174890.1,523-541).
ggacctataaatactagaa

SEQ ID NO: 276795 - DNA, 19 bp, Homo sapiens
  siRNA target sequence for ANUBL1 (NM_174890.1,551-569).
cagacgatccacttaggaa

SEQ ID NO: 276796 - DNA, 19 bp, Homo sapiens
  siRNA target sequence for ANUBL1 (NM_174890.1,566-584).
ggaagatggcagagtactt

SEQ ID NO: 276797 - DNA, 19 bp, Homo sapiens
  siRNA target sequence for ANUBL1 (NM_174890.1,617-635).
cctcctgcagcaaacaagt

SEQ ID NO: 276798 - DNA, 19 bp, Homo sapiens
  siRNA target sequence for ANUBL1 (NM_174890.1,658-676).
ggagatcaattgaatttct

SEQ ID NO: 276799 - DNA, 19 bp, Homo sapiens
  siRNA target sequence for ANUBL1 (NM_174890.1,704-722).
ctttaacaccgttatctga

SEQ ID NO: 276800 - DNA, 19 bp, Homo sapiens
  siRNA target sequence for ANUBL1 (NM_174890.1,712-730).
ccgttatctgactcttcaa

SEQ ID NO: 276801 - DNA, 19 bp, Homo sapiens
  siRNA target sequence for ANUBL1 (NM_174890.1,750-768).
gcatgtcctacggagaaaa

SEQ ID NO: 276802 - DNA, 19 bp, Homo sapiens
  siRNA target sequence for ANUBL1 (NM_174890.1,935-953).
ctaagaaagctgtcaagat

SEQ ID NO: 276803 - DNA, 19 bp, Homo sapiens
  siRNA target sequence for ANUBL1 (NM_174890.1,1004-1022).
catctcgccaccgattgtt

SEQ ID NO: 276804 - DNA, 19 bp, Homo sapiens
  siRNA target sequence for ANUBL1 (NM_174890.1,1032-1050).
ccccaacattggtcaatct

SEQ ID NO: 276805 - DNA, 19 bp, Homo sapiens
  siRNA target sequence for ANUBL1 (NM_174890.1,1033-1051).
cccaacattggtcaatctt

SEQ ID NO: 276806 - DNA, 19 bp, Homo sapiens
  siRNA target sequence for ANUBL1 (NM_174890.1,1035-1053).
caacattggtcaatcttgt

SEQ ID NO: 276807 - DNA, 19 bp, Homo sapiens
  siRNA target sequence for ANUBL1 (NM_174890.1,1038-1056).
cattggtcaatcttgttca

SEQ ID NO: 276808 - DNA, 19 bp, Homo sapiens
  siRNA target sequence for ANUBL1 (NM_174890.1,1129-1147).
gctgagagatacatatctt

SEQ ID NO: 276809 - DNA, 19 bp, Homo sapiens
  siRNA target sequence for ANUBL1 (NM_174890.1,1165-1183).
cttaaggaagataatagct

SEQ ID NO: 276810 - DNA, 19 bp, Homo sapiens
  siRNA target sequence for ANUBL1 (NM_174890.1,1174-1192).
gataatagctgggagaata

SEQ ID NO: 276811 - DNA, 19 bp, Homo sapiens
  siRNA target sequence for ANUBL1 (NM_174890.1,1209-1227).
cagtagcaacgtcaaacta

SEQ ID NO: 276812 - DNA, 19 bp, Homo sapiens
  siRNA target sequence for ANUBL1 (NM_174890.1,1221-1239).
caaactacctcctcagata

SEQ ID NO: 276813 - DNA, 19 bp, Homo sapiens
  siRNA target sequence for ANUBL1 (NM_174890.1,1301-1319).
ccctgcctaggcaaacaaa

SEQ ID NO: 276814 - DNA, 19 bp, Homo sapiens
  siRNA target sequence for ANUBL1 (NM_174890.1,1302-1320).
cctgcctaggcaaacaaaa

SEQ ID NO: 276815 - DNA, 19 bp, Homo sapiens
  siRNA target sequence for ANUBL1 (NM_174890.1,1305-1323).
gcctaggcaaacaaaacat

SEQ ID NO: 276816 - DNA, 19 bp, Homo sapiens
  siRNA target sequence for ANUBL1 (NM_174890.1,1351-1369).
gggaacattgtcttacctt

SEQ ID NO: 276817 - DNA, 19 bp, Homo sapiens
  siRNA target sequence for ANUBL1 (NM_174890.1,1375-1393).
gaatgtgtaaccgaacaat

SEQ ID NO: 276818 - DNA, 19 bp, Homo sapiens
  siRNA target sequence for ANUBL1 (NM_174890.1,1379-1397).
gtgtaaccgaacaatcact

SEQ ID NO: 276819 - DNA, 19 bp, Homo sapiens
  siRNA target sequence for ANUBL1 (NM_174890.1,1469-1487).
gtgcgtgcaaagtgaatct

SEQ ID NO: 276820 - DNA, 19 bp, Homo sapiens
  siRNA target sequence for ANUBL1 (NM_174890.1,1576-1594).
gtagagacttcagttctta

SEQ ID NO: 276821 - DNA, 19 bp, Homo sapiens
  siRNA target sequence for ANUBL1 (NM_174890.1,1591-1609).
cttaactaccgggaattaa

SEQ ID NO: 276822 - DNA, 19 bp, Homo sapiens
  siRNA target sequence for ANUBL1 (NM_174890.1,1610-1628).
gtcctcacaagaatagact

SEQ ID NO: 276823 - DNA, 19 bp, Homo sapiens
  siRNA target sequence for ANUBL1 (NM_174890.1,1691-1709).
gacagtccaaatgttttga

SEQ ID NO: 276824 - DNA, 19 bp, Homo sapiens
  siRNA target sequence for ANUBL1 (NM_174890.1,1716-1734).
gaagctacagccttcttct

SEQ ID NO: 276825 - DNA, 19 bp, Homo sapiens
  siRNA target sequence for ANUBL1 (NM_174890.1,1776-1794).
ctctaggactacttgcttt

SEQ ID NO: 276826 - DNA, 19 bp, Homo sapiens
  siRNA target sequence for ANUBL1 (NM_174890.1,1820-1838).
ggaaaagatctgatgttat

SEQ ID NO: 276827 - DNA, 19 bp, Homo sapiens
  siRNA target sequence for ANUBL1 (NM_174890.1,1846-1864).
gttgaggctcgggatatca

SEQ ID NO: 276828 - DNA, 19 bp, Homo sapiens
  siRNA target sequence for ANUBL1 (NM_174890.1,1855-1873).
cgggatatcacagaaatga

SEQ ID NO: 276829 - DNA, 19 bp, Homo sapiens
  siRNA target sequence for ANUBL1 (NM_174890.1,1858-1876).
gatatcacagaaatgacta

SEQ ID NO: 276830 - DNA, 19 bp, Homo sapiens
  siRNA target sequence for ANUBL1 (NM_174890.1,1893-1911).
gcctgttggttgtgtaaat

SEQ ID NO: 276831 - DNA, 19 bp, Homo sapiens
  siRNA target sequence for ANUBL1 (NM_174890.1,1939-1957).
gggagcacaagcagaaata

SEQ ID NO: 276832 - DNA, 19 bp, Homo sapiens
  siRNA target sequence for ANUBL1 (NM_174890.1,1976-1994).
gggcaggcaggcttcagaa

SEQ ID NO: 276833 - DNA, 19 bp, Homo sapiens
  siRNA target sequence for ANUBL1 (NM_174890.1,2090-2108).
ctacccatggtgttggaat

SEQ ID NO: 276834 - DNA, 19 bp, Homo sapiens
  siRNA target sequence for ANUBL1 (NM_174890.1,2139-2157).
cgtaggagaatgtactact

SEQ ID NO: 276835 - DNA, 19 bp, Homo sapiens
  siRNA target sequence for ANUBL1 (NM_174890.1,2179-2197).
gcccctcttcagacaaaga

SEQ ID NO: 276836 - DNA, 19 bp, Homo sapiens
  siRNA target sequence for ANUBL1 (NM_174890.1,2242-2260).
ctggctagtagctacgaat

SEQ ID NO: 276837 - DNA, 19 bp, Homo sapiens
  siRNA target sequence for ANUBL1 (NM_174890.1,2333-2351).
gtgcagggaggagatactt

SEQ ID NO: 276838 - DNA, 19 bp, Homo sapiens
  siRNA target sequence for ANUBL1 (NM_174890.1,2370-2388).
ggttaatgcaccaaagctt

SEQ ID NO: 276839 - DNA, 19 bp, Homo sapiens
  siRNA target sequence for AP2A2 (NM_012305.1,194-212).
cggatatccgcaactgtaa

SEQ ID NO: 276840 - DNA, 19 bp, Homo sapiens
  siRNA target sequence for AP2A2 (NM_012305.1,195-213).
ggatatccgcaactgtaaa

SEQ ID NO: 276841 - DNA, 19 bp, Homo sapiens
  siRNA target sequence for AP2A2 (NM_012305.1,196-214).
gatatccgcaactgtaaaa

SEQ ID NO: 276842 - DNA, 19 bp, Homo sapiens
  siRNA target sequence for AP2A2 (NM_012305.1,250-268).
ctggcaaatatcagatcaa

SEQ ID NO: 276843 - DNA, 19 bp, Homo sapiens
  siRNA target sequence for AP2A2 (NM_012305.1,285-303).
ggctcttgatggctatagt

SEQ ID NO: 276844 - DNA, 19 bp, Homo sapiens
  siRNA target sequence for AP2A2 (NM_012305.1,286-304).
gctcttgatggctatagta

SEQ ID NO: 276845 - DNA, 19 bp, Homo sapiens
  siRNA target sequence for AP2A2 (NM_012305.1,289-307).
cttgatggctatagtaaaa

SEQ ID NO: 276846 - DNA, 19 bp, Homo sapiens
  siRNA target sequence for AP2A2 (NM_012305.1,388-406).
ctgagttcaaacagataca

SEQ ID NO: 276847 - DNA, 19 bp, Homo sapiens
  siRNA target sequence for AP2A2 (NM_012305.1,415-433).
cagatcggctaccttttca

SEQ ID NO: 276848 - DNA, 19 bp, Homo sapiens
  siRNA target sequence for AP2A2 (NM_012305.1,441-459).
gttggtgaactcaaacagt

SEQ ID NO: 276849 - DNA, 19 bp, Homo sapiens
  siRNA target sequence for AP2A2 (NM_012305.1,671-689).
ggacgtcccccgatcttgt

SEQ ID NO: 276850 - DNA, 19 bp, Homo sapiens
  siRNA target sequence for AP2A2 (NM_012305.1,868-886).
gatctccaggattacactt

SEQ ID NO: 276851 - DNA, 19 bp, Homo sapiens
  siRNA target sequence for AP2A2 (NM_012305.1,876-894).
ggattacacttactatttt

SEQ ID NO: 276852 - DNA, 19 bp, Homo sapiens
  siRNA target sequence for AP2A2 (NM_012305.1,1041-1059).
gcactccaacgcgaagaat

SEQ ID NO: 276853 - DNA, 19 bp, Homo sapiens
  siRNA target sequence for AP2A2 (NM_012305.1,1074-1092).
ggccatcagcttaatcatt

SEQ ID NO: 276854 - DNA, 19 bp, Homo sapiens
  siRNA target sequence for AP2A2 (NM_012305.1,1479-1497).
gaacttgatccgaattgct

SEQ ID NO: 276855 - DNA, 19 bp, Homo sapiens
  siRNA target sequence for AP2A2 (NM_012305.1,1490-1508).
gaattgctggtgattacgt

SEQ ID NO: 276856 - DNA, 19 bp, Homo sapiens
  siRNA target sequence for AP2A2 (NM_012305.1,1518-1536).
ggtgtggtaccgagtcatt

SEQ ID NO: 276857 - DNA, 19 bp, Homo sapiens
  siRNA target sequence for AP2A2 (NM_012305.1,1523-1541).
ggtaccgagtcattcagat

SEQ ID NO: 276858 - DNA, 19 bp, Homo sapiens
  siRNA target sequence for AP2A2 (NM_012305.1,2260-2278).
gccaggtttgtttgtaaaa

SEQ ID NO: 276859 - DNA, 19 bp, Homo sapiens
  siRNA target sequence for AP2A2 (NM_012305.1,2308-2326).
cttcaaattggacttaagt

SEQ ID NO: 276860 - DNA, 19 bp, Homo sapiens
  siRNA target sequence for AP2A2 (NM_012305.1,2347-2365).
ggtcggatgtttatctttt

SEQ ID NO: 276861 - DNA, 19 bp, Homo sapiens
  siRNA target sequence for AP2A2 (NM_012305.1,2378-2396).
cctccacgcagttcctaaa

SEQ ID NO: 276862 - DNA, 19 bp, Homo sapiens
  siRNA target sequence for AP2A2 (NM_012305.1,2381-2399).
ccacgcagttcctaaactt

SEQ ID NO: 276863 - DNA, 19 bp, Homo sapiens
  siRNA target sequence for AP2A2 (NM_012305.1,2493-2511).
gcagcaggtggtcaacata

SEQ ID NO: 276864 - DNA, 19 bp, Homo sapiens
  siRNA target sequence for AP2A2 (NM_012305.1,2537-2555).
cgccagtcctcaacattca

SEQ ID NO: 276865 - DNA, 19 bp, Homo sapiens
  siRNA target sequence for AP2A2 (NM_012305.1,2765-2783).
ctgcacttcttgaagaagt

SEQ ID NO: 276866 - DNA, 19 bp, Homo sapiens
  siRNA target sequence for AP2A2 (NM_012305.1,2789-2807).
ctaatcctgcgaatttcgt

SEQ ID NO: 276867 - DNA, 19 bp, Homo sapiens
  siRNA target sequence for AP2A2 (NM_012305.1,2815-2833).
ggaatcatccacacgaaaa

SEQ ID NO: 276868 - DNA, 19 bp, Homo sapiens
  siRNA target sequence for AP2A2 (NM_012305.1,2893-2911).
ctcacgctgcgcacaagta

SEQ ID NO: 276869 - DNA, 19 bp, Homo sapiens
  siRNA target sequence for AP2A2 (NM_012305.1,2919-2937).
cgtttctcagagattatgt

SEQ ID NO: 276870 - DNA, 19 bp, Homo sapiens
  siRNA target sequence for APOA1BP (NM_144772.1,227-245).
ccgtggaccaggagctatt

SEQ ID NO: 276871 - DNA, 19 bp, Homo sapiens
  siRNA target sequence for APOA1BP (NM_144772.1,228-246).
cgtggaccaggagctattt

SEQ ID NO: 276872 - DNA, 19 bp, Homo sapiens
  siRNA target sequence for APOA1BP (NM_144772.1,229-247).
gtggaccaggagctattta

SEQ ID NO: 276873 - DNA, 19 bp, Homo sapiens
  siRNA target sequence for APOA1BP (NM_144772.1,263-281).
gcgtggaccaacttatgga

SEQ ID NO: 276874 - DNA, 19 bp, Homo sapiens
  siRNA target sequence for APOA1BP (NM_144772.1,264-282).
cgtggaccaacttatggaa

SEQ ID NO: 276875 - DNA, 19 bp, Homo sapiens
  siRNA target sequence for APOA1BP (NM_144772.1,407-425).
gtgctcgacacctcaaact

SEQ ID NO: 276876 - DNA, 19 bp, Homo sapiens
  siRNA target sequence for APOA1BP (NM_144772.1,409-427).
gctcgacacctcaaactct

SEQ ID NO: 276877 - DNA, 19 bp, Homo sapiens
  siRNA target sequence for APOA1BP (NM_144772.1,410-428).
ctcgacacctcaaactctt

SEQ ID NO: 276878 - DNA, 19 bp, Homo sapiens
  siRNA target sequence for APOA1BP (NM_144772.1,432-450).
ctacgagccaaccatctat

SEQ ID NO: 276879 - DNA, 19 bp, Homo sapiens
  siRNA target sequence for APOA1BP (NM_144772.1,489-507).
ggtgacccagtgtcagaaa

SEQ ID NO: 276880 - DNA, 19 bp, Homo sapiens
  siRNA target sequence for APOA1BP (NM_144772.1,543-561).
gcccatgacgattgatgaa

SEQ ID NO: 276881 - DNA, 19 bp, Homo sapiens
  siRNA target sequence for APOA1BP (NM_144772.1,545-563).
ccatgacgattgatgaact

SEQ ID NO: 276882 - DNA, 19 bp, Homo sapiens
  siRNA target sequence for APOA1BP (NM_144772.1,549-567).
gacgattgatgaactgtat

SEQ ID NO: 276883 - DNA, 19 bp, Homo sapiens
  siRNA target sequence for APOA1BP (NM_144772.1,551-569).
cgattgatgaactgtatga

SEQ ID NO: 276884 - DNA, 19 bp, Homo sapiens
  siRNA target sequence for APOA1BP (NM_144772.1,782-800).
ccggtcgctaccattacct

SEQ ID NO: 276885 - DNA, 19 bp, Homo sapiens
  siRNA target sequence for APOAL (NM_024492.2,482-500).
caagcctagaggattcatt

SEQ ID NO: 276886 - DNA, 19 bp, Homo sapiens
  siRNA target sequence for ARFIP1 (NM_014447.1,164-182).
gaaattccagtgactagta

SEQ ID NO: 276887 - DNA, 19 bp, Homo sapiens
  siRNA target sequence for ARFIP1 (NM_014447.1,194-212).
gatgactctcgtgaacata

SEQ ID NO: 276888 - DNA, 19 bp, Homo sapiens
  siRNA target sequence for ARFIP1 (NM_014447.1,199-217).
ctctcgtgaacatagcttt

SEQ ID NO: 276889 - DNA, 19 bp, Homo sapiens
  siRNA target sequence for ARFIP1 (NM_014447.1,203-221).
cgtgaacatagctttaata

SEQ ID NO: 276890 - DNA, 19 bp, Homo sapiens
  siRNA target sequence for ARFIP1 (NM_014447.1,213-231).
gctttaatagggatttgaa

SEQ ID NO: 276891 - DNA, 19 bp, Homo sapiens
  siRNA target sequence for ARFIP1 (NM_014447.1,259-277).
ctcagaaacccaaattaca

SEQ ID NO: 276892 - DNA, 19 bp, Homo sapiens
  siRNA target sequence for ARFIP1 (NM_014447.1,281-299).
catggctttgacaatacca

SEQ ID NO: 276893 - DNA, 19 bp, Homo sapiens
  siRNA target sequence for ARFIP1 (NM_014447.1,297-315).
ccaaagagggtgttattga

SEQ ID NO: 276894 - DNA, 19 bp, Homo sapiens
  siRNA target sequence for ARFIP1 (NM_014447.1,351-369).
caaaaagtggaccagttat

SEQ ID NO: 276895 - DNA, 19 bp, Homo sapiens
  siRNA target sequence for ARFIP1 (NM_014447.1,396-414).
caatggaaaagttagaact

SEQ ID NO: 276896 - DNA, 19 bp, Homo sapiens
  siRNA target sequence for ARFIP1 (NM_014447.1,400-418).
ggaaaagttagaacttgtt

SEQ ID NO: 276897 - DNA, 19 bp, Homo sapiens
  siRNA target sequence for ARFIP1 (NM_014447.1,416-434).
gttagaaaatggagtctaa

SEQ ID NO: 276898 - DNA, 19 bp, Homo sapiens
  siRNA target sequence for ARFIP1 (NM_014447.1,426-444).
ggagtctaaacacctataa

SEQ ID NO: 276899 - DNA, 19 bp, Homo sapiens
  siRNA target sequence for ARFIP1 (NM_014447.1,431-449).
ctaaacacctataagtgta

SEQ ID NO: 276900 - DNA, 19 bp, Homo sapiens
  siRNA target sequence for ARFIP1 (NM_014447.1,473-491).
ctaggccgtggctcaagaa

SEQ ID NO: 276901 - DNA, 19 bp, Homo sapiens
  siRNA target sequence for ARFIP1 (NM_014447.1,492-510).
ctgtggaccttgaacttga

SEQ ID NO: 276902 - DNA, 19 bp, Homo sapiens
  siRNA target sequence for ARFIP1 (NM_014447.1,615-633).
ggcaacttggagatgcatt

SEQ ID NO: 276903 - DNA, 19 bp, Homo sapiens
  siRNA target sequence for ARFIP1 (NM_014447.1,635-653).
gctgacctgagtttgaagt

SEQ ID NO: 276904 - DNA, 19 bp, Homo sapiens
  siRNA target sequence for ARFIP1 (NM_014447.1,697-715).
gaaactgctggctaaaaat

SEQ ID NO: 276905 - DNA, 19 bp, Homo sapiens
  siRNA target sequence for ARFIP1 (NM_014447.1,723-741).
ctcttcttggggccattaa

SEQ ID NO: 276906 - DNA, 19 bp, Homo sapiens
  siRNA target sequence for ARFIP1 (NM_014447.1,725-743).
cttcttggggccattaatt

SEQ ID NO: 276907 - DNA, 19 bp, Homo sapiens
  siRNA target sequence for ARFIP1 (NM_014447.1,731-749).
ggggccattaattttttca

SEQ ID NO: 276908 - DNA, 19 bp, Homo sapiens
  siRNA target sequence for ARFIP1 (NM_014447.1,825-843).
ggattgaatatgatgcata

SEQ ID NO: 276909 - DNA, 19 bp, Homo sapiens
  siRNA target sequence for ARFIP1 (NM_014447.1,836-854).
gatgcatatcgcactgatt

SEQ ID NO: 276910 - DNA, 19 bp, Homo sapiens
  siRNA target sequence for ARFIP1 (NM_014447.1,922-940).
cttccaagcacataaggaa

SEQ ID NO: 276911 - DNA, 19 bp, Homo sapiens
  siRNA target sequence for ARFIP1 (NM_014447.1,962-980).
gatgtttctgtcaaattga

SEQ ID NO: 276912 - DNA, 19 bp, Homo sapiens
  siRNA target sequence for ARFIP1 (NM_014447.1,1094-1112).
cagttccatatcaaattga

SEQ ID NO: 276913 - DNA, 19 bp, Homo sapiens
  siRNA target sequence for ARFIP1 (NM_014447.1,1131-1149).
ccccatcttggcttgaaga

SEQ ID NO: 276914 - DNA, 19 bp, Homo sapiens
  siRNA target sequence for ARFIP1 (NM_014447.1,1132-1150).
cccatcttggcttgaagaa

SEQ ID NO: 276915 - DNA, 19 bp, Homo sapiens
  siRNA target sequence for ARPP-21 (NM_016300.3,393-411).
cctgaatcaggcaatagca

SEQ ID NO: 276916 - DNA, 19 bp, Homo sapiens
  siRNA target sequence for ARPP-21 (NM_016300.3,450-468).
gaacggcattgttaaatca

SEQ ID NO: 276917 - DNA, 19 bp, Homo sapiens
  siRNA target sequence for ARPP-21 (NM_016300.3,453-471).
cggcattgttaaatcagaa

SEQ ID NO: 276918 - DNA, 19 bp, Homo sapiens
  siRNA target sequence for ARPP-21 (NM_016300.3,507-525).
gcggctggaggctcagaat

SEQ ID NO: 276919 - DNA, 19 bp, Homo sapiens
  siRNA target sequence for ARPP-21 (NM_016300.3,631-649).
gatcaggaatcaattcatt

SEQ ID NO: 276920 - DNA, 19 bp, Homo sapiens
  siRNA target sequence for ARPP-21 (NM_016300.3,757-775).
cccaagatcagaatgttat

SEQ ID NO: 276921 - DNA, 19 bp, Homo sapiens
  siRNA target sequence for ARPP-21 (NM_016300.3,806-824).
ctacaggcatagacttaca

SEQ ID NO: 276922 - DNA, 19 bp, Homo sapiens
  siRNA target sequence for ARPP-21 (NM_016300.3,817-835).
gacttacacgagtttctga

SEQ ID NO: 276923 - DNA, 19 bp, Homo sapiens
  siRNA target sequence for ARPP-21 (NM_016300.3,826-844).
gagtttctgattaacacat

SEQ ID NO: 276924 - DNA, 19 bp, Homo sapiens
  siRNA target sequence for ARPP-21 (NM_016300.3,832-850).
ctgattaacacattaaaga

SEQ ID NO: 276925 - DNA, 19 bp, Homo sapiens
  siRNA target sequence for ARPP-21 (NM_016300.3,858-876).
cagggacaggatgatactt

SEQ ID NO: 276926 - DNA, 19 bp, Homo sapiens
  siRNA target sequence for ARPP-21 (NM_016300.3,860-878).
gggacaggatgatactttt

SEQ ID NO: 276927 - DNA, 19 bp, Homo sapiens
  siRNA target sequence for ARPP-21 (NM_016300.3,906-924).
cattgctgacaacaataat

SEQ ID NO: 276928 - DNA, 19 bp, Homo sapiens
  siRNA target sequence for ARPP-21 (NM_016300.3,939-957).
ccctcagatgtcatcgtat

SEQ ID NO: 276929 - DNA, 19 bp, Homo sapiens
  siRNA target sequence for ARPP-21 (NM_016300.3,943-961).
cagatgtcatcgtatcaga

SEQ ID NO: 276930 - DNA, 19 bp, Homo sapiens
  siRNA target sequence for ARPP-21 (NM_016300.3,973-991).
catcgagtggcagcttatt

SEQ ID NO: 276931 - DNA, 19 bp, Homo sapiens
  siRNA target sequence for ARPP-21 (NM_016300.3,1044-1062).
gaccagcagcaccagaata

SEQ ID NO: 276932 - DNA, 19 bp, Homo sapiens
  siRNA target sequence for ARPP-21 (NM_016300.3,1058-1076).
gaataccagagcaaaggtt

SEQ ID NO: 276933 - DNA, 19 bp, Homo sapiens
  siRNA target sequence for ARPP-21 (NM_016300.3,1112-1130).
cccagaagcggtttatctt

SEQ ID NO: 276934 - DNA, 19 bp, Homo sapiens
  siRNA target sequence for ARPP-21 (NM_016300.3,1128-1146).
cttgaagcgagataactct

SEQ ID NO: 276935 - DNA, 19 bp, Homo sapiens
  siRNA target sequence for ARPP-21 (NM_016300.3,1138-1156).
gataactctagtattgata

SEQ ID NO: 276936 - DNA, 19 bp, Homo sapiens
  siRNA target sequence for ARPP-21 (NM_016300.3,1178-1196).
gaatgcatccatttagaga

SEQ ID NO: 276937 - DNA, 19 bp, Homo sapiens
  siRNA target sequence for ARPP-21 (NM_016300.3,1193-1211).
gagatgacagacgaagtaa

SEQ ID NO: 276938 - DNA, 19 bp, Homo sapiens
  siRNA target sequence for ARPP-21 (NM_016300.3,1200-1218).
cagacgaagtaaatcaatt

SEQ ID NO: 276939 - DNA, 19 bp, Homo sapiens
  siRNA target sequence for ARPP-21 (NM_016300.3,1202-1220).
gacgaagtaaatcaattga

SEQ ID NO: 276940 - DNA, 19 bp, Homo sapiens
  siRNA target sequence for ARPP-21 (NM_016300.3,1315-1333).
ctcttggaagacagtaaca

SEQ ID NO: 276941 - DNA, 19 bp, Homo sapiens
  siRNA target sequence for ARPP-21 (NM_016300.3,1317-1335).
cttggaagacagtaacata

SEQ ID NO: 276942 - DNA, 19 bp, Homo sapiens
  siRNA target sequence for ARPP-21 (NM_016300.3,1337-1355).
gcaatgagacctataagaa

SEQ ID NO: 276943 - DNA, 19 bp, Homo sapiens
  siRNA target sequence for ARPP-21 (NM_016300.3,1479-1497).
cagttccaaccgcaatcta

SEQ ID NO: 276944 - DNA, 19 bp, Homo sapiens
  siRNA target sequence for ARPP-21 (NM_016300.3,1481-1499).
gttccaaccgcaatctaaa

SEQ ID NO: 276945 - DNA, 19 bp, Homo sapiens
  siRNA target sequence for ARPP-21 (NM_016300.3,1509-1527).
gaccaagacggcgagtttt

SEQ ID NO: 276946 - DNA, 19 bp, Homo sapiens
  siRNA target sequence for ARPP-21 (NM_016300.3,1555-1573).
gacagcacttccagtacta

SEQ ID NO: 276947 - DNA, 19 bp, Homo sapiens
  siRNA target sequence for ARPP-21 (NM_016300.3,1805-1823).
ctggaagcatccttcttaa

SEQ ID NO: 276948 - DNA, 19 bp, Homo sapiens
  siRNA target sequence for ARPP-21 (NM_016300.3,1854-1872).
cgatggaactcctgcaata

SEQ ID NO: 276949 - DNA, 19 bp, Homo sapiens
  siRNA target sequence for ARPP-21 (NM_016300.3,1855-1873).
gatggaactcctgcaatat

SEQ ID NO: 276950 - DNA, 19 bp, Homo sapiens
  siRNA target sequence for ARPP-21 (NM_016300.3,2010-2028).
ggtcactcagagagatgat

SEQ ID NO: 276951 - DNA, 19 bp, Homo sapiens
  siRNA target sequence for ARPP-21 (NM_016300.3,2240-2258).
cctcaccacagggatttgt

SEQ ID NO: 276952 - DNA, 19 bp, Homo sapiens
  siRNA target sequence for ARPP-21 (NM_016300.3,2275-2293).
gcacagatgcctgtatatt

SEQ ID NO: 276953 - DNA, 19 bp, Homo sapiens
  siRNA target sequence for ARPP-21 (NM_016300.3,2276-2294).
cacagatgcctgtatatta

SEQ ID NO: 276954 - DNA, 19 bp, Homo sapiens
  siRNA target sequence for ARPP-21 (NM_016300.3,2318-2336).
cctcaaccacgcaacagta

SEQ ID NO: 276955 - DNA, 19 bp, Homo sapiens
  siRNA target sequence for ARPP-21 (NM_016300.3,2473-2491).
cagagtcagaacgtgataa

SEQ ID NO: 276956 - DNA, 19 bp, Homo sapiens
  siRNA target sequence for ARPP-21 (NM_016300.3,2475-2493).
gagtcagaacgtgataaat

SEQ ID NO: 276957 - DNA, 19 bp, Homo sapiens
  siRNA target sequence for ARPP-21 (NM_016300.3,2477-2495).
gtcagaacgtgataaataa

SEQ ID NO: 276958 - DNA, 19 bp, Homo sapiens
  siRNA target sequence for ARPP-21 (NM_016300.3,2481-2499).
gaacgtgataaataaccaa

SEQ ID NO: 276959 - DNA, 19 bp, Homo sapiens
  siRNA target sequence for ARPP-21 (NM_016300.3,2512-2530).
gtgcaaagcgtgatggttt

SEQ ID NO: 276960 - DNA, 19 bp, Homo sapiens
  siRNA target sequence for ARPP-21 (NM_016300.3,2527-2545).
gtttcctacccaacaatgt

SEQ ID NO: 276961 - DNA, 19 bp, Homo sapiens
  siRNA target sequence for ARPP-21 (NM_016300.3,2535-2553).
cccaacaatgtcttcttat

SEQ ID NO: 276962 - DNA, 19 bp, Homo sapiens
  siRNA target sequence for ARPP-21 (NM_016300.3,2537-2555).
caacaatgtcttcttatca

SEQ ID NO: 276963 - DNA, 19 bp, Homo sapiens
  siRNA target sequence for ARPP-21 (NM_016300.3,2582-2600).
gactgccccagcagtcata

SEQ ID NO: 276964 - DNA, 19 bp, Homo sapiens
  siRNA target sequence for ARPP-21 (NM_016300.3,2586-2604).
gccccagcagtcataccaa

SEQ ID NO: 276965 - DNA, 19 bp, Homo sapiens
  siRNA target sequence for ARPP-21 (NM_016300.3,2791-2809).
gctggttggcaggtcaaat

SEQ ID NO: 276966 - DNA, 19 bp, Homo sapiens
  siRNA target sequence for ARPP-21 (NM_016300.3,2792-2810).
ctggttggcaggtcaaatt

SEQ ID NO: 276967 - DNA, 19 bp, Homo sapiens
  siRNA target sequence for ARS2 (NM_015908.3,267-285).
cgcagggacaagttcagaa

SEQ ID NO: 276968 - DNA, 19 bp, Homo sapiens
  siRNA target sequence for ARS2 (NM_015908.3,331-349).
gtcgaggggacgattggaa

SEQ ID NO: 276969 - DNA, 19 bp, Homo sapiens
  siRNA target sequence for ARS2 (NM_015908.3,336-354).
ggggacgattggaatgaca

SEQ ID NO: 276970 - DNA, 19 bp, Homo sapiens
  siRNA target sequence for ARS2 (NM_015908.3,379-397).
gccgtagtcggggtgaata

SEQ ID NO: 276971 - DNA, 19 bp, Homo sapiens
  siRNA target sequence for ARS2 (NM_015908.3,380-398).
ccgtagtcggggtgaatat

SEQ ID NO: 276972 - DNA, 19 bp, Homo sapiens
  siRNA target sequence for ARS2 (NM_015908.3,391-409).
gtgaatatcgggactatga

SEQ ID NO: 276973 - DNA, 19 bp, Homo sapiens
  siRNA target sequence for ARS2 (NM_015908.3,734-752).
ggccgtcaagcgctataat

SEQ ID NO: 276974 - DNA, 19 bp, Homo sapiens
  siRNA target sequence for ARS2 (NM_015908.3,736-754).
ccgtcaagcgctataatga

SEQ ID NO: 276975 - DNA, 19 bp, Homo sapiens
  siRNA target sequence for ARS2 (NM_015908.3,738-756).
gtcaagcgctataatgact

SEQ ID NO: 276976 - DNA, 19 bp, Homo sapiens
  siRNA target sequence for ARS2 (NM_015908.3,816-834).
gagtggtttcggtctaagt

SEQ ID NO: 276977 - DNA, 19 bp, Homo sapiens
  siRNA target sequence for ARS2 (NM_015908.3,984-1002).
gatgcagccgtgattaaga

SEQ ID NO: 276978 - DNA, 19 bp, Homo sapiens
  siRNA target sequence for ARS2 (NM_015908.3,1009-1027).
gaggcacggagaatgatct

SEQ ID NO: 276979 - DNA, 19 bp, Homo sapiens
  siRNA target sequence for ARS2 (NM_015908.3,1122-1140).
gacggggagcgcaaaacca

SEQ ID NO: 276980 - DNA, 19 bp, Homo sapiens
  siRNA target sequence for ARS2 (NM_015908.3,1536-1554).
gagatcatctccctttgta

SEQ ID NO: 276981 - DNA, 19 bp, Homo sapiens
  siRNA target sequence for ARS2 (NM_015908.3,1633-1651).
ccttcgaccgcagtgttaa

SEQ ID NO: 276982 - DNA, 19 bp, Homo sapiens
  siRNA target sequence for ARS2 (NM_015908.3,1637-1655).
cgaccgcagtgttaacatt

SEQ ID NO: 276983 - DNA, 19 bp, Homo sapiens
  siRNA target sequence for ARS2 (NM_015908.3,1638-1656).
gaccgcagtgttaacatta

SEQ ID NO: 276984 - DNA, 19 bp, Homo sapiens
  siRNA target sequence for ARS2 (NM_015908.3,1640-1658).
ccgcagtgttaacattaaa

SEQ ID NO: 276985 - DNA, 19 bp, Homo sapiens
  siRNA target sequence for ARS2 (NM_015908.3,1642-1660).
gcagtgttaacattaaaga

SEQ ID NO: 276986 - DNA, 19 bp, Homo sapiens
  siRNA target sequence for ARS2 (NM_015908.3,1888-1906).
cgcaaaacccgatcttgaa

SEQ ID NO: 276987 - DNA, 19 bp, Homo sapiens
  siRNA target sequence for ARS2 (NM_015908.3,2031-2049).
cgggatgagaagttgatta

SEQ ID NO: 276988 - DNA, 19 bp, Homo sapiens
  siRNA target sequence for ARS2 (NM_015908.3,2085-2103).
gtgcattccttggattatt

SEQ ID NO: 276989 - DNA, 19 bp, Homo sapiens
  siRNA target sequence for ARS2 (NM_015908.3,2088-2106).
cattccttggattattaca

SEQ ID NO: 276990 - DNA, 19 bp, Homo sapiens
  siRNA target sequence for ARS2 (NM_015908.3,2406-2424).
gagtttgtgcgcaaacata

SEQ ID NO: 276991 - DNA, 19 bp, Homo sapiens
  siRNA target sequence for ARS2 (NM_015908.3,2412-2430).
gtgcgcaaacatatcttca

SEQ ID NO: 276992 - DNA, 19 bp, Homo sapiens
  siRNA target sequence for ARS2 (NM_015908.3,2415-2433).
cgcaaacatatcttcaaca

SEQ ID NO: 276993 - DNA, 19 bp, Homo sapiens
  siRNA target sequence for ARS2 (NM_015908.3,2466-2484).
gaagtcgcgttttttaaca

SEQ ID NO: 276994 - DNA, 19 bp, Homo sapiens
  siRNA target sequence for ARS2 (NM_015908.3,2469-2487).
gtcgcgttttttaacaact

SEQ ID NO: 276995 - DNA, 19 bp, Homo sapiens
  siRNA target sequence for ARS2 (NM_015908.3,2722-2740).
ctggtcgagggaactatga

SEQ ID NO: 276996 - DNA, 19 bp, Homo sapiens
  siRNA target sequence for ARS2 (NM_015908.3,2835-2853).
gccccagacgatgttgatt

SEQ ID NO: 276997 - DNA, 19 bp, Homo sapiens
  siRNA target sequence for ARS2 (NM_015908.3,2836-2854).
ccccagacgatgttgattt

SEQ ID NO: 276998 - DNA, 19 bp, Homo sapiens
  siRNA target sequence for ARS2 (NM_015908.3,2838-2856).
ccagacgatgttgatttct

SEQ ID NO: 276999 - DNA, 19 bp, Homo sapiens
  siRNA target sequence for ARS2 (NM_015908.3,2839-2857).
cagacgatgttgatttctt

SEQ ID NO: 277000 - DNA, 19 bp, Homo sapiens
  siRNA target sequence for ARS2 (NM_015908.3,2841-2859).
gacgatgttgatttctttt

SEQ ID NO: 277001 - DNA, 19 bp, Homo sapiens
  siRNA target sequence for ASB1 (NM_016114.3,125-143).
gggctccgcaggtcgtaat

SEQ ID NO: 277002 - DNA, 19 bp, Homo sapiens
  siRNA target sequence for ASB1 (NM_016114.3,127-145).
gctccgcaggtcgtaatct

SEQ ID NO: 277003 - DNA, 19 bp, Homo sapiens
  siRNA target sequence for ASB1 (NM_016114.3,130-148).
ccgcaggtcgtaatctgaa

SEQ ID NO: 277004 - DNA, 19 bp, Homo sapiens
  siRNA target sequence for ASB1 (NM_016114.3,241-259).
ccctcaggagcctattgca

SEQ ID NO: 277005 - DNA, 19 bp, Homo sapiens
  siRNA target sequence for ASB1 (NM_016114.3,242-260).
cctcaggagcctattgcaa

SEQ ID NO: 277006 - DNA, 19 bp, Homo sapiens
  siRNA target sequence for ASB1 (NM_016114.3,660-678).
gtggtctgccccttgtaca

SEQ ID NO: 277007 - DNA, 19 bp, Homo sapiens
  siRNA target sequence for ASB1 (NM_016114.3,730-748).
gcgcgaaccctgacttcaa

SEQ ID NO: 277008 - DNA, 19 bp, Homo sapiens
  siRNA target sequence for ASB1 (NM_016114.3,732-750).
gcgaaccctgacttcaact

SEQ ID NO: 277009 - DNA, 19 bp, Homo sapiens
  siRNA target sequence for ASB1 (NM_016114.3,868-886).
ccaacctgaatctagtgaa

SEQ ID NO: 277010 - DNA, 19 bp, Homo sapiens
  siRNA target sequence for ASB1 (NM_016114.3,1029-1047).
cggcttcatctgattcctt

SEQ ID NO: 277011 - DNA, 19 bp, Homo sapiens
  siRNA target sequence for ASB1 (NM_016114.3,1059-1077).
ccagaccccataaagaagt

SEQ ID NO: 277012 - DNA, 19 bp, Homo sapiens
  siRNA target sequence for ASB1 (NM_016114.3,1066-1084).
ccataaagaagtttctact

SEQ ID NO: 277013 - DNA, 19 bp, Homo sapiens
  siRNA target sequence for ASPSCR1 (NM_024083.2,237-255).
cctgtgaatatgatctgaa

SEQ ID NO: 277014 - DNA, 19 bp, Homo sapiens
  siRNA target sequence for ASPSCR1 (NM_024083.2,240-258).
gtgaatatgatctgaagtt

SEQ ID NO: 277015 - DNA, 19 bp, Homo sapiens
  siRNA target sequence for ASPSCR1 (NM_024083.2,267-285).
gcgtgctcgacctttctct

SEQ ID NO: 277016 - DNA, 19 bp, Homo sapiens
  siRNA target sequence for ASPSCR1 (NM_024083.2,402-420).
cgaggttgcaggactcttt

SEQ ID NO: 277017 - DNA, 19 bp, Homo sapiens
  siRNA target sequence for ASPSCR1 (NM_024083.2,593-611).
gccaccatcaggtttgtca

SEQ ID NO: 277018 - DNA, 19 bp, Homo sapiens
  siRNA target sequence for ASPSCR1 (NM_024083.2,597-615).
ccatcaggtttgtcatgaa

SEQ ID NO: 277019 - DNA, 19 bp, Homo sapiens
  siRNA target sequence for ASPSCR1 (NM_024083.2,808-826).
cgcagctgccccctttgtt

SEQ ID NO: 277020 - DNA, 19 bp, Homo sapiens
  siRNA target sequence for ASPSCR1 (NM_024083.2,885-903).
catcatcttcagctaagtt

SEQ ID NO: 277021 - DNA, 19 bp, Homo sapiens
  siRNA target sequence for ASPSCR1 (NM_024083.2,1371-1389).
ggaaccccgagctgtcatt

SEQ ID NO: 277022 - DNA, 19 bp, Homo sapiens
  siRNA target sequence for ASPSCR1 (NM_024083.2,1372-1390).
gaaccccgagctgtcattt

SEQ ID NO: 277023 - DNA, 19 bp, Homo sapiens
  siRNA target sequence for ASPSCR1 (NM_024083.2,1396-1414).
gttcatcacccctccaaaa

SEQ ID NO: 277024 - DNA, 19 bp, Homo sapiens
  siRNA target sequence for AUTS2 (NM_015570.1,341-359).
gccatggactccgcaaaaa

SEQ ID NO: 277025 - DNA, 19 bp, Homo sapiens
  siRNA target sequence for AUTS2 (NM_015570.1,711-729).
caatggcttgtcctttcat

SEQ ID NO: 277026 - DNA, 19 bp, Homo sapiens
  siRNA target sequence for AUTS2 (NM_015570.1,765-783).
cagctcagatcgagaaaat

SEQ ID NO: 277027 - DNA, 19 bp, Homo sapiens
  siRNA target sequence for AUTS2 (NM_015570.1,767-785).
gctcagatcgagaaaatga

SEQ ID NO: 277028 - DNA, 19 bp, Homo sapiens
  siRNA target sequence for AUTS2 (NM_015570.1,887-905).
gtgccagtggagaatccaa

SEQ ID NO: 277029 - DNA, 19 bp, Homo sapiens
  siRNA target sequence for AUTS2 (NM_015570.1,1082-1100).
gcacgctaccagaacatga

SEQ ID NO: 277030 - DNA, 19 bp, Homo sapiens
  siRNA target sequence for AUTS2 (NM_015570.1,1116-1134).
gccgattgtccccaagata

SEQ ID NO: 277031 - DNA, 19 bp, Homo sapiens
  siRNA target sequence for AUTS2 (NM_015570.1,1117-1135).
ccgattgtccccaagatat

SEQ ID NO: 277032 - DNA, 19 bp, Homo sapiens
  siRNA target sequence for AUTS2 (NM_015570.1,1172-1190).
gttgcaaagagccaatctt

SEQ ID NO: 277033 - DNA, 19 bp, Homo sapiens
  siRNA target sequence for AUTS2 (NM_015570.1,1489-1507).
ccattgtcagcctacaaca

SEQ ID NO: 277034 - DNA, 19 bp, Homo sapiens
  siRNA target sequence for AUTS2 (NM_015570.1,1500-1518).
ctacaacagcagtagctta

SEQ ID NO: 277035 - DNA, 19 bp, Homo sapiens
  siRNA target sequence for AUTS2 (NM_015570.1,1514-1532).
gcttaagcctcaacagttt

SEQ ID NO: 277036 - DNA, 19 bp, Homo sapiens
  siRNA target sequence for AUTS2 (NM_015570.1,1515-1533).
cttaagcctcaacagttta

SEQ ID NO: 277037 - DNA, 19 bp, Homo sapiens
  siRNA target sequence for AUTS2 (NM_015570.1,1682-1700).
cacatcaccccaatatgtt

SEQ ID NO: 277038 - DNA, 19 bp, Homo sapiens
  siRNA target sequence for AUTS2 (NM_015570.1,1781-1799).
cttactcagagcaagacat

SEQ ID NO: 277039 - DNA, 19 bp, Homo sapiens
  siRNA target sequence for AUTS2 (NM_015570.1,2003-2021).
ctcccatgtttgacaaata

SEQ ID NO: 277040 - DNA, 19 bp, Homo sapiens
  siRNA target sequence for AUTS2 (NM_015570.1,2016-2034).
caaataccctacaaaagtt

SEQ ID NO: 277041 - DNA, 19 bp, Homo sapiens
  siRNA target sequence for AUTS2 (NM_015570.1,2027-2045).
caaaagttgacccattcta

SEQ ID NO: 277042 - DNA, 19 bp, Homo sapiens
  siRNA target sequence for AUTS2 (NM_015570.1,2151-2169).
gacatccaaccctatcgat

SEQ ID NO: 277043 - DNA, 19 bp, Homo sapiens
  siRNA target sequence for AUTS2 (NM_015570.1,2189-2207).
cagtcccacacactttact

SEQ ID NO: 277044 - DNA, 19 bp, Homo sapiens
  siRNA target sequence for AUTS2 (NM_015570.1,2238-2256).
cagacctatgttaaggaaa

SEQ ID NO: 277045 - DNA, 19 bp, Homo sapiens
  siRNA target sequence for AUTS2 (NM_015570.1,2267-2285).
ggtgtgctatgcatgttca

SEQ ID NO: 277046 - DNA, 19 bp, Homo sapiens
  siRNA target sequence for AUTS2 (NM_015570.1,2270-2288).
gtgctatgcatgttcacat

SEQ ID NO: 277047 - DNA, 19 bp, Homo sapiens
  siRNA target sequence for AUTS2 (NM_015570.1,2600-2618).
ccttcgggggacttggaaa

SEQ ID NO: 277048 - DNA, 19 bp, Homo sapiens
  siRNA target sequence for AUTS2 (NM_015570.1,2624-2642).
ccgttacacccaactcaat

SEQ ID NO: 277049 - DNA, 19 bp, Homo sapiens
  siRNA target sequence for AUTS2 (NM_015570.1,2666-2684).
gtgtgcagaactttagcaa

SEQ ID NO: 277050 - DNA, 19 bp, Homo sapiens
  siRNA target sequence for AUTS2 (NM_015570.1,2818-2836).
cgagactcatctgttagta

SEQ ID NO: 277051 - DNA, 19 bp, Homo sapiens
  siRNA target sequence for AUTS2 (NM_015570.1,2819-2837).
gagactcatctgttagtaa

SEQ ID NO: 277052 - DNA, 19 bp, Homo sapiens
  siRNA target sequence for AUTS2 (NM_015570.1,3442-3460).
gacaggactcgcatgatga

SEQ ID NO: 277053 - DNA, 19 bp, Homo sapiens
  siRNA target sequence for AUTS2 (NM_015570.1,3500-3518).
gcttcccgtacccttcttt

SEQ ID NO: 277054 - DNA, 19 bp, Homo sapiens
  siRNA target sequence for AUTS2 (NM_015570.1,3549-3567).
ggatccttaccgagaactt

SEQ ID NO: 277055 - DNA, 19 bp, Homo sapiens
  siRNA target sequence for AUTS2 (NM_015570.1,3554-3572).
cttaccgagaacttgacat

SEQ ID NO: 277056 - DNA, 19 bp, Homo sapiens
  siRNA target sequence for AUTS2 (NM_015570.1,4070-4088).
cccacacgctgaaggatat

SEQ ID NO: 277057 - DNA, 19 bp, Homo sapiens
  siRNA target sequence for B1 (NM_014451.2,510-528).
cgtgattggtggtctacta

SEQ ID NO: 277058 - DNA, 19 bp, Homo sapiens
  siRNA target sequence for B1 (NM_014451.2,676-694).
gagctcaagccgaagattt

SEQ ID NO: 277059 - DNA, 19 bp, Homo sapiens
  siRNA target sequence for B1 (NM_014451.2,679-697).
ctcaagccgaagatttgct

SEQ ID NO: 277060 - DNA, 19 bp, Homo sapiens
  siRNA target sequence for B1 (NM_014451.2,756-774).
ggtaccgaaatgctacatt

SEQ ID NO: 277061 - DNA, 19 bp, Homo sapiens
  siRNA target sequence for B1 (NM_014451.2,776-794).
ggctgtgttacattctaga

SEQ ID NO: 277062 - DNA, 19 bp, Homo sapiens
  siRNA target sequence for B1 (NM_014451.2,817-835).
caggaaccttgggtaatgt

SEQ ID NO: 277063 - DNA, 19 bp, Homo sapiens
  siRNA target sequence for B1 (NM_014451.2,860-878).
gaaattgatgtatgaacat

SEQ ID NO: 277064 - DNA, 19 bp, Homo sapiens
  siRNA target sequence for B1 (NM_014451.2,905-923).
gacctatggatcatttggt

SEQ ID NO: 277065 - DNA, 19 bp, Homo sapiens
  siRNA target sequence for B1 (NM_014451.2,925-943).
gtgtaaaaggtcgagattt

SEQ ID NO: 277066 - DNA, 19 bp, Homo sapiens
  siRNA target sequence for B1 (NM_014451.2,927-945).
gtaaaaggtcgagatttaa

SEQ ID NO: 277067 - DNA, 19 bp, Homo sapiens
  siRNA target sequence for B1 (NM_014451.2,933-951).
ggtcgagatttaatttgca

SEQ ID NO: 277068 - DNA, 19 bp, Homo sapiens
  siRNA target sequence for B1 (NM_014451.2,934-952).
gtcgagatttaatttgcat

SEQ ID NO: 277069 - DNA, 19 bp, Homo sapiens
  siRNA target sequence for B1 (NM_014451.2,989-1007).
ggagagctatgcttttgga

SEQ ID NO: 277070 - DNA, 19 bp, Homo sapiens
  siRNA target sequence for B1 (NM_014451.2,1035-1053).
ggtcctcttgcctacagtt

SEQ ID NO: 277071 - DNA, 19 bp, Homo sapiens
  siRNA target sequence for B1 (NM_014451.2,1046-1064).
ctacagttcccgtacagat

SEQ ID NO: 277072 - DNA, 19 bp, Homo sapiens
  siRNA target sequence for B1 (NM_014451.2,1051-1069).
gttcccgtacagattcctt

SEQ ID NO: 277073 - DNA, 19 bp, Homo sapiens
  siRNA target sequence for B1 (NM_014451.2,1089-1107).
caacaagtggaaagttata

SEQ ID NO: 277074 - DNA, 19 bp, Homo sapiens
  siRNA target sequence for B1 (NM_014451.2,1113-1131).
caggtacttgcttttgcaa

SEQ ID NO: 277075 - DNA, 19 bp, Homo sapiens
  siRNA target sequence for B1 (NM_014451.2,1177-1195).
ctggaaaaagactagttgt

SEQ ID NO: 277076 - DNA, 19 bp, Homo sapiens
  siRNA target sequence for B1 (NM_014451.2,1191-1209).
gttgtggattggactctaa

SEQ ID NO: 277077 - DNA, 19 bp, Homo sapiens
  siRNA target sequence for B1 (NM_014451.2,1218-1236).
gagcaagcccttgacatat

SEQ ID NO: 277078 - DNA, 19 bp, Homo sapiens
  siRNA target sequence for B1 (NM_014451.2,1227-1245).
cttgacatatgtattgtct

SEQ ID NO: 277079 - DNA, 19 bp, Homo sapiens
  siRNA target sequence for B1 (NM_014451.2,1237-1255).
gtattgtctctttcaatca

SEQ ID NO: 277080 - DNA, 19 bp, Homo sapiens
  siRNA target sequence for B1 (NM_014451.2,1258-1276).
cggcatcctctgtttttgt

SEQ ID NO: 277081 - DNA, 19 bp, Homo sapiens
  siRNA target sequence for B1 (NM_014451.2,1259-1277).
ggcatcctctgtttttgtt

SEQ ID NO: 277082 - DNA, 19 bp, Homo sapiens
  siRNA target sequence for B1 (NM_014451.2,1292-1310).
ctttttttgccttaaggat

SEQ ID NO: 277083 - DNA, 19 bp, Homo sapiens
  siRNA target sequence for B1 (NM_014451.2,1341-1359).
gattggagcccaagttgtt

SEQ ID NO: 277084 - DNA, 19 bp, Homo sapiens
  siRNA target sequence for B1 (NM_014451.2,1586-1604).
gttccaagctccaaacgtt

SEQ ID NO: 277085 - DNA, 19 bp, Homo sapiens
  siRNA target sequence for B1 (NM_014451.2,1590-1608).
caagctccaaacgttcaat

SEQ ID NO: 277086 - DNA, 19 bp, Homo sapiens
  siRNA target sequence for B1 (NM_014451.2,1601-1619).
cgttcaatctcgagaacta

SEQ ID NO: 277087 - DNA, 19 bp, Homo sapiens
  siRNA target sequence for B1 (NM_014451.2,1602-1620).
gttcaatctcgagaactaa

SEQ ID NO: 277088 - DNA, 19 bp, Homo sapiens
  siRNA target sequence for B1 (NM_014451.2,1605-1623).
caatctcgagaactaaact

SEQ ID NO: 277089 - DNA, 19 bp, Homo sapiens
  siRNA target sequence for B1 (NM_014451.2,1609-1627).
ctcgagaactaaactatga

SEQ ID NO: 277090 - DNA, 19 bp, Homo sapiens
  siRNA target sequence for B1 (NM_014451.2,1622-1640).
ctatgatgaacttgatgta

SEQ ID NO: 277091 - DNA, 19 bp, Homo sapiens
  siRNA target sequence for B1 (NM_014451.2,1629-1647).
gaacttgatgtagaaatga

SEQ ID NO: 277092 - DNA, 19 bp, Homo sapiens
  siRNA target sequence for B1 (NM_014451.2,1736-1754).
cgtggtttctcctaacttt

SEQ ID NO: 277093 - DNA, 19 bp, Homo sapiens
  siRNA target sequence for B1 (NM_014451.2,1739-1757).
ggtttctcctaactttgat

SEQ ID NO: 277094 - DNA, 19 bp, Homo sapiens
  siRNA target sequence for B1 (NM_014451.2,1744-1762).
ctcctaactttgattcagt

SEQ ID NO: 277095 - DNA, 19 bp, Homo sapiens
  siRNA target sequence for B1 (NM_014451.2,1765-1783).
ctcaagcgaccgatgttga

SEQ ID NO: 277096 - DNA, 19 bp, Homo sapiens
  siRNA target sequence for B1 (NM_014451.2,1868-1886).
ctacgtgcaaccaccatta

SEQ ID NO: 277097 - DNA, 19 bp, Homo sapiens
  siRNA target sequence for B1 (NM_014451.2,1875-1893).
caaccaccattagaattga

SEQ ID NO: 277098 - DNA, 19 bp, Homo sapiens
  siRNA target sequence for B1 (NM_014451.2,1899-1917).
gatcagttcacctttgaat

SEQ ID NO: 277099 - DNA, 19 bp, Homo sapiens
  siRNA target sequence for B1 (NM_014451.2,1924-1942).
gcattccgcgagttatcca

SEQ ID NO: 277100 - DNA, 19 bp, Homo sapiens
  siRNA target sequence for B1 (NM_014451.2,1925-1943).
cattccgcgagttatccaa

SEQ ID NO: 277101 - DNA, 19 bp, Homo sapiens
  siRNA target sequence for B1 (NM_014451.2,1929-1947).
ccgcgagttatccaatgta

SEQ ID NO: 277102 - DNA, 19 bp, Homo sapiens
  siRNA target sequence for B1 (NM_014451.2,1930-1948).
cgcgagttatccaatgtaa

SEQ ID NO: 277103 - DNA, 19 bp, Homo sapiens
  siRNA target sequence for B1 (NM_014451.2,1931-1949).
gcgagttatccaatgtaaa

SEQ ID NO: 277104 - DNA, 19 bp, Homo sapiens
  siRNA target sequence for B1 (NM_014451.2,1932-1950).
cgagttatccaatgtaaat

SEQ ID NO: 277105 - DNA, 19 bp, Homo sapiens
  siRNA target sequence for B1 (NM_014451.2,1933-1951).
gagttatccaatgtaaatt

SEQ ID NO: 277106 - DNA, 19 bp, Homo sapiens
  siRNA target sequence for B1 (NM_014451.2,1940-1958).
ccaatgtaaatttagactt

SEQ ID NO: 277107 - DNA, 19 bp, Homo sapiens
  siRNA target sequence for B1 (NM_014451.2,1954-1972).
gacttcccctaaagttaat

SEQ ID NO: 277108 - DNA, 19 bp, Homo sapiens
  siRNA target sequence for B1 (NM_014451.2,2001-2019).
gcaagccacaaaattacta

SEQ ID NO: 277109 - DNA, 19 bp, Homo sapiens
  siRNA target sequence for B1 (NM_014451.2,2002-2020).
caagccacaaaattactat

SEQ ID NO: 277110 - DNA, 19 bp, Homo sapiens
  siRNA target sequence for B1 (NM_014451.2,2117-2135).
cttaggaggtgctcgaatt

SEQ ID NO: 277111 - DNA, 19 bp, Homo sapiens
  siRNA target sequence for B1 (NM_014451.2,2122-2140).
gaggtgctcgaattactgt

SEQ ID NO: 277112 - DNA, 19 bp, Homo sapiens
  siRNA target sequence for B1 (NM_014451.2,2139-2157).
gttcttgcttccaaaactt

SEQ ID NO: 277113 - DNA, 19 bp, Homo sapiens
  siRNA target sequence for B1 (NM_014451.2,2149-2167).
ccaaaacttctcaacgata

SEQ ID NO: 277114 - DNA, 19 bp, Homo sapiens
  siRNA target sequence for B1 (NM_014451.2,2150-2168).
caaaacttctcaacgatat

SEQ ID NO: 277115 - DNA, 19 bp, Homo sapiens
  siRNA target sequence for B1 (NM_014451.2,2160-2178).
caacgatatcgcattcaga

SEQ ID NO: 277116 - DNA, 19 bp, Homo sapiens
  siRNA target sequence for B1 (NM_014451.2,2169-2187).
cgcattcagagtgaacaat

SEQ ID NO: 277117 - DNA, 19 bp, Homo sapiens
  siRNA target sequence for B1 (NM_014451.2,2179-2197).
gtgaacaatttgaagatct

SEQ ID NO: 277118 - DNA, 19 bp, Homo sapiens
  siRNA target sequence for B1 (NM_014451.2,2193-2211).
gatctttggctcataacca

SEQ ID NO: 277119 - DNA, 19 bp, Homo sapiens
  siRNA target sequence for B1 (NM_014451.2,2204-2222).
cataaccaatgagcttatt

SEQ ID NO: 277120 - DNA, 19 bp, Homo sapiens
  siRNA target sequence for B1 (NM_014451.2,2252-2270).
gggagtcaaagattttgca

SEQ ID NO: 277121 - DNA, 19 bp, Homo sapiens
  siRNA target sequence for B1 (NM_014451.2,2272-2290).
gttctttttcgggatctat

SEQ ID NO: 277122 - DNA, 19 bp, Homo sapiens
  siRNA target sequence for B1 (NM_014451.2,2284-2302).
gatctataccccttcaaga

SEQ ID NO: 277123 - DNA, 19 bp, Homo sapiens
  siRNA target sequence for B1 (NM_014451.2,2312-2330).
gttgattgatcatcatttt

SEQ ID NO: 277124 - DNA, 19 bp, Homo sapiens
  siRNA target sequence for B1 (NM_014451.2,2406-2424).
cggctactagcaagattca

SEQ ID NO: 277125 - DNA, 19 bp, Homo sapiens
  siRNA target sequence for B1 (NM_014451.2,2407-2425).
ggctactagcaagattcaa

SEQ ID NO: 277126 - DNA, 19 bp, Homo sapiens
  siRNA target sequence for B1 (NM_014451.2,2412-2430).
ctagcaagattcaaagata

SEQ ID NO: 277127 - DNA, 19 bp, Homo sapiens
  siRNA target sequence for B1 (NM_014451.2,2477-2495).
ctacaagcaggtaattgct

SEQ ID NO: 277128 - DNA, 19 bp, Homo sapiens
  siRNA target sequence for B1 (NM_014451.2,2524-2542).
gcaatctgttccagtcatt

SEQ ID NO: 277129 - DNA, 19 bp, Homo sapiens
  siRNA target sequence for B1 (NM_014451.2,2560-2578).
ccacccatttggtgattct

SEQ ID NO: 277130 - DNA, 19 bp, Homo sapiens
  siRNA target sequence for B1 (NM_014451.2,2719-2737).
gcctgtcgaagagttctaa

SEQ ID NO: 277131 - DNA, 19 bp, Homo sapiens
  siRNA target sequence for B1 (NM_014451.2,2814-2832).
ctctgcgatagattatcca

SEQ ID NO: 277132 - DNA, 19 bp, Homo sapiens
  siRNA target sequence for B1 (NM_014451.2,2885-2903).
catgccaggtggttgtact

SEQ ID NO: 277133 - DNA, 19 bp, Homo sapiens
  siRNA target sequence for B1 (NM_014451.2,2890-2908).
caggtggttgtactacaat

SEQ ID NO: 277134 - DNA, 19 bp, Homo sapiens
  siRNA target sequence for B1 (NM_014451.2,2911-2929).
cagagtcagacctagaaga

SEQ ID NO: 277135 - DNA, 19 bp, Homo sapiens
  siRNA target sequence for B1 (NM_014451.2,2946-2964).
gactctacagaactgttta

SEQ ID NO: 277136 - DNA, 19 bp, Homo sapiens
  siRNA target sequence for B1 (NM_014451.2,2990-3008).
gacacccaggcctgaagtt

SEQ ID NO: 277137 - DNA, 19 bp, Homo sapiens
  siRNA target sequence for B1 (NM_198428.1,1934-1952).
gactagaacagtaagcttt

SEQ ID NO: 277138 - DNA, 19 bp, Homo sapiens
  siRNA target sequence for B1 (NM_198428.1,1972-1990).
gttatacaccatcagaatt

SEQ ID NO: 277139 - DNA, 19 bp, Homo sapiens
  siRNA target sequence for B7 (NM_006992.1,254-272).
ctcacggaggacatgatga

SEQ ID NO: 277140 - DNA, 19 bp, Homo sapiens
  siRNA target sequence for B7 (NM_006992.1,311-329).
ctggctcatgcttatgtca

SEQ ID NO: 277141 - DNA, 19 bp, Homo sapiens
  siRNA target sequence for B7 (NM_006992.1,487-505).
gcgaagtgcccagatgaat

SEQ ID NO: 277142 - DNA, 19 bp, Homo sapiens
  siRNA target sequence for B7 (NM_006992.1,489-507).
gaagtgcccagatgaatga

SEQ ID NO: 277143 - DNA, 19 bp, Homo sapiens
  siRNA target sequence for B7 (NM_006992.1,520-538).
gcagattgctagttttgct

SEQ ID NO: 277144 - DNA, 19 bp, Homo sapiens
  siRNA target sequence for B7 (NM_006992.1,523-541).
gattgctagttttgcttat

SEQ ID NO: 277145 - DNA, 19 bp, Homo sapiens
  siRNA target sequence for B7 (NM_006992.1,568-586).
ctctcatcctcgtcttgaa

SEQ ID NO: 277146 - DNA, 19 bp, Homo sapiens
  siRNA target sequence for B7 (NM_006992.1,632-650).
gaccccgagaagttgatca

SEQ ID NO: 277147 - DNA, 19 bp, Homo sapiens
  siRNA target sequence for B7H3 (NM_025240.1,588-606).
caacgagcagggcttgttt

SEQ ID NO: 277148 - DNA, 19 bp, Homo sapiens
  siRNA target sequence for B7H3 (NM_025240.1,809-827).
gctggagaaagatcaaaca

SEQ ID NO: 277149 - DNA, 19 bp, Homo sapiens
  siRNA target sequence for BAL (NM_031458.1,248-266).
ccggagcagcagcttacaa

SEQ ID NO: 277150 - DNA, 19 bp, Homo sapiens
  siRNA target sequence for BAL (NM_031458.1,249-267).
cggagcagcagcttacaat

SEQ ID NO: 277151 - DNA, 19 bp, Homo sapiens
  siRNA target sequence for BAL (NM_031458.1,253-271).
gcagcagcttacaatgaaa

SEQ ID NO: 277152 - DNA, 19 bp, Homo sapiens
  siRNA target sequence for BAL (NM_031458.1,358-376).
gaatgtctcccctacaagt

SEQ ID NO: 277153 - DNA, 19 bp, Homo sapiens
  siRNA target sequence for BAL (NM_031458.1,413-431).
ggcaaattcccattaacca

SEQ ID NO: 277154 - DNA, 19 bp, Homo sapiens
  siRNA target sequence for BAL (NM_031458.1,473-491).
gtgaagtcctccagaataa

SEQ ID NO: 277155 - DNA, 19 bp, Homo sapiens
  siRNA target sequence for BAL (NM_031458.1,568-586).
ctgactcctaggatagagt

SEQ ID NO: 277156 - DNA, 19 bp, Homo sapiens
  siRNA target sequence for BAL (NM_031458.1,575-593).
ctaggatagagttatcagt

SEQ ID NO: 277157 - DNA, 19 bp, Homo sapiens
  siRNA target sequence for BAL (NM_031458.1,641-659).
cagccaatgaagatcttct

SEQ ID NO: 277158 - DNA, 19 bp, Homo sapiens
  siRNA target sequence for BAL (NM_031458.1,695-713).
ctggtggatttgaaatcca

SEQ ID NO: 277159 - DNA, 19 bp, Homo sapiens
  siRNA target sequence for BAL (NM_031458.1,729-747).
gtttgttgccagatatggt

SEQ ID NO: 277160 - DNA, 19 bp, Homo sapiens
  siRNA target sequence for BAL (NM_031458.1,788-806).
ggcttccctgcaaacagat

SEQ ID NO: 277161 - DNA, 19 bp, Homo sapiens
  siRNA target sequence for BAL (NM_031458.1,820-838).
gggcctcggtggatggaat

SEQ ID NO: 277162 - DNA, 19 bp, Homo sapiens
  siRNA target sequence for BAL (NM_031458.1,840-858).
ggataaacagggatgtact

SEQ ID NO: 277163 - DNA, 19 bp, Homo sapiens
  siRNA target sequence for BAL (NM_031458.1,870-888).
gagggccattgtaagtatt

SEQ ID NO: 277164 - DNA, 19 bp, Homo sapiens
  siRNA target sequence for BAL (NM_031458.1,872-890).
gggccattgtaagtattct

SEQ ID NO: 277165 - DNA, 19 bp, Homo sapiens
  siRNA target sequence for BAL (NM_031458.1,968-986).
ctctgaatttgtgtacaaa

SEQ ID NO: 277166 - DNA, 19 bp, Homo sapiens
  siRNA target sequence for BAL (NM_031458.1,978-996).
gtgtacaaagactattgta

SEQ ID NO: 277167 - DNA, 19 bp, Homo sapiens
  siRNA target sequence for BAL (NM_031458.1,997-1015).
gagactatccgggttagtt

SEQ ID NO: 277168 - DNA, 19 bp, Homo sapiens
  siRNA target sequence for BAL (NM_031458.1,1021-1039).
gggaagccaatgatgagta

SEQ ID NO: 277169 - DNA, 19 bp, Homo sapiens
  siRNA target sequence for BAL (NM_031458.1,1022-1040).
ggaagccaatgatgagtaa

SEQ ID NO: 277170 - DNA, 19 bp, Homo sapiens
  siRNA target sequence for BAL (NM_031458.1,1023-1041).
gaagccaatgatgagtaat

SEQ ID NO: 277171 - DNA, 19 bp, Homo sapiens
  siRNA target sequence for BAL (NM_031458.1,1027-1045).
ccaatgatgagtaatttga

SEQ ID NO: 277172 - DNA, 19 bp, Homo sapiens
  siRNA target sequence for BAL (NM_031458.1,1145-1163).
ccccttctttcaatgcaat

SEQ ID NO: 277173 - DNA, 19 bp, Homo sapiens
  siRNA target sequence for BAL (NM_031458.1,1192-1210).
gtccagggccacattgaat

SEQ ID NO: 277174 - DNA, 19 bp, Homo sapiens
  siRNA target sequence for BAL (NM_031458.1,1212-1230).
gcagacggcagatgtaatt

SEQ ID NO: 277175 - DNA, 19 bp, Homo sapiens
  siRNA target sequence for BAL (NM_031458.1,1240-1258).
gtaaacccacatgatatta

SEQ ID NO: 277176 - DNA, 19 bp, Homo sapiens
  siRNA target sequence for BAL (NM_031458.1,1245-1263).
cccacatgatattacagtt

SEQ ID NO: 277177 - DNA, 19 bp, Homo sapiens
  siRNA target sequence for BAL (NM_031458.1,1265-1283).
gacctgtggcaaagtcaat

SEQ ID NO: 277178 - DNA, 19 bp, Homo sapiens
  siRNA target sequence for BAL (NM_031458.1,1324-1342).
gccacaaaggctaaacagt

SEQ ID NO: 277179 - DNA, 19 bp, Homo sapiens
  siRNA target sequence for BAL (NM_031458.1,1325-1343).
ccacaaaggctaaacagtt

SEQ ID NO: 277180 - DNA, 19 bp, Homo sapiens
  siRNA target sequence for BAL (NM_031458.1,1479-1497).
cattgagcaaaatataact

SEQ ID NO: 277181 - DNA, 19 bp, Homo sapiens
  siRNA target sequence for BAL (NM_031458.1,1514-1532).
cccttgggactggaaacat

SEQ ID NO: 277182 - DNA, 19 bp, Homo sapiens
  siRNA target sequence for BAL (NM_031458.1,1519-1537).
gggactggaaacatggaaa

SEQ ID NO: 277183 - DNA, 19 bp, Homo sapiens
  siRNA target sequence for BAL (NM_031458.1,1521-1539).
gactggaaacatggaaata

SEQ ID NO: 277184 - DNA, 19 bp, Homo sapiens
  siRNA target sequence for BAL (NM_031458.1,1606-1624).
caccagttaactgtaaaat

SEQ ID NO: 277185 - DNA, 19 bp, Homo sapiens
  siRNA target sequence for BAL (NM_031458.1,1608-1626).
ccagttaactgtaaaattt

SEQ ID NO: 277186 - DNA, 19 bp, Homo sapiens
  siRNA target sequence for BAL (NM_031458.1,1636-1654).
ccaacagatttggagatat

SEQ ID NO: 277187 - DNA, 19 bp, Homo sapiens
  siRNA target sequence for BAL (NM_031458.1,1650-1668).
gatatataaggctttcagt

SEQ ID NO: 277188 - DNA, 19 bp, Homo sapiens
  siRNA target sequence for BAL (NM_031458.1,1685-1703).
ggtccaagatgctgagttt

SEQ ID NO: 277189 - DNA, 19 bp, Homo sapiens
  siRNA target sequence for BAL (NM_031458.1,1790-1808).
gattcaacgtggaagagat

SEQ ID NO: 277190 - DNA, 19 bp, Homo sapiens
  siRNA target sequence for BAL (NM_031458.1,1816-1834).
gcccacgcatggatccaaa

SEQ ID NO: 277191 - DNA, 19 bp, Homo sapiens
  siRNA target sequence for BAL (NM_031458.1,1819-1837).
cacgcatggatccaaagaa

SEQ ID NO: 277192 - DNA, 19 bp, Homo sapiens
  siRNA target sequence for BAL (NM_031458.1,1857-1875).
ccacatcattgagaataat

SEQ ID NO: 277193 - DNA, 19 bp, Homo sapiens
  siRNA target sequence for BAL (NM_031458.1,1962-1980).
cccaggaaggacagagtta

SEQ ID NO: 277194 - DNA, 19 bp, Homo sapiens
  siRNA target sequence for BAL (NM_031458.1,2005-2023).
ctcattgaggtggttatga

SEQ ID NO: 277195 - DNA, 19 bp, Homo sapiens
  siRNA target sequence for BAL (NM_031458.1,2016-2034).
ggttatgaacattgaagat

SEQ ID NO: 277196 - DNA, 19 bp, Homo sapiens
  siRNA target sequence for BAL (NM_031458.1,2094-2112).
gttaggacagtggactatt

SEQ ID NO: 277197 - DNA, 19 bp, Homo sapiens
  siRNA target sequence for BAL (NM_031458.1,2219-2237).
gtggtttgcaggttctaaa

SEQ ID NO: 277198 - DNA, 19 bp, Homo sapiens
  siRNA target sequence for BAL (NM_031458.1,2403-2421).
gacaccttgcgatccaaaa

SEQ ID NO: 277199 - DNA, 19 bp, Homo sapiens
  siRNA target sequence for BAL (NM_031458.1,2405-2423).
caccttgcgatccaaaata

SEQ ID NO: 277200 - DNA, 19 bp, Homo sapiens
  siRNA target sequence for BAL (NM_031458.1,2489-2507).
ctgcagataagctgatcta

SEQ ID NO: 277201 - DNA, 19 bp, Homo sapiens
  siRNA target sequence for BAL (NM_031458.1,2543-2561).
gccagggacatccgttaaa

SEQ ID NO: 277202 - DNA, 19 bp, Homo sapiens
  siRNA target sequence for BAL (NM_031458.1,2544-2562).
ccagggacatccgttaaat

SEQ ID NO: 277203 - DNA, 19 bp, Homo sapiens
  siRNA target sequence for BAL (NM_031458.1,2545-2563).
cagggacatccgttaaata

SEQ ID NO: 277204 - DNA, 19 bp, Homo sapiens
  siRNA target sequence for BAL (NM_031458.1,2547-2565).
gggacatccgttaaatatt

SEQ ID NO: 277205 - DNA, 19 bp, Homo sapiens
  siRNA target sequence for BAL (NM_031458.1,2549-2567).
gacatccgttaaatattgt

SEQ ID NO: 277206 - DNA, 19 bp, Homo sapiens
  siRNA target sequence for BAL (NM_031458.1,2707-2725).
cagtcacaagattactcat

SEQ ID NO: 277207 - DNA, 19 bp, Homo sapiens
  siRNA target sequence for BAX (NM_004324.3,269-287).
gggacgaactggacagtaa

SEQ ID NO: 277208 - DNA, 19 bp, Homo sapiens
  siRNA target sequence for BAX (NM_004324.3,686-704).
catcagatgtggtctataa

SEQ ID NO: 277209 - DNA, 19 bp, Homo sapiens
  siRNA target sequence for BBS2 (NM_031885.2,432-450).
ctgtgttcaccctgaaact

SEQ ID NO: 277210 - DNA, 19 bp, Homo sapiens
  siRNA target sequence for BBS2 (NM_031885.2,525-543).
cccaaacgggcaaggtttt

SEQ ID NO: 277211 - DNA, 19 bp, Homo sapiens
  siRNA target sequence for BBS2 (NM_031885.2,526-544).
ccaaacgggcaaggttttt

SEQ ID NO: 277212 - DNA, 19 bp, Homo sapiens
  siRNA target sequence for BBS2 (NM_031885.2,527-545).
caaacgggcaaggttttta

SEQ ID NO: 277213 - DNA, 19 bp, Homo sapiens
  siRNA target sequence for BBS2 (NM_031885.2,617-635).
gtttctcttctcagcatta

SEQ ID NO: 277214 - DNA, 19 bp, Homo sapiens
  siRNA target sequence for BBS2 (NM_031885.2,653-671).
ctgactgcaggcgtattga

SEQ ID NO: 277215 - DNA, 19 bp, Homo sapiens
  siRNA target sequence for BBS2 (NM_031885.2,684-702).
gctatgatgcccttttagt

SEQ ID NO: 277216 - DNA, 19 bp, Homo sapiens
  siRNA target sequence for BBS2 (NM_031885.2,703-721).
ggggacacagactaatctt

SEQ ID NO: 277217 - DNA, 19 bp, Homo sapiens
  siRNA target sequence for BBS2 (NM_031885.2,704-722).
gggacacagactaatcttt

SEQ ID NO: 277218 - DNA, 19 bp, Homo sapiens
  siRNA target sequence for BBS2 (NM_031885.2,705-723).
ggacacagactaatctttt

SEQ ID NO: 277219 - DNA, 19 bp, Homo sapiens
  siRNA target sequence for BBS2 (NM_031885.2,714-732).
ctaatcttttggcttatga

SEQ ID NO: 277220 - DNA, 19 bp, Homo sapiens
  siRNA target sequence for BBS2 (NM_031885.2,724-742).
ggcttatgatgtctacaat

SEQ ID NO: 277221 - DNA, 19 bp, Homo sapiens
  siRNA target sequence for BBS2 (NM_031885.2,725-743).
gcttatgatgtctacaata

SEQ ID NO: 277222 - DNA, 19 bp, Homo sapiens
  siRNA target sequence for BBS2 (NM_031885.2,726-744).
cttatgatgtctacaataa

SEQ ID NO: 277223 - DNA, 19 bp, Homo sapiens
  siRNA target sequence for BBS2 (NM_031885.2,796-814).
ggggacattgggagacatt

SEQ ID NO: 277224 - DNA, 19 bp, Homo sapiens
  siRNA target sequence for BBS2 (NM_031885.2,797-815).
gggacattgggagacattt

SEQ ID NO: 277225 - DNA, 19 bp, Homo sapiens
  siRNA target sequence for BBS2 (NM_031885.2,820-838).
ccctcttgcgattattggt

SEQ ID NO: 277226 - DNA, 19 bp, Homo sapiens
  siRNA target sequence for BBS2 (NM_031885.2,829-847).
gattattggtggcaattgt

SEQ ID NO: 277227 - DNA, 19 bp, Homo sapiens
  siRNA target sequence for BBS2 (NM_031885.2,846-864).
gtgctctgcaaggtttcaa

SEQ ID NO: 277228 - DNA, 19 bp, Homo sapiens
  siRNA target sequence for BBS2 (NM_031885.2,849-867).
ctctgcaaggtttcaatca

SEQ ID NO: 277229 - DNA, 19 bp, Homo sapiens
  siRNA target sequence for BBS2 (NM_031885.2,891-909).
cggttactggagacaatgt

SEQ ID NO: 277230 - DNA, 19 bp, Homo sapiens
  siRNA target sequence for BBS2 (NM_031885.2,900-918).
gagacaatgttaattcctt

SEQ ID NO: 277231 - DNA, 19 bp, Homo sapiens
  siRNA target sequence for BBS2 (NM_031885.2,919-937).
ggccttgtgtgactttgat

SEQ ID NO: 277232 - DNA, 19 bp, Homo sapiens
  siRNA target sequence for BBS2 (NM_031885.2,945-963).
gaaagaaagagcttcttgt

SEQ ID NO: 277233 - DNA, 19 bp, Homo sapiens
  siRNA target sequence for BBS2 (NM_031885.2,965-983).
ggatctgaggattttgata

SEQ ID NO: 277234 - DNA, 19 bp, Homo sapiens
  siRNA target sequence for BBS2 (NM_031885.2,1031-1049).
gagatagtcacctctcttt

SEQ ID NO: 277235 - DNA, 19 bp, Homo sapiens
  siRNA target sequence for BBS2 (NM_031885.2,1042-1060).
ctctctttgtcccatgtat

SEQ ID NO: 277236 - DNA, 19 bp, Homo sapiens
  siRNA target sequence for BBS2 (NM_031885.2,1054-1072).
catgtatggcagtcgattt

SEQ ID NO: 277237 - DNA, 19 bp, Homo sapiens
  siRNA target sequence for BBS2 (NM_031885.2,1057-1075).
gtatggcagtcgatttggt

SEQ ID NO: 277238 - DNA, 19 bp, Homo sapiens
  siRNA target sequence for BBS2 (NM_031885.2,1095-1113).
cagttggagtttatgacaa

SEQ ID NO: 277239 - DNA, 19 bp, Homo sapiens
  siRNA target sequence for BBS2 (NM_031885.2,1097-1115).
gttggagtttatgacaaaa

SEQ ID NO: 277240 - DNA, 19 bp, Homo sapiens
  siRNA target sequence for BBS2 (NM_031885.2,1119-1137).
cccgatactggagaattaa

SEQ ID NO: 277241 - DNA, 19 bp, Homo sapiens
  siRNA target sequence for BBS2 (NM_031885.2,1120-1138).
ccgatactggagaattaaa

SEQ ID NO: 277242 - DNA, 19 bp, Homo sapiens
  siRNA target sequence for BBS2 (NM_031885.2,1319-1337).
gatggccacatacagttaa

SEQ ID NO: 277243 - DNA, 19 bp, Homo sapiens
  siRNA target sequence for BBS2 (NM_031885.2,1322-1340).
ggccacatacagttaatct

SEQ ID NO: 277244 - DNA, 19 bp, Homo sapiens
  siRNA target sequence for BBS2 (NM_031885.2,1477-1495).
ccgtaactatgaggaaaat

SEQ ID NO: 277245 - DNA, 19 bp, Homo sapiens
  siRNA target sequence for BBS2 (NM_031885.2,1606-1624).
ccaaactgctcatacagaa

SEQ ID NO: 277246 - DNA, 19 bp, Homo sapiens
  siRNA target sequence for BBS2 (NM_031885.2,1657-1675).
ccgagcagtattgattttt

SEQ ID NO: 277247 - DNA, 19 bp, Homo sapiens
  siRNA target sequence for BBS2 (NM_031885.2,1709-1727).
gtacatcccagcattcaca

SEQ ID NO: 277248 - DNA, 19 bp, Homo sapiens
  siRNA target sequence for BBS2 (NM_031885.2,1795-1813).
ggcattcgtgggttacaga

SEQ ID NO: 277249 - DNA, 19 bp, Homo sapiens
  siRNA target sequence for BBS2 (NM_031885.2,1796-1814).
gcattcgtgggttacagaa

SEQ ID NO: 277250 - DNA, 19 bp, Homo sapiens
  siRNA target sequence for BBS2 (NM_031885.2,1812-1830).
gaagcagcacccagtttca

SEQ ID NO: 277251 - DNA, 19 bp, Homo sapiens
  siRNA target sequence for BBS2 (NM_031885.2,1816-1834).
cagcacccagtttcatgta

SEQ ID NO: 277252 - DNA, 19 bp, Homo sapiens
  siRNA target sequence for BBS2 (NM_031885.2,1855-1873).
ccctcgattctccatgtat

SEQ ID NO: 277253 - DNA, 19 bp, Homo sapiens
  siRNA target sequence for BBS2 (NM_031885.2,1896-1914).
ccagtgagccaatcagtta

SEQ ID NO: 277254 - DNA, 19 bp, Homo sapiens
  siRNA target sequence for BBS2 (NM_031885.2,1899-1917).
gtgagccaatcagttatgt

SEQ ID NO: 277255 - DNA, 19 bp, Homo sapiens
  siRNA target sequence for BBS2 (NM_031885.2,1901-1919).
gagccaatcagttatgtta

SEQ ID NO: 277256 - DNA, 19 bp, Homo sapiens
  siRNA target sequence for BBS2 (NM_031885.2,1905-1923).
caatcagttatgttaactt

SEQ ID NO: 277257 - DNA, 19 bp, Homo sapiens
  siRNA target sequence for BBS2 (NM_031885.2,1938-1956).
gggcacagagggttgttgt

SEQ ID NO: 277258 - DNA, 19 bp, Homo sapiens
  siRNA target sequence for BBS2 (NM_031885.2,1959-1977).
ggctcggtcagaactttct

SEQ ID NO: 277259 - DNA, 19 bp, Homo sapiens
  siRNA target sequence for BBS2 (NM_031885.2,1961-1979).
ctcggtcagaactttctgt

SEQ ID NO: 277260 - DNA, 19 bp, Homo sapiens
  siRNA target sequence for BBS2 (NM_031885.2,1963-1981).
cggtcagaactttctgtta

SEQ ID NO: 277261 - DNA, 19 bp, Homo sapiens
  siRNA target sequence for BBS2 (NM_031885.2,2045-2063).
ggccacctgcatataaaaa

SEQ ID NO: 277262 - DNA, 19 bp, Homo sapiens
  siRNA target sequence for BBS2 (NM_031885.2,2075-2093).
ggagagatcactataaata

SEQ ID NO: 277263 - DNA, 19 bp, Homo sapiens
  siRNA target sequence for BBS2 (NM_031885.2,2080-2098).
gatcactataaatactgat

SEQ ID NO: 277264 - DNA, 19 bp, Homo sapiens
  siRNA target sequence for BBS2 (NM_031885.2,2105-2123).
gatttggctggtgatatca

SEQ ID NO: 277265 - DNA, 19 bp, Homo sapiens
  siRNA target sequence for BBS2 (NM_031885.2,2136-2154).
catcattttttgctattga

SEQ ID NO: 277266 - DNA, 19 bp, Homo sapiens
  siRNA target sequence for BBS2 (NM_031885.2,2171-2189).
gcggattttcctgtctatt

SEQ ID NO: 277267 - DNA, 19 bp, Homo sapiens
  siRNA target sequence for BBS2 (NM_031885.2,2172-2190).
cggattttcctgtctattt

SEQ ID NO: 277268 - DNA, 19 bp, Homo sapiens
  siRNA target sequence for BBS2 (NM_031885.2,2185-2203).
ctattttgaggaattacga

SEQ ID NO: 277269 - DNA, 19 bp, Homo sapiens
  siRNA target sequence for BBS2 (NM_031885.2,2255-2273).
gctgatatggctgatcatt

SEQ ID NO: 277270 - DNA, 19 bp, Homo sapiens
  siRNA target sequence for BBS2 (NM_031885.2,2274-2292).
ctaatttgatccgaagttt

SEQ ID NO: 277271 - DNA, 19 bp, Homo sapiens
  siRNA target sequence for BBS2 (NM_031885.2,2337-2355).
caatgaagagtcgttatat

SEQ ID NO: 277272 - DNA, 19 bp, Homo sapiens
  siRNA target sequence for BBS2 (NM_031885.2,2341-2359).
gaagagtcgttatatggaa

SEQ ID NO: 277273 - DNA, 19 bp, Homo sapiens
  siRNA target sequence for BBS2 (NM_031885.2,2346-2364).
gtcgttatatggaactcta

SEQ ID NO: 277274 - DNA, 19 bp, Homo sapiens
  siRNA target sequence for BBS2 (NM_031885.2,2349-2367).
gttatatggaactctatga

SEQ ID NO: 277275 - DNA, 19 bp, Homo sapiens
  siRNA target sequence for BBS2 (NM_031885.2,2356-2374).
ggaactctatgaccttaat

SEQ ID NO: 277276 - DNA, 19 bp, Homo sapiens
  siRNA target sequence for BBS2 (NM_031885.2,2357-2375).
gaactctatgaccttaata

SEQ ID NO: 277277 - DNA, 19 bp, Homo sapiens
  siRNA target sequence for BBS2 (NM_031885.2,2369-2387).
cttaatagagacttgctaa

SEQ ID NO: 277278 - DNA, 19 bp, Homo sapiens
  siRNA target sequence for BBS2 (NM_031885.2,2376-2394).
gagacttgctaaatggata

SEQ ID NO: 277279 - DNA, 19 bp, Homo sapiens
  siRNA target sequence for BBS2 (NM_031885.2,2378-2396).
gacttgctaaatggatata

SEQ ID NO: 277280 - DNA, 19 bp, Homo sapiens
  siRNA target sequence for BBS2 (NM_031885.2,2434-2452).
cctcaaagcagtaaatcaa

SEQ ID NO: 277281 - DNA, 19 bp, Homo sapiens
  siRNA target sequence for BBS2 (NM_031885.2,2469-2487).
gtcgtctgcgggttggaaa

SEQ ID NO: 277282 - DNA, 19 bp, Homo sapiens
  siRNA target sequence for BBS2 (NM_031885.2,2508-2526).
ctgcttgtcgggatgcaat

SEQ ID NO: 277283 - DNA, 19 bp, Homo sapiens
  siRNA target sequence for BBS2 (NM_031885.2,2518-2536).
ggatgcaattcgaagcaat

SEQ ID NO: 277284 - DNA, 19 bp, Homo sapiens
  siRNA target sequence for BBS2 (NM_031885.2,2519-2537).
gatgcaattcgaagcaata

SEQ ID NO: 277285 - DNA, 19 bp, Homo sapiens
  siRNA target sequence for BBS2 (NM_031885.2,2522-2540).
gcaattcgaagcaataaca

SEQ ID NO: 277286 - DNA, 19 bp, Homo sapiens
  siRNA target sequence for BBS2 (NM_031885.2,2523-2541).
caattcgaagcaataacat

SEQ ID NO: 277287 - DNA, 19 bp, Homo sapiens
  siRNA target sequence for BC-2 (NM_014453.2,246-264).
ccgcgagcgacagaaacta

SEQ ID NO: 277288 - DNA, 19 bp, Homo sapiens
  siRNA target sequence for BC-2 (NM_014453.2,248-266).
gcgagcgacagaaactaga

SEQ ID NO: 277289 - DNA, 19 bp, Homo sapiens
  siRNA target sequence for BC-2 (NM_014453.2,334-352).
cgcatcatggcaaaagact

SEQ ID NO: 277290 - DNA, 19 bp, Homo sapiens
  siRNA target sequence for BC-2 (NM_014453.2,366-384).
gcgctatgtgcgcaagttt

SEQ ID NO: 277291 - DNA, 19 bp, Homo sapiens
  siRNA target sequence for BC-2 (NM_014453.2,368-386).
gctatgtgcgcaagtttgt

SEQ ID NO: 277292 - DNA, 19 bp, Homo sapiens
  siRNA target sequence for BC-2 (NM_014453.2,369-387).
ctatgtgcgcaagtttgta

SEQ ID NO: 277293 - DNA, 19 bp, Homo sapiens
  siRNA target sequence for BC-2 (NM_014453.2,550-568).
caggcagagatcatggata

SEQ ID NO: 277294 - DNA, 19 bp, Homo sapiens
  siRNA target sequence for BC-2 (NM_014453.2,669-687).
gggacttagcctaacagat

SEQ ID NO: 277295 - DNA, 19 bp, Homo sapiens
  siRNA target sequence for BC-2 (NM_014453.2,710-728).
ctgggggctcgcttagtgt

SEQ ID NO: 277296 - DNA, 19 bp, Homo sapiens
  siRNA target sequence for BC-2 (NM_014453.2,790-808).
ctggaggaacggcttaaga

SEQ ID NO: 277297 - DNA, 19 bp, Homo sapiens
  siRNA target sequence for BCLP (NM_033504.2,249-267).
cgtgggcacccctcaagat

SEQ ID NO: 277298 - DNA, 19 bp, Homo sapiens
  siRNA target sequence for BCLP (NM_033504.2,556-574).
gaccccacacgcatttata

SEQ ID NO: 277299 - DNA, 19 bp, Homo sapiens
  siRNA target sequence for BCLP (NM_033504.2,559-577).
cccacacgcatttatagct

SEQ ID NO: 277300 - DNA, 19 bp, Homo sapiens
  siRNA target sequence for BENE (NM_005434.3,415-433).
gccgccacccacatagtat

SEQ ID NO: 277301 - DNA, 19 bp, Homo sapiens
  siRNA target sequence for BENE (NM_005434.3,416-434).
ccgccacccacatagtata

SEQ ID NO: 277302 - DNA, 19 bp, Homo sapiens
  siRNA target sequence for BENE (NM_005434.3,593-611).
gcgctgccgtcctacaagt

SEQ ID NO: 277303 - DNA, 19 bp, Homo sapiens
  siRNA target sequence for BENE (NM_005434.3,594-612).
cgctgccgtcctacaagta

SEQ ID NO: 277304 - DNA, 19 bp, Homo sapiens
  siRNA target sequence for BENE (NM_005434.3,643-661).
gacccaagaatttactaca

SEQ ID NO: 277305 - DNA, 19 bp, Homo sapiens
  siRNA target sequence for BICD1 (NM_001714.1,103-121).
cagacggtggaccattata

SEQ ID NO: 277306 - DNA, 19 bp, Homo sapiens
  siRNA target sequence for BICD1 (NM_001714.1,221-239).
ccctcaaacagcagtatga

SEQ ID NO: 277307 - DNA, 19 bp, Homo sapiens
  siRNA target sequence for BICD1 (NM_001714.1,222-240).
cctcaaacagcagtatgat

SEQ ID NO: 277308 - DNA, 19 bp, Homo sapiens
  siRNA target sequence for BICD1 (NM_001714.1,377-395).
catcgaaggaggcttacta

SEQ ID NO: 277309 - DNA, 19 bp, Homo sapiens
  siRNA target sequence for BICD1 (NM_001714.1,380-398).
cgaaggaggcttactatct

SEQ ID NO: 277310 - DNA, 19 bp, Homo sapiens
  siRNA target sequence for BICD1 (NM_001714.1,547-565).
gatgaaatccgagaatata

SEQ ID NO: 277311 - DNA, 19 bp, Homo sapiens
  siRNA target sequence for BICD1 (NM_001714.1,550-568).
gaaatccgagaatataagt

SEQ ID NO: 277312 - DNA, 19 bp, Homo sapiens
  siRNA target sequence for BICD1 (NM_001714.1,582-600).
gctccttcaggactatact

SEQ ID NO: 277313 - DNA, 19 bp, Homo sapiens
  siRNA target sequence for BICD1 (NM_001714.1,586-604).
cttcaggactatactgaat

SEQ ID NO: 277314 - DNA, 19 bp, Homo sapiens
  siRNA target sequence for BICD1 (NM_001714.1,654-672).
gaaccaggttgaatacgaa

SEQ ID NO: 277315 - DNA, 19 bp, Homo sapiens
  siRNA target sequence for BICD1 (NM_001714.1,673-691).
ggcttaaagcatgagatta

SEQ ID NO: 277316 - DNA, 19 bp, Homo sapiens
  siRNA target sequence for BICD1 (NM_001714.1,740-758).
ccatccgattgaaagagat

SEQ ID NO: 277317 - DNA, 19 bp, Homo sapiens
  siRNA target sequence for BICD1 (NM_001714.1,741-759).
catccgattgaaagagatt

SEQ ID NO: 277318 - DNA, 19 bp, Homo sapiens
  siRNA target sequence for BICD1 (NM_001714.1,778-796).
gaagccctcgagactttaa

SEQ ID NO: 277319 - DNA, 19 bp, Homo sapiens
  siRNA target sequence for BICD1 (NM_001714.1,843-861).
gtatatcagcctcaatgat

SEQ ID NO: 277320 - DNA, 19 bp, Homo sapiens
  siRNA target sequence for BICD1 (NM_001714.1,948-966).
ccatgggcctcttgtgaaa

SEQ ID NO: 277321 - DNA, 19 bp, Homo sapiens
  siRNA target sequence for BICD1 (NM_001714.1,984-1002).
gactcccaccttaaggaaa

SEQ ID NO: 277322 - DNA, 19 bp, Homo sapiens
  siRNA target sequence for BICD1 (NM_001714.1,1092-1110).
gcgggaaaaggccattctt

SEQ ID NO: 277323 - DNA, 19 bp, Homo sapiens
  siRNA target sequence for BICD1 (NM_001714.1,1315-1333).
ggtttagagatccttgaat

SEQ ID NO: 277324 - DNA, 19 bp, Homo sapiens
  siRNA target sequence for BICD1 (NM_001714.1,1437-1455).
ggccaagtatgagagtaaa

SEQ ID NO: 277325 - DNA, 19 bp, Homo sapiens
  siRNA target sequence for BICD1 (NM_001714.1,1451-1469).
gtaaaatccagatgtatga

SEQ ID NO: 277326 - DNA, 19 bp, Homo sapiens
  siRNA target sequence for BICD1 (NM_001714.1,1556-1574).
gcatagccaacgaaaatca

SEQ ID NO: 277327 - DNA, 19 bp, Homo sapiens
  siRNA target sequence for BICD1 (NM_001714.1,1589-1607).
cggcccaggatgagttagt

SEQ ID NO: 277328 - DNA, 19 bp, Homo sapiens
  siRNA target sequence for BICD1 (NM_001714.1,1641-1659).
ccatgtgtgtctatgtaat

SEQ ID NO: 277329 - DNA, 19 bp, Homo sapiens
  siRNA target sequence for BICD1 (NM_001714.1,1677-1695).
ggtcatgctggattactat

SEQ ID NO: 277330 - DNA, 19 bp, Homo sapiens
  siRNA target sequence for BICD1 (NM_001714.1,1678-1696).
gtcatgctggattactata

SEQ ID NO: 277331 - DNA, 19 bp, Homo sapiens
  siRNA target sequence for BICD1 (NM_001714.1,1785-1803).
gtcatccccggtagaaaca

SEQ ID NO: 277332 - DNA, 19 bp, Homo sapiens
  siRNA target sequence for BICD1 (NM_001714.1,1935-1953).
ccgcaaagagccaatgaat

SEQ ID NO: 277333 - DNA, 19 bp, Homo sapiens
  siRNA target sequence for BICD1 (NM_001714.1,1950-1968).
gaatatctacaaccttaat

SEQ ID NO: 277334 - DNA, 19 bp, Homo sapiens
  siRNA target sequence for BICD1 (NM_001714.1,1970-1988).
ccataatccgggaccaaat

SEQ ID NO: 277335 - DNA, 19 bp, Homo sapiens
  siRNA target sequence for BICD1 (NM_001714.1,2022-2040).
gcaactgtctcgtcaaaga

SEQ ID NO: 277336 - DNA, 19 bp, Homo sapiens
  siRNA target sequence for BICD1 (NM_001714.1,2055-2073).
gctagcccccatgattgat

SEQ ID NO: 277337 - DNA, 19 bp, Homo sapiens
  siRNA target sequence for BICD1 (NM_001714.1,2056-2074).
ctagcccccatgattgata

SEQ ID NO: 277338 - DNA, 19 bp, Homo sapiens
  siRNA target sequence for BICD1 (NM_001714.1,2060-2078).
cccccatgattgataaaga

SEQ ID NO: 277339 - DNA, 19 bp, Homo sapiens
  siRNA target sequence for BICD1 (NM_001714.1,2079-2097).
caaggaagccttaatggaa

SEQ ID NO: 277340 - DNA, 19 bp, Homo sapiens
  siRNA target sequence for BICD1 (NM_001714.1,2150-2168).
cattgagggcggtgttgaa

SEQ ID NO: 277341 - DNA, 19 bp, Homo sapiens
  siRNA target sequence for BICD1 (NM_001714.1,2186-2204).
ctgaggtggcgctagctaa

SEQ ID NO: 277342 - DNA, 19 bp, Homo sapiens
  siRNA target sequence for BICD1 (NM_001714.1,2191-2209).
gtggcgctagctaatctca

SEQ ID NO: 277343 - DNA, 19 bp, Homo sapiens
  siRNA target sequence for BICD1 (NM_001714.1,2195-2213).
cgctagctaatctcaagaa

SEQ ID NO: 277344 - DNA, 19 bp, Homo sapiens
  siRNA target sequence for BICD1 (NM_001714.1,2249-2267).
ccatgacgaagcttagaaa

SEQ ID NO: 277345 - DNA, 19 bp, Homo sapiens
  siRNA target sequence for BICD1 (NM_001714.1,2250-2268).
catgacgaagcttagaaat

SEQ ID NO: 277346 - DNA, 19 bp, Homo sapiens
  siRNA target sequence for BICD1 (NM_001714.1,2253-2271).
gacgaagcttagaaatgaa

SEQ ID NO: 277347 - DNA, 19 bp, Homo sapiens
  siRNA target sequence for BICD1 (NM_001714.1,2526-2544).
gatcggcagccctaaagta

SEQ ID NO: 277348 - DNA, 19 bp, Homo sapiens
  siRNA target sequence for BICD1 (NM_001714.1,2529-2547).
cggcagccctaaagtaagt

SEQ ID NO: 277349 - DNA, 19 bp, Homo sapiens
  siRNA target sequence for BICD1 (NM_001714.1,2582-2600).
cttacctcctgcatagtca

SEQ ID NO: 277350 - DNA, 19 bp, Homo sapiens
  siRNA target sequence for BICD1 (NM_001714.1,2700-2718).
ggcttcctacctacagaat

SEQ ID NO: 277351 - DNA, 19 bp, Homo sapiens
  siRNA target sequence for BICD1 (NM_001714.1,2705-2723).
cctacctacagaatttatt

SEQ ID NO: 277352 - DNA, 19 bp, Homo sapiens
  siRNA target sequence for BICD1 (NM_001714.1,2737-2755).
gatcccacctccacagaat

SEQ ID NO: 277353 - DNA, 19 bp, Homo sapiens
  siRNA target sequence for BICD1 (NM_001714.1,2805-2823).
ccggctcagcaaggaaaaa

SEQ ID NO: 277354 - DNA, 19 bp, Homo sapiens
  siRNA target sequence for BICD1 (NM_001714.1,2832-2850).
cgtggctccaccagattgt

SEQ ID NO: 277355 - DNA, 19 bp, Homo sapiens
  siRNA target sequence for BK65A6.2 (NM_019601.2,490-508).
ccaacaaagtgtcaatgat

SEQ ID NO: 277356 - DNA, 19 bp, Homo sapiens
  siRNA target sequence for BK65A6.2 (NM_019601.2,792-810).
cggatcatcgacagcaaaa

SEQ ID NO: 277357 - DNA, 19 bp, Homo sapiens
  siRNA target sequence for BK65A6.2 (NM_019601.2,793-811).
ggatcatcgacagcaaaaa

SEQ ID NO: 277358 - DNA, 19 bp, Homo sapiens
  siRNA target sequence for BK65A6.2 (NM_019601.2,1278-1296).
gatgtcctcagcttctatt

SEQ ID NO: 277359 - DNA, 19 bp, Homo sapiens
  siRNA target sequence for BK65A6.2 (NM_019601.2,1281-1299).
gtcctcagcttctattact

SEQ ID NO: 277360 - DNA, 19 bp, Homo sapiens
  siRNA target sequence for BK65A6.2 (NM_019601.2,1391-1409).
cttcggagacccacacttt

SEQ ID NO: 277361 - DNA, 19 bp, Homo sapiens
  siRNA target sequence for BK65A6.2 (NM_019601.2,1419-1437).
gacggcaccaacttcacat

SEQ ID NO: 277362 - DNA, 19 bp, Homo sapiens
  siRNA target sequence for BK65A6.2 (NM_019601.2,1672-1690).
ggatggacctgaaaggaat

SEQ ID NO: 277363 - DNA, 19 bp, Homo sapiens
  siRNA target sequence for BK65A6.2 (NM_019601.2,2233-2251).
cacctcccaacggacaaaa

SEQ ID NO: 277364 - DNA, 19 bp, Homo sapiens
  siRNA target sequence for BK65A6.2 (NM_019601.2,2236-2254).
ctcccaacggacaaaagga

SEQ ID NO: 277365 - DNA, 19 bp, Homo sapiens
  siRNA target sequence for BK65A6.2 (NM_019601.2,2443-2461).
cggttgcgctcgtctatgt

SEQ ID NO: 277366 - DNA, 19 bp, Homo sapiens
  siRNA target sequence for BM-002 (NM_016617.1,44-62).
cgaaggtttcctttaagat

SEQ ID NO: 277367 - DNA, 19 bp, Homo sapiens
  siRNA target sequence for BM-002 (NM_016617.1,78-96).
cccacggctgccgtacaaa

SEQ ID NO: 277368 - DNA, 19 bp, Homo sapiens
  siRNA target sequence for BM-002 (NM_016617.1,80-98).
cacggctgccgtacaaagt

SEQ ID NO: 277369 - DNA, 19 bp, Homo sapiens
  siRNA target sequence for BM-002 (NM_016617.1,83-101).
ggctgccgtacaaagtact

SEQ ID NO: 277370 - DNA, 19 bp, Homo sapiens
  siRNA target sequence for BM-002 (NM_016617.1,100-118).
ctcagtgttcctgaaagta

SEQ ID NO: 277371 - DNA, 19 bp, Homo sapiens
  siRNA target sequence for BM-002 (NM_016617.1,102-120).
cagtgttcctgaaagtaca

SEQ ID NO: 277372 - DNA, 19 bp, Homo sapiens
  siRNA target sequence for BM-002 (NM_016617.1,191-209).
ccaatgatggaataggaat

SEQ ID NO: 277373 - DNA, 19 bp, Homo sapiens
  siRNA target sequence for BM-002 (NM_016617.1,192-210).
caatgatggaataggaata

SEQ ID NO: 277374 - DNA, 19 bp, Homo sapiens
  siRNA target sequence for BM-002 (NM_016617.1,261-279).
gcggattattcctagagat

SEQ ID NO: 277375 - DNA, 19 bp, Homo sapiens
  siRNA target sequence for BPESC1 (NM_021812.1,617-635).
gtccttgggttgatttctt

SEQ ID NO: 277376 - DNA, 19 bp, Homo sapiens
  siRNA target sequence for BRD3 (NM_007371.2,322-340).
gcccgtggacgcaatcaaa

SEQ ID NO: 277377 - DNA, 19 bp, Homo sapiens
  siRNA target sequence for BRD3 (NM_007371.2,323-341).
cccgtggacgcaatcaaat

SEQ ID NO: 277378 - DNA, 19 bp, Homo sapiens
  siRNA target sequence for BRD3 (NM_007371.2,324-342).
ccgtggacgcaatcaaatt

SEQ ID NO: 277379 - DNA, 19 bp, Homo sapiens
  siRNA target sequence for BRD3 (NM_007371.2,326-344).
gtggacgcaatcaaattga

SEQ ID NO: 277380 - DNA, 19 bp, Homo sapiens
  siRNA target sequence for BRD3 (NM_007371.2,343-361).
gaacctgccggattatcat

SEQ ID NO: 277381 - DNA, 19 bp, Homo sapiens
  siRNA target sequence for BRD3 (NM_007371.2,346-364).
cctgccggattatcataaa

SEQ ID NO: 277382 - DNA, 19 bp, Homo sapiens
  siRNA target sequence for BRD3 (NM_007371.2,349-367).
gccggattatcataaaata

SEQ ID NO: 277383 - DNA, 19 bp, Homo sapiens
  siRNA target sequence for BRD3 (NM_007371.2,426-444).
ggagtgcaagcgaatgtat

SEQ ID NO: 277384 - DNA, 19 bp, Homo sapiens
  siRNA target sequence for BRD3 (NM_007371.2,495-513).
cagatgacatagtgctaat

SEQ ID NO: 277385 - DNA, 19 bp, Homo sapiens
  siRNA target sequence for BRD3 (NM_007371.2,508-526).
gctaatggcccaagcttta

SEQ ID NO: 277386 - DNA, 19 bp, Homo sapiens
  siRNA target sequence for BRD3 (NM_007371.2,561-579).
cccaagaggaagttgaatt

SEQ ID NO: 277387 - DNA, 19 bp, Homo sapiens
  siRNA target sequence for BRD3 (NM_007371.2,562-580).
ccaagaggaagttgaatta

SEQ ID NO: 277388 - DNA, 19 bp, Homo sapiens
  siRNA target sequence for BRD3 (NM_007371.2,1283-1301).
ctgatgttctcgaattgct

SEQ ID NO: 277389 - DNA, 19 bp, Homo sapiens
  siRNA target sequence for BRD3 (NM_007371.2,1586-1604).
gccccagtaaacaaaccaa

SEQ ID NO: 277390 - DNA, 19 bp, Homo sapiens
  siRNA target sequence for BRD3 (NM_007371.2,2021-2039).
gaactggagagatatgtca

SEQ ID NO: 277391 - DNA, 19 bp, Homo sapiens
  siRNA target sequence for BRD3 (NM_007371.2,2076-2094).
cagcaagcgggaagaaaca

SEQ ID NO: 277392 - DNA, 19 bp, Homo sapiens
  siRNA target sequence for BRMS1 (NM_015399.2,131-149).
cagcctccaagcaaagaca

SEQ ID NO: 277393 - DNA, 19 bp, Homo sapiens
  siRNA target sequence for BRMS1 (NM_015399.2,445-463).
gcagcggagcctcaagatt

SEQ ID NO: 277394 - DNA, 19 bp, Homo sapiens
  siRNA target sequence for BRMS1 (NM_015399.2,470-488).
caggtggcagggatctaca

SEQ ID NO: 277395 - DNA, 19 bp, Homo sapiens
  siRNA target sequence for BRMS1 (NM_015399.2,503-521).
gatgtgatcaggaataagt

SEQ ID NO: 277396 - DNA, 19 bp, Homo sapiens
  siRNA target sequence for BRMS1 (NM_015399.2,513-531).
ggaataagtacgaatgtga

SEQ ID NO: 277397 - DNA, 19 bp, Homo sapiens
  siRNA target sequence for BRMS1 (NM_015399.2,641-659).
ctggacctcagctctgaat

SEQ ID NO: 277398 - DNA, 19 bp, Homo sapiens
  siRNA target sequence for BRMS1 (NM_015399.2,750-768).
gcccatacatcgtgtacat

SEQ ID NO: 277399 - DNA, 19 bp, Homo sapiens
  siRNA target sequence for BRMS1 (NM_015399.2,793-811).
ggactggacagccatcaaa

SEQ ID NO: 277400 - DNA, 19 bp, Homo sapiens
  siRNA target sequence for BRMS1 (NM_015399.2,794-812).
gactggacagccatcaaaa

SEQ ID NO: 277401 - DNA, 19 bp, Homo sapiens
  siRNA target sequence for BRP44L (NM_016098.1,275-293).
cagtgggcggatgacattt

SEQ ID NO: 277402 - DNA, 19 bp, Homo sapiens
  siRNA target sequence for BRP44L (NM_016098.1,294-312).
gccctctgttgctattctt

SEQ ID NO: 277403 - DNA, 19 bp, Homo sapiens
  siRNA target sequence for BRP44L (NM_016098.1,295-313).
ccctctgttgctattcttt

SEQ ID NO: 277404 - DNA, 19 bp, Homo sapiens
  siRNA target sequence for BRP44L (NM_016098.1,370-388).
gccacgcaacaaatgaagt

SEQ ID NO: 277405 - DNA, 19 bp, Homo sapiens
  siRNA target sequence for BRP44L (NM_016098.1,371-389).
ccacgcaacaaatgaagta

SEQ ID NO: 277406 - DNA, 19 bp, Homo sapiens
  siRNA target sequence for BRP44L (NM_016098.1,419-437).
caaacacgagatgactaaa

SEQ ID NO: 277407 - DNA, 19 bp, Homo sapiens
  siRNA target sequence for BTN2A1 (NM_007049.2,667-685).
caatgaggggccatgaaga

SEQ ID NO: 277408 - DNA, 19 bp, Homo sapiens
  siRNA target sequence for BTN2A1 (NM_007049.2,955-973).
cagtggccctgcctatcat

SEQ ID NO: 277409 - DNA, 19 bp, Homo sapiens
  siRNA target sequence for BTN2A1 (NM_007049.2,1062-1080).
gagtttgaacgggaaacaa

SEQ ID NO: 277410 - DNA, 19 bp, Homo sapiens
  siRNA target sequence for BTN2A1 (NM_078476.1,1188-1206).
catgctgagctccaattct

SEQ ID NO: 277411 - DNA, 19 bp, Homo sapiens
  siRNA target sequence for BTN2A1 (NM_078476.1,1194-1212).
gagctccaattcttctcaa

SEQ ID NO: 277412 - DNA, 19 bp, Homo sapiens
  siRNA target sequence for C11orf1 (NM_022761.1,101-119).
ctgtggcagccttgttaat

SEQ ID NO: 277413 - DNA, 19 bp, Homo sapiens
  siRNA target sequence for C11orf1 (NM_022761.1,184-202).
ggcgatgcaccactaatga

SEQ ID NO: 277414 - DNA, 19 bp, Homo sapiens
  siRNA target sequence for C11orf1 (NM_022761.1,186-204).
cgatgcaccactaatgaga

SEQ ID NO: 277415 - DNA, 19 bp, Homo sapiens
  siRNA target sequence for C11orf1 (NM_022761.1,187-205).
gatgcaccactaatgagaa

SEQ ID NO: 277416 - DNA, 19 bp, Homo sapiens
  siRNA target sequence for C11orf1 (NM_022761.1,193-211).
ccactaatgagaataccta

SEQ ID NO: 277417 - DNA, 19 bp, Homo sapiens
  siRNA target sequence for C11orf1 (NM_022761.1,194-212).
cactaatgagaatacctat

SEQ ID NO: 277418 - DNA, 19 bp, Homo sapiens
  siRNA target sequence for C11orf1 (NM_022761.1,250-268).
gatatgacctgaggaatat

SEQ ID NO: 277419 - DNA, 19 bp, Homo sapiens
  siRNA target sequence for C11orf1 (NM_022761.1,292-310).
cccagtttggacactactt

SEQ ID NO: 277420 - DNA, 19 bp, Homo sapiens
  siRNA target sequence for C11orf1 (NM_022761.1,324-342).
gatacaagctacaacaaca

SEQ ID NO: 277421 - DNA, 19 bp, Homo sapiens
  siRNA target sequence for C11orf1 (NM_022761.1,410-428).
ggatcctccccgatacaaa

SEQ ID NO: 277422 - DNA, 19 bp, Homo sapiens
  siRNA target sequence for C11orf1 (NM_022761.1,411-429).
gatcctccccgatacaaat

SEQ ID NO: 277423 - DNA, 19 bp, Homo sapiens
  siRNA target sequence for C11orf2 (NM_013265.2,398-416).
gacaccatccggaagatga

SEQ ID NO: 277424 - DNA, 19 bp, Homo sapiens
  siRNA target sequence for C11orf2 (NM_013265.2,407-425).
cggaagatgaagaacgatt

SEQ ID NO: 277425 - DNA, 19 bp, Homo sapiens
  siRNA target sequence for C11orf2 (NM_013265.2,927-945).
cggctcccgacgtgttaga

SEQ ID NO: 277426 - DNA, 19 bp, Homo sapiens
  siRNA target sequence for C11orf2 (NM_013265.2,930-948).
ctcccgacgtgttagagtt

SEQ ID NO: 277427 - DNA, 19 bp, Homo sapiens
  siRNA target sequence for C11orf2 (NM_013265.2,1424-1442).
gcagcagtgcaccttttca

SEQ ID NO: 277428 - DNA, 19 bp, Homo sapiens
  siRNA target sequence for C11orf2 (NM_013265.2,2080-2098).
gctattctctgaacgtatt

SEQ ID NO: 277429 - DNA, 19 bp, Homo sapiens
  siRNA target sequence for C11ORF4 (NM_020155.2,542-560).
cttctacttccgagatact

SEQ ID NO: 277430 - DNA, 19 bp, Homo sapiens
  siRNA target sequence for C11ORF4 (NM_020155.2,1118-1136).
caaaggctacctggtattt

SEQ ID NO: 277431 - DNA, 19 bp, Homo sapiens
  siRNA target sequence for C11ORF4 (NM_020155.2,1254-1272).
gcctctcggtcctacttct

SEQ ID NO: 277432 - DNA, 19 bp, Homo sapiens
  siRNA target sequence for C11ORF4 (NM_020155.2,1255-1273).
cctctcggtcctacttctt

SEQ ID NO: 277433 - DNA, 19 bp, Homo sapiens
  siRNA target sequence for C11ORF4 (NM_020155.2,1256-1274).
ctctcggtcctacttcttt

SEQ ID NO: 277434 - DNA, 19 bp, Homo sapiens
  siRNA target sequence for C11ORF4 (NM_020155.2,1258-1276).
ctcggtcctacttctttga

SEQ ID NO: 277435 - DNA, 19 bp, Homo sapiens
  siRNA target sequence for C14orf1 (NM_007176.1,78-96).
ccgtttcctgaatgtgtta

SEQ ID NO: 277436 - DNA, 19 bp, Homo sapiens
  siRNA target sequence for C14orf1 (NM_007176.1,79-97).
cgtttcctgaatgtgttaa

SEQ ID NO: 277437 - DNA, 19 bp, Homo sapiens
  siRNA target sequence for C14orf1 (NM_007176.1,84-102).
cctgaatgtgttaagaagt

SEQ ID NO: 277438 - DNA, 19 bp, Homo sapiens
  siRNA target sequence for C14orf1 (NM_007176.1,149-167).
gcttccgagaccacacttt

SEQ ID NO: 277439 - DNA, 19 bp, Homo sapiens
  siRNA target sequence for C14orf1 (NM_007176.1,150-168).
cttccgagaccacactttt

SEQ ID NO: 277440 - DNA, 19 bp, Homo sapiens
  siRNA target sequence for C14orf1 (NM_007176.1,160-178).
cacacttttctctatgaaa

SEQ ID NO: 277441 - DNA, 19 bp, Homo sapiens
  siRNA target sequence for C14orf1 (NM_007176.1,186-204).
cactggcaagccaaacctt

SEQ ID NO: 277442 - DNA, 19 bp, Homo sapiens
  siRNA target sequence for C14orf1 (NM_007176.1,191-209).
gcaagccaaaccttgtgaa

SEQ ID NO: 277443 - DNA, 19 bp, Homo sapiens
  siRNA target sequence for C14orf1 (NM_007176.1,272-290).
gtgccattgacattcacaa

SEQ ID NO: 277444 - DNA, 19 bp, Homo sapiens
  siRNA target sequence for C14orf1 (NM_007176.1,275-293).
ccattgacattcacaacaa

SEQ ID NO: 277445 - DNA, 19 bp, Homo sapiens
  siRNA target sequence for C14orf1 (NM_007176.1,346-364).
ctctctgagttgtttgtct

SEQ ID NO: 277446 - DNA, 19 bp, Homo sapiens
  siRNA target sequence for C14orf1 (NM_007176.1,438-456).
ggtcgggctccggtatcta

SEQ ID NO: 277447 - DNA, 19 bp, Homo sapiens
  siRNA target sequence for C14orf1 (NM_007176.1,441-459).
cgggctccggtatctagaa

SEQ ID NO: 277448 - DNA, 19 bp, Homo sapiens
  siRNA target sequence for C14orf1 (NM_007176.1,443-461).
ggctccggtatctagaagt

SEQ ID NO: 277449 - DNA, 19 bp, Homo sapiens
  siRNA target sequence for C14orf1 (NM_007176.1,444-462).
gctccggtatctagaagta

SEQ ID NO: 277450 - DNA, 19 bp, Homo sapiens
  siRNA target sequence for C14orf1 (NM_007176.1,447-465).
ccggtatctagaagtagaa

SEQ ID NO: 277451 - DNA, 19 bp, Homo sapiens
  siRNA target sequence for C14orf122 (NM_016049.3,237-255).
cagtcaacgggctgttttt

SEQ ID NO: 277452 - DNA, 19 bp, Homo sapiens
  siRNA target sequence for C14orf122 (NM_016049.3,467-485).
gggcgaattgcagaattct

SEQ ID NO: 277453 - DNA, 19 bp, Homo sapiens
  siRNA target sequence for C14orf122 (NM_016049.3,497-515).
gtacttattatgttggata

SEQ ID NO: 277454 - DNA, 19 bp, Homo sapiens
  siRNA target sequence for C14orf122 (NM_016049.3,577-595).
ccgctgggtccctaaggat

SEQ ID NO: 277455 - DNA, 19 bp, Homo sapiens
  siRNA target sequence for C14orf122 (NM_016049.3,578-596).
cgctgggtccctaaggata

SEQ ID NO: 277456 - DNA, 19 bp, Homo sapiens
  siRNA target sequence for C14orf122 (NM_016049.3,579-597).
gctgggtccctaaggataa

SEQ ID NO: 277457 - DNA, 19 bp, Homo sapiens
  siRNA target sequence for C14orf122 (NM_016049.3,582-600).
gggtccctaaggataagaa

SEQ ID NO: 277458 - DNA, 19 bp, Homo sapiens
  siRNA target sequence for C14orf122 (NM_016049.3,584-602).
gtccctaaggataagaact

SEQ ID NO: 277459 - DNA, 19 bp, Homo sapiens
  siRNA target sequence for C14orf122 (NM_016049.3,586-604).
ccctaaggataagaactta

SEQ ID NO: 277460 - DNA, 19 bp, Homo sapiens
  siRNA target sequence for C14orf122 (NM_016049.3,731-749).
cggctcaacactcaaatca

SEQ ID NO: 277461 - DNA, 19 bp, Homo sapiens
  siRNA target sequence for C14orf122 (NM_016049.3,757-775).
ggttggtcccactaatgga

SEQ ID NO: 277462 - DNA, 19 bp, Homo sapiens
  siRNA target sequence for C14orf123 (NM_014169.2,595-613).
cctgaagaagcaatacaga

SEQ ID NO: 277463 - DNA, 19 bp, Homo sapiens
  siRNA target sequence for C14orf123 (NM_014169.2,805-823).
cagcgtgaggccattgaga

SEQ ID NO: 277464 - DNA, 19 bp, Homo sapiens
  siRNA target sequence for C14orf123 (NM_014169.2,1059-1077).
ggcccaggagttgttaaat

SEQ ID NO: 277465 - DNA, 19 bp, Homo sapiens
  siRNA target sequence for C14orf123 (NM_014169.2,1061-1079).
cccaggagttgttaaatgt

SEQ ID NO: 277466 - DNA, 19 bp, Homo sapiens
  siRNA target sequence for C14orf123 (NM_014169.2,1113-1131).
gcctagtgtaccttctact

SEQ ID NO: 277467 - DNA, 19 bp, Homo sapiens
  siRNA target sequence for C15orf2 (NM_018958.1,3-21).
gggcaatttacttagtaaa

SEQ ID NO: 277468 - DNA, 19 bp, Homo sapiens
  siRNA target sequence for C15orf2 (NM_018958.1,4-22).
ggcaatttacttagtaaat

SEQ ID NO: 277469 - DNA, 19 bp, Homo sapiens
  siRNA target sequence for C15orf2 (NM_018958.1,589-607).
gacgtggcctccttcagat

SEQ ID NO: 277470 - DNA, 19 bp, Homo sapiens
  siRNA target sequence for C15orf2 (NM_018958.1,915-933).
gaagcctttctgtattcct

SEQ ID NO: 277471 - DNA, 19 bp, Homo sapiens
  siRNA target sequence for C15orf2 (NM_018958.1,1334-1352).
ccaccacaccaaaaatgga

SEQ ID NO: 277472 - DNA, 19 bp, Homo sapiens
  siRNA target sequence for C15orf2 (NM_018958.1,1335-1353).
caccacaccaaaaatggat

SEQ ID NO: 277473 - DNA, 19 bp, Homo sapiens
  siRNA target sequence for C15orf2 (NM_018958.1,1354-1372).
gagaaaatagcattcacaa

SEQ ID NO: 277474 - DNA, 19 bp, Homo sapiens
  siRNA target sequence for C15orf2 (NM_018958.1,1420-1438).
ggtgatcagtctaatgaga

SEQ ID NO: 277475 - DNA, 19 bp, Homo sapiens
  siRNA target sequence for C15orf2 (NM_018958.1,1421-1439).
gtgatcagtctaatgagaa

SEQ ID NO: 277476 - DNA, 19 bp, Homo sapiens
  siRNA target sequence for C15orf2 (NM_018958.1,1442-1460).
gaggctcttataattcagt

SEQ ID NO: 277477 - DNA, 19 bp, Homo sapiens
  siRNA target sequence for C15orf2 (NM_018958.1,1540-1558).
gagtccccaatatctatgt

SEQ ID NO: 277478 - DNA, 19 bp, Homo sapiens
  siRNA target sequence for C15orf2 (NM_018958.1,1542-1560).
gtccccaatatctatgtgt

SEQ ID NO: 277479 - DNA, 19 bp, Homo sapiens
  siRNA target sequence for C15orf2 (NM_018958.1,1610-1628).
ccaccgggacctcagttat

SEQ ID NO: 277480 - DNA, 19 bp, Homo sapiens
  siRNA target sequence for C15orf2 (NM_018958.1,1644-1662).
gaattccacgtcagtcatt

SEQ ID NO: 277481 - DNA, 19 bp, Homo sapiens
  siRNA target sequence for C15orf2 (NM_018958.1,1709-1727).
cggtagaccctgaagtagt

SEQ ID NO: 277482 - DNA, 19 bp, Homo sapiens
  siRNA target sequence for C15orf2 (NM_018958.1,1710-1728).
ggtagaccctgaagtagtt

SEQ ID NO: 277483 - DNA, 19 bp, Homo sapiens
  siRNA target sequence for C15orf2 (NM_018958.1,1711-1729).
gtagaccctgaagtagtta

SEQ ID NO: 277484 - DNA, 19 bp, Homo sapiens
  siRNA target sequence for C15orf2 (NM_018958.1,1723-1741).
gtagttaatatggatacta

SEQ ID NO: 277485 - DNA, 19 bp, Homo sapiens
  siRNA target sequence for C15orf2 (NM_018958.1,1744-1762).
gccccatctcaggttgtta

SEQ ID NO: 277486 - DNA, 19 bp, Homo sapiens
  siRNA target sequence for C15orf2 (NM_018958.1,1745-1763).
ccccatctcaggttgttat

SEQ ID NO: 277487 - DNA, 19 bp, Homo sapiens
  siRNA target sequence for C15orf2 (NM_018958.1,1789-1807).
gtgagctctctcccaaatt

SEQ ID NO: 277488 - DNA, 19 bp, Homo sapiens
  siRNA target sequence for C15orf2 (NM_018958.1,1892-1910).
ccaccccaagttttaacca

SEQ ID NO: 277489 - DNA, 19 bp, Homo sapiens
  siRNA target sequence for C15orf2 (NM_018958.1,1893-1911).
caccccaagttttaaccaa

SEQ ID NO: 277490 - DNA, 19 bp, Homo sapiens
  siRNA target sequence for C15orf2 (NM_018958.1,1898-1916).
caagttttaaccaactctt

SEQ ID NO: 277491 - DNA, 19 bp, Homo sapiens
  siRNA target sequence for C15orf2 (NM_018958.1,2080-2098).
cccattgaaaccaatgcta

SEQ ID NO: 277492 - DNA, 19 bp, Homo sapiens
  siRNA target sequence for C15orf2 (NM_018958.1,2081-2099).
ccattgaaaccaatgctat

SEQ ID NO: 277493 - DNA, 19 bp, Homo sapiens
  siRNA target sequence for C15orf2 (NM_018958.1,2086-2104).
gaaaccaatgctatgcata

SEQ ID NO: 277494 - DNA, 19 bp, Homo sapiens
  siRNA target sequence for C15orf2 (NM_018958.1,2461-2479).
gacaccagtgacatgaata

SEQ ID NO: 277495 - DNA, 19 bp, Homo sapiens
  siRNA target sequence for C15orf2 (NM_018958.1,2533-2551).
gaggagtacatccgatttt

SEQ ID NO: 277496 - DNA, 19 bp, Homo sapiens
  siRNA target sequence for C15orf2 (NM_018958.1,2535-2553).
ggagtacatccgattttat

SEQ ID NO: 277497 - DNA, 19 bp, Homo sapiens
  siRNA target sequence for C15orf2 (NM_018958.1,2536-2554).
gagtacatccgattttata

SEQ ID NO: 277498 - DNA, 19 bp, Homo sapiens
  siRNA target sequence for C15orf2 (NM_018958.1,2827-2845).
ccaggttttgcagagttaa

SEQ ID NO: 277499 - DNA, 19 bp, Homo sapiens
  siRNA target sequence for C15orf2 (NM_018958.1,2839-2857).
gagttaacatcaccatata

SEQ ID NO: 277500 - DNA, 19 bp, Homo sapiens
  siRNA target sequence for C15orf2 (NM_018958.1,2861-2879).
cattgggcacacctgttaa

SEQ ID NO: 277501 - DNA, 19 bp, Homo sapiens
  siRNA target sequence for C15orf2 (NM_018958.1,2886-2904).
gccagtcgagggtcacaat

SEQ ID NO: 277502 - DNA, 19 bp, Homo sapiens
  siRNA target sequence for C15orf2 (NM_018958.1,2934-2952).
gacttctggatttagaatt

SEQ ID NO: 277503 - DNA, 19 bp, Homo sapiens
  siRNA target sequence for C15orf2 (NM_018958.1,3007-3025).
ccaggcccacaagtgatta

SEQ ID NO: 277504 - DNA, 19 bp, Homo sapiens
  siRNA target sequence for C15orf2 (NM_018958.1,3255-3273).
cgcctacattcctggttta

SEQ ID NO: 277505 - DNA, 19 bp, Homo sapiens
  siRNA target sequence for C15orf2 (NM_018958.1,3257-3275).
cctacattcctggtttaga

SEQ ID NO: 277506 - DNA, 19 bp, Homo sapiens
  siRNA target sequence for C15orf2 (NM_018958.1,3312-3330).
ggatggcaccagatccata

SEQ ID NO: 277507 - DNA, 19 bp, Homo sapiens
  siRNA target sequence for C15orf2 (NM_018958.1,3414-3432).
ccactactatggacaagaa

SEQ ID NO: 277508 - DNA, 19 bp, Homo sapiens
  siRNA target sequence for C15orf2 (NM_018958.1,3415-3433).
cactactatggacaagaaa

SEQ ID NO: 277509 - DNA, 19 bp, Homo sapiens
  siRNA target sequence for C15orf2 (NM_018958.1,3424-3442).
ggacaagaaacatatgtta

SEQ ID NO: 277510 - DNA, 19 bp, Homo sapiens
  siRNA target sequence for C16orf35 (NM_012075.1,302-320).
gccccatcagcgtgattct

SEQ ID NO: 277511 - DNA, 19 bp, Homo sapiens
  siRNA target sequence for C16orf35 (NM_012075.1,464-482).
gcgattccaggttttcaga

SEQ ID NO: 277512 - DNA, 19 bp, Homo sapiens
  siRNA target sequence for C16orf35 (NM_012075.1,505-523).
gcaaccaagtctgaaatgt

SEQ ID NO: 277513 - DNA, 19 bp, Homo sapiens
  siRNA target sequence for C16orf35 (NM_012075.1,522-540).
gtgtggccaaaaatttgaa

SEQ ID NO: 277514 - DNA, 19 bp, Homo sapiens
  siRNA target sequence for C16orf35 (NM_012075.1,597-615).
ggggcagatctccaaaaca

SEQ ID NO: 277515 - DNA, 19 bp, Homo sapiens
  siRNA target sequence for C16orf35 (NM_012075.1,632-650).
gggaagcacctactatgat

SEQ ID NO: 277516 - DNA, 19 bp, Homo sapiens
  siRNA target sequence for C16orf35 (NM_012075.1,633-651).
ggaagcacctactatgatt

SEQ ID NO: 277517 - DNA, 19 bp, Homo sapiens
  siRNA target sequence for C16orf35 (NM_012075.1,688-706).
gacccgtcagtgataaact

SEQ ID NO: 277518 - DNA, 19 bp, Homo sapiens
  siRNA target sequence for C16orf35 (NM_012075.1,819-837).
cgccatggctgatggaaat

SEQ ID NO: 277519 - DNA, 19 bp, Homo sapiens
  siRNA target sequence for C16orf35 (NM_012075.1,890-908).
gggacctcaaggaagctta

SEQ ID NO: 277520 - DNA, 19 bp, Homo sapiens
  siRNA target sequence for C16orf35 (NM_012075.1,891-909).
ggacctcaaggaagcttat

SEQ ID NO: 277521 - DNA, 19 bp, Homo sapiens
  siRNA target sequence for C16orf35 (NM_012075.1,929-947).
gcgtagttcggcttcacat

SEQ ID NO: 277522 - DNA, 19 bp, Homo sapiens
  siRNA target sequence for C16orf35 (NM_012075.1,934-952).
gttcggcttcacatcaaca

SEQ ID NO: 277523 - DNA, 19 bp, Homo sapiens
  siRNA target sequence for C16orf35 (NM_012075.1,1099-1117).
ggtgagcttcctattgact

SEQ ID NO: 277524 - DNA, 19 bp, Homo sapiens
  siRNA target sequence for C16orf35 (NM_012075.1,1127-1145).
ccctagtgcgggtgatcaa

SEQ ID NO: 277525 - DNA, 19 bp, Homo sapiens
  siRNA target sequence for C16orf35 (NM_012075.1,1271-1289).
gtgagaacaacgtctacat

SEQ ID NO: 277526 - DNA, 19 bp, Homo sapiens
  siRNA target sequence for C16orf35 (NM_012075.1,1298-1316).
ccaatgccagcgtatgtct

SEQ ID NO: 277527 - DNA, 19 bp, Homo sapiens
  siRNA target sequence for C16orf35 (NM_012075.1,1396-1414).
ccggtctccttgtcagaat

SEQ ID NO: 277528 - DNA, 19 bp, Homo sapiens
  siRNA target sequence for C16orf35 (NM_012075.1,1397-1415).
cggtctccttgtcagaatt

SEQ ID NO: 277529 - DNA, 19 bp, Homo sapiens
  siRNA target sequence for C16orf35 (NM_012075.1,1399-1417).
gtctccttgtcagaattta

SEQ ID NO: 277530 - DNA, 19 bp, Homo sapiens
  siRNA target sequence for C16orf35 (NM_012075.1,1404-1422).
cttgtcagaatttaggaat

SEQ ID NO: 277531 - DNA, 19 bp, Homo sapiens
  siRNA target sequence for C16orf35 (NM_012075.1,1498-1516).
cagctgcacacctatgtct

SEQ ID NO: 277532 - DNA, 19 bp, Homo sapiens
  siRNA target sequence for C16orf35 (NM_012075.1,1950-1968).
ccacgaggaccctgtcatt

SEQ ID NO: 277533 - DNA, 19 bp, Homo sapiens
  siRNA target sequence for C16orf5 (NM_013399.1,678-696).
gctgcagggagagatcttt

SEQ ID NO: 277534 - DNA, 19 bp, Homo sapiens
  siRNA target sequence for C17orf1A (NM_031456.2,231-249).
ggaatcaaggctcaagaat

SEQ ID NO: 277535 - DNA, 19 bp, Homo sapiens
  siRNA target sequence for C17orf1A (NM_031456.2,246-264).
gaatgccccctattttcgt

SEQ ID NO: 277536 - DNA, 19 bp, Homo sapiens
  siRNA target sequence for C17orf1A (NM_031456.2,316-334).
gtcttagcctggaagatct

SEQ ID NO: 277537 - DNA, 19 bp, Homo sapiens
  siRNA target sequence for C17orf1A (NM_031456.2,322-340).
gcctggaagatcttctcta

SEQ ID NO: 277538 - DNA, 19 bp, Homo sapiens
  siRNA target sequence for C17orf1A (NM_031456.2,426-444).
gttacactatttccaaaat

SEQ ID NO: 277539 - DNA, 19 bp, Homo sapiens
  siRNA target sequence for C17orf1A (NM_031456.2,455-473).
ccacacagggaaaggattt

SEQ ID NO: 277540 - DNA, 19 bp, Homo sapiens
  siRNA target sequence for C17orf1A (NM_031456.2,458-476).
cacagggaaaggatttcat

SEQ ID NO: 277541 - DNA, 19 bp, Homo sapiens
  siRNA target sequence for C17orf1A (NM_031456.2,492-510).
gatcaacctcagcaagaaa

SEQ ID NO: 277542 - DNA, 19 bp, Homo sapiens
  siRNA target sequence for C17orf1A (NM_031456.2,530-548).
cctccttgaaccaaatgtt

SEQ ID NO: 277543 - DNA, 19 bp, Homo sapiens
  siRNA target sequence for C17orf1A (NM_031456.2,614-632).
ccaaggcgaattatactct

SEQ ID NO: 277544 - DNA, 19 bp, Homo sapiens
  siRNA target sequence for C17orf1A (NM_031456.2,620-638).
cgaattatactctcttact

SEQ ID NO: 277545 - DNA, 19 bp, Homo sapiens
  siRNA target sequence for C17orf1A (NM_031456.2,645-663).
gatgtgcaaccccaaatta

SEQ ID NO: 277546 - DNA, 19 bp, Homo sapiens
  siRNA target sequence for C17orf1A (NM_031456.2,785-803).
ctgcgacctcacaagtcta

SEQ ID NO: 277547 - DNA, 19 bp, Homo sapiens
  siRNA target sequence for C17orf1A (NM_031456.2,787-805).
gcgacctcacaagtctatt

SEQ ID NO: 277548 - DNA, 19 bp, Homo sapiens
  siRNA target sequence for C17orf1A (NM_031456.2,889-907).
gaggaaccatggaggaatt

SEQ ID NO: 277549 - DNA, 19 bp, Homo sapiens
  siRNA target sequence for C17orf1A (NM_031456.2,903-921).
gaattcactccggtgtata

SEQ ID NO: 277550 - DNA, 19 bp, Homo sapiens
  siRNA target sequence for C17orf1A (NM_031456.2,913-931).
cggtgtatatccgaaatga

SEQ ID NO: 277551 - DNA, 19 bp, Homo sapiens
  siRNA target sequence for C17orf1A (NM_031456.2,914-932).
ggtgtatatccgaaatgaa

SEQ ID NO: 277552 - DNA, 19 bp, Homo sapiens
  siRNA target sequence for C17orf1A (NM_031456.2,915-933).
gtgtatatccgaaatgaat

SEQ ID NO: 277553 - DNA, 19 bp, Homo sapiens
  siRNA target sequence for C17orf1A (NM_031456.2,972-990).
gtacgatccctgcaatcta

SEQ ID NO: 277554 - DNA, 19 bp, Homo sapiens
  siRNA target sequence for C17orf1A (NM_031456.2,1071-1089).
cctctccaagtacattcta

SEQ ID NO: 277555 - DNA, 19 bp, Homo sapiens
  siRNA target sequence for C17orf1A (NM_031456.2,1149-1167).
ggtttctgggtccatcttt

SEQ ID NO: 277556 - DNA, 19 bp, Homo sapiens
  siRNA target sequence for C17orf1A (NM_031456.2,1175-1193).
caggaatgctggatagaca

SEQ ID NO: 277557 - DNA, 19 bp, Homo sapiens
  siRNA target sequence for C17orf1A (NM_031456.2,1263-1281).
gtcagcgcacggcttcatt

SEQ ID NO: 277558 - DNA, 19 bp, Homo sapiens
  siRNA target sequence for C17orf1A (NM_031456.2,1265-1283).
cagcgcacggcttcattca

SEQ ID NO: 277559 - DNA, 19 bp, Homo sapiens
  siRNA target sequence for C17orf1A (NM_031456.2,1267-1285).
gcgcacggcttcattcaga

SEQ ID NO: 277560 - DNA, 19 bp, Homo sapiens
  siRNA target sequence for C17orf1A (NM_031456.2,1268-1286).
cgcacggcttcattcagaa

SEQ ID NO: 277561 - DNA, 19 bp, Homo sapiens
  siRNA target sequence for C17orf1A (NM_031456.2,1310-1328).
cctacacaagaggaattga

SEQ ID NO: 277562 - DNA, 19 bp, Homo sapiens
  siRNA target sequence for C17orf1A (NM_031456.2,1331-1349).
ctaattatgccaataaggt

SEQ ID NO: 277563 - DNA, 19 bp, Homo sapiens
  siRNA target sequence for C17orf1A (NM_031456.2,1352-1370).
ctatcccagttcctaaaat

SEQ ID NO: 277564 - DNA, 19 bp, Homo sapiens
  siRNA target sequence for C17orf1A (NM_031456.2,1386-1404).
gagcatgcgtgtgaaacat

SEQ ID NO: 277565 - DNA, 19 bp, Homo sapiens
  siRNA target sequence for C17orf1A (NM_031456.2,1532-1550).
ctgacacgtgggatcaaaa

SEQ ID NO: 277566 - DNA, 19 bp, Homo sapiens
  siRNA target sequence for C17orf1A (NM_031456.2,1581-1599).
gatagctgtgtcatctaat

SEQ ID NO: 277567 - DNA, 19 bp, Homo sapiens
  siRNA target sequence for C17orf1A (NM_031456.2,1586-1604).
ctgtgtcatctaatcgaaa

SEQ ID NO: 277568 - DNA, 19 bp, Homo sapiens
  siRNA target sequence for C17orf1A (NM_031456.2,1717-1735).
gggagctatgacctaagta

SEQ ID NO: 277569 - DNA, 19 bp, Homo sapiens
  siRNA target sequence for C17orf1A (NM_031456.2,1718-1736).
ggagctatgacctaagtat

SEQ ID NO: 277570 - DNA, 19 bp, Homo sapiens
  siRNA target sequence for C17orf1A (NM_031456.2,2350-2368).
cagtttgagcacataaagt

SEQ ID NO: 277571 - DNA, 19 bp, Homo sapiens
  siRNA target sequence for C17orf1A (NM_031456.2,2369-2387).
ggcagtatgccgtggaaaa

SEQ ID NO: 277572 - DNA, 19 bp, Homo sapiens
  siRNA target sequence for C17orf1A (NM_031456.2,2370-2388).
gcagtatgccgtggaaaaa

SEQ ID NO: 277573 - DNA, 19 bp, Homo sapiens
  siRNA target sequence for C17orf1A (NM_031456.2,2379-2397).
cgtggaaaaaacgaaacaa

SEQ ID NO: 277574 - DNA, 19 bp, Homo sapiens
  siRNA target sequence for C17orf1A (NM_031456.2,2431-2449).
gaaaatagtctcatggaaa

SEQ ID NO: 277575 - DNA, 19 bp, Homo sapiens
  siRNA target sequence for C17orf1A (NM_031456.2,2637-2655).
gcccagtcacccaaagaaa

SEQ ID NO: 277576 - DNA, 19 bp, Homo sapiens
  siRNA target sequence for C17orf1A (NM_031456.2,2709-2727).
cctgcagcacgcccataat

SEQ ID NO: 277577 - DNA, 19 bp, Homo sapiens
  siRNA target sequence for C17orf1A (NM_031456.2,2710-2728).
ctgcagcacgcccataatt

SEQ ID NO: 277578 - DNA, 19 bp, Homo sapiens
  siRNA target sequence for C17orf1A (NM_031456.2,2757-2775).
ccaaacagaaattactgat

SEQ ID NO: 277579 - DNA, 19 bp, Homo sapiens
  siRNA target sequence for C17orf1A (NM_031456.2,2776-2794).
gtctggggaccttcaattt

SEQ ID NO: 277580 - DNA, 19 bp, Homo sapiens
  siRNA target sequence for C17orf1A (NM_031456.2,2778-2796).
ctggggaccttcaatttca

SEQ ID NO: 277581 - DNA, 19 bp, Homo sapiens
  siRNA target sequence for C17orf1A (NM_031456.2,2780-2798).
ggggaccttcaatttcata

SEQ ID NO: 277582 - DNA, 19 bp, Homo sapiens
  siRNA target sequence for C17orf1A (NM_031456.2,2799-2817).
cccaaggaaggtcttgaat

SEQ ID NO: 277583 - DNA, 19 bp, Homo sapiens
  siRNA target sequence for C17orf1A (NM_031456.2,2805-2823).
gaaggtcttgaatttcaaa

SEQ ID NO: 277584 - DNA, 19 bp, Homo sapiens
  siRNA target sequence for C17orf1A (NM_031456.2,2842-2860).
gcagttgatcggttgagat

SEQ ID NO: 277585 - DNA, 19 bp, Homo sapiens
  siRNA target sequence for C17orf1A (NM_031456.2,2843-2861).
cagttgatcggttgagatt

SEQ ID NO: 277586 - DNA, 19 bp, Homo sapiens
  siRNA target sequence for C17orf1A (NM_031456.2,2845-2863).
gttgatcggttgagattga

SEQ ID NO: 277587 - DNA, 19 bp, Homo sapiens
  siRNA target sequence for C17orf1A (NM_031456.2,2862-2880).
gagcaatcctcctatagat

SEQ ID NO: 277588 - DNA, 19 bp, Homo sapiens
  siRNA target sequence for C17orf1A (NM_031456.2,2864-2882).
gcaatcctcctatagatgt

SEQ ID NO: 277589 - DNA, 19 bp, Homo sapiens
  siRNA target sequence for C17orf1A (NM_031456.2,2872-2890).
cctatagatgtgaaacgaa

SEQ ID NO: 277590 - DNA, 19 bp, Homo sapiens
  siRNA target sequence for C17orf1A (NM_031456.2,2891-2909).
ccagtattccccttgaaat

SEQ ID NO: 277591 - DNA, 19 bp, Homo sapiens
  siRNA target sequence for C17orf1A (NM_031456.2,2917-2935).
ctgcagcccaacttgaaga

SEQ ID NO: 277592 - DNA, 19 bp, Homo sapiens
  siRNA target sequence for C17orf1A (NM_031456.2,2923-2941).
cccaacttgaagatctctt

SEQ ID NO: 277593 - DNA, 19 bp, Homo sapiens
  siRNA target sequence for C17orf1A (NM_031456.2,3022-3040).
gaccaagtgaccagttcaa

SEQ ID NO: 277594 - DNA, 19 bp, Homo sapiens
  siRNA target sequence for C17orf1A (NM_031456.2,3024-3042).
ccaagtgaccagttcaatt

SEQ ID NO: 277595 - DNA, 19 bp, Homo sapiens
  siRNA target sequence for C17orf1A (NM_031456.2,3127-3145).
gccaccctgtctcttaaga

SEQ ID NO: 277596 - DNA, 19 bp, Homo sapiens
  siRNA target sequence for C17orf1A (NM_031456.2,3128-3146).
ccaccctgtctcttaagaa

SEQ ID NO: 277597 - DNA, 19 bp, Homo sapiens
  siRNA target sequence for C17orf1A (NM_031456.2,3148-3166).
gaacggcctcgcatctata

SEQ ID NO: 277598 - DNA, 19 bp, Homo sapiens
  siRNA target sequence for C17orf1A (NM_031456.2,3242-3260).
ccaagatgaaggaatatca

SEQ ID NO: 277599 - DNA, 19 bp, Homo sapiens
  siRNA target sequence for C17orf1A (NM_031456.2,3311-3329).
catggatcaggaagatcaa

SEQ ID NO: 277600 - DNA, 19 bp, Homo sapiens
  siRNA target sequence for C17orf1A (NM_031456.2,3331-3349).
ggcctgcctattgataatt

SEQ ID NO: 277601 - DNA, 19 bp, Homo sapiens
  siRNA target sequence for C17orf1A (NM_031456.2,3332-3350).
gcctgcctattgataattt

SEQ ID NO: 277602 - DNA, 19 bp, Homo sapiens
  siRNA target sequence for C18orf1 (NM_004338.1,255-273).
ctggagttcgcccaaatca

SEQ ID NO: 277603 - DNA, 19 bp, Homo sapiens
  siRNA target sequence for C18orf1 (NM_004338.1,258-276).
gagttcgcccaaatcatca

SEQ ID NO: 277604 - DNA, 19 bp, Homo sapiens
  siRNA target sequence for C18orf1 (NM_004338.1,343-361).
ccacgcggtccttcatcaa

SEQ ID NO: 277605 - DNA, 19 bp, Homo sapiens
  siRNA target sequence for C18orf1 (NM_004338.1,554-572).
gcagcacgagattgatctt

SEQ ID NO: 277606 - DNA, 19 bp, Homo sapiens
  siRNA target sequence for C18orf1 (NM_004338.1,694-712).
ccaaccgaaccatatttga

SEQ ID NO: 277607 - DNA, 19 bp, Homo sapiens
  siRNA target sequence for C18orf1 (NM_004338.1,711-729).
gacagtgatttaatagaca

SEQ ID NO: 277608 - DNA, 19 bp, Homo sapiens
  siRNA target sequence for C18orf1 (NM_004338.1,911-929).
gcagtttcagcagaacaat

SEQ ID NO: 277609 - DNA, 19 bp, Homo sapiens
  siRNA target sequence for C18orf1 (NM_004338.1,926-944).
caatgcagagagcacaata

SEQ ID NO: 277610 - DNA, 19 bp, Homo sapiens
  siRNA target sequence for C18orf2 (NM_031416.1,112-130).
gacccaactgtcaacagaa

SEQ ID NO: 277611 - DNA, 19 bp, Homo sapiens
  siRNA target sequence for C18orf2 (NM_031416.1,148-166).
gagcatgcaacaacaagaa

SEQ ID NO: 277612 - DNA, 19 bp, Homo sapiens
  siRNA target sequence for C18orf2 (NM_031416.1,158-176).
caacaagaaacaaatttat

SEQ ID NO: 277613 - DNA, 19 bp, Homo sapiens
  siRNA target sequence for C18orf2 (NM_031416.1,164-182).
gaaacaaatttattagcta

SEQ ID NO: 277614 - DNA, 19 bp, Homo sapiens
  siRNA target sequence for C18orf2 (NM_031416.1,180-198).
ctaacctaaccactaatga

SEQ ID NO: 277615 - DNA, 19 bp, Homo sapiens
  siRNA target sequence for C18orf2 (NM_031416.1,197-215).
gacgcaagagacaattcta

SEQ ID NO: 277616 - DNA, 19 bp, Homo sapiens
  siRNA target sequence for C18orf2 (NM_031416.1,220-238).
ctttcaaaacagcaaagta

SEQ ID NO: 277617 - DNA, 19 bp, Homo sapiens
  siRNA target sequence for C18orf2 (NM_031416.1,265-283).
gggatgcaattgtccaatt

SEQ ID NO: 277618 - DNA, 19 bp, Homo sapiens
  siRNA target sequence for C18orf2 (NM_031416.1,306-324).
gctattggctatttgaaat

SEQ ID NO: 277619 - DNA, 19 bp, Homo sapiens
  siRNA target sequence for C18orf2 (NM_031416.1,320-338).
gaaattcctcctctaattt

SEQ ID NO: 277620 - DNA, 19 bp, Homo sapiens
  siRNA target sequence for C18orf2 (NM_031416.1,326-344).
cctcctctaatttcagaat

SEQ ID NO: 277621 - DNA, 19 bp, Homo sapiens
  siRNA target sequence for C1orf2 (NM_006589.2,844-862).
ggggtggttggcattgtgt

SEQ ID NO: 277622 - DNA, 19 bp, Homo sapiens
  siRNA target sequence for C1orf2 (NM_006589.2,872-890).
ggccattcactctagtgat

SEQ ID NO: 277623 - DNA, 19 bp, Homo sapiens
  siRNA target sequence for C1orf2 (NM_006589.2,1056-1074).
gtcggggcaggaactgaaa

SEQ ID NO: 277624 - DNA, 19 bp, Homo sapiens
  siRNA target sequence for C1orf2 (NM_006589.2,1058-1076).
cggggcaggaactgaaagt

SEQ ID NO: 277625 - DNA, 19 bp, Homo sapiens
  siRNA target sequence for C1orf2 (NM_006589.2,1167-1185).
ctgtacactctctgctatt

SEQ ID NO: 277626 - DNA, 19 bp, Homo sapiens
  siRNA target sequence for C1orf2 (NM_006589.2,1169-1187).
gtacactctctgctattgt

SEQ ID NO: 277627 - DNA, 19 bp, Homo sapiens
  siRNA target sequence for C1orf2 (NM_006589.2,1341-1359).
gcccccaccgccctactat

SEQ ID NO: 277628 - DNA, 19 bp, Homo sapiens
  siRNA target sequence for C1orf2 (NM_006589.2,1496-1514).
gccaggccactctctttga

SEQ ID NO: 277629 - DNA, 19 bp, Homo sapiens
  siRNA target sequence for C1orf2 (NM_006589.2,1679-1697).
ccgtggactacgttctctt

SEQ ID NO: 277630 - DNA, 19 bp, Homo sapiens
  siRNA target sequence for C1orf2 (NM_006589.2,1680-1698).
cgtggactacgttctcttt

SEQ ID NO: 277631 - DNA, 19 bp, Homo sapiens
  siRNA target sequence for C1orf2 (NM_006589.2,1798-1816).
gctgcccgctcctattcct
